United States Patent Application Publication US 2007/0067865 A1 - sequence listing, part 10

SEQ ID NO: 48854 - DNA, 223 bp, Glycine max
cccatttgatgtgggagatagatgtgaaattgatggggttcagatggtggtagaagaaatgaacatattgacaaccatatttctgagatatgataatcaaaaggtcatcatccctaacaatgtccttgctaccaaggccatatataactattaccggagtcctgacatgggagatgctatcgaattctgtgtacatatatctcccccagttgaagagatttca

SEQ ID NO: 48855 - DNA, 246 bp, Glycine max
gcgaatccctctctctctttctctttctctctcatccagatcttgcaaaaaaaaagaaacacaatggcagcgagcgctcccactccacgtgaagattccgtgtacatggcgaatctggcggaccaggccgagcgctacgaggatatggtggatttcatggagaaggtctccgcctccgccgagagcgaggagctgaccgtggaggagcgaaacctcctctcggtcgcctaaaagaaggtaatcggc

SEQ ID NO: 48856 - DNA, 249 bp, Glycine max
tattacaacattttaggcttgcacgaatttgacggcatctatgtattaagtgtatcagcttgagctgctcccctatttgtgaaatacgagtcatatagtatttgaccaacttactacacacatgagtgggtaagagttgatggaaattacgcaaccatcggcataactgatcatgcccaagatcattttggtgatgttgtatatgttgaattgccagaagtggtagcagctgtgacacaaggaggtagt

SEQ ID NO: 48857 - DNA, 245 bp, Glycine max
atgtcaatgcacaacttgtgaccacaaaatctggaggaggtttaaccattctagcacctgatgatggtgccttctcacaactcaaagcaggttacttcaactctctcggcgatcgccaacagaaagcattgatacagttccacgttcttccagtttatgtctcaagctctaactttgactctcttagcaatccagtgatgacactggccagtgatagccccaatgggtatcaaataaatgtgaca

SEQ ID NO: 48858 - DNA, 218 bp, Glycine max
ccaaccactcttaatttctctctgccttgctcatttacacacctctccaacctttcactttcagctttatttgaatccctctctctcctttccaaatggccagcgttgaggttgcacatcaaacaccaacaacagttccagaaaatgaaacaaccgaggtaatcaagacccaggaaacaaccccggaaccaataccagccactgaggctcctgcaaca

SEQ ID NO: 48859 - DNA, 214 bp, Glycine max
cgcgagaccgtgcagcggcggtacttcaccgtcaccggcgagagtcccgatgatacgacgctcgatctcttgatctccaccggtgagagtgagaccttccttcagaaagccattcaagagcaaggcaggggtagaattctggacaccatcaatgagattcacgagaggcatgatgccgtcaaagagatagacaagaatcacaaggagttgcacc

SEQ ID NO: 48860 - DNA, 212 bp, Glycine max
ggctcaagttgtctttgctggaaatttaattgagatacctcacagacttcttaatggacagaatttggcttcaaaggatctctcaagaatggctgagccaataaaggagctagatattctgttgagtcagatagctgctggtttgcctttggatatcatgccagggcccagtgaccctgctaatttctcattaccacagcagtcattgcata

SEQ ID NO: 48861 - DNA, 208 bp, Glycine max
gtgattctctctatcagaattggagatggcagcccagagattgctctttgcccaagttcaaaccaagacttttgcttgagaagcttagagggaggaggcttatgtttattggagactcactgaacaggaaccagtgggaatcaatgatttgtctggtccagtctgttgttcctcaaggcaaaaaaagtttgagcaagaatggttctct

SEQ ID NO: 48862 - DNA, 206 bp, Glycine max
aaacttaaatagggtatacccaacaagattaacataattactctatcatttattcgtaaaggctcagatcttattaatatccgcaaggttctggggccacatgcaaagaatattcagttgatatcaaaggttaagaatcaggagagaatcctaaattttaacgaaatcctacgggagactaatacattcataatggcacgtgatga

SEQ ID NO: 48863 - DNA, 231 bp, Glycine max
ctctgccaaatgtttatcataaatgctggccctggatttaggttgctatggaacactgtcaagtctttccttgatcccaagacaacttcaaagattcatgtatgtagaaatgctatattgtagcgcctaaggctcttttcatgatggcttatggctgctgacattgcttggtgcctctatggaaatattacttaggttctcggaaacaagtaccaaagcaaattgtttgaa

SEQ ID NO: 48864 - DNA, 234 bp, Glycine max
acaaggtgtgctggaagggaggatgcttcagctccgacattcttgccgctatcgagagggcaatattggacaacgtaaacgttctgtctctgtcgctcggtggtggcatgtcggattattacagaacagtgtcgctattggagctttttccgctatggagaatgggattttagtttcatgctccgctgggaacgcgggccccagtccctacagtctctccaatgtggctccatg

SEQ ID NO: 48865 - DNA, 235 bp, Glycine max
agagtagttactgcgaactcctctcaaagatccactccaacttttagggcttcttcaagcttgcatttgggacgtgtgataccttctgatgatggattgcatatggtggctgaaagttactcttctagacatccaatgccattgaccactgttgtctatcattgctctgccagccaacagtggtcaatggccttggatgtctagaagagcaatgatagacatggaaggtcaagaa

SEQ ID NO: 48866 - DNA, 230 bp, Glycine max
agttcgaattggtcaattgtttcgttctaagaatgatgggtcgatcacatcccgcagatttgtttgctctaaagaggggttccagcacccttcaagagttggttgtggggcttatttaaggattaagagacagccatcgggaaagtggatagtggaccgcctccgaaaagatcataaccatgatctggactctgaaaaggtgggcagggcaaaaagtcttcctgcttcta

SEQ ID NO: 48867 - DNA, 224 bp, Glycine max
cggcggccctctagtggcgtcgcgttgaagaatttggttccttgccttgtggaggctctggggagtgaggactgggccaccaggaagggcgcggcggaggcgttgaagaagctcgcgagcgtggagaaggacctcttgccggagttcaagggtggatgcttgaaggttttcgagaatcggcgatttgataaggtaaagttggttcgggaggttatgaatgagat

SEQ ID NO: 48868 - DNA, 229 bp, Glycine max
tgcataagagctctggacaatgaccaaggacacatccctttcagaggcagtaaactgactgaagttttgagggattcatttgttggcaactcccgcaccgttatgatttcatgcatatcaccaagcactggttcatgtgaacatactctgaatacattaagatatgctgacagggtaaaaagcctatcgaaagggaacaattcaaagaaggatgttttatcgtcaaatt

SEQ ID NO: 48869 - DNA, 237 bp, Glycine max
gtgcatgccaccaaagtgtccctctctgccctgtgagggtgaagttgtacacaaaggccacacggaaaaagtcatcatattgagtgaatggtggaaatcagatactgaagctgtaataaatgaagctttgaaatctgggtcggctccaaatgtctctgatgctcacacaatcaatggtcatcctggatctgttcaaaattgtgcatcacaagggggatacaaactccaagttcaacc

SEQ ID NO: 48870 - DNA, 242 bp, Glycine max
catacttctcctcagtactcttcaaagttgatcaaggtgggtgggttccacttgccattgctggagcatttcttattattatgtctgtttggcattacggcaccgtgaaacggtatgagtttgaaatgcatagtaaggtctcaatggcatggattcttggtcttggcccaagtttaggacttgttcgtgtccccggaattggactagtctacacagaacttgcaagtggagtgccccacatt

SEQ ID NO: 48871 - DNA, 236 bp, Glycine max
cggactatgttgcatcactacttatgcccctgtataaggcaaggaaactagacaaggatggatacaaggctataatgaagaaaagtgcaacaaaggtcatggagcaagccacagatgcagaaaaagccatggctgttcgtgagtttctagattttaagcgaaagaataagattcgctcctttgtggatgtattgattgagagacacatgacaacgaaaccagacatgaaatcttaa

SEQ ID NO: 48872 - DNA, 134 bp, Glycine max
  unsure (1)..(134): unsure at all n locations
ctaatgtggagtgatcctgaagatattgaaacatgggcagtcagtccccgtggcagcaggttcggcttttgtggatcgagggggttacttctagagttcaagtcacagtaaatagatctagggnatcttgtttg

SEQ ID NO: 48873 - DNA, 248 bp, Glycine max
actaattcaataacatagaagaatatggaagatggaagcgtcaaccttcctcctgggtttttcttctctcctactgatgaagaacttgttcttcactttctctattgcaaggcttctctcattccatgccatcctaacatcatccccgatctccatccgtctcagcttgctccttgggaattaaatggtaaggcgttgttaagtggaaatcagtactatttctttaccaaagtgaatgaaaacagagc

SEQ ID NO: 48874 - DNA, 248 bp, Glycine max
ctagttctagatcgctcgcgatctagaactagtcatagagcccaacctctcaagcccaagcccaagcccaagcccaagcccgttcataaaatactcctgcagcagcacccagtacccagccctctgcgtctcatccctctccgtctacgcctccagcatccaacaggaccctcaccaactggttcagacagcactctccctctccctgaaccgcacccaagccaccaaaaccttcgtggctaactgca

SEQ ID NO: 48875 - DNA, 245 bp, Glycine max
gtggatccggctgatgtggatgctatatcaaagactgtcaaaagggcccttgcagtctatggaactccagcttttacagaaattatcaagaactgcatggctcaagatctttcatggaaggtgagtaaaggaagaacctgagtaatacaccataagctgtgatgagatttaaatatattttttgaatttaatttctatgcactgattatcagtgtcaatcaataagaaatcatgataaatatgac

SEQ ID NO: 48876 - DNA, 240 bp, Glycine max
ttcctgttgtgtgaagcaaaaattaaggaaaggcttatggtcccctgaagaagatgagaagctatttaattacataacaagatttggagtcggatgctggagctcggttcccaaactagctggattgcaaagatgtggaaagagttgcaaggtgggaatggataaactatttgaggcctgatttaaagagaggcatgttctcacagcaggaggaggatcttataatcagtcttcatgaag

SEQ ID NO: 48877 - DNA, 234 bp, Glycine max
gcactatagtaaaaaaaggacattcattcatctatggctacccttattgctcccagcaaccactctccccaagaagatgctgaagctctcagaaaggcttttgaaggatggggaactgatgagaacactgtcatagtaattttgggtcatagaactgtgtatcagaggcagcaaatcagaagagtttatgaggaaatttaccaggaggatcttgtgaagcgcctagagtctgag

SEQ ID NO: 48878 - DNA, 235 bp, Glycine max
ctcgagccgaatcggctcgaggcgctgatgctgtgggctcagttagtgcaatcttagataacgtacacaaaaattgagccagatgatgacatagatgggtacaagcctgaaaagctaacagggaaaatagagcttcatgatgtccattttgcatacccagctaggcccaatgtgatgatcttccaaggcttctcaatcaaaattgatgcaggcagatcaacagcattggtcgggc

SEQ ID NO: 48879 - DNA, 231 bp, Glycine max
gactagttcaagatcgcgagcggccgcccttttttttttttttttagataaaaccccaagttctcatgatcaatccagaatttgcacaaactgaggctgaaattctccatgatcctgtcaaaaaaaaaaagggtagctatgaagagaccattagggtcttgaccacaaggtgcaggacccaacttgttgcaactttcaaccgctacagagagatccatggcacttccatct

SEQ ID NO: 48880 - DNA, 260 bp, Glycine max
cgacattgagttgggaaactcttgttacccaatggttcttgttcaagtccccatgtacaacgaaagagaggtttatcagttgtctattggagcagcatgtgggctttcttggccttcagataggatcatcatacaagtccttgatgactccactgacccaacaatcaaggagttggtgcagcttgaatgccaaagatgggcaagcaaaggggtgaacataaagtatgaggttagggacaataggaatgggtacaaagcag

SEQ ID NO: 48881 - DNA, 264 bp, Glycine max
ctcgagccgaatcggctcgacttaatcgcttatcacttcacttcactattgcatcatggcacacgagacccagaacaagtatgagagctctgaggttgaggtccaggatcgtggtgtttttgactttctcggtaagaaaaaggatgaagaatacaagcctcatcctcaggaggaggtcatggccacggagtttcaagaagtcactgtctcataccaaggagatttcacgcgcagcctcttagaaaagcttcactgatgtcactg

SEQ ID NO: 48882 - DNA, 250 bp, Glycine max
gcggctagggttttagcgcacttcttctagatttaaggaagatgggtaaggagaaggttcacatcagtattgtggttattggccatgttgacttttgcaccaactggactgacaaccgaagttaagtctgtggaaatgcaccatggagctctcacagcagcacttccaggtcccgatctcgtagatggttccagagaggcctcaccagaaagcccttggccttgttcaagaagctccgtaaaccgaaaag

SEQ ID NO: 48883 - DNA, 255 bp, Glycine max
gaagacgatagctatcactgaatatgggattcgctcagtggctgccaagtatatcatgaagtgtgatgatgacacgtttgtcagaatagagtctatcatcagcgaacaagaaaagtaggaagtggtagaagtcctatataggaaatatgaattaccaccataggcccctacgttctggcaaatgggcagtaacatatgaggaatggtcagaggaagagtatcctacctatgctaatggtccaggctatacaatct

SEQ ID NO: 48884 - DNA, 255 bp, Glycine max
gcgacttgaggctagggttacggattcttgcgttttaatatctgcacttcagaagcatggggcactccaatgtgtggaattctcaccctaagaactacggacctggttctcgcacttggcagtgcttccgaagcatgccaaggaaattggcttcatcaagtatcggtgaaagattagttttccacctgccccacccggtttggattcttgcatcaggctatgatgacgtggggatgattttactgtttgaagaac

SEQ ID NO: 48885 - DNA, 244 bp, Glycine max
gcgattctcacccctccccaatgtcttcgcaggagaatggtcgtccattgcctaaattcggtgagtgggatgtgaataatcctgcctcagcggaaggttttactgtcatattccacacggctacgatacaaagatgactaacacagcaactgcaaccccaaccccacgtagatctgatcctgtgttcaagaatgagaattattacaatcctcaatattcggagtagtagcaagtggttttgctg

SEQ ID NO: 48886 - DNA, 241 bp, Glycine max
attccttaaaggtttgatgggtcgccaaaatcgcacacccaccattgttgtgatttggtcagtgctattggcctctattttctccttactttgggtaagaattgatccatttgtcctcaagacaagggacctgataccaagctatgtggaatcaactgctaaaaaagactgctttccctatagtattattctttaaaagatgtatgtagggtacatacattcttggtttcacaaaccaaca

SEQ ID NO: 48887 - DNA, 237 bp, Glycine max
gttgcacgctctttcaagccatcaattgactggattgcagcttctgaccttgaagatgacagtgaaaaatcaacaccagaagcacatgctgcggcctggaagactttgaagagcgcagattgtgtcttggttcctgggggatttggagatcgtggtgtgagaggtatgatgctagctgccaaatatgcaagagaaaacagtgttccttacctggggagtttcctgggaagtcaaatt

SEQ ID NO: 48888 - DNA, 245 bp, Glycine max
gaagatggattcattggtatgttcaacagcggtttgtggcgaggaactggcagcagccctctgtgcgtttgaacaatgcactcatacacatgtatgctagttgtggaatccttcacgaagcttatcaagtgtttgtcaagatgcctcggaaaagcaccgtatcttggactagcatgatcatggcttttgcgaaacagggactcgggaaggaggcccttgatctgtttaagactatgctcagtgat

SEQ ID NO: 48889 - DNA, 165 bp, Glycine max
gttggcacagggtgtgtattcaggaggcaagctctatatggctacaatcctcccaagggtcccaagcgtccagaaatggtaagctgtgactgctgcccatgtttcggaaagcgcaagaaggttaagtatgaacggaatgatgcaaatggagaggcagcaaacctt

SEQ ID NO: 48890 - DNA, 254 bp, Glycine max
ttggattcaatatgcagctgagttttgtggatcttgctggttcagaaagagtgaaaaagtcaggttctaccgggagtcagcttaaggtagctcaaagcattaacaagtcattatcagcacttggagatgttattagttctttgtcttctggtggtcaacacacaccatacaggaatcacaagttaaccatgttgatgagtgattcacttggtggtaatgccaaaactctcatgtttgtgaatgtttctccggca

SEQ ID NO: 48891 - DNA, 257 bp, Glycine max
gcctttcttctccgtttccgtttcctcgttcgaattcgctttttgatctgcgaaaatgagagagtgcatctcgatccacattggtcaggctggtatccaggtcggaaatgcttgctgggagctctactgcctcgagcacggcatcgggcccgatgggcaaatgccaagtgacaagacagttggcggtggtgatgatgctttcaatactttcttcagcgagactggtgctggaaagcacgtgccacgtgcagtgtttg

SEQ ID NO: 48892 - DNA, 129 bp, Glycine max
ggagacgctactggagtcgtctctgctgcctgcggacctgcgtctagactgacccaccgcgctcaagctcggctgtcttatgcaggggagatgctgtcctgccgtctccagtgcgcgctggcctcgctc

SEQ ID NO: 48893 - DNA, 246 bp, Glycine max
caggcttgaaaaccttgctttcaaagagcaagctagttccttctggagacttgcaaaaatgaactctcctgaatggctttatgctttaattggctctatagggtctgtagtttgtggatcccttagtgccttctttgcttatgttctaagtgctgtcctcagtgtgtattacaatccagaccacagatacatgttccgcgaaatagaaaagtactgctacttgttgattggcctttcatcaactgc

SEQ ID NO: 48894 - DNA, 242 bp, Glycine max
ctttcaacctaacccatcatcgttcacacccgtggttctggctcagccctattttcggttcctctcgttatcggaacagaaaccatttgtggtgaacatggatttggaccagtggatctcgaaggtcaaagatggccagcatcttctcgaagacgagcttcaacttctctgcgaatatgtaaaagagatccttattgaggagtccaatgtgcagcctgtcaatagtccagtgactgtttgtg

SEQ ID NO: 48895 - DNA, 247 bp, Glycine max
gaagcttcgaggagtggtgcgggactgcgtgagccagcacctctactcctccgccatcttcttcgccgacaaagtggcagccttcaccgccgaccccgcagacatctacatgcaggcccaggccctcttcctcggccgccactaccgccgcgccttccacctcctcaacgcattcaaaatcgtcctcaccgacctccgattccgctacctcgccgccaagtgcctcgaggaactgaaggagtgggat

SEQ ID NO: 48896 - DNA, 238 bp, Glycine max
gttgagagtaagagaagaggccaatgccaatgtaatcaaggcaagtttggttggagagtgagaggtgggaatagtccttggctctaacatggtcaacttgttcagtctcagaatactgagtgtacgctttggtgaactcattgaatgattcatgaagcgatggaagagactcatggtttgtgaattgagtgtttgggaatatagaggatgttgttgtgaccgcgaactcgtggcgcca

SEQ ID NO: 48897 - DNA, 230 bp, Glycine max
gaaggatttaagttggatgtccaaccaggaaacacctacttgctaagaatcatcaatgctgcactcaatgaagagctattcttcaaaattgctggccatgaactcactgttgttgaggttgatgcagtctacacaaaaccattcaaaactgataccattgtcatagcacctggccagaccacaaatgtgcttctaacaaccaaacatgcagcaggcaaatacttggttgc

SEQ ID NO: 48898 - DNA, 221 bp, Glycine max
ctcacaccaaaacctttgttacaatgcactcaccacctgtgtcatgtccgggtgcactggcatttgaaagacaactataaggactattggcgcgtcaagattgccatcatcaatttcaactatcggttgaatttcaccgattggtctcttgttgtgcagcaccctaatctcaataatgtcacccaagtctatagctttgtatacatgccgcttcttcccta

SEQ ID NO: 48899 - DNA, 230 bp, Glycine max
attatatttacaatggaagatctcttgcagagtgcgaagacaaacatgaatgtggaggaggttatcttttcaatagcaagagatatcaagcaaaggcttgcacacacagattctaaggctgaagtatgttgttgactcttatgcacttcattagtactcttatttcttatatgaaagactaaaattttgccatcatcaaattcaagtagatgtaaaacttgttaaggtca

SEQ ID NO: 48900 - DNA, 238 bp, Glycine max
tgggaacattggtgacggtggctggggccatgttgatgaccttgtacaaaggtcctatggtttggaccaaagatgcacctcataatgggcaaatcaataatgcaacaaataccacaacatattcagacaaggattggttcataggctctatcctcctaatcattgccactcttgcctgggcatccctctttgttttacaagccaaagccattgaaacctacaaaaatcaccagctaag

SEQ ID NO: 48901 - DNA, 251 bp, Glycine max
aaaataaccttatttcttggtctgcaaaacatcatggcagaagcgagtttctttgttggagtcataggtaacatcatctcaattctcatgtttctttctcctgtacctacgttttggaaaataaagaagcacggatccaccgaagatttctcaagccttccttatatttgcacattgcttaattgctccctctggacttactatggaatcataaaagctggagagtaccttgtggccactgttaatggctt

SEQ ID NO: 48902 - DNA, 263 bp, Glycine max
ataaaatatgggcatcaaagcgattgctttgtagcaagcgtgttgttgactctctatgccagtgtcggtgaacttgtggatgtggaaaagttgttcagaagaattgatgataaagatattgtagcatggaactcaatgatcttggctcatgctcggttggcacagggatctggtccctctatgaaactattacaagaacttcgtggaacaacctctttgcaaattcaaggtgcctccttggttgctgttttaaagtcttgtga

SEQ ID NO: 48903 - DNA, 273 bp, Glycine max
tgctggcatacatattacgtttgtgcttggaatggataccatgcgctatgcatttctaacatctcttgtcaggattactttcttgcatgcccccaaggaaatgcgcagtaaaaatgtggaagctttgcgtacactgttggttctatgtgactcagacatgaacgctcttcaagatacatggaatgcagttctggaatgtgtttctcgcctcgaatttataacatcaactccttcaattactgtcactggtatgcatgggtcaaaccagatctc

SEQ ID NO: 48904 - DNA, 260 bp, Glycine max
cccttttattttttttttttggtgaggcattttccgacacaggaggtgctgcctcaggaggagtaggatgtataacgtgtagttgggcacccagcagttggttcaatgcggtttcttcacaggaatcgtgcttctcgttatatgggtgaagtgaatgtgttccccaaggatgaaccgtcctcggcacccgtgctcactgcattcttgggttaccaggccggtatgactgccatgccccgagaggtcgagaagttatgatc

SEQ ID NO: 48905 - DNA, 257 bp, Glycine max
atatactcccgcatgttaaatggcgaggatcaaacctcaagctctgctacagcaaagctaaaggaagaagggtccttctcggataagtgccgtgactgctatattttacttgctgattcttgccttggttgggtttttcctgtttgcttcgtacatacatttgtccagcagatcactattacaatccgtagatcacttgtcagtctccgagggtgataatacttttgtggactccaagagatctgagctgccttgat

SEQ ID NO: 48906 - DNA, 247 bp, Glycine max
ctttgtcaccgccacaaacttctgccctccaaactacgctctccccagcgacaatggcggttggtgcaatcctcccagacctcacttcgacctcgccatgcccatgttcctcaaaatcgctcagtaccgcgccggcatcgtccccgtctcatatcgccgggtgccctgcaggaaagagggagggatgaggttcacgatcaacgggttccgttacttcaacttggttttgatcaccaacgtcgcgggt

SEQ ID NO: 48907 - DNA, 236 bp, Glycine max
catcgttctcgatgacgtcgcgattactcacctctcctacggcggggaattctcccgcgcagtggagcagaagcaggtggcgcagaggaggcggagagatcgaagtttgtggtgatgaaggccgagcaggagcggagggccgccattattagggctgagggtgagagcgatgcggccaagctgatctcggacgccactgcctcggccgggatggggttgatcgagctaaggaggat

SEQ ID NO: 48908 - DNA, 241 bp, Glycine max
ggaaaagtgaaaaccagaagtacgaacgaaagagaagagcgatttagaagtgagagaagatggggttgtcgttcacgaagctgttcagcaggttgtttgcgaagaaggaaatgaggattctgatggtaggtctcgatgctgctggtaagacaaccatcttgtacaagctcaagcttggagaaatcgtcaccactatccccaccatcggatttaatgttgagactgtggagtacaagaacat

SEQ ID NO: 48909 - DNA, 209 bp, Glycine max
aagcattcaaaattcaaaagtttattttaaagtcttttcttagacaattctcttctccagtctctaacgcaatcaatataacaatgggttttcatttacctagtatcagaagggcattatttgctgcaaatcaagtatcttcaaaaacagtggacgtgccaaagggatatcttgcagcctatgttggagataaaatgaagcgctttgtg

SEQ ID NO: 48910 - DNA, 232 bp, Glycine max
atcaaaatgtgagagaccccttttcacttgactgggccaaggccaagaggacattaaaaaatctgaggattaaagcgagcccatctaatcaagaattcaaaataactgggattagtgaactcccttgcaaagatcaaacgtttaccttgaagagaaaaggtggtgatgatgttgctgaggaagaagtgacagtatatgattatttggtaaatatcggcaggatagatcgtcg

SEQ ID NO: 48911 - DNA, 255 bp, Glycine max
agattttcagactatgctcttgtgataagagcattgggatcactagaaggcacagctaaagctctggatcctgattttaaagtcattcagagtgcatatccttttgtcattgggagacttattgcagacccaagccctgatatgagaagaattctgagggaacttctcattcgtaacaatggatccataaggtggaatcgtctagaacgcttggtagcagcaatctctgaacaagcttctgagataactggagac

SEQ ID NO: 48912 - DNA, 251 bp, Glycine max
gtttttgttgtcaatgttctaggttacatagcatacaactttgtaataggtgcttactcatattggggccctaaagctggttatagtatatataacatgactaatgcagatatgatgtttggaggaattactgttgtatgtggaatattgggcaccgtagcaggaggctttgttcttgattcatgactaacacaatatcaaatgcatttaagcttctctcaatagcaacatttattggtggtgcatgctgt

SEQ ID NO: 48913 - DNA, 243 bp, Glycine max
tatggaaataccctaagttgtgggtgggattcttgaagtgtgtgcagttgacaaaaccacagtcatttggcattttgcttcagctgcctccagcacaattggaaaatgcattaaatagaattgcagccttgaaggcaccattgattgcgcatgcaagccagccagatatacaatctaaacttccgagggctgtgctggttgttctgggacttgcttccgattctcaggtttcaagtcaagcac

SEQ ID NO: 48914 - DNA, 236 bp, Glycine max
gattgatacaaggcttttttgttggttggagatgcatgattgtggtgtgctttgttttcatttcatcatatgacagccttgtgggtttctttggtgtttcttgatgcatacttaatttactttattattgtgtatttatctcttccatttacaaaaaaaaaaagtttgtgtaggtttccttctttgaagtaaaaagaaattaaatatgtactgaaaatggaataatagtgtgtttt

SEQ ID NO: 48915 - DNA, 233 bp, Glycine max
aacaaaaacaaagaaaaaaaaaaacccttagccaacacaaccatcatggccacctctgctattcagcaatcagcattcactggtcaaactgctctgaagcagctcaatgagttcgtccgcaagaccggtggcgccggcaaaggtcgcactaacatgcgccgcaccgtcaagagtgctcctcagagcatttggtatggccctgaccgtcccaagtacttgggtccattctcggg

SEQ ID NO: 48916 - DNA, 229 bp, Glycine max
ctatgttgagagactcagggatgagcccttgtttctggttcttgcccagaatgttcaggaatatcttgaaagagttggaaatttcaaagctgcatctaaggtggccttgaggagggttgagctcatttactacaaaccacaagaggtttatgttgcaatgaaaaaattgactgagctgacagaggatggagataatggagtggaggcaagtgaggagaaaggatttgag

SEQ ID NO: 48917 - DNA, 227 bp, Glycine max
ggggctacccgctgagtttaagcatatcaataagcggaggagaaagaaaatgtgagaatcactggagaccaagtcaaagataagactcaatccaaaagattaagtgaacaagatcaagtcaatgtaaaatatctctcttgataagcaataagttaatcaattaattaaaggtatataccttttgaaatatcaatacaataaaatctctgttgctcttttctagcatt

SEQ ID NO: 48918 - DNA, 243 bp, Glycine max
atgcttacggtgatggaagcttaatcgcgcgtctctatcgtgacacgctttctctctcttctttgtttctcagaaatttcacgttcggttgcgctcacactaccctcgccgaacctactggagtcgccggattcggtcgtggtttgctctctctcccggcgcagtggccacgttatctcctcaactcggaaaccggttttcgtattgtttggtttctcactcgttcgattcggagcgagtgag

SEQ ID NO: 48919 - DNA, 252 bp, Glycine max
ttcacatccaaatctagtaaagttaattggatattgctgtgaagacgaacatagggtgctaatatacgagtacatgtcccggggaagtgtggaacacaacttgttctcaaaaattttgcttcccttgccatggtccataagaatgaagattgcgtttggcgctgcaaagggacttgcatttcttcatgaagcagagaaacctgtcatctatcgagatttcaagacatcaaatattttattggaccaggagta

SEQ ID NO: 48920 - DNA, 254 bp, Glycine max
ctcgagccgattcggctcgagcctccactctgcaacctctcgccgatcgcaaccagaagtgcctcccatcacattcgtgcatcacccttggaggagtgggaagggagaatgaatgttggcatgtctaattctgtgacgacagcaattcgcagcagtgttcgagacttggccattgggaagactaaaactactgagaaagcagaccgggctactgttgagcaggcaattgatcctagaacgcgcatggtcttatt

SEQ ID NO: 48921 - DNA, 177 bp, Glycine max
tgaagagatgagagtcaaaaggagggatgcagaactgtggatgtcccaccgtatgctaccagatttgctgaaggaaagaattagaaggtatgagcaatacaaatggcaagaaaataggggtgctgaagaggagacattgattcgcaacctccctaaaagatactacagaaggggata

SEQ ID NO: 48922 - DNA, 245 bp, Glycine max
tcttgtttctggaagttagttgcatctggaaaaagcaaaagggaagcccaaaatagtttaaagggtgctcagttgcaaaagaaaattgaggaattggctattgactacaataatttaccagtcatgtaccgacaaggatcctcggtttatagggacaaggtagatattgctctaattcatcaggagaatggagagtttcctgaaaattatggaaaggttattgtaggacatattgacattattgg

SEQ ID NO: 48923 - DNA, 258 bp, Glycine max
gaatcgagctcaagctcctatagagcttatcagatgcttgaggtcacgtaaagttcatgcctttgaggcatcagagtctccagttgtggtagccctagaagaccttcttgcacctgatcttcatgctaccagtggctgaaatggttgatcacacatttgattcctgtacccaaatgctcctagagtctgaaagtcgtggatgaataccgatcatgctgaatcggcttccgccgaagattcctaattcagcctacccag

SEQ ID NO: 48924 - DNA, 231 bp, Glycine max
ggaacgcttgctcattccctttgctacccaagtataattccctagcagaagctcgagggttgatatatttaatagccaaagatcagcatggctgtagattcctgcaaagaatatttgacgagggtacaccggaggatgttcaagtgatatttaatgagataattgatcatgttgcggaacttatgatgaatccttttggcaattacctaatgcagaagttgttggatgtct

SEQ ID NO: 48925 - DNA, 221 bp, Glycine max
gactcaaagaagatcactcacaagtccgatgtctacagcttcggggtgctgctgctagaaatgctgacagggaagacccctctgaggtatcctggctatgaggatgtggttgatcttccaaggtgggtgaggtctgttgtcagagaggaatggactgcagaagtgtttgatgaggagcttctgagagggcaatatgttgaagaggagatggttcagatgct

SEQ ID NO: 48926 - DNA, 232 bp, Glycine max
ccctctctctatctctcacacacactttctctctctctctctctcacccagatcttgtagcaatggcgagcgctcccactccacgcgaagagttcgtgtacatggcgaactggcggagaggccgagcgctacgaggagatggtggagttcatggagaaggtctccgcctccgccgagagcgaggagctgaccgtggaggagcgtaacctcctctccgtcgcctacaagaacg

SEQ ID NO: 48927 - DNA, 233 bp, Glycine max
agaatcatgggaaaagttacttccttcttcagtccttgctaccatattagacaatatagtcatgccaaaactatcaagtgctgaagatacttgggaacctcaccgtgataccattcctattcacacttcagtgcatccatggctacctttgctggggcacaagttggacggcatataccacgtgatacgtttaaaattgagtactgtacttggtgcctgacacccacgtgatg

SEQ ID NO: 48928 - DNA, 228 bp, Glycine max
ccgaagcgcttattagctgtgtgacaggaaagggttccgagattggtgattttcttacaatgcatccgggggtgaactgcataagtttcactggtggggacactggaatagcaatatcaaagaaggccggcatggttcctcttcaaatggaattgggtggaaaagatgcctgcattgttcttgaagatgctgacttggatttggcagctgctaacattgtaaaaggag

SEQ ID NO: 48929 - DNA, 224 bp, Glycine max
gggaaatatgtttcggtgcatcttcgtttcgaggaggatatggttgcattttcatgctgtgagtatgatggtgggaaggaggagaaacttgaaatggatattgctcgtgaaaggagttggcgaggtaaattcagaagaaagcataggataataaagcctggtgcaaatcgcgtggatggaagatgcccattgactccattagaggtgggaatgatgcttagagg

SEQ ID NO: 48930 - DNA, 222 bp, Glycine max
cagccatgctcatgtgggatctgcatctgtgttggttggtgatattgatgatgcattggactctgaaaaaaggtacttgaaaaggggtgtgaatgatcgggggagggttgctaatgatgttgagacagagcagattgtccttgatgaagaatcaggctcttgcaagggaaagatgagttcagttgtgcaaatgcgtggatcaataccacttttctggtcaca

SEQ ID NO: 48931 - DNA, 232 bp, Glycine max
gggctgcaatgtccaatttgtcaacgtctcacatgcttattgctgctgccactgaggatgtccaagttcgcctttgtgatattgcttccggggcttttgctcacactttgtccggtcaccgtgatggagttatgactgttgaatggtctaattcaagtgaatgggtcttggttactgggggatgtgatggtgcaatacgattttgggacatcagacgcgctggctgtttcca

SEQ ID NO: 48932 - DNA, 234 bp, Glycine max
agatgaagtgctacatcttatagatgaacgaactcaagctaggattaataaggatttcgccaaaagtgataagatgagggctgatttggctacaaagggcattgcacttatggatgtgggcaacgaaataacatggagaccatgcatcccgagtgagccacttgttgcagaagttgttcagagacctatagttgaggaaaagcagtctactccagtgaatcaaaaagtggaaga

SEQ ID NO: 48933 - DNA, 226 bp, Glycine max
tgtcaagattgatgccttcaagcgcgacttcctctctgcatgcaactcctcaccaacgctgtggaggcttcaaggcagcaactacaagccttcagatcaaaccaaggaacgaggccagttctggaagaattcatgccaatattaaagcatccaaactctcaagaaagcgctgaaaaaacatcaaacatatctgacaaggcgaattggatgacatcagctcaactat

SEQ ID NO: 48934 - DNA, 217 bp, Glycine max
gttggcttcaccaaactgtatcttcgaacagggcagattggggcactggaggacaggagacaacatcttttgcagggaatacttggaattcaaaaaagctttcgtggttatcaagctcgttgtcattatcatgaacttaagaatggagtgactattttacaatcatttgttcgcggagaaattgcaagaaggaaatatggtgttatggtgaagtctc

SEQ ID NO: 48935 - DNA, 264 bp, Glycine max
tctgttttgtctctgcgtttgcggctgaggattccgaacgagcgaccttcttcgtttctcgcaaagtttaagtcattatgggtaaggaaaagactcacatcaacattgtcgtcattggacatgtcgactctgggaagtcaactaccactggtcatttgatctacaagcttggaggtattgacaagcgtgtgattgagaggttcgagaaggaggctgctgagatgaacaagaggtcattcaagtatgcctgggtgcttgacaagc

SEQ ID NO: 48936 - DNA, 266 bp, Glycine max
cttttgtagattatatagtttgatttctttgaagacaattgcaatttgcattatggggacaaaaatcatcccttctaaatacatcatgaaaacagatgatgatgcctttgttaggattgatgaagtgctttccagccttaaaggaaagccatcggaaggcctcttgtacggtctcatatcttctaaatcatctcctcagagggacgaaggcagcaagtggtacatcagtgaggaggaatggccccatgatacatacccaccatggg

SEQ ID NO: 48937 - DNA, 258 bp, Glycine max
agtaaggtcacctgccatgctaacttaaggaaggtagctcttgtaaacatttagatctatcttccttaagtaaggtgcacctgccatgctaacttaaggaagatagacctaaatgttaccaagagctacccagaacttctcaaggccttgggaaatatgttcaagtgcacatttggtgaatattcagaaagggaagggtacaatggatctgaatatgctccaccttatgctgacaaggatggggattggatgctggtt

SEQ ID NO: 48938 - DNA, 255 bp, Glycine max
gggccagcaagccccactcaaccaccacacctctcctcgttcacgctacccctttctgctcttcttctacctttcaagttttaaaagtataaagatggcagagacattcctatttacctcagagtcggtgaacgagggacaccctgacaagctctgcgaccaaatctccgatgctgtcctcgacgcttgcctcgagcaggacccagacagcaaagttgcctgcgaaacatgcaccagcaccaacttggtcatggt

SEQ ID NO: 48939 - DNA, 259 bp, Glycine max
gaggcaatgttgatcgggctgctctatggcaccagttatgtgccagtgaagatgaaattgtgcgtgttcgtgaagaaagcaaaaatgagatttctaatatggctaaggaaaaagttatgatatcgcaaaagctgagtgaatctgaggccacaaacaatcgcttgaagtctgaaatgaggactgagatggatcggttttctcgggaaaagaaggaactagcagaacaaattcaagaagttgagagtcagcttgaatggat

SEQ ID NO: 48940 - DNA, 247 bp, Glycine max
aaaaaatctaaaactttttctttctagaaaaccagagcaaagcaaagcaaaaacagtcgctggctggaaacaactggccctcctaacgaaacgaagaatctcgcatcggaatctggaagcacgcgatgtcaacctcgaaccagcaccagttccgatacactcaaaccccttccaaggtgctccaccttcgcaaccttccctgggaatgctccgaagaggaactcagagagctctgcaaacccttcgg

SEQ ID NO: 48941 - DNA, 240 bp, Glycine max
tgattgagaggtccacaaaccttgactggtacaagggtccaactctgcttgatgcacttgaccagattaggagcccaagaggccctctgacaagcccctcaggcttccccttcaggatgtgtacaagattggaggtattggaactgtgccagtgggacgtgttgagaccggtgtcttgaagcctggaatggtggtgacttttgcaccaactggactgacaactgaagtcaagtctgtgga

SEQ ID NO: 48942 - DNA, 237 bp, Glycine max
tgcagtttttgacaaagctattgtattatactccaacagctattcttgcttctgtgatcctctctgccccccaggactcattgacgttagtgaagcttacaaaatttggaaggttgataagatagactttcttgcttgcgctggggcattctttggagtactgtttgcttctgtggagattggtctacttgttgcggtgttaatatcattttcaaagatcattctgatctcaattcg

SEQ ID NO: 48943 - DNA, 246 bp, Glycine max
gcaagaatggcacttcgttgcttggtgatgtccctttctgttctcttcactcttggtcttgcgagagaaagccatgccagagacgaagatttttggcatgctgtttggccaaacactcccattccaagttcattgcgagatcttctaaagcctggccctgcaagtgttgaaatcgatgatcacctatgcaaattgaagaaacacagtacccgaaaaccttcttctataaagaagaccttcatccag

SEQ ID NO: 48944 - DNA, 244 bp, Glycine max
cttgggcttggcagggatggcttactacccttagtatttgctaaagtccactccaaataccacacccctgttcattctcagatctgggttggcttggttgccagtgttttggctgggctatttaatgttcatgtgctctctcacattctttccgttggtacactgactggctattcggttgtctcagcatgtgttgtcgttcttcgctggaaggataagacaaatagtcaagtgtcatcttctg

SEQ ID NO: 48945 - DNA, 261 bp, Glycine max
tcctaacataacattttttcagaaaaaatcaagccatcagatgtaggtcttgaacaagaggcacaagtggttcagaattggtccggttcaatgcttgaacgtaatgggagccatcaatctttgccacctatcaaatatttgcatttgcatgaaagtgattccttctctataggaattttttgcatgcccccctcttctatcattcctctccataatcatcctggaatgacagtgttgagcaagctgttatatggctcaatg

SEQ ID NO: 48946 - DNA, 251 bp, Glycine max
ttatggacattgccctgtctacaccaagagtatttaaagaagccagaggattatttagctcatctccttgggcatgagggcagaggaagcttgctctcctttctcaagtccagaggatgggctacatctctatctgcaggagttggggaagaaggaatttatcggtcatctatagcttatgtctttgtcatgtccatacacctcacagactctggtatagataagatctttgatatcattggctttgtcta

SEQ ID NO: 48947 - DNA, 256 bp, Glycine max
caggctcctttcttcggtgagtcacccgaatttagtgcgcctcttaggttgctgcatagaagggggagagcagctacttgtttatgagtacatgccacatggaacactatctcaacatttgcacagagcgaggggtggagtacttccatggacaataagactcaccattgctactgaaaccgctaatgctatagcatatctccattccgcaaatgatcatccaatttatcatagagacatacaatccagcgacata

SEQ ID NO: 48948 - DNA, 254 bp, Glycine max
gctcagcttcgccctccatagacgctactcactctgctccggaaccatgtgcacggccacgtagcaaaagatctccgcagtacaagcgaggacttcagcctcttcgacaaggacggcgatggttgtattactactaaggaacttgggactgtgatgcggtcactagggcaaaacccaactgaggcagaactgcaggatatgattaatgaggttgatgctgatggcaatggaaccatcgacttcccagagttcct

SEQ ID NO: 48949 - DNA, 238 bp, Glycine max
tgggtcgccaaaaccgcacacccaccatagttgttatatggtcagttttattggcttccattttctccttgctttgggtaagaattgacccgtttgtattaaaaactaagggacctgataccaagctatgtggaatcaactgttgaaagactggttttccaatagtatccatttgtgagcatcttttaaagatgcaagtaaatgtaaattcttgattgtgctgtatgatgcgtgagct

SEQ ID NO: 48950 - DNA, 241 bp, Glycine max
atcacttgctgatgtctcagaagggcttagttcgcaggagaacactgttagctatgaagactctctacacaggagtcaatggagaacgttacccatcaaggttttatgagtagggcttgctcaaggttggagatatagagtacgcattggcatacgttgatggcgcctgaagcggaacataccctgagatgcaaaagctaaggcacgcgctagtggactatgcattggccagtggagagta

SEQ ID NO: 48951 - DNA, 248 bp, Glycine max
ctgataatgagtggttgtgtgttgggcttgtgcgtgggcataggaggttgtgtatgtgtggtggagaacgagaatggaagaatcatcattgatattagtcactcgtaccatcctgatatgcctgcctgggaatccaaggatagccttgggcagtttttgtggcttacaagaagcatggccaatggttctctggctaacttctcccaattcaagctccccgctcacagcggcacccatgtcgatgctcc

SEQ ID NO: 48952 - DNA, 251 bp, Glycine max
aacatatacaaattctctgtgttgtgttgtgtacttgtgttaattgtgttgttgttgtaggaaatttaagtgaagagagaatgatgatgaagtctgctatgtgtgcattggtgcttgtggcactggttgtggttgaagtggggcccatggctgaggctgcggtgacttgcaacccaacacagttgactccttgtcttccggcaattaattcaggttctgcaccttcgagtgcttgttgccagaagctgaag

SEQ ID NO: 48953 - DNA, 250 bp, Glycine max
ggcttatcagaaagcaaggttatgcctgcacccagacaaactgcagcaaagaggagcaacactccttcagaagtatgtagcagagaaggctttctcaattcttcaggatgcatgggctgcattcatttccatagatgtttccttctagccagtggatgactctaatcttgataactcagttttgtcttgagatttgtggacaaacaccaagcttgacattcgaaatgtcgggagtgtttgttgttgacaa

SEQ ID NO: 48954 - DNA, 218 bp, Glycine max
tcagaacacctttgtcccacgtttattattacacattatgcaaaaaatagctaacgttacaaaatttaaaaatatatgggtgaatttgtacttgtgttttcatcaggactcattgatctggccatcaaaaggaatagtttgattggaggagatgactttaagagtggtcagaccaaaatgaaatcggtgttggtggatttcctagtaagggccggcat

SEQ ID NO: 48955 - DNA, 208 bp, Glycine max
ctcaaatctggtgtggtgaataacatcacccctcacactcactcaacctaaacaaaatgcagagtcagagaaccacgccgctaaggaaccctcacacctccacctccgatctcctaacgtggtccgaacaacctccgccggaatcctccgcctccggctaccgctctcgccagccttctgataaaatcggtgaggttctccgcggaag

SEQ ID NO: 48956 - DNA, 203 bp, Glycine max
gcaagagagttaacaatgaggcagaatttgcctatggtgctggtcaattgaacccaagaagtgctgtgagccctggtctagtctatgacatggatgccttaggttatatccagttcttatgccatgagggttacaaaggttccagtttatcagctttagttggttcacctgtaaattgctcctctttgcttcctggtcttggc

SEQ ID NO: 48957 - DNA, 209 bp, Glycine max
tctcgagccgaatcggctcgagggatgctggtttgagaacttgggtagaccaaatgggaaatgtacatggtcgtgttgatgacgctaaagctttattgattggatctcacatggtacatgcataggctaaaatcaaaagatctctcaatatgccacaatatgatcctactgggatcttgtataatgaagccgaatgctacaaactgaaa

SEQ ID NO: 48958 - DNA, 257 bp, Glycine max
ctgagggggatgatagggaggtggagaacaagcttttgtttcaccttgagtttgataaattcagcctcattaagtttttgttgcggaataggttgaagattgtgtggtgcacgcggttggcgagggcgcaggaccaggaggagagggagaagattgaggaggagatgaaggggacggagttgcagccaattttggagcagttgcacgcaacaagggcttctgcaaaggagaggcagaagaatttggagaagagtatt

SEQ ID NO: 48959 - DNA, 253 bp, Glycine max
aaaagtgaaaaccagaagtacgaacgaaagagaagagcgatttagaagtgagagaagatggggttgtcgttcacgaagctgttcagcaggttgtttgcgaagaaggaaatgaggattctgatggtaggtctcgatgctgctggtaagacaaccatcttgtacaagctcaagcttggagaaatcgtcaccactatccccaccatcggatttaatgttgagactgtggagtacaagaacatcagcttcactgtgt

SEQ ID NO: 48960 - DNA, 240 bp, Glycine max
cacaaccactcttaatttctctctgccttgctcatttacacacctctccaacctatcactttcagctttatttgaatccctctctctcctttccaaatggccagcgttgaggttgcacatcaaacaccaacaacagttccagataatgaaacaaccgaggtaatcaagacccaggaaacaaccccggaaccagtaccagccactgaggctcctgcaacagaacaagcagcagctgaggtt

SEQ ID NO: 48961 - DNA, 262 bp, Glycine max
cgaaccagcacttctcagcttcacgctccgattttccactaccctttaatgagaggaaatcttcacaacactatgcatcatcatcatcctcagcaacaacaaggagggagcccaactagctccactggtgaagttgaagccataaaagctaaaatcattgctcaccctcagtactctaatcttttagaagcctacatggattgtcaaaagataggagctacacccgaagtggtggcgcgtatggttgcggctaagcaagagt

SEQ ID NO: 48962 - DNA, 257 bp, Glycine max
ctgcatttttctttgcaaaaaccaaaaaatacccctggttttcatacagccgttgtccaccgaggtactgaacaaaaccaggggtactttttggtttctgcatttttctttgcaaagcttgtggagtgcctgacccgaaggcattggttctttaggttgcagcaagttggactccgaatccgagcgctgcttgtcacaatgatctataataaggctctgaccctttcttgtcaatcaaagcagggtcacacttctgg

SEQ ID NO: 48963 - DNA, 256 bp, Glycine max
gaaggatctgcgtgtaaccatcccatggttctagttcagattcccatgtgtaatgagagggaggtgtatgagcagtctatttctgcagtatgccaaattaattggccaagggactgtttactaattcaagtacttgatgattcggatgatgagagcatacagtggttaattaagactgaggtcacaaaatggagccaaaagggaatcaacataatctacaggcatcgcttagtcaggacgggatataaagctgggg

SEQ ID NO: 48964 - DNA, 253 bp, Glycine max
gcaacatcaagagcttcaacctctccggcatgggttgcagtgctggcttgatatccgttgacttggctcgtgaccttctccaggttcaccctaactcaaacgccgtcgttgtaagcaccgagatcatcacccctaactactaccaaggcaaagagagagccatgcttcttcctaattgcctcttccgaatggggggtgctgctattctcttatccaaccgaacctccgaacgcaggagagccaagtacaggtt

SEQ ID NO: 48965 - DNA, 247 bp, Glycine max
aattgcggaatctgctagaattttctaataatggcgaaagacgttgagcaggtcacagagcaaggtgaatactccgcgaaggactaccatgaccctcctccggcaccgttgatcgacccagatgagctcacaaagtggtccttgtacagagccgccatagctgagttcatagcaacactcctttttctttacatcaccgtgttgaccattattggctacaagagacagagtgacaccaaaatccccg

SEQ ID NO: 48966 - DNA, 240 bp, Glycine max
cctcaggccccctaaggtagagaatcttgttcaatgtcctagggtcatccacagccctgatggtgtaggttccaatgtcctcttcctcaggccccctaagaacatttactcgttcaacgagcttgtggccttgtgggagaacaagattggcaagaccctcgaaaaaatttatgtaccagaggagaaggttctcaaggacatcgaagaggcacctcttccaatcaatgtggtattagcaat

SEQ ID NO: 48967 - DNA, 237 bp, Glycine max
ttttgtgactaggtgcattgccatagcacctagtcttattgtttccatcattggtggttctcaaggggctggtcggcttatcatcatcgcatcgatgatactttcattcgagctcccattcgcattaattccactccttaagttcagcagcagcagtaccaagatgggacctcacaagagttctataattatcattgtcatctcttggatcctaggcttggtgatcattggtatcaa

SEQ ID NO: 48968 - DNA, 239 bp, Glycine max
tgtccaagagattaagatcagtttctttgggcgatcctggtttctatacagactcctttgctcttgtttgatgcttttattatagcccgggaatcattttgttgatttatgctaaagcaagtagccatgttccgcttaaaattctttcaatagaagatggtactggtttgaagtcattcagccatctcctttatcggaataagaaggtagattttattgaacagttcaatgaaaagcta

SEQ ID NO: 48969 - DNA, 240 bp, Glycine max
ataacacctaaagatggtgaatggatgtcttctactgacttcaagtttaagaggactgatctccatgcaaaagatgatcgtactagttataactggcaagatagagcatgggatctgctaaatcaggttattaacatgtaaaactgataatcataagcttttttaggtattggaaatcactcacacaaggagcagaatctcctccttattttgttcaggtgtctatggatgtcaacttct

SEQ ID NO: 48970 - DNA, 131 bp, Glycine max
tgcgcgttgggatttatggatgatcattacccgattcggagtgcgttttctcttctcaaccaggtaatagatgaatatcaaaaaaactttggcgagtcatggagaaatgctcaggaagacagtactcaaca

SEQ ID NO: 48971 - DNA, 230 bp, Glycine max
caagaactcgaaatggctccaagagaatctgacggatatggattccaaggtgaagcaaatgatcaagctgatcgaggaagatgcagattcatttgccaggagggctgaaatgtattataagaaacgccagagcttatgaaattagttgaagagttttatcgcgcataccgggcattggctgagagatatgatcacgcaactggagtgatacgtcaggcccatcatactat

SEQ ID NO: 48972 - DNA, 234 bp, Glycine max
gttcttttcataaacaacaacattttaactcaagggttgcctgataacttagcctccactcatattctcttactcaccttagcaaacaacaagttcatgggtccaattccaagaagtcttcctaaggctttgtccactctaagtgaagtgcttttactaaacaaccagttaactggttgtttgccttatgagattggttttcttgaagaggcaacagtgtttgatgctggcaac

SEQ ID NO: 48973 - DNA, 232 bp, Glycine max
ctagggataacttgtcatattgtgattgatcatggtggaaatgttccctactgggaaggacagagttatggtgttattccaccggtaagtgatagttcttctttgcttcctcccattctgtgagtactgattgtgaattcataattattgatctttgtattcagttttgtttcgataaattaattttgatggaaggaatgcattttcgatatgtgtcctttatcatcatagt

SEQ ID NO: 48974 - DNA, 228 bp, Glycine max
ctgaagaggccaagagaagagaagaagccttggagaacgatttagcaaatatgtgggtccttgttgctaagttaaaaaaagacgggggtgcagttccagaatcaaacatcgataaaaaaaatgatggcgcagaacacataaatggtccaaaaactaatgacgttgaaagtaatattgttcccaaggagcatcttttggatgcaccgaaaccagatgaggaaatgccca

SEQ ID NO: 48975 - DNA, 226 bp, Glycine max
atttgttaaccaggtaaagcgatgtgcagaaatgtcaagaaagctacgattcttcgaggatcaaatcaataaagctggtctaatgtcttctccttcagtcttgcaaacagatatttatctggaggatttagagatacaacttgctgagcatgaacatgagctaattgaaatgaactctaacagtgagaaacttcggcaatcatataatgaactcctggagttcaag

SEQ ID NO: 48976 - DNA, 238 bp, Glycine max
aagcacaattagcaaagaacagtgtcccagatggtaaatttactgggagatgagaacacaactgcaaattacctgagcaagtgcatttattcaattggaatgggtagcaatgattaccttaacaactatttcatgccgcggttctattccagcagcaggcaattcacaccacagcagtatactgacgtgcttgttcaagcatatgctcaacaactgaggattctttacaaatatgggg

SEQ ID NO: 48977 - DNA, 239 bp, Glycine max
cagaagtatcgtgtggagaacttgtatgagggtcctcttgatgatcaatatgcttctgggctgttgatggagagggtagatgaaatatcatcagcccagaagtatcgtgtggagaacttgtatgagggtcctcttgatgatcaatatgcttctgctatcagaaattgtgatcctgaaggtcctctgatgctctatgtctccaagatgcttccagcatctgataaggggagattttttgc

SEQ ID NO: 48978 - DNA, 236 bp, Glycine max
atcagttggaatcaatcttgatatgtataattcccttggtagtaagaactacaaatttgaacagcatctcatttcaggagtgaaaggagtgggaagaagtgggaagtctcttcattataaagggagcacattccataggattataccgagctttatggtccaagggggtgatttcacccgtggtgatggaagaggtggagaatcaatctatggtgataagtttgctgatgaaaact

SEQ ID NO: 48979 - DNA, 234 bp, Glycine max
caaccctaacgcgtgcagagcagagagagacgcagccatggggcgaagacccgcgaggtgttataggcaaattaagaacaaaccataccccaagtcacggttttgccgtggtgttcctgatcccaagatcaggatttacgatgttggtatgaagaagaagggtgttgatgagtttcctttctgtgtccatctggttagttgggagaaggaaaacgtttctagtgaggccctgga

SEQ ID NO: 48980 - DNA, 235 bp, Glycine max
caagaatggcacttcgttgcttggtgatgtccctttctgttctcttcactcttggtcttgcgagagaaagccatgccagagacgaagatttttggcatgctgtttggccaaacactcccattccaagtccattgcgagatcttctaaagcctggccctgcaagtgttgagatcgatgatcaccctatgcaaattgaagaaacacagtacccgaaaaccttcttctataaagaaga

SEQ ID NO: 48981 - DNA, 234 bp, Glycine max
agcgaccatgccggcaccggcacggttgacggtggtaacagctggggaggagtacaatgcatgcaggtgtggccaccaattggcaagaagaagttcgagactctttcctacttgccagacctcgatgatgcccaattggcaaaggaagtcgaataccttctaaggaaaggatggattccttgcttggaattcgagttggagcacggtttcgtgtaccgtgagcacaacaggtca

SEQ ID NO: 48982 - DNA, 230 bp, Glycine max
ttttagtctagcaagatttgctcagatgatgtggcggcttaatttctttgtggtgttcagttgtattgtacttaacaacagttacatgttatactacatctgccccatgcacactcttttcactcttatggtttatggggcacttggtattctccacaagtacaatgagcttgggtcagtcattgctgtaaaaatcattggttgcgtcttggttgttatcttagtatggg

SEQ ID NO: 48983 - DNA, 240 bp, Glycine max
gcattattcatcgagatattaagtcatcaaacatcctgcttgatctcaactatgaagctcgagtttcggactttgggcttgcaaaattggcattagattcaaatacacatgtaactacacgtgtaatgggaacctttgggtacatggcaccagaatatgcgacaagtgggaaacttactgaaaaatctgatgtatattcttttggggttgtgctgttggaactaattacaggtcggaagc

SEQ ID NO: 48984 - DNA, 239 bp, Glycine max
tggcatcaaagtctctgacatccgatcaattaatcgattttgtgagcctcctgaaaaaaggctgatgtgtgacttgctctggagtgatccacaacctctccctagcacgggaccaagcaagcgtagtgtaagcctttcttttcgtgcagctgttacaaaaaggtttttgcaggtaaataatttagctttcgttgtgcgctctcatgaagtaaaggccgagggttatgagattgaacatg

SEQ ID NO: 48985 - DNA, 233 bp, Glycine max
attcgcgaggcaattgaggacgctggtttcgaagccgcgttactcacagacgacaaaaaatccgttcaagtatgccgcatccagatcaaaggaatgagctgcacctcctgctcctccactctggaatccgttctgcaagcccttgacggggtccttgaagcccgcgtgggccttgccaccgaagaggcccaagtccactacaacccaattctcctcaccaccaaccacatcct

SEQ ID NO: 48986 - DNA, 238 bp, Glycine max
cggctcgaggaaacagtgctggtgttgtcacacagaataataggagtagtgtaagctacttggagttcagaaagaagagattgaatgcaagtaacttctgctgcaataagagccatgcttctatattctgcctcagtactagaccttgcaacaactgattgcttcttagaccaccaagagatgagttcaggtccaagaaaaatagcaggtccaggggtagacctcctatcatcaggat

SEQ ID NO: 48987 - DNA, 229 bp, Glycine max
agctacaccagtcaagctttgagccagaacctacaaggactaagggcgagaagtccgatacgtaggatgagccgcagaatgctgtactacttgcaagaaaattggcggagactttgggttttagcattgtggatttccgctatgattggactgtttacctggaagttcatcgagtacaagagaaaaaatgcttatcatatcatgggtaactgtctactagcggccaaag

SEQ ID NO: 48988 - DNA, 216 bp, Glycine max
agcagccacacctcccgcagcagccatggttctcaaaactgaactatgccgattcagtggtgccaagatctacccaggaaagggcatcagatttgttcgtggtgattctcaggttttcctgtttgcaaactcaaaatgtaagaggtatttccacaatcgcctgaagccttcaaagctcacctggactgcaatgtacagaaagcaacacaaaaagga

SEQ ID NO: 48989 - DNA, 217 bp, Glycine max
gtcggattttcatatggaaaaagaaaagtggtcagcttattcgtgtcatggatctgtgtcatctcaatccaagatggatgctgatgagaaagtcaccccgcaagtttttaagggacacaggaattgtgagacggtgaagggtgttaacttttttggacctaaatgtgagtatgtggtgagtgggtcagattgtggtcggattttcatatggaaaaag

SEQ ID NO: 48990 - DNA, 221 bp, Glycine max
caaaaagtcaaatgtccaaagctcagctggccctaaacctgataaagtgcaactgattgagcataggcgagcatataattgtgaaatcatgctttcaaaagtgaaagtgccattgcatgatttaatgagctcagtgttagcactggaggagtcagcactcgacactgatcaggttgagaacctcataaagttttgtcctacaaaagaggagatggaattac

SEQ ID NO: 48991 - DNA, 250 bp, Glycine max
ctgtaagttcacaattgttgggcaggagttcacaaaaagtggctggggatttgcattcaatgctagacatcaaaacctcaacataaggaagctcatcaacaactgctgcaacccctccagctttagggccacgccgaagggcatcaatataatcctccatgttgaggttttgatgtctagcattgactgtaagttcacaattgttgggcaggagttcacaaaaagtggctggggatttgcattccaaagg

SEQ ID NO: 48992 - DNA, 267 bp, Glycine max
gaagacccatatcaagttttatccaattggggtacggtgaaatcagatccttgtaactggtttggcgtcttatgcactatggttcgagatcatgtcatcaagctaaacatatcaggatcatcattaaaggggtttcttgcaccagagctggggcaaatcacctacttgcaggcactaattttgcatggcaacaatttcattggaacaatacctagagagttgggtgtgttggaatctctcaaggtgttggatttgggaatgaaccaa

SEQ ID NO: 48993 - DNA, 245 bp, Glycine max
ggaataccgataatcttgaagaactcgatagtgttgcagacattcggcgtcattcaccagcatccgtgtcaagaggttgagaatgtggtgataccgccttacgtttcgccggaaagtgtaaggagtacgctggaaaagtttccggtgaccggccggcgagacatttttgcttttttccgagggaaaatggaagtccatcctaaaaatgtcagccgacggttttacagcaagcgagtgaggacgga

SEQ ID NO: 48994 - DNA, 238 bp, Glycine max
agctgaaggcggtgtcggaggagaaccctaacgagactgtgaaaagggaaacggtggatctcggaaacggaagcgacgtcgtttacattcagaggttaataccctccgatcaatcatggaaatggttccattatctcgacaaacacatcccatggaccagacccaccattcgcgtcttcggaaaatctttccttcagcctcgagacacatgttatgttgcaactccaggattgactga

SEQ ID NO: 48995 - DNA, 240 bp, Glycine max
cttgattcccttcatgttcactaagtatttgcaagatgtgtttaaggttcctttggttatatagctcactgatgatgagaagttcttctggaaaaatctttctatagacgagtgccgaagacttgcaagggagaatgcaaaggacatcattgcttgtggttttgacatttcaaagacattcatcttctctgatttcaattatgttggcggttccttctacaagaacatgtgtgaggttgg

SEQ ID NO: 48996 - DNA, 159 bp, Glycine max
agtcccatccgaatatggtaattcttggtgacgaagttgctgcatcaaagcttaacctttgctgcaattgtcaaacacggttactgaatgcaattcaggctagagctatagaagacaaataccatggaggtcatctccttccagaaaggctgatagaga

SEQ ID NO: 48997 - DNA, 259 bp, Glycine max
ctcagaattctctaaaagagatctttttctgctctttgaagaaagaagggtctttgcttgattttggagatgtctctgctctcagatctcatcaaccttaacctctccgataccaccgagaaggtgatcgcagagtacatatggatcggtggatcaggaatggacctgaggagcaaagcaaggactctcccaggaccagttagcgacccttcagagcttcccaagtggaactatgatggttccagcacaggtcaagctc

SEQ ID NO: 48998 - DNA, 251 bp, Glycine max
aagacaacgactgttgtctgacatttcgagattggaggccaaagtggagaggcttgaaggtcaactacaagtcaaagacagggagatagcgactattactagaacggaagctaaaaacactgcagctctgaaggcccaaattgagaagctgcaacaggagagggatgaattccagagaatggttattggtaatcagcaagtaaagactcaacaaatgcatgagatgaagaagaaggaaaaagaatacataa

SEQ ID NO: 48999 - DNA, 248 bp, Glycine max
aagcacaaaaaaaaagtgtctggtcccaaaatacaacaagagtgtaaaatggtggtggcagagttcactagtggtggcttgaggggaatgaaggccttcagctaccatgttctcacggggcgttggttcatgctatttgcatctttactcatcatgtccgttgcaggggcaacctacatgtttgggatatactctaacgaggtcaaaacctcattaggggtacgaccaatccactctcaacttgctaa

SEQ ID NO: 49000 - DNA, 203 bp, Glycine max
tttacaatggattaccgttatccactctctgccttccaagcctttgccatatgcttgagcagctttgataccaaaccagcctgtgaatgagaccgatggcactggatcatctgctggagcagcattgataccaaaccagcctgtgaatgagaccaatgacactggatcgtctgctggtttgaaccatatatatataattggca

SEQ ID NO: 49001 - DNA, 247 bp, Glycine max
ggctccatggctcagtatgttcctgctcttaagcactacagtgatgggaaattgcctttggtttgtaccatgtatgcttcttctgagtgctactttggggttaatctgaagcctctttgtgatcctggtgatgttgcttttacgctcttgcctaacatgggttactttgagttccttcctcttggacataacgggacgctgttgatggactttgatgaaggggagcaggttcccaatgataagcttg

SEQ ID NO: 49002 - DNA, 242 bp, Glycine max
aattgaatttcaatttccctaggggcttaatatctccccgcatttgtgcctagcctcattattatcatagtagatattcattccccttatctttctctcttctctctccccgcccaaaccctaactccctaccctattccgctttctctcatccatcatgaaaggaggaaagtccaagaccgaatctaagagagccgatgccaaacttgctgtgaataagaagggcgccgccaccaagacta

SEQ ID NO: 49003 - DNA, 244 bp, Glycine max
ccaccacacctctcctcgttcacgctacccctttcagctcttcttctacctttcaagttttaaaagtataaagatggcagagacattcctatttacctcagagtcggtgaacgagggacaccctgacaagctctgcgaccaaatctccgatgctgtcctcgacgcttgcctcgagcaggacccagacagcaaagttgcctgcgaaacatgcaccaaaaccaacttggtcatggtcttcggagaa

SEQ ID NO: 49004 - DNA, 237 bp, Glycine max
ctcgagccgattcggctcgagatttgatccaaattgtagaagaatacgcaatttaccaatgatcagaaattgtatgaacttgcaaacaagtttgaggagtgtactgcccatgaagaaaaacaactactggagaaagtagcagaaatgcttgctagctctagttctagaaagaaaaaactggttcaaatggcagttaatgatcttcgggagagtgcaaacgctaaaatcagtaggctg

SEQ ID NO: 49005 - DNA, 244 bp, Glycine max
caagaaattacgtccagaggtagaaattaagggagtttcgtgccagagtaagaaggagaattcgggaagtgatggaactgtggttgatcaaggaaaaggtggtagcccagttgcatcgtctcatgcaacaacaaccacaaccactagcagtgcacaaactcataggaaagctagaaggtgttggtcaccagacctgcaccgaagatttgttaatgcccttcaaatgcttggtggatcacaagtg

SEQ ID NO: 49006 - DNA, 242 bp, Glycine max
catgcctgcaggtttagcctatcaactctgtttttttcccacagtaagtgatccttacagttactttttgtttggtagaaggacaagataagctggtttattattatttttttttcattgcttctgcaggagagaataccatgagttctcttggtcggttggtgatgctcatatggttatttgtggttttgatcctcacttccagctacactgcaagtttaacatccatactcacagtgcag

SEQ ID NO: 49007 - DNA, 235 bp, Glycine max
cctcccttacttaattggactaattttccgtgaccgcattcatcaatggttaaagagatggcccaagaatgccgcaatgattaggcttgctggggaaggaagctggttccatcaatttcaagtagttgctctgtttagagtttctccttttccgtataccatattcaactatgctgtagtagtgacaaatatgaggttttggccgtacttatgtgggtcaatagcaggaatggtg

SEQ ID NO: 49008 - DNA, 176 bp, Glycine max
caggtcgccggcgagtggcgcttaccggagcagccgtgtggcggcgttgacggggctcggaaggttgggtgaggctgtgtcggaatgtgacgaggctgtgaggttggatcctagttatgggaaggctcatcagcgtttggcgtctcttaatccttaggttgggacaagttgataat

SEQ ID NO: 49009 - DNA, 238 bp, Glycine max
cagccaccgccataccaagaagaagaagaagaagaaagtggttgaagagtttggtggcaaaccagatattaaatggagactttatgttttcaaggctggtgaagtgctaaacgagcccctttatatacatcgccaaagttgttatctttttggaagggaaagaagggttgctgatatccctacagatcatccatcttgcagcaagcaacatgctgttattcaattccggcaagtcgaa

SEQ ID NO: 49010 - DNA, 238 bp, Glycine max
cttcaaattgctcggaccaggaccaggatattcatgtggccctgccaagattgttccatccactgccatcctcacagatgatcgcaggcgaaaaatgcaggcattgatgtcctggaatgtgacatgcacttactcacagtttcttgcctccaagaatccaagctgttgtgtttctttgtcatctttctacagtgacaaagtcacaggttgcccaccttgtgcttgtggttgccagaat

SEQ ID NO: 49011 - DNA, 230 bp, Glycine max
agaggctccattggatgttgacatcaagggtggtggaagggttgtggtgttgaacaccaagaatcttcccttggttggcgaggttggactaggggctgatcttgtgaggctggatggaagagccatgtgttcgcctggattctcttgtgattctgctttgcacgttacttatattgtcaggggtagtggccgggttcaggttgttggtgttgacggccgtagggttttgg

SEQ ID NO: 49012 - DNA, 233 bp, Glycine max
gaagtgtgaggcttctggattttgctatgttaatgatatagtccttgcaatcttagaacttctcaaacaacatgagcgtgttctatatgtggacattgacatccaccatggagacggtgtggaggaagctttctacactactgacagagtcatgactgtttctttccataaatttggtgactattttcctggtactggggatgtacgtgatattggatatggaaaaggaaaat

SEQ ID NO: 49013 - DNA, 142 bp, Glycine max
ctgggactgattatagtgaaagggccatcagccttgcccaaagccttgctaatcgtgatggattttccaacgtcaaatttttggttgatgatgtcctcgagacaaagttggaacaagagtttcgacttgtcatggataaagg

SEQ ID NO: 49014 - DNA, 183 bp, Glycine max
gggatgcatcttatagctccacggctgaacttgtcactgtggatgaggaagagggtcctgtcacaagcgttgcctgggctcccgatggatgccatgtagccatcggtttgaacaactcgcatgtcctgctctgggattctaatgtttctaggctggtaagaacattgagaggtggacatcaac

SEQ ID NO: 49015 - DNA, 249 bp, Glycine max
atccctttagcttaattttttggctacgttatggggatccttagcgatcatcataatcagaagcatcaccaccaccaccaacaacaagagaagaaggaggatctgaaggacattccaaaagggtgtttggccatcttggtagggcaaggggaggagcaacagaggtttgtgatccctgtgatgtacatgaaccacccattgttcatgcagttgctgaaaaaacctgaagaggaatacgggttcgcccag

SEQ ID NO: 49016 - DNA, 248 bp, Glycine max
atgatttgctgctgtaacaaaatggatgctactacacccaagtattccaaggccaggtatgatgaaattgtgaaggaagtctcttcctacttgaagaaagtaggatacaaccctgacaagattccttttgttcctatctctggttttgagggagacaacatgattgagaggtccacaaaccttgactggtacaagggtccaactctgcttgatgcactctagctgattagtgagcccaagaggccctc

SEQ ID NO: 49017 - DNA, 250 bp, Glycine max
tgtctggaaggcggttatcatgttttagacgaatcaactcattacagcagtgatcttcgcccaactgcgaaacagctgtggaagtccagtattggagttcttgaactgggtatattgagtgctcatggtttgatgccgatgaaaacaaaagatggtaaggggacaactgatgcttattgtgtagcgaaatatgggcagaagtgggtgcggacaaggacaatcattgacagctttgcaccccggtggatga

SEQ ID NO: 49018 - DNA, 238 bp, Glycine max
tttgatcgctagataggagctccacccgaagtggtggcgcgtatggctgcggctaagcgcgagtttgaggcacggcaacgatcttcagatggttccaaggaaacttcagaagaccctgaacttgaccacttcttggcaggatactatggcgtgcttgtgaagtatagtgatgaattagcgcggcgtattcacgaggctatggatttcatgcgaaggatacatcctcagctagatatgc

SEQ ID NO: 49019 - DNA, 241 bp, Glycine max
gagagcgagagagagagagagaatggcagcacttggtggcaatcgtgatgtggcaggaagccagaacagccttgagatcgatggtttagctcgctttgctgttgaagaacacaacaaaaaacagaatgcccttttggagtttgaaaaggtagtaagtgcaaaacagcaagtggtttctggtaccttgtacaccatcactttggaggcaaaagatggtgggcaaaagaaggttatgaagcca

SEQ ID NO: 49020 - DNA, 256 bp, Glycine max
agccattgcattcctccagctttgacattttggatcattcttttcaaattagagattgttcttcttcctccaatcaagcaatacagaatgggtttccgtttacctgctgttcgacgggcatcattcacggctagccaagcagcttcaaaatctgtacaagttccaaagggctatcttgcagtgtatgttggagagaaacaatagcggttctggttcccgtatcatacttgaatcaaccttcattcgaagatctttt

SEQ ID NO: 49021 - DNA, 265 bp, Glycine max
caagtggtgaagaaggagaatccaaagtaacagagcaaaccagcaacaagaatggcaaatccaacgcaaataaaaacaacaacagagaaacaacctctgcggagacttccaaggataattcgaaaggctccgaggttcaaaatcagaagccagagtacattcatgtccgagcgcgtcgtggacaagccacggatagtcatagcttagctgaaagagttggagggagaagattagtgagagaatgaagtatttgcaagatttagta

SEQ ID NO: 49022 - DNA, 251 bp, Glycine max
ccctgacttcacatgggaagtggtgaagccactcaagagggagaaaagtttgaatttgaagataaggtgaaagttttgagtaaaggacttgaaaggctgaaagaagttagtggtggagagataaaaccaattgttgatttggcagaggacaatgacaaagttttacagtgtgaaaagataagagccgagagtgaggttgaggtttggaaagacaagtacaagacattggaatcatgggccttcccatcccg

SEQ ID NO: 49023 - DNA, 245 bp, Glycine max
ctcacagggagaaatagagcaagagaagtttgattcatatgatgcacatttctatgcaccatcaagggaagagatagaagaagaggtgaggaaatcagggtcattgaagatggagaggctagagatgtttgagatggacaagagtaataatgagcaagaaagtagtgagagctatggcacacaggttgctgtggcagttagggccattcaagaatcaatgatctcacaccactttggagaaggga

SEQ ID NO: 49024 - DNA, 238 bp, Glycine max
gaactgcttcagatggctgggcgtgctggacgcagaggcattgatgaaaatgttcatgtatttctcatccaaactcctaatgaaggtgctgaagagggctgcatagtactgttcgctggactagagcctctagtgtcacaggatactgcttcatatggtatggccatgaatctacttgctggtgtgaaatccatacataggtcaaatgaatcagatgacatgataccttccacaggta

SEQ ID NO: 49025 - DNA, 237 bp, Glycine max
gtaaaaaatctgggtgcctcaagaagtactgtgagtgcttccaagccaacattctttgttctgaaaattgtaaatgcatggattgcaaaaactttgagggaagtgaagagagacaggctttgtcccatggagatcagattaacaacatggtgtatttccacaagcggccaattgtgccataactggagctatcgggtcctctggctaatcctccaccaccatattcaaggaaaggaa

SEQ ID NO: 49026 - DNA, 245 bp, Glycine max
tgaagatggtgaagagcccaaatctgctgccgttagggaacttcgagaagaaactggaatagtgtctgctgagataattgctgaggttcagaaatggttgacatatgatttccctcctgctgtgaaggctaaagtcaatcgtctatggggaggtgaatggcatggacaggctcaaaagtggtttcttatgagattaacaaaagatgacagtgaggtcaacttagctaatggggaagcagaacgtg

SEQ ID NO: 49027 - DNA, 248 bp, Glycine max
gattgtgatcattatgttaacaacagcaaggccgttcgggaagtaatgtgttttctcatggatccaggagttggtagccatgtgtgttatgtgcagttcccccagagatttgcaggtattagatcgcagtgatcgatatgccaatcgcaacacagttgtctttgatgttaacatggaaggacttgatgggattccaggaccagtatatatgggaactggatatgtcttcaatagacaagcactttatg

SEQ ID NO: 49028 - DNA, 257 bp, Glycine max
ctgtgctattggttacgggcccaggttgattcaggtcattaccggatcgccgcccaattgtcctcggaggaggcccttgccggagaatctcaattacccgtcgtttgtggcggtcttaccggtgtcgtcgtcgttgttgagcaagacgttcttcaggacggtgacgaatgtgggcccgccgagtgcggtgtatcgggtgagggtggagacgcaggcggagggggtggcggtgacggtgaggccgtcgcagcttgtat

SEQ ID NO: 49029 - DNA, 254 bp, Glycine max
cttggagacaatatcaaaactggaggagagaataaaagaagctgaggagaatgcaagaaggattaaggagcatgccgatatagcagaaaaagaaatcgaagctttggaattacaagttactaaacttaatgaagaaaaggaagatgctgctctccattatcagcaatgcatggagataatttccagtttggagtataagctctcttgtgctgaagaggaggtgcataggctaaattccaagatagttgatgggg

SEQ ID NO: 49030 - DNA, 263 bp, Glycine max
ggcaatttctgataataaggagcgtgaagatgacaaacctgaagatattgctcgatctcttctaagaatgatctcaaataatattggacagatctcttacttaaatgcccttcgctttgggatgaagaggattttttttggtggattttttattcggaggcacccttttactatggacacattatctgttgctgttaattcgtggtctaaaggtgaggctaaggcaatgtttttgcggcatgaagggtttctaggaggtgtag

SEQ ID NO: 49031 - DNA, 253 bp, Glycine max
aaaccctaaacgactctatctctcttcgttttgttcttccttgcgctcctcctcgttcgttcgttctccctcgcgtagatcggcaatggcggagaccgagacgtttgctttccaggctgagatcaaccagctcctcagtctcatcatcaacaccttctactccaacaaggaaatcttccttcgtgaactcatcagcaacgcctctgatgctttggacaagattagatttgagagtttgacggacaagagcaag

SEQ ID NO: 49032 - DNA, 246 bp, Glycine max
gctttgttgacacaagtaaccgtgtctttacccagaacttgaggcccggtgagtcgtttgtgttcccaaagggcctggtccacttcttgttcaatagtgattccagggaaccagcaattgccatatccggtctcaatagtcagaacccaggtgcacaaattgcatcacttgcaacatttgctagcaagcctccaatccctgatgacattcttaagaaggctttccaaatttccaaaggagaagtgg

SEQ ID NO: 49033 - DNA, 252 bp, Glycine max
tgtgaaaagacttggttgaaccggccagaccttgtgtctgaaatctggagtgttcttgaaccattcaaagcaacttgcattgacacgccaccacatttgatttctaagaagcttcgtcggattccttcccattttgtctgccccattgtccaggaagtaatggaagatccatacatagctgcagatggctttacgtacgaagaagaggcaataagaggatggttgaatagtggccacgacacttcccccatg

SEQ ID NO: 49034 - DNA, 249 bp, Glycine max
ctagttctagatcgcgagcggccgcccgcgatctagatcaagctaggccgcagatctgtagctcatagtggattgttgcctcgggcagttatatcacaccagcaaaaccaggaccaagcccaaggaatgctttactataacaatcccccacctcctcagcaggaaagaagctactacccatcaatggatcctcaaagaatgggtgctcttgtttcatcccaagatggtcctcccggtgggccttctggg

SEQ ID NO: 49035 - DNA, 255 bp, Glycine max
cttgggctcgctaagcgagtaggagcaaggattctgcttacatcaacttcagaggtatatggggatcctcttgtgcatccccaacctgaaagttattggggcaatgttaaccctattggtagattccttcatttcattctcaacttgctaaagcgcttataataaggaactatttctgtatctttttatacatattaataaagatgtagactgaggacttaaatatatgataatatcaggagttcgtagttgcta

SEQ ID NO: 49036 - DNA, 251 bp, Glycine max
gtttggaattactgtagttccatctgttctgttagatattggaatgactatctctccagaaagtcctcggtggctctttcagcaaggaaaaatatctgaagctgaaaaagctgttaaaacactatatggaaaagaaagagtggctttggttatgcatgacttgacagcagcaagtgaaggttcttctgaacctgaagcaggatggtttgatctgtttagtagtcgatataggaaagtggtcagtgtagggg

SEQ ID NO: 49037 - DNA, 246 bp, Glycine max
aaaatatggacgcagatcagaggataactcacgacttggagaagttaacagcggacttgtctggattggtaaccggaatggtaaagccatctgtggatattttgtggttcacatggagaatgaagctattaacaggtcagaggggggtttccatactctatgcttacatgttacttggtctgggatttttaagaactgttactcctgattttggcgatttgataagccaagaacaacaacttgaag

SEQ ID NO: 49038 - DNA, 248 bp, Glycine max
cttgtgtacaccccaaccaactattgttagatggtcatctacacctccagtgtcagatgaagttagacttcagtggaaaggcttttgtgcccttatagcaaatgcatattttatgaagggaatggcttggtgagatgccatccttgcatcttttcttttcttgatatgcttctagtattgcacccccacccccccaaaaaaaaaaagaatattatctaccagaatcgttctctaatctagcggatttg

SEQ ID NO: 49039 - DNA, 140 bp, Glycine max
gagatgcaccatgaggctctcacagaggctcttccaggtgacaatgttggctttaatgtgaagaatgttgcagtcaaggatctcaagcgtggttttgttgcatccaactccaaggatgaccctgccaaggaagctgccaa

SEQ ID NO: 49040 - DNA, 141 bp, Glycine max
gtttctgcaagccattggatcattccctaattcgaagccttgcaaaatcgcacgaggttttgatcaccgtggaagaaggatcaataggaggatttgggtctcatgttgctcagttcatggcccttgatggccttcttgatg

SEQ ID NO: 49041 - DNA, 251 bp, Glycine max
gttagcaagacgagaaaagcttccagatcctgttgagagagagaaaggtgttagtctttggtcaatgatcaaggacaatgtgggaaaagatctaacgagagtttgtctcccggtatactttaatgagccgagatcatccctacatgaatgttgtgaggacttggagtactcttatcttctggatcaagcttatgagtacgggaaatcaggaaacggtctccttcgggcactgtatgttgctgcctgtgcag

SEQ ID NO: 49042 - DNA, 252 bp, Glycine max
attgattgtttgcagatggaccccttacggaaacactaagtgcaccatttgcaagcagcaagtgcaccagaatgctaagtactgccacacctgtgcttactctaaaggtgttatttccatgttgagatctttttgcatttgctaccatacatattatttttggtacactaattaaatgtgttctatcatgaaagtgcatgactaaatttctgatgtgttctatatggcaggagtttgtgcaatgtgtggaaa

SEQ ID NO: 49043 - DNA, 158 bp, Glycine max
cttcttctcttgcggctaggggggtagcgcagttcggtctagatttgaggatgatgggtaaggataaggttcacatcagtattgtagtcattgtcctggtcgactctgggatagccactaccactaggtgaactgatttacaagctaggttggattga

SEQ ID NO: 49044 - DNA, 243 bp, Glycine max
gttcacaatcttgctcgatttatttcagtcatgcagtttcatcctttatcttggcgaacttcccactcttatgttatggtagatcgttttgaagacatcactcctcctgaaaaagtgcacgcaaataataaatgtgacagaaaagtcactctttatggttatcttagaggctgtaatttgaaaatgggcaataaggtgcacatagcaggagtgggtgattatcatgtagctggtattactgct

SEQ ID NO: 49045 - DNA, 251 bp, Glycine max
cgaactcttggtgttcctgaaaatgccagtcaggacgagataaagaaggcatttcactcgatgcgtactcgtggttcagaagacatagaatatgatcgtgatgatgcagaaaggtttagaaatgcttatcgttctcatttttctgattcatttcataaagtattctatgagatatttgaagaagcaacaactcaattctcatcaaatatagaggtggagatgtctcttactttctccgaagcagcgagagg

SEQ ID NO: 49046 - DNA, 254 bp, Glycine max
ctcacctggcatgggaactgttccatgggttgtgaactcagagatctatcccttgaggtacagaggggtttgtggaggaatagcatccacaactgtttggatttccaacctcattgtttctgagtccttcttgtccctcacaaaagctctagggacagcatggacattcatgatgtttggacttgtggccattgtggcaatcttctttgtcattatttttgtgcctgagaccaaaggggttcctatggaggaag

SEQ ID NO: 49047 - DNA, 243 bp, Glycine max
ggaggaggaaggcctcggggacggtgacccttgcggtggcatagaggaacgctgcgacgtcataattctcggggcagtccagcatgaccttgcggaagaaggaggccttgccgtagcggctggcgccgcagtagagcgagttcttgtcgttgttgaaggcgtcgtaggtggcttggatgaggtccccgcaccggaggatcagggagcggagagaggggtggagagggtctagtaggcccgccc

SEQ ID NO: 49048 - DNA, 230 bp, Glycine max
gttgatcttaagtgcaagctggttgattttggtaatgcttgttggacctataaacaattcacaaatgatattcagacaaggcagtataggtgtcctgaggttcttcttggatctaaatactcaactccagcagatctgtggtcctttgcttgcatttgctttgagcttgcctctggcgatgttctttttgatcctcatagtggtgacaactatgatagggatgagatcat

SEQ ID NO: 49049 - DNA, 306 bp, Glycine max
cgcgctcgaacttactaacactttccttagttcaatatggggaagcccttcttcactctctctctttcttccctttgcttgctactcttgtcgagtgcatgctttgctattacctccagcaagttcaacgagtgccaactcaacaacctcaacgcgttggaacccgccaccgcgttgagtccgaaggtggtcttattgaaacatggaactctcaacaccctgagctgcaatgcgccggtgtcactgtttccaaacgcaccctcaaccgcaacggcctccacttgccatcttactcgacttatcccc

SEQ ID NO: 49050 - DNA, 299 bp, Glycine max
gttatgggtttccttgtgttgcttcttttctccctcttaggtctctcttctagttccagcatatcaactcatcgttccatattggaccttgacctaaccaagtttaccacacagaaacaggtgtcttcactgttccaactatggaagagtgagcaggacgtgtctaccataaccacgaagaagaggcaaagagacttgagattttcaagaataacttgaactatatcagggacatgaatgcaaacagaaaatcaccccattctcatcgtttaggattgaacaagtttgctgacatcact

SEQ ID NO: 49051 - DNA, 291 bp, Glycine max
gtttattcacgctgggagcaatttcttgctgcttgtgctgagaatacagaaaagtcaacatttgttcgagatcgttttcccttcaaagagttcttctgtgatacaccacatcctgtatttacaggtgagtcttttgagaaagacatgcggactgcaatggggtgctttcgtcatcttaagaccatgtttcaagaacttgaagagtgtcgggcattcgaattacttaagtcaacagctgatagggctaactacttaatgaccaagcaggctaagattgtggcaatgacttgc

SEQ ID NO: 49052 - DNA, 284 bp, Glycine max
cttaattattaacacttccttagttcaatatggggaagccctttactctctctctttcttccctttgcttgctactcttgtcgagtgcatgctttgctattagctccagcatgctcaacgagtgccaactcaacaacctcaagcgttggaacccgaccaccgcgttgagtccgaaggtggtttgattcaaacatggaactctcaacaccctgagctgaaatgcgccggtgtcactgtttccaaactcaccctcaaccgcaatggcctccacttgccatcttact

SEQ ID NO: 49053 - DNA, 273 bp, Glycine max
ttagttattaacacttccttagttcaatatggggaagcccttcactctctctctttcttccctttgcttgctactcttgtcgagtgcatgctttgctattagctccagcaagctcaacgagtgccaactcaacaacctcacgcgttggaacccgaccaccgcgttgagtccgaacgcggtttgattcaaacatggaactctcaacaccctgagctgaaatgcgccggtgtcactgtttccacactacacctcaaccgcaatggcctccacttg

SEQ ID NO: 49054 - DNA, 252 bp, Glycine max
gtccacgaagggagcaattgtggcctatacaaggggacttgctcttcagttggtgagtaagggaattcgggttaatggggtggctcctgggcctatttggaccccattgataccctcctctttcaaggaggaagaaacgctcaatttggtgcccaggtgccaatgaagagagctggccacctatgaggtgctcgcttatgtttctgctgcaacatgcccctacaactggacaatcctcaccaatgggaacgt

SEQ ID NO: 49055 - DNA, 236 bp, Glycine max
ttctaccacgtgcacttgttctgtggttttggtctcttgtttaattgcagacaagtagtactctcgggtaaccagaatcaggtgtgaatgtgttgagattatttactgttttgcatgataggagaattgagaaagaatacgttataagatagagaggcataacatcaatgcagagttggaagatggctcccaagggctgacatggtgtgagtgtatgggtgtgtgactagcttctc

SEQ ID NO: 49056 - DNA, 275 bp, Glycine max
gtccttgaatataatactcagatggctaagcttgttctttccctttgtcttctgcttttcagtggctgctgcttcgctttcagtttcagagagcagccacagcaaaacgagtgccagatccaacgcctcaatgccctcaaaccggataaccgtatagagtcagaaggtggcttcattgagacatggaaccctaacaacaagccattccagtgtgccggtgttgccctctctcgctgcactccaaccgcaacgcccttcgcagaccttcctacacc

SEQ ID NO: 49057 - DNA, 233 bp, Glycine max
gcgagagcgactcgtacaggaccaagcatgccacgctcgttgcaacctccttaaggtggacagagaagaatgtgtagaaggtgaaattccatgaccacgaccacgaccacaacacccgtagagggatcctcagcaacgcggttagtaggagtaagtcgcagttcagcaaccacggcctctcccattcccacggccacaacctcgacatgccgaagagcacgtgcttagatagg

SEQ ID NO: 49058 - DNA, 268 bp, Glycine max
caatatcctagtatactttctacatactttacgatagtatgatgagagcacggttcccattactgtgctgagagtgtttacctggcttcagtttctgtctcatttggcattgcttactgggtcaaagtgaacccgcatccataacatgtgtctgcatagttgtaatgacgagcgagactcgttcagggaccaagcatgccatgctcattataacctccttaatgtcgatgttgagtctgtgatgacagtgtcattcgacgagcacgac

SEQ ID NO: 49059 - DNA, 228 bp, Glycine max
cttaattattatcattccttagttcaatatcggggaagtccttcactctctctctttcttccctttgcttggtactcttgtcgcgtgcatgcgttgctattagctccagcaagctcgacgtgtgccaactcaacaacgtcatcgcgttggaactcgaccaccgcgttgagtccgaaggtggcttcattcatacatgggactctcatcacgctgagctgtgatgcgccg

SEQ ID NO: 49060 - DNA, 275 bp, Glycine max
tggtccttaaaactcatcagtcattatcatggccaagctagttttttcccatcgttttctggtatgcagcggctgctgcctcgctttcagttccggagaacagactttggaaaacgagtgccagatccttacactccatgccctcattccggataaccgtataaggtcttgaggagggctcattgaggcatggtacccttccaacaagccattccagtgtgccggtgttgcctctctcgctgtagcctcaatcgcaacgctcttcgtagaccttc

SEQ ID NO: 49061 - DNA, 246 bp, Glycine max
gatgtttcatgtcatggtgaatgaataccaattgatgcccaatatagagcattacgggataatggttgatcttttggtcgaatgggagagttggataaggccttggatatgattaataacatgcccatgcaagctgggcctcatgtatggggagccttacttggtgtttgtcgcatacatcaaaatattaagataggggagcttgccgctctgaatcttttcctgttagaccctaatcacgcaggg

SEQ ID NO: 49062 - DNA, 242 bp, Glycine max
gtgaaactctctgcagatatcatactggattcttggagcgaaacacacagatctcatctcgtagcacaacttatcttcttagaccaactttgtgagatttcaccgtaccttccaagaagctcgctggaaacccacgttccgtatgccattctccgttcagtatacagccaatactatgcagatactcagtccactccattggcaatactgaacgcatcaccccgtcattcacctgccgtgtt

SEQ ID NO: 49063 - DNA, 240 bp, Glycine max
tcctaatggacgacgtatagctgtgaaaagattatcgacaaattcatcacaaggttcggttgaattcaaaatgagattttatcaatagcaaaactacagcatagaaatcttgtggagttaataggtttttgtctagaagtgcaagagaagattcttatttatgagtacatgtccaacgggagccttgataactttttatttggtttgattcttgactttaaactcttgaataatatcaaa

SEQ ID NO: 49064 - DNA, 237 bp, Glycine max
taaagacttagacaaggaagaaatgctacgaggaaggcctggctatgagcacctgaatgatccgcttcacattataattgaagctgaactacctaccagtgttgctgatgtaagattgatgcaagcacaagaaatcatacaagagctacttaaaccagtggatgagtcacaggacctttacaaaaggcaacaactaagagaacttgctatgcttaattccaactcagagaagagagc

SEQ ID NO: 49065 - DNA, 249 bp, Glycine max
gttacacggcaatgctcaacatatatgggagtcagggagatgttgacaaggcgatgaaattgtttgacgagatgtgtaagttgggtgttgaactcaatgtgatggggtttacctgtttgattcagtgcttgggaagggcaatggaatttgatgatttggtgagagtttttgacatttcggttgagagaggaattaagccagatgataggctatgtggttgcttgctatctgttgtgtctctgtctcagg

SEQ ID NO: 49066 - DNA, 242 bp, Glycine max
aaaaatggacggcgaactaagagtgattgtggatggatttctgtctcattatgatgaagttttcaggctgaaaggggtggctgctaaaacagatgtgtttcatcttattaatggcacatggacttcaccagctgagagatgcttcctctggataggtggttttaaaccatcagagctcatcacaatgttgataccacagttagagcccctggcggagcagcaaattatggtcatatgtgaac

SEQ ID NO: 49067 - DNA, 247 bp, Glycine max
ctggccttccccttaaagaaacagaaagccaaatgcaataatggtcaagataaaagaggcacactaaagttggtgctgagggactctggcttattaaatgctgatcatcccctccatttcttttcaaaattcaaattgacccttctggccttctcctacttcttctatccattgtttcatttttatttccaaattttcaggtgaaaggaacataggaacttgaggtgatgaaagcaacagaatgtta

SEQ ID NO: 49068 - DNA, 210 bp, Glycine max
aataagtactcagaagaatgctcagatcaagttattctctctcatggtgcaacgaattgcaaagtcagtaacatagtcccaccattgccaaggctttgcaattcgttgccccatgaaagagaataagtactcagaagaatgctcagatcaagttattaaatctcttggtgctgatctgaagaagattaaagactgcgatggagatcccca

SEQ ID NO: 49069 - DNA, 243 bp, Glycine max
ggatgccaaaaaatatgcaggccaatagaccggcagagaaatcccatgggactgatgctgtgatgtgggcacctgtaaaacctcagagcaagagtgagatcgtggatgaattgagtgggataggtaaaattgaggcagtaaatcctctaaagattgagcagcaggtgcataatttaaaaaataagagggcagaaatggagaggtatgttccgaaacctgttgcaaaagaaatggctcagcaag

SEQ ID NO: 49070 - DNA, 255 bp, Glycine max
actcaaagttgatcgaaacctcttttacaccatcggtttggccaagaattcttgccccacatgcgtcaatggaactcggctacttgcttccttaaacaatgtctcttttgtgatgcctcaaaccgcgcttctccaagctcactacttcaatatcaagggggtttacagaactgattttcctgataagcctctaactgcttttaactatacaggtgcaccattaacggctaatcttggtacttcagttggcacaag

SEQ ID NO: 49071 - DNA, 259 bp, Glycine max
gtcaggatggccctccaaaggtgactcatctgaatctgatgcaactgttgataatgctaacacttacaacagtaacttgatcagacacgtcctgaacaatacggggactcctaaacatcctggaattgcagttagtacatatatttatgagctttataatgaagacttaagatcaggtccagtctcagaaaagaactgggggctattttatgctaatggagaaccagtgtataccttacacttgactggtgctggtatt

SEQ ID NO: 49072 - DNA, 256 bp, Glycine max
attcggtcttgtgattttgacttagagcaaacatgtgtattgcattcaccagaaaagaagtaacagataggattgataagtggtttgctgcgtgtgaagaggagaattggcttgacgaatataatcaagatgacaacagatactgtgctgggcgaggcgctcacattaatcttaaacgtgcagaacgcgctagaataactataagcaaaattccagctatggttgacaatcttataaacaaaacactagcctggga

SEQ ID NO: 49073 - DNA, 251 bp, Glycine max
gttttggatatacttattgagaccagcatgcttgattttcgccatagtgacactccaatggatcccaatatcaagcttcttccgggtcaaggagagccattggaaaacccgtgaagatattgacgacttgtgggtagacttaattacctcactgtcaccaaaccagatatcatgtatgcagttagtgtgttaagtcaatttctgaatgctccttgtgattgccattggaatgctgtcatgcgcattcttcg

SEQ ID NO: 49074 - DNA, 255 bp, Glycine max
ctatgtactagcagtttacccatctgtgccttgtctaaccattgggagaactgcagggtccctgcttgatgccatggttatggtcatagtcaaagttcttagtccagatcaagcttcatgtgcaattgatctcccaattctaggtctatctgattgggactatggctgtcactatttgtcttgaaagatcaaacatgttcaagtacttggggaaattgcatctcttggaaaagtagaggaccagaggacttactt

SEQ ID NO: 49075 - DNA, 250 bp, Glycine max
gaatctgtcatcaaagggagccgcaagcttgatcacacaaaccgcttcaagtgtttggataaggcagctgtagagaccgaatctgatcataccaaagacttgtcaaatccttggaggctttgcacagtaacacaagttgaggaactcaaatcagtaatctcattactcccagtttgggcatcattgattgcctttgcaactgtgtacggtcaaatgagcaccatgtttgttctccaaggcaacacaatgg

SEQ ID NO: 49076 - DNA, 251 bp, Glycine max
gggagtttgtcattcttccacttcccatgccaccctagagaagaaatgtataggaaagccaagatgcacggtcactgtatcaaacagtaactttgggcaagacccttgtcctaatgtgttgaagcggttatcagttgaagctgtttgcgctcccaactaattggagaggctgaatgattaaggaagcacccttttacgtgtagtgtgaagtgacttaacaagcacacgaaagaacaataatagtataggta

SEQ ID NO: 49077 - DNA, 264 bp, Glycine max
atcgagccgggaaggtggggtgcttgatgctgatgaacggtggggatgaagcggatttgaatggtgggcccggggccacactcgggaattaccaacagcaagggtttgaggttgagtatgacttggaagagaagcgcgtggggttcgcaaggaggcagtgcgcgttgctttgggagagactcaatcgcgacaaaaactagcgtaaggtatcgtgcactgaacatactagattccctcccctgctttctgtcacgggtcgggttc

SEQ ID NO: 49078 - DNA, 265 bp, Glycine max
cttgtctttatgacatttctcaagaacctgacaatggttttgttcttgtacagctagggataatcttgttttcctacagcgttggttcactaaattccctgagtactcaaataacgacttcttcatttcaggggagagctatggaggtcactatgttccacaacttgcacaacttattgttcaaaccaagaccaacttcaatctcaagggaatagcaatagggaatcctcttcttgagtttaatactgatttcaactcaagatct

SEQ ID NO: 49079 - DNA, 258 bp, Glycine max
caaactggaactgatggaagccttatatctgaagagggttccacacataaggcagcagacccgtttgatattgggggtggacacgtggatcccaacaaagcaatggatccaggactaatatatgatatcaccactgaggattatgttcaattcctatgttccatgggtcacagtagtgcatccattagcaaagtgaccaagaccaccacaagttgtaagaaaggaaaacaccaaacactgaacctcaaccttccttcc

SEQ ID NO: 49080 - DNA, 256 bp, Glycine max
ctcgagccgaatcggctcgagcggctcgagggttgaggaactttacgcaaacaacaaaattccgatattggtttgtaccagacaccttggcttggggtgtgaatcttccagctcatctagtgattatcaaggggacagaatactatgatggaaaagcaaagaggtatgttgattttccaatcactgatattttgcaaatgatgggtcgtgctggacggcctcaatttgatcaacatgggaaagctgtgattcttgt

SEQ ID NO: 49081 - DNA, 249 bp, Glycine max
agcatctgcagtggcatttgtggctgaacgtcactcccgtgcttgggctgttggttgggattataggctctatgctcctttttacacgggagtagttagttcaggaattgcatactatgttcaagggctggtgatgaaactaagaggccccgtatttgcaacagcctttaatcctctttgcatgatcatggttgctgctttgggctcccttatattaggagaactgctccatctcggaagtatcattgg

SEQ ID NO: 49082 - DNA, 264 bp, Glycine max
tgagatcgttgtcatcggttcctgcatgacccccgcggactccattttcaacgaatgcgaagagagtttgaagagcatcttgtcggagataaggctgaatttgaagacaggcaagtccacgagaaaacccattatctcggaatccgaacaaagcaacttggaagccgggatggtcaacagaaacaagctcgggagaaagacgaagttcgggtacttagcacttgcggagccgtggcctaaggtttcgggttttgccaaggttga

SEQ ID NO: 49083 - DNA, 173 bp, Glycine max
gagacagtggattcgactcaccaaatcactcttcctcgagggctacctggatggtcagtttctgcaacttcagcagcttcaggatgagaacaaccctgactttgtggtcgaagttgtctctctcttctgtgaagattctgaaaggcttctcaaagatctcacctttgccctag

SEQ ID NO: 49084 - DNA, 262 bp, Glycine max
cgacaacggttcaaacaattctgcatttgctgaccctcttgcatttggtccaggccatgttaaccctgcgagagcttctgatccaggcttagactatggcatctccactcatgattacttgcattacttgtgcagtttgtggtccacatcctcccagtttgctatactgtcggtcggttcttttaaatgtgacatagaagcatctcatcgcgcaggcgacttgaccgacgcctcatgtgctgagctaactagggcgagtgct

SEQ ID NO: 49085 - DNA, 246 bp, Glycine max
  unsure (1)..(246): unsure at all n locations
gtcactcatgtcccgatagagtgatgattgncatgatgtgatgattgccggaaaggtagctgttgtgtgtggctgcngagacgttggcaagggttgtgcttcggcacgtattaaaccgtggctcgtgtcattgtcaccgagattgatcccatttgtgcccttcaggctctaatgttgggtcttcaggttctcaccctggaagatgttgtctccgaggccgacatcttcgtcaccaccacagggaac

SEQ ID NO: 49086 - DNA, 236 bp, Glycine max
ggaagttatgaaaaatggaggggttggcatgattttggcaaatggtgtatttgataattatgaagaatatgttggagctgatattgtgaaaagagctcttagttaccctttgaaattaattgccaaaaacgctggtgtcaacggtagtgttgtcagtgagaaggtattgtccagcgacaatccaagatatggatataatgctgccaccggataatatgaaggattgatgtctgctg

SEQ ID NO: 49087 - DNA, 244 bp, Glycine max
gttcatggatctggggtttgttttctcagaggaagataaggactcaagtttggcttcaatcattcctggcttgcaaaggctagggaaaagtgatgaggaagaagaggattctgaattagggtcctcagtccaaagaccttacctctctgaagcatggaaggctcaagaaaggagaaagaaagagaaccctctcgtgaattggaagattcctgctctgaacaatgaaattgacataaaagatagt

SEQ ID NO: 49088 - DNA, 171 bp, Glycine max
gtgttgatgtacgtatgtagaaggagtgaacgggaaccagagctgtcctcaatgcaacactcgctataagcgccacaaaggttgtcctagagtagctggagacgaagaggacaactttgatgcagatgagtttgatgatgagtgtccggtgaagaatcatcttgaagatct

SEQ ID NO: 49089 - DNA, 236 bp, Glycine max
gtttcaatgggagacaaaggctttatcaagcctttgcttgaaaagcgaggtaaagtacatttcgataaggtgtgtattaaaccaggcaagccatttacatttgcagagattgactttcaatctacagagagcacaattctagcttttgggctacctggaaatcctgtcagctctttagtttgcttccatctctgtgggggtccctgcaatacgctaccctgcagggtggacaaatc

SEQ ID NO: 49090 - DNA, 229 bp, Glycine max
ccccaaccattcagaaatgatctagagagctattctttagaattgggaaaacttagcatcgcaatcattaaacttatttcaaaagctcttgagatcaacactaatgaattgctagagttatttgaagatttaagtcagtcaatgaggaagaattgctaccctccatgtccccaaccagaacatgtcattggccttaatcctcattctgatgctggtgctctcaccatcc

SEQ ID NO: 49091 - DNA, 264 bp, Glycine max
actcgagccgaatcggctcgagtgaacaagcaggggaaaactccacctatctttattctgacccaagtaattaggtgctactgtcatgcaggagatattgagcgtggtcttcaaaattttgagaaccacctaaggcaggacaggtctgttcctgcagaacgtattgtgactcttgcagaaggggcaatggttgggtacactgaaaaaggaatgcaaatggctcaagatattctggtaaggatgaacgagagaaacatttttttg

SEQ ID NO: 49092 - DNA, 158 bp, Glycine max
gtccgaaacccctcacaccgtcctcgccctcgacgtctacaacgacaagatcaaacacctcctcgaaccctccgattccccctgggccggccgcatcaccttccacacaacatacgagcgagcgaaagtgggacgtgcaggcagaagcaagaaggcag

SEQ ID NO: 49093 - DNA, 253 bp, Glycine max
agatctcaagaggggtgggaataacaggttcttgaagactgctgcatatggacacttcggcagagaggaccctgacttcacatgggaagtggtcaagcccctcaagtggaatgaatgggagttttttagcgttgcccttataatgtctattatccataactttccacgtcccttgctctgtgtttttctctcgtcgtcctcctcctatattgtttctccagcctttcatttgtaattttttacatgatcaact

SEQ ID NO: 49094 - DNA, 255 bp, Glycine max
agggatgtgaggtttgcgccgtgtgggaactgcagtgggagtaggaaggtgtttgatgaggatgaagaggtgttgaagaggtgtttggagtgcaatgagaatggcttgattcggtgtcctaattgttgctcttcttgaagtttgcaaaaaataaaaataaaacagaaaaaaaagaaataaaaaagaagaaaaatttgttgatgttttgcatgaaacttagatgcgattccttttggttctggtgttgttgtccag

SEQ ID NO: 49095 - DNA, 233 bp, Glycine max
tttattgctctcatggcttttagtcttgcgtggctagttattgaagctggagttggtgttgctgtttttgtgcgtttctttgttaacaagagaggaatggagtctgaaatcattgatagactcggaaatggattctctcggcccccatttgcagccgttgtggttgtatgtactgtagtttctatcttggcttgtgtgcctttgggtgagcttttctttttccacacaacata

SEQ ID NO: 49096 - DNA, 244 bp, Glycine max
tattcttctaactcggactttcgatatcagcatcacgtatgattaatattatcaaataccacgagtatggcttactgggtatgacgagtcaaggatgctcttgcaaccagaacttgttcttgaagatgttagtcaagaccatgcacgcaaaacggtaactcttgaggaccatcctcacttgccagggaagcatgcatctattcatccatgtcgacatggagctgtgatgaagaaaatcattgat

SEQ ID NO: 49097 - DNA, 247 bp, Glycine max
ggtccaagaaggagcaggtttgctttcaattgtgatccaagaggctgaagaggttgagggggaccatcacaacaacccatttgcagtgctgacctttagaggcgaaaagaaaaggacaaagacgatgaagaaaactcgacacccgcgttggaatgaagaattccaattcatgctagaggagcctacctctacatgagaagatacatattgaggttatgagcaagaggaagaactttagttttctgcc

SEQ ID NO: 49098 - DNA, 223 bp, Glycine max
  unsure (1)..(223): unsure at all n locations
ttcaaacaggaattatctggagcatcttccgagcttgttaataagttgatacctgaccatgtgaagcggcaaatggggatacagtttatgcatctgggaggatcgtgacgataagnagcttaggggacatagtgtatactagctggtaagttaaaaaataatggtgccatgttctgtgacctggcgaatgtagtttcaagctgaaaccggactgtgattcgcg

SEQ ID NO: 49099 - DNA, 149 bp, Glycine max
gacttgcaatgggcattgctggaactgaggtagcaaaagaaagcgctgatgtaataattctagatgataacttttcgactattgtgactgtagctaaatggggccgctcggtctacgtaaacattcagaaatttgtgcagtttcagcta

SEQ ID NO: 49100 - DNA, 261 bp, Glycine max
gttgtccccagcttctaaggttttgaacaactggtttgagacagatgttctgaaggcaacccttgcaactgatgctgtgataggcagtacagtaagacaggccagtgtccacaccccaggaagtggctatgtgctgctacatcattgatgggcgaaactgatggggaacgaggaatttggtcgtatatatgttgaaggtggaatgggctcaatatccaaggctattggtaatgctgctattgaagctggagctcatgttgt

SEQ ID NO: 49101 - DNA, 256 bp, Glycine max
attgaattgcagcagaaaatgaaggattttccttcttgttttggtgaaaatggagttcaagtggcggattcttcgtcttcaagcgctaataaaagtgcccagaatgtggttacctgtgtttatcaatgcaggattggggtatttcctgcctgattactgtcacgtggagtaagaatttgatggggcaaggccttggcgttgggatcgacgattcatcaagccagagtctttgtaaggtggatatcaaaccgtgggg

SEQ ID NO: 49102 - DNA, 241 bp, Glycine max
cttttcagtggcaaagagttaaagaaagccacaaacgacttctccagtgaccggcatctaggtgttggaggctatggtgaagtctacaagggcattcttcaagatggcactgttgtggctgtcaagtgtgccaagcttggcaaccccaaaggcactgaccaagtcctcaatgaggttcgcatattatgccaagttaaccaccgcaaccttgttggttgacttggttgctgcgtggaattgg

SEQ ID NO: 49103 - DNA, 161 bp, Glycine max
agaattgagtgaatccatcagatatgcttctggggatcccattgaaagctggcgtaactctctactgtgcttagatgcttcaaagaccatccctaatattagcaggttacctccacctagcgagtgcgatatatactatgttaatcgggatacgctcttct

SEQ ID NO: 49104 - DNA, 197 bp, Glycine max
atcgatttcggattgtggaaggtctgatcgccagtgtgcatggcagccgagctagtcagcagactgttgatggtctattcagacaaggactgcagtggtggaagagctgcttccttcgatatgagtcccaggaggactggagccgggaaggctgtaggtcggcttcgtcgagcgctgattgggaaatggactggcat

SEQ ID NO: 49105 - DNA, 216 bp, Glycine max
caggagcagaaagtaccagtgtcgacgcatatgggaattcttttcatttcacaacaaagttcctgcacttagcatggcacccaactgagaattcaattgcttgtgctgctgcaaatagcttatacatgtactatgcttaaggcagatagatgattgcacagcatgtatttgctttcgttgacctgtttttaggttgctgtggagaaggcttcttta

SEQ ID NO: 49106 - DNA, 254 bp, Glycine max
aatgagacttcctattgttcttagagatttgaagtctccaaatcttttggttgatgattcatacactgttaaggtatgtgattttggcctttcacgtacaatggcaaacacatttctttcatctaaaaccgctaccggaactcctgaatggaggcacctgaagtcattcgaggagaactgtcaagcgacaaatgtgatgtattcagctttggtgtaatcttgtgggaactagtgaccctgcaacagccatggag

SEQ ID NO: 49107 - DNA, 231 bp, Glycine max
agcaacgccgtcgtatccttgtcgacgtggcagaggggcttaactaccttcaccacggttgggaccaggttgttattcacagggacatcaaatcgagcaacattttgttggacgccgacatgagagggagattaggggactttggtttggcaagctttacacgcacggggaggttcccacaacaaacgtttgttgggaaccttgggcacttggcggcggatctggccacgg

SEQ ID NO: 49108 - DNA, 245 bp, Glycine max
acggatgaagtatgaggggagtgctgctgggtctggtaaggtgtatgtgtatgatggggtgtataggattgttgattgctggtttgatgtggggaggtcgggttttggggtttataagtttaagctttggaggattgatgggcaggctaagatgggtagtgctattttgaaggaagctaggaatgttaggaggagtgagctggatttgaatcccacatctgctgatatggctaacaggaaggaga

SEQ ID NO: 49109 - DNA, 242 bp, Glycine max
caagaataggggatatgatgatgagtatgtttttgatacaagccgtatttacgatacattcaaatggaattatgaacctagcttattgatagaaataagctcaaatgtctctagtgaggattatgatataccgtctcctctaattatcagttctaagaaatttggaaatgtggctagatacatgaatcatagttgctccccaaatgttttctggcagccagtcttgtatgcagaaaataatc

SEQ ID NO: 49110 - DNA, 256 bp, Glycine max
ttcggcgcgagctaccaggccttcaccatgtaatccgcattggtgatggtgaacaacttcctgcggtagtcaaaagccaggtgtctcaagaagctggatatggaagaagtttgtttgagaggctggtatcattgggacacatgaagcatctgtgtaatgttcagtatagaatgcacccatccatcagcttattcccaaataaggagtgctatgataagcaactttctgagtcccctttggtcagagaagtgagcta

SEQ ID NO: 49111 - DNA, 259 bp, Glycine max
cagttcttagattcctcaaaggccatgtctcgagattttgggtcgattagagcgaactgggtaaggaaaagggatggagactgtgctctttgagtacagatatgaagtacacatgtgttggtcggtctggcttagaaagtgctagcaacttccctctgatagccaatgtgcttgtaaacccagcagcaggagaagtggctgtctcgtcagaacagaaggtctatgatgtggtgatgaagcaggcatctttggttaagag

SEQ ID NO: 49112 - DNA, 271 bp, Glycine max
gtagcatctcaacgaacacgtgatactcttgttggttagattattcaacccctgcaatatggagactatcccatttccatctagacaaatgcatgtgaaataattccggcctacacaaatcatgaatctaaacaagttaatggatcatttgacttcataggcgtaattcactacaccagtctcaatgtctcagacaattctgacgcccttaagaactagctgagagatttcagtgcagacatggcggcagatatctgttgagaagatctgt

SEQ ID NO: 49113 - DNA, 272 bp, Glycine max
gcggattattttcgatttgtcgattaatagaagttcatcttgttcattgacatctcgtaaatatctttcgcttcgtccaagcaggatctgaagtatctgccttattgggtcgattgccttctgctgtgggttatcaacccactcttagtactgaaatgggttctttacaagaaagaatcacttctaccaaagaggggtccttaacttctattcaagcagtttatgtacccgcagacgatttaaccgatcctgcgcctgctacgacatttgca

SEQ ID NO: 49114 - DNA, 258 bp, Glycine max
gttggaatggtctgcgtgtaacaacaacagtaccaacttccaacttgaaatagatgtgctttgcaaattacagcctcactttaacattgaatcgttgagaataaaaggctataaaggaaccagatctcctgattggatggaaattcttcctactagaatatgatctgtctaaaattgcgtgattgtgacaactgtagtatgcttccttcacttggacgactttcttctctcaaagtccttaagattgcacgattgaat

SEQ ID NO: 49115 - DNA, 262 bp, Glycine max
attgagtcttggcgtggccaaagtagcagaaaataaaagtttcaaaggaagcctgatgggaattagcattggcacagtaacacaagccggaacagtcactagcacacagaaaatatggaggagtttacaagctctcgggcaatggcctttgcatactccttttccattatcctcatcgaaattcaggacaccataaaatctcctcctgcagagcacaagaccatgagaaaggccacaactttgagcatcgcagttactacag

SEQ ID NO: 49116 - DNA, 221 bp, Glycine max
gtcgtgcctctcattgttctcgccatttccaaatcatccgatcgccacaagtacgatctgtcttccatcagagtcttgtcgtcctggggatcccctctgggtaaagaactcgaagacggtgtcacagctaaattccccaacgtcaaactttgccacggatacggcatgactgaggcagagcctctgctaacaatctctttagcttttgctaaagaatcgat

SEQ ID NO: 49117 - DNA, 175 bp, Glycine max
gtcacctgaagaactttgccattggttaatactagcagacatgtatggtgtttgcaagattcgggaatattgtctagacacaattgcttgtaatttcgaaacatttgctgatactaaagaatttcgggcatgttgttgactttgcctccaccatctggagactcgtctcttggta

SEQ ID NO: 49118 - DNA, 139 bp, Glycine max
gcttttggaccatttcaagcattctggtcccaatggacagcatgtttgtatggtgtttgagtaccttggggacaatcttttgactcttattaagtactctgattatcgggggttgcctattgtcatggttaaggagatt

SEQ ID NO: 49119 - DNA, 271 bp, Glycine max
ccagcatatgtctaaggatgatttggataagaatattagaaaacttatgaatgagcttgagtgtgcaaatcggaagtgtgaaatttatcggtccaacctgctttccgttttgaaagctgttgaggatcacaagctagagttatcagttaaggtggaaaacatcaagataagcatgaaagatggcatctaaagactatggagaattaacattgaaactgataggaaaacaaattctattttggcaatccagtcgcgcatcaataatgatccc

SEQ ID NO: 49120 - DNA, 263 bp, Glycine max
  unsure (1)..(263): unsure at all n locations
gggatggaggtttttatgtatgatgagattggatttaatggggaaaagtgaaggtttggagtcatgattaagaaaggagatggaggtgatgtgtataaaggagtcgnaaaggattagaggggtgaagatgttaatgttgataagttttttgctggtttagttggaaataagtgagcactgagtggtggcagtgggaaggttgtggagagtggtgatgatgatgatatatttgtatagtatactgacgatggaggtggtggggt

SEQ ID NO: 49121 - DNA, 256 bp, Glycine max
ctattactcagcagctgcgccttatggagaaaggtgttgatatattggttgcaactcctgggcgtttggtggatattattgaaagagaaagggtttcgttgacaaagataaagtatcttgctttggatgaggctgatcgtatgttggacatgggttttgaacaccaaatacgcaagattgtggagcaaatgcagatgccctcgccaggtattaggcaaacattgttaggttaaagccacgtttcctaatgatatac

SEQ ID NO: 49122 - DNA, 274 bp, Glycine max
gtggtttccacaaagccatttagaatgcgaatcagttggcttaactctcgaagcaacagtgaattgggcccaatagattgggtaggttctggtttttacaaaacctgtggggatttcaggactggcaagcatgaaataactgaatcgttaaattccttttcacacaaggtaaggtcgacaaaaggcaccacgggagttgttcgcatctttcctaggaagggggaagtctgggctctctatagaaactggtctcctgattggaatgaaataactc

SEQ ID NO: 49123 - DNA, 274 bp, Glycine max
caagaatggcacttcgttgcttggtgatgtccctttctgttctcttcactcttggtcttgcgagagaaagccatgccagagacgaagatttttggcatgctgtttggccaaacactcccattccaagttcattgcgagatcttctaaagcctggccctgcaagtgttgaaatcgatgatcaccctatgcaaattgaagaaacacagtacccgaaaaccttcttctataaagaagaccttcatccaggcaaaacaatgaaagtacaattcagcaa

SEQ ID NO: 49124 - DNA, 270 bp, Glycine max
caagcgcatccgcggcgacaaggccaagctcaacttcccggccaccgctccgccaccctccaaaaaagtggtgtcatcatgtgagaagaagaagaagaaaagtgtgagtgcagaaaagaagagtggtgggcgagctcggaagaacgtgtacagaggaatcaggcaaaggccgtggggcaagtgggccgcggaaataagggacccacataagggcgtccgcgtctggctcggcaccttccccaccgccgaggaagccgcccgagcctacga

SEQ ID NO: 49125 - DNA, 253 bp, Glycine max
aaatgttcccagatagtgattttctgaacaaagaaattgaaattccaatccctggtttccatccctacaggctcaacctcttcaggttggtttggaggacaatatatgtaatgttgagcactgtaatatcaatgctcctcccattcttcaatgacataggtggacttcttggagcatttggattttggcccttacagtgtatttcccagtggagatgtacattattcaaaagagaataccaaagtggagcaca

SEQ ID NO: 49126 - DNA, 248 bp, Glycine max
gaagaggcaaaaaaagaagaaaattgatgttgttattgttgatactgctggtaggctgcagattgacaagacaatgatggatgagttaaaagaagtgaaaaaggcattgaatccaacagaagtgttgctagttgtggatgcaatgacagggcaagaagccgcagcgttggtgactactttcaatcttgagattggaataacaggtgccatcttgacaaagcttgatggcgattcaagaggtggagcag

SEQ ID NO: 49127 - DNA, 253 bp, Glycine max
caaaattttatatattataatgcgtggcctgtgtatacctgtgcaattactatccgatggctaatttaaacaggtaaatgacgtagcagtggaagtgctagaaggtgatcctagaaatgttctttgcgaggcagtggaaaagcaccaagcttcaatgttggttgtgggtagtcatggttatgggacttaaaaaggtacaaattcattaattttggtcctagtaattatgtttatgttgctttgtaatgatata

SEQ ID NO: 49128 - DNA, 241 bp, Glycine max
ggaacgcttctccgtccccctcgacgccgtcacctcctttctcctcctcttcaacttcgccgtcgtcggagtcctctccgtctttgccggcggcggcctcccgatcctgctccgccagtgctacacggtctgcctcggcatcatcgttgccgcgtggttcaccaagcttcccgagtggaccacgtggacggtcctcgtcgcgctcgcgctctacgacctggtagccgtcctcgctcccggc

SEQ ID NO: 49129 - DNA, 239 bp, Glycine max
cacgaagatcattgacacatacttcctgggatatttccaactccagggaatatgaccgccggggatggcatccagtgacttacaagtactcagacgctacacctatgcttctaaactttatcaaggaaatagataatatttattttgaaaccgaataccgaagagaatggtgcagcacaagggtaaaccatccacttgcttcctttttgcaagaaaattcactcggactgctgctttaa

SEQ ID NO: 49130 - DNA, 243 bp, Glycine max
aggatggatgtaagtatatttgcatctgagaatagggtacatgagggtacgagaagcgcaatttgcatcggctacatcgcgggatatagagtggcagcaatcgctcaggcttgaactcccacttatgctttggtgagggaatccacactctctgactgctccaaggcacaactcgtccacaatgttgaggctttgggcgttaatttggtccgcggggatctgtacgatcatgagaagttggtg

SEQ ID NO: 49131 - DNA, 267 bp, Glycine max
atttcagagtttcaatctagagtcaccagagataaacagcaacatgtgtattattaatcaggaagctatcaagcagttgcagtcccttatggaaaacttggatgagcaacagaaaacacattccagattatgcaccggggctatccaacagaaacattagtacggtttctcaaagcaagggatgggaatgttgtcaaagcacataaaatgttaattgattgtttacaatggagagtggaaaatgagattgataatgttttatcgaag

SEQ ID NO: 49132 - DNA, 265 bp, Glycine max
aaggatgtcaagaataatgtgtcaaaagggaagaaacgaaagcatgatgcgggagttgagaagggcagcgggactgttgaaaagcttgtcaagattcaaattcctgcaacataaagaaacaacttgttgatgattgggactctgttactcagcaagataagcttgtaaaacttccccgttcaccaactgttgatgaaattctgacaaagtaccttgaatacaaatcaaagaaggatggcattgctcctgattcaataggagaaat

SEQ ID NO: 49133 - DNA, 265 bp, Glycine max
gttcaatagtcatttgatcacaatttttagtagtccaaatctagagactatatgactgtttttcatggtttccagaggatggtagtctctgcgatcatggaggtgactactatggatccatattagaaacaggccttctgtcctctggaaaccatgaaaaacagtcatatagtctctagatttggaccactaaaaattgtgttcaatagtcatttgatctaaaaatttatatttgcaaggtgatgtttagttaggaatttctaag

SEQ ID NO: 49134 - DNA, 264 bp, Glycine max
agtggggctgcttttgggttcccaccatcaatagatctaaacaactgaacattccatgtctcatgatcttctagaaatgttactggccgatgttcagttgtgtagatctatgatggtggggctgcttttgggttcccagagactcctgaagatgctgccagagctggtcttattagtgggaaggataatatcattgatcgtagttctcaagatgcttatattaatgctattcgacgtgcagagaactgcatctatattgaaaat

SEQ ID NO: 49135 - DNA, 258 bp, Glycine max
aagagaatggctcccaagggtttaatctttttggctgtgttatgcttctcagcactgtcactgagtcattgtcttgcggtggataatggacttgtgatgaacttcacaaggaatcatgccctcaggctgaagacatcatcaaagaacaagtcaagcttctctacaagcgccacaagaacactgctttctcctggctcagaaacatcttccatgactgtgctgttcagaggtgtgatgcttcactggtgctggactcca

SEQ ID NO: 49136 - DNA, 227 bp, Glycine max
cttcactcccctttcccattcttcctcctcctcttttctctctctctctctctggagtgaaagtactatttaattgatcatggatatatcatatattcttctacaatatagatatcacataaccatagcaatagtagtttcactatcattttctttgttgttatatgctgctccacactttctgaccattctcgcctatttttggcctttgtttgcttccactactg

SEQ ID NO: 49137 - DNA, 230 bp, Glycine max
tcgagccgaatcggctcgagtggagaaaacagtggtgggctatcccaatgacgatgaaccctttggtaacttcccatcatgcaacaaatcctagtaatcctagtaataatactaataataatgaaaacacaaactgtctcttcattcccaactgcagtaacagttctggaactccttctatcatgctccacaacaacaacactgatgatgataacaacaaaaccagcact

SEQ ID NO: 49138 - DNA, 244 bp, Glycine max
tgctcttcaatgtttcacgcgtagagactcatgactggctggctacctgaacaaagcaaaacgaaatccggaaggttcagatttcaatgtgctttgttcaggtagccagccagtcatggtgctcttcaatgtttcacgcgtagagaccactcccttcgatggccagaagcctggaacctctggtctcgcgcaagaaggtgaaagtgttcgtgccacctcattacctccataactttgttcagtc

SEQ ID NO: 49139 - DNA, 236 bp, Glycine max
gtgaagtagcaaataccaagttgtttcaagttaagccttattacagttagtaccaaatatgggacacacatggttgggttcattagtgatttttatgacaatttcggccgtacaagcccaactcaaaactgggttttactcctcttcgtgcccaaacgcagaagccacagttcgatccactgttgaatcctacttcaataaagatcctacaattgctcctggcctgctccgacttc

SEQ ID NO: 49140 - DNA, 246 bp, Glycine max
tggccaaggtggaacatttgcgctttattccttgctttgccgacatgcaaagataaaaaccattcctaaccagcatcgaactgatgaagagctaacgacgtatagttcggtctacgttgcatgaaaggtcgtttgcggcaaaaaccagaagtggtttgggaacaagaatcttcgagagagcattttattctggccttgttagcaccgcatggttattagaaacggattcttacccggctatatcgt

SEQ ID NO: 49141 - DNA, 259 bp, Glycine max
tgggtgacaaactcattgggcttgtgacttcaagagaagatattccagatctgctcaaggcaagtaaaattcctaaaatttattagtctgaaatgattttccactaatcatactttgccacagcttgatgacgtgatagatcttgtggtccccagaggcagtaataagcttgtctctcaaatcaagggtacaacaaagattcctgttcttggtcatgctgatggaatatgtcatgtatatgtagacaaaacagctaata

SEQ ID NO: 49142 - DNA, 253 bp, Glycine max
agcatatgaagctttagaaaaccgtgcccaggccagaatgtggtataaagctgctataaaagcggatcctttatgctatgaggctttggaatgccttattgagaatcacatgcttacatgtgaggaagaagcaaatttgatctcatcattgcaatttggtagtgaggatggatggctctcttcattttattcttgtttgataaagaagtatgacaaagaaaatattgtagtagccaagttcagagatcttgag

SEQ ID NO: 49143 - DNA, 254 bp, Glycine max
cttgtgggagttaactaccacaagaattccctggcaaggtttgaacccaatgcaggttgttggagctgttggatttcaaaataaccggcttgaaattccagaagatgtcaatccagtagtagcacagataatacgtgattgctggcaaacggagccacacttgcggccatcattctcacaactgatgtctcgtctttaccgtcttcaaaatttgattgtcccaaaaacgggtgcaacacattaaaccaagttgt

SEQ ID NO: 49144 - DNA, 261 bp, Glycine max
gtgcggacagcaacagcaacagaagcatcgttcaagtatgacagtgtgactaggattccttctagcttggactggaggaaaagaggtgctgttactccaatcaaggaccaaggaacatgtcgaagttgttgggcattttcaactgtggctacaattgagggtctccatcaaataactaaaggtgaattagtgtctctatcagagcatgaactagttgattgtgttaaaggtgacagcgaaggatgctatggtggatatgtg

SEQ ID NO: 49145 - DNA, 262 bp, Glycine max
gtcactttcaatttatggttagctgcttgtgcctcacagaatgatgttgaaactgcagaaagagttctgcttgagttaaagaaggcaaaaatagatccggactgggtaacatacagtacattgaccaatttatacataaaaaatgctagccttgaaaaagctggagctactgttaaagaaatggagaacagaacctcgaggaaaactcgagttgcatattcctctcttcttagcttgcatacaaacatggggaacaaagatg

SEQ ID NO: 49146 - DNA, 265 bp, Glycine max
caagttatacagatcatcaaaaaacaccaatcagcggatactgtttgatattgacccttctggaaagtatcttggtacaggtggccaggatggtttagtacatatatataatctccaaactgggcagtgggtgtcaagtttcgaggctgctttagacacagttaatggtttctcattccatccatttctaccccatgctgtatcatcctcaggccaccgaagatttgtaattccagatgatggcaatgaagaattttgcttgact

SEQ ID NO: 49147 - DNA, 258 bp, Glycine max
gttggtattgcagtaattaagaatttcacagttgttgtgactagtaacgctttggagattcggttatattgggctgggagaggaaccacttctattccatttagatcagtttatggtcctcttatatcagctatatctgtagatcctaactttgtacccccatcagagggtggtactatcagcatatccatagtattggttgtggttgtagttgtggttgcttgagcaattatcatcttgatatttggtatattgtgg

SEQ ID NO: 49148 - DNA, 274 bp, Glycine max
gaacctcttaactggtccaattccatggtcatttgggtgcttgaagaaagtggagcagcttaacctagctaggaacttcttgtacggacaggttccggaagtggtgtgtgcgttggggaatttggcgaacttttcgttgtcttataattattttactaaagtgggaccattgtgtaagatgctgattcaaaggggtgttcttgatgtgaggaagaactgcattttcgggcttccggatcagagatcggtgagggagtgcatggcattctttttg

SEQ ID NO: 49149 - DNA, 266 bp, Glycine max
acgcatcggtgacagtccagaattgggaaggaaggggttattcagtcgtgaatgttcagtgcaaagatcgaaccaagctattatttgacattgtatgcaatttgacagacatggaatatgttgtattccatgcaactattaacactgatggtgaccgagcttacttggaattttatataagacacaaggatgggactccaattagttcagaaccagaacgtcaacgtgtaattcaatgcttaaaagctgctgtagagagaagggca

SEQ ID NO: 49150 - DNA, 266 bp, Glycine max
tcatttgataagtctgttgctcatgtttttaaggagtttgggtatggtatggaggatgttgttaaggggaatttggaggttaagcatccctgcttgcaaatcgggtacaaggagaggtattcgtgctcacattgttcttctgctgtgaagaaaggaggggagagtctgatggttgagggaaatgggaatgtggtggggaagaaggagggaggatcaaggactgtggtgacgcttgttggcgccccaaattggttgaagtgtagcac

SEQ ID NO: 49151 - DNA, 268 bp, Glycine max
cgaaggaacattttccatgtttggaagcaaaaagatgcactcgcagcagaacgactttctattacacaattggctggttgatattcatggaagatagccctgtgaaatttaaatcttcaatggatccactccagcaggtttttctcagtttggaatcaactcctgatgcagtatttcgaacagatgctgtaaggtatgcacttgttggtttgatgagggaccttagaggaattgcaatggccacaaacagccgtcgaacgtatggatt

SEQ ID NO: 49152 - DNA, 240 bp, Glycine max
ctcttctctaatttgcttgttggaaaggaattgaaatgggtgcacttaactacatcatctccaacttttgcacagttcccagcaaaaagatcaaaacaatgcagacagttgagatcaaagtcaaaatggactgtgatggctgtgaacgaaaagtcagaaatgcagtggctacaatcaaaggagtgaaatctgtggagataaacagaaagctaagcagggtgacagtgaatggttgcgttg

SEQ ID NO: 49153 - DNA, 230 bp, Glycine max
gtactcatgagattcctcaagcattcctgtctggaccggacacaaacctccgaagggtaaccgagttggttgtatttatcttaaatcacattacttctgcagccgatgccgaattctttgacttgtcccttagacggcataaccaacctccagaaaaagtaaacagaggcatgatattggcacctctagtagggattctcttaaatttattggatgctacaaattcagca

SEQ ID NO: 49154 - DNA, 232 bp, Glycine max
aaaaaagaacagagagagaagaatgaaatctatctatcttcttatccgaagtctgggaggccaataggaagcacgccagctgctacgaatggtgaataaaagacaaaagaaacaaactgctacatagcatacagtctgtcttctcttctcttctccggttatggcgtccgccttgggcacttcttcaattgcggttctgccttcgcgctacttctcttcttcttcttccaag

SEQ ID NO: 49155 - DNA, 223 bp, Glycine max
ggatcatttgcttttttgcttccagttttgtccataatcaatgattacacagacaggacattcccttctgagcatgagaggtttatctacacaatcagaacaattcaaggatcccttattgtttcttctttcgtcaatatcttccttgggtttagtaagacgtggggaaatttgacaaggttgtttagtcccataatcatggctcactttggtatgtgtggcg

SEQ ID NO: 49156 - DNA, 256 bp, Glycine max
ttaacatatacaaattctctgtgttgtgttgtgtacttgtgttaattgtgttgttgttgtaggaaatttaagtgaagagagaatgatgatgaagtctgctatgtgtgcattggtgcttgtggcactggttgtggttgaagtggggcccatggctgaggctgcggtgacttgcaacccaacacagttgactccttgtcttccggcaattaattcaggttctgcaccttcgagtgcttgttgccagaagctgaaggag

SEQ ID NO: 49157 - DNA, 243 bp, Glycine max
gtttgatgatttcattgcagatgcactgcgaggtactggattctatcagaaagcaacactggaagcttaagcagatagaacttgcagattgtgaaatatatgcttcttgtgaaccttgccccatgtgccttggtgcaatccacctttctcgaataaagaggttggtttatggagcgaaggctgaggcagcaattgctattgggtttgatgatttcatagcagatgcactgcgaggtactggat

SEQ ID NO: 49158 - DNA, 243 bp, Glycine max
gaggaaagtccaagaccgaatctaagagagccgatcccaaacttgctgtgaataagaagggagccgccagcaaggctaggaaacccgccggcaaggggaaggcagcgaaagaccctaacaagccaaagaggcctccaagtgctttcttcgttttcatggaggagttcaggaaggtattcaacaaagaacatcctgaaaacaaagcagtgtctgctgtgggcaaagctgctggagcaaaatgga

SEQ ID NO: 49159 - DNA, 219 bp, Glycine max
  unsure (1)..(219): unsure at all n locations
ccttcttcttcttctcttaaaagttatgaagagcttttgctttgctttctgcgcgcttttcccaattaagtagttctcccttntctcaaagcagaaaaaatgttcatcgagagtttcacggttgagagtccttacgtgaagtacacagagactgagattcagtccgtgtagaactatgaaaccactgaacttgttcacgagaacaataatggcacttat

SEQ ID NO: 49160 - DNA, 155 bp, Glycine max
aattgacgttgttcctttgttttctttgtatttcagatatatgcagtatctattactatccgtatagtgtttggcttcatgttcatagcactgatatggaaatttgacttctctcctggtatggtcttgatcagtgctattctgaatgatggaac

SEQ ID NO: 49161 - DNA, 200 bp, Glycine max
agaatctgttctggctgtaatgctgatattggccatggaagatttttgagttgcatgggatgttattggcatccagaatgcttttgttgccatgcttgcaaacttccaatcactgattattttcgttctatgtctggaaatcgtcgttatcataaatcctgctataaggagttgcatcatccaagatgtgatgtttgcaa

SEQ ID NO: 49162 - DNA, 267 bp, Glycine max
aaacattgataaaaattctttagaggacttttccactgagtgcccacgtgttgtagtaaatcctaagtcatcaccctttgggtttaagggaactgaggttcctcgggaagcattacaaaatatcatattggatgatgaagttgtcaaggacattgatcccagaacatggacaatgcatgggtttgcattgaagcccatctctccatcttcaagttccactgaattatcagtagccgaaaaattcagacttgcatttgtggaaaggga

SEQ ID NO: 49163 - DNA, 258 bp, Glycine max
ctcatggtgttagcatgagtcccatcaaaggtacacaatccaatttgtgagcagatcttttttggctttgatgggactcacggtgttagcatgggtatcgagagtgtggtggataagaatgaaaaaaaatcatctggtggcattcgggatgctggttgtactgcatgtgagatggctgttatttggatgcagaaccagctgaggcagaatcagacagaagataggataatagactatgccaatgagctttgtgaaaaa

SEQ ID NO: 49164 - DNA, 258 bp, Glycine max
cgacgccggttcgcggttcgagaccgaggagaccaacggcaccgcacacttcctcgagcacatgatctttaagggcaccgagaggcgcaacgccgtgagctcgaggaagagattgagaacatgggaggacacctcaacgcctacacctcaagggagcaaaccacctactacgccaaggtcaccgacaaggacgtcccccaggccctcgacatccgcgccgacatcctccagaactcccgattcgaggaaactcgcatc

SEQ ID NO: 49165 - DNA, 257 bp, Glycine max
ctccttcaccgtcgctctctccaacgatcacaacaacatcgtcatcccatggcaaacgccgcatctggtatggcagtccatgatgactgcaagttaaggtttttggagctgaagacaaagaggacacaccgtttcatagtttttaagattgaggagcagcagaagcaggtcattgtggagaagcttggtgagccagcccaaggctatgaagatttcactgccagccttcctgctgatgagtgccgttatgctgttta

SEQ ID NO: 49166 - DNA, 253 bp, Glycine max
tgcttctgtttgattccttggcagaaacatagatgcaccatcatctgagacatagcagctgactttgtctcagatgatggtgcatctatgcatctgtttgattccttggcagaaactgctgaatttgcaagaagatgggttcccttttgcaagaagtataacattgagccaagggctcctgagttttacttttctcagaaaattgattacttgaaggataaggtgcagcctacatttgtgaaggaaagaaggg

SEQ ID NO: 49167 - DNA, 250 bp, Glycine max
tggaaaggccttgagagccacagcatgtgctacatcatgtgcattggcagcacacaaattgcggcgcccagtcaggatgtatctaaatcgaaagacagatatgataatggctggaggaaggcatcccctgaaaacaacttacagtggtgggtttcaagaatgatgggaagattacagcattagatcttaagatattggtcaatgcagggatatatgtggatgttagtccaataataccacgcaacatgat

SEQ ID NO: 49168 - DNA, 247 bp, Glycine max
gcattgcgtaatggctctgattttccctatgtatctcgggatggtggcaggttaattgaagctaaagatgtagtatttgaatgtggtcccaaatgtggttgtggtcctggttgtgtgaaccgaacgtctcaaagaggacttagatatcgtctggaggttttccgtactgccaaaaaaggatgggctgttagatcctgggattttataccttctggagcaccagtttgtgagtacaccggaatacttg

SEQ ID NO: 49169 - DNA, 248 bp, Glycine max
agcgagttttccgaagaagaggaaatccggtgcatggcgaactgcaagcacattttccactgcgcgtgcgtggaccgttggatcgatcacgatcagaagacgtgtccgctgtgcagaagtacgttggtgccacatcagaagctcgaagaatacaaccagcgactatgggcggcttctggagtttcgccgttttattaccaagacgattacacggcttccctctgaatttttctttttctttttccact

SEQ ID NO: 49170 - DNA, 247 bp, Glycine max
ctttctttacctacttggacgggaatgtaaatgtactttggttagcacctaataatgttattgattactattttgcactttctttgttttagactgcagtggcagtaggagtggagcctagtcctaagttgccttacaatgaatattatgaatattttggcccggactataatctccatgtgaacccatccccatgggaaactctaaccacacccagggatctggaaaaaattcggaatacattact

SEQ ID NO: 49171 - DNA, 248 bp, Glycine max
ccgatacaagaaaatggcgtatttctggtctgatttggcaaatcatagcaatgtggccaatgcacttggggtgcttttcttctacattttttacaggactgtggtgcttagttataggaagcagaagaaggactatgaggacaggcttaagattgagagggccgatgccgaggagaggaggaagatgagggctttggagagggagatggagggaattgcaggtgatgatgaggcgggttagcagggga

SEQ ID NO: 49172 - DNA, 258 bp, Glycine max
atcaaatttgcaacaaataacttctctgatgcaaataagcttggtcaaggtggattcggaattgtttataagggtacgctctctgatggacaagaaattgcaattaaaagattgtctatcaattctaaccaaggagaaacagaatttaagactgaaatttcgctaacaggaaagcttcagcaccgaaacttagttagactacttggcttctgttttgcaaaaagagaaagattattgatatatgagttcgttcccaat

SEQ ID NO: 49173 - DNA, 254 bp, Glycine max
ctctttcttcctcttcctcagtagtgattttcgattctcttctctgcaactatgcctaaccctaaggtcttcttcgacatgaccatcggcggtcaacctgccggccgcatcgtgatggagctctacgccgacgtgactccgagcaccgccgagaacttccgcgcgctctgcaccggcgagaagggcgccgggcggagcggcaagcccctccactacaaaggctcgtccttccaccgcgtgatcccgaacttcat

SEQ ID NO: 49174 - DNA, 266 bp, Glycine max
gaaataagagcggatgtttagaattgtggaagcgaaaaaagcccgggaccggatggtttaaatttcaaatttattaaacagttttgggagatgttaaagcccaaaatcagccgattcattgctgaatttcatgctaatagggtattttcaaggggcaccaatgcatctttcattgctttgatcccaaaggtgaaggatccacatcatcttaatgaatatagacctatctcattaataggctgtgtttataagattgtggctaaact

SEQ ID NO: 49175 - DNA, 257 bp, Glycine max
gtgttcactagtgatagtgaggtgttacaattgaccatggcagtgttacctataattggactgtgtgagttagccaattgtccacaaaccacaagctgtggaatcctcagaggaagtgctaggcctggtgttggggctgttataaacttttgctcattttatttggtaggagcaccagtggctattgtatttgccttttatcggaaacttcggatggtgggcctttggtatgggttgctggcagcacagatcgcatg

SEQ ID NO: 49176 - DNA, 251 bp, Glycine max
agacgaggttgcataactgaactagcaaagcaaccctatgtcgaaggtggtttgtgtcaccggagccagtggcgccgttggatcattggtggccctcctcctcctccagcgtggttatacggtccatgccaccgtccaagacatcaaggatgaaaatgagacgaaacatttggaggaaatggaaggagcaaagagtcgtctccatttttttgaaatggatcttcttgacatcgactccattgccgctgcca

SEQ ID NO: 49177 - DNA, 253 bp, Glycine max
caaggatgtaaaagtacctctggatattctaatattcaagctcatgaaggcatatatgcgttcctcatctctacgaaaagcagctttaagggctctgtctaagatgttaactgttgatgagctattttatttgagggagcagtttgcacttttagagccaagcaaaaatggcactattagcttggaaaatatcaaagcggtcttgatggtaaatgcaacagatgctatgaaggagtcacgccatactgacttt

SEQ ID NO: 49178 - DNA, 248 bp, Glycine max
atggataaagacaaaagttcaatgtcttgggtatgcatgaatttgacagtgacaggaagagaatgtcagttatattggggtaccctgacaattcagtgaaagtttttgtcaaaggagcagacacatccatgcttaatgtgatagacaggtcattcaaaatggacttagtaagagccactgaagcacatcttcactcttactcttccatgggtttgaggacacttgttattggtatgagagacttgaat

SEQ ID NO: 49179 - DNA, 264 bp, Glycine max
gtgatgatgacacatggcaatgtcttagctgcactctctgctgtgatgaccattgttcctgacattgggacaaaggctatatatcttgcatacttaccgatggctcatatcttagaattagcagctgagaatttgatggcagctgttggggttcctataggatatggatctcctctgacctttactgatacttcaaacaagatttcaaaaggaacaaagggggatgctactgcactgaggccaactttaatggcagctgtgcca

SEQ ID NO: 49180 - DNA, 266 bp, Glycine max
ctcgagccgcatcggctcgagagttcttctctatgccactcaatgcgaaggatacagcagagtaccccaagccatttgggactggtagctagagtattggacacaatggggatgttggttaggttgagtaccttcttctcaacaccaatcacgaacacaacttctctttctatggcaaaaatgctgaacaatctaggtgtctattatacagttacatgtcttctgtgagaactatggcatgcgagattcttgagttgctggcagaa

SEQ ID NO: 49181 - DNA, 264 bp, Glycine max
ccaagaactcgatgattacttcaacactcctggggttgcgacccgggtccctcactttggttccaccaactctcttctctatctcaatcctcgtctcaagcatatcaccggatacatggcacccctggtagattcattacaaaagcttggctacgctgatggtgagactctgttgtggagccccttatgactttagatatggtctagctgctgaaggtcacccttcacaagtgggttccacgttcctcaaagatctaaagaatt

SEQ ID NO: 49182 - DNA, 159 bp, Glycine max
cagcgttggatctgttctcgtctccgctctcatgcttggcgtcgccgtcgtctgcctccacggcgcgttccgcgtgccggaggatctgtttcttgacgaccaggacaactctcaggccaccggattcctctccttcctccgcggccctgccgcgtcggc

SEQ ID NO: 49183 - DNA, 251 bp, Glycine max
gctgactggcggaacatcaaacagcaacataatcctcaactgggaaaatttctctgcacgacatgtctgatgaacgagcagtgcatcctgattgccggaatgctagtaacccttatcatgaatgtagtgattactgttttagagtaatagctgaagccaaaattaggtcacaacaacaggaatcagaagttggacaagctagtggtggaaacaactctaagcgagcgatcccagatgattcctatgtggaa

SEQ ID NO: 49184 - DNA, 251 bp, Glycine max
gtgcgagagcttatataccgagagattctggagtaccatccgaagatgttaaaagaacatctagagggagccgagccaacaggattcatgtatccaagtgcggtggatcacttcaagaagcaatttgcatatcttgaggagcattatggaaaaggtggaactgttactccacccgagaggcaacatgcatcattacccaggtcatgtgtgttgtattcagataactcaggaccaaatatggctgaggttgc

SEQ ID NO: 49185 - DNA, 254 bp, Glycine max
ctaatcttgataacccaccctacaaaattaacaatggtgaagttcaacaatccattaattacagaacagtcccagcaacatctttacactttggtaatatcactgagtataatgcccacaatttgtatggactactagaatccaaagtcactaacaaggcattggtggatataactggtaaaaggccattcatcctaagtagatcaacttttgtaagttctggtaagtatgcgtctcactggacaggagataat

SEQ ID NO: 49186 - DNA, 250 bp, Glycine max
caaatctttgtcaagactttgaccgggaagaccatcacccttgaggtggaatcctcggacaccattgataatgttaaggccaagatccaggacaaagagggcatccccccagatcagcagaggctgatttttgccggtaaacaacttgaggatggaagaacccttgctgattacaacattcagaaggaatccacccttcacttggtgcttcgtttgagaggtggtatgcagattttcgttaaaactttga

SEQ ID NO: 49187 - DNA, 249 bp, Glycine max
tcattgggtactgcaggcagcattgataccataaagcctctcctcgtggccctgtctttccatcaattttttgagggtatggggcttggtggttgcatatctcaggcaaagtttgagtccaagtctatggcaattatggcaacctttttctcactgacaaccccaattgggatagcaattggaatgggggtgtcaagtgtgttcaaagagaatagccctactgctttaactgttgaagggattttcaat

SEQ ID NO: 49188 - DNA, 231 bp, Glycine max
ctcgagccggggggaattcaacctcgatgatgttgaagttgccttaaaggattctgaggagatcagttgccggggaaaaaggaggagcagcctacagccatgaatgcatttgagttaatctcaatgtcaaaaggattgaaccttgaaaccttgtttgatactgacaggggttttaaaggggacacaggtttcccctaaatatcctgtggggatgagatactcaacaagttt

SEQ ID NO: 49189 - DNA, 258 bp, Glycine max
cggctcgagccgcccaaatcaataccacaatgggttttcatttgcctggtatcagaaaggcattgtttgcagtgaatcaagcatcttcaaaagccattcatgtgccaaagggctatcttgcagtatatgtcgggagaacatgaagaggtttgtgatccctgtgtcatacttgaaccaaccttccttccaagacttgttgagtcaagctgaggaagaatttgggtatgatcatcccatgggtggccttgcaattcctta

SEQ ID NO: 49190 - DNA, 251 bp, Glycine max
acgacatttcataaaatggggagagaaaaagttattctgatagactcaatactgccttttggtttcgagctgttgatgtgtgatactgacatggaaattagaaacccccagatctctcaattgtttaaccacgtcagaataaaatccatgaatgcatagttaccaaaggtcactattacagcattatccttcaccctttgctgaaccagtttcttggtcagcctgatatcctccaaaggtggcatcttttt

SEQ ID NO: 49191 - DNA, 253 bp, Glycine max
ggacaattgatatgcactggggtgaatatcatcagaattttatagaaggtttgaacaaacagctggagaaggatgatatactgtatggttacactttggatgaactagtcaaagtgacatacaacaatgggaatcctctgcctgaattcaacaatgcagctgaggtttggaatcatgacttcatctgggaatccatgcaaccaggagggggtgatatgcccaaactaggtctccttcaacagattgaaaagga

SEQ ID NO: 49192 - DNA, 259 bp, Glycine max
gctttgctttttttaatttttaattttaatttttaatttttaatttctgtttctcttcttgcaggtgttggaacaacttagtggccaaaccccagtgttttccaaagcaaggtacactgttcgttcctttgggattagaagaaatgagaagattgcatgctatgtcactgtcagaggtgacaaggcaatgcaacttttggagagtggtttgaaggtgaaggaatatgaacttctcagaaggaacttcagtgatactggt

SEQ ID NO: 49193 - DNA, 264 bp, Glycine max
cccaaatgtattatcagctacagatactgatctttctctttctttgtcttcaaatagtaagtctcctacaacaactgtccatagcaataatgaggcacctaatagtagttgtatggggatacctcatgacaggtccctggggaagtggataccccaagatagaaaggatgagatgattttgaagctagttccaagggttcgggagctgcaaaatcagcttcaagaatggacagagtgggcaaatcagaaggttatgcaggctgc

SEQ ID NO: 49194 - DNA, 260 bp, Glycine max
tgagagtgttggtggctggtggaggaattggtggccttgtgttggctctggctgcaaagcatagagggtatgaagtgaaggtgtttgagaaggatttgagtgctgttagaggagaaggtaggcaccgtggcccaattcaactattgagtggtgctcttgctgtgttggaaaccatcgatcagagtgttgcaaggcagataatggaggctggttgtgttactgccaataggactaatggccttgctgatggtctatctggg

SEQ ID NO: 49195 - DNA, 235 bp, Glycine max
aaagaaggcgtcttcataaacgcctttcttctccgtttccgtttcctcgttcgaattcgctttttgatctgcgaaaatgagagagtgcatctcgatccacattggtcaggctggtatccaggtcggaaatgcttgctgggagctctactgcctcgagcacggcatcgggcccgatgggcaaatgccaagtgacaagacagttggcggtggtgatgatgctttcaatactttcttc

SEQ ID NO: 49196 - DNA, 218 bp, Glycine max
ccagacttttcaaatttgcctaatctggaaaagctagtgctgatagattgtccaaggttgtttgaggtctcccataccgttggacatctcaataaaattcttatgataaatttgaaagattgtattagccttcatagccttccaagaagcatctacaaattgaaatctcttaaaacactcattctctctggatgtttgaagattgacaagttggaaga

SEQ ID NO: 49197 - DNA, 257 bp, Glycine max
atacaaagcattgaattcaaaaacttaagttcattccttgtgttttgctttcttcctcaaaaccaaacatgtcgaacacatgcggcaactgcgactgcgctgacaagactagctgcacgtaagtgcttcatttcttttctgcatttgtgtgcaagacaatctttacacatatgtagttcatgttacaatcaccatatttgatcgctaaaggattaatctgtataggagtatattatgcatacagtatactgagatct

SEQ ID NO: 49198 - DNA, 259 bp, Glycine max
cagtgattcaacactgatcttgttcgtttcatttttttttcttttcctacctttttcatattccttaactttttcctgcttaattacctccacgaccattagggaagattgaaccaatgttttagattagacgctatagtttgggcaagaagaagtgttttacttaattttttccaagctattgctgatcttgggaagaaaatgaatcaggaaatgaatggggttgaggcagagagggtgaaagtgaatgtgcatgaca

SEQ ID NO: 49199 - DNA, 255 bp, Glycine max
atcccacctgaccagcagattcttatctttgcgggtaaacagcttgaggatggtcgaaccctcgccgactacaacatctagaaggaatccactctccattccgagtttcgcctcagtggtgccagttctatctgagcatagactttgtctggtccgcagatcaccctcgatgtcgaatcctcggacactattgataatgtctaggccaagatgcaagactcggaggctgtacctccagatgaaccgttgcttata

SEQ ID NO: 49200 - DNA, 273 bp, Glycine max
gaagaataggttcctagtatacgaatatatgcataatggtaacctgcaagatcatctgaatggaattggggaaagaaagatggattggcctttaagacttaaagtggcactgggagcagcaaaaggacttgcttatcttcattcagttcttgtcttggaattcctattgttcatagagatttcaaatccaccaatgttcttctagatgccaaatttgaagcaaagatatctgattttgggcttgccaaactaatgtcagaaggacaggagaca

SEQ ID NO: 49201 - DNA, 246 bp, Glycine max
gcaaaacgttcgaaatgggtcgcacactcacaactgcagcaacgtgtcttcttctctcattattattagtgtccctctgtgtgaccaccaccaccaacgccctaatgccatacacacgtagcagcaccctctgggacacgatgtctcatcagaggacccgttcagaatcctggaacacaccccattcagcgacattcccacgaccacccaaggggtggacgatctcgccctggcacgtgcggactg

SEQ ID NO: 49202 - DNA, 266 bp, Glycine max
aatacaggtcctctcggatgcttgcctcagaatattgccaaatttggaactgattcatcaaagcttgacgaactagggtgtgttagttcacacaaccaagctgctaaaacctttaacctacagctacatgctctctgactaaattgcagggccaatatccagattcaaatgtcacatacgttgatatcttcactataaaatcaaacctcatttcaaacttttctagatacgggtttgaacacctattatggcttgttgtggatacg

SEQ ID NO: 49203 - DNA, 269 bp, Glycine max
ggttcacttgagcctgttactgatggtgcaaaccttcagattttaactggttttgccaatgcatttcatgctttgcagcccctcaaagttcctgcattcagttttgcatggcttgagttgattagtcacaggagcttatgccaaaaatgttgactggtaatggtcaaaaaggttggccttatatccaaaggttgcttgtagatctgttccaatttatggagccttttctgaggcatgctgaacttggagaaccggttcgtgtcctctat

SEQ ID NO: 49204 - DNA, 238 bp, Glycine max
ttggttttcgaatacggcgaggtgtattaacagatattcctgccattctagtgttcgtttccaggaaagttcacaagcagtggctcagtccaatccagtgtctacctattgttcttaaggggcttgtgagtatggtgtgatgtggatgtggtggaattctcggatattggtgcaccagagtcagtttccaaagagcaagctgtacacagagattgtagatgacttgcggtggggcgat

SEQ ID NO: 49205 - DNA, 227 bp, Glycine max
ccgtctcttggcagcttacgtcaattgtcagaaggttggggccccgcctgaagtggtggcaaggttagaagaagcatgtgcttctgcagcgacaatggctggtggtgatgcagcagctggatcaactgcataggtgaagttccacctttggaccagtcattgaggcttactgtgagatgctcacaaagtatgagcaagaactctccaaacccctaaaggaagccatg

SEQ ID NO: 49206 - DNA, 244 bp, Glycine max
aacttgctgaatttattgatagtttcttcctttgctgaattgattttctcctatctgttgtatgttactgggcagcgcgtgctgtatgttgacattgatgttcaccatggtgatggtgttgagaggccttttacaccactgatagagtgatgacagtgtctttccataagtttggggactttttccctggcacaggacacgtcaaggacattggggtgggatcaggaaagaattatgcagtcaa

SEQ ID NO: 49207 - DNA, 231 bp, Glycine max
agagggagtcagagaaaccctaggtaagaagaaaagatgcaggctggtcatggtttgagatcccgcaccagagattccttctctcgtcctttcaggaagaaggcgagcatcgccctcaccacataccttagaagctaccacgtcggcgactatgatgacgctcaaggttaacgttgccgttcacaagggaattccccacaagattctaccatggccgaaccggacgcgtct

SEQ ID NO: 49208 - DNA, 264 bp, Glycine max
tgtttgttcattgggaaaaaggacgagatgtcttcgagaggcttctgattgattcagattgggcaattaataatggaaactggatgtggctttcttgttcatctttcttttatcagtataatcgtatttattctccaactacatttggtaagaagtatgaccctaatggcgactatattaggcattttctcccagtcttaaaagatatgcccagggagtacatttatgaaccctggacggctcctaaaagcattcagaccaaag

SEQ ID NO: 49209 - DNA, 253 bp, Glycine max
aaaaccaccacctcaacgcgtgcgtgcgttctcatagattttcgctttggtcgaaaaatctggctcggacattgcagtttaaggttagagtagatatccaaagaacaaaacttaagttaacatttgagctccagaggtcaccaacggaagaagagttagtagaaagaattgggatctcacttgaaagatatcatgaagtaatgaaggcatcaaaacccattttatcccttcattcaagacatataaccacgca

SEQ ID NO: 49210 - DNA, 262 bp, Glycine max
  unsure (1)..(262): unsure at all n locations
gggtgatgttgtttggtgccatgattaccatcttatgtttcttccacaatgcttaaagaattataaccgcaaaatgaaagttggctggtttctgcataccccgtttccatcttctgaaattcacaggacattgccatctcgctcagagnctcttcantcatntcttgcagcnganttggnttgattttacaccnacgacnatgtacgacattttgtaagagcangtacacgcantctttgacnagtgggcacaccngtaggg

SEQ ID NO: 49211 - DNA, 265 bp, Glycine max
agaaaatactctgcaaaggacaatgatgatctatgcattgtttgttgggatggtggtaatctattgctttgtgatggatgcccaagagcatttcataaagaatgtgcagctctatcaagtattccacgtggtgactggtactgccaattttgccaaaacatgttccagagagaaaagtttgtggcgcacaacgccaatgctgtggcagctggaagggttgaaggagttgatcctattgaacagattgccaatagatgcattcgca

SEQ ID NO: 49212 - DNA, 261 bp, Glycine max
gcgaaacagtaatattaggcaggaaattttgattgttaacactcacctgatatttccccatgattcaactctatcccttgtttacaagatacttcaatacgtagaatcttatcagaatgatttccaactcaagccaatgccaatcgtactttgcggtgactggaatggaagcaaacgtggacacgtctacaaagtcttgaggtctcagggcttggaacatctaatgatactgcacatcattacactgatgcagatgctcac

SEQ ID NO: 49213 - DNA, 256 bp, Glycine max
gaaaccagtggtgttacttgttggaggagcattagctcttttttggacttttgatgttttctcttgtggagacaagctactttgaagtaacaccttaaagagacttcttggcaacgaatacaagaagatcaatgacacgtgagctgtatccccactcgttgtcgtaccaagaaacaagcttcacaaagttcttattcaatgcaattccagcctttgcatcaaaaatacttgatctgctatcgccgataaagtcagt

SEQ ID NO: 49214 - DNA, 256 bp, Glycine max
gtttggcagcgacacgtatcttcatcaataatcgcagaagcagtttccggtgcatctcatcgtcttccaaaatgaacgacgcagatgtctcgaagcaaatccagcagatggtgcgtttcatccgccaggaagctgaggagaaagccaacgagatctctgtatctgccgaagaggaattcaatatcgagaagctgcagttggttgaagccgaaaagaagaagatcaggcaagaatacgaacgcaaagagcgccaagt

SEQ ID NO: 49215 - DNA, 261 bp, Glycine max
cctccccctcctccaccttcgtcctccaccgcgccttcggctcccgccaggtcttcacggcgaaccccaccgttgtccagcacattctggggaccggcttccctgtgtaccccaagggcctgactctgaatcgggcccttggagacttcctcggccagggtatcttcaactcagatggcgctggatggaaagttcagcgccaaatttccagccacgagttcaacactcgcgctctcggcaagttcgtcgagaccgtggtcg

SEQ ID NO: 49216 - DNA, 270 bp, Glycine max
gaggaagcagaaatgccacggggaggctgcaggatgctcattggatgttgatgatggaaggttcaaagtatgctgaaaggttgccaattggactagagagagtgattcggacagtttcgtccgagactgtgaagcatttttacaagaagtggtaccatttatgcaatatggcggttatagcagttggagatttttctgatgcacaggatgtagttgagttgataaagactcattttggccagaaaattcccgatcctgatcctccactta

SEQ ID NO: 49217 - DNA, 267 bp, Glycine max
ctttctccgagaacaaaaaagaaaaaaaaaaaaatccgcgattggcccttcccttggaaaagtgaaacccaaaattacgaccgaaagagaagagcgttttagaagtgagaaaagatggggttgtcgtccacgaagctgttcagcgggttttttccgaaaaaggaaatggggatcctgatggtaggccccgatcctgctggaaggacaaccatctttaaaaaccccaaccttggaaaaatcgtcacgattatccccacaatgggtttt

SEQ ID NO: 49218 - DNA, 210 bp, Glycine max
ttcagccgggcatcctgttctcctgagtcgtcagtttgcagagaggccaagaaagggcttgctgagagatgggccgtgatgtcaaatgagggttctcaaggacaaaggcatgtgcgtagaagctctaccgtgggtgagatgcttgctctttcgggtgtagggagatctgtaatatctgagcttgggggtattcatgaagaacgggagcca

SEQ ID NO: 49219 - DNA, 221 bp, Glycine max
ctttcttcttcttctgttaaaagagccgttgctttttctttaggcgtttccgaattaagtacttgtgtcattttctctcgaagcaagaaaaatgttcatcgagagtttcaaggttgagagtcctaacgtgaagtacacagagactgagattcagtccgtgtacaactatgagaccactgaacttgttcacgagagcgataatggcacttatcagtgggttt

SEQ ID NO: 49220 - DNA, 222 bp, Glycine max
actacctatgttccattgcaatgggtggaccttcacgtggggcgtggctgcacgtggtggaacaaacgtgtgccttcgcaccacagctgcacgtgacatatacaggaacatagtagtccacaatgtgacacacatgtgctgtgcccccgttgtgttcaacgtaatcttggaggcaagacaaagtcaaaggattgacataaaggtaataagtgggaagagaaa

SEQ ID NO: 49221 - DNA, 258 bp, Glycine max
ggatctcttcgttccttcgattcgttccatttcttccaaaatggccaaagacccagttcgcgttctcgtcactggagctgcagggcaaattgggtatgctcttgtccctatgattgctaggggagtgatgttgggtcctgaccagcccgtgatgagccctctgatggataatacgatggatgaacttcattcgcaaggaaaaaccattgaagacattgtacaagttctgaacaggactccaatgcatcctcgcattgt

SEQ ID NO: 49222 - DNA, 236 bp, Glycine max
gaaatgatcagcttggcagtgcacagaaacctcctcaaactgtatggattttgcatgacaccaacagaaaggcttttggtttatccttacatgtccaatggcagtgttgcttctaggctcaagggtaagccagtgttggactggggcacaaggaagcaaattgccttaggagcagcaaggggactactataccttcatgagcagtgtgatccaaagatactccatagatatgtgag

SEQ ID NO: 49223 - DNA, 130 bp, Glycine max
cagaaagctaaaacagaagaagcaaagatgatattgcagttcttcgtgctttcacagagaggcgataacatcgtctaccgcgactatcgtggtgaagctcaaaaaggaagcgctgagacatttttccgaa

SEQ ID NO: 49224 - DNA, 266 bp, Glycine max
gtcacttcaagtcacaacccaagggtgccaagcaagatgataagtcctttagtgagttccaagatatccatgcatctgccatgccagctgatccagagatacttcctcaacagctactgaagaagtacattacatatgccaagttgaatatttttccaaggttacaagatgctgatatggataaactgtcacatgtctatgccgaactgcggagggaatcttcacacggacaaggagtccctattgctgtaaggcacattgaatca

SEQ ID NO: 49225 - DNA, 260 bp, Glycine max
catctttggaattggagtttaaggctagtttttgaggagtgagtgagaaatggattctgttggaggggaagaggcaattcaagagcctacagaccatgatgagaggattcttgtttcggttcgtcttcgtccccttaatgaaaaggagcttgcaagaaatgatgtttcagattgggaatgcatcaatgacactaccatcatatacaggagcaacctttcagtactgacaggtcactctacccaacagcatattccttgac

SEQ ID NO: 49226 - DNA, 257 bp, Glycine max
tcacgcacttacaataaatattccttgaatatagaatgatccgtcaaacaattcatgcaaattatttaatttttaactgatctgttgactgttgattcaatgcagcaaacacttcttaatttgttacttcgtaactaccttcactacaacctatatgatcaggctgagaagttgaggtcgaaggctcctcgatttgaagcacattcaaaccgcagttttgtcgttatctcttctacctagggaaaattcggacaatt

SEQ ID NO: 49227 - DNA, 262 bp, Glycine max
gaaatggaaatatatcctgtgctggatgaactagcctcatctatcagtactctaaatctggaacgtgttcgaagatttaaaggtcacttgcttgctttgactcaacgagttcagaaggttcgtgatgaaatagaacatctcatggatgatgatggtgacatggctgagatgtgcctaactgagaaaaagagaagatcggatacttgcacttttaatgattgttttcaaactcgtgcatcaggtagactaatttcaaagtcgg

SEQ ID NO: 49228 - DNA, 249 bp, Glycine max
attctatttaattttatttttgttgttgttgttattactattattatgtaggctctaaccaaatgctcttttttatgttgtgatgacagaagttaacgctgatattttctaactcttaatttttttttgtcatgcatgtttgctttgttgttgttgttgttgttgttattattattattattccgaactgaggatgggtttttggagttagctcaccctcgccagatcgcaatcctttgtcccgtccat

SEQ ID NO: 49229 - DNA, 249 bp, Glycine max
ggagtcaagtatttggtgatgatgccaagttcttggttgaggtaaaatctggtcaggtagaagcaagtttgaacccagatcaagagcttagaaggttaaaacagatgtttgaagcttggaaaaaggattatggggcaagactgcgtgaaacaaaagttattataaataaacttggaagcgaagatggcgcacttgagaaaatgaagaaaaagtggtggggaagaaggaccagtacaaggataaattgat

SEQ ID NO: 49230 - DNA, 219 bp, Glycine max
gagaatacttgctggagatatgtctgctgtacgcattgctaacacaatagctatgttcaggtcccagcgtattggaatggttcaaacccaggaccagtacattttctgctataatgctatcatagagtgaactgaagaccatgctcctcagcagcaatatgagtagaagggcagggatactgtttaagttgttagaatgcgattggggttacagaaggc

SEQ ID NO: 49231 - DNA, 191 bp, Glycine max
cttgagaatcagattcaagctgttgccaaaagggaatatcaccaaggagattcaagcgatagtgatcccagatttagaatagctgatatcccagctgctgtatttggctcaagagctcatctagaggagaaagctttagctacaaggaagagggaccgcaaagtttttgaagaagggcctccagcatgtgg

SEQ ID NO: 49232 - DNA, 164 bp, Glycine max
ctccggcatctcctccacgagtcactcctccgcctgcgtctcctcgttcgaattcgctattagatctgagtcaatgagcgagtgcatctcgatccacattggtcatgctggtatccaggtcggaaatgcttgctgtgaactctactgtctcgagcacggcatcg

SEQ ID NO: 49233 - DNA, 225 bp, Glycine max
  unsure (1)..(225): unsure at all n locations
ctttaaagcatgctaaagaaggaacagaaagctcagctttctggtctgcactaggaggaaaacaaagttacaccagcaagaaagttgttaatgaggttgtcagagatccacatttgttcactttataggttaacaaaggaaagtgtcaatggagaggaggcttacaacgttncgtaggacgaccatctgtcggaggatatccntatacctgtcacacatgtagaa

SEQ ID NO: 49234 - DNA, 202 bp, Glycine max
  unsure (1)..(202): unsure at all n locations
gtaaaatctcttgactctatgaaaaaaaggcaaaattcaatcataattccaattggctctgtgcagtatggtgtatgtagacatagagctctgctttttaagtatttatgtgatcacatggagccaccagttccttgtgagcttgtcagggggtacccagaattttcaccacagtcctggaagatcaggctgacnatgaggg

SEQ ID NO: 49235 - DNA, 250 bp, Glycine max
gtcttcttcttcttgaatctctctaagctaaggtaagagatatggggaattgccaagctgtggatggtgcagtgcttgtgatccaacacccttgtgggaagatagagagattgtattggccattcactgcaagtgaggtcatgaggactaaatcctggccactatgtttctttgataataccattgcctgtgccaccacaggagcagaatcaagagaagaaactgtgcgtttcacacgcgttaagctgct

SEQ ID NO: 49236 - DNA, 255 bp, Glycine max
gtcaaatgttgcaggctacagggatgggcctagtgaggatgctaaattctcaaatgatttcgatgtggtatatgttcggcccacctgttccttgttggtcattgatagaggaaatgctgctcttcgacaaatctctcttgaccaggaggactgtgattatcagtctaattcaatttccagtacagatatacttacagttgttggtgctgttatagtaggatatgctacatgtatgcttcagcagggatttggatc

SEQ ID NO: 49237 - DNA, 252 bp, Glycine max
gatagacagagcccatgaactgggtctgcttgttctgatggatattgtacacagccatgcatcaaataatacattggatgggctgaacatgtttgatggaactgatggtcattacttccatcctgggtcacgaggttatcattggatgtgggattctcgccttttactctacggaagctgggaatttctaaggtatctactcccgaattcgagacggtggctggatgaatacaagtttgatggatttcggtt

SEQ ID NO: 49238 - DNA, 246 bp, Glycine max
gccacgtctccttccactgcatttcttcacttaacccctaaaataaatttcatcctatggttcatctccattgctattgttgctactattttcaccacctatctcttcagaataattctccattttgaagcagttcgtcgtgagtaccaacatccgatctgtgttaacttcttctttgcaccatggatagcccttttgttcctagctcttggagttcccccatcagttaccaaggacttgcatcaa

SEQ ID NO: 49239 - DNA, 256 bp, Glycine max
attctatcaagtttatgtaaatatatgctttgtcttattttgtttgcagattcgtgtatgttgaacttctggaaattcgtaaagatgtccaatgcccaatttgccttggcattattaagaagacaagaactgttcaggaatgcttgcaccgtttttgcagggaatgcattgataaatcaatgcgactagggaacaatgaatgccctgcttgtcgcacacattgtgccagtcgtcgttccttgagagacgatccaaa

SEQ ID NO: 49240 - DNA, 249 bp, Glycine max
gaatgaacttatccaattccacgtgctaccaacatttgtttcaatctcaaacttcgacactcttagcaacccggttagaacgcaagccggtgatgaccctgataggttggcattgaacataacaagctcagggaaccaagtgaacttgacaacaggtgttgttaacaccacagttggtggaagtgtttactccgatcaccagctcgcgatttatcaagtggacaaggttcttcttccgagggattcttc

SEQ ID NO: 49241 - DNA, 234 bp, Glycine max
agtgatcgctgcggcattgtatggattcattttacccttggtggagttggtgtacaaaaaaatcaaacagcctcttacttactctcttgtcatggagattcagttcgttatgtgcttctccgccactctcttttgcctccttggaatgatcatcaacaatgaacttaagggtgattcggaggaaacccaaaaaatttaagcacggagaaggaagtactaagctggttttggtgg

SEQ ID NO: 49242 - DNA, 255 bp, Glycine max
ggagtattccaagtttgcagaaaaagccacagcactgcttgaaatcctttccaactccgaagaaggacgaactgcaatctcaattgcagatggtggaatcttaacgctagtagagacagttgaagatggatcacttgtcagcacagaacacgctgttggaactctgctatcattatgtcgaagctgtcgagataaataccgggagctgattcaggaagaaggagcaattccgggtctgttacgtctgacagtgga

SEQ ID NO: 49243 - DNA, 235 bp, Glycine max
gggaaggccaggctatgagcacttgaatgaaccactgcacgttttgattgaggccgaattacctgtcaatgttgttgatataaggctgaggcaagcacaagagatcatagaagagctactcaaacccatggatgagtcacaggatctccacaaaaggcaacaactaagagaacttgctatgctgaattccaattttagagaagatagccctcaactcagtggtagtccctctaca

SEQ ID NO: 49244 - DNA, 262 bp, Glycine max
attgtattaataggttgaaggattttgggtctgctactgccatcttgctcgtcctgcttctttacctagtccaacagatttgcaccttttcaaggaaggaatccgtctctatgggaggactctgctaactgcaatggtggtaaatggattatacgattcaaaaaggttgtcactggccgtttatgtggaggacctggtaatgcaaatatggtcatctgtaacatttggtatcatccttgataaaatgtatggctatggcatg

SEQ ID NO: 49245 - DNA, 269 bp, Glycine max
ctcgagcgcgggcgatgaagaggcaatgcaagagttcattgccagaggtggaatgattggaacaaccattggtcccaaagggatggttaagggtgataaggatgagagtgactacaagaaggagctgaaggacaagaagtttgggcaagaggctcagaaactgtggatgaggatgaggagtgaggtcattgctgagcttcaggagaagggctttgatgtggaatgaatgagtgcaatgagtgctcaaaactattggtggtagtaaatat

SEQ ID NO: 49246 - DNA, 270 bp, Glycine max
caccctgcaacaagccagagatcctctctccaagcttgcttgacttcccttccctcactctcagcagcccagtcactcctttgaatgatgacccttttgacaagtcctcctcattaccttcattgggaagcacttcttcagaggaagagagagccatagctgaaaaagggttctacttgcatccctctcccatgtctactccaagagactttgagcctcagctcttgcctttgttccctgtgacttcacctagagtttctgagtcaacta

SEQ ID NO: 49247 - DNA, 263 bp, Glycine max
gaacgtgtactacaacgaagcttcctgcgggcggtttgtcccacgcgcagtgctgatggacctggagcccggaaccatggacagcgtgcggactgggccgtacgggcagatattccggcccgacaacttcgtgttcgggcagtccggcgcgggcaacaactgggccaaggggcactacacggagggcgccgagctcatcgactccgtccttgacgtcgtgcgcaaggaggccgagaactgcgactgcctccaggggttccagg

SEQ ID NO: 49248 - DNA, 262 bp, Glycine max
tttttaatagccttacaaagtacaatggtgacaaaatggttcctgttccagcatcacaggttaaacaaattgcaggaagagctggtcggagaggatgcctttaccctgatggactcgccacaaccttgcatttagatgatttggactacttgattgagtgtttgaaacaaccttttgatgatgtaaaaaaggtaggcctttttccatcttatgagcaggttgaattgttttctgggcaacttccagatttgacattcaccca

SEQ ID NO: 49249 - DNA, 262 bp, Glycine max
atttactgtgtctagcgttatgctattagcggcctataatgtacatcggaagttgcttttgtcttgctcatagatttgagtacagaagatcgctggttagtagttagttagtcgtgcgtgtattagcggtatttatgtggttgatattttgctatgattattactgaattcatcaaataacagtgacttctcaattgtgtcaactcaaataactcagtccttcccattaggtgggattggttaaatgcgcagatcgacaatt

SEQ ID NO: 49250 - DNA, 250 bp, Glycine max
tgaagatgcggttggtgaagatgtggtgggagaactaaccaagtccatggaaaaaattggcctggatatgcgcgttgctgctctagtcagtctcactctcctctcttttggatttctttattttttatagccggatttgagcatgatggtttccagtttgtgtctgacagaaatttggagttataaggttaatgataccattggaacattagctggaggcagattctacaatcaggatgtcattgctgct

SEQ ID NO: 49251 - DNA, 250 bp, Glycine max
gaagtttcaaggaaattggcagagcttggatatcaaaggagtgcaaagaagtgcaaggaaaaatttgagaacgtgtacaagtacaacaagagaaccaaagagaacaaaagtggcaaatcacatggaaaagctataaattctttgatcaattacaagccctcgagaaccaattcacagtctcttacccgccaaaaccacaacctacttctactttgactacaacaaacacattgacaagtgatcatggtaa

SEQ ID NO: 49252 - DNA, 252 bp, Glycine max
acgtaagtcgatcggctcgagggcatcaactgaccctgattgcgggtgtggcctgtggcgtgatctaacccagagagatcatcatcatcatcatcccctcacgcgccagggcctccgtggactgctccaacctggtctcaccatggccgattgcttgtccttcgtcaccaacggcagcaccatcacaaagccagagggcacatgctgctctggtttgaagtctgttctcaaaaccgctccggcgtgtctctg

SEQ ID NO: 49253 - DNA, 243 bp, Glycine max
cataaaatttggtagaattcttatcatatatctaaggaatgtgtatgaaattgcaggcccttcttttcctgttagcccttattgttagggctgcaaataggccagcagattatgatagtgatgaggagttcattaatccaaggcagcaagtacaacagccattgctcaacagactaccagcaggcccagcaacagggataccggttgctggaacaattgaccagcgtccaagcagaatgatgc

SEQ ID NO: 49254 - DNA, 238 bp, Glycine max
ccgtgggtgcttctggtgcattatttggcttactaggaggcatgctatcggagctcttgataaattggacaatatatgccaataagtttgcagcgttattgactcttatagtcatcgttgtaatcaatttagccattggagttcttccacatgtggacaattttgctcatattggaggatttgtctctggcttttttcttgggtttatctttctgattcgcccccagttcaaatgggt

SEQ ID NO: 49255 - DNA, 242 bp, Glycine max
ctcgagcgttcaaattggctatagtttgaaagttctgcagcagatctagtcatagaaatcagttgtagattgtagaaatcaattcattcttacatacattacattacagtacaaaagaatcaaatggaagaaagatgatcatccctgttcgttgtttcacctgcggaaaggtcattggaaacaaatgggatacctatttagaccttctgcagtcagattacagtgaaggagatgccctggat

SEQ ID NO: 49256 - DNA, 244 bp, Glycine max
agactcgatccgtgcgccgtcacgcaacagggatggccttcgtcgctgatggccgtcgccaccgaaccatcggtgactggactcctcgtcgcgccaacaccttcgagaagctcgctaagattgggcaagggacgtatagtaatgtgtataaggcaagggaccttgtgacggggaagatagtggcattgaagaaagtgagatttgataatttggagccagagagtgtgaagttcatggcaagaga

SEQ ID NO: 49257 - DNA, 206 bp, Glycine max
cggaagacaagatttgtgatctctatgacctttttgttgatgggttagatgaaaatgctggtccgcaaatcagaaagttgtatgctgagcttgcggaattatggccaaatggttacatggacaaccatgggatcaagcgtgcaatttgcaggtcaaaagaaaggcgcagagcactgtacaacagacataaggatcaggagaaaatt

SEQ ID NO: 49258 - DNA, 275 bp, Glycine max
cgcaacgttcagaaaccaaatcgtgttatccttttccatgacttaacaacaggtttgagtcctcattacccgcctctctctggaaaccagcaaaaccacctttctctactatctatcggttccttttgtactctgagtgggtagaagacatggtgaggctcactgctgacttgatctggaaaagccctcatttcttcaacgcgattaaagagcgtgagttagatcttcgaggcaacaagatagctgtaattgagaacttgggtgctactgaggac

SEQ ID NO: 49259 - DNA, 275 bp, Glycine max
ctcgagccgttagtgaggatccacttactgtaaaagtcgatcatctcaaggataaaacttacaacaaagacgatgatattataaaggccacatctttcgaggttatatcaaccctaagagctgttcttaaaacaagttccctttggagagatcatgttcagacttacactaagcatataggtgattttacttatccaaggcttgcagattttggtgctgcaatatctggggcaaataaattgcaatgccaacaagttcttgaagagctagatgtg

SEQ ID NO: 49260 - DNA, 269 bp, Glycine max
cgttgatgctctaatgcagatatcaggcatcttgaattgattcacgccagatgggcaatgcttggtgctgctggattcatcattcccgaggccttcaacaaatatggagcaaactgcggtcctgaggctgtttggttcaaggtttgcaagctcttataacaactttcactgtgtcaagttcactaatacattatttttttatgacactcaacaaatgaaattcaatagatcttacaagtgctaatgaaagactcttcagtttctcttct

SEQ ID NO: 49261 - DNA, 258 bp, Glycine max
gtcgagcccagaggtagacacgaccatggtattagcagagctcgggtcccgattacaggacgcgctggccaagctaaaccgcacgacggtagtggacgatgaggcacttaacgctttgctcaaggagatctgcggtgcgttgctccagtcggacgtacaggtgaatcttgtgcgccacttcgcgacaatgtcaagctggctgtgaatcttgaggacgtgagctcgggcatgtaccgtcgccgtctcatccagaagtcg

SEQ ID NO: 49262 - DNA, 277 bp, Glycine max
cgcagttctggaaatttgggcttgttatggcaacaacaacaagtgatacctgaagtcgttgattccttagaagatgtctctgatgtgttatcagctgagggtggtgatacttttattgtaccgaatgacgaagatgaagatgaatttggtaccacagaatcttgtccaagtacaaggtatgtccgaattgtgagcaagcaaatggtagggatatatgtatctgtttgggttcagaggaggttgagaaggcacattaataatttaaaagtttccccgg

SEQ ID NO: 49263 - DNA, 272 bp, Glycine max
gcccaacatcaaggttcctctcattcttggtatctggggaggcaagggacaaggaaaatctttccaatgtgagcttgtctttgccaagatgggaatcaaccccatcatgatgagtgccggagagttggaaagtggaaatgcaggagagccagcaaaactgatcaggcagagataccgtgaagccgcagacttgatcaagaagggaaagatgtgtgctctcttcatcaacgatcttgatgcaggagctggtcgtcttggtggaaccacccaat

SEQ ID NO: 49264 - DNA, 271 bp, Glycine max
gaagtataactgcttactttccctcaaaatgatactttaatctaagtattttatctaaataaattctatagccctgaccggcacatcaaccaaagtctctaagatatattggaagcatggtagctgatgttcatcgtacgttgctttatggaggcatctttttgtaccctgctgacaaaaaaagtccaaatggaaaacttcgtgtcctgtactcagtcttcccaatgtcattcttgatggaacaggcaggaggacagtctttcacgggcaa

SEQ ID NO: 49265 - DNA, 239 bp, Glycine max
ctgaaaactaaggaataatttaccattgccaacagtactagttgcaattgtttctctcttcttccttcaatccagacaaaagagctggcgaattttggtactccggacttcactatatacaatgctggacagttcccctgtaatcgttatactcactacatgacatcctccactagtatagatcttaatcttgctaggagggaaatggtcatcctcggcacacaatacgccggggaaat

SEQ ID NO: 49266 - DNA, 153 bp, Glycine max
tccctcagagtatgatatctctttcacaagcgctggtgtctcttgggaggttggataggtacatgtctagcagggaattgatggattcggttgagagagaagaagggtgtggtggacacactgctgtggaggtcaaggatggaaccttcagct

SEQ ID NO: 49267 - DNA, 236 bp, Glycine max
ctaactgggtttgggatgaaagttaccctttgtatcagtcaaaagattgcagcttccttgatggaggatttcggtgttctgagaatggaagacctgatttgttctacacaaagtggaggtcgcaacccaaagcttgcaacttgcccagattcaatgcaacaataatgttggaaacgctgcggaacaaacgcctagtgtttgctggggactcaattggtagaaaccaatgggagtca

SEQ ID NO: 49268 - DNA, 261 bp, Glycine max
acatcaaagatgagtagaacaggacttcccgcagtggtcatcgacaatggaacaggatatacaaagatgggttttgctggaaactgcgaaccacagtacatcgtccccacgtgtgattgcaacacaagagggaaagggagcgcagaaggcagccactcagaagaagggagttgaggatttagacttctatattggagatgaggctctcgccaactcgaagacttacgacatcttttatccagtgagacatggacagattga

SEQ ID NO: 49269 - DNA, 211 bp, Glycine max
tcagtgttgcacgaatgaaatatgtagctggcgatgatttaccagctgttacgcctgctcgaaatgacactcgactgaaccactcttttccttttcttgaatcactgaatgagattatggaaacaaacagaagtgaggcatctcagagtcatgtgcacaggttgtatttccatggcccaaatacattcagtgaaccttggcatctacttca

SEQ ID NO: 49270 - DNA, 255 bp, Glycine max
ctgagactcgaggttcctctgtttcgtccccaggcttgaactgaacacaggttgtgattgtaatttgcaaagaaacatgctgaagtccatagtgggttgctgcaaggtgtacatatcagagagcagaaacagaactgcattggaatcaatagaacgagcttccaagctcttccctttggctccaataatcaacaagttcgaggatgtgacctacaacagagttggttacacccttgtctctgaattgggtcattc

SEQ ID NO: 49271 - DNA, 260 bp, Glycine max
caacaacgggctactgctagaatgcaaaaggagtatgctaaatcggatgcaatcaggaaggatttggctgtacttggtattactcttatggacagtccaaatggcacaacttggaggcctgccattcctcttccacttcaagagctgctctaagtcaagagttgttcaacatctccaaagcaaaaccaagaaatgtaagttactaggttctggtatatggaaatcaattataagggatgccacgggtgtatctcgctatc

SEQ ID NO: 49272 - DNA, 255 bp, Glycine max
ctcagaggaatcgttagatgttctgaatgaatggcttaatgttctccagtcagttcaaatcccctttgcactcattcccttgctttgcatggtgtccaaagaacagataatgggcagtttcagaattggccctgtcctcaagattatttcctggctggtggctgctctagtgatagtgataaatggctgctctattgctggaattcttctcctctgaagtgaatggggcagtgtttgccactgtagtgtgtgtat

SEQ ID NO: 49273 - DNA, 244 bp, Glycine max
cgcagcacttggtgggaatcgtgatgtgacaggaagccagaacagcgttgagatcgatgctctagctcgctttgctgttgaagaacacaacaaaaaacagaatgcccttttggagtttgaaaaggtggtaactgcgaaacagcaagtggtttctggtaccttgtacaccatcactttggaggcaaaagatggtgggcaaaagaaggtttatgaagccaaagtttgggagaagtcatggttgaac

SEQ ID NO: 49274 - DNA, 276 bp, Glycine max
cacagacagatatcatggctaaggcggtgtgcactctccacggcagtgcggcgacggtatacgggtcgttggtggtcacgcaagctcacgaagacgccaagagtgtaattacgggtgagctcaagggacttccggctggcaaacacgcgctgcacgtgaatgtgtttggggatgtatcgcaaccgggcggggtgtttaacccatttggtaagaaccacggggccaccgaagacgaagagcgtcgtgtgggatcattaggcaatgtgaacgtagcag

SEQ ID NO: 49275 - DNA, 258 bp, Glycine max
cgattttggccccaaaacccctatgatttcaggaaatcaaaggcttgactggactgacagagtttacctaaaggtgcttcctgaagatgagaggaagttcaaattttggccccaaaacccctatgatttcaggagtattgtcctacagtataccgaaagcatgcgactgctaagtgaagtaattattaaggccatggcaaagtcactgaacttggaagaggattgcttcctaaatgaatgtggagaaagagctgatat

SEQ ID NO: 49276 - DNA, 270 bp, Glycine max
tggacgaaggaagtgaaaagagtaggttccatctgttgctcaatgagcttcaggccatgatgagtactttctttgttccagactatattccattcacgggttggattgataaactcaaaggattgcatgcacgacttgaacgaaatttcaaggagttcgataagttctaccaagaagtcattgatgagcacatggatcccaatagacaacaaatggaggaacatgatatggttgatgtcttgcttcaattgaagaatgatcgttctcttt

SEQ ID NO: 49277 - DNA, 261 bp, Glycine max
ctcgacactttcttgcggaatgtttgcatcgcccaatcttcgcctggtcactagatctctggagaccagaggcaacagacactactcttcccagagtggttctcagactaccagtctcaagcagagattgacggaactcattccccagaagaatgctgagatcaaggagatcaaggagaagtacggagagatgaagcttggcgattgtaccgtcagccaggcttacggaggaatgagatccgttaagtccatggtctggga

SEQ ID NO: 49278 - DNA, 226 bp, Glycine max
gctgggcccatcagccccagaagtgggaagggtgagcatgaggaagaccgtcaccaagcacgtctcctcaggaagcccatggtcaggcccagaccgagtcaagtacttcggcccattctctggcgagcccccgtcctacgtaaccggtgagttcccacgcgactacgcctgggacactgctgggctttccgcagacccagaaaccttcgccaagaaccgtgaactc

SEQ ID NO: 49279 - DNA, 155 bp, Glycine max
gttaatgttctaagaaattcaaagtatgcgaaggctgcacaagagttgctggaagagttttgcagtgtagggaggggtcagtttaagaagagcaagttcaataggcagaattcaaaccctaattcaaatgccggtggtggtgcttcgccttcatc

SEQ ID NO: 49280 - DNA, 274 bp, Glycine max
gggatctgggatgtttttcgcagccaaaatgccgtagactttgctcgaaggaggcttcaagagcacaatgatgtgaagcagtgttgcaaggaggtgataggagacgccataaagagaggagcaacagacaacttgacagtggtgatgatatgtttcactcagaaccaccagctcctatggttgtagaaaggcctagagtcagaagaagcatatctgctgaggggcttcaaaatcttaagtgcttgctagaaggataaaattttctacttctcgg

SEQ ID NO: 49281 - DNA, 269 bp, Glycine max
aatatatattcagggatattatcaagcctcggcgatggaattgataaggatcaatggaaccacaaaagctccagtcatgaattttgctgctgagacatcacttggggtggttactgtaagagcattcaacacggtgaacagcctctcaacaactacctaaagcttgtggacatggatgcaacattgttctttcattctatcgtgaccatggaatggtcaattttaaggtttgaagtacttcaaaatttgacagtcttcactgcagcttt

SEQ ID NO: 49282 - DNA, 201 bp, Glycine max
ggctcgagtgacttttctcctgattgggcatatactggcgttagacgccaggttttaatagttggcacatttctgcggagtaaaaagccctctagtgagaccaaatggggatgtatgtttggtgaaattgaggtttcagctgaagttttggcggataatgtcataaggtgtcagactcctttgcattcacctggacgtgta

SEQ ID NO: 49283 - DNA, 149 bp, Glycine max
ttttgataccctgatcaagaatcttgaggctttgactaaaggccatgatacatcaatcccagagtttgactatcagcaaaagaggcgtgtcggctataaagcaataaagagcccttcatctgtggtgggcatagttgatggcacatatg

SEQ ID NO: 49284 - DNA, 202 bp, Glycine max
gagaaacttggcggggtggtatatgatggatacttgaatggccagttatctgtttcccgtgccttaggagactggcacatgaagggtcacaagggttctgcctaccccttgagtgctgagccagagctgcaggaaatcaacctgactgaggatgatgagttcttgattatgggctgcgacggcctatgggatgtaatgagta

SEQ ID NO: 49285 - DNA, 206 bp, Glycine max
cctcgagccgattcggctcgaggtcttgatggtcttgcctctcgcacggctgcatactaccagcaaggtgcccgtttcgccaacatggcgtactgttgtgagcatccccaacggtccctctgctctggcagttaaggcagcagcctggggtctggctcgctatgccgcaattgctcaggacaatggattggtcccaattgtggagc

SEQ ID NO: 49286 - DNA, 189 bp, Glycine max
ctcactaggagctcttctccattggttcttcatctgcatgcacacacttgcatagttttggaaaccaagaatttttgaagggtagcatcaacaagaagttctggaaatggagatcaccaatgtcagcgagtatgaagctattgcaaagcagaagttgccacagatggtgtttgactactacgcatctgg

SEQ ID NO: 49287 - DNA, 232 bp, Glycine max
gccattcttgaaaatgaaggcctctctccctcaattcgtaattatactcttcgtcgagcacatttacgaattgagggaaacacttaaaaagtacagcaactggcccacattccctcagatttttgtggatggtgaactggttgggggttgtcatatattgacctccatgcctgagaaaggtgaactggctagcttgttcaaaaaataattgtgcaagttacctgcatttgag

SEQ ID NO: 49288 - DNA, 215 bp, Glycine max
  unsure (1)..(215): unsure at all n locations
cttagatccggagcaaattaaagatgtatttaacaagatctatgacttcccaaagcctaatatgaatccacttgtcaagttactagcgactggactagcaggctatgaaggagaaaagtggagtaagcacagaaggataatcaaccctgcttttaatttagaaaaattgaagattatgttaccattgttcttcanaagttgcaacgatctggtta

SEQ ID NO: 49289 - DNA, 221 bp, Glycine max
attcatcttcgtttcttcccactgtgctttcttcgattttctcgctgcgtccctcttagatccctctctggatcacagggtcatgagggaaaattctctgtttatgtacattcatcaaaggaaaaaccaatacatgtcagccccttctttgttggccgagacattcacagtgaaccggctggggaaaaatttctatggttgaggcagaaaggagacttttg

SEQ ID NO: 49290 - DNA, 246 bp, Glycine max
  unsure (1)..(246): unsure at all n locations
cgaatatgcagccttcccagctccttggcgtatcgtcttctccatgcatcagccatgagcagtgatggtggatgcatggacaaaaccatactccagggaatatgcagccttcccagctccttggctccgtactgcaaagttctggcctaccacaggacgtgttgataatgtgtaacgtgancgcaacctcatttgcacccttctcccagcatcacaggctgttgaagaacaagcagctgccacagc

SEQ ID NO: 49291 - DNA, 133 bp, Glycine max
agtgtagcactattggcagacttctagatcagggtcactgtggttcttgttgggcatttggcgctgttgaatcattgtcagatcgcttttgcattcattttgatgttaatatctctctctctgttaatgacct

SEQ ID NO: 49292 - DNA, 249 bp, Glycine max
ctgctttctgatctcagcaaatctcaactggcagttccagcatcaatagagttcgtagatattgctgggcttgtcaagggtgcaagtcaaggagagggtttgggcaataagtttttgtctcatattcgtgaggtggactctatacttcaggttgtacgatgttttgaagacaacgacattgttcatgtgaatgggaaagttgatcccaagtctgatattgatgttatcaatttggagcttgttttctca

SEQ ID NO: 49293 - DNA, 263 bp, Glycine max
attgaagctcgtcaagtcgcggctgctacaatattttatctttcttcggtgaaagaatttcgcaagttaataggggaaaaccctgatgtcattacggctttggtggagttagttaaagaaggaacaacctgtgggagacagaatgctgtggttgctattttcggattacttttgcttcctaggaatcatcaaagggttatcgctgctggtgctgttccggcgcttcttgacattatagcttcttcgaataacgacgagcttgt

SEQ ID NO: 49294 - DNA, 259 bp, Glycine max
aaaacccagatgggtaatggaagacatgccgtttgggaggattatgggggatatggtgatgctgccaaacggcgacgttttgattattaatggagcgatgtcggggactcagggttttgagatggcgagtgatccgtgtttgaacccggttctgtaccggcccgaccaaccggtcgggttgcggttcatggttttgaaccccgggacggttccgaggatgtaccacgcgacagcaatctgttacctgatgcgagggttt

SEQ ID NO: 49295 - DNA, 252 bp, Glycine max
ctgcagtcacatcatctttacttgagtcggtggaaagtgctgatcttatcacatatggtctcatacccgaatttataggacgatttccaatcttaattagcttgtcagctctaaccgaagaccaacttatgcaggtcctcacagaaccaaaaaatgctcttgctaagcagtacaagaaattatttaacatgaataatgtaaagctacacttcacagagaaagctctgagattgattgcaaagaaagcaatgg

SEQ ID NO: 49296 - DNA, 139 bp, Glycine max
gccaccatgtcgaggccaaccgtcaccgtcgtctccgccaagggcgaggccaccaaggacaccgtccccgtgcccaatgtcttcaaggcacccattcgccctgacatcgtccacgcggtgcacactggcatgaacaaga

SEQ ID NO: 49297 - DNA, 252 bp, Glycine max
cccaattctttctttttaaagaccaaccaaaaacacatcaaacaatggcgcccaagaccgcagacacgaagcagaccgcctccaaggcccccgccaaggccccggcctcgaaggccccggccaaggcccccgcgaagaagccggccagcggcgacaagaagaagtccaagaagcgtgtcgagtcttacacctcgtacatcttcaaggtcctgaagcaggtgcacccggacactggtgtctcgaacaaggcca

SEQ ID NO: 49298 - DNA, 187 bp, Glycine max
caacaaatataactaatattctttagaataatcaaaaagaatattaaattcaaataaattttagatagaccaaagacttaaaaaggaggatttgaaatgcgagatctaaaaacatatctttccgtggcaccagtagtaagtactctatggttcggggctttggcgggtctcttgatagagatcaatc

SEQ ID NO: 49299 - DNA, 220 bp, Glycine max
ccaaaaagggttaaaacctgatggttattgctatgaccctttgattgctgctttgtgcaaagagggtagagtggatttggctattgaggtattggatgtcatgatctccgacgggtgcgtgccggatattgtgaactataacaccatattggcttgtttatgtaagccaaaaagagctgatgaggctacgagcatttttgaaaagttgggtgaagtgggg

SEQ ID NO: 49300 - DNA, 245 bp, Glycine max
  unsure (1)..(245): unsure at all n locations
cgaacattctttgtttttggcattgtttcatgttgtgccgttgcctttgttcattattgtgttccagaaacaagagggaagactttggaggaaattgaagtactctttaaagacgaggatgatttgcaagacagtgaggtagaaatgggagatgtagagcgtctgatgcagaagtcgtgagttggtggcataccaaacgtttaaaactanaattcctagatatttcaaatctagtattatactcg

SEQ ID NO: 49301 - DNA, 183 bp, Glycine max
tcaacgatcgctcgctatgatgctaaatacggcaatacccgcctctatgtggggcacttatcttcgaggactcgttcccgggatctggagcctgccttcagcagatatggaaggtaattcccccttttcttatcattccatcgtcgagcatggtcttagttatttgctatgtgcaatcacagc

SEQ ID NO: 49302 - DNA, 262 bp, Glycine max
ggcttccacagatcaaagtggctcagacttggaaatggcaaacagaataggatggtgtgctttctcaacaatacagactctaggcactattgcagtgatgtgtcaggtggcatggcaagtatttgtcatcttcattccagtaactgcagtctgcatatggtaccaagtatgtgatcctttttccttgatctatgacaggacagaaaaaagtgagatacattctagtttcaaaatttatacaagatataatacgatttctcaa

SEQ ID NO: 49303 - DNA, 266 bp, Glycine max
gcaataagctttgggtggccgcaacaatcaaggctagtaatgaattatagcggggagatacaatttctcgagtttaatggaacggaatgggttaagaaatggtggaagccagaccacaagtgcgatatacgtgactattgcgggagctttgccatctgcaacaaaaataaccggattcactgcaagtgtttgcctggattcattcccgggcatgaaggagaattcccgctccaagggtgtaaaagaaaatcaacattatcgtgtgt

SEQ ID NO: 49304 - DNA, 264 bp, Glycine max
aggtctaaggggactcaaaaacattttgcggatgcatatcaaaagggccaatagctcagagtgggagcagattgcaattcctacaagtgtaagggcaatagttgctttgaatcttcatagctatggaagtggaagaaatccatggggtaaaccaaaaccagaatatttggaaaagagaggctttgttgaagctgatgttgccgatgggctcttgggaagtatttggtttaaaacaaggatggcacgcatcgtttgtcatggtgg

SEQ ID NO: 49305 - DNA, 252 bp, Glycine max
aatcggctcgagcggctcgagacagaactctggagcgaggagaatttgcgttcaccatgttcacgtgccagcaactatgatccccgtgatgggtggcaaatttcctgctagtgcgctgagagaggaggaagttcaagattaccacgaaacagaaaggctgaaaatgtacaagactctggatgcctatctttctatctgtcaagggatgggggtgcgtgcagggaaactacaaattgaaatggattgcataga

SEQ ID NO: 49306 - DNA, 187 bp, Glycine max
ctggagaaaatatagggacaaacaacatggatttgttggtatctctatttacacgtttgggatttttcctcaaacaaatacagaaaaagacatggtagcatctcaacgagcccgtgatttttttgttggttggattatggaacccctgcaatatggagactatcccatttccatgaagacaaatgca

SEQ ID NO: 49307 - DNA, 237 bp, Glycine max
agtatctcgtgcttatctcctgcaccttgtctgttgcactcttttttctaacaagagtgtaacaaatgttcatgtggtgcatctggaggcttttcgcgacctgggtcagagtgggggctatgcctggggagctgccgcgctggttcatatgtatgagcagttagatgaagcttctaggaccacaacatgacaaattgggggtacctcactttattacagtgttggatctatgagcac

SEQ ID NO: 49308 - DNA, 278 bp, Glycine max
caatgatcaccattatcatttgggatacttcctttatggaattgcggtccttgcaaagattgatcctgagtggggacaaaaatacaatccacaagtttattcacttgtcacagattttatgaacttgggccaaaaatataactctcgttatccacgtctaaggtgttttgacctttacaacttacactcttgggcttcaggagtgactgaattcgcagatggaaggaatcaagaaagtacaagtgaggctgtgaatgcgtactattcagcggcattgg

SEQ ID NO: 49309 - DNA, 276 bp, Glycine max
caactacaaaggttgctgtaggagataagatattgaagtagtgctaagtgcctaacacctgcagtgaacaatggcctctgcatcagcatctcttctcaagtcttcacttgttcttgacaagtctgagtgggtgaagggacaaacacttcgccaaccttctgctgcatcagttgtgagatgcaaccccaccaccccatcaggcctcaccatcagagctggttcctatgctgatgagctcgttaagaccgcgaaaacagtggcttcaccagggagggg

SEQ ID NO: 49310 - DNA, 279 bp, Glycine max
ccacaggcaatttctgatgggtctgaagaagtatggtaaaggagactggagaaacatctctcgcaattttgtgaccacaagaagaccaactcaggacgcaagtcatgctcagaagtatttcatcaggcaactaagtggaggaaaggacaagaagagatccagtatccatgacatcacaatggtgaatctcccagaagcaaaatctccttcatcagagagtaacaacagaccctattcaccagatcactcagtgaaggatgtgaatccaccatcccagaa

SEQ ID NO: 49311 - DNA, 217 bp, Glycine max
tggactggctgtttatgccaactgtcaatatctgtgaagaatgtttaacaggccaagacgtgctcgtgcttttaatgtattgaattggaaacatcaaggtgaatcatctgtgacaacaggtttacttcaggatgttccaccagagattgaattgtcggattatagaaggatcccaagtccaggtagtgagagcccttcagacctccttaatggtgag

SEQ ID NO: 49312 - DNA, 262 bp, Glycine max
aatctatagaggggtttacaagcagaaggatgtggcaattaagctgattagtcaacctgaggaggatgaggacttggctgcttttcttgagaagcaattcgcttcttacgtgtccttgctcctcagattaggccacccaaatatcattacttttattgctgcttgctagatacctcctgtgttttgcataattactgaatatttggctggaggttctctgggaatcttcctgcatcaccaacaaccatatatacttccactc

SEQ ID NO: 49313 - DNA, 223 bp, Glycine max
tggaaaaacctcaagaatcatacttaactgagcaatcaccatcatcttcgcatcttccagaaaattgggtggaggcaatggatgagacaacaggtcataagtattattacaatacaaaccctcatgtatcacaatgggagcgtcctaatttagttcaggaagttgtttcaaatcactcagacttgtctgctggtggtgggtatgatcaatcatctaattttcc

SEQ ID NO: 49314 - DNA, 238 bp, Glycine max
gtctggcctggacgcgaggctgttatctatgatttatctaaacaaatttaccaaatatgtgacaagcgttcggtctcctgtattattgaacacaagcatgatgcaggtgctgtgatttgtgattctgatctgagttcacagctcaagtctgcagcttattctgcactcaagaagatggagggtgacattcaagatgaagtgccaacgttaatgagtggagcagggcatgatgcaatgg

SEQ ID NO: 49315 - DNA, 268 bp, Glycine max
ctgcaccgcaacaaaagtgataaagaaaagataattgatcattgaacatcaatctacagtatcatggttatttttctgtactagttaattttttttggtcttgctttctgatttaccttgattgtatggcagcgtatcactatacctgagattttggatgatgaatggtttaagaaagaatataagcctcccatttttgaggagaatggggaaatcaacctcgatgatgttcgaagctgtctttaaagactctgaagagcaccatgtg

SEQ ID NO: 49316 - DNA, 269 bp, Glycine max
ggactcaattcctgcttggattaagttttctgtacaggctcctggtgaaattccatacagcggaatatactatgatcccccagaagaggaaaaatatgtcttcaaacatccacagccaaagagaccaaaatcacttagaatataacggctcacacatcggaatgagcagtccggagccaaaaatcaatacatatgtcaattttagagatgatgtactgcctcgcattaaaaggccttggctatatgctgtacagattatggctatccaa

SEQ ID NO: 49317 - DNA, 164 bp, Glycine max
ctcctaacaatttctctctgtttccttcttcaccgcatcaatggtgttggacggcgttctcctcggcatgtgcaaccctctcctcgacatctctgccgtcgtcgacgacgctttcttgcaaaaatacggtatcaagttgaacgatgcgattctcgctgaggata

SEQ ID NO: 49318 - DNA, 147 bp, Glycine max
cgtgttcacaagctgatattaatagaaatgtagacatgattgctgctcgtaggaaggagcgtgaatattttgagacaacgtcctgaatatggacatttggcacataaaatgggctcagaatatcctgctaagcttctatcccagcat

SEQ ID NO: 49319 - DNA, 233 bp, Glycine max
gtctgtttgtcgttggaccagagagcgcaaggcacacccaggcccagcatgttaccgcaaaggtggtcctctgaccatcaccgacgccaacctgttcttgggcagactactacccgacttcttcccaaagatctttggcaagaatcgagacgaagggcttgatgagcaggcaagcaaggctctttttgaggagctgacgaagcagatcaataggatactgctggtagcacaga

SEQ ID NO: 49320 - DNA, 200 bp, Glycine max
ctgggataaacttaagacttcaattattgaaattgcataagtacacaatttaattggattggtccaaccgtatcacaaacatggactactaactcccatttcttatttattattgaattaaccgatcaacttgctttgttatcgaacatttctttttgatttcaaaaattttccggcaaaaatttgaatctatttttata

SEQ ID NO: 49321 - DNA, 276 bp, Glycine max
atactacggactttctcctccaaaaatactactcatgtatttgctgcatctgatcggccaactgtactttatagtagtaacaaaacattactttatagtaatgtgaatctgaaggaagtgagtcacatgtgtcctttcaattctgctgcttttccagacagtttggcaattgcaaaagaaggtgagcttactattggcactattgatgacatacaaaaacttcatattcgctctattccgctgggggagcacgcacgacgtatctgccaccaggag

SEQ ID NO: 49322 - DNA, 259 bp, Glycine max
gggtgatagtaacaagggctgagattggggactgatgacacaaaacttataagggtgatagtaacaagggctgagattgatttacagtatatcaaagctgaatatttaaagaaatacaaaaagacgcttaacgtgcagttcactcagaaacatccggccactacagggcttttcttctctcactcttaggtcccaaccagtagtaaaaaatgttcaacgatgttttgtgtggaatgaattcagcgtatgatgtttgaat

SEQ ID NO: 49323 - DNA, 260 bp, Glycine max
gtaacatcctgctatcagataatctcactcaatcacttctattcctttcacattttttgggagacgtccatcagcccctacattgtggctttttctcagacaagggtggcaatgaaatcaatgttcgctggtacgaagaaagcaaaatcttcaccacgtttgggatgcaagcataattgagactgaagttgaaagattctatgatgacatagaagacttcgttgatgcaattcaaaggaatattacgaaagtgtgggccg

SEQ ID NO: 49324 - DNA, 269 bp, Glycine max
gaataaatggttagaggtccaaagaaggcacttaagagaatcaatgctcccaagagctggatgctcgacaaattaggcggcatcttcgcaacaaaatcttcccaaggtccacacaaatacagagaaagtcttcctctcacgttgtgctcaagcaccgtcttaaatacgctcttactggaagagaagtcactatgatcgtcaatgacaaggaaggaaacatcgctgtcgatggcaagatcagaagagaccctagattccccgctggtctt

SEQ ID NO: 49325 - DNA, 230 bp, Glycine max
cgattcttaactcgtatagataatatagaatagataccatgtctgccgttgaagcaaagaagggaaaggtcatcctcgcctactcgggcggtcttgacacgtcatgcattctcttgtggctcattgaacaggctacgaggttgtcgcttacatggccgatgtcggtcaggaagaggactttgaagctgcccgtaccaaggccatgaagtgcggcgcctccggctttttcc

SEQ ID NO: 49326 - DNA, 256 bp, Glycine max
  unsure (1)..(256): unsure at all n locations
ttcttcctttgaccatgttccttcccgaagcggactcccagcctgggttgtttgttacattcctggaatcatgtccctcctaagtgttctaccagctccacggtcatttccgtttatagttccttaccttctatttgagaacactatgtcggtaactanatttaatgccatgatatctggattacttcgctttggaagttcttacgagtgggtggttacaaaaaagttgggaagatcgtctgagactgatttggtt

SEQ ID NO: 49327 - DNA, 169 bp, Glycine max
cagcaaccagggtataacagttcacgggcttacctggatcaccttgctgatttgccatggcagaaggctagcaaagagcttgaactggacttaagggctgcacaggagcgcctggacactgatcactatggtttagtgaaggtcaagcaacggataattgaatacctgg

SEQ ID NO: 49328 - DNA, 171 bp, Glycine max
ctaaagaaagaatggctgctaggttgaaacacttgggtattagagtgaaaagcattgaagaagatgagcattgtgtcattccaatgggtggccccctcccagttctcccccaaagagttgttggcattggcggtaccgcagaatggtgcatccttcaacagggtatatggt

SEQ ID NO: 49329 - DNA, 197 bp, Glycine max
cagaaatatggcagttggcacttcaacctgcattcctgtcgtacactgcctcggcgatcgctgtagtgttctttttgattttgtattgtgctcctcgccatggccagactaatattttagtttatattggaatatgctccataattggatccttgactgtcatgagcataaaagcacttggcattgctataagactt

SEQ ID NO: 49330 - DNA, 267 bp, Glycine max
gtttaaacctaattctcatttcttcatcgttcgattcttctcctcctaaagatgcagatcttcgtgaaaactttgaccggtaagaccatcacccttgaggtggagtcctccgacaccatcgataacctgaaagctaagattcaagacaaggaagggatcccacctgaccagcagagacttatctttgcgggtaaacagcttgaggatggtcgaacccttgccgactacaacatccaaaaaggaatccactctccacctcgtgcttcg

SEQ ID NO: 49331 - DNA, 245 bp, Glycine max
gtggagctctggcatccaaagaagggtacgaagcagattaccgctcgtcatgtagttattgccgtgggtggacgacccaaggagctgacgtgcccgggcggggagcacgcgatttcgagtgacgacattttttggatgaagaagaaggaaccaggcaagacgttagttgtgggtgcctcgtacgtagcacttgagtgcgcaggctttctaaaggcgctgggctacgacgtgaaggtgatggtgcg

SEQ ID NO: 49332 - DNA, 262 bp, Glycine max
gcaataaacacatccttcatcaacatgtcttcctcttccattcccacccatggtaaaggctacggaatctccgacaccaagaactacaccaacttcaccgttaaggagttcccccttaagactgccggtcccgatgatgtgaccatccacatcgagtgctgtggtgtctgcggctcggatgtccacaccgtcactggcggctggggcgagctgtccactgactgggtctgcccaggtcacgagattgtcggaaaggtcactc

SEQ ID NO: 49333 - DNA, 265 bp, Glycine max
gtgaggaagtggatttctggtgttggtgttgacagtgttgggaagaagcttgtgaactcaaaagatggacctccaacctttgagcagcccaagatgactctggagaagctcttgctgtatggtaacatgcttgtccaagaacaagagaatgtcaagagagtccaattggctgacaagtacttgaacgaggctgctcttggaaatgctaacgaggatgctattcagaggggaactttcttccagtcttgaattggaggcaaagcaa

SEQ ID NO: 49334 - DNA, 261 bp, Glycine max
aagcaccatggaattgtagaatgcatgtattcttttccatttggagaacaatatttgcagtacatagttaacttcacaatgatatgcaggtttattaaattttaagagttaacatttgtgtttgtttaggttgcctgatgactttgacaaaccggagtttgccacggtcaacattcagcgtgatctgttctatggttacgatactctcatggagaatgtctctgatccttctcacattgagtttgctcatcacaaggtcac

SEQ ID NO: 49335 - DNA, 261 bp, Glycine max
tgccaccaacaatttttcgttgaataataagattggacaaggtggttttgatcctgtatataagggagaattagtggataggcgacaaattgctgtcaagagactatcaactagctccggacaaggaataaatgagaccacaacagaagtaaaactgattgcaaagcttcaacaccgaaatcttgtaaagctccttggctgttgctttcacgaacaagaaaaattactaatatatgaatacatggttaatggcagcctaga

SEQ ID NO: 49336 - DNA, 264 bp, Glycine max
  unsure (1)..(264): unsure at all n locations
gagtgaacaaggtgtaaccacactacaaaaccattttatgtagtgtggagttanaaaggttttgtccatcacccttcattcttagcagtcagtgcaagtctcaatgtataaaccgtgggagatattgtgctccggatccggagaaggattttggagaaggatatgaagggaaggatgtggtgtatgaaaatttgaggcagttgtgtgttcatagagttgccaatgagagcaaccgttcatgggtctggtgggattatgtgacag

SEQ ID NO: 49337 - DNA, 255 bp, Glycine max
caaaggttgctgtaggagataagattgcagtagtgctaagtgctaacacctgcagtgaacaatggcctctgcatcagcatctctgctcaagtcttcacttgttcttgacaagtctgagtgggtgaagggacaaacccttcgccaaccttctgcatcagttgtgagatgcaaccccaccaccccatcaggctccagcatcagagctggttcctatgctgatgagctcgttaagaccgcgaaaacagtggcttcacc

SEQ ID NO: 49338 - DNA, 177 bp, Glycine max
gaggagcgccggttgaaggatttgattaagaagcattctgagttcattagctacccaatttctctttgggttgagaagactaccgagaaggagatttctgacgatgaggatgaggaagagaagaaggatgaggagggtaaggtggaggatgttgatgaggagaaggagaaggaagac

SEQ ID NO: 49339 - DNA, 260 bp, Glycine max
ctgggttccaacaagcctcgcggtcttcaggcagcgcgcaagcaccgcacttcccgccgggagacccgatgggcggacaagaactacaagaagcgcgccctcggcaagttctacaagacttcgcccaccggtggtagctcgcacgccaagggcatcgtgctggagaaggtcggtgttgaggccaagcagcccaactcggctatccgcaagtgtgtccgtgtccagctcatcaagaacggcaagaaggtcactgcgttcgt

SEQ ID NO: 49340 - DNA, 252 bp, Glycine max
caggaagccacagcaattggaaaaacatttgcatctatgaaagactatcaattggatgggaacagagaaatgatggcattaggaacaatgaatgttgttggttccatgacttcgtgttatgtagcaacaggttctttctctcggtctgcggtaaattacatggcaggctgccaaactgcagtctctaatattgtgatgtcagtggttgtgttcttaaccctgaaattcatcactcctcttttctactacact

SEQ ID NO: 49341 - DNA, 238 bp, Glycine max
gtcaagtggaagtgcagtgatgtatgcagctgaggcatcctaacagaccgggaggtaactaaaacttgaccaagaattgtttctaccaaagattgaactaaggttcgaccttaattttaacacattaaccacgtgtacccaatcatttggttattttatgcttttgtttacttgcccaaattgaagaaaaaccaaatgtagagtcaaactgattgggaattattttgttagatattgc

SEQ ID NO: 49342 - DNA, 257 bp, Glycine max
tggaaagcagaagagttacttactactatggaagagaggggtgttgtccctgaaatgtcgactatgcaactggtggctgatgcttggcgtgccattggtttattcaaagaagccaacagaattcttaatggttcagaagaagaatctgagctagatcaagaatttgatagtgacaagatacaagtgcaaagcttggagagtatttataagaaacagaaactcagtgcttctccctctaatctgcttcaaatacctga

SEQ ID NO: 49343 - DNA, 198 bp, Glycine max
gtttagttgaggaggtggatgggcatacagcagttctttatcagcgacttcagctagactagttcccaatgtctgtctggcctcgtgatctttgttatgtgcgatactggcgccgaaatgatgatggaagtcatgttgttttatttcgctctagggaacatgcaaactgtggtccacagccagtctgtgttcgggcac

SEQ ID NO: 49344 - DNA, 266 bp, Glycine max
aaacttctaattttcttctatcctgaataggtaaatgtttgttgcttaattcattttgactttctacttctttttatcctcctcctccaagtactagttcaaaagttgatccacagcgagtaactaactaagtaactaacctggcttaaaaaagacggagaggccaaaatctgtggccttgaggggggaatcatcgttcttgttgagcaacaagaaattctcgggcttcaagtccctatgcatgactcccatggagtggcagttat

SEQ ID NO: 49345 - DNA, 247 bp, Glycine max
actgtatttgtaagtggcacattttgagagaaggtcaagaaagattggctcatatttaccttgctcatccttcattctatggggactctatacagctgtatcaatttttctgagactaccgaggattttgaatcaccatggaagtctcttctggataaatatgatcttcagatacatgagtggcttcaagcagtgtataatgctcgcgaacaatgggcccctctttactttcatgatactgtctttg

SEQ ID NO: 49346 - DNA, 254 bp, Glycine max
ttaggctatcaccaatgccgttggagttatttatctgatcagagagttctggaggttgcaaaaacattccggaaaaagagcataccttgtgatgtggtgtggatggatatcgattatatggatggttttcgttgtttcacctttgacaaggagcgttttcgagatcccatgtctttagtgaaaatctccattatagtggttttaaagctatttggatgcttgatcctggaatcaagcaggaagagggttatttt

SEQ ID NO: 49347 - DNA, 261 bp, Glycine max
cacgtataacaatattttcagtcaacttagcgcgattgtggacggtgaacctcctgatctgccagaggaaggctactctgacgcggcgaggaattttgtgcgaggctgtctaaacaagattcccaacttgcggccaacatatgcaatgctcttgcagcacgcatggttggccccacttgccaaaccagacacgattacagcagaagacgaggaggaagtcgaagctgctcacgcagcagatggtggagaagccgctagtga

SEQ ID NO: 49348 - DNA, 276 bp, Glycine max
atctcagaggatgtgcagccacctgttgaaggaacgactcttatagcagtctatgttggtttggccattggaagttctttctgcatccttgccagagcgatacttcttgtcacagctggtataaaacagctactatactcttcaataaaatgcacttctgcattttccgtgctccaatgtcatttttcgattccactccaagtggacgactccttaacagagcttcaactgatcaaagtgcattggatacaacattccttatcaaattgcatcgtt

SEQ ID NO: 49349 - DNA, 199 bp, Glycine max
ggcagtgaccattgcagctgcgcagaaagtgaaagggcgtggagatggtactgttgggatgtttggttggcttgttgtggctgcaattgctgggtccctgaatgtgttgttcacaacccaatatgggttttggtgactcggatgcagactcatactcaagcacaaaggaaaatcatggaggacaagaaagaagctttaa

SEQ ID NO: 49350 - DNA, 277 bp, Glycine max
gaagcatttgctagcgcgtgaagctgaagcagcaaggtggagtcaatggaaacaattgttggcagcagcaggagtaggtagaggaggaggaagcaagagagagtgaacccttggcttacaccaaccatgggtttccctcccatgacatcaatgcaccattttagacctttacatgtatgggggcatcaaaccatggaccagtccttcatgcacatgtggcctaaacatccaccatacttgccgtcaccgccggtatggccgccacaaacagctccgt

SEQ ID NO: 49351 - DNA, 216 bp, Glycine max
ctgaacttggagagccatgggtactaccatgcgttcggacaactgagctgttgatggcgcagaatgattcgcttaatcacgagtacctccccgtgttggggttcgaaccattttgtaaagctgctgtcactcttttgctcggtgacgtcgagacttccacaccactagccgaccctcgggcttttggagtgcaaacactgagtggtactggagcac

SEQ ID NO: 49352 - DNA, 206 bp, Glycine max
aagtcatgatttggctctctgctcttggcggcgcaggacccatctcctccaacggcagtgacatcgccaccgtcacagtcgccggcaagcagtttaagctgtataaggccccaacggaagatgacgctttctcgtttgttgctgtcagcccgatcaacagcttcaacggcgatctgaaatgcgttcttagtataccttcgtagcag

SEQ ID NO: 49353 - DNA, 165 bp, Glycine max
ctacaatggcatctgctctacgactgtcgagcgctttccgcgctgccgcccctctgcggaccacagccttcaatggcctccgctgctactccagcaagactcagtcgctgaaggagaccttcgccaacaagctgcccggcgagatcgagaagatcaagaagctcc

SEQ ID NO: 49354 - DNA, 231 bp, Glycine max
tccagacctatgcagttggaagcagtggaggatacaagaagggtgtgacagaagcaaaactgaaggttgccataaacgggtttggaaggattggaaggaacttcttgaggtgctggcacggtcgcaaagactcccctcttgatgtcattgccatcaacgacaccggcggcgtgaaacaagcctctcaccttctcaaatacgattccatcctcggaaccttcgatgctgatg

SEQ ID NO: 49355 - DNA, 235 bp, Glycine max
gtcaagtttgctcagtatttgggcatcaaggtcgtctccattgttggtggacagtccattgaggagcaagggtttaagattaggcagggctgtgagattgtcattgccactcctggacgtttgattgattgtttggagcgccgctatgctgtgctcaaccagtgcaactatgttgttcttgatgaggacacccatcacctggggctcaaaccccatgtgatgggtgtcctcgatg

SEQ ID NO: 49356 - DNA, 208 bp, Glycine max
aggcgatcaccggaatatcggtatccttgtgcctatgatgatggctggtctgcacttaactgggttaaatcaaggacatggcttcagagtggaaaggattccaaggttcatgtgtacttggctggggatagttcaggtggtaacattgctcatcatgttgctgtgagggctgctgaggaagatattgaggtgctaggtaatattcttc

SEQ ID NO: 49357 - DNA, 276 bp, Glycine max
caactacaaaggttgctgtaggagataagatattgaagtagtgctaagtgcctaacacctgcagtgaacaatggcctctgcatcagcatctcttctcaagtcttcacttgttcttgacaagtctgagtgggtgaagggacaaacacttcgccaaccttctgctgcatcagttgtgagatgcaaccccaccaccccatcaggcctcacaatcagagctggttcctatgctgatgagctcgttaagaccgcgaaaacagtggcttcaccagggagggg

SEQ ID NO: 49358 - DNA, 275 bp, Glycine max
ctcagcgtctcgagtgggagcagctcgagaacaaaatcagacgctggatacgcgccgccaaggtctgcgtcagaacgctcttcgccagcgagaagaagctctgcgagcaaatcttcgacggtgtcggaacttccatcgacgacgcctgcctcatggagacggtgaaaggtcccgcgattcagctcttcaacttcgcggaagcaattagcataagccgtaggtcggcggagacagtgttcaagattctcgatttgcatgacgcgttgacggatttg

SEQ ID NO: 49359 - DNA, 279 bp, Glycine max
caagaatgaagagaaaaacccaccactgacacctctaggaactgatgatagtaataactacaattcttctgcaaaccacagcaatatcactgttagggtttgttctgattgccacaccactaagacccctctctggagaagtggaccaaaaggtccaaagacactttgcaatgcttgtggaattcgacaaaggaaggcaaggcgtgccattgccgtggctgcaacggcaaacggaatgaatccggtggaggctgagaaatctcaagtaaagaaaggaaa

SEQ ID NO: 49360 - DNA, 287 bp, Glycine max
ctccggcgttcgttctcaattcctggtttcgcttcaacgactcaccgaatcggcgcaaatcttgctcgcggagttcgagtccacgatccagaaaggcacttcaaagccggcggtgaacggcggcggcgtgcactcgctcacgattcagacgatgaattacctttcagtcctcgccgattatctcaacgtgctctcggatatatttccgcgcgactggcttccaccgcagaagtcgtcatctctgccggaatcttatttatacagtccagaatctgattactcggcgt

SEQ ID NO: 49361 - DNA, 189 bp, Glycine max
caaattgattagtgtatgtgttgcttttgagtgttatgctgtgaatcgatgaagagttgggacaattgggtgtgttgaaacaggtacaaggatcatgcttgggaacggggttgttgggatcttggcagaatctgtgaataaatgggaaagaagggcacctttgaccccatcacactgtgctcgattact

SEQ ID NO: 49362 - DNA, 220 bp, Glycine max
cggatcaactgaggagagtgagagaaaagagaagagaagatgacaacacgcttcaagaagaacaggaagaagaggggccacgtcagcgctggccacggtcgaatcggaaagcacaggaagcaccctggaggacgcggtaacgccggaggcatgcaccaccacaggatcctcttcgacaaataccaccctgggttcttcggcaaggtaggaatgcgctatt

SEQ ID NO: 49363 - DNA, 290 bp, Glycine max
gacgaggaagagggcgaggacctgtgcaacattgagcagttcaacttggcctacggtgccaagatcctcttgcaccacgccaacatgcgtctcaagcgtggccaccgctacggtctctgtggccgtaacggttcgggcaagtcgaccctgatgaacgccatcatcaactcgcaggtcgagggcttcccgccacccaccgaggtccgtaccttctacgtccagcacgacattgacggttccgaggccgagatttccatcatcgactgggttctcagcgacaagcgtctctt

SEQ ID NO: 49364 - DNA, 257 bp, Glycine max
caatatttggctctggcatgtcttcattggattttatactcatggaaccagctgaagttgcaggggttaatggtggaaagtggactgatcaggagactctcctgctccttgaagcattagaactgtatagagaaaactggaatgacattgcagaacatgttggaacaagaacaagagctcagtgcatattgcactttgttcaaatgccaattgaggatacctttgttgactgtgatgatgatgttgatgctggttgc

SEQ ID NO: 49365 - DNA, 246 bp, Glycine max
acgaaatgcacgcgtccttcgtgtggctgttccagcaagtgttctctcacactccgactctgatggtgtatctgatgattctcctagcgaattttacggttcactcaatggggaccaccgccgccatcgccgccgtggctccgccgccggtaacatcagtcgtagaggctcacgaccaaaggggtcatattcagagtcataacattgattcctcttccatcaagacgttctctccttcgaacggta

SEQ ID NO: 49366 - DNA, 263 bp, Glycine max
cttctacattgctccagcttttatggacaagcttgtcgttcacatctccaagaacttcatgaccctgcccaacatcaaggttcctctcattcttggtatctggggaggcaagggacaaggaaaatctttccaatgtgagcttgtctttgccaagatgggaatcaaccccatcatgatgagtgctactgagttggaaagtggaaatgcaggagagccagcaaaactgatcaggcagagataccgtgaagctgcagacatgatca

SEQ ID NO: 49367 - DNA, 256 bp, Glycine max
cccctttgccgctgttgttgttgctgcaccaccgaacaacttcccctgtaaatcgcgtttcgtttgtgcaaggttttaaaagatggctgatgctgaggacattcaacctcttgttgttgataatggaactggaatggtcaaggctggttttgcaggtgatgatgctcctagggccgtgttccccagcattattgggagaccacgccatactggtgtaatggttggcatgggtcagaaggatgcttacgtgggtgat

SEQ ID NO: 49368 - DNA, 280 bp, Glycine max
gttaatgttttatattccaattttgaaaaccttttaacagaatatacatgcattccctctgagcacagcttgctgggaaaaattctcatcatattattgaggcaaccttcaaagcttttgctcgggctcttcgacaagcaacagagtatgatgcacgtcgccgtggaactataccaagttcgaaaggggttctgtcacgtagctaatatttttctggcggtggaccttcatggctccacaatcacagtccttagatgctgtgtgatggataatgcttgtg

SEQ ID NO: 49369 - DNA, 259 bp, Glycine max
cctcgagccgaatcggctcgagtgctgattttggcctttcaaggacaggtcctcttgataaccaatcctatgtcagcactcgtgttaaaggcacttttgggtatcttgatcctgagtatttcaggtcacaacagctgacagaaaaatctgatgtatattcatttggggtggttcttttggaagtgttgtgtgcaagagcagtgattgacccatcacttccaagagaccagataaacttggctgagtggggaatgctttg

SEQ ID NO: 49370 - DNA, 262 bp, Glycine max
gctttgagagtgtccggattcttgtttatggatgaatgggcacgagtaatttctggggaagaacaaggcatctcttcttgggttgctgtaaattatgctcttggaaacttgggacgtgagcctcaagaaacaactggaatagttgaacttggtggggcttctttgcaggttacatcagctaaacttaatgcagatatagctcaatctttgcacactataagattgcctggggttatgtacaacctttacactcggagtttgc

SEQ ID NO: 49371 - DNA, 270 bp, Glycine max
ccagaggagttgtaaattaagagatggctgcacaagctcttgtatcatcatcttctcttaccttctcagcggaggctgcaagacaaagtcttggaccaagatcactccaatctccatttggcttctccagaaaagtctcctttcttgttaaggcagctgctaccccccctgtcaagcaaggatcagacagacctttgtggtttgcatcaaagcaaagtctttcttacttggatggcagccttccgggtgactatggatttgacctctggg

SEQ ID NO: 49372 - DNA, 111 bp, Glycine max
aatacttggtcaccatcaagcttggtgccaaaaaggctttggttatcagcaactgggaaatagctaaggaatgcttcaccacaaacgacatcgtcgtttcgtctcgcccca

SEQ ID NO: 49373 - DNA, 135 bp, Glycine max
gttctgactttgagttatgtcttactgattatggtctcactgtgttccttaatcctgacacaatggatgagcctagtgcaacttctttgttctatagagcacctgaatgccgcaactttcaaaggtcacaaactc

SEQ ID NO: 49374 - DNA, 170 bp, Glycine max
ctggaaccctccgtgagcatatctacggcaccgataacccttctctttcatggaagcacaggcttcagatatgcataggtgcttcacgaggactgcattatctgcatacaggtgcgaacacatgatcattcaccgagacgtcaagagcaccaacatcttgttggatgaaa

SEQ ID NO: 49375 - DNA, 267 bp, Glycine max
tgcaaatatgatttgtaaatatgaactcatgcaagctatccaagttcctcaccactagttcaatcctagtggtttaacttctaatcttttaaaacatcttgtaggtccgagccttcaaatcctggtgacacactttatgtaaccggtctatcttcaagggtcactgaaagagacctagaggagcatttctccacggaaggaaaggtttcttcatgtttcttgtggtggagccccgtacacggatttctcgtggttttgcttttgtta

SEQ ID NO: 49376 - DNA, 129 bp, Glycine max
ggcaaaacttcttgcatgcatttatgtcttcacaggcatggctcttgtagggttaattcttagcaaggctgcagattacattgttgaaaagcaggaaatatttctagttagaaccttattcaagggtga

SEQ ID NO: 49377 - DNA, 274 bp, Glycine max
aattgatgactatctataccctataccaattacgctccaataactttggtttcttctaatttctcggcgcgattttggaccacagccatctcagtgacagcggtcggttcttcctcggcttgctcccggtacctcttgtatatatcccctttgtacaacttaattgtcctagccaccagcatcagtgaaattaaggcgccaaaaaaggtggctgcagtgataataatgaaggacaatttgaagcaactggacccaacacaagtcaattcggtgt

SEQ ID NO: 49378 - DNA, 289 bp, Glycine max
tatataccaatactagctagtagctagagagtagagaacatggagggcaaaggtttcacggaagagacagaagctctggtggtgaaatcatggaacgaaatgaagaagaattctcaagaactcggtcttaaatttttcaagaaaatattggagattgctccagcagctcagcaattgttctcattcttgaaggattcaactgttcctttggaggaaaaccccaagctcaagccccatgccatggctgtctttgtcatggtaacaaagttggcactattggagaccataa

SEQ ID NO: 49379 - DNA, 281 bp, Glycine max
cttgctctagccattgaagttccaaaaataactagcgccatcttgattggagtttatgcattaatttcattttctagtgctgggtttgtatatgtaagatctctctttactgctcaccttgggttaaaagcttctacagccttcttcaacagtttcacaactgctatcttcaatgctcctatgttgttctttgactcaacccctgtgggaaggattttaacccgagcttcatcagatttaagtattttggactttgatataccttattccatcacctttgt

SEQ ID NO: 49380 - DNA, 252 bp, Glycine max
tattgcttcagcactttgcttggttaataaaattgaagaggctgggagtaataaggaaaaagatgtagattttctttcttccatagaggttctgatcattgatcatgcagatgtaatatcaatgcagaattggtctcatgtgcatacagttatggaccacttaaaccgcttaccatctaagcagcttggaacagatgtaatgcgcattagaccatggtatcttgatgatcatgccagattttacaggcaaac

SEQ ID NO: 49381 - DNA, 234 bp, Glycine max
ggccttccgcgcgagtgctctctcgaccagagctcccgtcaacaagcgattcttcactccttcggcatacaacatgaccatcaaatcgtacttcgacgtctcgtgggagggccccgaggtccaggtggacaagtcgggcaatgtcacctcccagggcgcaccaaagactcaatccggtcgcatcaacttcgagctgtttgacgacgtcgtgcccaagacagtagagaacttccg

SEQ ID NO: 49382 - DNA, 245 bp, Glycine max
tgcttcgtgcagatataaggtgtacattgaaggttctgcttggtccgtgagtgaaaaatacattctggcatgtgactctcccaccctacttgtaaaaccccattactatgattttttcacaagaggactaattccggtgcaccactattggcccataaaggaagatgacaagtgcaggtccattaagtttgctgtggattggggcaatagtcacaaacaaagggtaatcttgaagttttgcttat

SEQ ID NO: 49383 - DNA, 130 bp, Glycine max
gtattttccgcactgatggtattcttgaacaggacattgtcaagcttgttgacaccttccctggccaatccattgatttctttggtgcactgagggccagagtatatgatgatgaagtgaggaagtggat

SEQ ID NO: 49384 - DNA, 260 bp, Glycine max
agcagtcttccatttcaatgactgatccaaacagactggcacgttcagcctccaatcttgaattcgagttaaggaactggagacatgcctttgagtcatggatcacttctcagagatcctacattcatgcactaaccggatggcttcttcggtgcatgagatttgagcctgacgtatcacagttaccatgctctcgacgtacgtccagcagcactcaccctttgtacggactatgtgttcagtggtcaaggcgcctagat

SEQ ID NO: 49385 - DNA, 234 bp, Glycine max
cagattttgggttggccaagcaaggtagtgaggaccaatctcatctcactacaaaggttgctggcacatatggttatgtggcaccagagtatgctctatatgggaaactaactgagaacagtgatgtgtatagttttggtattgtgattcttgaaatcatgagtggacgacacagtgcttgatgctttgaattcatctgcggattcaatcacggattgggtatggacacttgtg

SEQ ID NO: 49386 - DNA, 245 bp, Glycine max
ctgtattcggctagcagcagaggtatcgaaagtactgatagaactttccaacagcataaggaatcgccggcattgctctccagaaatactctcggatcatctgcacgaagccttacaggacctaaacactgccataaaatctcaacctcgactcttcttaggccccaaaaacaggcacaaccaagccaccaacatgctcaaaatagctgccgaacaagttggacaagaaagacatggaaagacct

SEQ ID NO: 49387 - DNA, 248 bp, Glycine max
gaagaacagaggagcagaacgaaatattccaccacctggagtttctagcaactcggttcttgtttcagtttacacagttgtactccattttctatctgagggatttgccttgggtgacatctgtggctggttgaagagctgcaaagcagatgttggtttccttcatagaggtggtgaacaaacttttcctgtacatttatttctgaaaaatgatccccatagagctgatatttccaggcttgggggat

SEQ ID NO: 49388 - DNA, 264 bp, Glycine max
gatgaagggtcgttcatcctgatatatattcgtctggtaaacctcatctccaagcaaggctaaattttcttttcactctgtgtcaaaaggttattatggtgaatgtggacagcgaggtggatattttgaaatgaccaacattcctccagagacagttgatgagatctacaaggttgcatcaatatcacttagtccaaatgttccagcacaaatatttatgggagttatgctcaatccacctcaacctggagatatttcttatga

SEQ ID NO: 49389 - DNA, 264 bp, Glycine max
gggcgtgtggcagaatgaccgcgtggagatcattgccaacgatcagggcaaccgcacgacgccgtcgtatgtggcattcacggactcggagcggctcatcggcgatgcggccaagaaccaggtcgccatgaacgcgcacaacacggtgttcgacgccaagcgtcttatcggccgcaagttttcggatccgatcgttcaagccgacatcaagcactggccgttcaaggtgacgtctggtgccggtgacaagccgcagatcacggt

SEQ ID NO: 49390 - DNA, 262 bp, Glycine max
  unsure (1)..(262): unsure at all n locations
gtggattggttgcagctggtgtcatcccatccactgacgtgtgncatatctgccaatagtatagctttctgtttatcgcaaaccttgcgtacacgtacataatcatagagacgtgcataagcgctagctccagcaacaattaattttggcagatatggcacacatcagtggattggatgcagctggtgtcatcccatcaccttttgattatgctgatgtagttactaccacaactcacaagtcacttcgaggaccacgtgga

SEQ ID NO: 49391 - DNA, 254 bp, Glycine max
gtgctaatagcatatttagttgtggccttgtgctacttccctgttgctctcattggctattgggtgtttggtaattccgttgatgacaacatcctcatcaccctaaacaaacccacttggctcatagtaactgccaacatgtttgttgtcatccatgtcattggaagctaccagctatatgcaatgccggtttttgacatgatcgagaccgtgatggttaaacaattgcgcttcaagccaacttggcagctacg

SEQ ID NO: 49392 - DNA, 262 bp, Glycine max
ggccgccaaggcgcttcacgcgcttcgtgggagattctacaacgcacgcccaatcatcgctgatttctcccccgacacggattttcgcgaggccacgtgtcggcagttcgaggagaatagctgcaaccgcggcgggtattgtaatttcatgcatgtgaagctcatcgggagagatctacggaggcgactcttcggccgcaaccaccgcggtggcagtgggacctaccaccgcgtcagccggagcacgagtcgcagccgcagc

SEQ ID NO: 49393 - DNA, 265 bp, Glycine max
gtagagacaataagacttgaaaatgtggaggacatgtgaagaaatgaatgataatcatcctgtgcactccagattttccatcaagacaaattggctcgcctccaagtgtgacagctattgcagctgctacagtagctgctgcaactgcatggtgggctgcccatggactgcttcctttatgtggtccactccatacagcttttgcctgtcctcctgcatcagcaactacagttccatcaatgattattgatgaatcaccacaaaa

SEQ ID NO: 49394 - DNA, 203 bp, Glycine max
attggggataaggtacactgttgggaaggaggcttcgattttgcgggagcctaagcagggtgattttgatccgaaggacaagttctggactaggtttccgacggaggggtcgaagcttacaccgccgcatcagtccgcggagtttcgatggaaggattactgccttgtggtttttaggcatttgaggaagctgtttcaggtgg

SEQ ID NO: 49395 - DNA, 289 bp, Glycine max
caagttcgccacagttgtgcgtgtcatcgcacacacacaggccaagaaggtcggattcaccaagaaggccgatgtagtcgagatccaagttaacggaggagacatcgccgccaaggtcgcctttgcccgtggactcttcgagaagccagtcgccgtcgacgaggttttctccgagtctgagcagatcgacgttatcggtgtcaccaagggttccggattcgagggagtcacagccagatggggaaccagaagactgccacgtaagacacacaagggtctgagaaaggtc

SEQ ID NO: 49396 - DNA, 285 bp, Glycine max
agaatatcttatcttgaggaaggaagacatggatttgtcaacatttgagttgtcaaccattgctgaagccactaataatttttctagcagaaataaactgggggaaggtggatttgggccagtgtacaagggtacactaatagatgggcaagacgtagccataaaacgacactcacagatgtctgatcaaggactgggggagtttaagaatgaagttgtgctaattgcaaaacttcagcaccgtaatcttgtgaaacttctaggttgctgcgttcaaggagggga

SEQ ID NO: 49397 - DNA, 284 bp, Glycine max
gaaaaataacaaatttatgaaaaaagaaatatttgttatcgaaccagttcgcctgtctagaaaaaacaataaacaattttttatgtatcaaaccataggtctttcgtttattcttttgaattaatgaaagacctatggtttgatacatataaaataaacgaaaaatttatcacaaatacccagaaaaaattcatgttaataagacaaatttttataaatatattacaagaacaagagatcaaagaataacagagaaaaaagaataagataattctgatttactt

SEQ ID NO: 49398 - DNA, 265 bp, Glycine max
tgatgatgaagtgaggaagtggatttctggtgttggtgttgacagtgttgggaagaagcttgtgaactcaaaagatggacctccaacctttgagcagcccaagatgactctggagaagctcttgctgtatggtaacatgcttgtccaagaacaagagaatgtcaagagagtccaattgcctgacaagtacttgaacgaggctgctcttggaaatgctaacgaggatgctattcagaggggactttcttccagtcttgaattggag

SEQ ID NO: 49399 - DNA, 228 bp, Glycine max
ctcacctcccaccatgtacggtatcactcgcgccctccgcacgtctaccccgctccgcctcgcaccgcgcaccgtcgccgcgaaggcttcaacagtggcaatgtctcgggccccgtgatcggtatcgatctcggcacgaccaactcgtgtgtctccgtgtacgacggcggcgcacccaaagtcattgagaatgccgagggcgcgcgtatcacgccctcggtcgtggcg

SEQ ID NO: 49400 - DNA, 272 bp, Glycine max
atgtgctgaagtataaacttatagtggatgcattattgatttggttatttgtgtgttgtttctgaacgattcctttgttatctttttcaattttgccagagtacttgaatgtatggtctcttttaacggaagttttgctttttgcagtgatggcaggtttggctccagaaggaacacaatttgatggtcgccaatatgatgctaagatgagtgaattgctttccactgatgggcaagaattcttcacctcatatgacgaatctatgacagct

SEQ ID NO: 49401 - DNA, 296 bp, Glycine max
gttaacgagaccaagccacccatgacttgatctcatcatccaacttggtctcgttaactagatcaacagcagtgtgaagaagggaggaggagatcaagtcatggctagcttttgctgcccaaaaaattgttgaagttaacgcattggctaaagcattgtctggccacaaggatgaggccttcttctctcgtaatgctgctgctctggcttcaaggaagtcttctccaagagtgaccaacgaggctgttcagaaggctgctgctgcattgaagggttcagatcatcgccgtgcaaca

SEQ ID NO: 49402 - DNA, 291 bp, Glycine max
gaaacttctcaaatcagctgctgcatatgctaattcacgtattcatgctgttaaagctgaagttcttgtacttgctagtggcaaggacaacatgcttcccagcataaacgaagctcaaagactcatgggattattgcaaaactgcaaagttcgtgtctttaaggacagtggacacacacttctcctggaagatggtattggtttgctgacaatcatcaagggaacttgcatgtaccgtcgctcaaggaggcatgatttggtcagggatttcatacctcccagtatgacaga

SEQ ID NO: 49403 - DNA, 293 bp, Glycine max
ggctcgaggttataatccagccacatgggttttggagatcactactccagcagttgagagtcagcttagagtagactttgcagaattctacacaaaatcagaattgtatcagaggaatcaagaacttattgaagagctaagcacacctttagagggaacgaaggaccttgatttccctactaaatactccctttcctttattactcaatgtatagcttgcttctggaaacaacacttgtcctactggaggaatccacagtataatggcatccggttattcatggcagtaatta

SEQ ID NO: 49404 - DNA, 287 bp, Glycine max
caccacttctacactcaccctctgacacattcagacacccaacaactaccgaatacacacagcacacccgcaatcatgcagatcttcgtcaagaccctcaccggaaagaccatcaccctcgaggttgagtcttctgacactatcgacaatgtcaagagcaagatccaggacaaggagggcattcccccagaccagcagcgcttgatcttcgccggcaagcagcttgaggatggtcgcaccctgtccgactacaacatccagaaggaatcgaccctgcatctcgtcct

SEQ ID NO: 49405 - DNA, 274 bp, Glycine max
acaatattttgaagattcgaagagtctatgatgcttttctagcagaatttcccttgtgctatggttattggaagaactatgctgaccatgacgcacgccttggctctattgataaagttgtcgaagtctacgagcgtgcggttcaaggggttacatattcagtggacatgtggttgcattattgcatatttgctataaccacatatggggatccagacactgttcgtaggtaatggaagtttagttgtttgtcttccttttattattattattt

SEQ ID NO: 49406 - DNA, 276 bp, Glycine max
ctcaaatttgagtgctacaagtgagaaggcagttatggaaacattgaaagaaacagagacttccatgcgtattgttggaaatagaaaagattttgctgaaggtgcaaaaaaaattgaatattttgaagagacaacttttcttttgagcgcaatactgtggcgctggcctccttctaggttccctgttggtaatgatgttatacttatgaaagtcttagcaaacatccatacaaggacagataaagcaactcctttttccaagctctttcttcttca

SEQ ID NO: 49407 - DNA, 276 bp, Glycine max
cgctgcctccgtctccactgtcggagctgtcaacagagctcttttgaacctgaatgcttctggagctggagcttcagctcccagttcagcattctttgggaccagcttgaagaaggttattgcctcaagggtccccaacagcaaggtttccgcgtggaagcttcaagattgttgctgtagaagagaagaaagagattgaagagacccagcagaccgacaaggacagatggaagggtcttgcctatgatatctcagacgaccaacaagacatcacaa

SEQ ID NO: 49408 - DNA, 275 bp, Glycine max
ccaggaggcaccttcaacatgaccgagcaaataacgtggggagagccagtgaataatggatggatcgacattcagaagaggacattcacgaaatggtgcaacagccatctggcggagaaaatgctgaagatcggtgtgctggacaaggatttggaagatggtgtccttctctgctcacttcttgaagttatatcatccaagaatgtcggaatgatcaacaagaaagccaagatccgtgctcagaaactggagaacacaggcgccgcgctcaagtt

SEQ ID NO: 49409 - DNA, 257 bp, Glycine max
ggctcgagcttgaggtctcttgctctactaaacggttattttcactctgccaataaaaatcttcgtgtatacctacttagagatctagcatcatgggagagcctacaacacaagaaatcattgatattgctaataattttctgctttcgagccctcctggagagtttatggaagttgttacagacgttagagctctcttacctaacgagtccatgatcaatgagagcgctcctagaacgttcagagagtacaatact

SEQ ID NO: 49410 - DNA, 268 bp, Glycine max
aagaacctgattattgaggtgataaataaatctgttaaattgcataaaattacccgtcatctagtgaagcattgttctttattttcatggttttcgtctctcatctccgttgccagacagaggcttaatggaaatgaaaataaacttttcttaaagcatgtgttggtagcattgaaggtaagtaagcgcttgattctcacggtttgtatttcctgttggatgcaggaaggtcctttttgattttcctttgaaatgtgttgggattttc

SEQ ID NO: 49411 - DNA, 274 bp, Glycine max
catttggtgagaatgtcagcgagttgaacaaatgtagaaaatgaggcaaggtgataacttgatggtcttacgactcccagactgagtgacaatcaacctctatgtgcttcgttcttttatggtaaacaggatttgtggcaatttgaatggcacttgtattgtcaacatgcagtggagttggttttgcttgtgaaaccaagctttgaaaggagaccgtgtagccaaataatcttagagcatgtagcagacatggtatggtattctgttttagtgg

SEQ ID NO: 49412 - DNA, 126 bp, Glycine max
tgagattttgtagatacagagaacaaagtaaaattctggggctgtttattcggcaattagaatactagattcaaagaaaggagagtaatgagtataatctttcgctcagacgatgtactgatatat

SEQ ID NO: 49413 - DNA, 151 bp, Glycine max
caatactctagttaagccaatatgtcaagttacccctccaggaccgagcttgcatagttctccggccagacaagagggtgaagtgcctgaatcagaattagacctagataccaggcgtaggcttctcatattgcaacatgggcaagataca

SEQ ID NO: 49414 - DNA, 266 bp, Glycine max
aagccatggctttgcttccgagactatgactgcaactggaacgtggacatcctgcaggagtttgcaagcaatgtagctcatgcaagatggtggaaggtgcatgatgcaatgccagaaaacttgcagaagttctgtttgcttaggtccaagcagaaggctgcattagagtgggatcgtcgacaagctgaagggaaactacagtgatggtcactggaaaattaagataaaagacccaagattgaacacttgctttgaggatttctgtt

SEQ ID NO: 49415 - DNA, 246 bp, Glycine max
attctggccattgttttcttcatttctggtttgctgcaccttctggttagattcctgtggagaccccaaactagagagcctgatgaattggacaatgtcactgctctccaaggccaattgcagcaactcttccacctccatgatgctgcggttgaccagtccttcattgacaccctccctgtgttcctacaaggccatcataggactcaagaagtacccctttgactgtgccgtttgtttgtgtga

SEQ ID NO: 49416 - DNA, 299 bp, Glycine max
tcgcaagccccactcaaccaccacacctctcctcgttcacgctacccctttctgctcttcttctacctttcaagttttaaaagtataaagatggcagagacattcctatttacctcagagtcggtgaacgagggacaccctgacaagctctgcgaccaaatctccgatgctgtcctcgacgcttgcctcgagcaggacccagacagcaaagttgcctgcgaaacatgcaccaaaaccaacttggtcatggtcttcggagaaatcacgaccaaggccaacgttgactacgagaagatagt

SEQ ID NO: 49417 - DNA, 293 bp, Glycine max
caagagtttcaagaagaggtagcctgtatcatgtattgcaatgctgcctttgagaagaaagaaggcttggcttcagcatattctgttgtggagagtaaaaagattcaagaagcaatcaaatatgtaactttcaatgtacaatttaatgaagaagattttgaagtgcaatgtgaatgtcatttgtttgagtttaaaggtattttatgcagacatatcctctctttgctcaagctcataaggaaaacagagtcagtgccatctaagtatgttttctcgcattggaggaaagattt

SEQ ID NO: 49418 - DNA, 282 bp, Glycine max
ctgcttgacgccgcgggggacgccgaggactggaaacggttcaccaagttagggttgctggacgaggctgtgatgcagcggaaggcccacgaagcgctcgtggagaaggtttctaggctcgaaagacagctttttgactaccaatacaacatgggcctcctattgattgagaagaaagaatggacttcaaagtttgatcagctgaggcaagaactagctgacactgaagagattctaaaacgagaacagtcagcacatttaattgcattatttgacgttgag

SEQ ID NO: 49419 - DNA, 278 bp, Glycine max
cctcgagccgattcggctcgaggttctttgctcctagttttggtgacagcagctatatttcgactcatcctctttttccaaggctttcataaggaatacagaaacaaaaacagcaattggaccagagaatgcgattgcattataagccgcaattgaacagatcgagcaagttcaaattgacgtaacatgaaacctattaatgcgaaagcgccgtggagagcaacaaaagtccacagaccacctaattgacaccaacgggtaaaatctccctgtgcttc

SEQ ID NO: 49420 - DNA, 274 bp, Glycine max
gttggtgccatattcgcctctggcttcatccgtgccattaggttccttgagaaacattgggcccttttgtgcaatgacatcaaaacaggaactattaacaactcaatcactgattcttcagtgagagaggctgtgatgaggtcctcaaggctgatcccaagcttgcggattttatccacaatgagtgtagtaaagggtcatggcaggggattattactaggctttggcccaatacaaagtatgtggatgttattgtgacggggactatggcaca

SEQ ID NO: 49421 - DNA, 277 bp, Glycine max
ggagaatatcttgggaaatcagacgcgcgccgtccgagcatcattgtcgttggtgccggtgctggaggcgttgcgacagcagcacggctcgccgcggcaggatgcaaggtcacagttgttgagaagaacgacttttctggggggcgatgcagtttgatacatcgccagaattatagattcgatcaaggcccgagtttacttctgcttcccggcttgttccacgagacgttccacgacctaggcacaaccctcgaagatgaaggagtccacattgtca

SEQ ID NO: 49422 - DNA, 261 bp, Glycine max
cgagaaaaagaagttgcatttgttcaatttccccaaaaattttatgctactttgaaggacgacccttttggaaatcagatgacaattttggctaagtacttggcggctggaataggtggactccaaggacctttctacggggaacaaactgcttccatagaagaaaagttatttatggtctttctccagaaaacattgaaaaggatggcttggatatatggatcagtcacagaggatgtgctcaccgggctgacaatacat

SEQ ID NO: 49423 - DNA, 276 bp, Glycine max
cgtggtttcgtgctccaagttgaaggacacagaatggatttcaagacaagatccgtacgtttgtcttgagtatggcagcacaaagttccgaaccagaacctgcacaggtcggtcagcccttagttcttgattttgcttttgattttgatttgattttgattgactcgttgacccacgacgaccttgaccttccagacggcggcttaaccccggtattccaagagaagttcatctttcccctcattgaaggccttcgggagctcaatgtccttgttt

SEQ ID NO: 49424 - DNA, 267 bp, Glycine max
cttgctcgagaatttcttctagatgctgctaccgttatatttaaagaacagggttgaaaaggctttcagagaaggaacagcacgccaaaatgcgcacagcatatttgtttgtcttgcactgaaactactggagaacgagttcatgtagcatgcaaagaaatcattacattcagaaaagcaggtctttattatgcttttattgggaacagattttggaataaaatgaacaaaaatgaactctccattttattttgagatttacttcca

SEQ ID NO: 49425 - DNA, 254 bp, Glycine max
ctatttttactaccaagagaatgcagtgaaagatgtgaaattaacgggtatgaaataccagccaagagcaaggttattatctatggttgggctattggaagggatccaaaccattggactgatgctaagaagttttgtccagaaaggttcttgatagctcagttgattacaaaggtgcagattttcagtttattccatttggtgctggaaggaggatgtgtccaggaagtgcatttggcattgctaatgttgaa

SEQ ID NO: 49426 - DNA, 221 bp, Glycine max
aaggactatgacagtaaccaaggtcgtgactctccgtacatgatatacactgatcatgatcatgctgaaatcatactggctgttagtggactcaatttggggaaggaaagtgattatatagttttgctcgataacaagctgggacaggcggaatttcatggtggttatgttcataacgggttgttgaaggcagcagggggctggggtggtggcattgttga

SEQ ID NO: 49427 - DNA, 250 bp, Glycine max
gatctatcatgctcgccattcccaccgtcctcctcgcgtgccttggcagtgccatcgccgcgcccactcccggccagccggctcccgtcccgtctggtggtgttggtgtgcgtcccaatgatacggcgccgctgtatcacaccatctctgacttcgacttccagagcttcaatctggcgctctatcaggagtggattgagctcgatctcttcaactacatcgtccagcgcttcagcgtcgacgagtttgc

SEQ ID NO: 49428 - DNA, 218 bp, Glycine max
ggttcgaagcacatttggaagttcatgcaggatcaatagatgaggaggaggacgagcaaggaattgcacatatgattgaacatgttgctttcctaggaagtaaaaaacgtgagaagcttttgggaacaggagcccgttcaaatgcttatactgatttccaccatacagtgtttaacatccatgctcctacgagcaccaaggattctgatggtgattta

SEQ ID NO: 49429 - DNA, 253 bp, Glycine max
actcgccccacctcacatcgtccaagtggtggattggatcgcttggtcgcactgccaaccatgctgtggtgatggcacagctgatcattgagggcaaagcttatggccctcacccgttcgttgtccaatccgcgatctcagacacaccagccactggagaatatccacattggtgacatcggtcccaagttcggctacaacaccatggacaacggtttcctcttgttcaaccacgtcaaggtcccccacatca

SEQ ID NO: 49430 - DNA, 107 bp, Glycine max
ggccaatatgctcgaaggaggtggcaagacacccatacttaatcctatggagcttcaagatattggttttaaaattgttgcgtatccactttccttgatcggggttt

SEQ ID NO: 49431 - DNA, 151 bp, Glycine max
cgcaaaaatggacttatcaagcagtttctaaaagatgtctactggggtgaacttgattttctaattgtggatgctccaccgggaacctcagatgaacacatttcccttgttcaatgccttgatgccactggaatagatggtgcaatcatag

SEQ ID NO: 49432 - DNA, 185 bp, Glycine max
gagatggaggacgcggtgagctcggagatagggtttgcagcgaagtgcgacttctttgcggtgtacgacggccaggccggactcaggtggcggaggcgtgcaaggagaggctgcaccggctggtggcggaggaagtggtggggagtagtgagagtcacgtggaatgggactggcggggagtgatg

SEQ ID NO: 49433 - DNA, 265 bp, Glycine max
cacttctcgaacaccgaaaacacaaaaatccattgattttgattttgaggggatagaaaaatcaatgacgggatcagactccggtgtggttacagtgtacggcaacggtgcaatcaccgagaccaagaagtcccccttctccgttaaagtgggcctggcccacatgctccgcggcggcgtcatcatggacgtcgtcaacgcggaacaggcccgcatcgcggaggaggccggtgcctgcgaggtcatggcccttgagcgtgtcccc

SEQ ID NO: 49434 - DNA, 193 bp, Glycine max
cgctcagcgattgcaccgacctaacagtccccacttgagcatctacccgccccagctcacatggtacccatcgatcttcaaccgaatcaccggagtgggactctctggtgtgctatacgcggcttcgttggtctacctcttccacccactataccccgctctcgactcggcccaccttatctcgctagtgcac

SEQ ID NO: 49435 - DNA, 234 bp, Glycine max
ctgatgtttggtcatgtggagtcaccctatatgttctaatggctgcatatcttccttttgaggaggcagaccttccaacactgtatagaaggataaatgctgcagaatttgtttgcccattctggttttctgcagacacaaagtcattcatacaaaaaattctggatcctaatcctaaaacacgggtgaaaattgaagaaataaggaaagagccatggttcaagaaaaactatt

SEQ ID NO: 49436 - DNA, 194 bp, Glycine max
gtaatcgcaatatctgttatttccttccatatacgagcttgagcctcgagctattgatgctttgaaatccgagttctctatacccatttacactgttggccctgccataccttcttttggtaatagcctcattgatgacattggctacttccaatggcttgacaaccaaccctctggctctgtattgtacatct

SEQ ID NO: 49437 - DNA, 206 bp, Glycine max
tgtatcgacagacgagaaccatgacttttaaactattacatctggtcaagccctttatgcccttcctccctgaggtcacagcgcctgagaggcaggtcccattcaaggaaagagtcctgtggacagcgatcactctatttatctacctggtctgctgccacatccctctatacggtattgtctcaagcgacagtgctgacccattc

SEQ ID NO: 49438 - DNA, 269 bp, Glycine max
actcgagccgattcggctcgagtacaactacaaaggttgctgtaggcgataagatattgaagtcgtgctaagtgcctaacacctgcagtgaacaatggcctctgcatcagcatctcttctcaagtcttcacttgttcttgaccagtctgagtgggtgaagggacaaacacttcgccaaccttctgctgcatcagttgtgagatgcaaccccaccaccccatcaggcctcaccatcagagctggttcctatgctgatgagctcgttaaga

SEQ ID NO: 49439 - DNA, 259 bp, Glycine max
ctcattttctatgtataagaattaagtgaaaaaaatgaattaaattataggtagaagttgttgtttttcccaaggttggttgattagtcatcctgtcttgaagcgggcgtaaaagaccaaccctttttaaattaaattttcaatatcatttgtatgaattagcatatatatattaacataaataacataaataagggattaataaaaaatgaatggatgattagaaacaccaaaatacacaaaggattagtaacgtata

SEQ ID NO: 49440 - DNA, 260 bp, Glycine max
cgagcagaaggtggcagcaacaaagcagtacattgaaaatcattacaaggagcaaatgaagaaccttcaggagaggaaggagcgtcgaaccatcttggaaaagaagttggctgatgctgatgtctctgaggaggatcaaaacaacctgcttaaatttttagagaaaaaggaaactgaatatatgcgccttcagaggcataagatgggtgttgatgattttgagttattgacaatgattgggaaaggtgctttggggaggt

SEQ ID NO: 49441 - DNA, 267 bp, Glycine max
atattattctcctcattccttcatttttaaacctagctccatctccctccactcaccataacatgtccatcagaagcatatgctgccaacaccaacttctgtgtaaatgttagcaacaatggctacattagtgctaatgaccccttgaactggggtgcggcggcggaggctatggctgggagccacctcgacgaggtcaagcgcatgctagaggagagaccctgaccatctcgcaggtcgcggcgatcgcggcccacgaccaggggg

SEQ ID NO: 49442 - DNA, 243 bp, Glycine max
ctggcatgaatggtggacattagctctcaaagataattccaacccacagatagccttgcttcccctgcatccagagttgcgtgcaagattcaactccactgccgcatgggaatatgcacggagcatgtctggcaagccatatggttatcataatatgatattcagttggattgacacagtagctgacaactatcctccacctcttgatgctcacttggtaatttctgtcatgtctatgtggac

SEQ ID NO: 49443 - DNA, 263 bp, Glycine max
ggaaaatctagcatgcttaacgcactattccggattgtggagctacaaaaaggaaaaatcattattgatggttgtgatatttctacattcggattagaagatgttcgaaaagttcttactatcataccacaatctccagttcttttctctggaactgttcgtttcaatcttgatccatttaatgaacacaatgatgctgacctatggcaagctttagaaagggcgcatttgaaggatgtaataagaagaaatacgtttggtct

SEQ ID NO: 49444 - DNA, 234 bp, Glycine max
caactttctggatggactccaatgtgttctttcaggcactgctagaggatgtggttggcagaaaattggtgcatttgtcaatctggggtcatactatatagttgggattccatcatctatcgtgtttgcttttgtattgcatattggtgggaagggactctggttggggatcatatgtgcactcattgttcaaatgtgttctttaatgatcataactattcgtactgattggga

SEQ ID NO: 49445 - DNA, 184 bp, Glycine max
atagattcagtgacagggaacaaaaggctaatacaagaatcagatcttcccaaccttccatacctacaagccatagtcaaagaaacactaaggattcaccctacagcgccactgctagggagagaatcatcagaaagctgcaatgtatgtggctatgacattccagcacagtccttagtgtttg

SEQ ID NO: 49446 - DNA, 269 bp, Glycine max
gattcaagaacgatgcatcctaacgtgttgaacagcaccggggcataaaacatgattgcattgatgccccggtgctgttcacacacgttaggattcatgaacgatgcatccctgtattctgctgtgataactggggctgtgaacgtgctctccactgttgtatcgatactttcagtggacaaagtgggacgtcgattctgttgctggaagctggtgtgcagatgttcttgtctcaagtggtgattgcaatcatactgggaataaaggtg

SEQ ID NO: 49447 - DNA, 263 bp, Glycine max
gcgcgacacaggcattcgaagacgctgtctcgcttgcctcctgcctgcaaatcggcggcaagaagaacatcgcagaggccgtcaacgtgcacaagacgttgaggttcacccgcaccgcctgcgcccagaaaatcggcttcgccaacgccgagctactccaaaagaccgactgggctcaagtcaaaattgaccacgcaagtcgtctcctcgcttgccaaagtggatctgggagcacgacgccgaaaggtacgcgcatgacaact

SEQ ID NO: 49448 - DNA, 217 bp, Glycine max
cttcccacgctcctccttctcatacccttcgccaccctcgtctccgcccgccctcacctcgccggagactttctccgactgccctccgaaaccgataacgatgacaacgtccagggcacccgctgggccgtcctcctcgccggttccaatggctactggacttacagacctcaggctgatgtttgtcagcctatcacatactaaggacaggtggcct

SEQ ID NO: 49449 - DNA, 260 bp, Glycine max
cgaatatctcctctagatggaataagctatttagtaattccttttggctataactttgttttatctgatctgaatattggtgtttttttatggattgctatttcgagtattgctcccattggacttcttatgtcaggatatgggtcaaataataaatattcctttttgggtggtctacgagcagctgtcaatcgattagttatgaaataccattaactctatgtgtgttatcaatatctctacgtgcgattcgttgagac

SEQ ID NO: 49450 - DNA, 255 bp, Glycine max
caaattacaatacaattatccgttttccattcacatttgtcagttagttagcagagtgcagtgacttgagaatggccttgccagtggtcgtcgacgcaccgtacctcaaagaggtcgacaaggctcgccgcgatctccgcgcactcatcgctaacaggaactgcgctcctctcatgcttcgattggctggcacgatgccggaacttacgatgctaagaccaagactggtggacctaacggttcgatccgtaacga

SEQ ID NO: 49451 - DNA, 251 bp, Glycine max
gtaatattgttctcgtatggaagtggcttaacttccacaatgttctctttgcaattacgagaaggtcaacatccattcagcttgtcaaacattgctaaagtgatgtttctagcaaaatgaagtcaaggcttgagttctccaccagagaaatttgttgaaaccatgaagccaggaagtcaactgtgcttagcaacatttagaaggttgtttttgtttgcaatagtttcttcttaagggcggacagatgaaca

SEQ ID NO: 49452 - DNA, 257 bp, Glycine max
gagataatgaaaacccatgatctcatctttgcatcgaggcctcacactctagttgcagatatattggcttatgaatcaacaagtattatcacggcaccttacggacgatattggagacagctactaaaaatttgcacggtggagcttttcacccaaaaacgtgtcaattcattcacataaaggtctttctatcaacctcgctgaaatagtagttttatcaatcatataatcatcatttcaagagccgcttttggcat

SEQ ID NO: 49453 - DNA, 245 bp, Glycine max
gttggatgctgagaggctgttatcagatatgcttaggaagggttgttcccctagtgttgttactttcaatatcttgattaacttcttgtgccggaaacgattactgggtagagccattgatgtcttggagaaaatgccaaagcacggttgtgttccaaattccttgagctacaatccattgcttcatgggttttgtcaagagaaaaagcatggatagggcaattgagtatttggacataatggtg

SEQ ID NO: 49454 - DNA, 233 bp, Glycine max
atggttttacatggatcacttgttagattagtagaaacttcaatcttgtgtttatgcaggcatatgtgcattgtatgaaaggaaattgaaagagttaaatccggccatcagaaatctctcttatgatattgtggatctctacaacttcatagatggtcttgctgacatgagtgctctagtgtctctctctctctctctctctctctctctcaagtcatgattcttgagcaata

SEQ ID NO: 49455 - DNA, 240 bp, Glycine max
tgatcctctaatttatgttacaaatcagcgtgacggcagggtcctttgtccatacgctgcttctaactggttatgcgtttatccacgaggactccgacaactgctgctttacatcaagaagcaatacaacagccccgtaatttacattactgaaagtggttatgatgagctcaacgatccaacactctcacttgaagaaagcatgatagatacttacagagttgattacttttatcgtta

SEQ ID NO: 49456 - DNA, 217 bp, Glycine max
ccattcctcaaggcatcagttaagccaagctagacaacctccctcctgttcttggactttattcgagctttataccgccattgatctatgcaatgatgggaagctcaagggatttggcagtgggaactgtggctgttggatcgcttcttatggcctccatgttgggtcgagtggtcaatttcaacgagaacccaaaccttttcctccacttggcttt

SEQ ID NO: 49457 - DNA, 193 bp, Glycine max
ctcatgctattttcagtcctctcttcatgcaagaactctgcagcctcagtaatggtagatgatctgatcgacactgctgggaccattgctgagggtgcagcactcttgcatgaacgtggtgctagggaagtgtatgcatgctgcactcatgctattttcagtcctccagcaattgagaggttgtccagtggct

SEQ ID NO: 49458 - DNA, 267 bp, Glycine max
gtcaatttcaaaaggctttcccttaccgacatcaagattgacttgttacctcaccatatcaagggcatcgacaagtgctctgttctggtcaatgacgtcgacgatgactacgagcctgatatggtgaggtcccaagtcaatttcaaaaggctttcccttaccgacatcaagattgacatcaagagggtctctaagaagaaagatcttgtcaaagccatggaggatgctgatgttaagaacaaatgggagatgggttcatggggtata

SEQ ID NO: 49459 - DNA, 267 bp, Glycine max
gttgtaggtcgcgagctgccgctcgcgatctaaggctcgaggttcggaagccagaaccctagcagccggcgagaatggcagacgttgaggttgacgtggcggcggcggcggcggcggcggctgcagggcagccaaagaagagaacgttcaagaagttcagcttcaggggggtggatctggacgcgcttctggacatgtccactgacgaactcgtgaagatgttcagtgatcctgcacgcagaacgttccagagaggtctcaccagaa

SEQ ID NO: 49460 - DNA, 236 bp, Glycine max
atggcgttaactgcaaggttctcatcaacattgtgtaggagagtactgatattggtcaggatgtataggggtaccttatcaacaaagctgaagaaagttgggatggtgaggaaggtcagatgattcggctatagagtagatgaaacacctgagattgatgtcattgagcgaagttcttgcaagggaactctgtgctcgactcaccgaggtactaaagtacggtacctgcgcttgga

SEQ ID NO: 49461 - DNA, 259 bp, Glycine max
gcaaaagtcccacaaaaagttgatcattcacttctcctcactgttggtttggggattaacccttgtccatcttgcacagctggcaatgggagtagagtagtggctgctgtcaacaatgtgacatttgtgatgccaaccactgcactgcttcaggctcattacttcaacatcaagggggtgttcaccactgatttccctggcaacccttctcatgtttacaactacacggcgactccgccggcggcagcatggcagacca

SEQ ID NO: 49462 - DNA, 260 bp, Glycine max
gttttgttcgggaaccagacattagggccgttcttccagcaccacaagaacaccaccttcgtgaatccccttttcaagggccagcgcgtgacgccactcgccgggaaccaggtcgaggtgtttgacaaggagaagggttcgggtgtttacaccatcgatttgaagctctttatggtggttcggttcaagttcttgctgttacaagagtgcgagcgtgaagcccaagattcggtgtgcgttgcacgtgccgctgaaatcgc

SEQ ID NO: 49463 - DNA, 264 bp, Glycine max
cagagaaagcttcgcaggtgctggtcacaggacttgcataagcgcttcttgcatgcccttcagcagcttgggggtgcagattgtgagtatctcaatatatactgccacaccaaagcaaatcagagagctgatgaatgttgatggcctcacaaatgatgaagtcaaaagccatttgcagaaataccgtttgcacactagaaggccaattcccatggttcacaacagttccgatccacaagcagcaccttttgtccttgtagggaa

SEQ ID NO: 49464 - DNA, 258 bp, Glycine max
gaagaatatttgctgtgttttggatattgacaggtactattactttagctcagcttttcgtctacattgctgaactaaacactgaaatcagacaaaaggaacttgtcaagtgggtacttacaaggaaagtgaccaatttagatttggaggctgcagatcttgatgaggatgggactgttggggctgcggaattcgttatttataagctcaaagagatggggaagattagtcaagaagatatatcacttgtgatgcagg

SEQ ID NO: 49465 - DNA, 256 bp, Glycine max
ggacaagcaaatgaaatattcaaggacctagctgttctggttcatgatcagggtgttgttattgatgacattcattcaaatattgatgcttctgctggtgcaacaacccaagctagggtccagctagctaaggcttccaaaagtgtgaaatccaaaacctcatggtgttggtggttgcttgcaatttttgtggtcgtgcttgtcatcttacttgttgtactcattttttagtgtgcaagtgcctacaagctggaca

SEQ ID NO: 49466 - DNA, 224 bp, Glycine max
cagaattctctaaaagagatctttttctgctctttgaagaaagaagggtcttgccttgattttggagatgtctctgctctcagatctcatcaaccttaacctctccgataccaccgagaaggtgatcgcagagtacatatggatcggtggatcaggaatggacctgaggagcaaagcaaggactctcccaggaccagttagcgacccttcagagcttcccaagt

SEQ ID NO: 49467 - DNA, 221 bp, Glycine max
catctccaagatatcagcatgcagcggtatttgttaatgcaaggctccatgtgtctggtggggcccttggaggaggacggatggttgaagattcatcgagtgttgcagtgttggacactgctgctggtgtttggtgtgataccaaatctgttgttaccagtccaagaacgggtagatacagcgctgatgcagcaggtggagatgctgcagttgagttgaca

SEQ ID NO: 49468 - DNA, 222 bp, Glycine max
ctcgagcgtttggatttcgcgattttcggcacgaattcggcttgtgctttcgcgttgaaactcgcagttttcttgctggtgggaaagacttcggctttgacaatgaatgttgctggggtggtcaaggattggcttttgattacgttctcttggtctgtgataaaggacactgtgaccccgattaacttgattggttacgggttggcgtttttgggggttgcg

SEQ ID NO: 49469 - DNA, 265 bp, Glycine max
cctgaatgatgcacccacactctgtaaataccttgaatcattttataccttgcgtaacctgtggcatccaccataaatacattggcaggtgctctttacaaagtattttgtgcatcccctgatctggcaaggaaggaaatgcgccaagcttgcttcgattatctcagccttggaggcctattctcggaaggaccagtctctttactttctggattaaaccctcgtcccttgagcttggttctccatttctttgctgttgcaatat

SEQ ID NO: 49470 - DNA, 258 bp, Glycine max
ggattttctccctttttgagggaggatgataatagaatcttgagaaatggcaatagcaatggattgaaccctagtgtaagtatgatgggaaagggaaaagtgaggccagaagcaattattgaagctgcaaatcttgcagccaataagaaaccctttgaggttgtttactaccctcgggcaagtactcccgagttttgtgtgaaggcctcactagttgaagcagcaatgcagactaggtggtattctggaataaggttc

SEQ ID NO: 49471 - DNA, 240 bp, Glycine max
gaaatataactaatattctttagaataatcaaaaagaatattaaattcaaataaattttagatagaaaaaagacttaaaaaggaggatttgaaatgcgagatctaaaaacatatctttccgtggcaccagtagtaagtactctatggttcggggctttggcgggtctcttgatagagatcaatcgtttttttccagatgcattgatattcccttttttttcattctagttattgacacgg

SEQ ID NO: 49472 - DNA, 248 bp, Glycine max
aatttttgcgtgccggttgggttgcttccggggtaccgggtcctttggggctcttttgttctcctgatgggtctgtgaattttgctattttctcgagacgtgctgagagtgtggttttatgcttgtatgatgagaatgacatggagaagcctgctttggagcttgatttggatccttatgtgaataggacaggtgatatctggcatgtctcgtttgagagtgccaagggtttcatgagctatggttat

SEQ ID NO: 49473 - DNA, 247 bp, Glycine max
gaaatcgcatttccggcaagattccgacggacatcgggaacctctggagtctcaccctattgagtctgggtgacaacgagatctctggcgagatcccaatgtcagttgtaaaccttgccagactcaagcatctagacctcagcaacaaccgactcactggcgaaattccctatgatttcgggaaactcgccatgctgagtcgggcgttgctgagtgaaaaccaattaaccggttcgatccctaagtc

SEQ ID NO: 49474 - DNA, 240 bp, Glycine max
atctcaccatatcgtcaatcaaaagactcctatctacgatgtctgctccccagttcgaccccaagaacatgatctacaggaacatgggccctaccggcctccgtgttcctgtcttcagctacggtggatggcttaccgtcggcggtacccagaagggtgacatcgtcaaggagctcatgaagacctgctttgacaatggtatcaacatgttcgacaatgccgaggcttacaatgccggcg

SEQ ID NO: 49475 - DNA, 240 bp, Glycine max
tcaacctgctgatcctcactttttcaatttactatctaatatctatttgtactataagcaggtcatgtaagcttctactttccaggttctggggcaatttttactggagacaccttgttcagcttatcatgtggcaagctcttagaaggaacccccgaacaggttgatttgaattgcttttagtttctcattttgttttctggttgtacatttctatcttcagggacaagtgattgcatc

SEQ ID NO: 49476 - DNA, 251 bp, Glycine max
ctgataaaggcaggacattgttgcttggtgtggatgacatggatgttttcaagggaataagtttgaagttgttggccatggagcagcttctcattcagcatcctgagtatcgggaaaaggtggtgctggtccagatagctaatcctgcgaagtggcgaaggtaagctgtgccacaagtgcaaacctagacgactgccactgtggaacgaattgctgatgcatttggtgaaacgctggtatgatcccgtcat

SEQ ID NO: 49477 - DNA, 263 bp, Glycine max
ggccaggcaagccccactcaaccaccacacctctcctcgttcacgctacccctttctgctcttcttctacctttcaagttttaaaagtataaagatggcagagacattcctatttacctcagagtcggtgaacgagggacaccctgacaagctctgcgaccaaatctccgatgctgtcctcgacgcttgcctcgagcaggacccagacagcaaagttgcctgcgaaacatgcaccaaaaccaacttggtcatggtcttcggag

SEQ ID NO: 49478 - DNA, 259 bp, Glycine max
ctcgagcgtgatttttggttatggccttggcttcgttataataatggttggaacaaccattgggatggtgctgccatacttaattgggctactgttccgtgaccgaattcatcaatggttaaagagatggccccagaatgctgcactgattaggcttgctggggaagggaactggtctcgtcaatttcaagtggttgcactgtttagggtttctccttttccctatactatattcaattatgccgtggtagtcacaaat

SEQ ID NO: 49479 - DNA, 254 bp, Glycine max
ggaagagctcgacttcaaagttttccaactaacctcacacaacattctcagcactcaaggagaaagccaagggtagcaccaatgctcgtgccactgggtttaatgttatcactgcccatatatggagatgcaaggccttatctgcaccctacaacccctctaggtcatccaccatactatatgccgtggacatacgtccacggctgaaccctcccctccccaaatcctttgcgggtaatgctgtgttaaccgcg

SEQ ID NO: 49480 - DNA, 222 bp, Glycine max
aacgagcgattcggatcgcgattatagcgaaccctggcgaaggcgaattgcattctatctacggaacgattatttgaggaaacgcagagggacgaagacagagcaaaatcatactttgaccaagccattcacgccgctccaaatgattgtacggttcagggatcatatgcgcacttcatgtgggaagcaggagaggaagaagaagttgttaacggaggagtg

SEQ ID NO: 49481 - DNA, 240 bp, Glycine max
atctgtggtgcctccattttttacgtggcgtgtatgaaccatttgggagacatcatgaagattccaagttccaagcaactggttgtgggatttgcacttggaaatgaaggataggcaacgttggagagctgaagaggatgctttactacgcgcatatgtcaaacagtatggtcctagggaatggaatctggtgtctcagcgcatgaacacacctcttaacagggatgccaagtcatgctt

SEQ ID NO: 49482 - DNA, 237 bp, Glycine max
gttggtctcaacaatgggttctgattccaatttgggagggtcgccctcagcatcttcgcccagtgccaaacgcaccagagatcccgaagaggaagtttacctcgacaatcttcgctctcacaagcgttacctaagcgagataatggcatccagtcttaacgggttgacagttggagactcacttcctgataatctcatggattctccagcaaggtctgaaagcatgttctctttcag

SEQ ID NO: 49483 - DNA, 232 bp, Glycine max
gcaaagagccgtgttttgtctgtgcccacttggatgggccccttggagcccaagattggtagaagctgtgatatttggttgcatccctgttattattgcagatgacattgttcttccattcgctgatgcaatcccatgggaagagataggggtgtttgttgatgaggaggatgttcccaagttggatacaatactcacatctatcccaccagaagtcatattaaggaaacag

SEQ ID NO: 49484 - DNA, 254 bp, Glycine max
ttcttctgaaaccacgcagaaacccaagggaacgagtagttctcagacttgggccaggagaataagtgggaagcccacgaacggtgttgggaagaggcgcgtgccagcctcgccgcacgagttgcactataaagcaaaccgggcccaagcagaggagttgaggaaaaagaccttcctcccttacaggcagggtctacttggatgcttgggatttagttctaagggttatggggccatcaatggctttgctagag

SEQ ID NO: 49485 - DNA, 237 bp, Glycine max
gaacaatttcaaagacttcgtgatttgaaacaacttggcctaagttatatggtttaccctggagccgtccattctcgctttgagcattcactgggtgtttattggctggctggaaaagctattgatgccattaaaaaataccaaggccaagagcttggtattgaacatactgatgtattgacagtaaaacttgcaggattgctacatgatgttggtcatggtccattcagccacact

SEQ ID NO: 49486 - DNA, 258 bp, Glycine max
cgaggttattataaactctgaagtctgggatctgcgcaagttcagactgttacgcagtgtaccttcactagatcaaacatcaataacattcaatgcacgtggtgatgtaatgtatgcaatcttaaggagaaatcttgaggatgtaatgtcagcagtccacactcgtcgcgtcacacatcctctttttgcagctttccgcacagtggatgcgacaaattattctgacattgcaactatccctgtggatcgctgtgttct

SEQ ID NO: 49487 - DNA, 253 bp, Glycine max
agaaggttcatccaatctccgaatcctgtaatcgcattgcaccatgtcgaggagaaaggtcagagagccaaaggagggaaacgtgactcttggcccagctgttagagatggcgaacatgtctttggcgtcgctcgcatatttgcctcctttaatgataccttcattcatgtcactgatctgtctgggagggaaacgcttgtccgcatcactggtggaatgaaggttaaggctgacagagatgcgtcatctcct

SEQ ID NO: 49488 - DNA, 254 bp, Glycine max
gcctgtggtcatcgtggcatttgtgatgagtgtgttttggatatctactacagccggagagctggtgaactgcctagaagctataggtgtgcttcttgaactgccgccagcactcctgggtctcacagtgctggcgtggggaaattcagtgggagatcttgttgcagatgttgcagttgctaaagccggtcatccagctatggcaatggcgggatgctttgcaggaccaatgtttaacatgcttgttggccttg

SEQ ID NO: 49489 - DNA, 254 bp, Glycine max
ccacaccactctctctgctcttcttctacctttcaagtctttaaagtattaagatggcagagacattcctatttacctcagagtcagtgaacgagggacaccctgacaagctctgcgaccaaatctccgatgctgtcctcgacgcttgccttgaacaggacccagacagcaaggttgcctgcgaaacatgcaccaagaccaacttggtcatggtcttcggagagatcaccaccaaggccaacgttgactacgag

SEQ ID NO: 49490 - DNA, 239 bp, Glycine max
gacaggcctgtctttgctgcccctgcccccatcatcaccccaactgtgagagaggatatggcaaaggaatacgagcaagctattgaagaactccagaaattgttgagggagaagagtgaactcaaagccacagctgctgagaaagtggagcagataacagcttctctgggaacatcatcatctgatggcatcccatcatcagaagcctcagacaggatcaaagctggtttcattcactt

SEQ ID NO: 49491 - DNA, 229 bp, Glycine max
cttctgaatcacttagttgaattgaattatcttcaaaatgagagaaatccttcatgttcaagctggtcaatgtggcaaccaaattggaggcaagttttgggaggtgatgtgtgatgaacatgggattgatgccactggaaattacgtaggcaattcccatcttcaacttgagagggttaacgtactacaatgaagcaagtggaggacgctatgttcctcgagctgtgct

SEQ ID NO: 49492 - DNA, 240 bp, Glycine max
ccagcgggttaagaacgttgcaggttttggatctgtcttcaaacctcttgaacggttctcttcccaaggatttcggcggtgataatatgcgttacttgaacatctcctacaacagattctccggcgaaatcccgacggagttcgcggcggagattccggggaacgccaccgttgatctctccttcaacaacttaaccggcgaggttccagactccactgtgttcacgaatcagaattcga

SEQ ID NO: 49493 - DNA, 265 bp, Glycine max
aagtcaccttcctataacccaccaggttacaaagcaccatcttataatccaccagcttacgagtctgcttcctataatccaccaggttacaaagcaccatcttataatccaccaggttacaaagcaccatcttataatccaccagtttataagccaccttcctataattcacctgattacaagccaccttcctacaatccaccagtttacaagtcaccttcttataattcaccagattacaagacacctgattacaagcccactt

SEQ ID NO: 49494 - DNA, 272 bp, Glycine max
gaaagatattccaacaccatggtaagagctccttactttgataaaaatggaataaaaaaaggtgcatggagcgaggaagaggataagaggctcatggcttatgttgagagacatgggcatcccaattggcgtcaactaccaaagtttgcaggattgcaaagatgtggaaagagttgcagacttcgttggatgaattaccttaggccaaatctaaaacgagggaactatacccagaaagaagagcaaataatcaaggatttgcataaaaagca

SEQ ID NO: 49495 - DNA, 268 bp, Glycine max
gtggagtgcaggtgtgatcatatacattctcttatgcggaacacctccattttggggtgaatcggagcaagagatatttgaagaagttttgcatggtgatcttgatttctcttcagatccttggcttaatatctctgaaagtgctaaagacttggttaggaaaatgcttgttagagatcctagaaaacggatgacagcacatgaagttcttcgtcacccttggattcaggttgatggagttgctccagacaagcctcttgattctgca

SEQ ID NO: 49496 - DNA, 240 bp, Glycine max
ctcgagccgctcgagccgaatcggctcgacacaaacacacggctgataccgcaacagtgagattctccatagggacatcaatgcaccagtaaatacgcagccctgaccagaatcccaaggcgagaattctgtggcaagggttgcgactcaggtctgtagccataagcctactgctcgaaggattgctatcccgtgtgctacgacggtctcgtcctacacgacaaggggtgaagtgcttgt

SEQ ID NO: 49497 - DNA, 253 bp, Glycine max
ggccaatcccataaatgataatggggtttcatacacaaatgtttttgatgcaaattttgataccttggtctctgccctcgaaaaagtaggatatgggaacatgccaattttggtaggagaggtggggtggcccacagatggtgacaaaaatgctaatgtaggcaatgcatttaggttctataatgggcttttaccgaggcttgcaataaacaaagggaccccacttaggcctggatttattgaagtttaccta

SEQ ID NO: 49498 - DNA, 248 bp, Glycine max
gttcactcttcttctcttgcggctagggtattagcgcagcttcttctagatttaaggacgatgggtaaggatcagggtcacatcagtattgtggacattggccatgtcgtctctgggatatccactaccactggtcacctgatttacaagcttggtggcattgacaagcgtgttattgtgactcttgagaaggacgctgctgtgatgaacaagatgtctttcaagtatgcctgggtgctggacaaact

SEQ ID NO: 49499 - DNA, 248 bp, Glycine max
gtcaaaggaggcatcaagttgccaattgggttcaggttttgtcccaccgatgaagagcttctccttcactacctcaagaagaaggcgtttgctcaacaattacccgcttcagtcatttcagagtttgacgtgtttcagactgagccatggaaacttccaggttggtccgaattctttttttctttcctacagctgcttcatttgttttttcttggttgttacttagtttggatttcagccattgaaaa

SEQ ID NO: 49500 - DNA, 246 bp, Glycine max
cacagggagatcgaactaaaaaggtgggagttgttgacagcgaatatgtttttcaccagggaatacaaactctgggggggagtggtcacagaatgacaaagaaacaaggtggagtaggaattgatgtgcgaactgagataagaaggcaatcaacatgggaatttgaaatcttcaaagagcggtggaatgaagccattgctgcagacaaaaactgggttgatccctttaagagtgaccaaagacgca

SEQ ID NO: 49501 - DNA, 221 bp, Glycine max
gtctcggagttggacaacgtcctccgctccctcggatccggcgtcccgcggaggagctccagcgtgtcatggaagaccttgacaccgatcacgacggcttcattaacctctcggagttcgccgccttctgccgctccgacaccgcggacggcggcgacaccgagctccacgagcatttaatcataatccaacgcacggtagcttcgcgccactggcttttc

SEQ ID NO: 49502 - DNA, 272 bp, Glycine max
cgcataacctaggcttttcccaattccgaattccgattactcggatcgatctccgattgttgctagggttagggttgttgttgttaacgatgtcgctgaggccgaatgctagaaccgaggttcgccgcaaccgctacaaggtggcggtggacgccgacgagggtcgccggaggagggaggacaacatggtggagatccgcaagagcaagcgcgaagagagcctccagaagaagcgccgcgaaagcctgccagctcagcagcagttccccact

SEQ ID NO: 49503 - DNA, 259 bp, Glycine max
agctgatgaagagaccttgagagaagctatggcagtgctcagggatatgtttggacccaacatccccaatgccattgatatacttgttcctcgctggtggaataacagatttcagcgtggcagctacagcaactacccattatttccaatcataaactttttcataatattaaggcccctgtaggtcgcatttttttcactggagagcacactagtgaaagatttaatggctacgtacacggtggatacctggcaggta

SEQ ID NO: 49504 - DNA, 223 bp, Glycine max
ctcgagccgctcgagccgctcgagccgattcggctcgaggggagctaaaggtgcagaagctcgtgctcactatctccgatggagagagtggagatcgtctcaccagagccgctacaggttttggaacagcttatggccaaacccctgtgttttccaaagcaaggtacacggttcgttcctttgggattagaagaaatgagaagattgcatgctatgtcactgt

SEQ ID NO: 49505 - DNA, 255 bp, Glycine max
ggcttccttaagctccttagtgctgctccttgcagctctaattctatcccctcaagttcttgcaaactatgagaattgcccagtgtacaagcctcccactgagaaaccaccagtttataagcccccagtgagaagcctcctgtttacaagcctccagttgagaagcctccaatttataagcctccagtagagaagccaccagtgtacaagccctcagttggtcctattaagacgcgtcagaaggaccatgatgag

SEQ ID NO: 49506 - DNA, 246 bp, Glycine max
cctgaattacgcaaataatgacgagtctgggagaggtgatatgttaagtatcttaaagcaaattgaaatggacttgtcaaacaccaacattagcttttggagtcaggcttcagatcctgtactcctccatgaccctttctcaacattgatgtgggttcttttttgtctaccacacccatttttgtcatgtgaagaatccttgttatccctagtgcatgttttctatatagtagccgtaacccaggc

SEQ ID NO: 49507 - DNA, 246 bp, Glycine max
gttcgctgcccgcgacgttgtgagaagtccactgaaccttatcatttagaggaagaagagaagttgaaggatttggcagaggcttttgagatgtaccatgactctgaaatgtttgggtttataacacccaaaagcttgcaaaagatgctaggtaggttaggagaatcaaaatccatggagcaatgcacagctatgattggccactttgatttgaatggagatggcctgcttagctttgatgaattt

SEQ ID NO: 49508 - DNA, 244 bp, Glycine max
gtcggatattctccagctaaaagtcaaaatatggttcttatgggcggtttaacaaaacatgtaccaattacaaaaacttcttttttagtgggtacgctttctctttgcggtattccaccttttgcctgtttttggtctaaggatgagattcttaatgatagttggttgtattcacccatttttgcaataatagcttgttgtacagcaggattaactgcattttatatgtttcggatctatttac

SEQ ID NO: 49509 - DNA, 230 bp, Glycine max
aatcggctcgagtggaggcacaaacatgaatgctatttataataggtagggttcctaattctaagaggctgaatttagaaactgtaggtgttgagcttgacaacactggagcaataaaggtggatgagtattcccgcacaagcatacctagcatatgggctgtgggtgatgtcacaaaccgaatgaatctaactccggtggccttgatggaagcatcgtactttgctaaa

SEQ ID NO: 49510 - DNA, 229 bp, Glycine max
atcttttatacccagccctcccttttcttttggtaagcaaactgattcccatttcatccatgctatcttcctttgatccgaacctcctccccataggaaccttcgctgaattttgatcagtttcgccgctgtttcgctaggtaacctgaaaaaagaaagaaaatagattgggatagatgatagggtggactgtataagggtcactctccccccaaaggatagacatctt

SEQ ID NO: 49511 - DNA, 232 bp, Glycine max
gtttcactttctttgcatagtgctacctcctttctctgtgactctgaggtccattggatatgtctccgtcgttggatcttcctcccaagggtggcttctgttttgatctatgccgaagaaacgcaatgcttcaaaacaagggcctcaaagccccaacctttctcaaaactggcaccactattgtcggtttagttttccaggatggtgtcattcttggtgctgatactagggc

SEQ ID NO: 49512 - DNA, 273 bp, Glycine max
ctcgagccgaatcggctcgagcggctcgagcattctcatatccacaatcaccccccctcgacactcgctcttcccttcctacggtggcgacaatgtcgactcctgctaggaagaggctgatgagagacttcaagatgctgctacatgatccgcctgcagggatcagttgtgccccccaggataacaacatgatgctgtggaatgctgtcatatttggtcctgatgatactccatggcatggaggcacgttcaagttgacactccaatttactg

SEQ ID NO: 49513 - DNA, 270 bp, Glycine max
tatcaacctaaatatgttaagacacacacaagctatgatggccataggatacttcataactctgatttcgtatttgtgaggaacagtggcttctgccagagaaatactcttggacagtactttggccttggatccgagacacgaggcacagctacggatgttccagatccttttgggatagctgtaggggatcctgcagaaattcctgaagggtatgaggagaagtggatgttcaatatccatgccattgatacacgcggtgtagtggat

SEQ ID NO: 49514 - DNA, 272 bp, Glycine max
gttggaagctcagcacacgaacctgcggagagtgacttaccttgtcttagatgaagctgatcgaatgctagacatgggttttgaacctcagatacggaaaattgtagcccagattcgaccagataggcaaacattattatggagtgctacatggccaagggatgttgaaactctggcaaggcagtttctgcacaacccatacaagatgtgaaagacataaaatgtgtgatcaattatgattttccaacaagcctggaagattatgtccacag

SEQ ID NO: 49515 - DNA, 266 bp, Glycine max
aaatatttttgcacggacgttgtccagtcaaagtttacttgggcttgataaggagaaagtgcttgctctagacaaaatctcatctattggtctatttgtgattggtataatggctttggctgaggcttgtggtgtggccgtgcaatctgttgtgaccgttggtggtataggaggtgtggctactgcttttgctgccaaggacattcttggcaatgtgtccagtggtttatctatgcagttttcaaagcccttttcaattggagata

SEQ ID NO: 49516 - DNA, 242 bp, Glycine max
ctcgagccgcgatgcagtacggtggagcgttttattgtaatgaatgtgaaagtgaaattattctactccaaaaaaacaaggttcagagacttttccgattcctggaagaagagaagagaaaacctaaatcacagatccatggcggaagaacaccgatgtgaacctcccgaaggtcaccgactctgcgtcaacaactgcggcttcttcggtagcaccgccacgatgaacctctgctccaaatg

SEQ ID NO: 49517 - DNA, 266 bp, Glycine max
ccagtattataaaggagaagttgaaagattttccggattacaagcccaaggacattgtcaatgacatcaaacaggaatatggaattcaacttaactattttcaggcatggcgtgggaaagagattgctaaggagcagcttcagggttcttataaagaggcatatagtcagttacctttcttctgtgaaaaattaatggaggctaatcctggaagtcttgcgatgtgcactacaaaggaagactcaagctttgaccgtctctttata

SEQ ID NO: 49518 - DNA, 260 bp, Glycine max
gttgctgggctgggtaaaattcggcttgaacttgaggagattgtcaagttctttactcacggagagatgtaccgaaggaggggagtgaaaataccaggtggcatacttctttgtggccctcctggagtgggaacgacattgctggcaaaggcagtggctggtgaggcaggggttaatttcttctctatttccgcttcacagtttgtggaaatatatgtcggtgtaggggcttctcgtgtccgagcactttaccaagaagc

SEQ ID NO: 49519 - DNA, 257 bp, Glycine max
ctcgagcgctcgagccggctcgagtgggttacaaatgtcagagctgatgacattcatgctggagatgcccttgccgtttcagaaattcgaggtcggtggggtgcttttgagactctagagaagtgggttagtggagcttatgctggccacactgctgtttgtctaagggactccagtgggaagctttgggttggagagtcaggacatgaaaatgaaaagggagaagatataattgctgtgataccatgggaagagtg

SEQ ID NO: 49520 - DNA, 128 bp, Glycine max
gaagaagcttacatatgatggaaacgaatatgtcttctctgatggaattgggaaaatatctcttgaatttgcccagaaagtggctaaaaaatgtggttatgattgcactccatctgcctttcagattc

SEQ ID NO: 49521 - DNA, 215 bp, Glycine max
atatagcccaagccctatacaaccaaaccctaacacacacccatttgattcagtttccatggctagcctcaaggttgcatttttggctgcagtgctctgcatggttgtggtgagtgcacccatggcacatgcagctatcacgtgcgggcaggtgacgaatagcctgatcaattgcatcggttacctccagaacggaggaacgccgccgtcgggat

SEQ ID NO: 49522 - DNA, 255 bp, Glycine max
cacactccaaagtcaccctacaacaacaacacacacactcctcacacaaatattgttggtgggaatgactgtgttgccagatacaataacatagcattggagttcaatgataagctcaagaatttgaccattaagctaaaccaagagctccctggactcaaattggtgttttctaatccttattacattatgttgaacatcataaaaagactccaacttaatggatttgaatcgacctcagtggcatgttgtgct

SEQ ID NO: 49523 - DNA, 248 bp, Glycine max
gttcaaggagcttcttaaggctgggatggttgcacaagatgaagataattataaagaagctattgattcagcattcaaagtatttgctccccgaggaataagtttggagtcgcaacagatactaaatgatagttctgctgaagtggactctaattcttcagatttttgggtgttggtgacagctcttaaggatttcattgcaaatgaaggtggtggggatgcaccccttgaaggactataccagacat

SEQ ID NO: 49524 - DNA, 100 bp, Glycine max
tgcgcttgcccacgcgcttatagctacgcgtacgacgacaagaccagcaccttcacttgcgcttccgcggattataccataaccttttgcccttccccta

SEQ ID NO: 49525 - DNA, 233 bp, Glycine max
ggaaggaagcaagaatctgaatatggaccgagtgatggaactcatggactcggacagagggaaggagattagacagaggatttttaagatgaaaatcagtgccaccgaagcaatgtctgaaggttgatcttctgtcgttactttgaatcggttggtagatatatggagggagcactaattaatgtaatgtttatgcagctaagcataatttatttggtagagaattactgtga

SEQ ID NO: 49526 - DNA, 145 bp, Glycine max
  unsure (1)..(145): unsure at all n locations
ctcatggccaggaagatgaaggacactgattctgaggagaagctgaaagaagtatgccaggtttacgaaaaggacatagttggttcatttcgactgtaagattcggaatgaataacnaacctgggggagaagctcaccgatgaag

SEQ ID NO: 49527 - DNA, 263 bp, Glycine max
ctagttgatttggttcatgacaaagaaaaaggaaggattttgaaattggacagcattagttctggggaccagtggaaaaatgtggatgttttgattttcaacacctaccattggtggactcacactggacagtctcaagggtgggattactttcaagtggggcatgaattaataaagaacatggatcacatggaagctttcaagattgggctgactacttgggctaaatgggttgattctaacattgatccttcaaagactaa

SEQ ID NO: 49528 - DNA, 254 bp, Glycine max
ggtccccggtggtttctcggagcagcattgacgatggaatgctttccttcacttccctgccggctgcaaatataaaatcagttaacggtgcttgtgtcggtgccggtgattccgatcactcggacctggaagctgaaccaaagattctatgctctacgagctgtagttccaaatgtatccaagatggacaaggcatcgctgttgggggacgccatattgtacattaacgagttgaaatcgaagctcaacgtgct

SEQ ID NO: 49529 - DNA, 259 bp, Glycine max
ctcgagccgaaaatataatggttttaatagggaaggataaaaatgcttggtggtttgcatagcagattgtatctgatctggctttattttactctgaattatgctttgacgacgcaggattgttgtctccgaatagtactgtgtcgccgacattgtactattcggagacaacaatcctgtcgtcgtcaaagcctaagtttgggacatactggattaaagatgggaaagttgttggggtctttctggaaggtggaactcc

SEQ ID NO: 49530 - DNA, 260 bp, Glycine max
ctcgagccgattcggctcgaggccccactcaaccagcacacctctacctcgttcacgctaccacctttctgctcttcttctaactttcaagttttaaaagtataaagatggcagagacattcctatttacctcagagtcggtgaacgagggacaccctgacaagctctgcgaccaaatctccgatgctgtcctcgacgcttgcctcgagcaggacccagacagcaaagttgcctgcgaaacatgcaccaaaaccaacttg

SEQ ID NO: 49531 - DNA, 268 bp, Glycine max
cgcccactcctttctctgtctccatcgtttcgcattgcacaagcactctctctttccctgacccattttcaggtcgtcaacgggcggcatcgtcagctcgttccgccgatgacttgagggacatccttggctccgttggagctgacgcgaacgatgacaacatcagcaacttcttgtctgaagttaatgcgaaagacattgtggagcttatcgcctccggtaaggaaaagctggcctccgtgccttctggcggtggcgccgccgttgc

SEQ ID NO: 49532 - DNA, 256 bp, Glycine max
ggaagcagagaccgaaatacttcgagatggcccgtacaaagcaaactgctcgtaagtcaactggaggaaaagctcccaggaagcagcttgcaaccaaggctgcacgtaagtctgcaccaacaactggtggtgtgaagaagcctcatcgttatcgccctggaactgttgctcttcgtgagattaggaaataccagaagagcactgagctcctaatcaggaagcttcctttccagaggttcgttcgtgaaattgccca

SEQ ID NO: 49533 - DNA, 119 bp, Glycine max
  unsure (1)..(119): unsure at all n locations
aagctatgggttgtaaaaaagattcggtaggggagcgttccgccttagagggaaggacccgcgcgagcagtgctggacgaagcggaagcgngaatgtcggcttgagtaacgcaaacgtt

SEQ ID NO: 49534 - DNA, 262 bp, Glycine max
tgtgtctcaacaacaaatcgaaatttccctggtcggatggggcacatggaaggccagatatatcttgcttccccctatactgctgcagcatctgcactaactggtttcgtaactgatcccagggagttcttgtagatcagctaaaatgggtagaaagcagtttctacctaattggaaaaataataaaataaaaaaaagctcaaagaacttttatgccggaaccagaattatgtattttaaagtcaagtagttagcttgtaag

SEQ ID NO: 49535 - DNA, 248 bp, Glycine max
cgcgtcggtcaggacgagtttcacggcttgaatatcttacctgtatggagcgatccgagaaaaactctgtcacaacatgttggtttagcaggagctccttacaggtgctgagcttctctctgactccttccgttacacggaccattgagaatggaatgctgtgggacgttgaggggacgtgggttgtcaaaggagcagttgatgtagacattggtagcagacccttctgctgagggtggacgacaaga

SEQ ID NO: 49536 - DNA, 211 bp, Glycine max
  unsure (1)..(211): unsure at all n locations
caaaatagnaaatgatgacaaaaataaacagtcttaagaaagaatatcgtgcaaagaacatcgttaacgagcccagagttttagtggcaaacttaacattccctgatgtccttgaagcagccctgggccacgggatggaatcattcaatgttttatcaaaagagataaatctactttaacataccacctattcctttgtctcagccctgct

SEQ ID NO: 49537 - DNA, 232 bp, Glycine max
ctgaaactgctaaaaaagcaaacaacattattgtaaacaagatttttctggatcatgcaagattatccattcacttcctttaaatacctcacgactctcccttagagcatcatcaaacaacaaaaagactttctctttacaaattttgtaactttcaagactcagctaataaacatcaaaagatgtctctgattccaagtatttttggtggccgaaggagcaacgtgttcga

SEQ ID NO: 49538 - DNA, 247 bp, Glycine max
ggcttatacaaccttagaactcagcatcatatccgcataggtcatcaagcacgttctactcatctcccagatggatgtatacgccgtcgcttcactctccggtaacccttgtgaatctcacttcgttaatatggtttgttaggaagatcatgtaattgttcgctgatgtggagacttctgagttgtgatagggtttatatcttgtgtcctgtggatttctctcatgcactagcgtgatattttgtca

SEQ ID NO: 49539 - DNA, 245 bp, Glycine max
tctcgagccagctcgagcggcttcgaggtggtcacttgccggaacgaagacgagcaacaccatcttacattttccggcgatctcttgtaccttccatcatcaccgttttccggcgatccctaatcctcgcaaacagaaatgacgacatcaaggcgccttgcggacaggaaggtggagaagtttgagaagaacatcacaaaaagaggatttgtgccagacactaccactaagaagggaaaagacta

SEQ ID NO: 49540 - DNA, 268 bp, Glycine max
ggatgacagaggcagggccagtgctatcaatgtgcttagcgtttgcgaaggagccaatgcaggtgaaatcaggtgcctgcgggactgtcgtaagaaatgcggagatgaagatcgttgaccctcgaactggtgcttcgcttcatagaaatcaagctggtgagatttgcatcagaggcaaccagatcatgaaaggttacctaaatgatcaagaggccacacaaagaactatagacaaggaaggatggttgcataccggcgatattggata

SEQ ID NO: 49541 - DNA, 204 bp, Glycine max
catgtggtagccaaatgggttttcaattctcttaaggggcacttgcaatgcaaagcagttttctccccttttaaaataaataaatgcagttcattttgtaacattttacatgccactctggggtgcaattctgtataatgggtttacatactttcaagtaatacgcatgctaaataatgcaacccgtatggcggttggtatgtc

SEQ ID NO: 49542 - DNA, 261 bp, Glycine max
ggttgcctcaatccaatatcgagcattggcagaaaaggcatcagatgcttactacaaactcaccaataccaaagcacagatacaatcctatgtctttgatgttatcagagctactgttccaaagatggaacttgatgctgtttttgagcagaagaacacaattgcaaaagcagtggacgaagaacttgggaaggtatttcctttcattttatttttaaattaagaatggagaactatgtaatctgtttggttttactttct

SEQ ID NO: 49543 - DNA, 258 bp, Glycine max
gatggcaaagagtcgcagcttctacgttatcgtgttgttgccatggtattagaacttggaattattgttcattcagtggtgataggacttggcatgggagcctcaaataacacgtgcacaataagaggtcttatagccgccatgtgcttccatcaaatgtttgaaggaatgggtcttggtgggtgcattctacaggctgagtacaagtttttaaagaaggccatcatggtggtctttttctccatcacaaccccattt

SEQ ID NO: 49544 - DNA, 242 bp, Glycine max
ctgttgtgagtgtgaacattgagcctgagccaaaggtcgtgcagcaggatatagtagacatgtacatgaaaagcatgcagcaattcactgagtcgctagcaaaaatgaagcttccgatggacttggaaagtgaaccaaccagttcaggaaattcaaccactgagcagaaactacagccatcaaagagcaataattcccgcgtgttttatggcagcagagctttcttctgatcttttgcttcc

SEQ ID NO: 49545 - DNA, 248 bp, Glycine max
cttaggtcttccgaattcgaagttaatttgcaagatggctaaggaaaaggctcagatcaacattgtggtggttggtcatgtggaccctgaggaggcaaccaccattaacgagctgaagaagcctgttgtggagaaagaagctccagggcatgccatatgagggcatgcacgtacggcctcggaggggaaccagaaaattatgttaacaaaataatctggaaccctaatgtatcagttcatcatcagtg

SEQ ID NO: 49546 - DNA, 246 bp, Glycine max
ttgggactggaggtacagtaacaggtgctggaaaatatctgaaagagcagaatcctgatataaaggttaggcatttaattttctcatggtgtgttaatctttctaatgttcccgctgtattctttatgattttttctttttttcttttaacttagctatatggcattgaaccagtagaaagtccaatactgtctggaggaaaacccggtgagtattgattttttatgtgtttcagggcaactttct

SEQ ID NO: 49547 - DNA, 254 bp, Glycine max
caagttactatctataattaattaaattcctcgtggaatattgaggaagccatgtctacagctgggcaggtcatcaagtggagagctgcggtggcatgggaagcagggaagccactgtcaatagaaaccaagaagtggcaccaccccagaaaggtgaagtgcgtttgaggatcctcttcaactccctttgccgtagtgatgtttattggtgggatcctaaggaccagactcctctgtttcctcgtatcttaggc

SEQ ID NO: 49548 - DNA, 248 bp, Glycine max
cggagatgatttacctgcttcaatggcgaataattgggagcaaccttgcagaagcacctgtagcatgcaaggagaaggtccaagacctttaagggaaaatgcttccccttgaaggtgaagatgaccaaggccctcctaggcggttggcttccggcaaccaaggtggccccagataacaatgaagattgaaggatgcaaacctttggcttccagtaaaggacttgaggctgtttaagaatgcttcagta

SEQ ID NO: 49549 - DNA, 260 bp, Glycine max
ggttgacggatgcctcctcctcaacgccattaaccaggtcaatgggaagaagccatggtcactctctttctcctttggaagggcacttcaacagagcacccttaaggcatggggcggaaaagaagagaatgtgaagaaggctcaggaagcccttttggtaagagccaaggctaactcagaggcaactctgggaacctacaagggtaactcacagcttgctgatggtgcctcagagagcctccatgtttcgaactacagct

SEQ ID NO: 49550 - DNA, 263 bp, Glycine max
cgcgactaaaatccgttaaagcagatttggcttttgctaaagcaaggtgtgctcaacttgaggaagagaacaaagtactccgggaccgagagggcagcgataagggacagaaccgtgaagatgatgatctgataaggcatcaattggagacacttctagctgagaaggctcgtctggcaagcgagaatgagaaatattctcgggaaaaccgtttcttgagggaaattgtggagtacaatcagctgactatgcaggatgtggtg

SEQ ID NO: 49551 - DNA, 277 bp, Glycine max
tctcgagccgaatcggctcgaggttttccttgtttcccctattaacatctcgctctcacaacatcatggcattctctagtgtctttgattctgtggtcgttgctagcaatcaacatggccctgccaaccctcgcaaccgtctacaccgtgggagatacttcaggttgggcaattggtactgattatagcacttggactggcgacaagatcttttcacgttcaactatggagctgggcacacagtggatgaagttaaagagagcgattacaagtcgtg

SEQ ID NO: 49552 - DNA, 280 bp, Glycine max
  unsure (1)..(280): unsure at all n locations
aaagagtaatatggctatagctttgacagatttgggaacaaaggttaaattggagggtgacattgaccatggtgtggctttttataagaaagctttgtattataattggcattatgctgatgctatgtataatcttggggttgcttatggtgagatgcttaagtttgatatggctattgtgttctatcaacttgccttccacttcaatccgcattatacgnaagcttgtaagaatctaggtgttatatataaagatcgtgacaaccttgacaaagcagtg

SEQ ID NO: 49553 - DNA, 271 bp, Glycine max
  unsure (1)..(271): unsure at all n locations
gttaaagaagcttgtggagaagaaggaagaaatcgactcgttggcgcacaagcaggtgcgtcacatcctgtggtctggactaggattcggtgtgatcactgttggactattcttcaggctaacattctgggaattctcatgggatgtaatggaacctatcacatattttaccacttccactggcctagtggtaggctatgcctacttcttgttcacttcaagagacnccacttaccaagacttcatgaagaggtctttttctccaggcaga

SEQ ID NO: 49554 - DNA, 248 bp, Glycine max
caagaatggcacttcgttgcttggtgatgtccctttctgttctcttcactcttggtcttgcgagagaaagccatgccagagacgaagatttttggcatgctgtttggccaaacactcccattccaagttcattgcgagatcttctaaagcctggccctgcaagtgttgaaatcgatgatcaccctatgcaaattgaagaaacacagtacccgaaaaccttcttctataaagaagaccttcatccaggc

SEQ ID NO: 49555 - DNA, 273 bp, Glycine max
ctccgacaccatcgacaacgtcaaggctaagattcaggacaaggagggaatccccccagaccagcagaggctgatcttcgccgggaagcagctcgaggacggacgcacccttgctgactacaacatccagaaggagtcaactctccacttggtgttgcgtcttcgtggtggtatgcagattttcgtgaagactcttacgggtaagactattaccctcgaggtggagagctctgacaccattgacaatgtgaaggccaagattcaggacaagga

SEQ ID NO: 49556 - DNA, 260 bp, Glycine max
gattcatacatcaaataaataccgcttcattgaccaggggagcaatttgcagggcaaagagtataacctgactatgcattggcatgttatgccaaagagtggcaaaatgtttgctgataaaatagtcatgccaggttaccgattgcctgaggaatatagatgatgctcgtcatgttaagtttttttgctgtaactttaacctctcctataacggatatagaaggttagttcaaagaactagaaagaggaaggaaatttgt

SEQ ID NO: 49557 - DNA, 208 bp, Glycine max
gctgagatcattaaatctgaccctgttgtgtcattcagggagactgtcctggagagatcatgccgcactgtgatgagcaaatcacccaacaagcacaatcgtgctgtacatgaggaagcacagaccacttgggacggacaggtacatagccggagggcccattggcacgatggcacagattggaccaagggatgacccaagattcgct

SEQ ID NO: 49558 - DNA, 212 bp, Glycine max
  unsure (1)..(212): unsure at all n locations
caaagttcttggtggagtagacaccaacttcactgtgacagcaaaagcagcagaggacactgaattcggagagctctatctcttcaagtaggaccactacttactcataccctaccgaacttactactacgatanatactatcgaacaatacgtntnnggagtacgatggaccgagagtctactgatgccatcaacaatggatatggttcat

SEQ ID NO: 49559 - DNA, 195 bp, Glycine max
gttgctcttcgtgagattaggacataccagaagagcactgagctcctaatcaggaagcttcctttccagaggttggttcgtgaaattgcccaggatttcaacgactgatactgcgttgtccacgagccatggctcgtgctactgcagttagcaagtaggctgctgaggcataccttgttgggctctttgagaact

SEQ ID NO: 49560 - DNA, 198 bp, Glycine max
ctcgagccgcttccggagcctggacttcggggagcgcaacggctacctcaagggcgtggtcgccgacgtcatccatgaccctggccgcggcgcgctcgctcgctcaagggtcgccttaccgaccaaccctattccagatgacgaaggaacgcaggagacgagctcttcattgccgccgagggctctacacggtcagtt

SEQ ID NO: 49561 - DNA, 238 bp, Glycine max
gaggacacaagatggaggaacagaagttgtagaagctaaggctggaaagggttctgcaactttgtcaatggcctatgctggtgccctttttgctgatgcttgcctcaagggcctcaatggagtcccagatgttgtcgagtgctctttcgtgcaatccactgttactgaacttcccttctttgcttccaaggtgaggcttgggacggttggtgtggaggaagttctgggcttggggcac

SEQ ID NO: 49562 - DNA, 266 bp, Glycine max
ggtaccaatcaaagggaccaggttcgttggagttgatgacacactatagggtcctcaaggataaaggagtttatgtcctggtgacatatggagctccactatatcgcctgcgcttgctacaggaatcatgctcttggacaataaaacttcatgtgataggaaatttctgctaactcacacaaatgcatgactggggctgtttagagagggaggcatgcattttcactctctacaaatttatgttactgtagttgatcctggaactt

SEQ ID NO: 49563 - DNA, 263 bp, Glycine max
gtttaagcagatatgggaaccaggatggggttgataacttgcagatggcatcactgcttgcactctttgtatctgatcattttggtggcagtgatagaagtggtattgtagaaaggacacggaaatctgtgtccggttcaaactataataagccttttgtctgtacatgctcagctggaagcagcaccagtataagttctcccactgaaccagttgcaaacaccatagaagatatcactctttcgaagatgtcggaaaaatct

SEQ ID NO: 49564 - DNA, 262 bp, Glycine max
gtccggcaaggccaaggtcatgattgccggtggattcgacgacttctccgaagagggatcgttcgagttcgccaacatgaaggccacgagcaacaccgagaccgagttcgccacgggccgagagccgaatgaattctcgcgaccgatgacgagcacccgagctggtttcatggaggccatgggttgcggtgtacacattctcatgagcgccaagacggacatcgagctcggtgcgaccgttcgaggtatcgtcgctttcact

SEQ ID NO: 49565 - DNA, 265 bp, Glycine max
gtaaaaccagaagtaatgtcacctccaaatacattatcaaaagcgaaggccttggagaaatataggtatgagcagtcccttgagcatactagccagttcattgaaaagttggagaaagagcttgaagagtatcatcaacaccttgcaaagtttaaaaaagggaaagaggatactgctaaagatggattggggaagcgtgactctatctatgctggacacaaaatgtcacatacatgaggctcagacaaccttatcttgtttgcta

SEQ ID NO: 49566 - DNA, 264 bp, Glycine max
gtttagtttgatcattctttgaaattcaacctagtactgattatgaaactatatgttaaaaaaatgatgaaattgcgttcagttcccagaagaatggatcactcttgggaagcacaaaagcttcttttcttagtgggaggaaactgaaggtgaacaactttacagcaccagttggagcacgatccagcactacagtttgcgcagttgctgagcctgataggcctctgtggttcccaggcagcacccctcctcatggctagatgg

SEQ ID NO: 49567 - DNA, 260 bp, Glycine max
gtatttggagtgccttgccaagggaaagacctctgatgccattaagaagctagtggaacttactcctgcaacagctttattgattgccaaagataaaggtggtagaactgttgaagaaagggaaatagattccttgctcattcaacctggtgacacattaaaagttcttcctggtacaaagattcctgctgatggtattgttacttggggctcaagttatgtaaatgagagtatggtgactggtgaatctatacccgttt

SEQ ID NO: 49568 - DNA, 260 bp, Glycine max
caggggcctgttaaattggtcggaacagttgctatgccaatgctgtcttgcattgcttaacttctacaaagcctctagtcttctattggctttatagatcgcactcaaaagcttgttgtgctaaagattggtctctcatgtgtgagttagaccaacacataatgattgtaagagaaaatggggctcctctatctccgagtcggatactttggcatatgcggagcattaactgccatatgggtgaaggaagtcaggaagat

SEQ ID NO: 49569 - DNA, 255 bp, Glycine max
cggcagtgaagttattagaatctgtgttgtgttgtgttgtgttgagcagagagagagagtgagggataagaagagaatagggttagggttagggttagggttagggtttgattgaggatgccgaagaacaagggaaagggaggtaagaacaggaagaggggaaagaacgaggcggacgacgagaagcgggagctggtgttcaaggaggacaggcaggaatacgcgcatgtgctccggatgctggggaacgggcgg

SEQ ID NO: 49570 - DNA, 266 bp, Glycine max
gataatccatcacttattgggactaattcatttactgccactaatgaatcacaacaagctatgggccctactctaaattctcgcacaggcccagcaagtgcaatcaatgtcaatgatagcaagacgcacaaaaaggatgatgcagcaacatttaacttgtctaagaggttgtcttgtaagtggaccactggggctggacctcgtattgggtgtgtccgtgactatcctgaacatttgcaatcgagggcgttggaacaggtcaattt

SEQ ID NO: 49571 - DNA, 233 bp, Glycine max
gcttccgggtggggcatggactgccacgtagcggcaggctccgccgggtcgaggtgctccgcgtgcttcgggccgcggctcggggtttccacaccgtcgatcatatactacgatgccgtgtgctactccaacgtgcagggaagtctgaacacgacgattcaattgaatgcgacgaagaaagtgcagcggcatggcatgctggatgctatacctgaagatgaagcgatgatggt

SEQ ID NO: 49572 - DNA, 250 bp, Glycine max
cgtatcacgtgtatgcgatggggaggatggagagtatttgaggtcaggattgggcggagtttaagccagaaagatggttggagaaggttgaaacgggaaagtggaagtttgtgggaagggattcgttcacttatccggtgtttcaggctggtcccaggatttgtttggggaaggaaatggcatttatgcagatgaagaggttggtggctgggattctgaggcgcttcacggtggttccggcaatggctaa

SEQ ID NO: 49573 - DNA, 253 bp, Glycine max
gacgtcgtccccttcacccacgacatgcaccacgccgcccaggccggcgtccgctacgccatgcaaaaccctcaatcctacatccacagcaacatcgccgccttcatcaaccttctagaagcttccaaatccgctaaccctcaaccctccatcgtctgggcctcttccagctccgtctacggcctcaattccaaagtccccttctccgaaaaggaccgtacggatcaacccgcgagcctctacgccgccacaa

SEQ ID NO: 49574 - DNA, 247 bp, Glycine max
ggctgctgtggttaccacgccgcttgatgtcgtcaagactcaattgcagtgtcagggtgtctgtggttgtgataggttcacaagtggatcaattggggatgttattagaacaatagtgaaaaaagatggttacagagggctgatgcgagggtggattccaaggatgctctttcatgctcctgctgctgctatttgctggtctacatatgaagctggaaagtccttattccaagatttcaatcagcag

SEQ ID NO: 49575 - DNA, 245 bp, Glycine max
ctttcgtgggctttgcagagatctgcaccctggtcctgttagactcttgcattggagtgggaaaggtaaaccgtgggttcgattggacgctaataggccttgtcctttggatgcgctttgggcaccttatgatctattgaacactcccttttctttggattcttgaacaaactttcttcagattgggatgataggatgcatccatataaatatatacccatacatatatatagtgtatacattac

SEQ ID NO: 49576 - DNA, 272 bp, Glycine max
tggttctcctcagtagtgatggctagcctcaagtttgcctgcgtagttactgctgctctagataattgttgcagtcgcttgaactcatgcaagtgcttgcattgcggcccggcgggccccgactttccgtctaaccggaatcggcccgccgcagcccgacaacaccgacgcgctgcagcaagtgggctggaaattagcccaattggcccagaacatcggcgtccagttcgaattccgcggcttcgtttgcaacagcctcgcggatctcgacc

SEQ ID NO: 49577 - DNA, 195 bp, Glycine max
agagctttgtgtaatcatgggcatagctattgcatgtgttataactacatctacgagtacatgatcaccgtatagaaactaatagttcagctcgccgataaggctcaggtttgcacccagcggtcatggaaacggccttatggagttggactccgggtagctggattagatgaatcgggagctcacctctattac

SEQ ID NO: 49578 - DNA, 266 bp, Glycine max
aagtagttgagaactaagaaggagaagcaaatggcttcctcaatgatctcttccccagctgttaccactgtcaaccgtgccggtgccggcatggttgctccattcactggcctcaagtccatggctggcttccccaccaggaagaccatgatgttcagttcctccattgctagcatcggtggaagagtgtaaggcatgcaggtgtggccaccagttggcaagaagaagtttgagactctttcctacttgccatacttggaggcgtc

SEQ ID NO: 49579 - DNA, 267 bp, Glycine max
gattgtttgttgttgtaactcgttcttcttcttttgttgttctgtgtttgtgtctgttttttctctcacctgacaatgtcttgctgccgtggtaactgaggatgcagcagctcctgctactgcggcctcggctgcggaagctgcacgatgtacccagacccgagctacactgcgtcaaccaccaccgagaccttggtcatgggagtggcacctgttaaggctcaatttgagggtgctgaaatgggtgtgcccgctgagaacgatggc

SEQ ID NO: 49580 - DNA, 267 bp, Glycine max
ctcgagccgctgatccacacaaaagataacagcattactcctgagattccgccaactgttactgctgttaagaaccctacttctaagattgtctatgatgatcacaaccatgaaagatttcccccaggtgacccaagcaagagggcatttgcctacttcgtacttacaggtggtaggtttgcttatgcctctgaggtccgactcctagtactcaagtcagggctaagtagttctcgcgacaccgcattaccaggggggtccgctcag

SEQ ID NO: 49581 - DNA, 267 bp, Glycine max
cacgagaagaactgtgggaagctatggtattgctcttgtgggtccgattttaagcacaaaagatctctcaaagatcatatcaaggcatttgggaatggacataaagcttatggaatcgactcgtgtcttgatcaagatgatgaagccggctctgaaattgagcaggaaaataatgaatctttttaatttccagtcgtagttgatgtgtttaatttcaactatgaagacaagacaattgaggattctctcgtgttttgaactaattga

SEQ ID NO: 49582 - DNA, 263 bp, Glycine max
atcgggggaggcgttgggggttgtggagaaagtgaacgacccgaagaggttgagcgcgtggcggaacatgctgttgaaggagtagccgaggagcatggcgttccacgtgaaggtgtttctgtggggggtcgtgtcgaacaccttacgcgcgaagtgcgcgtgagttggatttggagtagaagaggatgagtttcgaggcgaggaagttatcgggtgtaacggagagtaggatgatgcgagcgtggagctgcatgccctggcgg

SEQ ID NO: 49583 - DNA, 212 bp, Glycine max
cagagttgaatatatgcattcaagaggtttccttcaccgtgacataaagccggacaattttctaatgggtctaggacgaaaggcaaatcaagtatgttattgttgaagataatttcattcaatttttgtttccccccgtcttcttatattcccttatctattgtgaaatctgtatacctttttgtgaagtttaatgatcaagaatatgtatg

SEQ ID NO: 49584 - DNA, 260 bp, Glycine max
gcagttctctagcaacaaatggagatgtggaaagcttcttcaattatgtgcgttttgatccaaagttgttaacactagagcataagtctaatcgtcaaatggattttaagcgacatgttaatgctgctcttggaatttcacctgatgaatctccatctagttcttcaaaaggcaagctactgccatcgcctgtaccagaagacatgaaacgggtaaaggatgctttgggtgcaaacattgtgaaggcaagggaacgtgtg

SEQ ID NO: 49585 - DNA, 259 bp, Glycine max
gcgacgaggccgatctctacctccaagctgtcgacgaaatccagcgctctctctcctccgtctccgtctccgtctacgacctccgctgcatcgccgagcgcatggtctcctccggctacctccgcgagtgcatccaagtctacggcagcgtcagcaaatcctccgtcgatgcgagctttcgcaaactccaaatcgaaaaactcagcatcggagatgttcagcgtctcgagtgggagcagctcgagaacaaaatcagacg

SEQ ID NO: 49586 - DNA, 257 bp, Glycine max
cagaacccgcaactcccccgacgcaccagcctcgcgcctgctcagtcttatgtccacagatatccagaaccttaagtccttcgatccgttcgcggaagccgaagacgcaggcggggaagtcaaggtcagcaatcagcagaactacattcacatccgtattcagcagcgcaatggtcgcaagacattgaccacggtctaaagcctgccgaagaagttcgaccagaagaagatcctcaaagtgatcaagaagcaatttg

SEQ ID NO: 49587 - DNA, 251 bp, Glycine max
ttccagaacccctctcttcccgcatccgagaactctctagttgtacttttcgttttctataagcccttccggctctccttatttttcccacttcatccaatcaaatcaaatcaaagtcattcacctaaaccctatggccgacgaagccaaagccaaaggcaacgcagccttctcctccggcgactaccccgccgcaattcaccacttctccgacgccatcgccttggcccccaccaaccacgtcctctatt

SEQ ID NO: 49588 - DNA, 250 bp, Glycine max
gcaaaacagagaatggcatcattacttttgagtttactcgtcccttggacccgtcttgtaggcgggaaaagagggtagaatgtaaaaatatcgttgatcccacaactcctctcaaagttgtttgggcaatgggtgctaaatggactgatgatcatcttactgacaggaatatgcattctagtacaagtaatagggctattcttgtacacctgatgcgtggttcagcagatgcggagaggatttacttcct

SEQ ID NO: 49589 - DNA, 261 bp, Glycine max
gcaggatgcacagcggctcttgtgttagccctaattctaatcgttcgtactcgtaaaatattggatgagtcagggagtactaagtacatggataccttgttcccactgaacagtctatatggatacatagttctacacatgctgatgtatgcagcaaatatttacttctggaggcgatacagagtgaaccactcattcatatttggttttaaacaaggcactgagttgggctacaatcaagtccttctcctaggttttggt

SEQ ID NO: 49590 - DNA, 152 bp, Glycine max
tgaggcatggtttattgattcttttgaggaatggagaaaagccaaaaacttgagcaattttatactgctcggacattcttttggtggttatgttgctgccaaatatgcgctcaagcaccctgagcatgtacaacacttgatcctggttggat

SEQ ID NO: 49591 - DNA, 269 bp, Glycine max
gtcacaactagctgctgttgtgacggttctccttcccgatcatacctcagtgcaagcctgtcaagatatgatcgggaaggagatacgtcacaactagctgctgtagacattggtgtcagtactgttgatccattaaaggagcctccacttgtgactgccaataccgtactatcttttcttgcagttgactatccagtggataaggtctcctgctatgtgtctgatgatggtgctgcgaggttcacatttgaagcactgctgagacatcg

SEQ ID NO: 49592 - DNA, 203 bp, Glycine max
aaaaaaaaaaaaaaaaaaaaaagaaaaaaaaaaaaaaaaaaaaaacaacaaaaaaaaaaaaaaaaaaaaaaaaaatagggagcaccagccccagaagtgggccgggcgaggattatgtttaccgtcaccaagcaggcctcctcaggaatcccatggtacggcccagaccgagtcaagtatgtaggcccattctctggcgatcc

SEQ ID NO: 49593 - DNA, 261 bp, Glycine max
gaaacttccaacaaaaaggggttagaaagtctccaaaacatccttctttctaaaacagttggagatatgaaaattgaagtaacaaattcgagagaaggaactgacataataaagcgtaactcaaggaaaagaaggttcttctggttctagatgatgttaatgaacatgaacagttacaagcgattattgacagccctgattggtttggtcgtggtagtagagtcatcatcaccactcgagatgaacaattgttagtgcttc

SEQ ID NO: 49594 - DNA, 264 bp, Glycine max
gccaggcaagccccactcaaccaccacacctctcctcgttcacgctacccctttctgctcttcttctacctttcaagttttaaaagtataaagatggcagagacattcctatttacctcagagtcggtgaacgagggacaccctgacaagctctgcgaccaaatctccgatgctgtcctcgacgctatgcctcgagcaggacccagacagcaaagttgcctgcgaaacatgcacctaaaccaacttggtcatggtcttcggaga

SEQ ID NO: 49595 - DNA, 262 bp, Glycine max
gacatcgcggtttatcaatgatcacctatttcaccatctcaagagatttacttcagagcaacaatcaatgtcggtggatgtaattcgcaaggcactccaagcaacagaagaggggtcatgctgtcttgttggtgttatttgtaatggaaccctttacatagcaaaccttggggattcccgggctgttttgggaagagcagtcaaggcaactggcgaggttttagccatgcaattatcagcagagcacaatgcatcgatagag

SEQ ID NO: 49596 - DNA, 236 bp, Glycine max
gggaagacggcaaaatggatccgtaacctcgggaaaaggattggcactgagggctgcgcacgggggtcccagtcccgaacacgtcggctgtcagaggactgctcgagctgcttccgcagcgagagcgggtcgtcacgtgccggtcgggggacggattaggaacggacccttcagggcctattccccgggcgtcgaacagtcgactcagaactggtacggccccggggaatccgact

SEQ ID NO: 49597 - DNA, 249 bp, Glycine max
gcttgaagatgagcactaacttgcttggtttggaggttagggatgatgagttgttgtgcatgctcatggaaggtgatttggatggagatggggcccttaaccagatggagttttgcattctcatgtttaggttgagtccatgcttgatggatatgcaaggtatggttccagtgaatcatgttaatggcttaatgtcatataatgtagtgtaatatcgtaatacaatgttcttctagctagctagctata

SEQ ID NO: 49598 - DNA, 213 bp, Glycine max
caaattcctactgccttcgatccttttgctgatgcaaatgctgatgactcgggtgctgggtcaaaggagtatgtgcatattcgcgttcagtagcgaaatggtaggtgaagcctgacaaccgatcagggattgcaaaaagcgttcgagctaactcactacggtgtcaacgctatggtcgagttcagctgcattagctcagttgttaaggaccca

SEQ ID NO: 49599 - DNA, 253 bp, Glycine max
ctttaccacattccacatgccagtcgaaaaccctaactccgttcgaagcactaaatcgtgatggcaccaaaggcagagaagaagccagcagagaagaagcctgtggaggagaagaaatcgacggtgggagacaaggctccggcggagaagaagccaaaggccggaaagaagcttccgaaggagggaggcgccggcggagaaggtaagaagacgaagagatacaagaagagcgtggagacatacaagatctaca

SEQ ID NO: 49600 - DNA, 277 bp, Glycine max
cccagtttcactttctcattattttctctcctattgataaagaaacagagagagagagaaaaaaatgcctgcggtaggaggtattagcaacggagggggcaaggagtaccctggaagcctcactccttttgtgacggtaacatgtatagttgcagctagtgaatcctccagaaaagtggagcacccgtggaggaacttgttgcaaagaaagtacagaccccacctcaccatggctgtgctgattccattcttccagcaactcactggaatcaatgtc

SEQ ID NO: 49601 - DNA, 277 bp, Glycine max
tgcagtggcaatactagagaatcttttgaagcctgtggatgaatcccttgatcactataagaagcagcaattgagggaactggctatgctcaatggtactttgagggaggaaagtccaagcatgagcccaagtatgagtccaagcatgtcaccttttaacagcactggaatgaatcgagccaagacaggaagatgaccctgaaatgatagcaaacatgatctcttagacttttcacacccttgggctcaatctccacaggatgacacatggtttacg

SEQ ID NO: 49602 - DNA, 275 bp, Glycine max
atctcactaaggttcatttggcttgaaattcccattatcttgagatgtttgttgtgaacttttacaggctatggaggagtcgtatgttgatctggcagagaagttagcaaggtcaggagtgaaggttgcaaaattcagagccgatggagagcagaaggaatatgcaaagagtgaactgcagttgggaagcttccccacaatacttctcttccccaagcactcttctcaaccaattaagtacccttcagaaaagagagatgttgattcattgacgg

SEQ ID NO: 49603 - DNA, 268 bp, Glycine max
ctgcctttcactgttccacctcttgttttttcttctttaaagttggtcagacagttgcaaggtcaagaagaaaatccttttggagatgatgcatcaacaacaccaaagaaaatttttcagcttttaaatcagaccatcgagactttgtcaggtgtcctggcaccagaattagcattgcagttgtacttgcaatgtgctgaggctgcaaatgactgtgaattggaacctgttgcttatgaatttttcacccaagcttatattctatatg

SEQ ID NO: 49604 - DNA, 268 bp, Glycine max
ttttcactctcccattcttcttttttaagcaacaacaacctcattcctcggatcctaagaaaatgggaaccagagtgtggtgttgtttcatgatgttcttcctctctctcaatgctcttgcaatagcattggaagatcacaacctcaaaacgacgtccagggatgacatcaagtgcaccccatgtgggattatcctctttgttcttgtcgctgggtatcttccgtttaatgatcctaatttgatggttatgtataagaagatttacaa

SEQ ID NO: 49605 - DNA, 249 bp, Glycine max
gctgcatcgtggtgagctagttgaaattttggccaagtttttccccgagtacccaattcctaccaaatgttcagatgaaaagaacccgagagtaaaaccctacatattttcaaatcaaaagctgaaagatttgggattggaattcaccccagtgaagcagtgtctatatgacaccgttaaaaatctgcaagagaatggccaccttcctgtccccccaagcaaaaagattcctattgaagttagatccta

SEQ ID NO: 49606 - DNA, 257 bp, Glycine max
aagaccttgtagcactctcaggatctcactctattggccaaggtcgttgtttctccatcatgtttaggctatacaatcagtctggaactggaaggcctgatcctgccattgatcctagctataggcaagagcttaacaggatatgtccactggatgttgaccaaaatgtcactgggaaccttgattccacgcctctcgtctttgataaccaaatttcaaggatttggttgctgggaggggctttctcaactctgatc

SEQ ID NO: 49607 - DNA, 251 bp, Glycine max
ctctctttctctctttctagttcgtgttcttcgtcgcaaatccgacgtaggatctctcttgttttttctctaggtttttcgcgatggcgtcgaagcgaattttgaaggagcttaaggatttgcagaaggatcctccaacatcttgcagtgccggtatatttttattttattgttttgatattcttttcctattttattgttgagaattggttgtgtttgtttaaacaatttggatttaaattttggtaagg

SEQ ID NO: 49608 - DNA, 239 bp, Glycine max
ggacacaagctcttggatggtgttatttgtggaggtgaggccaaacttgctttctggggattcagagaaattccttctggatgatattagtcaggttggagatgttgtccttgtccaggatgaaagtgtgacagacaatgaatttaaaatggttggcttggagacactggttggatacaaagttgtaacaccctctcgacggaatattggaaaggtgcgtgggtacactttcggcatca

SEQ ID NO: 49609 - DNA, 239 bp, Glycine max
ctccgaacccaaacacgccctcctcaaacaactcatgttcttcctcctcaaatcacgtcgcgcccacgtcatctctgagttccacgcgtcctacaaagaactcttcgagagggccgaggagtttgtcggggacaggttcgtcggggaggaaggggagaagctcctcaagcacgtgctgtggtccaatgggcctgagactgagtctccaacactgggaacaagcaatgcgccggaaaaga

SEQ ID NO: 49610 - DNA, 263 bp, Glycine max
cgtttccataatcccataccccttcacaaacctgaaataccccgttccagacacaaccccaaattcccgttccgtcatcgtgaagatatctgatccttgaatctccaagctgcttcctttgaatttcccattggtgaagatcacggagaaaaccatgtacaagcctttgccatcaagctgcgaatttacgtatatgccctgggccctaccaatgagctttgagtcgtcgctgggtcccactgttactgggtcgtctacgactg

SEQ ID NO: 49611 - DNA, 259 bp, Glycine max
gtttccacactgcataccttaggtcttccgaattcgaagttaatttgcaagatggctaaggaaaaggctcagatcaacattgtggtggttggtcatgtggaccctgaggaggcaaccaccattaacgagctgaagaagcctgttgtggagaaagaagctccagggcatgccatatgagggcatgcacgtacggcctcggaggggaaccagaaaattatgttaacaaaataatctggaaccctaatgtatcagtgtcatc

SEQ ID NO: 49612 - DNA, 259 bp, Glycine max
caacaatcaatgcgtccataatttcctatattccctgattggtgtgattactgtcaataaaaacagctggaattggattctccaacataacatcgacttagaaagaatctttggagcatttttcactcatggctatgattatggatgctgttcttggaaaactgcttgatgagctgttgagaagaagaagtgaatcgtgcgggctggttcatcaggggatgttggttacaataaatgttggtttcttttctgtactctt

SEQ ID NO: 49613 - DNA, 261 bp, Glycine max
ggccaggcaagccccactcaaccaccacacctctcctcgttcacgctacccctttctgctcttcttctacctttcaagttttaaaagtataaagatggcagagacattcctatttacctcagagtcggtgaacgagggacaccctgacaagctctgcgaccaaatctccgatgctgtcctcgacgcttgcctcgagcaggacccagacagcaaagttgcctgcgaaacatgcaccaaaaccaacttggtcatggtcttcgg

SEQ ID NO: 49614 - DNA, 257 bp, Glycine max
ggaagtttgaacaccaccaagtactattgcacagtcattgatgcccctggacacagggatttcatcaagaacatgatcactgggacatcccaagctgactgtgctgttcttatcattgattccactactggtggttttgaagctggaatttcaaaggatggccaggtatgatgaaattgtgaaggaagtttcttcctatttgaagaaagtaggatacaaccctgacaagattccttttgttcctatatctggttttg

SEQ ID NO: 49615 - DNA, 254 bp, Glycine max
ggaatgtgttgatttgatcatggaagagcttgaaaagagaaagataactaatgcatacacccttgcttatcagagtagagttggacctgtggaatggttaaaaccctatacagatgagacaataattgaacttgggaaaaagggagtaaaaagcctgctggctgtaccaattagctttgtcagcgagcatattgaaactctcgaagaaattgatgttgagtacaaagaattggctctaaactctggtatagaaa

SEQ ID NO: 49616 - DNA, 262 bp, Glycine max
ggccaggcaagccccactcaaccaccacacctctcctcgttcacgctacccctttctgctcttcttctacctttcaagttttaaaagtataaagatggcagagacattcctatttacctcagagtcggtgaacgagggacaccctgacaagctctgcgaccaaatctccgatgctgtcctcgacgcttgcctcgagcaggacccagacagcaaagttgcctgcgaaacatgcaccagaaccaacttggtcatggtcttcgga

SEQ ID NO: 49617 - DNA, 248 bp, Glycine max
gggaattcttggttacactgaagatgatgtggtctccactgactttatcggcgatagcagatcaagtatttttgatgcaaaggctggaattgcattgaataagaactttgtgaagcttgtttcttggtacgacaacgagtggggatacagctcacgtgtcattgatcttcttgtattcgttgccaagaagtctctttaaggtgttacttcaaagtagcttgtcttcacattattaccgtatgtttatg

SEQ ID NO: 49618 - DNA, 248 bp, Glycine max
gagagtcggtggtggagatcgtgaagaatttgaaagaagcgcctctgctggtgcaggtttttcccaaatcggcgacgatgacgacggagaagaggacctctcccaggccttcttcaggcccataaacaacgccgcccctccctccccgaccaagcgccacaacaagatctccgtcatcggcgccggcaacgtgggaatggccatcgcgcagaccatcctcactcaggacctcaccgacgagctcgtcc

SEQ ID NO: 49619 - DNA, 250 bp, Glycine max
ctttccttctccctctttgctgtgatattaacaagttagtacttattcccatttcagattccagtgtcagaattgaaggggaaggttgtcctcctctacttctcagctcactggtgtcctccatgccgtgcattccttccaaaacttattgatgcatataataagattaaggaaaagggcaatgcattagaagttgttttcatctcaagtgacagagatcaaacctcctttgatgaattctttgcgggaa

SEQ ID NO: 49620 - DNA, 243 bp, Glycine max
tcgtgatacacagtgtggtttcaagatgtttactagggcagcagccaggaagcttttttcaaatgtacgcttaaaaaggtggtgctttgatgttgagttagtctttctatgcaagtggtttagaatcccagtttcagaaatttctgtgaattggtctgaaattccaggatccaaggtgaatcttctgagtatacctaacatgctttgggagcttgtgctcatgtctgtggggtacaggactgg

SEQ ID NO: 49621 - DNA, 250 bp, Glycine max
tggatccagacgcgtcggcaaaggcattcgtggagcagtactattccaccttcgacaccaaccgcaacaatcttccatgctctctttcgaggctcagaagatcctgggcgcccccaacatcctcgccaaactcacttcccttcccttccaacagtgccagcactccatcaccaccgtcgattcccagccctccgctgtcaactccgccatgctcgtcttcgtcagcggcaacctccagctcgccggcgaa

SEQ ID NO: 49622 - DNA, 250 bp, Glycine max
gccacttttccttctccgtcttcgccgctaccagcagaagctgctcctgctagctctgcacctccaaaagcagctcctgccttgccttcccccggaaaagcaagcacatcttctcacccaccactgaaatgtccaatggcaggaaccttctataggagtccagcacctggtgaacctgcatttgtcaaggtgggagataaagtgaagaaggccaggttatttgcattatcgaggctatgaaactgatgaa

SEQ ID NO: 49623 - DNA, 251 bp, Glycine max
attgcatttgagtatatctgttgtagactttgtagtatactactgaaagatggattcgaagacgaaggtagcaatacttattcctggcatgttagccatactccttttcatctcctcagaggtggcagccagggacttgaaagaggagggggttcttaaagagacaagtaaagttggtgatgccaaattagttggtggagggttgcaggctctggtcgtggctcacctactcctgtcttccctggtcgtgg

SEQ ID NO: 49624 - DNA, 271 bp, Glycine max
cttcctttctctgctctttgtcttctctgacacatttggggcctcgttgagtgtgtgtttgcaagagggtatggcgacggacgttgcggctgctgagcgtggctccttctctgggaaggactaccaggtccctccaccagcagtactcattgatgctgaggagctcacaaagtggtcctttcacagggctcttattgctgactgcattgccactttgcgcttcctctacattactgtgctcacagtggatagggtacccgctccagacgga

SEQ ID NO: 49625 - DNA, 265 bp, Glycine max
ggccaggcaagccccactcaaccaccacacctctcctcgttcacgctacccctttctgctcttcttctacctttcaagttttaaaagtataaagatggcagagacattcctatttacctcagagtcggtgaacgagggacaccctgacaagctctgcgaccaaatctccgatgctgtcctcgacgcttgcctcgagcaggacccagacagcaaagttgcctgcgaaacatgcaccacaaccaacttggtcatggtcttcggagaa

SEQ ID NO: 49626 - DNA, 239 bp, Glycine max
ctcgtcttcggaaccctagccatcatcatcggttccctcatggcctataatcacgtcggcggcgacaccgctcacggtctgttctttgcgatactgggaacactcttgttcattccgggtttctactatacgcgctttgcctattgtgcttacaaaggatacaaagacttctctttctctaacatacctcccgtatagctcagctctaacataccacctttatgtatagatcttctcgg

SEQ ID NO: 49627 - DNA, 257 bp, Glycine max
acaaaggttgctgtaggagataagattgcagtagtgctaagtgctaacacctgcagtgaacaatggcctctgcatcagcatctctgctcaagtcttcacttgttcttgacaagtctgagtgggtgaagggacaaacccttcgccaaccttctgcatcagttgtgagatgcaaccccaccaccccatcaggcctcaccatcagagctggttcctatgctgatgagctcgttaagaccgcgaaaacagtggcttcacca

SEQ ID NO: 49628 - DNA, 219 bp, Glycine max
gactaattctagatcgtcagcgtattactattctgaggggaaatcatgaaagtacgcagattactcaagtttatgggttgtatgatggatgcctgcggaagtattgtagtgctaatgtttggaagagctttaccgatttggttgactatttccgttgacagcgttggttgaatctgagataatttgtcatcatggtgggttgtcgccatctattgaaaa

SEQ ID NO: 49629 - DNA, 275 bp, Glycine max
ctcgagccgttttgatatcgggcctttgctacatgatgatagttgacgttccagcaagctttgttgggccagaagagtaatgatccatttgctgtgacgcttgaatagatccgattctctcgggctcatggctcatttatgctctctgcttaggtatccagtggctcctaatggggtgggttgagagcaagagatgggtggacttcttcaacccagattctcagtcagtggagtgggccactccatggtcaaaatctgctgagaactttggcaac

SEQ ID NO: 49630 - DNA, 263 bp, Glycine max
gtttaagatctttacctacagcccaaaaaagtctgctgattttcagctagtattgcgattttcacaaggagttgcatctataggccttgttgcagctgtgtgtcttgttgttgcctttactccactgtcgatagctgacctatttgcaagcatccttgcatttatccctactggatggggaatattatccttggcaattgcatggaagaagatagtttggagtctcggcatgtgggattctgttcgtgagtttgctagaatgt

SEQ ID NO: 49631 - DNA, 249 bp, Glycine max
cacgaagctgttcagcaggttgtttgcgaagaaggaaatgaggattctgatggtaggtctcgatgctgctggtaagacaaccatcttgtacaagctcaagcttggagaaatcgtcaccactatccccaccatcggatttaatgttgagactgtggagtacaagaacatcagcttcactgtgtgggatgttggtggtcaggacaagatccgtccactgtggaggcattatttccagaacactcagggtct

SEQ ID NO: 49632 - DNA, 229 bp, Glycine max
gtacaaagaattattcacttgttctttgagtacccatacaataactttttgcatcacctcgtggaaaacattataatgtcttgcttggagagtaagaattcttctcttctggaacaccttctccgtgattgtgattttgttgggaagattattcaagcagaaaagctattcacgttagaagctgatacaaacaagccaacaatacctgctgaaggtaaatcagcaccca

SEQ ID NO: 49633 - DNA, 251 bp, Glycine max
ctttgcaaggagttccatatctagccactggtaaacatctatgtggagctgcaacagatttaactttgagatgctgctttcctgaatatagagaagatagtagtggacagtacactgctaatagtaagtttggaggtctagctatagcaacatgttgtcaccacctttgccaatggaaacactatataaataaaaggttttttctggatttgggattgacaaaggaagaatttcatgccattacatggttt

SEQ ID NO: 49634 - DNA, 280 bp, Glycine max
gggaacggtccttcagaattagcggatgatgacttgccaagtgtgatgacgtgtgcaaattaccttaagcttcctccttattctaccaaggaaattatgtacaagaagctactctatgcaatcagtgaaggccagggatcctttgatttatcgtgagtttctggaactaaccaacccggccctgtatgttaatatgatgatgaatcagggtttactcttgagacttgattattttttggttatatgtactttcctccctgcttctcaaataatggcctct

SEQ ID NO: 49635 - DNA, 264 bp, Glycine max
tctcgagtcgattcggctcgagcaaagcttgagatcacgaatccagtttctggagtcttgacttttgggtacatgctgcatctttcatatggtttctttgtggtcactggtaccattggtttctattcatgcttctggttcataaagctaatctacgcgtcagtgaaaattgactgatccatggcttgtcaaggaaatgggtggattgctaaatcattttagtataggttgctttgatgctatgattttattcaaatatatttt

SEQ ID NO: 49636 - DNA, 150 bp, Glycine max
cttgctactgagtttccacactgcataccttaggtcttccgaattccaagttaatttgcaagatggctaaggaaaaggctcagatcaacattgtggtggttggtcatgtggaccctgacgaggcaaccaccattaacgagctgcagaagc

SEQ ID NO: 49637 - DNA, 260 bp, Glycine max
taaaaaagagctgaggagacggacatcatgcctgcccagcagcccaccgtgttcaagcgtttcgtcgaggttggccgtgtcgttctcgtcaacgacggcccctctgccggcaagctcgccgtcattgccgagatcatcgaccacaaccgggcgctcattgacggccccacctccggtgtcccccgccagtcgctcccttaccgcaacatgatcctgaccccttacaccatcgcctcgctcccccgcggtgccggctcggg

SEQ ID NO: 49638 - DNA, 257 bp, Glycine max
gctcttccacctggttatgttttgaaatctcaaatgaaggctttgttagaggaagaaacgtggcccggtccggttcactcgagccgtggctcgagcaacacggtgacttcaaccgggttttcctcataggagacagttctggcggaaactcggtgcatgaggtggccgcgagggccggttcggcggacctaagcccggtccgggtcgcgggggcaattccggttcaccccggttttgtccggtccaaccggagccgg

SEQ ID NO: 49639 - DNA, 260 bp, Glycine max
tgtttatccatggacttccatagctcgggttcggtactgagcaatcccacattcttcgagttccctttagaactcagaagggccttgttcgtcagcggtgctaaaatttggaagacgggccaaactaggtccctcatattaactagcttgctgaagctccgatggagtggtgtaaccatcgaagccctttggcgtaccgagcaattttgggtcattggaggtgttcctgctcaccttttcgccgtgttccaaggcctcct

SEQ ID NO: 49640 - DNA, 180 bp, Glycine max
aaggccttcagcaaaatgtccattcagttgtataattatggagaagggttgatggggaaagttgcatctgataagtgccacaagtgggtctttaaagagcccacagaatgtgaaccaaatatctccattttgtgcttagaatgcgacacacttttgaatcccttggctaccaatctggtt

SEQ ID NO: 49641 - DNA, 228 bp, Glycine max
gtttcttcctttctctgctctttgccttctctgacacatttggtgccttgtagagcgtgttttggcaggaaggtggtatggcgaaggacgttgaggttgctgagcgtggctccttctctgggcccaaaaccaagaaaccgaatcgattccgattccgattccgatcaatggctgcggaacccaaggaatcgccttccaacaaccccggtcttcacactacccctgacg

SEQ ID NO: 49642 - DNA, 261 bp, Glycine max
aaggccttcagcaaaatgtccattcagttgtataattatggagaagggttgatggggaaagttgcatctgataagtgccacaagtgggtctttaaagagcccacagaatggtgaccaaaggttactatatagaactaaaggagattcccgtttcagttacattcaattcaacgattgaccaaaagagaattcaaaaaataacatttagatcacccaaattccaatatttctatgaaacaataattaaatctaacgaattta

SEQ ID NO: 49643 - DNA, 205 bp, Glycine max
aaaaaaaaaaaaaaaaaaaaaaaaaaaaaaaaaaaaaaaaaaaaaaaaaaaaaagaaaaaaaaaaaaaaaaagaaaaaagaagaaaaagaaaagaagagaaaaacggttaaaggtgaatcaattccaatcagattgttcctcagtccctatgagctgaccccaacacatcgtaacattaataacaaattcagtgtgaagtacttt

SEQ ID NO: 49644 - DNA, 202 bp, Glycine max
cggcggaggagctcccccggcattgtcagcgcattacctggcggaggagctgtagtaggaccatgcccacaaccttccatctgccgtcaccaaccacaccttccgccaccgttaccccttcctctgtttcacccgcattggaacccttcgctcaacctcttctctctttcgcatttttctggttttttttttccagatccga

SEQ ID NO: 49645 - DNA, 118 bp, Glycine max
tgccagctttcttagatgctagtgaacgcggagtccatcacaacgtcatatagagattcggcgttgatcatacagtactcgctaatatcccatgctataggcaacatggatatggggt

SEQ ID NO: 49646 - DNA, 280 bp, Glycine max
ctcgagccgatagacttggcaggtaatgaagataacagaaggacatgtaatgaagggatacgtctccaagagagtgccaagataaatcagtcattgtttgcgctgtcaaatgtgatatatgcattgaacaacaataaaacaagggtaccctaccgagaaagtaaattgacccgtatattgctcgactctctaggcggaacaagtcgtgcactgatgattgcttgcctgaatccaggagaataccaggaatctgttcatactgttagtttagctgctcgat

SEQ ID NO: 49647 - DNA, 267 bp, Glycine max
  unsure (1)..(267): unsure at all n locations
ggccggtgggcggtggcggcacggcaggatctgtgccgcgatgacgacgtcgaacacggcgcggatggaggacagcggcggcgacctagcggacaccatcaagaagtggaatatcatctaccctgtctacctcaactccaagaggnaggtcgccgatggccgccgcatcgccgctgccaaggcctgcacggaccccacctgcatcgagatcgctgactgctgttcgcacctcaagatcgcccacgccatcgagttggataaggcgta

SEQ ID NO: 49648 - DNA, 266 bp, Glycine max
acaatgtcttcttcttttctcttccctcaaactcaatccacagtcatcccagacccttcaacctacttctcaccaaacctcctttcatcaccactccccacaaactctttcttccaaaactttgttattcctaatgggacacagcctgagtacattcatccttacctcatccaatcctcaaactcttcactctcagcctcataccctcttctgggtcttcacacagcactcctgtaccaagcatttgtgccagatctcactatctc

SEQ ID NO: 49649 - DNA, 278 bp, Glycine max
cggcggcatctccggcgtgctctgggcctacttctcctctacgtgctcgacctcccctacttcttcaagtagaaatcatcaaagatgcgtatatatatagctccggccgatcctcctctctagctgcatggtatgtaggtggtgtggtccttgtttcatttcactccagcggtgatcagcgccgtgtatatctgtaattcctctgctttgcacatggatggattgggatgtaacctgttcaacttttttttaccttattggatgcatcattcagagct

SEQ ID NO: 49650 - DNA, 284 bp, Glycine max
ctgatgcaacatttttaagaactgtagttgtgatcgatcaacgattcttctgcagaatgttggtctggttgttgcttcatttattattgccttcatgttgaactggaggataacgcttgttgtattggccacataccctttaatcattagtggtcacattagtgagaaactatttatgcaaggatttgggggcaacctgagcaaagcatatctaatagccaacatgttggctggggaggctgtgagtaatatccgcactgtggctgcattttgtgctgaacaaa

SEQ ID NO: 49651 - DNA, 273 bp, Glycine max
ttcactactagttttcccacatgcttaactagcgcttttttttctttctatattcattatccaatggcttcttctattcctctttatcaaccaaccaacaccttattctccaacacccagttcaaaggttcgcgccgtggcacagtgctgcaccccttaaaataaagcgtcttgcacatgatcctcaaaggttcgcttgggcagtaggtattgcacagtcacgatgtattaacatgcaaacgagaattggtgctctaaatcaagaagcaaata

SEQ ID NO: 49652 - DNA, 135 bp, Glycine max
  unsure (1)..(135): unsure at all n locations
catcgcaacatggagatggtttcgagaagaattagtagatctccagngccttcgacncgctcggcttctccaaggaccccgccaagttcgaggagtacaagctcaaggagatcaagaacggccgcctcgccatgc

SEQ ID NO: 49653 - DNA, 203 bp, Glycine max
gtgaagaacattttacttctggattctgaaggaaagcgtgttgctgtaaagtatttctcagatgattggccgactaatgcatcaaagttagcctacgaaaagtctgtttttactaaaactctaaagacaaatgcacggacagaagctgagataacattgtttgatggttatattgtcgtttacaagtttgtacatgaccttca

SEQ ID NO: 49654 - DNA, 259 bp, Glycine max
ggctcatacaaaggttgctgaggagataagattgcagtagtgctaagtgctaacacctgcagtgaacaatggcctctgcatcagcatctctgctcaagtcttcacttgttcttgacaagtctgagtgggtgaagggacaaacccttcgccaaccttctgcatcagttgtgagatgcaaccccaccaccccatcaggcctcaccatcagagctggttcctatgctgatgagctcgttaagaccgcgaaaacagtggcttc

SEQ ID NO: 49655 - DNA, 276 bp, Glycine max
gccatccctcactctcctccaagccatcgtccccgtcccagcctccccggactccaggggcaaaagctgcagcgtcgagatggtgaaggggcgcacggggcagcgcgtgaggctctacgtccggggcaccgtccttggataccagcggtccaagtcgaaccagtacgagactacgtcgctggtgcagatcgagggggtgaacaccaaggaggacgtcgcgtggtactgcgggaagcggatggcctacatctacaaggccaagaccaagagcagcgg

SEQ ID NO: 49656 - DNA, 186 bp, Glycine max
  unsure (1)..(186): unsure at all n locations
ctctatattaactgagtactcccaagggggagcctatatcgtctgntgcatanggcagatagtcgaattgatgaagtacggaggctaaaaatggcattcgatgtggcaaaagggatgaactacctgcactctagccatcctaccattgttcaccgtgacctgaaatcccccaatcttttagtggat

SEQ ID NO: 49657 - DNA, 270 bp, Glycine max
ctgcaacagcgtgtagtaccatcatgttcgtgagtagggccggaagctctgcttagagtgtcttgattctgctatcatggatactaatgaatgccaaccccttcatgctgatatacaaagattttatgaaagcctaaatatgaaactggaccaacaaattccacttctattggttgaaagacaagcactgaatgaagcaagagaaggagagaagaatggccactatcacatgccggaaaccagagggctctgcctctcagaggagctcag

SEQ ID NO: 49658 - DNA, 265 bp, Glycine max
gcaagaatggcacttcgttgcttggtgatgtccctttctgttctcttcactcttggtcttgcgagagaaagccatgccagagacgaagatttttggcatgctgtttggccaaacactcccattccaagttcattgcgagatcttctaaagcctggccctgcaagtgttgaaatcgatgatcaccctatgcaaattgaagaaacacagtacccgaaaaccttcttctataaagaagaccttcatccaggcaaaacaatgaaagtac

SEQ ID NO: 49659 - DNA, 261 bp, Glycine max
ggaattcaaatatttctttctttcatattcaagtactttgtactatttgttgtgaggagcaagagaaaacaatgggtttccgcatacctgctattgtcacgcaagcatcgttttctacaacccaagcagcctccaagagggttgaagtacaaaaaggatatcttgcggtctatgttggagataagatgaggcggttcatgattccagtatcatacttgaacaaaccttcatttcaagaattacttagtcaagcagaagaag

SEQ ID NO: 49660 - DNA, 215 bp, Glycine max
gcagtgttgggagtacttctgatccgaaagaatgaggactttgaaaaccttaagaagctatttgatgagactacattatatgacaagcaatggcaagcaacttggcaggatgagattcaagcattccaaaatgagtagtggattgcgtttgtagtctcctcctcatgtcctatacagtgctgcgataattgtatacaacagcatgtatgatagac

SEQ ID NO: 49661 - DNA, 259 bp, Glycine max
attgaatctcagaattctctaaaagagatctttttctgctctttgaagaaagaagggtctttgcttgattttggagatgtctctgctctcagatctcatcaaccttaacctctccgataccaccgagaaggtgatcgcagagtacatatggatcggtggatcaggaatggacctgaggagcaaagcaaggactctcccaggaccagttagcgacccttcagagcttcccaagtggaactatgatggttccagcacaggt

SEQ ID NO: 49662 - DNA, 255 bp, Glycine max
attccaagtttctaattttgctcatggcatggctaccaactgctgtaactttcgttttcttaccagttatcaggcaccacaggggagttcaacagccaaatgattccaaggctttctataatttcctctacaccactcttgtccttgcagggttcctcatggtggtgatcatattgcaaaaaagtttcacctttacaaagagtgagtattatatcactactagtcttatgcttctcttgctcatcctgccacttg

SEQ ID NO: 49663 - DNA, 229 bp, Glycine max
  unsure (1)..(229): unsure at all n locations
atggattcagctgccaccccagaaaactcatcaatatcaattggagatgatgattttgagcagagttcccaaaagtgtaaatcaggaggggatgaatatgatgaagatgaacctgatgccaaaagatggaaaattcgaagggtgaaaattgcagggtatcgtacagcaccctggacanggtagaacaaagtgagagcaaccttagnnagttcgtaagttcaaagacaac

SEQ ID NO: 49664 - DNA, 228 bp, Glycine max
tgtgaataagaccttggatgctctaaaagatgaattgcttgtgccagtgtcatggaggatcgaaaagaataagggtatggttcaacaaaacgatggttcgtggaagctgatggatcatgaagaagatgacttttgatccttaattaattgagacttgagaatgcctttatttcgttaagttacacatttgaggttgatgtcgattggagacaatattaactaattgga

SEQ ID NO: 49665 - DNA, 276 bp, Glycine max
cgctttttctgctccttactagaaatgctgctttcttcttcttcttctcgcggttatcttcactaacaacttctctctctctctccgtctgtgcattttccattgttgaagaaggagaaaggtcttgaggtgtggggtcggtgatggacggtggagtgaactacaaccctcgcactgtggaagaggttttccgggacttcaagggtcgtagagccggcatgatcaaggctctcaccactgatgttgaagaatttttccagcagtgcgatcctgaaa

SEQ ID NO: 49666 - DNA, 274 bp, Glycine max
atagatgatatcagctccacgaatctcaaatacattctggtgccattttttctgtcaactccgcaagataaaatggcaccagaatgtatttgagattcgtggtgctgatatcttctttggtctcgttgggagagaacaaacctagattattgaccatgtcctcgcatctatgcagctcctcgcaccccttcttcacaaatacattctggtgccattttatcttgcggagttgacagaaaaaatagcacaggatgacaggatacagattctaaag

SEQ ID NO: 49667 - DNA, 270 bp, Glycine max
cttttcttcttgtctttgttcagggcaccatcagctataattcataggatttctaccatccaaagaccattcctttgggggggtaaaccagatggtcggtagattgcttggatgtcttggcgccagtgctgcactcctaagcatatgggacgattggggatcagagatatcccaagtcttaacaaggctttgctgttcacatggacgtggatgatgttccaccaaccagaccagctttggactagaatcctgaactctaagtataatggc

SEQ ID NO: 49668 - DNA, 278 bp, Glycine max
cggctcgagaattccttgatgacagtcacttcacgaatgtggagtcagcatttgtcgcattgggcgcaaacagtgcattctgcctatagagtctagcgaatctactgacaataggatgttgtgtgatgtagttgactaaatgtggtgtgatgttaactgagagagagaaatctgaatttagaactagggatctggtacaggatctttgcaagcttgttaaaggccctattgaaccagttcgagatttagtgtctggatatggatctgcacctggtgct

SEQ ID NO: 49669 - DNA, 270 bp, Glycine max
gtttcgggtgctctggaaccttgtttagttatgtaataaattaaatctgacttgtgcattccctttaagggagaagagcttaggaagctgattaatgcaccagcttacattgaatgcagttcaaaaacacaggagacgtgaaggcagtctttgatgcagccataagagttgtccttcaaccacctaagcagaagaaaaagaagggtaaagcacaaaacgcatgctcgatattgtgattcactaggtgttaacatttgactgccctttgtt

SEQ ID NO: 49670 - DNA, 264 bp, Glycine max
caagctcaaagtgtggaatgtgccactactcttggtggtgtttgcatgttcactgcttggtcaagcttcagcttctgtgtcctatgaccataaggctatcatcatcaatggacagagaaggatacttctttctgctccattcactaccccagaagcacccctgagatgtggccagatcttattcagaaggcaaaggaaggaggtttggatgtcattcaaacttatgttttctggaatggacatgaaccttcacctggcaaatat

SEQ ID NO: 49671 - DNA, 277 bp, Glycine max
cactcgagcgaatcggctcgaggttgcctcttacacaggcaacatatttgttgccaacgttgccaaaacttgcagactggggacttgccatctttcttgaacaaatatgggtcctatccaggctactttgatgtagttgtgaatcaatttgtcaacattgataaagcagattgggttcttgcaaacagtttttatgaactggagcaaggggttgtggattggctggtgaagatttggccattaaagccaataggaccatgcctgccatctatctact

SEQ ID NO: 49672 - DNA, 277 bp, Glycine max
ctgaatacctagctcatggtcagttaacagaaaaggcagacgtatatagttttggagtgttgctgctagagatagtcactgctagacagaacaacaggagcaaagcatcagaatattcagacagcttagttacagtggcatggaagcattttcaggcagggactgctgaacaattatttgatccaaacctagacttgcaggaagatcacaatagcaatgttaatgttaaggatgagattttaagagtggttcacataggacttctatgcacccaaga

SEQ ID NO: 49673 - DNA, 252 bp, Glycine max
gcagtggatcgttgacttcttcgcttgcaagggcagttgctccttcaggacacgtctatacctttgatttccacgaacaaagggctgcatcggctagggctgattttgagaggacaggtctaagcagcttagtcactgttcaagttagggacattcagggtgaaggatttcctgatgacttgactggcatggctgactctgtatttttggatctacctcaaccttggcttgccatccctgcagctgcaaaag

SEQ ID NO: 49674 - DNA, 254 bp, Glycine max
gtctgaatattgacgctctgcaaaatcgtgttggccctgaaactgaaaatgtgtttcatgataccttctgggaaaacttgagtgtcgtgattaatgcactagacaatgtgaatgcaagactgtatgttgatcagaggtgcttgtatttccagaagtcacttcttgaatctggaactcttggggccaaatgcaatacccaaatggtcattccccactaacagataattatggccgctcaagagatccacctgaga

SEQ ID NO: 49675 - DNA, 253 bp, Glycine max
agttattacaggtcgaaaatctaaagtggaaacatttgccggtgcttgcaagacctatacgattgaggctatgatgggtgataagaaagcattacaagcaggaaccagtcataaccttgggcaaaactttgcccgtgcctttggaacacagttcacagatgaaaatgggttaagggaatatgtttggcagacatcatgggcaattagtacacgttttgttggtggtatcatcatgacacatggagatgacgca

SEQ ID NO: 49676 - DNA, 292 bp, Glycine max
ggaaatggaagggatgagacactattttatgcttggcttggctccaagtgtgtaacggaggataaagcagctgccatttcccacatgagtactatggctgattcaatcagaactagtccggctatggctcaaatccatgagggtaacgaaccagctcaatttttctcaatacttcagagagtaatcatattcaagttcaggatataggaagtttatagaagaacaaggtatagtggatgacacttacaataaaaacctggttactttgtttcgggtacaaggtacaagtcca

SEQ ID NO: 49677 - DNA, 288 bp, Glycine max
  unsure (1)..(288): unsure at all n locations
gatgtccttaaaatcaccaacaatttcaatacaattgttggtaaaggaggatttggaacagtttatctgggctatattgatgacactccagttgcagtgaaaatgctttccccatcgaccattcaaggttatcaacaatttcaagctgaggttaaacttctaatgagagttcatcacaaaaatttgacctcccttgttggttattgtaatgagggaaccaataaggctctcatatacgagtacatggctaatggaaacttacaagaacatctatctggtanacgcagc

SEQ ID NO: 49678 - DNA, 276 bp, Glycine max
ggggtctttaccgatgcaataaaaaatgcagttggccggcctcgcccagacttctattggcgttgcttccccgatggggtagagaattatgatagttggggaggtgtggtatgtcatggcaatgctagcgatataaaagaaggacacaagagtttcccaagcggccatacatcatggtcctatgcaggtctaggttttctgtctctgtacctatcggggaagattaaagcttttgatcgcaaagggcacgtggcaaaattatgcattgtgtttctt

SEQ ID NO: 49679 - DNA, 278 bp, Glycine max
actcgagccgattcggctcgagtccagccatgacttttgtgatggacctgttttgccggatacagaagatagaaataaagaacgtgagatgcatggcaaagatagtgggaacattagtcacagtggcaggggctatgctgatgaccttatatagaggtcctatagtggagatggtatgggccaaacatccacacaataaaaccaatgcaacaaccacgacagaatcatttgacaaagattggttcttaggatgcacctttcttatcattgccacccta

SEQ ID NO: 49680 - DNA, 150 bp, Glycine max
  unsure (1)..(150): unsure at all n locations
agattccgatgcagcagaggtgatggganggggaggaacatggtgtcacaaggtgcaaaatgtgtgcatgcttgtctacaacatgacgtccctggtatggatgttagtggaatctctggcaatgtctggtcggacaagacagtcgcagcc

SEQ ID NO: 49681 - DNA, 189 bp, Glycine max
aggtagaatacacaaccaactgccatgatccactcgctaaggtaatgaataacaggtctggcattgtcgctagtttgctcaccactggagatgccatcactgatacccaggcgactgttgatgggccatcagccaaggactggagatgtagaagtctgcttcacatatcatcactcctagcaccatgga

SEQ ID NO: 49682 - DNA, 284 bp, Glycine max
tgctacccggtgagaattaagttttatcacgcatctaaccttgtacaaattgcaggacagatcaatatgccctcaatttgtaggggtagtagagtttttggagtgaaaatccgtttcaaattgtggtcgtccagggtggtgggtcttcgggttttatagtaattttgattcaatttcacgctattgacaacaggtgaaggactttcatagggtgtgttgttcggttttggaactggacttaccattgaaactgttgtcttgcatagtgtggccatctgagatgc

SEQ ID NO: 49683 - DNA, 197 bp, Glycine max
gttggtacgaaaaatgtcgaagctgatcttcgtgttcctttcgctcattcctcttctctgcacctccttctccccagagagaccctcagatcgacgcgtcctcgttttgctcgatgacttcgccatcaaatcctctcattctctcttcttcaactccctcaaatctcgcggcttcgatctccaattccacacaacat

SEQ ID NO: 49684 - DNA, 278 bp, Glycine max
cacatagtagctattatactctctagacacttgcggaatctgctagaattctctaataatggcgaaagacgttgagcaggtcacagagcaaggtgaatactccgcgaaggactaccatgaccctcctccggcaccgttgatcgacccagatgagctcacaaagtggtccttgtacagagccgccatagctgagttcatagcaacactcctttttctttacatcaccgtgttgaccattattggctacaagagacagagtgacaccaaaatccccggta

SEQ ID NO: 49685 - DNA, 286 bp, Glycine max
acccgagcgattcggctcgaccaaattcctgggacgcagagccactctatcttgtgttgcaaattgcaatttggatgaaggtgttcctcccggaaaggtagcagtgatgcagatatgtggtgacactagacattgtcatgttctacatctaattcattctggaatccctcaaaatttacagcttttgcttgaagatcccacagtcttgaaggttggagctgggattgatggtgatgctgtgaaggtttttagagattataacatatctgttagaggtgtgacggat

SEQ ID NO: 49686 - DNA, 233 bp, Glycine max
cggaattccgatcactcgagcgaatcggctcgacggactcgagcaccttccaacgcctcaacatcaaccatgactctcgcctcgacgcctcatacgatggcagatctcactattatctggctgccatttgcactcccgcggattacaacacccgccctctcgacaccatttacagcaatttcatcgacgcgctccccgtggtgaaatactgttccgagaacaacaagcgcctt

SEQ ID NO: 49687 - DNA, 224 bp, Glycine max
gcttgtgtaattgtaggtggtttcggttcttatctcctgggtttgaataggaggacttatgagcaagcaggggttggcacagaggggaataatccgggtagtacaaggagcctggaattggatggatgacagcctttctctttgtgaccagctttgttggattgttggcgttggttcccattcgaaagattatgataatagactacaaattaacttatccaagt

SEQ ID NO: 49688 - DNA, 221 bp, Glycine max
ctcgagcgtgcaattgttggccatgttgattctggaaaatcaactctatctggcaggttactgcacctattgggacggatttcccagaaagaaatgcacaatatgaaaaggaggccaagttacagggcaagggatcctttgcttatgcttgggcacttgatgaaagttctgaagaaagagaaagggggataactatgacagtggctgttgcttattttgac

SEQ ID NO: 49689 - DNA, 224 bp, Glycine max
tggaatactagcattcctacaaagatggaagatgtactcacaacacattttgataaccaaaccaatatcttgattcatgtatacgagggtgagaggaaaagacttagagacaacaacttgttgggtaagtttgtgctagaaattcctccagttccacgtggtgttcctcaaattagcgtttgctttgaacttgattatgatggcatcctacatgtttctgccga

SEQ ID NO: 49690 - DNA, 252 bp, Glycine max
gccaaaaggagctcatgttcattagtgagttggaagagattttggaaatggctagcatggctgagtttcagaagatcatggtcccactgttccgacgaatggcttgctgcctcaatagttctcattatcaggtggctgaaagagcacatttgctatggaacaatgagcacattctgaacctgataacgcaaaacagacaggtgattctgcctctggtgttctcagcacttgtacataatgctcgaagtcatt

SEQ ID NO: 49691 - DNA, 247 bp, Glycine max
cagtcctggtatttctcagcgcgtatagcatggctttgttagtggagtgaacgacgactggtcgcgagtacacggtcacggaccttacccaggccgacttcggccgcctcgagatagacctggccgacgtttagatgaccggcctcatggcctgtcggtccgagtacggcccctctcagctcttcaaaggggcccgcatcacaggatccctccacatgaacatgcagactgccgttctcatttagac

SEQ ID NO: 49692 - DNA, 269 bp, Glycine max
gctttacgaagatgactttacagacagatttgacggccttttatatcaagagaatgatctttcttacagctttgattttaaaaaatctccagaattgatggaggatgaatttggttctcatggaaatgctgtgaaagtcaatagtcttgaggaacttgatcctgagatacagaccattgtattactaagtgatgcttatggagctgaaggtgaactgggcattgttttatctgagaaattcgtggagcatgacgcatactgtatgtttg

SEQ ID NO: 49693 - DNA, 264 bp, Glycine max
ggggaggcatcaaaatggtcaactgggacttggcaacacagaggattctcttgtgccacaaaagattcaagcccttaagggagttcctatcaaaatggttgctgcaggtgcagaacacagtgtagctattactgaaaatggagaactgtatggatggggttggggccgatatggaaatttggggttgggagatagaaatgatcgctggaatcctgagaaagtttcttctgttgattgtgacaagatggtcatggttgcttgtgg

SEQ ID NO: 49694 - DNA, 258 bp, Glycine max
cttcacttcactaatacatcctagctgacacttcccagaacaagtctgagagctctgaggttgaggtccaggatcgtgttgttcttgactttctcggtaagaaaaaggatgaagaagacaagcctcatcctcaggaggaggtcatcgccaccgagtttcaaaaagtcactgtctcagaccaaggagagaacaagcacagcctcttagaaaagcttcaccgatctgacagcagctctagctcgtcaagtgaggaggaag

SEQ ID NO: 49695 - DNA, 261 bp, Glycine max
cgacaatggtgggggcgcggaagaaaacacaaacttctcagttcagtgtgactcaaactttctctccaaattcatcatgtggccgaaatttgagaaagaaccaacttggtggcatcatcttcggatgcaagaatgccacaatgaaagaatgtctatctaagcaactgtttggcttaccagctcatcacttctgttatgtgaagaatattgatccagggttgcctctgtttctgttcaattatactgacaggcaacttcatg

SEQ ID NO: 49696 - DNA, 253 bp, Glycine max
tcaagattctaagagagattttgctgctctttgaagaagggtgtttgcttgattttggtgatgtcgctgctctcagatctcatcaaccttaacctctcagacactactgagaaggtgatcgcagagtacatatggatcggtggatcaggaatggacctgaggagcaaagcaaggactctcccaggaccagttagcgacccttcaaagcttcccaagtggaactatgatggttccagcacaggccaagctcctg

SEQ ID NO: 49697 - DNA, 261 bp, Glycine max
ctcatgcctgctgacaagttcagaatggctaccttgctccacaatgcgcccatcttgaaccacaccaatgcaatcaacccctctaatggttgacaaacgatgagccacgagcaccgtggtgcgacccctcattagcttttccaaggcttctggtagcacaaattcggattcagcttcaatgcacttgtgggctcatctagtagaagaattgtggggtccttaagcacggctcttgcaatggcaatactttgcttttgcccc

SEQ ID NO: 49698 - DNA, 252 bp, Glycine max
tcttgtgccactcacatttgcttccaggctctagcattagttttctttcaagtcttctttctcagcaatgggagatgaggtgattctgctgaatttctggttaagcccttatgggatgagggtccggattgcattagaacaaaagggcatcaagtatgaaagtagagaagaggacttaagcaacaagagctctttactcctccaaatgaacgcattcataagaaaataccagttctcatccacaatggcaaa

SEQ ID NO: 49699 - DNA, 268 bp, Glycine max
gctatataattcagaataaagcagcacagaggtctcctgtgattaagctttgctgcgttggctcgttattttttaactattatttttaattgaatgtgtatagtgtgtttctttgtttgagggatcttgtggcatgtgggtccacatccagctgaggttgtggtagggtcagccgcatggcttgggcgaggtctgtcttgtgtctgtgtacaaagaagagatagtgatgcttctaacactttcgatttaaccctagcccaggaggaat

SEQ ID NO: 49700 - DNA, 269 bp, Glycine max
gaagaattgtcttcttcaccatcccaattcccttcaatcttccaactatcacatacacaagtccacccataatcatccatcaagatccttttccttgtacaacagtactgacattgttattaggttgattgaggatgttgatgaggggaaagaggtttgcatcagctatttcaggattggtagggactattgtacaaggaaaaggatcttgatggaggattatgggtttacttgtggatgtgataggtgcaagattgaagctaattggg

SEQ ID NO: 49701 - DNA, 268 bp, Glycine max
cacttcttgaaggcctccgagggtgctcaggaagttaccaagatgcttgaggccactaggttgcattatcattccaatttcgcggataatcgcgggcacattgatcattctgctagggttatgcgtgtcataacgtggaataggtccttcagaggtgtgtccaatggggatgccgccaaagatgacattgattctgaggagtatgaaactcatgccactgttttggataagttgttggcatgggagaagaaactttatgaagaggtca

SEQ ID NO: 49702 - DNA, 262 bp, Glycine max
caaaaagtaggcataccacgtacaaaaagttcatgcccctctttatctctaaagacaggatgtcctaaccaaccgacggctattccatctccattgtccattgaacctgctctaaataaccccccttttgctggattatttccgatataatcataaaaagttaattttttgggaattttagaccaagcttctgataaatacaaaccgctgcattgaaccttccaattcagattgatttagtttgtcaacttttatctgactt

SEQ ID NO: 49703 - DNA, 268 bp, Glycine max
aaatgccacacaagaatggagggaagccgccgcttagttatcaatcgtttgtcaagcttgctggggaaccaccatcttctctctctactgtgtactcttcacttcctccagttggcaatcttggaagttgtgatatttctgaagttccaacaatcagagatcttggatatggagatgctgaacaggatgagttctctcctttcaaaggtggtgagtctgaagcattgaagaggttagatgaatgcatgacagacaagaagtgggtggc

SEQ ID NO: 49704 - DNA, 267 bp, Glycine max
aataccatgtgttagtgattatagctgatgggcaggtgacgagaagtgttgacactgagcatgggcagttgagtgcacaagaaaagaaaactgtagaagctattgtgaaagctagtgaatatcccttgtcaatcatattagttggagttggagatgggccgtgggatatgatgaaacaatttgatgataacatccctgcccgagcatttgataatttccagttcgtgaatttcacagaaataatgtcaaagaacatggatcggtcca

SEQ ID NO: 49705 - DNA, 266 bp, Glycine max
cttctgcatttccatgtaagacgagggacttaataaggttaaggatccaaagctttcaactttgaagtttgaatctcactctctttttggctcatctatggacccaaacactcgtcttgatcatgccctctttcagctcactccaaccagaaccaggtgtgaccttgttgttgttggtggaggtgtgagtgaaagacttgcttctgggctgttagaaccgtttctttctcacctcaagagtgccaaggatcagatttccaaaggtg

SEQ ID NO: 49706 - DNA, 261 bp, Glycine max
gctgttcagcagtggagtcaggctgattgctggatgcagttgtatgaccgatggtcctctgttgatgatattggttctttggctgttgtacaccagatgttagcaaatgacccggggaaaagtcttttacattttcggcaatctctccttctgctacggttgaattgtccaaagtctgcaatgcgtagtttgcggctggctagaaattattctacttctgatcatgaaaggcttgtctatgaaggatggatactgtatgac

SEQ ID NO: 49707 - DNA, 224 bp, Glycine max
cttttctcatcaagacaaagaacttctgcctaagttgttgtccgatagaaagagttatgcggcacaggtaatacagcaaggtgattatgaaaccatccaccgcgacataaatattggatttggtaactgggaatatagtccccttgatcttgaaaacccatttccaaataacgaaggctctgtccatctttggcaaggagatgaggatatgatggttccagtta

SEQ ID NO: 49708 - DNA, 266 bp, Glycine max
atcaatctctccctttcacctttctccatagcctaccacttttcttctttctctgctttcatctctctactctcacttctcttcacacactgagacacagagagagagagagaacaaaaaaagaaacggagtgatgggtgtgagactcagtgttttctttttataatgaacaaagtactacacatcctcttcttcactgaagaagatggcaattcagcaccacaatgaacaactagagcataatgacaatgtctcatctgtccttg

SEQ ID NO: 49709 - DNA, 256 bp, Glycine max
tacgccatcaaatttattctcaacttagatggacctgatcctggggccgatgatttgaaggtgattaatggtctcattgacatgtatgctaaatgccaaagcacagaagtggctcgaaaaatgtttgattcagcatcgccaaaagacagggacgtggttacctggactgtgatgattggtgggtatgcccaacatggtgatgccaataatgctcttcaacttttctccggaatgttcaaaatggacaagtctataa

SEQ ID NO: 49710 - DNA, 254 bp, Glycine max
cctctctagtactgcgaggtgtgacttgtcgtgagttccttcaaaccgcattggtatctggccatcaggactcatggttagcgcagtgcatatcgcgtttgctcatatggcagcaggtgtagtaatcatccttgccattggcactgcgtatccaccacaccgagccgagcagagcatgtatcctgagtactagtgcagtatcatcattagtgatcacatgaccgtgctcgatgtgtcatttgatcgcatgtgtg

SEQ ID NO: 49711 - DNA, 242 bp, Glycine max
gaagggtatagatgaggcaattgaagctggaaaaagaattagcagcattcctgttgatgtaatatttacatcagctttgattcgtgcacaaatgacagccatgcttgccatgacccagcaccgtcgtgggaaggtccctatcatgatgcacaatgagagtgaacaagcaaggtcatggactcaagtgtttagtgaagatacaaaaaagcagtccattccagtcatagcatcttggcaactaa

SEQ ID NO: 49712 - DNA, 241 bp, Glycine max
cttcaatattctggccagtcagtgttcccctctcaatatatttcgaaacggtggacaaaagatgcaaaggtcaggaatataataggagaagaatcagaacacgtgctgactagggtgcaacggtacaatgatttatgtcagcgagcactaaaacttattgaagagggatcattgtctcaagagagttatggtattgcattccatgcgctacatgaagcacacaaaagttgtgtgagtgtta

SEQ ID NO: 49713 - DNA, 241 bp, Glycine max
cttttgctgagcttcttgagaaacttggtaaatcaaatgaccatgttgattgtgtgatttataattcattgttaccttgggcactagatgttgccaagagatttgggattgctggagctgcatatcttactcaaaatatggctgtgaatagcatatattaccatgttcaattggggaagttgcaagctccactcatagaacaagagatttcccttcctgccttacccaaacttcatcttca

SEQ ID NO: 49714 - DNA, 244 bp, Glycine max
ggatagtgctagacgacaagaagaaatagagaatgcaatgtacctggcacgtgaaaagagcctggcagatgcagacttctaccgtgtaataaaggaagctgaagcaaacaggttgaagctcacccctgaatttcttcagcttaaatttattcaggccattgctcaactatggtgtacattatgataagacatggatatatgacaagattcatcatgagattaatcagttctgcagttctcattc

SEQ ID NO: 49715 - DNA, 239 bp, Glycine max
tggcaatgagggtttcatgcttctgtaccagcaacggagaagtgtttcctgggtatgatactctcctgcaaattggctgtaggcttggtgaatgcaggattattttatgtgaagcaggtgccaagcacaagttgcaaaaattgcagcttaatttcccgagtgatgatgtcgcctttgcgctgagagattgcaaagatctaccttggttgtcaaagtatctaatgtagggatgagaatta

SEQ ID NO: 49716 - DNA, 283 bp, Glycine max
  unsure (1)..(283): unsure at all n locations
atggggctcttgtggaaaactcacacgaggatacacgtgagaccctttttcctcctttcttactctatccactctaagtgattaaaacattttttgcaatccttttggttgcactgctgagttcagagagagtagagagcagaaaagccaaagttgtgaccacttccttggagtacaatgctataaactgcagagctcacagtgctgcattgacagattttggtggtgttggggatggaaaaacatccatcanaaaggcatttcagtctgcaataagtcacct

SEQ ID NO: 49717 - DNA, 289 bp, Glycine max
ctgttgatttgaaaactgttgtggagaaggagacgaagattgaaatgccacgtgcggaggaagaggaagaggtggaagaagaagaagaggacaaagaagaagaagaagaagaggagaaagttgagttgccaccagaagattgtgacttgttcactggggagtgggttttggataacgtgacacaccctttgtacaaagaagacaagtgtgagtttctcacttcgcaagtgacatgcatgaagcatggacgaccagattctttgtatcagaattggaagtggaagccaag

SEQ ID NO: 49718 - DNA, 280 bp, Glycine max
caagtttcttcctttctctgctctttgtcttctctgacacatttggggccttgttgagtgtgtttttgcaagagggtatggcgaaggacgttcctgttgctgagcgtggctccttctctgggaaggactaccaggaccctccaccagcaccactcattgatgctgaggagctcacaaagtggtccttttacagggctcttattgctgagttcattgccactttgctcttcctctacattactgtgctcacagttatagggtacaagcaccagacggatca

SEQ ID NO: 49719 - DNA, 266 bp, Glycine max
aaagagctgatttatgaaccgtgttgttagcatcaatgttcaacacagtttcaaacgaaaagcttggtatgctaggatatgccttacaacaaagacactaagtgcacacaagggagactcctaccattaacataagccagggcgtcctacgtgataaggccaacctgacgctatacgacgcgcaagtcaccgaggcacaaatccagacggatctatccatgaccaagtgtgactgggatcatcctatccacttgcagcccacaagt

SEQ ID NO: 49720 - DNA, 281 bp, Glycine max
gcggtggcagcattcgcgccagcgaagggtttaagatgagtaacagcttaaaggcttctcgcttccccttctgcgctctcgtcatggccgccaccaatcagaggatcgcgctccttcaacaggttgaaggtccaaaatacagtgaggagctgctggtgacactgcagagagtgcttgaagaaagctcccccgtccttgctgcggctaggcttgatgcagaagaaagaagaaataatatgcgcttaagggaggagcaagatgctgcatacagggctgcactt

SEQ ID NO: 49721 - DNA, 268 bp, Glycine max
ccgcttctcgctgatgacagaagcgacgtgattctgttgaagtttcttcgtgctcgggacttcaaggtgaaggaggcaattccattcagacgtttttgtcgaggtgacggagaggacagcccaggctaagaatagacactctaatggccaaggacggtggcctgtcaagtcagcaaaattcattcttgatttgctcaaaaatgctgagagcaatgctgaagtgaaaggtttggatgttgatgcactgtacatttcgcatatccaagtc

SEQ ID NO: 49722 - DNA, 265 bp, Glycine max
atttcctgaggcttggcattcagattctgcttcagttaagggagatggggtttataacataaggtcaaaggtttatgttaacccaaaattgtggtatttgagggttaatgtgattgaggctcaagatgtggagccaaatgacaaaagccagccaccccaagtttttgtgaagggtcaagttggacaacaagtgctcaagactaagttgtgtccaacaaaaacaccaaacccaatgtggaatgaggatttggtgtttgtggcagca

SEQ ID NO: 49723 - DNA, 264 bp, Glycine max
ggaaggctagatatatagagaaaaaggacgtaattctattacgaaattattgtttatttaataaatttcctaatgtgaaaacaaatattatattttaaacatttttgaaaagtgaaacatctcaatatcaaaaaataaaagaaatcaatagagattccgatagtagtggtgagcgaaattggatgaagaaataaaaataaataaaaataaacagtgtggaataattgaccaaaggaggtgaaagtcctgttagactttatatgt

SEQ ID NO: 49724 - DNA, 264 bp, Glycine max
cgacactaggaaaacactcccgcgatgacgacgcgacaaaacaataccatttgcaagaagaacaaccaccctcaaggcagagaaacggttctgttttggtccccaaaacactgagaattgatgacccaagtgaggctgcaaagagttctatatgggcaactttgggcatcaagaatgagtgtgtcactggtggaggcatgttcaagggattccaatcaaagaaagaagagaaagaccatgttgttgaagcctctcctgtgttga

SEQ ID NO: 49725 - DNA, 261 bp, Glycine max
tacttgagatataataatcctacgtatgccagcactagagaacacgcgaaacacgtgattcacccacgccggagaaaatgagcaccggcgctggaaaggtggtgtgtgtcaccggcgcttccggttacatcgcttcctggatagtcaaattccttctccatcgcggctacaccgttaaggccaccgttcgcgacacgaatgatccgaaaaagataaaccacttggttagcctcgatggtgctaaggagaggctgcacctct

SEQ ID NO: 49726 - DNA, 261 bp, Glycine max
agtaaacagacctgttagaaggcgacatggtaaattattggaagagggtgctagtggctttctccaaaaaaagctttgtgatgaaacccaggagccaataaagactgaaactaagggggattgggatttgttcaataaaatagtttctgatgggagtggcattgatgcttcatttggcagtaagcattgggtgtctgtttatttggccagcactccacagcaagctgccttgatgggactcaaatttcctggagttgatga

SEQ ID NO: 49727 - DNA, 262 bp, Glycine max
caattgggtgacgtttgacggattactacaaagacactattgcaattggaccttttgcagccactgcccatggaatactggtttccaattcagcaggaaatggtgggcctagtcaagcaactttgtctaatgtggcaccatggctaaccactgtgggtgccggaactatagaccgtgatttccctgcctatatcacccttggaaatggaaagatatacactggggtgtcgctttacaatggcaaactcccactcaactctcc

SEQ ID NO: 49728 - DNA, 269 bp, Glycine max
tgatctcagaattctctaaaagagatctttttctgctctttgaagaaagaagggtctttgctctgattttggagatgtctctgctctcagatctcatcaaccttaacctctccgataccaccgagaaggtgatcgcagagtacatatggatcggtggatcaggaatggacctgaggagcaaagcaaggactctcccaggaccagttagcgacccttcagagcttcccaagtggaactatgatggttccagcacaggtcaagctcctggt

SEQ ID NO: 49729 - DNA, 259 bp, Glycine max
cttgagagttgagagcatggagattggtcctctcttccccaacatagcgtggtggcagcaagtcaacgcctctacttgctgccaggacgctgttttctaattcctatgcgctgcttatgctcttgtctcttccaccgctttggtacatacatctccttctttattaactactcattcatttttgtctttcttattattctgctctgtagattcaattggttagaattcaagttagagtacctgagtatggttggactac

SEQ ID NO: 49730 - DNA, 265 bp, Glycine max
gtatacaagggatggttctgtttggaagagtgatgaaacttctgcccagtcatccagccatgtggtagatttgcttttcttatcacagaggtgtctagtatccaaagcagccaaacaattgatggagctagttcatcagacgctacagctgatcaatgcaaatgacaatttgcccaggatgtttgcctgtcatctacaagagttgcttttgaattttatcacacagctagagatgctgtactactttatgaagtagttgtccctg

SEQ ID NO: 49731 - DNA, 264 bp, Glycine max
cctcgagccgaatcggctcgagcgcgctcgagctcgagccgaagtcggactcgagctacgtctcgtatcgtcgttatagggctagaacacgaactttaaccgcggtgcactgatgtcatacggtcttgcttgatgattcgtcaacttgcagaaatcgaggcaatggctgcatctaagaaactgataacaagagaagagtgggagaagaagcttagtgatgtgaagattagaaaagaagacatgaataaattggtaatgaatttc

SEQ ID NO: 49732 - DNA, 269 bp, Glycine max
ctcggaggaagaatcaggatcggctcctctacaccaattccaggcgtggctccctggactcgcggggccacccttgggaatctgtgcctttcaagcacccaagcacgtttgacacattggccatggaccctcacaagaagaagcagatcacggaggatcttcaggacttcgccaatgggcaatctttttaccataaaaccggtagggcttggaagagaggctaccttctctatggccctccaggtactggtaaatcaagcatgattgcc

SEQ ID NO: 49733 - DNA, 264 bp, Glycine max
cggagataaagttgcctatgcacttcaacaaggtctaacagttattgcatgcattggggagactctcgaacagcgtgaagctggtacaacaacggctgttgtttctgagcaaacaaaagcaattgcagctaaaatatcaaattgggacaatgttgttttggcctacgagccagtttgggccattggcacaggaaaggttgctactcctgctcaggctcaagaggtccatgctgatctgaggaaatgggttcatgacaatgtgag

SEQ ID NO: 49734 - DNA, 258 bp, Glycine max
gttcttctagttaaatcattacttttgataaatataaaaactctctttttttttcgtaattatgcagattgcttctgattggttatatgtttatccaagaggaattcgtgaccttttattatataccaaagaaaagtacaataatcctttgatttacatcactgaaaatggtaaataacacttctctaaatacttgatttcctttattgcactgacatatactattctacatgaattttaattttcctaaccaaatga

SEQ ID NO: 49735 - DNA, 257 bp, Glycine max
cgatgagtatggtgcaaggaccgctctaaatcttggtggtactgtgcttggatactatccagtcagggttcttccttcaaaaactgccattcttccagtgaatcctacattcctccctaggtcagatgatgagcgtgaaatgtgtgcccggactgtctattgtacaaatattgataaacattcttcacttcagcttgagaaccctttttatcaatatttgtacaatagacagtccgggcacacattgataaacaggt

SEQ ID NO: 49736 - DNA, 260 bp, Glycine max
ctctctgcttgttcgcattgtggccttgtgactaagggacttcaatactttaacttgatgaccagtgtgtataacattgttcctgattcacgtcagtatacctgccttgttgaccttcttggacgacgaggtcttataaatgaggcttttgaattcttgaggttaatgccaatggaagctgaatcaaatacattaggagcatttattggatcctgcaatctacatgacaatataggaatggctaaatgggctgcagaaaa

SEQ ID NO: 49737 - DNA, 264 bp, Glycine max
gagcagttaaataatgtagactgcattgtgtatggcatgggctccctttttacttcaatctgcccctcactggtgttactgggaattggggagattatttcttcaaagtcctgcctcaaggtacttgtgctaaatggaacacgggaccgggaaactaatgggttttcagcttcttgttttgtaactgccattacggatgctctaaatcgaacatatggagagcctaacaatcgcttacagaatcccccaagtcactatataaat

SEQ ID NO: 49738 - DNA, 274 bp, Glycine max
gtgagatctctctattcctggaacgtgcctttgttcgattggaagcatggttccattggttcaaacttgaaatgaagacactgtcatctggactggatgattatccacgagcttcacacccaagtgaagatgaacaccacttggatcttagatgttggatgttacttgcagcagactgtatgcattccattcaagagttgttggatatggaaagcaagcctggcatggattatggttctactgctaagttgctattggattttgagttactgaa

SEQ ID NO: 49739 - DNA, 206 bp, Glycine max
ctgctcgacgggttcgggactgggacccccgtgcccagccctcagagcggctcgagatctgccaggggtgttgagaaaggtgcctcagctggtggtgaagttgaatcaggacgtgaagctggtgggaaactagttcactttgatggcccttttgtgtttactgctgatgatcttttgtgtgcaactgcggagataatgggaaaagt

SEQ ID NO: 49740 - DNA, 283 bp, Glycine max
gcaggacccagacagcaaagttgcctgcgaaacatgcaccaaaaccaacttggtcatggtcttcggagaaatcacgaccaaggccaacgttgactacgagaagatagtgcgtgacacctgcaggaacatcggcttcgtctcaaatgatgtgggactggatgccgacaactgcaaggtcctcgtcaacattgagcagcagagccctgatattgctcagggtgtacacggccaccttaccaaaaaacctgaagaaattggtgctggtgaccagggtcacatgttt

SEQ ID NO: 49741 - DNA, 281 bp, Glycine max
ctccgcccccgtggactgcgtcgtcgtcggcggaggcgtcactcgcctctgcatcgcccaggccctcgccaccaaacacgccaatcccaacgtcgacgtcacggaggcccgagaccgcgtcggcggcaacatcaccacgatggagagggacggatacctctgggaagaaggccccaacagcttccagccttctgatccaatgctcaccatggtggtggacagtggtttaaaggatgagcttgttttgggggatcctgatgcacctcggtttgtgttgtgga

SEQ ID NO: 49742 - DNA, 284 bp, Glycine max
  unsure (1)..(284): unsure at all n locations
aagaaacttaatcgatcatcacttcacttcactaatacattctctcagacgagacncagaacaagtatgagagctctgaggttgaggtccaggatcgtggtgtttttgactttctcggtaagaaaaaggatgaagaagacaagcctcatcctcaggaggaggtcatcgccaccgagtttcaaaaagtcactgtctcagaccaaggagagaacaagcacagcctcttagaaaagcttcaccgatctgacagcagctctagctcttcaagtgaggagcaaggagaa

SEQ ID NO: 49743 - DNA, 254 bp, Glycine max
caagattctaagagagattttgctgctctttgaagaagggtgtttgcttgattttggtgatgtcgctgctctcagatctcatcaaccttaacctctcagacactactgagaaggtgatcgcagagtacatatggatcggtggatcaggaatggacctgaggagcaaagcaaggactctcccaggaccagttagcgacccttcaaagcttcccaagtggaactatgatggttccagcacaggccaagctcctgga

SEQ ID NO: 49744 - DNA, 268 bp, Glycine max
tctttctttacctattctctcccgtctcaaacattttctcctccatctctcgtcagattcaagatataactcattgagcaaagtagcttataaaatttgctcaacatttattagctcatcaaacagaactacttaattagctagctagcagtatgggaagagcaccttgttgtgacaagaatggtctcaagaaagggccatggacaaccgaggaggaccagaaactcattgatcacattcagaaaaatggatatggcaattggaggac

SEQ ID NO: 49745 - DNA, 263 bp, Glycine max
ccgaactctacaagctgaaatccggcggaatcttccgccggcgccggagattctcctccagtagcatggacaacgcgttgaagcaagtgttccggagaaaggaggacggacggttgttgaacttgaaggacacgtgtaaaccggtccttattccttgcttcgacctcaagagttccgcgccgttcgtgttttcgcgcgccgacgcgtccgagtctccgagcttcgacttcgagctctggaaggtgtgccgagccacgtcagcg

SEQ ID NO: 49746 - DNA, 228 bp, Glycine max
cagatattgatgtttgattctatacgtcgaagaacttgcttgcactacgctgcttattatgggcatatagactgccttaaggccattctttctgctgctcattccacacaacatacgagacaaagacagaatggccttaaggcagtctatatgcccataataagcagcgtagtgcaagcaagttcttcgacgtatagaatcagacatcaatattgctcgagcgaattc

SEQ ID NO: 49747 - DNA, 246 bp, Glycine max
agctgcagaagtcacagaagtatcaaccaaagcagtcctagaagccggtggttgatgctccggcagcttcacggacaacaagtccagtttccgggtagcttgtagcaaccttggcatccggggtgagtcttggcactcgagagtagatcatggatgagtttgtcgggacacacccagagcatttatctctgatacttgatactggtagtgagattaataggattcagtgtgatccatgcaatgcat

SEQ ID NO: 49748 - DNA, 277 bp, Glycine max
cccgagccgaatcgcctcgagccgctcgagccgctcgagcggctgcaccgaagctctagcttgacgcagcgaatcacaatggcgtcaggcttgaagaagcatttgaagaggcttaatgccccaaagcattggatgcttgacaaactgggtggtgcatttgctcctaagccctcatctggaccacacaaatccagggaatgcctgccactcatactcattttgcgaaaccggtgaagtatgctctgacataccgtgaagtcattgctattctgatgca

SEQ ID NO: 49749 - DNA, 276 bp, Glycine max
aacaccctcagaaccctgtcatgagtccaccaagtggagttgccgtgaataacttcagagacccttcaactgcttggcagggaaaggatggaaaatggagggtagtaattggtgctcaaaatggtgatgaagggaagacaattctctaccaaagtgaggactttgttaattggaaagtggatcctaatcccttctacgcatcagataataccggagtttgtgagtgtccagacttcttccctgttaacatcagtggcagcaaaaatggggtggata

SEQ ID NO: 49750 - DNA, 266 bp, Glycine max
cgaaatactaacagtgaaccactctcttgggacacccgaatcaaaatagctattggtgctgcacggggcttggctttcttacacacctcagaaaagcaaatcatatacagagatttcaaagcctccaatatactacttgatgaggtctgttattttccttacttcctctctgttatatttgatgagtttatgaatttggaccccccatttgtgtttaattataaaccaaacttttgctagattttttttttatcgacaaagagttt

SEQ ID NO: 49751 - DNA, 256 bp, Glycine max
gttggatcctaattatggaagggctcatcagcgtttggcttctcttttcctcaggttgggacaagttgagaatgcaaggaagcacctttgttatcctgggatgcagccagagccgtctgagatgcagaggttgcaagtggtggaaaagcatatcagcaaatgtggggatgtacggagggttggggaatggaagagtgttctcagggaagttgatgctgctgttgctgctggagcggattcttcgcctcagctcttt

SEQ ID NO: 49752 - DNA, 262 bp, Glycine max
cacaaccttatggtgtatatacatggttaacggatattaaagacacctctaaagaaggatatagttttgaagagatatgcatcaagaaagaagcgtttgagggagaagagaagttttgtgcaaaatccttgggaacagtaattggttttgccatttcaaagctgggaaagaacattcaagtactttcaagttcctttgtcaataagcaagagcaatacactgtggaaggagtgcagaatcttggagacaaagcagtgatgtg

SEQ ID NO: 49753 - DNA, 261 bp, Glycine max
caaagagttgtatctccctggattgagagattatgtcaagagctttcatcctttaggccctgtttggagttcaacaggaaaaataattgctccatcaaaagcttctgctcctgctgcccctccccctccacctgcttctctctttagttctgaatcatctcaggcttcatcttctaagcctaaagaggggatgtctgctgtttttcaacaaatcagttcaggaaacgtcacttcaggtttgaaaaaggttacgaatgatat

SEQ ID NO: 49754 - DNA, 256 bp, Glycine max
gtatgattacatgccaaatgggaacctggaggaccatctctttttatcaacggactctcagaaagcaaaagggtcattgacttggcctcagaggaaaagcataatcttggatgtggcaaaggggttggcctatttgcactatggagttaaacctgctatttttcacagagatatcaaggccaccaatatactacttgatgcagatatgagggcaagagttgctgattttggacttgccaaacaaagtagggagggc

SEQ ID NO: 49755 - DNA, 260 bp, Glycine max
cctcgagccgctcgagccgattcggctcgaggagatatgatactcaggaacatcctctattttcaactactggacacagtgcataaagatgatttccatcagccaaatttccctggtgcttccatcaagaaaggtggtccaagagagccatggcatgacattcattgcaagttagaagggtctgttgcttgggatgttttgtacaattttcaacaaaggtgggagaagcaggttggaaatcagctcctattctcttcaag

SEQ ID NO: 49756 - DNA, 263 bp, Glycine max
cctcgagcgaatcggctcacggctcgagttttgtcatactacaaaccatgtattatacccattagagggtggagttgcatctgggtttaaaaaacctgaagaagagaagtttgaaacatgtttgtatgtatgcagagggaaaagagttgttagattgagacaggtcccttttgcaaggtcttcattgaaccatgaagatgtattcatactagagactcagaataagatttatcaattcaatggtgcaaattccaatattcagg

SEQ ID NO: 49757 - DNA, 268 bp, Glycine max
gattctctgtgttgtgttgtgtacttgtgttaattgtgttgttgttgtaggaaatttaagtgaagagagaatgatgatgaagtctgctatgtgtgcattggtgcttgtggcactggttgtggttgaagtggggcccatggctgaggctgcggtgacttgcaacccaacacagttgactccttgtcttccggcaattaattcaggttctgcaccttcgagtgcttgttgccagaagctgaaggagcaaaagccatgcttctgtggctac

SEQ ID NO: 49758 - DNA, 270 bp, Glycine max
gagtcaagatgcacaaagttctcatgttacagcttttaattcaggtgatggatcctcaaagtcggacaacgaacgggatgttcatatttcaatgcggttaatggaggactttcttgatcttgctaaagaaaatacagaaaaggatttggaaacttgtggtatacttggtgcctatcttgagaagggaaccctctatttgactaccctgatcataccaaagcaggaatcagcttccaattcttgtcaagctacaaatgaggaggaagtttt

SEQ ID NO: 49759 - DNA, 271 bp, Glycine max
ctaacgtgcgcccctccaccgtacccaccacggcacagattccgccttgtccgatccgatcggcgaaacccttgtcctcggcggtgccgtcactctcataatcccgattcctaccactgagccagctaatcatattatgatcttcaaattgtagagagacagagaattctaggctgtgacgacgacgacgaagaagatgcagagacgaagtcctccgaagcacaggcacgacgggacttcgccgctgcctctcggcatggattggagccct

SEQ ID NO: 49760 - DNA, 262 bp, Glycine max
cttctaagatgcttggcactgccaacaacaacgattccaccttcaaaagggtgctgaaggagtgtgcagaaaagtacaagtatgccagtgatgccctccaagcttctgctcaggattggttaatgaggcatatgactatgcttccatgcacatcattgcagcctatgattactccaatgtttgtcacaacttgttcaaactctactcgggtttggtttatccttctgagcttgctcctagagaggatggtttgaagtgttta

SEQ ID NO: 49761 - DNA, 269 bp, Glycine max
cgagcagctaagtagagacacagatggaagtttgagcacggtagaaacactggcttctacagctatttgcggaatcatacactcaattttgggtggccagccactcctaatagtgggagtgctgaacccactatcattatgtacacctacctgtacaactttgccaaaaatagggattccttgggacaagaactctttttagcttgggccggatgggtttgtgtatggactgctctcttgctgtttcttctagcaatattcaatgctgg

SEQ ID NO: 49762 - DNA, 258 bp, Glycine max
tacaaattctctgtgttgtgttgtgtacttgtgttaattgtgttgttgttgtaggaaatttaagtgaagagagaatgatgatgaagtctgctatgtgtgcattggtgcttgtgcactggttgtggttgaagtggggcccatggctgaggctgcggtgacttgcaacccaacacagttgactccttgtcttccggcaattaattcaggttctgcaccttcgagtgcttgttgccagaagctgaaggagcaaaagccatg

SEQ ID NO: 49763 - DNA, 99 bp, Glycine max
accgattgctagaatggaatttcgatgctcagtcatctctattacgattctcatctctcttgcacttgcaggagagaggcatgtccatgcatcgctacc

SEQ ID NO: 49764 - DNA, 128 bp, Glycine max
cgttcatggggatgcgaggcttaagacgctttgtcttttaatcttccgatgtcactcttgtctgtcagtttgtctttttatggtttatttcaattcgtactgtgcaagtaggttagagttgggtagaa

SEQ ID NO: 49765 - DNA, 181 bp, Glycine max
ctcgagccgctcgagccgtacggattccagttctctcttgtcacgcatgtatcgggactgctcaatcacatgtcttagccgctgtacgaggtcagattatggttctctcgcctcgctgaataagagcttctggaacataatccgaagtggtgagatctatcaatggatgagtctgaatggt

SEQ ID NO: 49766 - DNA, 126 bp, Glycine max
ggttcatggggatgcgaggcttatgacgctttgtctcttaatcttccgatgtcactcttgtttgtcagtttgtctccctatttttcatttcattaagtactgtgcaagtaggttagagttgggtag

SEQ ID NO: 49767 - DNA, 267 bp, Glycine max
cagtaatcctgcaattttagggaaatgagtaggaggcaacaagtagattatctgatagacgaaggtatgttactccaaacatgcttagttttggagggccatttgtgttgacaccttgtggtcttgcattcagtatgatttggttgtaagctgtagcatcataccttggaagtgcattttctccagcaacttggatgtcctctctccaacctccactcaatactgaatctaatattcatgtttggcaatttaaccgctataatacag

SEQ ID NO: 49768 - DNA, 263 bp, Glycine max
gtttgggcaagaaagaagtgctttatttacttaattaatttgttttcaaggtgttgctgatcgatcttgggaatgaaatgaatcaggaaatgaatggggttgaggctgagagggtgaaagtgaatgcgcatgacaaaatagattacgtgtttaaggtggtggtgataggggactcagcagtgggtaagactcaaatactctcaaggtttgcaaagaatgaattctgctttaactcaaagtctaccattggagttgagttccag

SEQ ID NO: 49769 - DNA, 265 bp, Glycine max
gcaggaacccttcaagaccatatttgagaggcagtatcgaccccacttggccatggcaattgctatcccattttttcagcagatgacagggattaacatcgttgcattctattcacctaacctctttcagtctgtgggtttgggacacgatgccgctttactttctgccgttatacttggagcagtcaaccttgtttctctcctcgtctctaccgctattgttgatcgctttggtcgaaggtttttgttcataaccggtggcata

SEQ ID NO: 49770 - DNA, 270 bp, Glycine max
gttggctggcattgttgcgattcatttccatttcccacaacaatggaagcatcgccgccgccgtcaccgtcgccgtcaccacggaccaccatcctggccaagtaccagctcacgcgtttcctcggccgcggcaacttcgctaaggtctaccaggcgcgctccctcctcgacggcgccacggtagccgtgaaggccatcgacaagtccaagacggtggacgccgccatggagccccgcatcgtgcgtgagatcgacgccatgcgccgcctc

SEQ ID NO: 49771 - DNA, 249 bp, Glycine max
aacaacagcacaatgcgggttactgtctgttcaagctaccatctctctctcactttcttactgcctccttgccagaagttaaaatgacccaagaatctttcctagtcacatctgaatcagcgaacgaggtgcaccctgacaagctccgtgaccagatctccgatgctgtgcccgatgcatgcttggagcaggaccctgacagcaagtttgcctgtgaaactgatcacagaccacatggtgatggtttgc

SEQ ID NO: 49772 - DNA, 167 bp, Glycine max
gtgttggcttattaaacttcaatgacagtgagaatgaccagtggaaggagctgataccagaagctgagcatgtagtccttcacctgaactacacttcaagtaatattacttgggatgtcctgtatccagaatggatagacgaagaagaagaatacgagttccctaca

SEQ ID NO: 49773 - DNA, 245 bp, Glycine max
ttctgatagaagtgtactttctattgaggtggaggacatctcaggcaagggtggtattaatattcaatctgacggggagcatttggggttccttccaaaaaagattagtgttgtgcctgctggtattgagatgatattgtgatttaactggagaatgacagaatctgtgaaatagagatgatgctgttcatgcctgtactttggcagatttagtagaagaaggacgagtttgttttaagtgtgta

SEQ ID NO: 49774 - DNA, 233 bp, Glycine max
ggttaacagtggtctttctagcctttgacgtattttttattatcttttgcattgggatggcatgtatagttttcattgctctcttctgcatcatcccaataatagcattagattatgctatgagaatcagagaaggtgcatcagaagaagatatcaggtcacttcctatgtataggtttagcctgtcaaattcattggtgatggttgatgacaacaagaagcaacttgttaaa

SEQ ID NO: 49775 - DNA, 315 bp, Glycine max
cggctcgagctcgagccgaatcggctcgaggacaaatctctgatttagctgagaagctagaacacgcagaccatcagttggcacactcacgctttgagccactaatagcacccacgcctagaaagaaagaggaggaatctccacttgctaagattactcgtgacagcgcaaaaataactgtggagcaagtgcatggtctaatgtcgcaggtcatcaaggacattctgtttaactccgttcatcaagcaaacagaactcgcacagaaccatctggtcccgaaccaatgattgaacgttgattctggctcagctaga

SEQ ID NO: 49776 - DNA, 308 bp, Glycine max
  unsure (1)..(308): unsure at all n locations
gttaaatgcttacgcttattatggatacaccaaaggagatggtcttttcncaattgaatatgctctattcagacccctttctccagtgacgcaaattgttgacccaaacacactattccactacaacagcaacactagaagctatggtggatgctacctattatgccatagaagccttcaatttcaataatatacctattgttgtcacagaaactggttggccagtgnatggtggagcaaatgaaccagatcctactacatagaattctgagacctacaataataatttaattaagagagtaataaat

SEQ ID NO: 49777 - DNA, 193 bp, Glycine max
tctcgagccgaatcggctcgagcggatcgagatcgagccggaatcggtcgagacttgtgggcccatcattgacaacattgctattaagaagctactcactcctgataaacccaaagacaacgcagtgatcaatggggattttgaagagggtccatggatgttcaggaacacttcactgggtgtgttgcttccc

SEQ ID NO: 49778 - DNA, 245 bp, Glycine max
taccactcccagtttctttaactttacagctttttgttacttgatagcttcaatgggtttacaagtcatttggagttttgtgcttgctttattggatgcatatgccttggtgaaaaaaaaggtcctccacaacgccgtactggttagcctctttgtagttggagattgggtaacagcaacactatctctagccgcagcgtcttcctcggctggcatcacggttttgtacttcaatgatctgggac

SEQ ID NO: 49779 - DNA, 246 bp, Glycine max
ggatgctgttgcaagtatgattgagaaagctattattgcaaatccaacatatgcagagggatacaacaacctaggagttctttatagggatgctggtgatatagctcgagcaattaatgcttatgagcaacaccataagattgatcctgattctagaaatgctggccagaatcgcttgcttgcaatgaattacatagaggaaggacatgatgacacacttttgtgaggttcacagtaaactgtatc

SEQ ID NO: 49780 - DNA, 242 bp, Glycine max
tggcccttgtgcatctcttgagaagaaaggcccattatgctcagatgtcgttataggtcaagggggtacaggtgcatggaacatgtgtggccttgacaaatccacatcgttgtgtctactgttcgacgttgtgaggaaggacactcctgatgcaacgatggagtccacgagcaatcacttttacttcacatttttgacgtattctcaggatgacagtgggcaaatgacgatcagggttacga

SEQ ID NO: 49781 - DNA, 199 bp, Glycine max
ccctgtagcaatcatgtcgcatcgaagtcgctgaggatctgcgggaaacaagttccgcatgtcgcttggtctaccggtggcgaccacctttagctgcgccgacaataccctcgcgtcgagcctctccatcgtctcactgcaggggatcaagggtaggctgaaccggttgccgtcagcttgcgtcggagacatcgttatg

SEQ ID NO: 49782 - DNA, 244 bp, Glycine max
gtagggtcatcggaagcacgggatctgatgaaaaagtgaggctaatcaaagaggaatttgggtatgatgatggattcaactacaaaaaggaagaggaccttgatgcagttctaagcaagttctttcctaatggtattgatgtttaccttgacaatgttggcgggaagatgcttgaatctgtactgaatcatgtcaacaagtttgccaggataccactttgcgggatgatatctcaatataacca

SEQ ID NO: 49783 - DNA, 247 bp, Glycine max
tgcttggaaagggtgggtttgggactgcgtacaaagcggtgctcgatgatggaaatgtggttgcggtgaagagactcaaggacgcgcagattacagggaagagggaatttgagcaacacatggaattgttgggaaggttgagacatcccaatgttgttagtttgagggcttactatttcgcgcgcgaggagaagttgttggtctatgattacatgcccaatgccaccttgttctggctccttcacgg

SEQ ID NO: 49784 - DNA, 263 bp, Glycine max
ggagtgactacactgttgcatacaagttttgggtcgaggttgcccttgatacaagggccttcttttgtttatctggccccggtgttggcgatcatcaactcccccgagtttcaaggattaaatgcaaataaattcaaacatataatgaaggagctagcagggggctataattattggatcggcttttcaaacttttattggatattctggacttatgtcactgttagtaaggttgatcaatcctgtggttgtatccccaacta

SEQ ID NO: 49785 - DNA, 264 bp, Glycine max
cgcgtcgctgctccgtaccagtttcactgcataaatttgagagaaaactctgcaaacatgttggtttatcaggacctccttacaggtgatgagcttctctcggactccttccgttacaatgaaattgagaatggaatgctgtgggaagttgaggggaagtgggttgttaagggagcagttgatgttgacattggtgcaaacccttctgctgagggtggagaagatgagggagtcgatgacgcagctgttaaggttgttgacatt

SEQ ID NO: 49786 - DNA, 215 bp, Glycine max
ttgagaatgggtgcttcttcttctatgtcgacggtctgtgtgattttggcatcactggcctctgcagcactctatgccaacccacagagggcagtggatgtaccatttggccgatactatgtggccacatcggcctttgctcacatcggttatctcaatggtggtacctcacattcagcttccacctaacccttacacttgtaatggcctccagt

SEQ ID NO: 49787 - DNA, 225 bp, Glycine max
gagtaatggcaagggtgtttcaattgatggtgtccctctagcatttgaggctggtgacattgattttggtgaaccaggaactaatgggcagcatagcttttatcagctcatacatcaggggcgcgtaattccttgtgatttctattggagttgtgataagtcagcaacctgtctttctaaaaggtgcagtggtgagtaaccatggtgagctaatgtccaactatt

SEQ ID NO: 49788 - DNA, 189 bp, Glycine max
gtaaatgacgcagcagctaggtttgcttgtgaatgtgcctatccatcagatctaagtcttgttacgaaagctcgccacaatggtcagaactatgtgttttcccttctaaccgggtatcgtgaccctcctgctggtgtttcgattagacaaggagtgaagtataatcttattttcctggtggggctattg

SEQ ID NO: 49789 - DNA, 174 bp, Glycine max
agaaactcttcaagaaaaggcatgctggaaactagtaatgatcaagtgaaacagaagcctttgcattaggataaggtgaatactaataatgctgatcactccatggtttgggctaaagtttatcgcggctctttcagagttgatcaagatctcatggaagatcacttcgggtta

SEQ ID NO: 49790 - DNA, 250 bp, Glycine max
aggaattgctgtaacatcttgattcctaaattctctacaattcgaaattctgatttcgttaaacggatagatattgtttgtgtgccagtgattattgctggaaaacgcgaaggtcctgctatcggaatcgatttgggaacgatgtactcttacgttcgcctgttgcaacacgatcgcgtagatatcatcgccatcgatcatggtgacattactacaccatcctacgtggctttcaacgacgcagttctgt

SEQ ID NO: 49791 - DNA, 264 bp, Glycine max
gcgcaatatgtgaactggattggggctgtatcggttggaattttgcttacattcggctgaatcttcgtatatggttcaaagtgtggaggaaggtgcttctatgcctgtgcagggtcctgcttgtaatgctacggataaattggttgggtggcatactttcaattcgttgcagtatactgggaggagtacggcacatattgatgacatggcgtctgtgctgcccagaaagcttgactggtctgggtttgtgtcgaattccaggtt

SEQ ID NO: 49792 - DNA, 239 bp, Glycine max
tcatggtttcaacacgcagctcgatgtggtttgcgctaccaggcgtctcgtagggctatttcgcctcatgagggacaccaatggaacgttcctttggagggccgaagtccatactgctggatcgccaacggaagttgcgctcacgcgtcgcttctagcccggcttctgtcttgtaaacgttctgctataatactccgcacggtagcttcgcgcaattggctcttcaactaagcgcgatg

SEQ ID NO: 49793 - DNA, 263 bp, Glycine max
ctctgatctcactcatcattcaccaagctgcttctctgttctcttcttgcccttaccaagaagaagaagacgacgatgtcttctgcagaatcatcaacaggcttctccgtcaccatttgggtgaaaggcgctggtaggctcatcgactcttggatggtcaaactccacttggacaaaggctacactgtccgtggaaccctcagaaacccagatgatgccaagatctggcacttaaaaaattttgaaggagattcccagagact

SEQ ID NO: 49794 - DNA, 279 bp, Glycine max
ttgaaatgactgaggaatatggtgaaggtaatcttatttcacaggctgaagcctttttcaatcaagtggtcctccgtagttggaaagactctctgagagcacttcaaacctgtgatgatgtttcggcccatgctgaagagctccacattgtgaaaagatgcattgaatcactggcagcaaaggcatctactgacccaaatttatttgggtggccagtgctggagcgtggtggtcccttgcagagccctggtggaagtgttttgtggaatggaataagta

SEQ ID NO: 49795 - DNA, 274 bp, Glycine max
tttgcatacgtgaaaatccaggatgccttttcattgccaccaaccgtgatgcagttggacatatgactgctttgcaagaatggcctggtgcggggtgtatggttgctgctatatgtggatcaacccagaaggagcctgttgtggtggggaaaccgtcaacctttatgatggagtttttacttaagaaattcaatgtaagttgctccaagatgtgcatggtgggtgatagactagatactgatatattgtttggacaaaatgctggttgcaaaac

SEQ ID NO: 49796 - DNA, 271 bp, Glycine max
gcaaggagaggagaaagcattgaactttcacccagacgaatatcaattttccagtttgacatagagcgtagcttggatgacagacaaaatttgatttttagagtgacatgttccaaagggacatatattcggtcactctgcgctgattttgggaaggctcttggcagctgtgcccatttaactgctctccgaagagattcaattgggcaatattcagcagatgatgcatgggagtttcaagagctggaagaggctatcaccaaaaattatc

SEQ ID NO: 49797 - DNA, 268 bp, Glycine max
gttcagagctgagatacgggtacagttcaggcatgtgccaggtaatctgtacaatcggaatttcggtactgatcttgatcgggctacaaatgaacttgttataagagttcagcctgatgaggctatttatctgaagataaacaacaaagttccgggtctgggaatgaagttggatcgcagtaatctcaatcttcactacgctgcaaggtattttccttttactctaaaaatcaacttcatgggacccctgaaatacactcttcattgg

SEQ ID NO: 49798 - DNA, 265 bp, Glycine max
ggttgttggatgagattgagggggaaggcttggagtgtgatcagtatacacatactattattgttgatggattgtgtaaggctggtaattttgatggggctcagaggcatttgaattatatgaattcgttgggttttggatccaatttggttgcgtttaattgttttctcgatggtttggggaaggccgggcatattgatcatgctttgagattgtttgaggtgatggaggtgaaggattcttttacttatactatagtggtgca

SEQ ID NO: 49799 - DNA, 265 bp, Glycine max
tctgtatctaaacattttttccacacaatttattatatctttcctcaataatcagaataaaaaatcttaatttgtgcgcctaattatcctgtcaaaccataataatgatggtattttaagttctactttgcttcaggcattcatagagaatggcataccagagaatcctcaaatggctgttgcactaatgcggaaggcaacaataaatgttggtgggcacgtgctaagtgcaacaaccatagagcatttcattttaagacttcct

SEQ ID NO: 49800 - DNA, 269 bp, Glycine max
aaataacactctctctctctcagttatttctgccgtaaatagacaagggttatctcaaataatcaatctaagctagctgaaagcaacaacaacaacatggggagggcaccttgctgtgacaaatcaaacgtgaagaaaggccctcggtcgccagatgaagatgccaaactcaaatcctacatcgaacagcacggaaccggagggtactggcatgcaatcccacaaaagattggcctcaaacgatgtggcaagagttgccgtctcaggtg

SEQ ID NO: 49801 - DNA, 275 bp, Glycine max
agccaagggcacctgagttttatctctcttggaaacttgattacttgaaagataagatgcacccaacatttgttaaggatcgcagggccatgaagagagagcatgaagaattcaaggtgaaaattaatgaattggctgcaaaggctaaaaaaaacaagaagaggagtgggtgatgcaagatggtaatccatggcctggaaagaacatggatgatcatccaggaatgattcaggtatgtctaggaagtgctggtgcactggacatagaaggcaagg

SEQ ID NO: 49802 - DNA, 274 bp, Glycine max
gtgagttcttcttggggaggtcttcgagaaactaaaaaggattcattcccaaattcttccaatgggttaatgttaccttattccatgagattatttaatttttcttctcaccgtgtcaggtcattgattttcctggagggaaagtgggatttacttctgaaatgagattcatttctgagtctcctgagaaaagggtgcactgttatcgtgttcatgatgacaatggtgagatcgttaaatacagcaactatgtacaggttagcaaggaaatggg

SEQ ID NO: 49803 - DNA, 275 bp, Glycine max
tgttgatgtgcactctatatatgcagcttccttacccacatcacatccaagttttgctccacagatgcatcttgaattgcttcctcaatggaaagctccacctcttgtacacgtgaatgtggagcttttcattggaatactttctgctggcaaccattttgctgagcggatggcagtaaggaaatcatggatgcaacataaactaatcaaatcttcaaatgtcgtatctcggttctttgttgccttgcatggaaggaaagatttaaatatggaga

SEQ ID NO: 49804 - DNA, 267 bp, Glycine max
gaggaacaagaagcccctgggtcacgatcatttttcacagagattattgactcaatctcagacataaaatttgggaaggatggaagatatatacttagtcgtgattacatgaccttaaaggtttgagagctttactattccaaaatacatgcttctgtcaatgaagcatttctgagtattttggatggagttactctaaatttattgaattgaactccatgagacatgggtgtttggttttggtctcaatgataagattcatactta

SEQ ID NO: 49805 - DNA, 289 bp, Glycine max
aacattttctacccatttcttggcatcatctgctagagataaatgccatctatcttttgtttgtctgcacttgctttttgaataagagctgcattgggttctgtgggaaaatggagaggtacaagttaattaaggaagttggtgatggaacatttgggagtgtttggagagccattaataagcaaagtggtgaagttgttgcaatcaagaaaatgaaaaagaaatattactcttgggaggagtgtgtaaacctgagagaagtcaagtcattacggaaaatgaatcatgc

SEQ ID NO: 49806 - DNA, 291 bp, Glycine max
ttgaactcttatccaataatttgtttttatcattacaaactgtctcagagtttgtttgtatttgttaatgtattgtagtgacgtgcatacaattcaatcccgtggataataattatttcattagtggatctatagatggaaaagtacgcatctaggcaattcctgattgccatgttattgattggattgatatcaaagatatagtaactgcggtatgctatcggcctgatggacagggagggatcattggctccttggctggcaattgccggttttataatgtatcagaga

SEQ ID NO: 49807 - DNA, 287 bp, Glycine max
  unsure (1)..(287): unsure at all n locations
attgaacctgactcaggacgcagatcgcatgaaccttaatctctacattaacacagcatacgacccttgcagagtacatatggatcggtggatcaggaatgganctgaggnactaagcaaggactctcccaggaccagttagcgacccttcagagcttcccaagtggaactatgatggttcccgcacaggtcaagctcctggtgaagacagtgaagtgattttatacccacaagccattttcagcggaccattcagaaggggtaacaatatcttggttatctgtgat

SEQ ID NO: 49808 - DNA, 296 bp, Glycine max
ctcgagccgggaaaaggagaaaacatcttcaacttctccttccgtcgagctctgcaacggcttcaatggcctcgagaaggttctcctccgcgaatcgcgtggttcctccgccgaggtgtatctgtacggtggccacgtgacttcttggaagaacgaccatggcgaggaattgctttttctcagtaataaggctatatttaagcctccaaaggcaattcgtggagggattccactatgctttccactcaacatagattcataatacactggaccagcatggatttgctagaaatcga

SEQ ID NO: 49809 - DNA, 296 bp, Glycine max
cttctaaggtattcaagatgctgcagattttgatgatagtaggactgcataacttctttttctaaatgagaattagagaataagagtttttatgttcttgtgtgctgtacagatcctgccaccacctatatcgagaacagattttgacaaagtacttgctagacaaagacccactgtaagcaagtctgaccttgatgttcacgagcgattcacaaaggaattcggagaggaaggataattctgacagaatttttcttcaaccatcttcactagtttaaacatgttatgatttgtaa

SEQ ID NO: 49810 - DNA, 299 bp, Glycine max
gaaattgccagatacttcatcttcttggtatgacaagagtttgaaccttgaggaatgtgagaacattgtgtttgaaaaactgctcttgtacagcatatgcaaatgtagatgtggatgggagagggtgtttgctttggtttgataacattgtggatttgacaagacacacagaccaaggacaagatatttacatacggcttgcagcttcagagttagatcatagagggaatgaccagagctttgataacaagaagcttgtagggatagtagtaggcattgttgcattcatcatggtactt

SEQ ID NO: 49811 - DNA, 285 bp, Glycine max
ctgaaacagaaacacccgtcagtgctgtttccatccggagatcaccacgagttccatcagatatgcctctttatgatatactgaatgagttccaaaagggcagtagccatatggctgctgttgttagggctagggggaaaggaaaaacaattcctgaaacaactgatgaagagacatatgaagaaaacaaaggggttggtggggattcacaattgactgctccattactacagaagcagaatgagaagtcggaaagttttattgttgacattgacaagttttcaa

SEQ ID NO: 49812 - DNA, 295 bp, Glycine max
atttgctacaccagcaacaagttccccactgtaagtccctcaaaaaaataataagaccccatccatcaaagatgcttcttttatccattaagctcccttgttttcattttttgaaatttggaggtatttcatctgaatggtacttttctgttcagactcacactgattacataccaacagtatttgacaatttcagtgccaatgtagctgtggatggaagcattgtcaatttggggctatgggacacagcaggccgagaagactatagcaggttgaggccactgagctatagagg

SEQ ID NO: 49813 - DNA, 291 bp, Glycine max
aattatcaagcacaaattaataatatccgtacgtgtggaacgataaagctttagttctacaaatattaaacaatttaattaattaattaacacctacaatcatttgctggttgttgtctaattagaaaggcttattaatattgaatttgtgtggttcacaagtttgataaattcataagataataacatgactttgtggtatattaagattttggggtgtgtgttgcagaacaaagctgaagcaaacggaggtggactgtgagttcttaaagaaatgctgtgaaacattga

SEQ ID NO: 49814 - DNA, 274 bp, Glycine max
  unsure (1)..(274): unsure at all n locations
caaatctccacctcctccatcaccagttcctaacccaccatactcctancagtctccacctccaccatcaccgattcctcaanccccatactattaccactctccacctccaccatcaccttctcctcctcccccatactattataaatcactccccccaccttcaccatcgcctcctcctccttactatcataaatctcccccaccaccttcaccagttcctccacccccatgttatctagactctccacctcaaccatcaccttctcctcct

SEQ ID NO: 49815 - DNA, 268 bp, Glycine max
atcaacttcgttgaatcacttcgggccaccaacatgtcacgactcaaactctacgtgatgcaacttaccgaactcactgatagctcttcctccatcttgatggttcaacgcagtcgaaagaatggttttcccttcatcaaccgaatgaagagtggaccaatgcatgagcaaattgccacagcattccaggcttatggtgaagtgggtaaagttactgtgcatcatttaacatctatctctctattgtcaacaatgcacgaggacatat

SEQ ID NO: 49816 - DNA, 267 bp, Glycine max
tgcttttctgatgagaatcctgcagtatcttgagacacctcagtatttgaggaaggctctctttccaatgcataacagcctaagatttgtgggcctgttgccaccccttgatgctccacaccatttgcgcaaccatgaatggtttccatatcgagaaggtgtcacagtaaaagaaagagactcaaactctgggtgcaacgctagttgatgttgggttagtgaagaatgtaatagttgaccaaatatttgaaccaggaagaagagtta

SEQ ID NO: 49817 - DNA, 260 bp, Glycine max
tcggtctcagatcatggcaggaatcatctctggcccaagtgggagcgagggtgttaatattttacttaatcatgacttctctagtgagctgaactcttggcatctcaataactgcactggctatgtaatttcggctgaatcaggtaatcaagggggaatttcaatggagtcgaatgttaattatgttgttatcaccgaccgaaaggaatgttggtcaagtcttgagcaagacattaccaacagaatttccattggttcca

SEQ ID NO: 49818 - DNA, 264 bp, Glycine max
tggtatgtgtatgttgatgttggagctagaagctatggttccagcattggaagttggtttaggcaacagtacccgaaacagaacaagacctttcatgtgtatgcaattgaggctgataaaacgtttcatcaggagtatgacacgaaaaagggtgttactttgttgccttatgctgcatgggtgaggaatgagagtttggtgtttgagattaaccgcgacccgggggagaaggagaaggagaaggagaaggagaaggttaagggt

SEQ ID NO: 49819 - DNA, 264 bp, Glycine max
gcatcccctctcccatttttcatcatttccttcgatggagcgcatgagactcttattcatctttatttctattttgttcaatgctacaactctgagtggtgttgaacttcttgttcataactactacaaggagaagtgtcccttagccgaagacatcgttagacataacgtggaagtggcagttttaaaaaatcctcgtttggcagcctctctacttcgcttacacttccacgattgttttgtcccaggatgcgatgcatccgt

SEQ ID NO: 49820 - DNA, 268 bp, Glycine max
agctcaatctgcggccaaaacgcgaacgcggcttcgtcagtggcgtatctcacattccgagctgccgagtcgaatcgtttggctgagtcacttcaccgagtctgatcttccggcatgttggacagactcctcggtcgaggattcgtcgcgaaatgcaaatcgttgatcaaattgacgaagaatcggatcgacgtgataaggaggaagaggaaggcgacggagaagtttctgaagaaggacatcgctgatctgctggcgaatggtttgg

SEQ ID NO: 49821 - DNA, 236 bp, Glycine max
ggagatatcacggaagcaattaaaaaggccaatggcgttcattttcctgaagagaggctctgtaagttgctggttcaactgctgatggcacttgattacttgcatgcaaatcatattcttcatcgtgatgtcaagtgttcaaatatattcttgactaaagatcaagatatacgtctaggtgactttggtcttgctaaaatgttgacatgcgatgatcttgcgtcttcagtagtggg

SEQ ID NO: 49822 - DNA, 284 bp, Glycine max
cctcgagccgattcggcccgagatcgaatataagccaaagcaggacttacagggaatacttcggattcaaaaatgcttccgcggtcatcgagctcttgtttatttctgacaacttaagaatggagtgacaacattgcaatcatttattcgtggagaaaatacaagaaggaaatatggtgttacagtgaagtcttcagtaacaatttattctagaatactggaggagatccatgcaatcatactatcacaatctgtaattcgtggttggctggttagaagggggg

SEQ ID NO: 49823 - DNA, 269 bp, Glycine max
ataaaaaaaaaaaacgtgtgtgtgtgtgtgttactgttagccgaggcagatcggaaccgggaagttgggcgctctttgctagatggaaggagttgggccccggctggggcggtcctcgacccggaacggaccggccacggtgttcactggaccggtgcggaagtggaagaagaaatggatccacgtgtccccctcttctgcttcctctaattccaacgccaataaccacgcttccaatgcctctcatcttctcctctacaagtggaccc

SEQ ID NO: 49824 - DNA, 260 bp, Glycine max
  unsure (1)..(260): unsure at all n locations
cgcgatcttgacctttattcctattgtgagttctgcttgctaccattccaattcaagtgtcatgtgggctatgtcccttctggccaaagagttgtgggtttaagcaaactctctcgagtggtttctctnattgctaaacgactccaggagcctcagcgtcttgcagatgaggtttgttcagcattgcatcaagaaatattgccagcaggtgtagctattgtacttcagtgtacacacatcccctttccacacatagaatc

SEQ ID NO: 49825 - DNA, 274 bp, Glycine max
  unsure (1)..(274): unsure at all n locations
ctcagttcacagagaaagatggctgcggaaaacgttgtagagttcacagacttacccgtcaatcganctagagaagaagaagaagaagaagaagaacaaaccaatggagtctccaacgacgccgtttcaacgctacccaatgaccctcaataccctggtatctctgctgttattcccggttggttctcagaaatcagcccaatgtggcctggtgaggcgcactccttgaaggtggaaaagattttgtttcaagggaagtctgactatcagaatg

SEQ ID NO: 49826 - DNA, 146 bp, Glycine max
ctaattctcatttcttccctcaaatttcatgatccgtgagatgcttcatatccacggtggccaatgcggcaaccagatcggcgccaagttctgggaggtggtttgcgcgtagatcgggatcgactctatcggaatgtacggtgggg

SEQ ID NO: 49827 - DNA, 279 bp, Glycine max
cgatcttgggaaaggattcttcggcaatcatcatggaagttctaccaagcttaaatgatttgtgtggaataacaaaaaatataagcgacacaatcttagataaactcaatatcacggtggagtccctttttgaagaaaagcaaaatcggctggaaaagcttcaccatttaggcaaagcactgtctaatctatggaatcttatggacacaccatacagtgagcgacaatctttttcccatgtaatcaatttgttgtacgtctcatctgcagaagtaacag

SEQ ID NO: 49828 - DNA, 148 bp, Glycine max
aatccagagaagttgcatccctatggtcaagcattctcttcagctgggagcgtttacggcaaggatttcgaaggggacaaagaattctacagcaatgcagaatagcaagaaagagtagagacatggaaagtcaggcaagaaaagagag

SEQ ID NO: 49829 - DNA, 275 bp, Glycine max
  unsure (1)..(275): unsure at all n locations
gcaagaatggcacttcgttgcttggtgatgtccctttctgttatcttcactcttggtcttgcgagagaaagccatgccagagacgaagatttttggcatgctgtttggccaaacactcccattccaagttcattgcgagatcttctaaagcctggcgctgcaagtgttgaaatcgatgatcaccctatgcaaattgaagaaacacagtacccgaaaaccttcttctataaagaagacttcatccaggcanaacaatgaaagtacaattcagcaag

SEQ ID NO: 49830 - DNA, 257 bp, Glycine max
cgcatctcaggttcctccgtagcagcatataccatctggcgaagttgttggtaagtcatcatcaactgcatcgcagagtaaggctagaactacgcggactccagaacttcacgaggcctttgcggcagcagttaatcaccttggtggtcgtgtgacggctactccacatggtgtgttgaatcaaatgacagttgaaggtctcgatatcgatcatgtacaaaggcacttgcagaactatagaactgccagttacaaac

SEQ ID NO: 49831 - DNA, 205 bp, Glycine max
aaatggtgtcgctgaaagtgcagaagcggctaaccgcatgactggtcatctactgcagagttaaagtgtagcgtgatgccaatgcagtctacgaaatctccatggcgaattctcggcaaaatatcaggaagttggttaacgattggtcgatcatcacgatgccaagcaagcatcactcacgatcgcgtgctcccaggatgaagga

SEQ ID NO: 49832 - DNA, 254 bp, Glycine max
cgccttctgccaagggagaagaatgcaatgtcagtgagctttctttctatgttgctaagggcagcaatatatcttgagacaacggttgcttgcagacttgatttggaaaagaggatggccctgcagttaggacaagctgttttagatgatcttctaattccttcttattctttcactggggacacattgtttgatgtagatacggtgcagcgaatcatgatgaatttcctacaatctgaaaaggaagatcgttc

SEQ ID NO: 49833 - DNA, 252 bp, Glycine max
tttaaagacttgatggaagaatcttctctaccttctagtttaaatatgctagaaaaggactatgattacatgattcgaaataagagtgaattggatgagaggttattcattaatgaggatgacagcctattagcttcagtaagcttgtctggaggttctgtttcagtaggtggtgtaaagaggaaatttgattcaatggcatcacctgctaaaaccattacaagtccactctcacctcaccgttcccccaca

SEQ ID NO: 49834 - DNA, 218 bp, Glycine max
tatgaacatgaagaatatggcttcctaaagctcctcattagtgctgctccttgcagctctaattctatcccctcaagttcttgctgactatgagcacgctcccaatttacgagccacctgtttacacaccgccagtttatacgcccccagttgaacatccaccagtgtataagcatccagtcaataagcctccagtttacatgcctcctgtttataag

SEQ ID NO: 49835 - DNA, 250 bp, Glycine max
ggtgattgctcctcatagttttctttcttcaaggcttgcagggattcctggagtgaaagattctttgctgcaagagtttggtattcgtttgttgacgtatgatcttcctggttttggtgagagtgatcctcatcccaaccggaatctggaatcctcggcaacggatatggcgtttttagcgaatgctcttggtgtggacaagttttgggtggttggttactcaagtggcagcatgcatgcttgggctgca

SEQ ID NO: 49836 - DNA, 252 bp, Glycine max
cagagatcgggggtactacccctggaagcatgccgcctttttcaaaatccatattggaggaaggagctgccattaaggcatttaagcttgttgaaaaaggtatctttcaagaagaggggatcattaaacttctgcagttcccaagctctgatggtcgaggaaataagatagcaggaactcgcaggatccaagataacttgtcagatctgcgagcgcaagtagcagcaaatcaaagaggagcttctctagttc

SEQ ID NO: 49837 - DNA, 249 bp, Glycine max
ctatttttcctctcaacatctcacttttgttgaggagttctgtcgtgcagaaaaattatgctcaatgccatgttcatcacaaaatgattcacaatctttgtttacaaattctcctccatgatcactcctaatagatgcaattttaagatttttcttattgtgaataactttagcaagtctcttgaatgcatgacatgcatcacttttgtgagttagaaataatgtccatgtatatctagagtaatcatc

SEQ ID NO: 49838 - DNA, 268 bp, Glycine max
tgccactcactgcacctactaacaagatcttcaatgacaacacttttgctaagatgaagaagggtgttcgcattgtcaacgttgcaagaggaggtgttcttgacgaagacgcattagtcagggccctcgacactggaatcgttgctcaggctgctcttgatgtcttcaccgaggagcccccatccaaagacagtcagtcagtgcaacacgagaatgtcagtgttagccctcatcttggagctagcaccaaagaggcacaggagggggt

SEQ ID NO: 49839 - DNA, 222 bp, Glycine max
cgctcgagccgctcgagccgattccgctcgagcttaaactggcggacttcggttccggggaaaccattgggactgggaggagcatgaccggacgtgtgacgacgccgtattacgtggcgccggacgttctgttggggagggagtacgatgagaaggttggtgtgtggagctgtggggtgattttgtatatagtgttggcggggatccccctttttacgggga

SEQ ID NO: 49840 - DNA, 287 bp, Glycine max
ggctcgaggcagacttcacaacagcacaaagcgggttactgtctgttcaagctaccatctctctctctctttcttagtgcctccttgccagacgttcaaatggcacaagacactttcctattcacatctgaatcagtgaacgaggggcaccctgacaagctctgtgaccagatctccgatgctgtgctcgatgcatgcttggagcaggaccctgacagcaaggttgcctgtgaaacctgcaccaagaccaacatggtgatggttttcggagagcatcacaaccaagg

SEQ ID NO: 49841 - DNA, 232 bp, Glycine max
ccccacaataatcccaaattataacccacaaatgttacatgccatgtcctcctttcaacaaagcccgtgactttgctctctggttgtggagttcccataacaaggtaaacgacagattgatgaaagaagaagcatccctaggcactgctgaccccaaattcccaaagacaatttggccaccgaagccgctttgctcttcctgttaacctagtgttgaccagaggaacaacaa

SEQ ID NO: 49842 - DNA, 270 bp, Glycine max
gaaatatagctctgaagagagtggtggagtccattgcaaatggcgattcacatgtggctttcagggacagcaaacttaccatgcttctgcaggattcatttgaagatgataagtcaaaaattctaatgatactgtgtgcaagtgctgatcctaaggagacacacaagacaatctctacacttgaatatggaccaaaagcaaaatgcatagtccgtggccctcatactccactcaaggacgatgaatcttcttcagctgtcattttgggat

SEQ ID NO: 49843 - DNA, 269 bp, Glycine max
ctagttcagcttgatggtgtaaataatagttccacaaatgaagatggtacccgcaaaatagtaatggttttggcagccactaactttccatgggacatagatgaggcactgaggagaagattggaaaagcgtatgtacattcctcttccaaattttgagagtcgaaaagagctgatccgtatcaatttgaggactgtagaggtgtcccctgatgtgaacatagatgaagtggctcgaaggacagaggggtatagtggagatgacttgac

SEQ ID NO: 49844 - DNA, 281 bp, Glycine max
gtttgattagtaactctggttagaaggagcatagtaaacctgcaattgttacagcaatatgaaacggaaagacgaatagccaagagcgcgcagtcactcactcacttattgcgtcaactgtagtccatgtcatatcaactggagctggggaacctcgtctctactcgctctcgtccccgccggagatccaccatggccggcaagtccgccaccgccaccgccacctcctgcgcattgtctcccgagaatttgaaattcggtttctcccccgataacccctc

SEQ ID NO: 49845 - DNA, 283 bp, Glycine max
tgatgccggtattgtgttaaaatcagtcaaaggggttgtaagtggtctcaatattgttgacaacatgttctctggcttaaataaaggggttgatatagtcaagttggaccaatcaaatagtcattttaatcaaattgatcaagtttttgtggcaagaaatgttgtgaggggtatgaacttaaaggccacagctgcaaagatgtctttgcttggtaatggaacctcatggactgctgattttaacaaagttttgcttttccctaatcttatcaagcatgttgtg

SEQ ID NO: 49846 - DNA, 283 bp, Glycine max
gtgggaatcattgtcctgcatgcttcacgcgtcggtgccgaatgccaccaccagctttgtgaggagacaagcaatctccactgtgaccttcgaggactatggagtaaccatacaactataccgcacaccatatttggtggacatagatagagaagatgttggaagagtgctcacactaaactccatcaaagctggtgatgcttggacaggcatggacatgttgatcttcaactcatggcattggtggacccacaaaggagattctcaaggatgggattacata

SEQ ID NO: 49847 - DNA, 278 bp, Glycine max
ctctgttgggtcaaattcatgtaattagatttcaccattaggacatatctagatacaacaacaaaatcgtatcgatgaatctaccgtatatgtgaacatatacgagtatcattgatatgatttgatgtgatgatgtgtgaatatttgtatggggcaggctttgaagggaggggttagaaagaaggttgaattggctaccaagtttggaatcagctatcctgaagggaaatgggagatccgtggtgatccagcatacgtgagggatgcttgtgagggca

SEQ ID NO: 49848 - DNA, 274 bp, Glycine max
ctgactaatgccacttccgcaaaggaaccgtgcagttcaataacatcaatagtagatgatacaggaacaaggcttgcatgtggcacactgacgtctctactattgatcgcattgaactaatgaaccttgggcaaaggaaccgtgcagttggagcaacagcccttaatgaccgcagtagccgatctcatagttgcttgactgttcatgttcagggtcgacatttgacatctggagctatccttcgtggttgcatgcatttggtcgacttggcagg

SEQ ID NO: 49849 - DNA, 276 bp, Glycine max
aagaaaaagtagtactcactgatgcttcggggcttcttctgtcaaatagaattaacagacgacaatattggatccctacttcttctcagattctgattggtccaacacagttcccatgccccctttgtttcaagacgttcaacagatacaacaacatgcagatgcatatgtgggggcatggatctcaatataggaagggaccagagtctctaaggggaacacaacccacggctatgctaagacttccttgctattgctgtgcaccggggtgcaaga

SEQ ID NO: 49850 - DNA, 275 bp, Glycine max
aacgttttgtgcgcctcctaactgttgtattagccatggctatggtgctggctgcaccagcccacgctcagatcagcacgccatgcagcacatcaatgataaacggctttttcaacccttgtatgaatttcctcacaaatagcagtggcaatggcaatggcacttcacctactgctgagtgctgcaattccatcaagtccctcacaagtggcggcatggactgtttgtgtctcattatgactggcactgttccctttagaataccaatcaaccga

SEQ ID NO: 49851 - DNA, 128 bp, Glycine max
ctcactcaaactcgggataacagaaaccaacaacagttcttgcactgaggtttcacgatgttgatggaacttgcacttggtttgtttgtgttagctttgtttctgcacttgcgtcccacaccacgtgc

SEQ ID NO: 49852 - DNA, 260 bp, Glycine max
gtggtttcccaacaagcaataaagcatgaaaatatatacagagaagatcccgtctcttcggatttcgaattctctgtcaagaacaattctatgatatcagcagatgaagtctttttccagggtatgttgttgcctctgaagagtgattgctccaataagaaggtgactttgagggatgagttgcttgtgaatgatgactatgaagaggagttaccaagaataccaaagagttcaagcaggtggaagcagagattaggcct

SEQ ID NO: 49853 - DNA, 265 bp, Glycine max
catcaactgaagcttatatgtgaagtcttgttacagagcttgtcaataccaagcacgagtactggtagtacaattgacaacaacatggccaggctaaggtggatggagcaaagttctcaacataacttatctggaggagctaacataaaccttgctgacgggccaacagcacgtatggaggccccagaggggattaccagaacgctcagtggcaatgcttggagcttcgctatttgaacatctcctacatcagtacaccacggac

SEQ ID NO: 49854 - DNA, 262 bp, Glycine max
tttgggagttaggttctgcacgctctgcttccagcgagtgttctttcttcgtttcaacaccttaatttgcacacgctgcttcttcagcttgagaaatggcacaagaaacctttctattcacatctgaatctgtaaacgagggtcaccccgacaagctgtgcgaccagatctctgatgcagtgctcgatgcgtgccttgaacaggaccctgacagcaaggttgcctgtgagacatgcaccaagaccaacatggtcatggtctt

SEQ ID NO: 49855 - DNA, 257 bp, Glycine max
gtttttaagtatagggactaactgggaaaaattttgtaactataggaacccaacgagtaattaaatctttcagaagataagaattttaatatttttatttttccaagtttcccctcgagccgctcacgttgaacgatacttttggaccttggtcaaccagcctaacttcagaaagattctaggtcaggttaagcaaactgaggctgttccacctattccatcggcaaagaagccttcccagtctaaggaatctaagc

SEQ ID NO: 49856 - DNA, 253 bp, Glycine max
attcagcaagtgcgtttcggaagcagagaccgaaatacttcgagatggcccgtacaaagcaaactgctcgtaagtcaactggaggaaaagctcccaggaagcagcttgcaaccaaggctgcacgtaagtctgctccaacaactggtggtgtgaagaagcctcatcgttatcgccctggaactgttgctcttcgtgagattaggaaataccagaagagcactgagctcctaatcaggaagcttcctttccagag

SEQ ID NO: 49857 - DNA, 269 bp, Glycine max
ctcggtattctgctcgaactttcaatgtgttgagtcatgacatagactacaaagctgggggacttaacccacctcacacacaccctcgagccactgagattgtgtttgtgttggatggacaactagatgttggattcatcaccacagccaacaaactcatctcaaagtccattaataagggtgaaatctttgtgttcccaaaaggtttggtgcactatcagaagaacaatgcggataagcctgcttctgtgctttctgccttcaacagc

SEQ ID NO: 49858 - DNA, 245 bp, Glycine max
tcatttgtctagtgctggattcatcggaatgcgtgactcaaatacctcatggtattcatggtgccattacgggcgagctccagataaatgctttgatagtagtgtctgcttctggagccgtccatgctactggcttggtgtgcctcgacatcgaacacgcttcagatccccttggggctgatgcatcagctgacgctcatagtatcaatattctatcaggtcattcagatgcctgtcctccaacg

SEQ ID NO: 49859 - DNA, 259 bp, Glycine max
ctcgagccggtggttgttgcttattcaggctcttgcatctcgtccaggtggaccacctttcgttcacgtaaccggtgttgatgattcccaatcatttcatgcaaggggtggaggacttcacattgtagggaaacgcctctcagattatgccaaatcttgtggagtgccatttgagttccacagtgctgcaatgtgtggaagtgaggttgaactagaaaaccttgtaattcaaccaggggaagcactagttgtgaacttc

SEQ ID NO: 49860 - DNA, 260 bp, Glycine max
cctcgagccgattcggctcgagagaccaattttactgtgattctccacaccaattgtgaaaatcaggcatcagcagtggagaacagcgaggtgatgtaccagaacataagtggcactacaatgagtgctaaggccattaaatttgactgcagtgactcagtcccatgcagcaaactagtccttagcaacgttgacttagagaaacaagatggctctgttgaaacatattgccactcagcacaaggctttccctatggtgt

SEQ ID NO: 49861 - DNA, 246 bp, Glycine max
caactctctctctctgcgtccatggagttttggggtgttgaggtgaaaaatggagaatctctcaaggttgatccaggagatgacaagattatccacctttcaaatgcatgcatgggggatgtcactaaggatataggaggtggaccagtagccctgaatttgagctatcccataactggaaatatggaagtgtcttctttactggatttaaagctcaacctcagtcggagtctgatgatgatgaag

SEQ ID NO: 49862 - DNA, 259 bp, Glycine max
tttatattttttgacaaaagctggaaagaagaaattcctaaggacaaaactggagattttgatatgatatatgaatttctgagagagaactggaatgttgtgagatgggttgctcttggaattgtcatctttgaggctcttctttttgtattagcccttattgtcagggctgcagacaggccaccagagtatgatagtgatggagagtacattaatccaaggagcaagttcgtcagcctttgctaaacagaccagcagg

SEQ ID NO: 49863 - DNA, 268 bp, Glycine max
cccgactactacatcctcaggtggtcaatggtgtgttgctaaccagggagcttcagacactgctctacacgttgctcttgactatgcttgtgggtttggaggtgcagactgctcagcaatacaaccaggagcaagctgttataatccgaacactgtccgcgatcatgcttcttatgcattcaatgactactaccagaagaatccagcacctaccagctgtgtttggaggaacagcatctcttacaagcaatgatccaagtagtgggag

SEQ ID NO: 49864 - DNA, 276 bp, Glycine max
ctctcgcacaatcaaacaaacacaatcctctatacgaagccttttaatctcgctctcattttctgactttctcagctcaatgttgttccgagtgtttgttgtttttctccaaccgagtcgaacatgtctagtttcgtcggtgtccttgtttctgatccatggcttcagagccagttcacccaagtcgaacttcaaaccctcaaatccaagaaaggactcaatcaggacgtgttactgtcggaaattttcgacctatttttaagaaattgaagggtt

SEQ ID NO: 49865 - DNA, 270 bp, Glycine max
ctcgatttgaaaacgatcgaacaatttcctttataccacctgatgggtcatttgatttgatgacatataggctcagtacacaggttaagcctttaatttgggtggaagcaagtgttgaaaagcattcaaagagtcggattgagattatggtaaaagctaggagtcaatttaaggaacgtaggtagtgagatttcttcttttcttatgtttgtcatgtttcttcccccacccctctagatgatagaagatgagggaaatcaggttttttct

SEQ ID NO: 49866 - DNA, 265 bp, Glycine max
cggctcgaggtagaagacgtaaaacttaaaatgtcccgggaagatctccagaatagacttgatattctgagaaggcaatctgagagctatgatgataaagggcctctcatagatgctgttgtctggcatgatggagacctttggagggtagcccttgacacacagagtctggaggatgatccaaattgtgggaagcttgctagttttatgcctttaactaattataggattgagagaaagtatggcgtcttcagcaaattagatg

SEQ ID NO: 49867 - DNA, 234 bp, Glycine max
tatcaatcacatgcttgttgcagttatatattataaatctattcaatgaatctgagtgatcaatacagtatatgatgtaacaaggcgggaaacctttacaaatctatctgatatatgggctaaagaaattgacttatactcaacaaatcaagattgcatcaagatgcttgttggaaacaaagttgataaggaaagtgaaagggttgtcagctaaaaggaaggaatagactttgc

SEQ ID NO: 49868 - DNA, 231 bp, Glycine max
ggcgtggcgaggcttccggtctccacttccgccctcatcatcgcaacgcaactcggcttcaccgcgttcttcgcgttccttctcgtgaggcagaagttcacggcgtactccgtaaacgccgtcgttttgctcactgtcggcgccggcgttttggcgcttcacaccagcggagaccgtccccctggcgagtccgttaaggaatatgttatgggctttgtgatgacagtgatc

SEQ ID NO: 49869 - DNA, 231 bp, Glycine max
agttttcatcaccttcctatgattgtctttgtcttaatttcctaactaactaacacaccaacaagcactgagtctttggccatgacgttcaacgcgagcaccatcacaacggcgtcggaaggcgcctggcagggcgataatcccctgaaccacgctcttcctttgttgatcgttcaaaccatcctcgtagtcttcgtgagccgcacactcgcctttctcctcaaacccttt

SEQ ID NO: 49870 - DNA, 232 bp, Glycine max
gcaagaatggcacttcgttgcttggtgatgtccctttctgttctcttcactcttggtcttgcgagagaaagccatgccagagacgaagatttttggcatgctgtttggccaaacactcccattccaagttcattgcgagatcttctaaagcctggccctgcaagtcttgaaatcgatgatcaccctatgcaaattgaagaaacacagtacccgaaaaccttcttctataaag

SEQ ID NO: 49871 - DNA, 278 bp, Glycine max
gaatgctataaatccaaacctgacttcatcaaggcctgggaaaaatggaggtcacaaattacaaaactggattgcagtcgattctggattcaatgtgataatcaacaaactcgtgagggcttgagaaacttgctacaaattatgctgggtaacactgagagtctctgcatggctacatgttattggattgaattatatatttctcatttcctgtacataaggccatttacaatgggaatagaaagcatgtataatttggcccagaaatgcatccagtt

SEQ ID NO: 49872 - DNA, 278 bp, Glycine max
gggggacctgacaagctctgtgaccagatctccgatgctgtgctcgatgcatgcttggagcaggacccttacagcaatgttgcctgtgaaacctgtagcaagaccaacatggtgatggttttcggagagatcacaaccaatgccaacgtggactatgagaagattgtgcgtgacacatgcaggaacattggttttgtctctgatgatgttggtcttgatgctgacaacttgcaaggtcctcgtcaacattgagccacagagtcctgatattgctcaag

SEQ ID NO: 49873 - DNA, 273 bp, Glycine max
  unsure (1)..(273): unsure at all n locations
ggcagatcggtgaagcggcggagcaaatggttgcagcgattccatacatgactcgacacacgtntagttaggagcagcggtggaaagcctactagaacaagtatctcctggctagacggtagcagaaacggaatcggcatgcgaatggataacgggaagtacgtgcgttacacgcctgagcaggttgaagccctagagaggctctatcacgattgccccaaacctagttccattcgccgactgcaactcattcgcgagtgccccactctctcc

SEQ ID NO: 49874 - DNA, 272 bp, Glycine max
gaatacaagttttttgttttttttcccatgatgttgaagcagatgggagagggtggtgctgcttccaatcctgctttgcaagtgtcggtttcttttggtagatttgagaacgattccttgtcttgggagagatggtcctctttctctccaaacaagtacttggacgaggttgagaagtgtgccacacctggatcagtggcacagaagaaagcctactttgaagcacattacaagaaggttgccgcccggaaagccgaattgctggctcagga

SEQ ID NO: 49875 - DNA, 273 bp, Glycine max
cctcgagccgattcggctcgaggaatagttggtttgatgcttttgcacctattggccaaggcactgtttcatgtgtattgctatcataagatgaaaggagaagaccaggctcggatagagaaattcttggaggattatagcgcaatgaagcctactcgattcacttatgctgacattaagagaatgacaaatgggcttagtgagagtttaggggaaggggctcatggagcagtgttcaaaggaatgctctcccgagaaattcttgttgctgtg

SEQ ID NO: 49876 - DNA, 273 bp, Glycine max
gtgaatttgggttcagcaggctggtgaaagaggagtcagtttatcttcctaacttccacttcagcactgagccaaagggttcttttacatatacagatcctgaatttcagagaactggagtactgacacctaagtctgacatatactcttttggaatcatcattttgcaactcctcactggtaggactccagttggattagtgggtgaagtacggagagcagtttcttgtggaaaattgtatccaattttggattcttcagctggagaatgga

SEQ ID NO: 49877 - DNA, 259 bp, Glycine max
gaatcatcattaacatcattaaaaaataagcaaaagttatcttcaagaaagtagctaatacatccaaattacatggatcacctaagtctaatcgtttgaattgcacatctgctccttcagaggatggtaatgaacaccccagagaaagttgggaggggaagcatctcaatccaaatggatcttcagctcatggcactaagacgactgaaatcatccagagaggatgcaaaaatgtaattagcaagctccaaaggagaat

SEQ ID NO: 49878 - DNA, 257 bp, Glycine max
cttgttcacccttccccttctccttacttctcactctctttccaatacactccctttctctttccccttacccttcttctgtgtgtgatgatgtagatagagaataaaaagagaccagtgtgcagtgagaaagagacgaacacagtccgaggaacaaccacgtgtatgggaaggagttccagtccatgctggaaggactcgacgaagaagggtgcgtggaagatgcagggcaccactctgagaagaaacgacgacta

SEQ ID NO: 49879 - DNA, 233 bp, Glycine max
gcctcaagagcctcaagtccatggacctctccaacaacatgctctccggcgaggttccggcgagttttgcggactgaagaatcttactctgttgaacctgttccggaacaagctccacggcgcgattcctgagtttgttggagagttaccggccttggaggtgttgcagctttgggagaacaacttcactgggagcattcctcagaatttggggaataatggaagactcactc

SEQ ID NO: 49880 - DNA, 242 bp, Glycine max
gtaaaaacggtcatcttgacagggcaattgcattgttcaacaaaatgaaagatcagggaattcgaccgaatacattcacattcactatacttcttgatggactatgtaaaggtggaagacttaaggatgcacaagaggtttttcaagatcttttgactaaaggatatcatctcaatatctacacatacaatgttatgatcaatggacattgtaaacagggcctgctcgaggaagcattgacc

SEQ ID NO: 49881 - DNA, 239 bp, Glycine max
gattttcatgccctgcaatttgttcccagaatacaagaaaccggtgctctgcttctaaaaagattgcgtgaacattcaggtcttattggaccgttggatcgttatcttgttggtccatttgcagaatcaatgaaggagaaaagtgaaagtaatgccaagaaagcatccaagtacctagctttgcatctcagatttgaaattgacatggtagctcattctttatgtgaatttgggggagg

SEQ ID NO: 49882 - DNA, 232 bp, Glycine max
ggtaaacctagggcaagcacaagggaaggttgtaaggcaatgattcatatcaaatatgataagtctggaaaatgggtgataacaaagtttgtgaaggatcataatcatccattagtagtctctccacgtgaagcacgccaaacaatggatgagaaggataagaaaattcaggaattaacagcagagcttcggcttaaaaaacggttgtgtgcaacatatcaagaacagttga

SEQ ID NO: 49883 - DNA, 268 bp, Glycine max
acagattcattaaaggctcaggaagttctggacttaatgtctgctggagagatcactaatgttctgaaggagatgctcatttgtggatacaagcctaatgaagaaccattcctttcaatgatgcttcaaacatttagggcatcaaaacttttggaattgcgacttaaatctaggatctttattccaaaaggacgagcaatgatgggatgtctagatgacactagaaccctagactatggtcaagtatttgtccagttctctaccaata

SEQ ID NO: 49884 - DNA, 213 bp, Glycine max
ctcgagccgaatcggctcgagagctgaacttgtttccgtcgccgcatcacccaccgtagcaaccatgatcattcccgagaagcaccgtaaagagatctgcaaatacctcttccaagagggcgtttactttgcgaagaaggacttcaatctggcaaagcacccagagattgatgtgacgaatctgcacgtgataaagctgatgcagagcttcaa

SEQ ID NO: 49885 - DNA, 276 bp, Glycine max
aaaacttttcctggtagaaaaactctcaaaagcacttacttaaagttttgtatccagacaagttcaagacgacattattttggtcatgtcactagtaaacacgagattttgatcttgtaacaaagttaaggttaactatccctttattgctcatgttctatacaactttgtacatgtactggcttccagtccaaagggtcttacttgtttggtcacttcagcatgtacataaagatggttcctggagattctgctggcacagtcactgctttctat

SEQ ID NO: 49886 - DNA, 274 bp, Glycine max
atttatgccgttttgtttatgtatgctgtatcataatatctattttatgttaattgttgtatactaattcctttgtacttctataccataattttctttggtagcatattgtggctcatggtaaaccacatgaacggactaccattatcagcaagcttactggtcagattgttaagatgagccagcaaaagtttgcttcacatgttattgagaaatgtttggcttttggtagtcctgaagaacgtcagattttggtgaatgaaatgcttggcac

SEQ ID NO: 49887 - DNA, 260 bp, Glycine max
ctctctctcaccaaagccttcctagaacgaaaaaaaaaagaagagcaattttccctcaccaaagaagaagaagcaaacaatggccgatcaacttaccgatgaacagatctccgagttcaaggaagccttcagcttgttcgacaaggacggcgatggttgcatcacaaccaaggagcttggaactgttatgcgttcattggggcaaaacccaactgaggcagagctccaggacatgatcaatgaagtggcatgctgatggg

SEQ ID NO: 49888 - DNA, 267 bp, Glycine max
ggttgaaggatcaaatgctatgtgcctattggatcagtgtttgttttgaatggcaatggagctgacattgctaagcattgtattccatccgtgtcgtcaaaaagaatttctattacttttagaaagatggacgagagcaagttaccatataagttttcacctgatcctgacttagtgggaatcaagccacttataatttcacctctacacaaaggacaagatgaagttgggcaactagataataaggctgacagtgttgaatctgaa

SEQ ID NO: 49889 - DNA, 282 bp, Glycine max
gttcttctttagggtatcttattccaaaagggtggaaagtgctacctctatttaggaacatacaccacagtccagacaacttcaaggacccagaaaaatttgatccctcaagatttgaggctgctccaaagcccaacacttttatgccatttggcagtgggatccacatgtgtccagggaatgaattagccaagttggagattttggtcctcctacatcatctgaccacaaagtacaggttggtaaaccttaatcatcagtaacaacagtgtctctcattgc

SEQ ID NO: 49890 - DNA, 279 bp, Glycine max
cttgaaaaatgagcaagttcaatattgttggtacaaaatcatcactgtcattgttcaaatttgaatgctgaaattgatcataagctaaacgtgcatctgatggatggatgcagttgaccttgtctggattactgaacttcatagacgggttatggtctagttgtggagacgagagaatcatcatattcaccaccaaccacaaggagaggctagacccagcactgttgaggccaggaagaatggacatgcacattcacatgtcctattgctcctaccaag

SEQ ID NO: 49891 - DNA, 282 bp, Glycine max
gatatctcatgctcctggagctggtaaaacttttctcatcattgcatttctcgttagctatttaaagctattcccagggaagaagcctcttatccttgctccaaaaggcacactttacacttggtgcaaagaattcaacaagtgggaaatttctatgccagtgtatctgattcatgggcgtggtggaactcagaaagatactgagcaaaattcaattgttcttcctggttttccaaatccaaataaagacgtcaagcatgttttggactgcttgcaaaagat

SEQ ID NO: 49892 - DNA, 280 bp, Glycine max
gcggcgggtgccaagggggagaggcggtctcttccaaatgcgacaatcatgattcaccagccttctggtggttatagtggccaggcaaaggatattgcaattcacaccaagcacattgttcgggtttgggattctttaaatgagttgtattccaagcatacgggccagtcggttgaggttattcagacaaatatggacagagataactttatgactccacaggaggccaaagagtttgggctcattgatgaggttattgatcagagacctatggctttgg

SEQ ID NO: 49893 - DNA, 280 bp, Glycine max
cggtaatgagtgattatcattgttgtatctgagtcatgatgtattgatgtatatttgcgattgccattgaatctgaatctgataggaaaaaaaacaaaaaggagcagatgggtagctcaggtttctcatggaaattggcggatcatccaaagcttccaaagggtaagactgtcgctgttgtggtattggatggttggggagaggccacacccaaatgagtacaactgcatccacaaggccgaaacaccctgcatggattcacttaaaaagggtgctcctg

SEQ ID NO: 49894 - DNA, 273 bp, Glycine max
ctcttttgggagcatggcagggcttaatgaggagcaaactgaggaactggcttggggtttgggagatagtggaagttatttcatgtgggtgattagagattgtgataagggaaagcttccaaaggagtttgctgacacatcagagaagggtttaatagtctcatggtgtccccaactacaagtcctaacacatgaggctttggggtgttttctcacacactgtggttggaactccacattggaagctttgagcttaggagttccagtgattgc

SEQ ID NO: 49895 - DNA, 278 bp, Glycine max
gttgggtctctagtttccaccgtaaccttaaacactgctgaaaatttctatggggaagttgactcttccgtttgtgggaatgattatggcagaatttgctcaggttgggttaatcatactgagcaaacaagtcatggcacaaggaatgaccaatttcatcttcatcttctattccaattcaatcggtgctctcctccttcttcccatttccatacttatacacagatttgaacgtcctccaatcaccttttccaccctttgtggattcatcttacttg

SEQ ID NO: 49896 - DNA, 148 bp, Glycine max
tggggaaataccccgcttgatgaagctcggatgtgtggaaataagaatctgatcaagctactggaagatgcaaaatcttctcaactgtcagaatttccatcccaagaatttacagataaaatgcatccaaagaagtgcacagtgttcc

SEQ ID NO: 49897 - DNA, 283 bp, Glycine max
ccagtatgcctttggggagaaggggagagaagctggcagtgggctctgttcaattcctccgaattcagtgctgcatgttaatattgaattggtgtccttcaagcctgtcataaatgttactggtgactccaaggtgattaacaagatttgaaagaaggggagggtgctttcacagccaatgaaggtgcaaatgttactgtgagcttcacagctatgctagaagatggcactgtatttgagaaaagaggaattggtgaaacactacccttggaattcataactg

SEQ ID NO: 49898 - DNA, 282 bp, Glycine max
gagcaacatcatttattactgatgatctttcgcaccgcatacttgacggaccacacccaacgccatccatgcgagctcatccggcattcatcccatttgcagaagacttcaatatgaacaatgtaatcacaactgtaaaaggtgtggggagatcagtgatgcgcacatcatcgctttgccgtctccaatcaacagtctcattggaagacaagtggtcaaagttggaagaagttctggtttgactactgggcctataatggcatatgctctagagtacaatga

SEQ ID NO: 49899 - DNA, 289 bp, Glycine max
ggaaaatataatgtcattcctggacaatgaaggatttattatgccactagacttaggtgcaaaagggagttgtcagattggtggaaatgtttcaactaatgctggtggtttgcgtcttgttcgctatggatcgcttcatggaagtgtattggtgttgaagctgttctggcaaatggtactgtacttgacatgcttaagacattgcgcaaagataatactggctatgatttgacacatctatttataggaagtgaaggttccttgggaattgttactaaggtttcaatac

SEQ ID NO: 49900 - DNA, 287 bp, Glycine max
  unsure (1)..(287): unsure at all n locations
tccaaacctgcgcaacccgacagggaggtctgatcttccaggaattgacgtgtttgtttccacggcagaccctgaatgaagaanctcctcttgtcaccgccaacaccattctctcgatccttggaattgattatccagtggagaagtcgcgtgtcacttgtctgatgatggtggagctttgttgacatttgaagcccttgctgagactgctagctttactagaatttgggttcctttctgtagaaagcaccacatagagccgcgaaaccctgaagcatattttgggg

SEQ ID NO: 49901 - DNA, 303 bp, Glycine max
tctggacaaggtttccggctgaaggatctaagattacgccgccgcatcaatcagtggagttccgctggaaggactactgccctatggtttttagacaattgaggaagctatttcaggtggatcctgcggattacatgttagctatatgtgggaatgatgccctcagggagctttcctctccagggaaaagtggaagcttcttctacttgacccaggacgacagatttatgatcaagacggtgaagaaatccgaagttaaggtgcttcttcggatgcttcgaagctactaccaacatgtttcga

SEQ ID NO: 49902 - DNA, 315 bp, Glycine max
gtcaccaactcaccaaaaggctcatgaatggggaggcactaagggtgacaattgttacaaagaaacagatcaaattacagaagaagggtattgggggaatggttcaattccaagtatgatgcgagttgtggaaaatgtgattgaaaatttgaatggaagaggtttgaatgttcaattgcttaacatcacacagctctcagagtataggaaagaagggcacccatcaatctatagaaagcaatgggaccctctaactgaagaacaattatcaaatccaaaaacttatgctgattgcatacattggtgcctccctgg

SEQ ID NO: 49903 - DNA, 304 bp, Glycine max
ctcctccactcatgtctggtcacggagaaacggcgtaacggaaggaatcacgtgacgtggatggctttagagcaggaggtgggtcagaataggaacacaaacggcgtggatggtggagacgagggagggaaagcgccgagactgcctcggtggacaagacaagaaattctggttctgatacagggaaagagagacgccgagaacaagttcaggagggggcgcaccgcgggtttggcatttgggtcgggtcaggtcgagccgaaatgggcatcggtatcttcctactgcagaaagcatggagtga

SEQ ID NO: 49904 - DNA, 295 bp, Glycine max
cggctcgagggcttttgaaggatggggaactgatgagaacactgtcatagtaattttgggtcatagaactgtgtatcagaggcagcaaatcagaagagtttatgaggaaatttaccaggaggatcttgtgaagcgcctagagtctgagatcaaaggagactttgagaaagccgtgtaccgatggatactggaacctgcagatcgtgatgctgttttggccaatgttgccatcaagagtggcaaaaactacaatgtcattgtggaaattgccactatcctctccccggaagagctt

SEQ ID NO: 49905 - DNA, 260 bp, Glycine max
agttggaacggtgggaagctgctattcaagactatgaaatgctattaagagaaaggccaggggatgaggaagtggcaagggctttgtttgaagctcagctccaactcaagatgctgcgtggtgaagatattaaggacttgaaatttggttcaaacttggtttccatctcaagtaatgatcggttcagacattatgtaacctcacctggtaagacacatttggctgcttctgttgtataattgcattaatatgagtaccac

SEQ ID NO: 49906 - DNA, 279 bp, Glycine max
cgcctgcaggttagagtatttaatactcatcgagcaccacatcaaaccattatcaatgaaattatagcctgcacccttcagcataaattgctgcctgatttcgacatgcaaaagtcagcaacttctcctttgaagaagccctcaaaagctgttctagtagcatctttattctcagaatatggtcagaagctgaggactatgtatcaggcaaatacaactgtgaccagggaagtaataagagtttatcagccaagtcatgaagagcgtcaaaagtcaaat

SEQ ID NO: 49907 - DNA, 273 bp, Glycine max
gcaggatctatctcagccaaagtcagaagttagtccaccagaaggattgctggcagttcctcttttaagacatcacagaattgctttatcatggatggttcaaaaggaaacatcaagtttatattgctcaggaggaattcttgcagatgatcagggacttggaaaaacagtatcaactattgcattaatattaaaggaaagacctccattacttaatgggtgcaccaatgcccgaaaaagtgaattggaaactctgaatctggatgtggatga

SEQ ID NO: 49908 - DNA, 234 bp, Glycine max
gtggttggaaataccggcaagaagtttgagaaagttctcgattttcttggcttggtggagaaacttttctatctctcgggaaaatatgaaattgagctgactgttggtgatgctgtcatggagaactctttcttacggctacttggccatgttgaattagatcttccagaagcactgagaaagcaccccgtcctccaccaccacctgttgatccttactcaagatatgggccca

SEQ ID NO: 49909 - DNA, 250 bp, Glycine max
aggcagtatagtgggagcatcgaggagtaatattgtattcacaatcatttcgcttgtactgtcacataccgtagacagacgctaagtgaatctgctagaattatgggcattgaggataaggcattcagtgtataacatgaatttgacgggaagtgggatgtcaatagcatccgattgagcaactgggatcctcatgcgatacacacagttgtcaagtctaacagtcctcaagatgtagtagactccagag

SEQ ID NO: 49910 - DNA, 258 bp, Glycine max
ccgtaggggacaataataagaagtcttggccaagagatgctagaatgaggcttatgacgcatgatgtcaatcttagaaggactgtcttctgggatatgaagaatcgccttcctcgaagcatcacaacattggagtgggagaacagttttgtatctgctgacagcaaggataatccaaacttgcttttcagcatgtgtggatttcaagtgaggatacgtcctagaattagaatgactcaagaagcattgagtcacacaa

SEQ ID NO: 49911 - DNA, 263 bp, Glycine max
actatgccccctttgcgtctgatctcaaaggccttggtgaactcgatattagctttaagctgggtaccccattcaaaccatttgaccagcttctaggggtctttcctgctgcaagctctcatgcacttcctgagccgtataggagacttatgacggatccaaactcaccaatcattgatttttatccaattgactttgaagtggacatgaatggcaaacgctttgcttggcagggtattgctaagttgccatttattgatgaa

SEQ ID NO: 49912 - DNA, 264 bp, Glycine max
cctcgtgccgaatcggctcgatcctattcttatgcaagtgtattcacacaagtctgtaccagacagtgtcgtctggccaatggctgtgattgccacacttgctgcaatgattgccagctaagcaatgatatctgctacattggcatgcataaagcaatctatggctttgggatgcttcaccaggctcaagatcattcgcacctcttaaatgttcattggccacatgtacatcctcatcatgaactggtttctgatgaccatgtg

SEQ ID NO: 49913 - DNA, 270 bp, Glycine max
gccaggcaagccccactcaaccaccacacctctcctcgttcacgctacccctttctgctcttcttctacctttcaagttttaaaagtataaagatggcagagacattcctatttacctcagagtcggtgaacgagggacaccctgacaagctctgcgaccaaatctccgatgctgtcctcgacgcttgcctcgagcaggacccagacagcaaagttgcctgcgaaacatgcaccacaaccaacttggtcatggtcttcggagaaatcacg

SEQ ID NO: 49914 - DNA, 254 bp, Glycine max
ggaacgacaaagggaattagagatgattcagagacagaaagaagaggctgctctgagaaagaagctggaggatgaagaagaacatgcgaatcgaattaattctttgggtaagaacaaatctaggcccaagtcttatggtttctaattattctaattactatgtgttatgtgatatcattttgtaccccaaattatttgtacccttatgtggaaccatgatcttcaatgaaagatttgatattcctatgtttgag

SEQ ID NO: 49915 - DNA, 268 bp, Glycine max
ctcacatctctagagcctctgttgttgttttggtagctttcctagtccttcccttacttttctcagacatggctagagcaacaattccagaatcagatgttgatcttttagaatttcctttaaatttagaatacttggaggctgaattctttttgtttgggtctttgggtcatggattggatgtagttgctccaaatctgactgagggaggaccccctcctattggtggaaaattggccaaacttgacaactttgtcaaggatgtcat

SEQ ID NO: 49916 - DNA, 336 bp, Glycine max
ccccccctccacacccatacaacctcccaactcggctcgacgaaaaactctgaccgagtccgagaggcatcatggcgacactggattccgacgtgaccgtgtttccggccggcgaactcccagcagcgccggtccttcttcgtccaccaagaagccgaagcgtttcgagatcaagaagtggaatgcggtttccacctgggcttgggatattgtcgtggacaattgcgctatttgtcggaaccacatcatggatctctgtattgagtgccaggccaaccaggctagcgccactagcgaggaatgcactgtagcttgggctgatggctcaagacccgt

SEQ ID NO: 49917 - DNA, 321 bp, Glycine max
accgcacgcaagctcgcgaacttcggctcgcagagacacggagcaagaagcagcagaagcgcgcaaattgaccaaagatgagtagaaacgattccaagcacttctccaccaccaagaagggtgaaatccctgagctcaaagaagagctcaattcgcagtacaaggataaaagaaaagatgccgtgaaaaaggtgattgcagcaatgactgtcggtaaggatgtctcgtcattgttcacagatgcggtgaattgcatgcaaacagagaatttggagctgaaaaagttggtttacttatatctgatcaattatgcaaagagcc

SEQ ID NO: 49918 - DNA, 273 bp, Glycine max
aatttgaggttgatacgaacaaacagtgcaatttggctacatgcctaattcacatgaacaagatcaaagaagcaaagtttctactccaggcagtacgtaccgctacaaaaaatagaaagatggatgattcatttgccaaatcattcgaacgcgcttctcagatgctaattgagatagagacatcatcatcacagaatgcagcattttcaatgacaacacagtgccctccacaaagctttgagaactcgattagaatgagctctgatagtgctc

SEQ ID NO: 49919 - DNA, 290 bp, Glycine max
tggatgtggtgcttctcagtgcaaacaggtacggcaaccccactctccgccacccccccactccccccccaacttcacttatggcacttcctcagtggcagctagcctggtccaagacacagtgaccctagccactgatcctgtcccagcctacgcctttgggtgcattcaaaaggtcacagggagctcagtgccaccacaagggctattgggcctgggccgaggcccactatcactcttggcccaaacccaaaagctctaccaatctacatcttctcattgcttaccca

SEQ ID NO: 49920 - DNA, 323 bp, Glycine max
cacgcgcacgcaagctcgcgaatctcgcgctcgcagcggccgactctcactcatcgccaacggcaccggacgcgagtcgatctacggcgccaagttcgctgacgacaacttcgcgaagaagcacactggtcccggcatcctctccatggcgaacgccggtaccggaaccaacggatctcagttcttcatctgcacgacgaagacggagtggctcgacggaaagcacgtcgtgttcggacacgtcgtcgacgggatggacgtcgtcaaggagatacagaaggtcggatccagctccggcacgaccgccaagcctgtagtcgtcg

SEQ ID NO: 49921 - DNA, 286 bp, Glycine max
gttggagatcaaggtctggctgctgttggacagtgttgcaaacaacttgaagatctgaatctgcgtttctgtgaaggcttgaatgatattggtttggttgaattagcattgggtgtgggaaatgcattaaaatctcttggagtagcagcttgtgccaaaataactgacgtttcaatggaagttgtgggatcacactgcagatcccttgagaccttgtcattggactctgagttcatccataataaaggggtgctttctgtgattaaaggatgccctcatttgaaag

SEQ ID NO: 49922 - DNA, 271 bp, Glycine max
tgaatatgctccttcaatgagctcaagtgagaaaagtttcttgtatgatattgttgcaaatggccgaaatggaattgatgttgacaagtttgattatcttcttcgtgactgtcgagcttgtggtctaggatgcaactttgaatttcaaaggttattggagacaatgcgggttttggatgacgagatttgttatcgtgctaaggactaccttaccatccacaaaatgtttgccactcgtgctgatctttatagaacagtttatacacatcca

SEQ ID NO: 49923 - DNA, 274 bp, Glycine max
gaaaatatcagttcctagcatgttatcaagggaaggatttactgcagattcattctccatgtgttttggacgtgatggcattggaaggataagttttggggacaagggaagttttgatcaagatgagactccatttaatctgaacccatcacaccctacctataatatcacagtcactcaagtccgtgtaggaacaactctaattgatgtggaattcacagcactttttgattctgggacctcttttacatatttggttgatccacctatacga

SEQ ID NO: 49924 - DNA, 280 bp, Glycine max
tgaaactgacgaggtgtatgcacagatgacccttcaacctgtaaacaaatatgagacagaagcaatactggcatcagacatgggtctcaaacaaaaccgtcaacccactgagttcttttgcaaaactcttacagctagtgacactagcactcatggtggattgtctgtgccacgtagagcagctgagaaaatattcccacctttggattattcaatgcaacctccagctcaggagcttggtgccaaggatttgcacgacaatacatgggcatttagacat

SEQ ID NO: 49925 - DNA, 251 bp, Glycine max
ggcgtttgggctgcagttgaacatggagcttcagttggccgcgcagtcgttggagaagcgggttttgaggacacagactctgttgtgtgatatgcttcttagggactcgcctactggcattgttactcagagtcctagtataatggacttggtgaagtgtgatggggctgccctttatttccaagggaactattatccgttgggtgtgactccaactgaagctcagattagggatattattgagtgggtgt

SEQ ID NO: 49926 - DNA, 260 bp, Glycine max
cttcagcattcacactaaggtgttccttgctcgccaaaagaccatggagcctgccaaaaccattcacaacaatgtcaaatactcccccatcttcttagccatctttgttctgatcttagcttcagcattgtcttcagcaaatgccaaaattcacgagcacgagtttgttgttgaagcaactccagtgaagaggctgtgcaaaacccacaacagcatcaccgtgaatggacaatacccgggcccaacgttggaaatcaaca

SEQ ID NO: 49927 - DNA, 273 bp, Glycine max
cagtactccgctcgaggtttcctaaagcatgtagggaatttagacgctgcaggatcatcacgagattgagtaatgaagtacaacattgcaaatcacagcaatgggtgccagaatcacctggaaatcgatgatgaactgaagcttcgggcattttggagacaaaggattccccatgatgacctatgcgacgtcctaggtgaggagtttaaagggtatgttttcaaaatcactggcgggtataacacgcaaagattcccaatgaagccgggagtg

SEQ ID NO: 49928 - DNA, 250 bp, Glycine max
gttggagggtgcatggctctgttccgtggcatttcgggtggggaacggaaacgggtcagtatcgggcaggcgatgttggtcaacccgagtttgttgtttgttgatgagcccacctcgggcttggactccaccacggcccaacttattgtgtcggtgctccgcgggctcgccttggcgggtcgaaccgtcgtcaccaccatccaccagccctccagccggttgtataggatgtttgataaggtggtcgtgt

SEQ ID NO: 49929 - DNA, 253 bp, Glycine max
aaacttttctcccttgagatccacatttcttgatcttagtactggcagtcattcctatctgcgtgcattttcatctgctccggtgatatcttttgccattgaaagaggttggactgagtcatcaagtgcaaatgtaagaggcctgccagcattgcctctcagactgccacaattggatgaaaggctcagagctggttataagtcaacaactgccgggaaatttaccgaggctcttaaggcattcaccagtatt

SEQ ID NO: 49930 - DNA, 262 bp, Glycine max
tgcaattctaaaagctttcctcagctttatgttctaaaagtttggaagctggaacaattgaaggactgggaagtaaagcaacaagcacttccctctcttagacaactggaaatccgatcatgtctgcgcatgacaaagcttcctgatggactaaagcatgttaacagtctccttgagttgaaattgacaaatatgccagtggaaattaatactgacaagcataacattccgcccaattgtgaagtccacagagatgactccg

SEQ ID NO: 49931 - DNA, 274 bp, Glycine max
tgtaatttcatatcgtaacaggttgttccttctatccctttctgttggtcttaggtcatatatcaatggcaacttcaacctctgcactcaataaaaggctggaaggaaaagttgcactgatcacaggaggagctagtggcatcggcaaacgcactgcagaagtgttcgctcagcaaggagccaaagtagtgatcgctgacatccaagacgaactgggacattccgttgctcagtccatagggccatcaacatgttgttatgtccattgcgatgt

SEQ ID NO: 49932 - DNA, 270 bp, Glycine max
agggaatttggaaagtgagagtgaggtgacgatgatcccatgttttgatttttgcaaggcattagaagaaggcagtgaggaatggaaagagatgagcaagaaagtgagagaagcatgtgagagtcatggctacttcctcttgatgtgtgatgagatcatccctgagagtgtacgtgaagagatgtttgatggtatgaaagaattgtttgatttgcctgaagaaacaaagcagcaacacatatgtcaaaagccttataggggctacattgg

SEQ ID NO: 49933 - DNA, 284 bp, Glycine max
atgatgcagagagagtgagggattatcagcaagcaatgacaagcagatgtcaatgtaacaatcctgcttgtcaatgatgcagagagagtgagggattatcagcaagcaatgacttgtcaatcatgtagtgttcctttgacatctgctcacctgaagtccttagcctatctacagacaattttgactaccagcatctacggcgtcattttgtcaagggattgcttcttgatgatataatggggtacaaaatttttgttcatgaaatccactcagactatgctgca

SEQ ID NO: 49934 - DNA, 277 bp, Glycine max
caagaatggcacttcgttgcttggtgatgtccctttctgttctcttcactcttggtcttgcgagagaaagccatgccagagacgaagatttttggcatgctgtttggccaaacactcccattccaagttcattgcgagatcttctaaagcctggccctgcaagtgttgaaatcgatgatcaccctatgcaaattgaagaaacacagtacccgaaaaccttcttctataaagaagaccttcatccaggcaaaacaatgaaagtacaattcagcaagcc

SEQ ID NO: 49935 - DNA, 272 bp, Glycine max
aactcggaatcggctcgactcgagcgtgagataacaatagcacctgaaaaagggccatgatgaagaagagaagctgattgaattcaaaacagatgaggaacaagttgttgatggacttgatagagctgtattgactatgaagaagggtgaggttgcgttgttgaccattgcacctgattatgctttcggtacatcagagtcccaacaggagttggctgtagttcctcctaactcagccgtgtattttgaagttgagctagtgtcatttgaga

SEQ ID NO: 49936 - DNA, 247 bp, Glycine max
attgtaaagctggtatggggaggactggactgatgatatgtagtcttcttttgtttcttaagttcttcccaactgcagaggaagccattgattactttaaccataaaagatgtgtagatggaaaggctttagtcctccctagtcagattagatatgtaaaatactttgaacggactttaacacacttcaatggagaagtccaaccaggacgaaagtgcatgctaagagggtttcggcttcacaaatg

SEQ ID NO: 49937 - DNA, 261 bp, Glycine max
gagaaatgatatggttctccatgaacaagaacatcaatatcaagctcttcttgaagttcttgttcatggagaaccagagagatatgatatggttgagtacttcggtgagcaattgtcaggctttgccttcactgttaatgggtgggtgccatcctatggttcccgttgtgtgaagccaccaatcatctatggtgatgtgagccgcccaaagccaatgactgtcttctggtcatctctggctcagagctttaccaagcgccc

SEQ ID NO: 49938 - DNA, 259 bp, Glycine max
caatttaccagctatacttgttccttttgaaggttagaagtgctacaatacaaacaatggcagctactcaggaagatgtgaagcttttgggtattgtgggaagcccatttgtgtgcagggtccagattgcccttaagttgaagggagttgaatacaaatttttggaagacaatttgggcaacaagagtgatttgcttctcaaatacaaccctgttcacaagatggttccagtgtttgttctccaatgagcagcccatag

SEQ ID NO: 49939 - DNA, 279 bp, Glycine max
tcaagatgtggatatcaaagttcttaagccttgaggcatgagtacagatatgataagggagtttacagaggaagtttaggtcatgaagaagattcggcacaataatgttgttcacttcattagaggatatactaggcgcccaaatctatggatagatactgagtttatggctagggggagcttatatgactttctgcacagacaaagacgtgtatttaagcttcgatcattggtaagagtagcaactgatgtttccagaggggtgaactatttgcacca

SEQ ID NO: 49940 - DNA, 224 bp, Glycine max
gcctggtgtgtgggagtactgacagcgcatgtgcacgctcttattgtagaggagttgcaacctgctgagtaccttcaattgaaggaagcacttgctgatggtagtatctaatggcgactttgtgcttgagtaggactttgaagcactcaatgcagccttctactgcgtcagctcctaacaagtcaactggagatggtgtggagtactcatgcgccacctttctg

SEQ ID NO: 49941 - DNA, 289 bp, Glycine max
tagggttatcatttctccatttccattttctctctcacttttcaagaatcgtaagctatgggaaagtcttacccaactgtgagtgctgattaccagaaggccgttgagaaggcgaagaagaagctcagaggcttcatcgctgagaagagatgcctcctctaatgctccgtttggcatggcactctgctggaacctttgacaagggcacgaagaccggtggacccttcggaaccatcaagcaccctgccgaactggctcacagcgctaacaacggtcttgacatcgctgt

SEQ ID NO: 49942 - DNA, 283 bp, Glycine max
tgctaatggagtgttcccaaggcgctgcaatgcatccttcatagctttaatccccaaggtggctgaccctcaattcttgaatgactatagacccatctcattaataggttgtatgtacaagattgtctctaaggtgctggctaaaagatgaagaaggtgatgtcctttattgtagatgagacacaatctgcttttattgaaggaagacatctactacatagtgtcctcattgcaaataaggtgattgaagaggccaaaagaagcagtcaaccttgccttgagt

SEQ ID NO: 49943 - DNA, 190 bp, Glycine max
aaaagttggtaagcagcttgagagctaccataaggcttcatcacttactcttgctatccaagatgggccccaagcaggacagatggtaccgcatgttcacattcatcttatccctcggaaaagtggtgattttgagaagaatgacgagatatatgatgcaatagatgagaaggagaaggaattgaaacaa

SEQ ID NO: 49944 - DNA, 257 bp, Glycine max
ggatattgcatcagcttgtgcacggtcgtcatatgggggcggtctgtaatctgcaaatattcagaaatttattcagtttcagcttacatagatgtggccgtctagtgattaatgttgttgctgcagtttcgtctggcgatgttccattaaattcagtgcagcttttttgggtgaatcctatcatggatactctgggagctgtgggcctcgcaacttgaccaccaactgatcaccctcaggatcgaactccagtgggt

SEQ ID NO: 49945 - DNA, 283 bp, Glycine max
ctaacatgatggtcacgtcatgttgagttatgtgcttgtgtttgctactacttcacattttcctgcgctttgtgccaatacagtcagcacctgaaagtgccattgtgacacagattcctggcttcagtggcactctaccttccaagcactatgctgggtatctgacgctggataagagtcatgggaggaccttgtactactattttcttgaatcagagggtataccttccgaggagcctgtgggtctgtgagctaatgggggacctggctgctctagcttcga

SEQ ID NO: 49946 - DNA, 294 bp, Glycine max
cttctctcttggttgccatgttaggccaagcaagatacctttgtgtctataggaagggcacggcttgtgccatcttggttagccaaagtgcatccttcaaccggcacaccattgaatgccacggtctttttgggactttgcacagcaacaattacactattcaccgagcttgacattataattgagttgattagcatcggcacactgttggtgttctacatggtagccaacgctcttatataccgtcgatatgtaatcactagccatgccccacctacgcacactctcgttttc

SEQ ID NO: 49947 - DNA, 187 bp, Glycine max
cttttctgtcttgtgcatccttagtcatttctcatattactacagtcaaggtatattacattcatagatgatgattaataaagctttaataaacaagagaagatgagtacttaggcttccttaagctccttagtgctgctccttgcagctctaattctatcccctcaagttcttgcaaactatgaga

SEQ ID NO: 49948 - DNA, 262 bp, Glycine max
gatgaaacaagctgcagcacttggaggagtgcaaagagccaggaagaggtttgttggtgtaaggcataggccatcaggtagatgggtggctgagatcaaagacaccattcagaagataagagtgtggctgggaacttttgacactgctgaggaagctgcaagagcctatgatgaggctgcttgcttgcttcgtggcaccaacacaaggactagcttctggccttgttctcaatcctccacaagtccagctctttcctcaaag

SEQ ID NO: 49949 - DNA, 259 bp, Glycine max
aattggaaacagagttggtttacaatgggaatgctcccagagaagcatatgcaacaattctgcattcagctcatgtttacgtttgtggggctatagctgcggcacaaagcatccgcatgtctggatcaactcgagaccttgtaatacttgttgatgagacaatcagcagctatcacagaagtggtctggaagcagcaggttggaaggttagaacaatacaaaggatcagaaaccccaaagctgaaaaggattttacaat

SEQ ID NO: 49950 - DNA, 248 bp, Glycine max
attaagtttccacattcatagttaacaccattcaaagtcaaaattctttagcacaaattttcaacaagatctttgtttcactcacatcaactccaacgatggtgcagaggctcacttatcgcaagcgccatagctatgctaccaaatccaaccagcaccgggttgttaagacccctggtgggaagttggtgtaccagaccactaagaagagagcaagtggacctaagtgccctgtcactggcaagagg

SEQ ID NO: 49951 - DNA, 200 bp, Glycine max
aaacccgtccctcacactctccaaaccctagcggcactacacactagttctatcgctatctccccaagatgtcgagcgccgatcccgagcacagagaagaggaggaggcacccgccgttggcgacgacgaggacaccggagctcacgtcgctccaatcgtcaagctcgaggaggttgctgtcaccaccggcgaggaggac

SEQ ID NO: 49952 - DNA, 257 bp, Glycine max
aagtgctcaaagaaatatgctgttcagtctgattggaaagcccattcgaaaatatgtggaacaaaggaatacaaatgtgactgtggcaccatcttttctagaagagatagtttcatcacccacagagctttctgcgatgcactgagtgaggagaacaacaagttcaacgaaggacaattgccaaagatgcatggttcaaacttgcaaccaccaacaataatcccaaacctagttgcatcattaccaatcaatggcgc

SEQ ID NO: 49953 - DNA, 144 bp, Glycine max
atttttggacaaggcatttatcaatactgcaatgagtattgacactgaatttataatactttctaataatcctctccctatcgttctttttaccgtgtgtatcatcctctagaaaacaacaattcaaagaagcgcctcaattct

SEQ ID NO: 49954 - DNA, 265 bp, Glycine max
gaaaattcataaagttaagcaaaagaaaggaacacgactgcggaatggtgaaacccctgaagttgtaccgtcacatgtaaaactgcatcagttacttcttcaggagcgcattgagaatgcttgtggggatcgtgctcgccttgtgaagttgaaaaagaaacaattgaatggatctgcagttgaagcaaaaacatggaaaagttacatggagaaaattctggaatcccctcccctgatcataaaatggtttgtgaaattcaattcc

SEQ ID NO: 49955 - DNA, 265 bp, Glycine max
ctttttctccaggaacatggtccagtgttaaggcttcagtttctcgaaaaccattttctcttggcttcaatcaacaagtttggacaacttcgttatcaggatgttacaatgggttccatggttggtaattttcgaactggcttaggacgtacaaatgtaatgcaagtcaaccccttcaatggggttgtttctttaggtcactcaggtggtactgttaccatgtggaagccaaccagtgcttctcctcttgtcaagatgttatgtc

SEQ ID NO: 49956 - DNA, 259 bp, Glycine max
ctcgagccgctcgagccgaatcggctcgagcagcatcgaacccgtactagcagaaaaactgccacatggcttcttccgacaaggatccacgagaggatctccttcaagcctggtacatggatgatagtgatgaagatcaaagactcccccaccacaaagaacccaaggagtttgtctcgttggaccaacttgctgaacttggagtccttagctggaaactagatgctgataaccatgaaaatgatccagagctgaagaa

SEQ ID NO: 49957 - DNA, 264 bp, Glycine max
ctcacgctacaagaccattctttcttcttctgaattgaagaatggcacaagatactgctactccaccagttccttttgatttcgaactcttggttggtgatcaccttagaactgtctcagcctcatccagcagcagcagggcagacccatggattgaacctgaaaggttgaaactcagacacaggattggtcggggaccctttggtgatgtttggttagcaactcatcatcaatcaactgaagattatgatgagtatcatgaag

SEQ ID NO: 49958 - DNA, 289 bp, Glycine max
atggacctccatcgccggccgccgcccgccgctgacgacggagcaatccaccccaagaagaggagggacacttcctctcccaaggcctccgacgctctccctctccctctctacctcaccaacgcgatcttcttcacgctcttcttctccgttgcttacttcctcctccaccgctgttcctctgtttctcgtttttgtgttcagaccgaaccctagctccgcatcgcaaccatgtcgaccaagcaaggtggaaaagctaagcctttgaagaaacccaagtctgataaga

SEQ ID NO: 49959 - DNA, 281 bp, Glycine max
agaggatccatcaagcccagggagtttaggcatagccatatcagaagctgtggaggttgctgctaaaaatgctgataccaagtactgcttggggagtgtactcaatcatgttttactccaccagagtgttataggagaagagtgcatcaaacaaatggaagctattggggaaaccccagatgtcattataggatgtactggtggtggctccaactttgcaggacttagtttcccgttccttcgagagaagctcaataaaaaaatcaatcctgttataagag

SEQ ID NO: 49960 - DNA, 281 bp, Glycine max
acgctgactgcatgatatcttccggttatgcgaaggaatgcgtcacgtctacatcttaattcgaaaatctatcatcgacgaaggaatctaccgcctcggcgtggagaaccttagctcctcgcgcgctaacaagatggattgggaagttcttgatttgaagatcaagagttggttagaggcgacaaggatttccgttagaacactctttaacggagagagaatactctgcgaccacgtcttcagttactcagattccgtcagagaatcatgcttcgccgaga

SEQ ID NO: 49961 - DNA, 277 bp, Glycine max
ctttgctgcaaacaaaagatgtggaaatcataaaagctgtcttgggttttgttaaagtgatggtatctagcttagaagcaagagaactgcagaatattctctcagaagttattactgaaatcctcccctggtcatctgttcaagaaatcattttaaatcaaaggtcactgttatatttgaaatattattacggaagtgtggttctgctgctgtcaaactggttaccccagagaaatataaggtttttctcaagacagttctagagaatcgacatggc

SEQ ID NO: 49962 - DNA, 180 bp, Glycine max
atggaggttacagcttgtcagtggatgggaccccaataggagggttcaagaacatggaatcaccaggggttgcattcccgaaggagcagccggtgaggatatagtcgactctatggacatgctgatgactgggcaacaagacgtggacttgtgaagacaggttggtcacaagcacgattc

SEQ ID NO: 49963 - DNA, 276 bp, Glycine max
atttgaggttgttacagggatggccaagaaacaaggaaaggaaaagtcatcagtttcgaatcatagcagtaccaagtcgaagtcaaactctaagcgcggttctgaatcaaagtacacaaaagcaatgcaatccaaggacgaggacgatgaaggtgtgggtgtggaagaggaagacgaagatgaacatggagagactttgtgtggggcatgtggagagagttatgctgccgacgaattctggatttgctgtgacatctgtgagaaatggttccatgg

SEQ ID NO: 49964 - DNA, 275 bp, Glycine max
tgggagttaggttctgcacgctctgcttccagcgagtgttctttcttcgtttcaacaccttaatttgcacacgctgcttcttcagcttgagaaatggcacaagaaacctttctattcacatctgaatctgtaaacgagggtcaccccgacaagctgtgcgaccagatctctgatgcagtgctcgatgcgtgccttgaacaggaccctgacagcaaggttgcctgtgagacatgcaccaagaccaacatggtcatggtctttggagagatcacaac

SEQ ID NO: 49965 - DNA, 278 bp, Glycine max
ctcgagccgttgaaattcttcattcaaataatgtttctgaattgagttggtatcttccttgacttgtgtgaaccatttttggttgttgcttttgttttgtaaggtttccaagttaggatttggttgtatgggcctaagtggagtgtacaacgatcctgttcccgaagaggttggcatctctttgatcaaacacgcattcaccaaaggggtcactttctttgattctgcagatttttatggagcacgtgccaatgaagttttggtcggaaaggctctca

SEQ ID NO: 49966 - DNA, 268 bp, Glycine max
gtccaagggaagagaattctgaggctggaaaaagtaggtgagaatggtgacgcatggcagagagctgatgtcgctgtcttcaaaacagggcattggtggagtcatcaaggatctcttcaagggtgggattatgtagaattgggaggcaagtactacccagatatggatggcttagcagctttggaaagtggtatgaaaacatgggctaattgggtggacaacaatattgatagaagcaaaaccagggtgttctttcaggcaatttctc

SEQ ID NO: 49967 - DNA, 267 bp, Glycine max
cacgacttcaactcacttcaagaactccctgactcttacgcttggacacaacctgatgatgatgatcaccgtctcacaaattacccttccaacaataagactaagaccgttgtccccatcatcgatttgaacgacccaaatgctccaaacctcataggccatgcatgcaaaacatggggtgtgttccaagtggtgaaccatggcatccccacgagcctcttcagtgacattcagagggctagtcttgctctattctcccttcctctt

SEQ ID NO: 49968 - DNA, 177 bp, Glycine max
ctctgcgactagaacatccagaaggagtcaaggcttcagctgatccaacgtctcagtagtggcatacatatcttcgttaagactctcactggcgacaatataactctagtggtcgtgaattctgacaccattgactatgtctaggcaaaaatccgggtcaaagtctgtatccccccg

SEQ ID NO: 49969 - DNA, 285 bp, Glycine max
gcaatatttaaaattggtaacagcagagatatgcctgaaattccggatcacctctcaagtgaggcaaagaatttcattcagctatgcttacaaagagatccatcagcccgcccaacagcccagaagttaatagagcatccctttattcgagatcagtcagcaacaaaagctacaaatgtcagaataaccagggatgctttcccctacatgtttgatggaagtcggacgcctccggtatagtcctcaatgcttatttattttctttttgaaattatgttccttttg

SEQ ID NO: 49970 - DNA, 279 bp, Glycine max
aagagttgaaggatagaatggagcagtcacatggaacatgggaggatgtatataaaagtgctaagagggctgatagatcaaagaatgatttacacgaaagagatgaaggagagcttgagcggacaggacaaccgctatgcatatatgaaccttattttggggaaggatcctggccttttctacataaaaaatctctttatcgaggaattggcctgtccggtaaaggtcgaagcccagggagagatgatgttgatgctccttctcgtcttccactgctga

SEQ ID NO: 49971 - DNA, 280 bp, Glycine max
tccgagcagttttagggaaatacgcaccagggtcaacgtccccttcatgttcttctggccatgaccaagagaatagaagctctttggatttttacactggaatttttggacttgataagtcaaggataatggatacagtaaaccaagctatggaggagctcatcaagatggctaccgtgggggaaccattatggcttcgtagcttcgagactggtcgcgaaattcttaactatgatgaatatgttagggagtttgcagttgaaaattcaagcagtggaaa

SEQ ID NO: 49972 - DNA, 278 bp, Glycine max
aaggcaacatgacaggagtatgcctgtaaatctattgcaaagaggaagctcgtcaccgatgatgatgtcgaggatctgagaagagaaattcagatgatgcaccacttggctgggcatcctaatgttatatccatcaagggtgcatatgaggatgccatggctgtccacgttgtgatggaactatgtgcaggtggagagcttttcgataggattattcagtatgggcattataccgagagacaggcagcggagcttactaggactataattggggttgt

SEQ ID NO: 49973 - DNA, 214 bp, Glycine max
atgggctgaattataccaaaattgggcttggcccaaaggactactatgtgcaagttgatacaggaagtgacactctgtgggtgaattgtgttggctgcacagcatgtcccaagaaaagtggtcttgggatggacttgaccctctatgaccctaacttatccaaaacttcaaaggcggttccttgtgacgatgaattttgcacttccacacaaca

SEQ ID NO: 49974 - DNA, 267 bp, Glycine max
cttttaagttgtcatgttgatgatttgacactactcggggaatggtcctctacttgaatgtgaccctgtagtgaaagcatactttgctggtccttttgttaatttttagatttggcttggtggtggttgttgtatgtttaatttaattttcaacatattgtgcaacagggatcttcctcagtcagaaagggccaagtataagatttatgacaacctggttcgcttcagctttggagttgaagattttgaggatttgaaggctgatgt

SEQ ID NO: 49975 - DNA, 267 bp, Glycine max
accaattaaggtctctcatagagtagtatttaacttgcactacgtactggctactatatgtatttaagcagaagcaggtgagtgagtgagtgagcaagagtgaagagcgaagagaatggctcccaagggtttaatctttttggctgtgttatgcttctcagcactgtcactgagtcgttgtcttgcggaggataatggacttgttatgaacttctacaaggaatcatgccctcaggctgaagacatcatcaaagaacaagtcaagct

SEQ ID NO: 49976 - DNA, 274 bp, Glycine max
tgtgaattctgccaaaaatggagtcagaaatcgccgtggtcgtcgaatgcagacttgtcagactccaattcgtcctataacacccaacaaccttctagactctatctgctggtctatatccgagccaacttcaactgcttccatttacacagactctttcagtgttgaagatcctagtgaaaatcatacttcaatattttttgacgcaaaaggggatggcaaggattcggaagcttcgttttcaaactccactcgtcctctgacagaaagcgag

SEQ ID NO: 49977 - DNA, 277 bp, Glycine max
gatattttgggagtgattggagcattggggttttggcctctaacggtgtactttcctgtggagatgtatatcttgcaaaagaggatcccaaaatggagtatgagatggatttctctggaattgctgagtgtggtgtgcctcatagtaacaattgcggctggtcttggctcaatggttggtgtcttgcttgacctccagaaatacaaaccattcagttcagattattaaacaccacataatctatttgcctccttggggatgtaagaaactctgaggg

SEQ ID NO: 49978 - DNA, 276 bp, Glycine max
cacatattgtgtgaagaaggccatcattctccctggattccaccaatgtactcaaaccgcaatccgtaactttgaggtccccgttctcatcaaaaagaaggttctctggcttgagatcgcggtgacacacccctcggctgtggcagtgatcaacagcatcaatcagctgctggaaatatttatcttggcacatcctccctcaacctcactcgggacactttatagaccagttcagcaccttgcaccatttccattgccagatatatctttgtcttg

SEQ ID NO: 49979 - DNA, 285 bp, Glycine max
aaccgtgtgcggcggcgcggagatggacgacgcggagtcctgctgcgggagcacagaggaggactgcgaacgacagaaagtggggtggcgcacgttagcggggtgcgcaggggtgaaggataaggacgaggggggtgagagtagtaatggtaatgggagaatgtgcaggaattgtgggaaggaagagtcgtgcgtgctgattttgccgtgccggcatctgtgtttgtgtactgcgtgtgggtcttcactccacatttgtcctatatgtaaatccttcaagactgc

SEQ ID NO: 49980 - DNA, 284 bp, Glycine max
  unsure (1)..(284): unsure at all n locations
actacatatcacttacaccaatctataatggtctacactgtatccgcattctanncgnttanaccnctgtcncatgatttccgcgtacatttggtcgcagagcaagaattctgagtgaaaaggtccaagaactacaattgcagttccaataccacaaaggccctcttctcagtggcaaactctccgtcaatctcatctggtacggtaacttcaagccttcccagcgagccatcatcgccgatttcatcagctccctttcatctcacaaatccacagcccagcca

SEQ ID NO: 49981 - DNA, 290 bp, Glycine max
caccattcttaacttcactcacttacaaatcacaatgacacaacaagcaacaacctcttccgaaacaacaacttcctcttcttcttcttcttcctcctcctcctccacattttcaccctcgcagcattcgggcccaaaggcccaggcccagaaacagagcaagaggcccagggactgcagcaagcacccggtgtaccacggcgtgcggaagcgcaactggggcaaatgggtgtccgaaatccgcgagccacgcaagaagtcccgaatctggctcggaacattcgccactc

SEQ ID NO: 49982 - DNA, 273 bp, Glycine max
atacccttgcacctgaaacaaacaatcacaatggtggtagggaagcaaatacagagccacatcatactcacgaggcagctcaattatggagcatggctaaacaattgggcgttacaggaggagcataagggtgagcaccatgctggagaatacaaaggggagcaccatggtgaacacagtagtgagtacaaaggagagcatcatggtgaacacaaagctggagagtaccatggtgagcacaagccagagcacaaagaggggttcctagacaaa

SEQ ID NO: 49983 - DNA, 280 bp, Glycine max
caggaatccaccacccaccacacccaacctctgttgtgttgtgttgtgtgtcttctttattctatcgctagaataagatctggttggaaaattggtgttgaagtgtacggatctggtagtttctcttgtttgtgggatggggtggagatacaacgctggtttgttcctcatagtcactgtcgttattatttgggtcacctccgccgaagttacccaggatatttttaccgattataagcagccatttgcagtaacatatcttggagcttctcttatggta

SEQ ID NO: 49984 - DNA, 277 bp, Glycine max
ctcgagccgctcgagccggaaaaagcgttcaactcgtttgagggtggtgagtatgaccccaagcagcagcatcagcagcaggtccggtgatagaaacggcagcgttgtgatggagacgccgttgaaagaattgaaaaaggaatccacggtggctgacgtggacgataacgccatctccgccggcggccctcaagatgtctacggcgaggatagggctacggaggatcactttgttaccccttggagtgtttctgttgccagtggttatacactattg

SEQ ID NO: 49985 - DNA, 260 bp, Glycine max
ggactgggcagtatagagacacggtgcgcctgtttatcacgggtacagatggctttgctggagcttttgctgaatgcctttgtgggagtcctaatttatatcagggaggaggcagaaaaccgtggcatagtattaactttgtatgcgctcatgatgggttcactctagctgatttggtgagctataacaacaagaataatttgtcaaatggagaagacaataatgcatggagaacatcataataatagctggaactgcgg

SEQ ID NO: 49986 - DNA, 267 bp, Glycine max
caatgctgcaggagttgtgttgcttgtgagatcagctttgcatctttactttacctttctaagagtgttcatataggcataactggacaaggttacaaaaagctctccggaaccacacccactggcttgaatgttgggccattgcaataccgctcctacgggcatgttcatctaccaagcactgcattgtgccattcgtgtgcagcatggccaaacatatggacaaccagatatcaacaggaccactcttagaaaggtacagtacag

SEQ ID NO: 49987 - DNA, 252 bp, Glycine max
cggctcgaggaagcttttagtcacatggacttgcttgaaagcttgaacctctcaagaaatcatttaaacggtgaaatccctgaaatattggcagagcttgatcgtcttagttccctagatctttctcagaatgacttgaagggaactattcctgagggctttgccaatctttccaacttggtgcatctctacctttcattcaatcaacttgaaggtcatgtaccaaaaactggaatatttgcacacatcaat

SEQ ID NO: 49988 - DNA, 269 bp, Glycine max
ttttggtttttcatgaacaactagcaaccaccctttttgctaagatggcaatgagcaacaatgtgatcggatgcataaacttcgtggccgtgatcctctcaatcccgatcatcggcgccggaatctggctaacaaacggggatgccgattcatgcgtccagttcctgcaatggcccgtcatcatcctcggagtcctcatcctcgtcgtggcccttgcaggtttcatcggagccttcttcagagtctcgtggctcctcatcgtttacctc

SEQ ID NO: 49989 - DNA, 276 bp, Glycine max
cttgaagattgctgaggctctccaaatgcaaatggaagtacaaagaaaactctatgaacaaattgaggtacaaaaacatttgcagcttaggattgaagctcaagggaagtacttacaatcagtgctaacaaaggcacatgaagcacttgcaagacacagttcttccacaactggtgtagaacttgcaaaatttgaactttctctgttagtgtcaataatcaataatgcatgtccaagctctccaatttcagaactcacagaaacacgagggttaag

SEQ ID NO: 49990 - DNA, 277 bp, Glycine max
  unsure (1)..(277): unsure at all n locations
gtcatggtccgttatgtgcttgtgtttgatcttacttcacattttcctgcgctttgtgccactacagtcagcacctgctagtgccattgtgacacagattcctggcttcagtggcactctaccttcccagcactatgctgggcatgtgacggtggataagagtcatgggaggacattgtactactatacagttgaatcagagggcgtaccttccgaggcacctctngttctgtggctctactgggggtcctggctgctctagcttcgatggattcat

SEQ ID NO: 49991 - DNA, 276 bp, Glycine max
ctcgagccgttcgtatgttgcagttggcaggagttcaatgtgctggcaacccacatttttgcgtcaatgaggatggttcctaccaagaagaggggcagaagaatacaaggggatatatatggggaaaggctggaacgaagctactatgtgctttcctgtccctgccagttccttctaaatcttcaaattctttgggagaacaaccctccagtctggctagcagaacaatgcctgactaccttgagcatgggatagttcagaagcttctcttagttg

SEQ ID NO: 49992 - DNA, 247 bp, Glycine max
gtggaaatgcgctgggtggatacttatatcccatttactaatccaccgtttgaactggaaatatatttcaaggaaaagtggttggaagttttgaggtgtggagtgacagcgccagagagtctggagtgagatgggaaacctaataatgttgcatgggcttaaggcctatggttagagacgtcagctatggttctatttgacataccagatattcgtctcatttagtcacatgatgagcgagttacct

SEQ ID NO: 49993 - DNA, 274 bp, Glycine max
gttgataaacatatcctagcccgccaaaccggtctctccagaagtcaggtttcgaattggttcattaacgcgagggtgaggctatggaagccaatggtggaggaaatgtatttggaagaagagaaggagcatcaaaacgacgtagcatcgtcggagggaggaggcatcaatattctcggggatcagaagccaacacaggctcgactcgttcgaattgactcagagtgcatgtcgtctatcgtcaacaacccagatgacaaaaacgacacaaaga

SEQ ID NO: 49994 - DNA, 279 bp, Glycine max
gagatatatactgacattttggccctttgatagaaggtggtgcaaaactaaaagatggtgctatctagtgttcccctctgcaacacttgtggggaacaagtgggacttaatggtaatggggaagtgtttgtggcttgtcatgaatgcaatttcccaatttgcaaggattgttttgagcatgagatcaatgaggaccatagggtctgcatgaggtgtggcactccctatgaagagagaacaaaggaggaggatgatttccatgagataaaggttcacgaa

SEQ ID NO: 49995 - DNA, 267 bp, Glycine max
catgtttataggaaaatggtcctcaagggctttcagccaaaagcacaagtttacaattcattacttgatggaatttctaagtttggtcaactagaaaaggcatttgagcttctaaatgatatggagacaaaatatattgagcctgacagtctgactattagtgctgtaattaattgttattgccaaaagggcaacatgcatggagctcttgaattctattataagttcaagaggaaggatatgtcacctgatttttttgggttcttg

SEQ ID NO: 49996 - DNA, 261 bp, Glycine max
ccctcgagccgctcgagccgctcgagcgctcgagccgtcgctccccactatgggttgacccttctccttcttctaataacaaaaccctgcttcctttgccttctccttcactaggctccccaagcaacaacaacaactactcttttttctctttcatcgacgatcttcactaagctctttcactcaaacacacacccttgattatatcactttctcttgttctcttaccgtagaacattgcatttactcctatctctcact

SEQ ID NO: 49997 - DNA, 267 bp, Glycine max
atttcctctcagaaccctcgatcactcccacgcgctcctatatcctctccttcaccgtcgctctctccaacgatcacaacaacatcgtcatcccatggcaaacgccgcatctggtatggcagtccatgatgactgcaagttaaggtttttggagctgaagacaaagaggacacaccgtttcatagtttttaagattgaggagcagcagaagcaggtcattgtggagaagcttggtgagccagcccaaggctatgaagatttcactgc

SEQ ID NO: 49998 - DNA, 263 bp, Glycine max
gcctagatataagcaaatagttaaagaccttgcagacaaatatcatactgagaacttgctgcttgtcacacacggggaaggtgttggggtggctctttcttcattcaaaaaggatgttacagtgtacgaagttgattactgtggatacgtccaacttagacgcccaattttcaagaaagaccagtcatttactgcaggagaatctgaagttcttaatcacaatggtcaaactggcgtaaatttcatcccaaattaatggccat

SEQ ID NO: 49999 - DNA, 260 bp, Glycine max
tacaaggttctcctcgataaccggttagggcaacaaatgtttgatggtgggtatgttcatcatgggttgttgaaatcggcagtgtggttgttgaaccgtgaatcggagacgctgaagcggttgtgggtggagaatggttcggagtatgagatggttttcgcggggcactcgttgggttctggggtggtgtcgctgttgaccattttggttgtgaatcatagggaccgtttgggtgggattcccaaggagaagattcggtg

SEQ ID NO: 50000 - DNA, 260 bp, Glycine max
cccaaattcattttaatcctaattttgcacttcttgatcattcgatttttctcctcaagatgcagatattcgtaaaaactttgaccggcaagaccatcacccttgaggtggaatcctccgacaccattgacaacgtaaaagctaagattcaagacaaggaagggatcccacctgaccagcagagacttatctttgcgggtaaacaacttgaggatggtcgcacccttgccgattacaacatccaaaaggaatcaaccctc

SEQ ID NO: 50001 - DNA, 259 bp, Glycine max
tgatcccagatgattttcgatgtcctatatctcttgaactaatgaaagatcctgtaattgtctccactggtcagacatatgaaagatcttgcattcaaaaatggcttgatgctggtcacaaaacctgccctcagacacagcagacacttgtgcatacagcccttacccctaactatgttttgaagagtttgattgctttgtggtgtgaaagcaacggtattgagctaccaaagaaacaagggaactgtagaacaaagaa

SEQ ID NO: 50002 - DNA, 290 bp, Glycine max
tgtggtttcacattggctgttcaaatcaaaaatgactttctccctcccattcaccactctgctttcccttctctctctcattctgcttcatgtcaatgccttccccgttcatttcaatcaccccatacaccatcgccaccctcgcttgccgctcataactacagagacgctctcaccaaatccattctcttctttgaacgccagaggtcagggaagctccctcctaaccagagaatgtcttggaggagagactctggcctctctgatggctctgccatgcatgttgattt

SEQ ID NO: 50003 - DNA, 291 bp, Glycine max
ctcgagccgctcatgtgtacgtaacctatcggcatattctggctgcggctatgatgttcccacttgcatactttttggagagaaatgcaagaccaaagctgacatttgctcttttcatggaaatttttgtgatttctctgttaggggttagtgtgactcttaatatgtactttgcaagcctgaactacacaaatccgacctttgttgcttccatggtcaacaccatagcttcccttaccttcatcattgcagtggcactcgggtttgcttaattctttatctgcatgaatt

SEQ ID NO: 50004 - DNA, 287 bp, Glycine max
gatataaggaagatgtcttctaatgcaataaatctgggccttggagatgatgagtgggactatcgatggatggactaccctgaatatgcaagaaatttaaagcatcctcatgatcagtcattagcaacatataaaggtcactcagtgttgcgtactttagtgcgctgttatttctctccttcgtatagcactggtcaaaagtacatttacacagggtctagtgattcatctgtttacatatatgacctggtaagtggtgcacaagttgcaaaacttgatcatcatga

SEQ ID NO: 50005 - DNA, 271 bp, Glycine max
gtttctcttgctctcactctgtctgcttcatcactttctctcgtgtcaatcgagaaaaatcatgggcagaaaattcttcgtcggtggcaactggaaatgcaatgggaccactgaagaggtgatgaagattgtgactactttagatgaagctaaagtccctggagaagatgtagtagaagttgttgtgagccctccttttgtgttccttccttcagtaaaaagtttgctgcgccctgatttccatgtctcggcccaaaattgttgggttcgc

SEQ ID NO: 50006 - DNA, 282 bp, Glycine max
ctcgagccgctcgagccgctcgagccgattcggctcgaggagagagagagagagagagacagagaatgaccagggtgggctatacgcggtgcatggtggcgctggtgtcgaccctaatctcccactcgagcgccaagaagaagcgaaacaacttctcacgcgctgtctcaatcttggaatctctgctctaaattctaatcttcccgccatagatgtcgtcgaacttgtggtgagggaattggaaacggatccgctgttcaattcgggccgtggatctgccct

SEQ ID NO: 50007 - DNA, 274 bp, Glycine max
aaaccttgcagattgtgcagtggttgtggaagagctatggtggaaggcattagactttgcagctctcaaacggagttctgtgtcattctttgatgttgaaaaaccagaaaccgccgcgtcacggtgggcaagggcaaggacaagagtagctaaggtcggcaaaggtttatccaaagatgaccaagcacaaaaactagccctgcaacattggcttgaagctattgacccacgtcatcgttatggacacaatttgcacatgtattatgatatttgg

SEQ ID NO: 50008 - DNA, 270 bp, Glycine max
cggatccctgattttctagcaaaccaaacactgccttatttcatctccagttgaaacaaaccctaacattgcagtgatagagcaataacctaagaagagaaagagagagtatgagtaacgtgacagagaaattgggcatcaagattgagaggaaccctcctgaagacaagctcactcaacttggtgttaggcaatggcccaaatggggttgtcctccaagcaaattcccatggacatatgaatctaaagagacctgctatctcttggaag

SEQ ID NO: 50009 - DNA, 282 bp, Glycine max
atgaaccttgagcttgaaaactccagaaagaggatgcaggaattgcaggatgagctacaactttcagcagatgacgcacagagattcgaggagctgcataagcaaagtggttcacatgctgaatctgagggaaaaaaggccttggaatttgagagactactcgaagaagccaaactgactgcaaaaggagtggaagatgagatggcttcccttaaggaagaattgaaaggagtttctgataagattgctgagaatcaaaaggttgaagaagcacttaaaaca

SEQ ID NO: 50010 - DNA, 276 bp, Glycine max
gctgatgtggcggtcgaaggtttctgtatgagccgatgtgggacccacggctcttccgcttctcatctgaagaagaacagcaagatatacaagttcgcctacatctgggtgggaaactccgaaacccaatgcccggggcaatgcgcgtggccattccaccaacccatttatgggccccagagcccacccttggttgctcccaacaacgatgtgggacttgacggaatggtcataaacctcgccagcctccttgccggaaccgccaccaaccccttc

SEQ ID NO: 50011 - DNA, 271 bp, Glycine max
tgacgctcttcagagttgcagaaatgcacaccaaagttgcttcactttcttggagtgtggtttctctatgctccaagcaaactcacactcaacttgtggaatccatagccatggaaaaaggtttcttgctctgcaatttcgtagccatttttatgctttgatcagctcatcaaggatttcttaatggggtctcctgttaatggagtttattcttcatcagaggttcataattcagtttctgtggtagatcatgatcctccttcgacatctg

SEQ ID NO: 50012 - DNA, 282 bp, Glycine max
ccctcgagccgctcgagccgctcgagccgctcgagccgctcgagccgatgcggctgcaaatgcacctatgttacctgaggttgtccatgtaaaacaccgtaccaagatttatgcatttgatcgagcttttgaaggctcgttttcttctattgcggctcctctggttgggattctttctgagaagatgtttggctataattcaaagtctgttgatcccatcaaaggatcttcaccgaggctcttgccttgtccaagggccttctttccatgatggctgttcca

SEQ ID NO: 50013 - DNA, 191 bp, Glycine max
cttgacttctctttcctcttctttgactccagccaacgtccaaatccattaaagaaattgcagtgttagagttagaagttatgtatttggaacaatatcttctctccttgtatcgtaaagcatttgatcaacaattaccctctgtagctccattcaccaaggaggaaaaagtgaagtcgcttcaataaaca

SEQ ID NO: 50014 - DNA, 241 bp, Glycine max
ttagatttcatctttaaactcattgacattaagtgaagttgctcaatagatatataagttgcatcccaagaattgagggaggcaatgtgggatgttccaacatcctcttccatagatgcttgctaccataggaaattaggcgatttaccaagatagattgtaggctttaataccatattagatttcatcttaaaaccaattagtattaagtgaagttgtccaacagatatatagttgcaca

SEQ ID NO: 50015 - DNA, 273 bp, Glycine max
  unsure (1)..(273): unsure at all n locations
cgctaaaatcaaccatgggttcagcagctgagactcagatcactccaacccatgtatctgatgaagaggcaaacctttttgccatgcaactagccagtgcctctgtactccctatggttctcaaatcagctcttgagcttgatctgttggaaatcatagccaaggctggccctggtgttcatctttcccccactgacatttctcctcagcttccanatcagatacgttctcatncgntatattggaccgcattttgcggctcttggcttgcta

SEQ ID NO: 50016 - DNA, 296 bp, Glycine max
ccgattgctagaatggaatttcgatgctcagtcatctcttttaccattctcttctctcttgctcttgcaggagagagccatgtccatgcatcgctacctgaggaagattattgggaagctgtttggccaaacactcccattcccactgcactgcgagagcttctaaagcctctccctgcaggtgttgcaatcgatgaactccctaagcaaattgatgatacacagtacccaaaaacattcttctataaagaagaccttcatccaggcaaaacaatgacagtacaattcaccaagcg

SEQ ID NO: 50017 - DNA, 292 bp, Glycine max
cggctcgagaccaattccaaatgctcttgtcatcaacattggagacacaatagaagttcttacaaatgggaaatacaggagtgtggagcatagagctgtggctcatgaggagaaagctagactctcaattgtgacattttttgctcctagctatgaagtggagcttggtccaatgcctgagtttgtggatgaaaaccacccatgcaagtataaaatatacaatcatggagagtacagtaaacactatgtaacaaacaagttacaaggtaaaaagaccctggaatttgccaag

SEQ ID NO: 50018 - DNA, 278 bp, Glycine max
  unsure (1)..(278): unsure at all n locations
ggtgttgcttctgcaccttttggaaattattggagagtgctacgaaagatgtgcaccatagagcttttgtcccaaaaacgtgtcgattcattccacacaacataaaaaatgaaaaanantantctcatcanaatgtttgattctcaaaaagggtcttccatcagcctttgtcaagtagtactttcatcaatatattctacaattcgagagctgcttttggcaagtactgaaggccaagaagattcatgtcttggtgaaagaggatcccatattgggtg

SEQ ID NO: 50019 - DNA, 285 bp, Glycine max
tcgagctcctaccctacttaaggctcttggtgaatgtccacacttcaaagtcaatattgtcgggcactcacttggtggtggtactgctgcactgttaacatatattcttagagagcagaaagagttctcttcaagcacgtgcgtcacatttgccccaggcatgtagttttactacttaatgaattcgattatttattagtttttgcatttttataactccatctcattgtcttggatggattgtgtgaatgtgcatgcaagttcactgaactttcttggtggtga

SEQ ID NO: 50020 - DNA, 148 bp, Glycine max
agctagaatggaatttcgatgctcagtcatctcttgtaccattcacttctctcttgctcatgcaggagagagccatgtccatggatcgctacctgaggaagattattgggaagctgtttggccaaacactcccattcccaatgagctg

SEQ ID NO: 50021 - DNA, 266 bp, Glycine max
ctaagccctctcttgctcgggattttactctcacggtagcaccagacatagaactctagatctcttgttttcctatccaatagattagagattgaagatggtgtctgacgcgagcaagaagaaggctgcgcagaagaaggcggcggcagcggccaagagaggaggcaaagcagcagctgcttcgtcgaaaacgacgtcgtcggagaaggccgccgacaagcttgccaacggaattggggaaattcagatatccgatcgaacctgca

SEQ ID NO: 50022 - DNA, 276 bp, Glycine max
gcaagaatggcacttcgttgcttggtgatgtccctttctgttctcttcactcttggtcttgcgagagaaagccatgccagagacgaagatttttggcatgctgtttggccaaacactcccattccaagttcattgcgagatctctaaagcctggccctgcaagtgttgaaatcgatgatcaccctatgcaaattgaagaaacacagtacccgaaaaccttcttctataaagaagaccttcatccaggcaaaacaatgaaagtacaattcagcaagc

SEQ ID NO: 50023 - DNA, 274 bp, Glycine max
aaggaactgagagtatgtgttggaacgtggaatgttggaggaaaacttccacctgatgacctagatattgatgattggtttggcattaacgagccagctgatatctatgttcttggtcttcaggagattgtaccattaaacctggtaacatttttggtgctgaagacactcggccagtactgaaatgggaaaacattattcgagatacactgaatagagctagaccaaaagcaccaaagctgaaatccttcagtgatcctccatcaccatcaaa

SEQ ID NO: 50024 - DNA, 294 bp, Glycine max
cgacttaacaacagcacaaagcgggttactgtctgttcaagctaccatctctctctctctttcttagtgcctccttgccagaagttaaaatggcccaagaaactttcctattcacatctgaatcagtgaacgaggggcaccctgacaagctctgtgaccagatctccgatgctgtgctcgatgcatgcttggagcaggaccctgacagcaaggttgcctgtgaaacctgcaccaagaccaacattgtgatgggtttcggagagatcacaaccaaagccaacgtggactatgaga

SEQ ID NO: 50025 - DNA, 295 bp, Glycine max
tcgatgatgaaaaacgtatcatggttttggacccggtttggccgtggatcatcctccaatttcagcacagtaagtatagcatccagttcttccaatgactccgtcgacagtagcatccaaaaccaaaactacagatacgatgtatttatcagtttcagaggtcctgacacccgcaacactttcgttgatcatctttatgcccatctcctccgaaagggtattttcgtctttaaggatgacgaaaagctccagaaaggagaatccatatcagcacagcttctacaagcacttcaag

SEQ ID NO: 50026 - DNA, 293 bp, Glycine max
ctaaggacttgtggtcctggaaaaatgaaggtattgtattggcagcagaggaatccaatgtaacccatgacctgtacaagactaatgtgcttgagaggccaaaagtaatttacaacgagaaaatcagaaagtatgtgatgtggatgcacatcgacgatgccaattatacaaaagcttctgttggcacagcaattagtgacacacctgatggtccatttgaatatcttggtagccaaaggccccagggatatgaaagcagggatatgacagttttcaaagatgaggatggtgtg

SEQ ID NO: 50027 - DNA, 290 bp, Glycine max
ggtgatgataacttaattagtgttcatgaatatgtcaagccttactttagtggttctaaattgaaaagctttctagctggtcataatatcaccattactgatggtattgacaaaactagtgcaactttgcaatttagaaagttagcagattgcgattttctcaagagaaactttaagcagatgtctaatgttttgtggtgtggtcctgaggacaagccgagtttatggtcacacttcattaggtttcttgtaataatctggagatgcaagaagcttatctggtcaatctc

SEQ ID NO: 50028 - DNA, 279 bp, Glycine max
gctgtgtgttgtgcaagtactaccttctctagctagattgctagagctagaatttcaacctacctatgtgtactgataagatctgcttccctacttaaagagagcatcatcctgtgatcagtatgtcttaaaaaaaaaaaaaaaaaaaaaaaaaaaaaaaaaagggggggcccccgataaggaaccccctcacccgggaatttatttcgggccggatacccgaaggggaaaaatttccccaaaggggggccgaataaagctgggggaaaccggggccaa

SEQ ID NO: 50029 - DNA, 279 bp, Glycine max
gtaaatcaggaaatactttcccattcatgctagatattctgagctaatattctaatgttggtatcaggactctggattcccctgcttcaaaggtggtccacggacaatacagaaccttagaaagcgcttccatctcaatttaacagaagaggtttcaatactaatattagttactccttaactgtaattttttttgcctgtttgctacatttttttctttcttggcagcaatgtgtatctttggtgctttccctcattagcagtagcctggatgcatgg

SEQ ID NO: 50030 - DNA, 286 bp, Glycine max
cgaggatggagatgtatcagatctggtgcaggagaatagcgttgggagcgctcggcatattctgactttcctatcggcctcagcagacgacgtcgttgtgctctctgaagataacttacgagaaggaagttggtcaggacagaggagctctcgttgagttctatgctccttggtgtggacactggaaaaagcttgctccagaatatgcacagcttggtagcagcttcaggtaagccatatctgttgtaatcggcaaagctgactgtgctgagcgacaagagtttgt

SEQ ID NO: 50031 - DNA, 263 bp, Glycine max
gccatttgggagttaggttctgaacagtcagcgtccagcgagtgatctttcttcgtatcaacacctgaaattgcatcagctgcttcttcagcttgagaaatggcacaagaaacctttctattcacatctgaatctgtaaacgaaggtcaccccgacaagctgtgtgaccagatctctgatgcactgctcgatgcgtgccttgaacagggacctgacagcaaggttgcctgtgagacatgcaccatgaccaacatggtcatggt

SEQ ID NO: 50032 - DNA, 263 bp, Glycine max
agctttccctgaattcaaatcttcttctcatctcacaccccactgtcacctgtattcacaaagctcaacaaaaattataacaatacacaaagaagggaaaagacgaatcagaagacagagatatctatcaggtcgacgacgagtgcctcaaatggcttaacaccaaggagtccaactcagtggtgtacatatgctttgggagcttggcccgtctcaacaaggagcaaaattttgagatagcacgtggaatcgaggcctctggg

SEQ ID NO: 50033 - DNA, 277 bp, Glycine max
gacacatggcttccttaagctccttagtgctgctccttgcagctctaattctatcccctcaagttcttgcaaactatgagacacacccagtgtacaagcctcccactgagaaaccaccagtttataagcccccacttgagaagcctcctgtttacaagcctccagttgaaaagcctccaatttataagcctccagtagagaagccaccagtgtacaagcccccagttgagaaacctccagtttacaggccacctgttgagaaacctccagtgtacaa

SEQ ID NO: 50034 - DNA, 253 bp, Glycine max
caaaggtcaaatcataatggatattgatttccgttggggtggtgatcctagtcttattttggctgttgaagctgcacttgttgcatcaatccctatacagttgaaggatcacaggttttcaccattgtccgtgtgatatttcaacttgctgaagagatcccctgcatttctgctgttgttgtagctctgcttgctgagccaaagcccaggattgattatactctgaaagctgttggtggaagtttaacggcta

SEQ ID NO: 50035 - DNA, 265 bp, Glycine max
  unsure (1)..(265): unsure at all n locations
ctcgagccgctcgagccggtttgtataattcaataaaggaacacgcgacacacaacacaaatcccagatcatgcagaggattccgcattttcagaagatctggcagtagcctgggaacagaaaatgcggaatcctctgcatgatctggaatttgtgttttctttcgcttgtccgtttgtataattcaataaaggaaattaggcatgacnctcttgttgagtatgctctgcctatttgaaaatttccacacctctcataattgtcg

SEQ ID NO: 50036 - DNA, 273 bp, Glycine max
attttatctggttcgagcaaggttgtcttctaaaacctaggtcttcagttgtggcgagtaccaacagagggtgcaaggccatctatgcttctggtggggccagcagtgtggttttgagggattgcatgtctagggcacctgttgttagattctccactgccaagagagctgcacagttgaagtttttcttggaggatcctctcaattttgataccttgtcacttgttttcaacaggtcgagtagatttgccaggctccaaggtattcagtgtg

SEQ ID NO: 50037 - DNA, 274 bp, Glycine max
cacataatgaatatgttgctctggctcccagcatacccaacattccaacctggctgggacctagatgatgaaatccatgccacattcttcaaatgcatcagttggcaagtggaggaaaccttggatacaatcaattgcccttaccattatttctgtgacaaaacatacccttcaaactaccctcttgttgttgatatcttggtccttctctttacagcagcttcttacttggtgactcttgtcatattggtaatggacatgagttcaggaagag

SEQ ID NO: 50038 - DNA, 269 bp, Glycine max
atgagaaacttcctcgtcgcaaaatttttgacaaacctaagacgcgctgcttcactattctccctatggagtttaatcttgtggttcgtcagaagtttttaaattttgtgaggttcattatgaagaaaagggacaagcttagttgtcaagttggaatcaacccatactccatggaatggactggtttggccaatagattactgagtaagggcaacgatattctgtgttgcgattatgctagttttgatggtttgattaccaagcaagtt

SEQ ID NO: 50039 - DNA, 176 bp, Glycine max
gaaagagaatccgaggcgaagagaagagacaaattaagatggaggggaaggagcaggatgtgtcgctgggagcgaacaagttcccggagagacagccgattgggacggcggcgcagagccaagacgacggcaaggactaccaggagccggcgccggcgccactggttgacccgacg

SEQ ID NO: 50040 - DNA, 267 bp, Glycine max
gaagaacttggcctcttaactgacctatcacttctccacataaactccaaccgtttctgtggttctcttcccactagcttcgacaaacttcacctcctccatgaacttgacatcagcaacaaccaattctcgggaccattccccgaagttgttctttgcatccctaacttaaaatacttggatatcagattcaacaacttccacggcaacgttccctcgcgcctcttcgatgtcaaactcgatgcacttttcatcaacaacaacaat

SEQ ID NO: 50041 - DNA, 255 bp, Glycine max
ctaaaggctcgcgttgtagaatcaaatacagattttcctcacaagttcttctactgcttttggtggggtttgcgcagtgtaagttctgttgggcaaggtctcgagacaagtacttatgctggggagataatctttctatcttcattgctgtctttggattgattctatttgcatcacttattggaaacatgcagaaatatctacaatctaccactgtcagagttgaagagatgagaatcaaaaggagggatgcag

SEQ ID NO: 50042 - DNA, 134 bp, Glycine max
gtggacagccataagtgttagaattttatctcttcctgatctgagtctcatcacaaaggaacaattatgacgggagatcatacctcgctctgtacttctctgtgcctatgaagggatatcgtacttgctattgc

SEQ ID NO: 50043 - DNA, 243 bp, Glycine max
tgcaagaatggcacttcgttgcttggtgatgtccctttctgttctcttcactcttggtcttgcgagagaaagccatgccagagacgaagatttttggcatgctgtttggccaaacactcccattccaagtcattgcgagatcttctaaagcctggccctgcaagtgttgaaatcgatgatcaccctatgcaaattgaagaaacacagtacccgaaaaccttcttctataaagaagaccttcat

SEQ ID NO: 50044 - DNA, 254 bp, Glycine max
aaaattgctgcaatagagggtgcagaggacacaaaagttagtttaagcagcactgacagtggcaggagtgatggtgatgcagatgaatataatgatggtagtcctactatcatgcttgatgagatccttgatttgttgagccgcaggtgggatagaataaatggagctcaggcccttaaacttttaccaaaagagacaaaattacaggacctactttcatttcttggaccccttctgagaaaatctagtgaaat

SEQ ID NO: 50045 - DNA, 249 bp, Glycine max
gagtagttggagacttatttggtccagatttgttttagtaattaactgctttaattgttgcatgcagctaggaggtccccatatccctcttaagactggaagaagggatggtagaaggagcagagctgatgtggttgagcagttcctcccagaccacaatgagtccatttctgcagttcttgacaagtttggtgccatgggaattgacaccctggcgtcgttgcactgcttggagcacacagtgttggt

SEQ ID NO: 50046 - DNA, 249 bp, Glycine max
aaaacacaggccatttggtcgtttgtggtgggatgaaattgtgtcaacagtggtgacaagggccgagcctcacaaccaggccattctccaccctacacaaaaccgagtacttaccattagagagaatgcgagactacaagggtttcctgattgctataaactttgtgggcctgtcaaagagaggtacatacaagttggaaatgctgttgctgttcctgttgctctagcattgggatacacatttggttt

SEQ ID NO: 50047 - DNA, 244 bp, Glycine max
ctcgagccggtgatcgcaatgatatttccctacttcaatcagattttgggggttctgggtaacatcattttttggccgttgaccatatattttccagtggaaatatacttgagtcagtccagtactgtatcatggacgactaagtgggtactgcttcggactttcagcttttttggctttttgtttggattgttcactctcattggatgtattaaaggaatagtaactgaaaaaataagctgag

SEQ ID NO: 50048 - DNA, 349 bp, Glycine max
cgttaatgtaacgagagaatcagggcctgttagcatgacattgactataccaatgcataatgtttcacggcttcaggtaaagtatttgcagatagcaaagaaatctgcaactcatgagccataccggtgggttagatatgttacacaggcaaattcctacgtcgctcgtatatgatgctgttaagaaaactgtggcctccccctcccccctttgtttttcatttttattttcctcccacaattgctcttcacagtgtacagacatgctttgattttttactttattctttatgtgtagattacattctaagtcgagtatagatgccgtttgtagtttgccttatgtatc

SEQ ID NO: 50049 - DNA, 238 bp, Glycine max
gagcgcggcataacctaaacctatctttcttctctctctgtgtgtgcgcttcaacggcaaccagaagcagccatggccactgcaaggactgtgaaggatgtttcacctcatgagttcgttaaggcgtactcctctcacctcaagcgatccggcaagatgactgcaaagttgactgtatgtgaaactgcagatttaggagttgctcttatgatctgatggtactattcaactgctccat

SEQ ID NO: 50050 - DNA, 348 bp, Glycine max
  unsure (1)..(348): unsure at all n locations
gttggaggcggcacacaactcgcatctcagtcagcatgtcttaatttacttggtgtcaagggtgccaataaagaatctcccggtgcaaattctaggctactggccaccattgtagccggttcagtcctagctggggaactatcactcatgtctgcaattgcagctggacaacttgttaagagccacatgaaatacaacagatctagcagggatatatctacaattgtccaatgagctggccagagtacaattaacttgtgttagagactaataagcgaatcatcagataacgancaaaataactaagaaaattggtattgatggtgggaggcggtaaataaagtgatg

SEQ ID NO: 50051 - DNA, 317 bp, Glycine max
  unsure (1)..(317): unsure at all n locations
ctntntcttctctctcaacaacttcaccttcttcctcctcgatcatgtctcacttcaagggcaagtaccatgatgagcttatcgccaatgctgcgtacattggcactcctgganagggtatacctgctgctgatgagtcaacagggacaattggcaagcagttggccagcatcagtgtagagagcattgaatccaacatgcgagctcttagggagctgcttntcactgctcctggactgtctcaatatctcagtggtgtcatcctctntgagganacccctctacagagcacagctgcaggcaagccccnttgtgat

SEQ ID NO: 50052 - DNA, 272 bp, Glycine max
  unsure (1)..(272): unsure at all n locations
catggaccatagagcttggatattgacagattgagagaattgagactcttgttagatttgttagtcacgactgttgattcatacacattcncatcatggctcagctcattatcagctggcaaaagccttgaatttgtctacatccattctgcttctccagcagatgtctccgtggcgaactacgtgttggcctgaaagtggcattggaatgngttactgctttcttgtgtaagactgtgtagcatacaaatgtgcagcgangggagtgtctt

SEQ ID NO: 50053 - DNA, 300 bp, Glycine max
  unsure (1)..(300): unsure at all n locations
ccgaatgaacactggctatggtgagcgttcttcggacgtagaatgcgcaattctaggcttgctgtgtaagcacacaacatccgagcaaattagancattcctgaagagtgcgtgaaccaacaaaggactacattaatggcgacaatttagatcagactctaagacagttaaccaacaagctttcttttatgctagtgaacgcgaagtcaatcacaacgacatatttatattcggcatagataacaccgtactctctaatatcccatactatgaaaacatggataggggtggaggatttat

SEQ ID NO: 50054 - DNA, 233 bp, Glycine max
gtggtttcagtgagtgatcggtgttcacttgatccttcataagtcgtcatcatcaccatcatcatcaccgatgattgaagaaatgccgatcagaacatcgcatcggaagcctaagagctaccactcgacgtgaagcgggttgctatcactcactgactcgttcgcgtcagtcgcacctaacactacgcacggcgcatccgcgctatcgtcacgcagtcgcttgccgtctggca

SEQ ID NO: 50055 - DNA, 100 bp, Glycine max
gtctctgcttcatcacccgccatgtccttccaagatagtagaagatggcagacgctgatgatattcaacctcttggttgtggcaatggaacaggatggtt

SEQ ID NO: 50056 - DNA, 126 bp, Glycine max
ggatcagctggctttaagcctgaaaatcttgtgcaaccaaacatacctaacaccttgaatgcgatggtaacactctatgactctggcaaggctcggaccatcggtgtaagcaatttttccaccaag

SEQ ID NO: 50057 - DNA, 110 bp, Glycine max
tagacaatggcgtccttaagctccttagtgctgctccttgcagcactaattctatcgcctcaagttcttgcaaactaagggaatcgctcagtgtagaagcctcgcactga

SEQ ID NO: 50058 - DNA, 167 bp, Glycine max
ggaatcggctcgagctgatcaagatgaagaactgcggaagattcctcgggaagaaaattaatgatgctgtggtcgctgtcccagcttacttcaatgatgctcagaggcaggccacaaaggatgctggtgtcattgctggtctcaatgttgctagaattatcaacgaa

SEQ ID NO: 50059 - DNA, 147 bp, Glycine max
tcaaaatgtcaatgaactagtaagtacacatggctattcccagaatcagataattgtttggagataccccaccatgtcaaaggtacattatatctactgtgataagctgtatctctttaatttttacttgtttttaacatgttttac

SEQ ID NO: 50060 - DNA, 296 bp, Glycine max
  unsure (1)..(296): unsure at all n locations
cgttgttcactcttcttctcttgcggctagggctntagcgtactatcttctagatttaaggaagatgggcaagacactgctcacatcagtattgtggtcgatggccatgtcgactctgagagatcgactactactggtcacctgatctacatgcttggatgcattgacaagcgtgctattgagaggtttgagaaggaagctgctgagatgaacttgaggtctctcaagtatgcctgggtgctagacgaacttaaggctgagcgtgatagatgaatcacgactgatattgctttgtg

SEQ ID NO: 50061 - DNA, 322 bp, Glycine max
cagcacaaagcgggtgactgtctgttcaagctaccatctctctctctcttgcttagtgctgcttgccagatgtaaggtgggccgtcgaacctttcctactcacagctgaatcagtgtccaaggggcaccctgacaagctctgtgaccagatctccgatgctgtgctcgatgcatgcttggaacaggaccctgacagcaaggttgcctgtgaaacctgcaccaagaccaacatggtgatggctttcggagagatacaaccaagccaacgtggactatgagaagatgtgcgtgatcatgcaggacatgggtgttgctctgatga

SEQ ID NO: 50062 - DNA, 272 bp, Glycine max
  unsure (1)..(272): unsure at all n locations
tgtgagctataagctagtctatcgtgaggagaatatgaagttgattgttttctttgttgctgcagtagtctggtagcatggccatgccatggcgcaggctacgannaggtccctctccgaatgataactggctatggtgagcagtcttcggaggtanaatgcgcaagtataaggcttgctgtggaagcacacaacatccgagcttttaatacgcatcctgaagagtgcgttgaaccacgaaagactacattaatggcgaacaattagaccag

SEQ ID NO: 50063 - DNA, 180 bp, Glycine max
  unsure (1)..(180): unsure at all n locations
gtntntcgatgacaagctgggggcgctctgcatgcaatggttggaagacaaggtcttttcaatcagagatgctgccgctaacaactttaagcgccttgcagaagagtttggtccagagtgggcaatgcagcatataatcgctcaggtgctggagaagatccacaacgcacactatgtata

SEQ ID NO: 50064 - DNA, 316 bp, Glycine max
  unsure (1)..(316): unsure at all n locations
cattcattcatctcagcaggccttctagtcaagcattaacattgcagcacaatgcagaagtaacaaaaagcagtcgtatggagctggctggggctgtagcacatacagtgaccnacactcttgcagctgcacctgctgcagatgtgccttcatccacacctgctaattctgccttaccagcaataaaccagaatatggctcttgtcaaatgtaattggacagaacatatatctcctgaaggcttcaagtattactataatagtgtcactggtgatagtcggtgggagaacctgaggagttgcatacatgaacagca

SEQ ID NO: 50065 - DNA, 314 bp, Glycine max
  unsure (1)..(314): unsure at all n locations
caacactactacaacaactataaagaataggagcttgaccatagtgaagagcatgacagatattttgaagctttaaggcctagcattctttccttgttgaatcatctccgcatctatatccctgagctgtttccagatctaaacaaggtagtattgctggatgatgatgttgtagtacaacatgacatatcttctttatgggaactggatcttaatggcaaagtcagtggttcagtngtcaagtcatggtgtgagaacagttgctgccctggtnaacaatacgtcaacttcttgaaattttcacatcctatcat

SEQ ID NO: 50066 - DNA, 311 bp, Glycine max
  unsure (1)..(311): unsure at all n locations
ggaatcggtcgagatggaataatgaaggacctgtcattgtttcaacaggacagacttatgagcgtacttgtattgagaagtggttgcaagcatggcacgggatctgggtcataacacagcagactctgactagtactgttctcacacctaactatgtattacgggagctcatagcagaatggtgtgaagcaatggaatagaggcaccaaaagaataagcgattacnacgtagtaaatagctcagcatatcatctgtggcaaagtagatgaagtcgtttcaaggtcaattggagtctgaagacagagatagt

SEQ ID NO: 50067 - DNA, 335 bp, Glycine max
gtgagctataagctagtgtatcgtgaggagaatatgaagttgtttgttttctttgttgctgcagtagttttggtagcatggccatgccatggcgcaggctaccaaaggttccctctccgaatgaaaactggctatggtgagcgttcttcggaggtagaatgcgcaagtcttaggcttgctgtggaagcacacaacatccgagcccttaagaccattctgaagagtgcgttggaacaacgaaggactacattaatggcgaacaatttagatcagactctaaaacagttaaccaacaagctttcttttatgctagtgaacgcgaagtccatcacaac

SEQ ID NO: 50068 - DNA, 215 bp, Glycine max
gaatctgctctagctctctatctctatcgactggagtagggagcacgccgcacgagcccttgccggtgccgccaaaatggtgaatgttcctaagaccaagaagacctactgcaagaacaatgagtgcaagaagcacacgctccacaaggtgactcagtacgagaatggtaatgatagccggtctgcccatggaaagcgctgtatgaccgcaagca

SEQ ID NO: 50069 - DNA, 309 bp, Glycine max
  unsure (1)..(309): unsure at all n locations
tctccggcggccggtcgtcgtcgcgccgtgagcgcgggacggccgagaggaagaggaggagcgggaagaggagcaaggcggtggcggtgggcaaaaggcgaggagctacaggcaggtgaaatcccggatcagagagggtccgtcatcgtgatccggcgggcaccgaccgcgctggtcgccggcgaagacaagaacctcgccgtcctctgcttcgaagtgaacgccagcttcgacgataaggtgttcttcgcgggcacngacagcgcgcttcagaagatggataggctggcgaactgctggcgttcgggc

SEQ ID NO: 50070 - DNA, 303 bp, Glycine max
aaatattgtttcttcgattataaatttgcttacaagaaattaaatcactgttcattttcatgcatcaattaatattaccaagtaatttctttatgtgatgcagaatcacaaacttgtagttgtggaagctgatggaaattatgttacaccatttgcggttgatgatattgacatctactctggtgagagctactcagtgctccttcgcacggaccaagatccaaacaaaaattattggctttcaattggggtgagaggaagaaagcccaatacgctcaaggcctaacgattctagactataag

SEQ ID NO: 50071 - DNA, 100 bp, Glycine max
cgccttttcagggaaggaccctaccaaggttgacagaagtggtgcctatattgtaaggcaggctgcaaagagtgtcgtggcaaatggccttgctagaagg

SEQ ID NO: 50072 - DNA, 119 bp, Glycine max
agtcttgtgtgtttgtgtgtgttcacacttgccagccagcagaggcgcctgcttgtacctagattactgtttccattgtcgtcatcatcggctagcattgtcatgatgtcagtttgggt

SEQ ID NO: 50073 - DNA, 299 bp, Glycine max
gagaaattaaattctggagttgatccttgcatcgcatttgttctctcctctgaagctgcattggctggagctcagtcaacggtagacatgcaagcacaggctggacgttcgacttacttgtctggagagattctttcaacagttcctgatcctggtgctatggctgccgctacatggtacagagccgcggccttagctgtgaaggccaaataccagagctaagctatatacttgaaatgtcctgtttgtgcggatatacccaagttttgttccatattttgtactctcctgtaaccatt

SEQ ID NO: 50074 - DNA, 159 bp, Glycine max
gctgttagggacatgcgtcaaactgttgctgtgggagtcatcaagaacgttgagaagaaggatctaccggagccaaggtcacaaggctgccaaagaagaatgatcgtcggtggttcatcagggatgtgtacaatatgtggttcttctgacctgtgctct

SEQ ID NO: 50075 - DNA, 160 bp, Glycine max
  unsure (1)..(160): unsure at all n locations
caaacacacacacacacaaattctcagactcaaatcccaagtctcctagaacccaaattcgcagtgaanatgagagaagtcttgcacatccagggagggcaatgcggtaaccagatcggtagcgagttctggtaggtgatatgctacgatgacggcatcg

SEQ ID NO: 50076 - DNA, 203 bp, Glycine max
cttcttccatttcttcagaggcgaactcagatgtccaaactaattttaacaaacgcattaagaggtttatttgggtacatggcccgcagtggcttttgctccagaaaggggaaaggaacacgcgggtagatgatttctagcaggcaggaagtcctgtgcggtgtcaccatgagcatctccagctgtactagtgccattggaat

SEQ ID NO: 50077 - DNA, 188 bp, Glycine max
  unsure (1)..(188): unsure at all n locations
ctcggaatcggctcttgctcgagcgaatcggctcgagaagacattgtatgttggcaaccagacaanaggttcatctcagcactctagcttcttggctggaggagccacatcttctgctgggagactagtgattgaaaatggtgtcttgaaggctgtttggcctcacagtggtcattatcgtccgacag

SEQ ID NO: 50078 - DNA, 310 bp, Glycine max
  unsure (1)..(310): unsure at all n locations
cgtagtagctcggatcggctgagctatgnttatctatgttagacaaacatntttgcaatattctactcagattaatgaagctaaatctttttgttgtgcagactcctctgagctggctctttatctatccggagggactttataagctcatgacatacataagggacaactacaataatccaccggtgtacattacncgaaatggcgttgcggaatcanagaatgactcacttgcaatcaatgaagctcgataggatggtatttcgattagataccatgatggccatctcaaatccctgcttcatgcgat

SEQ ID NO: 50079 - DNA, 154 bp, Glycine max
tccagacagcaggcagcagccatgtccaaggtcttcaccctcgacgcggtcgccaagcacaactccaaggaggattgctggctcatcatcggcggcaaggtgtatgatgtgacgaatttttggtagaccacccaggaggtgatgatgttctgtt

SEQ ID NO: 50080 - DNA, 371 bp, Glycine max
actttgttcactcttcttctcttgcggctaggtttagcgcagttcttctatatttaaggaagatgggtaaggacaaggttcacatcagtattgtggtcattggccatgtcgactctgggaaatccactaccactggtcacctgatttacaagcttggaggcattgacaagcgtgttattgagaggtttgagaaggaagctgctgagatgaacaagaggtctttcaagtatgcctgggtgctggacaaacttaaggctgagcgtgaaagaggaaccacattgatattgctttgtgcgagtctgaaacaacaaagtattattgcacagttattgatgcgcctggacatagggattcattaagatatgttactg

SEQ ID NO: 50081 - DNA, 340 bp, Glycine max
  unsure (1)..(340): unsure at all n locations
atcaccgaaatcgagattcttcgaattgtaactctctttcagtttcaagttggaaactttttcgattttcgctttctggaggtgtgaattgttgtttgacagtcacaagcaatggtgaaggacactgcgtattatgacatattaggtgtcaattatgatgcatctgctgcagagatcaagatagcttattatgtcaaggctagaattgttcagcccgataanaatcctgaggacctaaggccgcagaaactttcagaacttggtaggcttacangtctaagtgatcctggagcgtcgcatatgatacatgcaagaggatacacagatcatgatgactaca

SEQ ID NO: 50082 - DNA, 290 bp, Glycine max
ctcgagctcaggcgctgctgcccttcagtccttcagcaatggtttacgtgaagtcacagaaatcaaaagcctacttcaagaggtatcaagtcaagttcaagagaagaagagagggaaaaccgattaccgtgccaggattcggtgatatcaggacaagacaatatacacccgaatatcgcttgtgtcgtcagacaagacatgtgcacaatatatctgcacatctgcgaatgtctctgagatataatacgcagtatgctgatagccaatacgactatgatgccgtgcgaacc

SEQ ID NO: 50083 - DNA, 270 bp, Glycine max
  unsure (1)..(270): unsure at all n locations
ggctcgagcgaccgaggacgttaccctagacttnntctctttccttattctatttcaaacttccaccagtgatggcagagttggctccagaaggaacacaatttgatggtcgccaatatgatgctaagatgagtgaattgctttccactgatgggcaagaattcttcacctcatatgacgaagtctatgacagcttctgatgcatgggattgcaagagaatcttctgcgaggcatatatgcctatgcgtttgagagggcttctgcaatcc

SEQ ID NO: 50084 - DNA, 337 bp, Glycine max
  unsure (1)..(337): unsure at all n locations
cggctcgatgctttattaggacttttttgagtgaaagactagaaggggaagataaaatgtaatgattaatttcttattctgttacttgagttttagcagcacgtggttctaagaggaagccccaaagtttcaaggatgaggatcactatataagttcaataccanaaaatcaacatatggaggctggccttacagtanaagctaatgaagactttgcttctaatagattggaagcagctgtccttgatctagtggcagatgatggtactggcattaagaacaaagatctatgtatcactgggcatagcagggtanaagtacatcaagttaacaatgg

SEQ ID NO: 50085 - DNA, 379 bp, Glycine max
  unsure (1)..(379): unsure at all n locations
ttcggctcgagccaagttccacacacgataagacatagntagtctctcttctctccgtcaccgtcaccggcgatctacatttgaacccgatccagccaatagatctcagaaatccaaatggagaacctaatctctttggtcaacaaaatccagagagcttgcaccgccttaggcgaccacggagaaaacagtgcactcnccacactatgggactctcttcccgccatcgccgtcgtcggaggccagagctcaggaaagtcctccgtcttggagagcgttgtcggcaaagatttcttacctcgtggatcaggtcgtcgtcgctctctctctgtatgccttaaatcgatgcttgtgaattgaacttatgcgtgcgaatcgt

SEQ ID NO: 50086 - DNA, 356 bp, Glycine max
  unsure (1)..(356): unsure at all n locations
caacacattagttcattctctttgcgcagttcnctacctctcctttcaagatgcagatcttcgtcaagaccctcaccggaaagaccatcaaccctgaaggtgaaaagctctgaaaccatcgacaacgtcaaggccaagatccaggacaaggaaggaattcccccggatcagcaacgtctcatcttcgccggaaagcagctcgaggacggccgtaccctcgccgactacaacatccagaaggagtcaccctttacctggtccttcgtctccgtggtggcatgcagatcttcgtcaagactctgcactggcaanactataaccctagacgtcgacagctctgacaccattgacaacgt

SEQ ID NO: 50087 - DNA, 391 bp, Glycine max
agacactatatatatgtatatgtatatgtaagtgagttgtggaggtggaaaagagtggaaatggcaggtgcaagaggagggtatcgggaagccgaacagaaggttggcctacgggtccaagttgctgctgataggggactcggcggtggggaagtcgcagatactagctcggtttgcgaggaacgagttcagcttggactccaagtccaccatcggtgttgaatttcagaccaggaccttggtcatagatcacaagaccgttaaggctcagatctgggacactgctggccaagaacgatacagagcagttacgagtgcatactacaggggtgctgtgggggcaatgttggtttatgacatcactaaacgccaaacctttgatcacatacca

SEQ ID NO: 50088 - DNA, 277 bp, Glycine max
tggagggtatcgccccggaccagcaacgtctcatcttcgccggaaagcagctcgaggacggccgcaccctcgccgactacaacatccagaaggaatcaacgcttcacctcgtcctccgtctccgtggtggcatgcagatcttcgttaagaccctcaccggcaagactattaccctagagagtcgaagctcggcaccatcgacaacgtcaaggctaagattcaggacaggagggatcgccccagaccacagaggtgatcttgcgggaacactcgagga

SEQ ID NO: 50089 - DNA, 153 bp, Glycine max
ctgcagcaacaccaacaccacaaaggcaatatgggcacagctccttgctgcgacaaagcaaacgtgcagaaaggtccatggtccccagaagaagatgctaagctccaatcctacatagaacagcatggcacctggtggtactggattgctttg

SEQ ID NO: 50090 - DNA, 228 bp, Glycine max
agatcgtgcgtgacacctgcaggaacatcggcttcgtctcatacgatgtgggacttgatgctgaccactgcaaggtcctagtaaacattgagcagcagagccctgatattggcgcagggtgtgcacggcaactttacgaaaagacccgaggaaatcggtgctagagaccagggcaatgttggctatgcacggacgagacccagaatgatgccatgagtcatgtcttgc

SEQ ID NO: 50091 - DNA, 325 bp, Glycine max
ctaacaaatatgcttggcaagaccgaggtcgatttgtcccagccttaccggagaaaagagctattgttagttacactagctcatcctattcccccagctctttcttttctgctgtttcccaatgaagttttcagatcagtggcaatctcagtcccctggctatgaccctgctttgttctttccctgagaaacagttcagcagtgaccaccacccacatgacatttcaaagcacctccttaagccagccagagtaggaccagttagacccagggtgtggacagctccttagcatcttatctctgtgctgttttggttttgtacata

SEQ ID NO: 50092 - DNA, 106 bp, Glycine max
gacccgccaacatgggccgcgttagcaccaaaaccgtgaagaaggcggcccgggttatcatagaaaagttctacacgcgcctgggcaacgacttccacacaacata

SEQ ID NO: 50093 - DNA, 324 bp, Glycine max
  unsure (1)..(324): unsure at all n locations
cttcaccatccccaccaccaccttattattatcattccccacctccacctaaagtgcatgtacaccctccctactactaccactcaccaccaccaccatccccatctccaccacctccttattattataaatcccctccaccaccatccccttctcctcctcccccctactactatcactctccaccaccaccatctccttctcctcctcctccctactactaccactctccacctatctacaagtaagctcaaattgtgaaagcaccattcatgatgaatcatgttctagttttcatcgaggactcanaggcaagctctattt

SEQ ID NO: 50094 - DNA, 309 bp, Glycine max
cacctctcctcgttcacgctacccctttctgctcttcttctacctttcaagttttaaaagtataaagatggcagagacattcctatttacctcagagtcggtgaacgagggacaccctgacaagctctgcgaccaaatctccgatgctgtcctcgacgcttgcctcgagcaggacccagacaacaaagttgcctgcgaaacatgcaccaaaaccaacttggtcatggtcttcggagaaatcacgaccaaggccaacgttgactacgagaagatagtgcgtgacacctgcaggaacatcggcttcgtctc

SEQ ID NO: 50095 - DNA, 185 bp, Glycine max
gtatatcgtgaggagaatattaagttgtttgtagtctttgttgctgcagtagttttggtagcatggccatgcatagtgcaggctatcaatagtgtccatctcggatgataactggctatggtgagcgttcttcggaggtaaaatgcgaaagttttaggcttgctgttgaagcacacaacatccga

SEQ ID NO: 50096 - DNA, 147 bp, Glycine max
aaagcgtcttcataaacgcctttattctccgtttccgtatccttcccgggattcgatttttcatctctgaaaatgagagagtgcatctcgatccacattggtcagggcgggtatccaggtcggaaatgcttgctgggagctctactg

SEQ ID NO: 50097 - DNA, 277 bp, Glycine max
  unsure (1)..(277): unsure at all n locations
cggaatcggctcgacgagaatgagaatggatgctgtgggaagttgaggggaagtgggttgttacaggagcagttgatgtagacattggtgcaacccttctgctgagggtggaggagaagatgagggagttgatgatgcagctgttaagggatgtgacgattgtgacacattcagacttcaggagcaacccgcattcgataagaagcagtttgntaccttcatgaagagggttatcaagaatntgactcgcaagctcgatgcagagcaacaggagttt

SEQ ID NO: 50098 - DNA, 116 bp, Glycine max
aagctatccacgtcgcatgatcatggattacttctctatagaaaatatgtatttaccaaaaaatagcgagacatgacatctgccatctcttgctagacatgcagtgcaaatagggt

SEQ ID NO: 50099 - DNA, 120 bp, Glycine max
cgccatttcaactgagaaaatcagagccaagtaccccgactacgaggtcacctgggctaacgacggctactgagcactcgcagcccggggcctgctgcctccagcagccacttcagagcc

SEQ ID NO: 50100 - DNA, 144 bp, Glycine max
  unsure (1)..(144): unsure at all n locations
ctcttctgctcttgctgtttcaggtgtagcgcagttcttctagacataaggtagattggtaaggaaaatgttcacatcagtactgtggtcattagccatgtcgactctgggagatccactaccactggtcactgatntacaagc

SEQ ID NO: 50101 - DNA, 257 bp, Glycine max
  unsure (1)..(257): unsure at all n locations
cgatcggtcgagtaaaatctcgtgacagatacatcatatgactttcattactccttcctatcgctgtatgaattctagttataatgtttctatttgcacacttcgtgtgatgctggtgcagttccaatatggcaatacaacctgtgaggatatacaattttgtanagactgttggtaggctctgtatgaatagtatagtctctatgtagctatancaactacttgcatgttgatgtcagtgctgctgatgccgatga

SEQ ID NO: 50102 - DNA, 313 bp, Glycine max
agttactggtggagatccaggccgcagaagatgcacttggtggcatatacggtgttctgaaccagaagagaggacatgtattcgaggagatgcataggcctggataggcgctctacgacatcatggctttcctctctgtcatcgagtcctttgcgttctcaagccagctgatggctgcaacctctggtcaggcgttacccagtgtgtgtttaaccactgggacatgatgggctcggatccatcggaggctggctcccaggctgcccagctggtgctgcatatgcgcaagaggaagggtcggaaagaacagatg

SEQ ID NO: 50103 - DNA, 135 bp, Glycine max
caacttcacacattcatacgtggtgtggttactgctgctcttttctcttttctttactctgtagtactctctgcccctttcttggtcgttgaagacggctactgagcttgcataagcttgtcttccattaacata

SEQ ID NO: 50104 - DNA, 337 bp, Glycine max
cattatcatctctcatcagcatctctttcctttccagttttttctctctctttctgacctgggttttcctggactctagttgttttttgaaggatgttgtgacaatctaattgtgttttacttgatctgcagactggggacctaagattgatgtcgttggattttgtttccttgaccttgcttcaaattatgtccaccaaaatcgctagtagattggcttgaagagggagaaaaacctatttatgttggatttggtagccttcctttacaagaaccagagaaaataacacgaattataattcaagcactggaagacacagggcagagaggtatcatc

SEQ ID NO: 50105 - DNA, 122 bp, Glycine max
  unsure (1)..(122): unsure at all n locations
acaaattgtatctattgctgacttaataagatatagaagaanaagagataagttagtggatcgctcttctgctgcacggatacctacaacgtggggaccattcacagcttagctgtacagat

SEQ ID NO: 50106 - DNA, 216 bp, Glycine max
gatcactatgaaactgctcgttgtgtacagatagtagttcagcattacaagaatcttcaaaatagcaatgatatctttaagattcttgtattgctgaagtactttctgtacaccagagctacaagaatcttcaagatatcattgctatattgggaatggatgagctcagtgaagatcataaatttacaattgcacgatctcgtaagattcagcgat

SEQ ID NO: 50107 - DNA, 116 bp, Glycine max
caattcaacattcatacgtggtgttgttactgctgctcttagcgtcaatctatgctctgtagttctctcatcgccgaacggcttcgtggtcgactgcttctagagttgatgaagcg

SEQ ID NO: 50108 - DNA, 183 bp, Glycine max
tcgcctcttgattgtcatgcactatgtgctttgtctgctgttacggatgtagcacttgtcacatctttgagggatggaatgcatcttgtaagtgatgaatctgcggcctgccaagatacacagagaggggctctcattctcagcgtatttgctggtgctgcacagtcacttagtgctgaggct

SEQ ID NO: 50109 - DNA, 249 bp, Glycine max
tgccacaaaagaatttctacagtctctgcatagtgcttgtgatgaagctggggcacttctcgtttttgatgaggttcaatgtggtttaggtagatcagggtttctttgggcccatgaggcatttggtcgcttcccggatatgatgacccttgcaaagcctcttgctggaggcctacctattggagcagtcctagtgactgagagagttgcttcttctataaattatggtgaccatggaagcacttttgc

SEQ ID NO: 50110 - DNA, 121 bp, Glycine max
cttggctggaagacttccttgtattcctggtgaattaccaactctcaatgattgggaaaatcacttgacaactatgtttcctgaggtcaggctgaagagatatttggagatgagaggtgct

SEQ ID NO: 50111 - DNA, 340 bp, Glycine max
  unsure (1)..(340): unsure at all n locations
agcaaacaaagtgaagaaagagcttaaatgagtgagacagcgactcttcatgcacaaacaaggacacccatttcttctttggattcaatggctcatcaccacccgcattatcggtcacccttcggagacacaacgttcaccaaattgttcgttggaggactagcttggagactcccaccgaagaaatgcgcaaatatttcgagcagttcggtaacattcttgaagctgtcatcatcactgacaagaacaccggaaaatccaaaggctatggattcgtaacattctgtgatcaagaatcagctagaagggcatgtgctgatccanacccaataatagatgg

SEQ ID NO: 50112 - DNA, 335 bp, Glycine max
aacagtgtattttcagaaatctagaaacttgatgatgcaggggatgggtatagcgtgaaaaggaaagacgtgccacgaaactatacggaactgaaatctcagtcgaagcaagcaatgggcaacgttcagtcacctcccaacaatgatcctcgatatgtttcagcaacagagcttttactcaaaaggaacttgaagacttgaggtctctgttcatcaatctggcaaatcaatcccagagcaacgggaaatacatctctccctccgtttttcagtcatattttggacttcatggccctcttggggagaggatgtttgatttagttactcaggagcgc

SEQ ID NO: 50113 - DNA, 350 bp, Glycine max
gagaatggctccaagggaataatctttttggctgtgtacagcttctcagcactgtcaaagagtcgttgtcttacggaggataatggacttgttatgaacttctacaaggattcatgtcctcaggctgaagacatcatcaaagaacaagtcaagcttctctacaagcgccacaagaacactgctttctcctggctcagaaacatcttccatgactgtgctgttcagagttgtgatgcttcactgttgctggactccacaagaaggagcttgtctgagaaggaaacagatagaagctttgggttgagaatttcaggtacattgagaccatcaaagaagctttggaaagggat

SEQ ID NO: 50114 - DNA, 221 bp, Glycine max
tctctctgattcatctctgatcaccgcttggaccgtgaaggatgtttcacctcacgatgtctagaaggcttacggctctcatctcaagcgcatcggcaagatggagcttactgagtcgactgatattgtatacaccgcagaatttaacgaatcagctccatatgatcctgactggtattatgttagggctcgctcaatggcaagaacgattgatttgagag

SEQ ID NO: 50115 - DNA, 250 bp, Glycine max
atcgaaacgaggtcgttttgtgttccgccgaatcaccggaggttgtagcaggctagcagctatggatctcgcatccaatctcggtggcaagattgacaaagccgacattctctctgccgttcagcagtatgagaagtatcatgtctcatatggaggtccagctgtagagaggcatgctaactataccgatatggtcattaattactacgatcttgtcaccagcttgtatgacttcggctgcggggaatct

SEQ ID NO: 50116 - DNA, 349 bp, Glycine max
atgaggttgatgaattccatgatgctgattggagtgatctcactgaagcccaattggaagaacttgttctgagcaatttggacaccattttcaagagtgcagtaaaaaaaattgttgcatgtggctacattgaagacgttgctacaaaggccatcttaaggtctggcatttgttatggatgtaaagatgctgtgtctaatgtagttgacaagggtttagcatttcttagaaatggccaagagattgatccttcacgagagcactattttgaagatttagtgcagctagagaagtatattttggctgaattggtctgtgttcttcgagaggttaggccattgttcagtac

SEQ ID NO: 50117 - DNA, 352 bp, Glycine max
caaagatagcaaaatatcttgaagaaaggtgctacaaagaactcagatatgagcacatcaaactggtcaatattatagcagaatccttcaacaagttgctttccatttgtaaggtgcagatagcgtattttgctgttgatgtgcttaatgtaattttggagctcttgagctattctaaggatgagaccattcagacacttggttgccagtgcttatcaaagttcatctactgtcagatggatgctacttatactcataacattgaaaagttggtgccgaaagtgtgcatgctatcacgggaacatggtgaagcatgtgcaaagcgctgcttgagggcacaaagcttgcaatg

SEQ ID NO: 50118 - DNA, 347 bp, Glycine max
  unsure (1)..(347): unsure at all n locations
tcggagtttcaacattcaacaatggtacctcaagctttgtcagtgcctgcgagtgccagcttcactatcgcttctcgcaccagaagtccctcccacctcgtattttctcacagttatggtgcaattgaagccaaggggaatccaccaataacacccgcagtgatgactcctggaggacctcttgatctctcactgttttgtttaggaatcgtataatattcataggacaaccagtcaattcacaagtggctcagagagttatatcccagcttgtgactctagctactattgatganaatgcagatatactggtatatatacatggccctggtggaagcacatattct

SEQ ID NO: 50119 - DNA, 264 bp, Glycine max
aagattttatccaattgaaattttacaaatgactgggataaacttaagaattcaattattgaaattgaataagtaaacaatttaattggattggtcgaatggtatcaaaaaaatggagtactaactcccatttcttatttattattgaattaaccgatcaacttgctttgttatcgaacatttctttttgatttcaaaattttccggaaaaaatttgaatctatttttatatgcgaatcaatcctactacttctggtcctgagg

SEQ ID NO: 50120 - DNA, 304 bp, Glycine max
aagattttatccaattgaaattttaaacatgactgggataaacttaagaattcaattattgaaattgaataagtacacaatttaattggattggtcgaatggtatcaaaaaaatggagtactaactcccatttcttatttatgattgaattaaccgatcaacttgctttgttatcgacatttctatttgatttcaaaaattttccggaaaacatttgaatctatgatcatatgcgaatcagtcctactacttctggtcctgaggactctgcgcttgaacacagaaatctgggacgtatcgccca

SEQ ID NO: 50121 - DNA, 331 bp, Glycine max
  unsure (1)..(331): unsure at all n locations
agaaaatgcagcagcaacccttttcagcttgtcacttgcagatgagaacaagataattattggcgcctcaggagctataccggctttagtggaattgctccaaaacgggagtcctagaggaaagaaggatgcagcaacagcattgttcaatttatgcatttatcaagggaacaagggcagggcattagggcaggtatcatcacagcattgttgaagatgcttacagattcaagcanatcgatggttgatgaagcctaacgataatgtcagttcttgcaagcaactagaggcannagttgcatagtanagccacactataccagtttgatag

SEQ ID NO: 50122 - DNA, 100 bp, Glycine max
tcatcatgcacttttaccgcaaagaaggtggcttctacggtggccatagaattgttggggcgcaggttccgctggggtgtagcttggcttttgctcagaa

SEQ ID NO: 50123 - DNA, 145 bp, Glycine max
  unsure (1)..(145): unsure at all n locations
acaggtntacggacaatcaacaccacaaaganaaacaatgaatcgcggtttcaacatagggacagacttcatcgcaaataaccgaatcccggccattgattttgcaacagtccactgctactccgaccaatgggtatcgagctca

SEQ ID NO: 50124 - DNA, 340 bp, Glycine max
caagttcgctctcgaagatatcatgcaaaccgttgattagtctcttttgcccccttatcatacaagggtcgcgaggggaaggtgactcaggtctaccgtcgaaagtgggtgattcacattgagcgcataacccgcgagaaggtgaatggttccaccgtcaacgttgggattcacccctccaaggttgtgctgaccaagctcaaattggacaaggaccgtatagccattctcgatcgcaaggccaagggtcgcgccgccgccgataaggagaagggtaccaagttcgctcccgaagatatcatgcaaaccgttgattagtctctttatgccccttatcata

SEQ ID NO: 50125 - DNA, 361 bp, Glycine max
gtgattcctgtgccttttcctcctccagcaggagatttcaccatattggctggagactggtacaagagaaatcacactgatctgagggccattctagatgggggaagtgatcttcctttccctgatggccttatcatcaatggtcgtggttccaatgcttacgcattcacagtggatcaaggcaagacttacagattcaggatatcaaacgttgggctcacaacttccatcaatttcagaatccaagggcataagatgctgctagttgaggtggaaggaatccatactctccaaaacacttatgattcccttgacattcatttggggcagagttactcggtgttagtaactgctgatcaac

SEQ ID NO: 50126 - DNA, 341 bp, Glycine max
gagagaagcattggttgttattaatggcggagggtaaggaagagagtaaatctagcgaggagagcgtgaagctgttcgtaggtcaagtgccgaagcgcatgtcggaagacgaagtgcttgcaatgttcaaggagctcgctttggttgacgaggtcaacatcatcagagacaaagccactcgtgcctcccgaggttgttgctttgtaatttgtccgtccaggagaagcggataggcggtccatgatatgtcgtacataagcaagcgaacgctcgctggggcatctagtccgttacaagtgaagtatgcagatggcgaattggaaagattagaacacaaactc

SEQ ID NO: 50127 - DNA, 310 bp, Glycine max
gatactcatatctgtagataggaggaagatattgctggcaactgcagatgcattggagataaatgatagtacgataaggcatgaagatgaagctgatgacgctgatgctgtggtatctggatatgaatcatccttgatatcacgtgtaaccctgaagcaagagaagatctctagtcttgcaaagtctgtgcgcgtgctggcagatatggaagatccaattggtcagatgttaaaaatgaccgagctagtagatagactcatcgtggagaagacatcatgtccttggggtgtccactggttatatgtgagt

SEQ ID NO: 50128 - DNA, 348 bp, Glycine max
catctatgttgacgatttgatttatgctggtaatgacaagggtatgatgattgagttcaagcagtctatgatgcaagcttttgacatgactggtctaggaaagatgagattctttcttggcattgaagttttgaagaaatcataacggattttcttgtgtcaaagaaaatatgccactgatatctggaagaagtttgcaatgtctaagagcaaacttgtgaaaagtccaattgtttcaggctttaaaattattaaagatgctgatggcgcactgtggatgacacttatttcaagcaaattgttggaagtttaatgtatcttacagctacaaggtcagatataatgtat

SEQ ID NO: 50129 - DNA, 341 bp, Glycine max
atttagccatggagtcacactgcgcggtttgtaaggaagctttcgaattaggaactgcagttagagaaatgccatgcaagcacatatatcatcctgaatgcatattaccgtggctcgcacttcacaactcttgccccgtttgtcgccacgagttacccgctgataccccgaatccaaatcaaaatcaaaatccgtctcaaaatgttgccttgaacgaggaggagaatgtggggttgacgatttggaggttgcctggtggagggtttgcggtgggtagattctccggtgggagaagaggtgctgagagagagcttcctgtggtttacactgaaatggatggt

SEQ ID NO: 50130 - DNA, 344 bp, Glycine max
  unsure (1)..(344): unsure at all n locations
atgatcgatggcaagcttttaggggtgaaagcacagatgccaaagatctaatctttactctgaagcggtcgtcgcttatccagtttaagaccaaattacatgtgtttttggccaataacaccaaagaagatgtttgtgactttaaggtcaaaggtagttggttggaacgatcctgcgttgtttatgctggtgaatctaacaacatcgttgcccaggtaaaacgatctcctctgtttaaataaccataacaatctctctctctcttttttccttcttttaccanaaatataatcggttttaatcaactactttcagtatttattcaaacaatttaattagaatgt

SEQ ID NO: 50131 - DNA, 336 bp, Glycine max
gagaaggtatgctatgggaaggacgcgctacatgataacatctttgactgcacatttgactagaattgcagttggtgattgtcgtgatggtatccttttatattcttatcatgaggaagcaaaaaaattggagctactttacaatgacccatcacacaggatagttgctgattgcattctcatggatgctgatactgctgttgtttcggatcgtaaaggaagcattgctgttttatgttcagatcacttggaagcatcagacaatgcaggtgcacaatgcatcatgacactaagctgcgcttatttcatggctgagatagctatgagcatcaagaa

SEQ ID NO: 50132 - DNA, 341 bp, Glycine max
  unsure (1)..(341): unsure at all n locations
aanagaatgaggcaaccctagctggatacgtcaaacatcatcatgtcggacgaagagcaccatttcgggtccaaggcagacgccggtgcctccgaaacctaccccttccgcagccggtaccattcgcaggaacggctacatcgtcatcttaggacgcccctgcaaggttgtggaagtttcgacttccaaaactggcaagcacggtcacgccaagtgccactttgttgggattgatattttcactgccaagaaacttgaggatatagtgccctcttctcacaactgtgatgttcctcatgtgaatcggactgattaccagctcattgatattgctgaggatg

SEQ ID NO: 50133 - DNA, 336 bp, Glycine max
atgccacgggcaggaaacattgggcatattactcgaattgttaacaaacttgttcacctggctcataatcgaaacctcatactgacatgtcttcagacaaacgttctactctctctgctgacatgaatatgccaacagtacctgctgctggaaaacaagtgccacgggcaggaaacattgggcatattactcgaattgttaacaaacttgttcacctggctcataatcgaaacgctcatactgacatgtcttcaggaaaatagtgagtggaatgaatggcaagcttcagttcttcaggagcgtaatgtggttgagaatgttcaccgttgggcttgt

SEQ ID NO: 50134 - DNA, 309 bp, Glycine max
aggagctattctggctggaaacttttacattcaattgacacaggacatactgcaaatatattctgtactaagtttataccagaaacttctgatgagcttgtagcctctggagctggagatgctggagtccggttatttaatttgtctcgcttaagtgggagtggatttagtgacaatgccatcattgctccatctgcacattaccaatgtcacactcgaagagtcaagaaattggctgttgaaaatggaaaccccaatgtagtatggagtgctagtgaagatgggaccctaaggcaacatgattttcgg

SEQ ID NO: 50135 - DNA, 179 bp, Glycine max
ctccgacaagcctctaaggcttccattgcaggatgtctacaagattggtggtggtggttaagtctgttgagatgcaccatgaggctctcacagaggctcttccaggtgacaatgttggatttaatgtgaagaatgttgcagtcaaggatctcaagcgtggttttgttgcatccaactcc

SEQ ID NO: 50136 - DNA, 353 bp, Glycine max
  unsure (1)..(353): unsure at all n locations
agccnctcaaaggattcccaggtgtcgacgatgttgtcaccgattgcaaatctcacaaggtggtcgttaagggagagaaagaagaagcagcagcagcggaaaaaccaagcgaagagaaaaaaccggaacaagagtcgaaagaggaagttgctgctccgccaccgccaccgccaccggccgagattgtgctcaaagtgttcatgcattgcgagggttgcgctcgcaaggttcgtcgctccctcaaaggattcccaggtgtcgacgatgttgtcaccgattgcaaatctcacaaggtggtcgttaagggagagaaagcggatccgttgaagggtttggagagatacagaggaaga

SEQ ID NO: 50137 - DNA, 259 bp, Glycine max
caagagggtcaaaagaatcttggcaaatagtaatgcaaatgcaacatgttctagtgagaaaatcacagaccccaagagggtcaaaagaatcttggcaaatagacaatctgcgcaaagatcaagagtgaggaaactgcaatacatatctgagcttgagcgaagtgtgacttcattacaggccgaagtttcagtgttgtctccacgggttgcatttttggatcatcaacgtttgcttctgaatgttgacaatagtgctttg

SEQ ID NO: 50138 - DNA, 317 bp, Glycine max
ggtgaatggtaaaccatggacagctggagtcccggaggtgtttagtggttcacatgtgtatgtatgtgctcatggaagtcgtgacgtgagatgtggtgtttgtgggccagttctcatcaagaagctgcatgaggaaattgagcttcgaggtttgaaggacagatgaccagactcttgctaatggggaggagactggcaaggtcaagaaaaacaatcacgttgaaagcgacaatctgagcagcaaagaaaacgtgggtggttgttgccagggtgttaatggagtttcttgttgcagaagtgcaagtcttgagcaaaac

SEQ ID NO: 50139 - DNA, 182 bp, Glycine max
cttcatgatagatagcagccccaatatctgggtgaggcctatcagtggactcacaatggtgggctaccttgaactcatgaagatcgttcagtatcacgacggtggcattataccagtaccaactgccgacaacactgaataccgcttttcacatcagaacccaccattcggtccaaacaaca

SEQ ID NO: 50140 - DNA, 331 bp, Glycine max
tgaatcactcattcatatttggttttaagaaaggcactgacttaagctaccatcaagtctttttctttagttttgtcttggcagcattggcagtaaccagtgtcctagcgaatctagacatgcaaatagatccagagacaaaagaatacaaagcgttcactgaacttttgccactatcctggttctagttctgattgccattttattatgcccattaaacatcgtttatcggtcaagccgtatgttcttccttacatgtctgattcactgcatctgtgctcccctgtacaaggttacactgccagatttcttcatgggcgatcaggttact

SEQ ID NO: 50141 - DNA, 334 bp, Glycine max
atcgagagtactagacacagtgtgatgataatgaaggaccttactttcttcgtagctaaaattgtagtagcatggcaatgacatgcgtatcgagatgtaccctctccgaatgaacactggctatagtgcacgtactccggaggtgaaatgcgcaagttggaggcttgctgtggagcacacaacatcgttggcttcgagaccatacctgaagagtgcgttgtagcaacaaaggaatacatccatggcgaacaagatagatcagactccaaaagagtcaaccaacaagcttacttatatgccagatagctcgaagtccatcccaaggacacatttg

SEQ ID NO: 50142 - DNA, 315 bp, Glycine max
agattctccaccaccaccatctgcgacaccaccacctccatgctattagaaatccgctcatgctccatctccatctgtagcaccgcgggactacgatcagagtcctcctccaccatctcggagtcctcatcctccctactactacgaatcgcctccacgaccaacgtcgcatcctgagcttagcagtatgtgagcgctccagcagcttctgcatgtcctcgtcgaccatacgattacacatgagcagctgctagttccccagctcccgctcccaagtacatttacaaatcacctgcacctccagtttacatatat

SEQ ID NO: 50143 - DNA, 196 bp, Glycine max
tcgcaacacaacaatataagaaacccagagagcgcgtcttaataaacgctcttctctgaaaacccccatttcttttcttctttcttcttctctttcgcttcttcgatcttcgatcttcgtcgctgaaaatgagagagtgcatttcaatccacatcggccaggtcgggattcaggttggaaacgcctgctgggagct

SEQ ID NO: 50144 - DNA, 344 bp, Glycine max
  unsure (1)..(344): unsure at all n locations
canaacactcataacacaaagcacaaagcaaagctcatccttgagttaaaaaatggcagcagcttcttccatggctctctcatccccatccttggctggcaaggccgtgaagctgggcccatcagccccagaagtgggaagggtgagcatgaggaagaccgtcaccaagcaggtctcccaggaagcccatggtacggcccagaccgagtcaagtacttgggcccattctctggcgagcccacgtcctacctaaacggtgagttccaggcgactacggctaggacactgctgggctttccgcagacccaggaaccttcgccaagaaccgtgaactcgaagtgatc

SEQ ID NO: 50145 - DNA, 318 bp, Glycine max
atgagttccaaaagggaagtagtcatatggctgctgttgttaaggctaggggaaaaggcaaagaaactccacaaatcattgatgaagagaaaaatgaagaagacaaaagcattggtggggattcacagttgaccactccgttgctacagaagcaggatgcaaaatcaggaagtgttgtttgacatagtcaagccttcaaagccttccagcattaataagctgtctgttgcaacgatgtacacacaaatgtcctctcagagatattaagatggtgagtgattgtatacacgtagagatgattgagacttctcaagaatg

SEQ ID NO: 50146 - DNA, 342 bp, Glycine max
tagttattttatggtatccaacttctattttttgttgttattgagatttttatgttggctatactgcattcggattgtgatacttttaatgctacaactaatgctgtggcagcattgtttaacctttttttctttcaaaatttccaagaaactatgcctgtttatgtgttttctttattgcaggatgcaacaattgagcagcttcttcctatttttctctcccttttgaaggatgaatttcctgatgtacgcctaaatatcataagcaagcttgatcaagtgaatcaggttattggaatcaatttgttatctcaatctttgttaccagccattgttgagctt

SEQ ID NO: 50147 - DNA, 304 bp, Glycine max
aatatgagcagcagtgcagggaagttggtgtgtgtcaccggtgctgccggttatattgcttcatggattgtcaagttcctacttgaacgtggttacactgtcagggccactgttcgaaacccaaatgatcacacgaaggtagaacatttgctaaaacttgaaggtgaaggagagactgcacctttttaaggcagatcttttgggtgaaatcttttgactcattgttgaggtgtgatgcgtcttcaactctctctttatacacgcaagaccaagctactattaccagcataaggactttacgtct

SEQ ID NO: 50148 - DNA, 224 bp, Glycine max
tgtgagatacatggcttccttaagctccttagtgctgctccttgcagctctaattctatcccctcaagttcttgcaaactatgagaataacccagtgtacaagcctcccactgagaaaccaccagtttataagcccagagttgagaagcctccggtttacaagcctccagttgaaaaccctccagtttataagcctccagtagtgaagctaccagtgtacaagc

SEQ ID NO: 50149 - DNA, 366 bp, Glycine max
  unsure (1)..(366): unsure at all n locations
caatggtttaacctttctggctgtgttaatatgcgtttcagcactgtcactgagtccttctgttgcgggggaagaacanaataatggccttgttatgaacttctacaaggaatcatgccctcaggctgaagacatcatcacagaacaagtcaagcttctctacaagcgccacaagaacactgctttctcctggctcaggaacatcttccatgactgtgctgttcagagttgtgatgcttcactgttgctggactccacaagaaggagcttgtctgagaaggaaacagatagaagctttgggttgaaatttcaggtacattgagaccatcatagaagctttggaaagagaatgccctggagttgttc

SEQ ID NO: 50150 - DNA, 169 bp, Glycine max
tgtcagagtgagaaagagagagagagagagagaaactgagagagattcgcaaaccctaatttcggatagatcagcgatggctgcctccaaggatcgcgagaacttcgtctacatcgccaagctcgccgaacaggccgagcgatacgaagagatggtggaatcaatgaag

SEQ ID NO: 50151 - DNA, 341 bp, Glycine max
  unsure (1)..(341): unsure at all n locations
caccaattatatcaacatgtctggtgttgagtatgcaaagagtgcagttactattccagctgtgtggaatattcaagtcagcagctggattcgtcattatgtttacganaggtttcttcccagtctgcattaatgattgctggttccagagtgatttacagatggcagctagacgtgcctcagacaatgtctctggttaagaatgtgttggtgtctacanattgtgcttatacacttatggttctanattactgctgtgttggatgcatggtgctaagtctgcatgaaactcttgcatcatatngacgtgtatacattggacgtatgtcctgtagtatgat

SEQ ID NO: 50152 - DNA, 347 bp, Glycine max
  unsure (1)..(347): unsure at all n locations
ccggttcggttctgtttgtcacgttcgggaccgggggcgttttgagttcggagcaacaaaatgagctggcgtgtggtttngaactcagtggcgtgaggttcgtgtgggtggttcgggtgccgaacgacgctagtgcatttgctgcgttttttaatgcgggtggcgatgatgatgcgacgtcgtatttgccggaagggtttgtttcaaggactcgggagaggggtttggtggtgaggtcgtgggccccgcaggtggcgattctgcggcacgcatctacgggagcgtttgtgtcgcactgggtggaactcgacgttggagagcgtacaaacggggttccggtgatcgcg

SEQ ID NO: 50153 - DNA, 182 bp, Glycine max
  unsure (1)..(182): unsure at all n locations
tcggaatcggctcaggctataactagtttatcgtgagagatatgagttgttgtctcttgtgcgcatattctgtagctggcatgcatggcgcaggctaccaagttcctctccgaatgaaaactggctatggtgagcgttcttcggaggtanaatgcgcaagttttaggcttgctgtggaagca

SEQ ID NO: 50154 - DNA, 327 bp, Glycine max
tttgccctcgttgctcgacgatacgcgagagcacggaaggccaaggaagcaatcgagacgttcgagaaaatggaacagtatggtttgaagccgcacgcgtcggatttcaataggttggtcgatgttttatgcaaatccaagtgtgtggaggaggcacacgaggtgtttgataaaatgcggcacttaaggttggaccctgatatcaagtcctacaccattttattagaagggtggagtcagcagcagaacttgattaaagtcaatgaggtgtgtagggagatggaggataaagggtttcagcttgatgttgttgcgtatgggataatc

SEQ ID NO: 50155 - DNA, 299 bp, Glycine max
gtctgttcgaagcatagtttctttcaaccactgctaaggatgaactataccttaatctggtacttgagtatgtgcctgagacagttagtcgtgtgatcaaacattacaacaacgttgtaccaacggatgcctcttgtatgtacagagttttacatatatcagaggcatccgttcgttcaacttgtagcaatgattgatcaccggattcctctgatatatgtacaactctatacataccagatctgtagggaatcacgcacatgactagctcttctgcttagcccacggcttcacagcat

SEQ ID NO: 50156 - DNA, 351 bp, Glycine max
tctttctctcctctcgatctctcaagaaccagagagatcatagttagttcacttcaaatagagaaaagaaagtaaagattaatataacatgcacaacatgagcactctcgatttctttatccttctttcaacgctactaagtgtttgttacggtggtcgcgacttagtagataaaaacccgttcaccgagcaggcttacgtggcacgctactgggacaaacatgttggcaacaacttgccaaagccatcgtttcttctctccaaagcctctccaatgagcgcttccgacacggcgtcgttcgcgaacctcgccgccaccaactcgctctccacgcggctgccggagttctg

SEQ ID NO: 50157 - DNA, 348 bp, Glycine max
ctcatcggaatattcctttcttttcggtttcaatctctggatccgtcgtgacagacggcatggccactttcaatggcttcgtcgacggcactccctcggaatctgcattgatctttctcggcaccggttgttcgagcatggttcccaacctcatgtgcctccttcagccttccgaccctccctgccccgtctgcgtccagtcattgtccatccctcccgaacgaaaccctaattacaggtgcaatacgtctctcctaattgactacggcgccgcgccgccaacggtggcgatcgcaagtatatattgatcgatgtcggcaagacgttcagggagaccgtgcttaggtg

SEQ ID NO: 50158 - DNA, 265 bp, Glycine max
gtatttccctacctctcccttcaagatgcagatcttcgtcaagaccctcaccggcaagaccatcacccttgaggtggaaagctctgacaccatcgacaacgtcaaggcaagatccaggacaaggaggatcccccggacagcacgctcatttcgcggaacacttgagacgcgaccttgtgataaaatcagaagaatactctcactgtctcgctcgtgtgcatcaactcgtaaacatacggagacatacctaagtgaagtcgcacat

SEQ ID NO: 50159 - DNA, 330 bp, Glycine max
  unsure (1)..(330): unsure at all n locations
tgtacatatcacatgaatgggctaggagtgtgttagatgacactgaaaatctcactgaagagctaatagatgaggtgttaaaggagtatatgaaagacttagatgatggtttactacgagaaaaagggtggccaacctatttgtctgcatatatggtctcannagcagcccatgattcatacacaaggcttctggcttatagggcacannaattgtgcatcaaatgtgtatgtcctggnttctgtannacagacattanncagaacactggcatcttatctngtganaatggtgctgctagtgttgtgagattagcactcttgcctaatg

SEQ ID NO: 50160 - DNA, 377 bp, Glycine max
  unsure (1)..(377): unsure at all n locations
cggtcgatgttntcctttcgggattggtttctatggcttctgaagtaatagagtaccgatgctttgtcggtgggcttgcttgggccaccgacagcgatgctctcgagaaagccttctctcattatggtgagatcgtcgaatcgaaggttatcatcgatcgtganacaanaaccctcatcaataatcttatacagaataacaatgatcccctcaaatccctaatccctaatcccaatgccattgaagaaagaagcaatgatttcgaatccagaattgatccactacgcgtgcattgctcgatcggagacgatcctgtggcagcaccagagcgagaaggagcctaacatggtaggccttagcagtcccatgcgtggccc

SEQ ID NO: 50161 - DNA, 355 bp, Glycine max
  unsure (1)..(355): unsure at all n locations
ttccanactcagaaaatagatccttcaacttctcatcactgaaactataacatcttgcaaggtgatgattgattcaaatggacggagtaaggggtctggttttgtttccttttctactcctgaggaagcaagtaaagctttgaatgaaatgaatggcaagttgattggacgacagcctctatatgttgctgtggcccagcgcaaagaagagaggaaggctcatctacaggctcaatttgctcaaattcgagcacctggtggaatggcacctctgcctgctggtattcctttatatcatccaggggcaccgagacttgccccccaacagtggtattatggtcaaggcacacctggc

SEQ ID NO: 50162 - DNA, 349 bp, Glycine max
  unsure (1)..(349): unsure at all n locations
ctccataacacaaggcagaaagcaagctcatcctagagttttaaaaatggcagcagcctcctccatggctctctcttccccatccttggctggcaaggccgtgaagctgggcccatcagcccccgaagtcgggagggtcagcatgaggaagaccgtcaccaagcagngcatctccggaagccatggtacggcccagacgcgtcaagtacttgggcccatctctggcgagccccgtcctactcactggcgagttcccagtgactacggctgggacatgctggctttcggcgacccaaaacttcgcaaaaccgtgactcgagtgatcactccagtgggcatctcggggctt

SEQ ID NO: 50163 - DNA, 346 bp, Glycine max
  unsure (1)..(346): unsure at all n locations
ctataagctagtttatcgtgaggagaatatgaagttgtttgttttctttgttgctgcagtagttttggtagcatggccatgccatggcgcaggctaccanaggttccctctccgaatgaaaactggctatggtgagcgttcttcggaggtanaatgcgcaagttttaggcttgctgtggaagcacacaacatccgagcctntataccattctgaagagtgcgttgaaccaacaaggactacattaatggcgnacaaattagatcagactctaaaacagttaaccacaaagcttctntatgctagtgacgcgagtcatcacacgcatattatatcgcatagtacacg

SEQ ID NO: 50164 - DNA, 337 bp, Glycine max
  unsure (1)..(337): unsure at all n locations
caggaagagaaatgttgagtgagagcaagctgaaggacctcctgcacggttcggaatatgtactcacttatgaagataaagatggtgactggatgcttgttggagatgtaccatgggatatgttcatcgacacatgcaaacgactgaaaatcatgaaggggtctgatgctattggcttagctnccangggcatgggaaaatcccangagcangtgctagttngtattnggaactgtgacttcgtntcgttactaaggtgaaagtgctgagatatatgaggtgtggaagagaattatgatataatgactgatgctggttntgatggtaactgctatca

SEQ ID NO: 50165 - DNA, 359 bp, Glycine max
caatgggctttgctactggtggaaaaacattctttctgtggggagggtgcatgatgatgcatgctgatgactttaggcaagatcgttatggtgtagtctccggacttaaagatggtggatattcggatgatatgactcttgcagccatatctggtgctcacaaaaggctcattacttctcctcctgttgctgtctttcctcacccccttgccagtgatcttaattttggaagatattggaattacttgaggaaacaaacatttgttttggagtcatatttaacaaatgttaactgggtgatgaaccgtgcattgtttactacccactgctatttgtcatggggatttgtggcaccatat

SEQ ID NO: 50166 - DNA, 345 bp, Glycine max
  unsure (1)..(345): unsure at all n locations
aagagaatggctcgcaagggtttaatctttttggctgtgttatgcttctcagcactgtcactgagtcgttgtcttgcggaggataatggacttgttatgaacttctacaaggaatcatgccctcaggctgaagacatcatcaaagaacaagtcaagcttctctacaagcgccacaagaacactgctttctcctggctcagaaacatcttccatgactgtgctgttcagagttgtgatgcttcactgttgctggactccacaagaaggagcttgtctgagaaggaaacagatagaagctttgggttgatgaatttcaggtacattgagaccatcanagaagctttg

SEQ ID NO: 50167 - DNA, 282 bp, Glycine max
  unsure (1)..(282): unsure at all n locations
ctcacctgntgttcgtgttgctgtacaatgtcaggatgcatcagatcttcacaagcttgttgaacgtcttacgcggttagctaagtcagatcctatggttgacagtaccatcgaggcgtctagctgacacattgttgctggcgcatgagatgcttcatcttgagatctgtatgacggacttgcaggatgaattcatgggtggagctgagactatcaaatctgactcagttgtgtcagtcacgggagactgtatatgagagatcatgccgcacagtgatgagc

SEQ ID NO: 50168 - DNA, 340 bp, Glycine max
gggggttggtgctccggaccgacaccgagaccggcaagccgcatggggtggctgtgaggaactccggcggcgaggaacctaacgccgcgaaactcgccgccgctgcttcgtcatccaggaagaactctcagaactccgccagaacttccggcgactcttcggacggcggcggcggaggcggagggattccgagaatttcggaccatgtgatgggagctttgtcggcttttcaacagactttcgtggtttcggatgctaccaaagccgattacccgatcctgtatgcgagtgctgggttctttaaaatgacgggttataagtccaaggaagttattgggag

SEQ ID NO: 50169 - DNA, 366 bp, Glycine max
  unsure (1)..(366): unsure at all n locations
ctcggatcggctcgaagttncgggaggcgtggaggtggacgaggtgggggacgtggatttggacgtggatttggaccacgagttccttaccgtggtggtcgtcgtggaggtttcagcaatggtgaaactggtgaaggtgaagacggacgacctcgaagagcatttgatcgtcgcagtgggactggacgaggaaatgaattcaaacgtgaaggttcaggacgaggtaactggggaacccaaactgatgaacttgctcaggtaactgatgaggttgtgaatgaaacggaaaagaatttgggtgatgagaagcctgcagttgaagaagatgtagctgatggcaacaaggacagccctactaatgaaacc

SEQ ID NO: 50170 - DNA, 349 bp, Glycine max
aagaggagcaagtgggcgatctcgaagccggccccactcagcatcaagatgatggagaaatctggaccgttcgcgttcgagaccgagtcagggacatcatgggtcgctgacctcaaagaaccatcttccgcacccgtggtcgtgttcgagaagccactcatgaacctcaccttcgtcgaccttctcgctggcacgtcacacttcggcaaagactcccttctcgctgagggcaggtgtgggcccgtatatcgcgctgtcttacccggagacatccacgtggcaatcaaagtcctcgaaaacgccagagacgtccatgatgatgacgctgtcgctctcttcgttgacctct

SEQ ID NO: 50171 - DNA, 309 bp, Glycine max
atgcaagaatggcacttcgttgcttggtgatgtccctttctgttctcttcactcttggtcttgcgagagaaagccatgccagagacgaagatttttggcatgctgtttggccaaacactcccattccaagttcattgcgagatcttctaaagcctggccctgcaagtgttgaaatcgatgatcaccctatgcaaattgaagaaacacagtacccgaaaaccttcttctataaagaagaccttcatccaggcaaaacaatgaaagtacaattcagcaagcctccctttcaacaaccatggggtgttggta

SEQ ID NO: 50172 - DNA, 306 bp, Glycine max
ctaaggtcgatttctcgttgtgctaacattgcattggatagaaactaaagtcttaaaacattcataatcatatctctttttattagttgttattgtgtgtctcagtattcaattggttgaattgaagctacttgttataatggatcacgctattgatggttactgtgttggggattgcagccaaagagtggtcgatttggcacatctagtagcaagcaagtggccaggggcacctaaagcggggagtggagacccattggaggatttctgcgagacaaaccctgctgatgaggaatgcaaagttta

SEQ ID NO: 50173 - DNA, 262 bp, Glycine max
aaagagcatcactgaactaacaaagcaaccctatgtcgaaggtggtttgtgtcaccggagccagcggcgccatcggatcatgggtggtcctactcctcctccagcgtggttacaccgtccatgccaccgtccaagatatcaaggatgaaaatagacgaaacatttggaggaaatggaaggagcaaagagtaatctccatttttttgaaatggatcttcttgacatcgactcgattgcggctgcaataaagggttgtccggcg

SEQ ID NO: 50174 - DNA, 311 bp, Glycine max
gtggtgttgagttgtcttgtttcctctgaaaattcacagaactcgctcacacacaacgcaacgcaacgcaaacactctcttgcttcgcatcagatccaaatctctcttcgtttcgccgattcggatctccgattgatctccgcctccgattccttctcctcgcaattggatccgatttgagcttctcgccgtacacaatcatcgtcaatcatgaacccgttctcttcaggaacgcgtttgagggacatgattcgggccatacgtgcttgtaagactgcagcagaagaacgagctgttgtaagaaaagaatg

SEQ ID NO: 50175 - DNA, 238 bp, Glycine max
cgcacactatcttacttctctctcttttgcgtttgcattgcttcctgcattttctttaccttccatactcacatcatgtatcgctttgcttctaacctcgcttccaaagcaaggattgctaggagtagcagccaccagattggaagtaggctgagttcgagcagaaactatgcggctaaagacattagatttggtgtggaggctcgggcactgatgcttaagggtgttgaagagctag

SEQ ID NO: 50176 - DNA, 302 bp, Glycine max
cacagggaaaacaaaacaaaaatactggaatttctacgtaaatcctgggagattgataggagaactgaatggtcaatatggatggtgtactcaaaggttgcaatgcctcgtcaaaatatgagcaatggagttgaggggacatcattgtcccatggcatgcatagaagttcaataattacaaggaggtttactgatgatcctattcaaactgcagcaatgcgtgcagaacttcacaggcgaggaatagctcaaatgaggatcaacaatcggtcacttcaagatatgtatatatttggagatcc

SEQ ID NO: 50177 - DNA, 155 bp, Glycine max
atcagctgttaagatgatccttcaacaaatggagctcatcaccagtactgatgttgctcggaatctttgcacacagatggctcgtcctcttgtgacattactctcggcagaagctgagatacagtatgttgcgctgcggaatatcaatcttatag

SEQ ID NO: 50178 - DNA, 327 bp, Glycine max
  unsure (1)..(327): unsure at all n locations
cggacgcattcncggtttcaaccagagcagcctcaggtatttaaatgtgtccaacaaccggctctccggcgagattccggtgagctcggcattgatccggttcaatgcgtcgtcgttttgggggaaccggggctctgcggggaacagatagaagaagcatgcaaaaacggttcattggcgccatcgacaagccctagttatccgttgataccaaggacgatggggaaatcgtcgacgtcatcattgaaccgcacgaagttgataaaaataatcggagggagcgtcggtggagttgttttggtattagtttgcacgactgtggtgtgg

SEQ ID NO: 50179 - DNA, 274 bp, Glycine max
caaaccccaaaaaaagaaaagatgaaagcaatgaaacgctgctcttcatcatcttcctcttcttattcttctgcttctgagtccaccccacaaagcaatcaaaataaaaatagtaataacttttgctacaaaataaaaggcccatggagtgccaaggaggatcggattctgaccggcctcgtggaggcccatggcccgagaaactgggcctcgataagccgtcacattaagggtcggtccgggaagtcctgccggcttcggtggtgtaccaact

SEQ ID NO: 50180 - DNA, 281 bp, Glycine max
gagaaagaagctctcaactatctttttctcctcgtcccattgatcaatgttataatcccattcttttggaagtcctttgctgttgtttggtccgcagatgtagtagccttcttgggaatgtacgcatggaaggtgcatactttcaagtagtctagatttactgttagctttactttcatgtaacttgtaatctgaagcgtgtctcttgcagtttggatggcttcagagaacggattaaggaacccaaatttggttagtaaaagttatcaatgcttgttggc

SEQ ID NO: 50181 - DNA, 329 bp, Glycine max
tagttagtgtgttgttgaagatatgtggtggtggtgattgtggtggtgatttggttgggcctgcttgtggggtgttgaggaatctcgttggtgttgaggagattaagaggtttatggttgatgagggtgctgtggtaacattcattaggcttgtgaggtccaaggaggaggcgattcaggtgaattcgatagggtttattttgagtattgcttctggggatgaattggttaggcagatggtgatcaaagagggagggattcgcgctttgttgcgtgttttggatcctaagtggtcttattcttgtaaaaccagggaggtgacaatgagg

SEQ ID NO: 50182 - DNA, 328 bp, Glycine max
ggctaaatcagtacatgcatataccaagtgaggctccagaagtaatagcaggaaatcgtcctcctgcgaattggccagttgctggtagagtacaaataaacgaattgcagatacgttataggcctgatgcgccactagtacttcgtggaatcacatgcacatttgaaggaggccacaagattggtattgttggcagaacaggcagtggaaagtctactcttataggcgccttattccgtctagtagagccagcaggtggaaaaatcattgttgatggcattgacatttgctccattggtctccatgatttgaggtcccgttttggtat

SEQ ID NO: 50183 - DNA, 254 bp, Glycine max
agacaggataaagtgtaggttactggaaggatcaaatgcccaagaggtgagggcgatggttctggatatgcaagctaggttgttattggatatgcttgggaaaggaattgagtctgcattgataaattcttcagctttagttcctgagctatggcaagcatcaggtgaaacgttatccagcattgaccctgaatcaatggctgttgaacctgcactaattcccagtattcaggcttatgtggattcagttcttg

SEQ ID NO: 50184 - DNA, 329 bp, Glycine max
gcacaaggtgccatggaagctgttgaagagggaaactacagcggtggtgaagaagcgagtgtttgtatgcccggagcctagttgtttgcaccatgacccatgccatgctctgggtgatcttgtcggcataaagaagcatttcagaaggaaacacaacaatcacaagcaatgggtctgcgagacatgctccaaaggcttgcggtgcagtctgattacaaagcacatctcaaaacttgtggcacccgaggacactcttgcgattgtggccgcgttttctcaagggtggagagctttattgagcccaagacgcgtcaagtagggaggtgggg

SEQ ID NO: 50185 - DNA, 349 bp, Glycine max
actgatgttcctacgacgtcgttcagtatctcagaaaagcctacgacgatttggaagaacccttgacccgttttctcgaatcttccaaagttgattggctcttctacgacttaattcccttctgggcaggtactgtggcttctaaacttggtataaagagcgccttttacagcatttgtactccaccgttatgggcttccttggtcctccttcagttctcatgggtgaagatccgtaccggacaaaactcaaagatttcaccgttactccgccgtggatctcttttccgactaccgtggcatatcgatacttcgagatgatgagagatctgacgccgtctctgataatg

SEQ ID NO: 50186 - DNA, 332 bp, Glycine max
cacgctcgtatataattgcaaacatcataaagaaaaagacatgaattcccttcgtctcagttttttctgtgtggtggtagttcttggagcattaccctacttctcatatgcacaactagatccctcgttttacgctagcacatgttcaaatttgagttcaatcgtacgtgaggtgctcacacatgttcgctgtctgatccccgcatgcctgccagtctcatcaggctccactttcacgactgttttgttcacggttgtgatgcatcaattctgttgaaccaaacggatgagatcgatagtgagcaaactgcttgtccaaatgacaactccat

SEQ ID NO: 50187 - DNA, 235 bp, Glycine max
acaaaacactagtctctcccttctgccttgtctctttctcttctcaacaacatgcagatcttcgtcaagactttgactggcaagaccatcaccctcgaggtcgagagtagcgacaccatcgagaacgtctaggccaagatccaggacaaggtaggtatccctgctgaccagcagaggctgactctgctggtaagcagctggaagatagtcgcactcttgctgatgataacataca

SEQ ID NO: 50188 - DNA, 309 bp, Glycine max
ttaactttggcacattctccttttgttcatcaatgtgtgttgtaaattgttcatttccttcagaggtctttggtagagatgatgtgcagtttctgtgttgcatcttggactggggttgttaagtatcatggagccaggcctagcaggagaccaaagcaggtttttgtagccaaccatacttcatgattgatttcattatcttagaacagatgactgcttttgctgttattatgcagaagcatcctggatgggttggtaagcttacagtactgtcaactgtgtatgaaatatgatacacgatacttgcgt

SEQ ID NO: 50189 - DNA, 304 bp, Glycine max
acaagctggacatcatgtacaacaatgcgggcatcccaggcccatcaattccaccaagcatagtagatctagaccttgatgagtttgatagagtcatgaggatcaacataaggggaatgattgctggtataaagcatgcggcccgggtcatgattccagtgggatcagggtccatctatgcacatctagcataagtggggttttgggtgggcttgggcctcatccttacacaatatcaaagtttacaataccaggggtagtgaaatctttggctagtgagctatgcaaagttgggattaggatc

SEQ ID NO: 50190 - DNA, 329 bp, Glycine max
gcaaacaacagaatagagtcagaaggagagagagagagatggtggtcggtgttctttctgattctccttgatcttctttttctcttcgttattgttcccaacacattccaaaccctaaatttattgcctggctcttcctccccaatatccgaactcaaacgcggagtggcagcagagaacaaaaacatgtcatcttggctgagatctgcggtcaacaaagccgtcgaggtcggcaacaaaaacaacctcactcgcaccgtcaagaactacgccgacaccgtcgttcaacacgccggccaagccgtggccgagggcgccataatcctaca

SEQ ID NO: 50191 - DNA, 311 bp, Glycine max
cttgttgtttggagcgatccgagaaaaactctgtaaacatgttggtttaccaggacctccttacaggtgatgagcttctctctgactccttccgttacaaggaaattgagaatggaatgctgtgggaagttgagggaagtgggttgttaaaggagcagttgatgtagacattggtgcaaacccttctgctgagggtggaggagaagatgagggagttgatgatgcagctgttaaggtgttgacatgttgacacttcagacttcagagaaccgcatcgatagagcagttgtacctcatgagaggtatcagat

SEQ ID NO: 50192 - DNA, 325 bp, Glycine max
tgcagcaatgaagaagaagatgatggcaagcaccgccatctccgtcgtcttcgccgcgctcttcctcttctcctccgtccactccttctacctccccggcgtcgctcctcgcgattttcaaattggtgaccccctctctgtcaaagtgaacaagttatcatccaccaagactcaacttccatatgactactattttgaatattgcaaccccaaaaatttgcaccacacgcgaatttgggaagatgtctagagggacgcattagaattcagattactctcaatgagaagacagctgtatgtgttgtcataatttgatctgatctca

SEQ ID NO: 50193 - DNA, 326 bp, Glycine max
  unsure (1)..(326): unsure at all n locations
ggtttgagganactgagttaaggcttggactgcctggaaacggaggcactgaagaagtgctcatcaggaagaggggtttctctgagactgaaactggtcatgaagatgagtctgccaccactgtggatttgatgcttaatctttcttctaaggaggccgcaaccactgctgctgctgctgcagatccaactgataagcacaagactttgcctaaggagaagacccttctgccagcagatcctgctaagctccagcaagacgcagtggtgggttgcactgtgcggtcctcggagacatgttgcttcaaagacgttgagagaacgaga

SEQ ID NO: 50194 - DNA, 274 bp, Glycine max
cggtcgacacctgttgagcgtggaagtgatgatggaaatggggtctcagagagtgatggtgggtctaatgatactaatactgaattggaggtttgtgttgggacttacatatcagggaagccatctgatggatcggttgatgtgatcctcaaactgttgaggaatattggtagggaacctgagaatgtaaagtttaggaggatcacgatgaataatcccaagattaaagaggctgttggtgatgttgccgggggagtatgattgctgagtttcg

SEQ ID NO: 50195 - DNA, 205 bp, Glycine max
cgtgagaaacatggcttccttaagctccttagtgctgctccttgcagctctaattctatcccctcaagttcttgcaaactatgagaatcccccagtgtacaagcctcccactgagaaaccaccagtttataagcccccacttgagaagcctcctgtctacaagcctccagttgaaaagcctccagtgtataagcctccagtagag

SEQ ID NO: 50196 - DNA, 198 bp, Glycine max
ctcgagccgatcgcgagcagccgcccgcgatctagaactagtccgaagagaatggctcccaccggtttaatctttttggctgtgttatgcttctcagcactgtcactgagtcgttgtcttgcggaggataatggacttgttatgaacttctacaaggaatcatgccctcaggctgaagacatcatcaaagaacaagtc

SEQ ID NO: 50197 - DNA, 172 bp, Glycine max
cagagagtggtttcagtgattgatcggtgttcacttgatccgtcataagtcgtcatcatcatcatcatcatcaccgttgattggagaagattcctatcagatacatcgccatcagaacgcctgaagaggctactcacaccgacacgttgaaggcggggatggctgagttcat

SEQ ID NO: 50198 - DNA, 266 bp, Glycine max
ctcagtacctgcatacttcgaatacacaacttgtgcaccagtcttcacactaatctctacattgttggtatccttgaaactgatgacatcaaggatcttaaacccttgaatgatagagtcctcataaaggttgctgaagctgaggaaaaaacctctggcggtttgttgcttacagaggcaaccaaggacaaaccttcgattggaacagtgatagcggttgggccggggcatctggacgaggaaggcaacagaaaacctttgtccgt

SEQ ID NO: 50199 - DNA, 100 bp, Glycine max
ccgcagtggacaatacctctttgctggagtggttgatggaaggaacatctgggccaatgaccttgctgcttctctcactacattgcagggtcttgagggc

SEQ ID NO: 50200 - DNA, 268 bp, Glycine max
gcgagagagagagagagaatggcagcacttggtggcaatcgtgatgtggcaggaagccagaacagccttgagatcgatggtttagctcgctttgctgttgaagaacacaacaaaaaacagaatgcccttttggagtttaaaaggtagtaagtgcaaaacagcaagtggtttctggtaccttgtacaccatcactttggaggcaaaagatggtgggcaaaagaaggtttatgaagccaaagtttgggagaaggcatggttgaacttcaa

SEQ ID NO: 50201 - DNA, 270 bp, Glycine max
cttgcgtttccctttcattttccctcactttctcgctcgccaaacgcccctctctctcctccaatggccgaccagctcaccgacgaccagatcgccgagttcaaggaggccttcagcctcttcgacaaggacggcgatgttgtattactactaaggaacttgggactgtgatgcggtcactagggcaaaacccaactgaggcagaactgcaggatatgattaatgaggttgatgctgatggcaatggaaccatcgacttcccagagttcc

SEQ ID NO: 50202 - DNA, 266 bp, Glycine max
cactcatagagttgtatgcaaaatgtagtagcatagataatgctaacaaggttttcaaaggaatgagacataaagatgttgttacctggagctcaataattgcagcttacggattccatgggcaaggagaagaggtttgaaattattttatcagatgtctaatcattcagatgttaagcctaatgatgtaaccttcgtctcaattctatctgcctgtagtcatgcaggtttgattgaagaagggataaagatgtttcatgtcatgg

SEQ ID NO: 50203 - DNA, 266 bp, Glycine max
gtttaatgttgacccagaagcagtcataagtcaagccttgcagacaggagggggacccaatgtttcagatgcatacaccatcaatggacttcccgggcctttgtataattgttcttctaaagatacatacacattaaggtgaagccaggcaagacatatctgctaagactaatcaatgctgcactcaacgaagagcttttcttcagcatagccaaccacaccctaactgtggttgaagcagatgccagatacaccaaaccatttga

SEQ ID NO: 50204 - DNA, 233 bp, Glycine max
gagagtgtttggctgaaagtagcatagaagtttcctttcgggcaaaagggtcacaagataaaggggactatggtgattatgcagcagaatgagttggatatcaacagcatcaccagtgttggagggatcgttgaccaagcttaggctgcacatgcagtgcagtcgatgcacttactattgcagccagcaatatctccatgcagttgagtagtggtaccaaggctgatggtgtg

SEQ ID NO: 50205 - DNA, 262 bp, Glycine max
taagcttgctactgagtttccacactgcataccttatatcttccgaattcgaagttaatttgcaagatggctaaggaaaaggctcatatcaacattgtggtggttggtcatgtggaccctgaggaggcaaccacattaacgagctgaagaagcctgttgtggagaaagaagctccagggcatgccatatgagggcatgcacgtacggcctcggaggggaaccagaaaattatgttaacaaaataatctggaaccctaatgta

SEQ ID NO: 50206 - DNA, 266 bp, Glycine max
agacattgcttctggggatcttccccctactcaccccatcagattgggtctcgctctcaacttctccgtcttctactatgaaatcctcaaccagtctgacaaagcgtgtgccatggctaaacaggtcaacttcatttcgacgtttttgactttcttgtttcggcaatcaattatcctttccccttttatgttactcggagattccacttccgtttaacatttttggaaaaataacaaacattttttttttaatctttactggtatg

SEQ ID NO: 50207 - DNA, 255 bp, Glycine max
ctcgagccgatcgagccggtcatcccaaccccggagggcaaactcagtggcattgcactccgtgtgcgaacaccaggcgtgtcagtggtggacctcgtccgtcaggtctcaaagaagacgtttgcagaagaagtgaatgcagcattcagagacggtgcagacaatgagctccagggaatcctttctgtgtgagatgagccacttgagtctgttgacttcatgtgcactgatgtgtcctcaaccgttgactcatcg

SEQ ID NO: 50208 - DNA, 254 bp, Glycine max
cgatctggtacgagttaagacaggacaattgtacagattgcgaaatcatagcgcaaccaatgtggcttcattatcaacttatgattcttccaatccaacagaacattgggattttccccagttatcacctaatagaaaaatcaaacgtcactctaagtccagtgaaagctctgcttcagctttggatgaaacccctattgagaaggcattgtctgcattgccaagtcagctctctgcctctaagaaaataaaac

SEQ ID NO: 50209 - DNA, 249 bp, Glycine max
ctggaaagccctcaaccacaacggaagaacggttttcatcgacgaaaaccgctactacgccgcgtattacgaagaactgcacccagaaattgatgcctatgatgttcaatacaccaccagaaggagcgagatgaaggagctcatagcctccgcgaaagaacaagtagccaatgagtgcaagccggtgcagaatcttcttttctccgagtgcaagctgggcctcaatgacctccccaaccatgtgtacga

SEQ ID NO: 50210 - DNA, 240 bp, Glycine max
gtgggagcaagaggaatggtagtcgccctcctcatttttgcaagagcagtggtgccattgctcgtcacattcttcaacagttgcagaacatgcgcatcattgaactggacaccaagggtggcaggaaaatcacttccagtggccgacggtatcttgaccaagtggctggacgcattctggttgcacaatgattcatgatttgaaaatgccataagcattatgaggtttttgggttcttgt

SEQ ID NO: 50211 - DNA, 269 bp, Glycine max
tctctctctacaaatccttctttctttcttctcttcgctgctcactgtagccatggctttcagagtaggaggagcgggagggggaaatgcctcttctggcatgggtgttgctgagcatagtgtaaacaccttcctggaattgcagaggaagaaagttcatcgctatgtgattttttcaattgatgagaaaaagaaagaggttatcgttgaaaaaactggaggccctgctgagagctatgatgatttcactgcatccttgcctgaaaatg

SEQ ID NO: 50212 - DNA, 251 bp, Glycine max
tgtttacaactacacggtgactccgccggcaccacctgtaagccttggtgccatttgtggtctgccacgctgccgccggcggcctcgccgtgtagttgtaaacatgctaagggttgcccgaccacaaatggaccacggcttacaggctggccttcaactccacagttcaggttgtctcgcaggatctcggggtcattgctcctgagcgccacccggttcatcttcacgggttcaattctatgttgtaggct

SEQ ID NO: 50213 - DNA, 241 bp, Glycine max
gttcattctctctgagcagttcgctacctctcctttccagatgcacacgatcgtcccgcccctcaccggtaagaccatcacccttgaggtcgacacgcccgacaccatcgacaacgtcaaggccatatccaggacaaggaaggaattcccccggatcagcagagtctcatcttcgcaggcaagcagctcgaggatcgcccgcgctcgctgactacaacatccagaaggagtcaactcttca

SEQ ID NO: 50214 - DNA, 255 bp, Glycine max
  unsure (1)..(255): unsure at all n locations
ggttaagcggtgaccccagagaatctgtgacatggcggattcttgctcgggaggagatcgtttacatggcgcccacgnggagaggncgtgcgttacgaggacatcgtggagtttctggagaaggttgcaaagatcgccgaggttgacgagttgacggtggaggagaggaatctcctctctgtcgctttcaagaacgtgattggtgcgagtcgggcttcgtggaggatcatatcctccattgagcagaaggaggag

SEQ ID NO: 50215 - DNA, 259 bp, Glycine max
cgagttcgaaaagggttctaaggtgacacagatgccctgcaagcacgcgtatcacggcgactgcttgattccgtggcttcggctgcataattcatgccctgtgtgccgctatgaattgcccacggacgacgccgattacgagaacgaggttcacggtggtgatgctgggtcgaggacaggtgggagcgacggtggaggtgggagtaatagaccttttcgcaggactgttaggatatatttgcgccatcctgatgctggt

SEQ ID NO: 50216 - DNA, 261 bp, Glycine max
gttgagcggttacgcgacaaatggcgatgttgaatcgttcgtgaagttgttcgaggaaatgcctgtgaggaatgtttattcttggaatgggttgattggagggtacgttcggaatggactatttaaggaggctttggagtgttttaaacggatgttggtgctggttgaaggtgaaggtaaagaaggtagtgatggtgtggttgttcctaatgattacaccgttgtggcggttttgacagcgtgttcgagattgggggacct

SEQ ID NO: 50217 - DNA, 258 bp, Glycine max
gcaggtgcaggcagatacatagatagatggcatattcatattctctttagactccccgctttcaaagctctgaaatttccgattcgggatggagaaatacgagctcgtgaaggatataggatctgggaatttcggtgtggccaggctcatgcgacacaaagacaccaaggagcttgttgccatgaaatacattgaacggggtcacaagattgatgagaatgttgcgagggaaatcataaaccatagaagtcttcggca

SEQ ID NO: 50218 - DNA, 244 bp, Glycine max
ctaatttgtgaaattcttgaagcttttttttcttagttattggttgtttaaaacagataaaaggtgactcaccagaaaaggtagagtacataggaatgagaaatttgatcaaggctgtgaaggacaatcttggacttcgaagaggaaagctattatttggatttgaaggcattaattacaggcagcttccttggggtgctttagatgacgtggtaatttgtggagttagtgaaagcacatttca

SEQ ID NO: 50219 - DNA, 175 bp, Glycine max
atcgtgatgcaatgctagggtgctatttgtgaacgctggcgtggtgaagggttacgaggggaaaacaaaatacggagcgttgaatggatgttccaactgtgttgtcgctggttacaccaagggtgatggtcttggcgctgagattgatggcactttcatcagtgtctataccgtt

SEQ ID NO: 50220 - DNA, 168 bp, Glycine max
cgttgcaagagatgtgccttaagattctggtgaagaatgttgatgctattgcttcgcttgagagtgtgccggatgccctgaggcaccggcttagccagttgctctgtgactcgaggagaattaacggccactttctcgagcttcttgtgcgtggaacgcccactgaga

SEQ ID NO: 50221 - DNA, 258 bp, Glycine max
  unsure (1)..(258): unsure at all n locations
gtcatcaatcatctatggctacctgtccctcgcctccttcaccatcgtctggttcttcaattccgtgcccaagatctaccatgttttactgtactggaagtgaggactactatgcagagcctcacttcctccaagcttgttgtctttgcagagaaccactaggccaagatcgtgacatcttcatgtctagatggaacacacgatcgagnagcaattagtgcagacaggagcaaagagagattgatgaggcaaaggtga

SEQ ID NO: 50222 - DNA, 250 bp, Glycine max
agaaaaaagaaccggaaccaaacttccagctgttggataatccagcacgggtcatgcctgcccagctgaaggtcttaagtatgacagagacctgcagataccaacccttcaagccactctccatcgggggcatcataattctgaaagacaccagcgaagacattgaggaacttgtggaacccgtggcatcacatggcccaaagattgaagaggaggagcaggagccagagcccccagagccatttgagta

SEQ ID NO: 50223 - DNA, 232 bp, Glycine max
gttgcgacacaatgctggatacgtacttcaaatgtgggtctgtgaggagtgcgaggttggtgtttaaagggatgagtagcaggaatgttgtttcttggaatacaatgattgatggttatgcacaaaatggtgaatctgaggaagcgtttgcgacgcttttgaagatgttggatgaaggggtggaaccacagactgttagtatgatgggggctttacatgcttgtgccaattt

SEQ ID NO: 50224 - DNA, 244 bp, Glycine max
gctcacatgccgggggactctaatccggctgggaatgaacatgcctgccacagctgagagagtgtgcaaggactggattggatctcaaacaactagtggaagtagtaatagccagatctctgatgtaatcctctactttggaatcattgacattctccaagactatgatattagcaaaaagatagaacatgcatacaagtcactacaagtggactccacttctatctcagctgttgatcccaag

SEQ ID NO: 50225 - DNA, 115 bp, Glycine max
gtgctatccgtcagcgcctgtggccactggtgcagcagggtcgtcagcgcacagccaacctaggcgctggcgccgcccagcccctgcgcgatcgcgcccaggctttgagtgaccg

SEQ ID NO: 50226 - DNA, 256 bp, Glycine max
gcagctgctgtgatgtcactgagctattcaactatatcctgggtggcttgtttggctagaggtcgtgttgagaatgttagctatgcatacaagaaaaccacttctactgacttaatgttcagaattttcaatgcacttggtcaaatttcatttgcatttgctggccatgcagtggcccttgaaattcaggccacaattccatcaacccctgagaagccctcaaagataccaatgtggaaaggtgtattggtgccta

SEQ ID NO: 50227 - DNA, 185 bp, Glycine max
tgctggcctacgagggtgagcgctgcgtggccggccccgctttcaaccccgccggctccttcggccgtaagatgaccatggacgctctcatcgccaagcagatgcgcgcctcgcgacaggagaatccgcactgcgagctcgtctctcttgatcgcgactgcgccaacgccttccagcactacgtc

SEQ ID NO: 50228 - DNA, 264 bp, Glycine max
gaattaaagtagcaacaaatactcttccctacacttggcagaaaaaaaatggttcaacaagaaatccgaaggggtccctggacagaacaggaggactacaaattagtgtattttgttaacatgtttggagatcgtagatgggactttatagcaaaggtatcaggtttgaaggtggagggagactgtaaatagatggtcaagaattgctcgcaggctaccagggcgaactgacaatgagattaagaattattggaggactcacat

SEQ ID NO: 50229 - DNA, 261 bp, Glycine max
ggccaggcaagccccactcaaccaccacacctctcctcgttcacgctacccctttctgctcttcttctacctttcaagttttaaaagtataaagatggcagagacattcctatttacctcagagtcggtgaacgagggacaccctgacaagctctgcgaccaaatctccgatgctgtcctcgacgcttgcctcgagcaggacccagacagcaaagttgcctgcgaaacatgcaccataaccaacttggtcatggtcttcgg

SEQ ID NO: 50230 - DNA, 273 bp, Glycine max
cagattcacagtgaaccggtaggctggggaaaaatttctatggttgaggcagaaaggagacttttggcacatgcacttttagaccctgataaccaacattttgtgttattgtctgaaagttgtatacctgtgcgccgctttgaatttgtgtacaactacttattattaacaaatgtcagctttattgacagctatgtggatcctggtcctcatggaaatggcagatatatagaacatatgttgcctgaagtagaaaagaaggatttccgaaag

SEQ ID NO: 50231 - DNA, 263 bp, Glycine max
agtgtgtcagtcattcctgttcctcaagtcaagctttgtagtgagcgcatataatggctgtagaaaggtccggaattgccaaagatgttacggaattgattggtaaaaccccattagtatatctaaataaacttgcggatggttgtgttgcccggagtgctgctaaactggagttgatggagccatgctctagtgtgaaggacaggattgggtatagtatgattgctgatgcagaatagaagggacttatcacacctggaaag

SEQ ID NO: 50232 - DNA, 252 bp, Glycine max
tgaagaacttgctcactggtcattaccagaggatgatcttgttttattggctattattggcctaaaggatccttgtcgacctggtgtcaaagatgcagtgcagctttgccaaaaggctggggttgaggtaaaagtggtcactggtgacaacgttaaaactgcgatagcaattgctgtggaatgtggaatgcttggttcgatttctgatgctacagaaccgatcgtcgttgaacgaaaaagatttcgtgcctt

SEQ ID NO: 50233 - DNA, 256 bp, Glycine max
atgtattgttaagctcatttgtcccacctaatggtctgatcaaatcggtaagggtctatccatctgagtttggccttcaacgtatgaaagaggaggaagttcgtggacctattggtctatttgatgatgaagatagcagcaatgatgaccttgacaatgagaaactgcgtgcatatgagaagagcaggttgcggtactattttgctgtggtggaatgtgactcaagtgccacagcaaattacatttacaaagaatg

SEQ ID NO: 50234 - DNA, 255 bp, Glycine max
ggccaggcaagccccactcaaccaccacacctctcctcgttcacgctacccctttctgctcttcttctacctttcaagttttaaaagtataaagatggcagagacattcctatttacctcagagtcggtgaacgagggacaccctgacaagctctgcgaccaaatctccgatgctgtcctcgacgcttgcctcgagcaggacccagacagcaaagttgcctgcgaaacatgcaccaataccaacttggtcatggt

SEQ ID NO: 50235 - DNA, 254 bp, Glycine max
cccaatatcttttccgggggtacaatacaaattccgaaccccccatattcctccctcgccgatcgctcacgtcagatttgtttttttttttctttctgttttggaatgcgcaattcttagtccaacgtccaaagtacgagaatttcaggtcaacgaaagccttcctttctcgatttctctttcatggaaaggttctggtccagatgcacaggacaatggatcagaaaatcagcagagttcccttgtttttccta

SEQ ID NO: 50236 - DNA, 268 bp, Glycine max
  unsure (1)..(268): unsure at all n locations
cttgctgctgatgagtcaacagggacaattggcaagcgtttggccagcatcagtgtagagaacattgaatccaacaggcgagctcttagggagctgcttttcactgctcctggtgttcttcaatatctcagtggtgtcatcctctttgaggaaaccctctaccagagcacagctgcaggacagnnctttgtgaatgtcttgaaggaagctggtgtgcttcctggcatcaaggttgacaagggcacagtcgagcttgctggaactaatg

SEQ ID NO: 50237 - DNA, 269 bp, Glycine max
caaaggggctatggctcgtcatggagaagtgctcaggaagacagtactcggccatgatactctctgaatgactctctggcagaattccatgatcctgcaaaagcagacaagtttatgaacatccagagagtcttggctgcatcgacaatcatccttccataaaacctactgatagtgtgctagttacaggggcgctgctggatagtttagtcgacgcgagtactgatctcactaccgcttcgcagatgatctatcggcagtcgtcgtcg

SEQ ID NO: 50238 - DNA, 264 bp, Glycine max
gcaagaatggcacttcgttgcttggtgatgtccctttctgttctcttcactcttggtcttgcgagagaaagccatgccagagacgaagatttttggcatgctgtttggccaaacactcccattccaagttcatcgcgagatcttctaaagcatggccctgcaagtgtagaaatcgatgatcaccctatgcaaattgaagaaacacgtacccgaaaaccttcttctataaagaagaccttcatccaggcaaaacaatgaaagtac

SEQ ID NO: 50239 - DNA, 261 bp, Glycine max
ctgtctctgtgtttgcggctgaggattccgaatgagcgacgttctaacgttctcgcaaagtttaagtcatcatgggtaaggagaagactcacatcaacattgtcgtcattggacatgtcgactctgggatgtcaactaccactggtcatttgatctacaagcttggaggtattgacaaccgtgtgattgagaggttcgagaatgaggctgactgagatgaacaagatgtcattcaagtatgcctgagtgcttgacaagctc

SEQ ID NO: 50240 - DNA, 252 bp, Glycine max
ctgcaaccgcttgggtccaagctggtgcaacacttggtgcagttcattatagacttgctgagaagagtaaaacccatgctttcccagcaggggtttgtcacacagttggggtgggaggacacataagtggtggtggctatggcaacatgatgagaaaatatggtctcctcagtggataatgttattgatgcacaaatggttgatgttcaaggtagactgcttgatagaaaatccatgggtgaagatctcttt

SEQ ID NO: 50241 - DNA, 249 bp, Glycine max
attgaatctcagaattctctaaaagagatctttttctgctctttgaagaaagaagggtctttgcttgattttggagatgtctctgctctcagatctcatcaaccttaacctctccgataccaccgagaaggtgatcgcagagtacatatggatcggtggatcaggaatggacctgaggagcaaagcaaggactctcccaggaccagttagcgacccttcagagcttcccaagtggaactatgatggttc

SEQ ID NO: 50242 - DNA, 244 bp, Glycine max
agattctattgtgagctataagctagtttctcgtgaggccaatatgcagttgtgtgttttctttgttgctgcaggagtcttggtagcatggccatgccatggcgcaggctaccaaaggttccctctccgaatgaaaactggctatggtgagcgttcttcggtggtaaaatgcgcaagttttaggcttgctgtggtagcacacaacatccgagcctttaaaaccattcctgaagagtgcgttgac

SEQ ID NO: 50243 - DNA, 220 bp, Glycine max
atcgttgctgttctaaagcactcatccacacattctccgttggtacgacaacaatggatccaaagacaggtgcgataggaggacttgtagcagcatcgaagaaggttcacgagaaggtaatgaactcgttgttcgagaagcgtccgaagcagatcgggatcagaagcacgatgccgtcgaagcgggacatgacgcgattcgtgaagtggacgttgaacgt

SEQ ID NO: 50244 - DNA, 276 bp, Glycine max
attcaatgtctagtccacactcctccacgttctgcatctttctcaggagattgcagtgctggcatcaaggtggacaatcctctaggaatgtgtggtgagttcgcgcttgcatttggtgccttgttgaggacattgtggctcttctcggcgaactgctattgcaccccgtgcattcaagagcaaattggcccgatttgctccacaattcagtggttataaccagcatgattctcaggaattgcttgcctttttattggatggattgcatgaagattg

SEQ ID NO: 50245 - DNA, 257 bp, Glycine max
gtatcggtcaccgctacgcgtacagtgccggcgaacagatgccggtgcacgtggattccagggtgaagggtgcagttgctcccatcaaagatcaaggaagtcgtgtaagttgttgggcgttctcaacggtggccacagtggaagcaataaacaagatagtgacatggaagtttgtgtccttatctgaacaagaacttgtggactgtgacagagcctacaatcaaggatgcaatggtggccttatggactatgcattc

SEQ ID NO: 50246 - DNA, 266 bp, Glycine max
gttagatagattgatgcctttatttttatctttgttttgaactactatgattactgttttctgtataggagtatgtgttgaatgattattgagttgcagcactgatcagttcttagaacatgaattcagcatccccgcagtttgtttccccgagaagtatgagtgtgtacgatccgatccaccagattagtatgtggggagaaggcttcaaaagtaatggaaatttaagtgcagccatgcctttaattgatgaggcagacatgaag

SEQ ID NO: 50247 - DNA, 257 bp, Glycine max
tgcaggtattacacggtgagccttgccattggcaatccccccaaggtttatgatcttgacattgacacaggtagtgatctcacttgggttcagtgtgatgcaccatgccaaggttgcaccatagtaagtttcaaacgttctcaactacttttacttattattactaattactaaccaatcatcttatgatgaatgatgatgttcatttccttaattggtgcttttttagcctcgaaatcgactttataaacccaatg

SEQ ID NO: 50248 - DNA, 232 bp, Glycine max
gtctccgctgtcttggaccacgagggttcagattgcaattcatgctcataggggccttgaatagatacatgagcacacaaaaactcattatgttcaccgtgatatcaagacaagtaacattttacttgatgcttcctttagagcacgaattccagattttgggttagcggaacttgttgggacaaccaatgagggagaaatttcaactatcaaagttgttggtacatatgga

SEQ ID NO: 50249 - DNA, 221 bp, Glycine max
ctctctgcagcaacaagatgtggaaccacccattgagagaaaccgatgacgaaagcggatctcgtccgctgtagtggctgatcatctagttttgccaggttcctgactgaaagtgggacttttaaggatgcagatctgctagtcaacagggatggagttcgaacggccgcgcagaatgatgtcgaagctccacctccaatgacgcctacagacaaccagtt

SEQ ID NO: 50250 - DNA, 274 bp, Glycine max
attaaattaaaagtatcgttgaccaactgaaatatgtccacaccgtcgcggagatcggttgccgttgccgtgagcggcgggtccaagggtagccggcgagcagtgcagtgggctgcggacaatttggtccctcaagccgataggttcatcttagttcacgtcatccctcgaatcacttcaattgcaacaccaactggagagtatattcctatttccgaagcagacgccgatgtgtttgcagcttctgtgctggatgcgaaactaaaatctgaac

SEQ ID NO: 50251 - DNA, 273 bp, Glycine max
agcgactttgaaccagaagctatacttcacagctacaaaaaaagctttaatggtttcgtcatcaagttaacagaagaggaagcacaaagaatggcagaaatggacaatgttgtctctgttttcccaaataggaaaagtcgtctgcagacgactagatcgtgggacttcataggcgtttcacagcaaatccaaagaacaagtttagagagagacataattgttggagtaatagactcaggactttggcctgagtctaagagcttcagtgatgaa

SEQ ID NO: 50252 - DNA, 251 bp, Glycine max
gttgcagatggaggtggaaatttaccgcgtaacgcagactggctccttgacgctcgcggaaagaaagccggaaaatcaaaatcatgccatcatcttcactcgcggtgatgcagttcagactattgatatgaatcaggacaactactttgaggaggcacttaaaatgcgaaatctcttggaagaatacaggagttactatggtatccggaaacccactattttgggagttagggaacacatttttactggtt

SEQ ID NO: 50253 - DNA, 259 bp, Glycine max
tttggatttctatgtccacctctgtggtactatgcaacatgatatgagatccatccaattccacaaccataacatggaaggggtttatcataaagtcccgtttggaattggatggttctcatttctttttggatttctatgtccacctctgtggtactatgcaacaatcctctactttggaaattattacaggaaagatcctagggaacgggcagggttaggagcctactgcaattgctgcattaatatgctcagtagc

SEQ ID NO: 50254 - DNA, 257 bp, Glycine max
ataataattggtgcaaagtacttcaatctggtaaatcactttaccaaagatgatatcatatctccaagagactcgcaaggtcacggatcacactgtgcatccacagttgctggaaactcagtaaactctgcaagtctatctggatttggctcagggactgctcgtggaggagttccatctgcccgaattgctatgtacaaagtatgttggctcacagggtgtggtgatgctgacaaccttgcagcatttgatgaagc

SEQ ID NO: 50255 - DNA, 252 bp, Glycine max
cgatgagatgcatcgagcatgtatctagtatgtgggaagaatgtgctgattgacatgcgcgtacttatggcatatgttcaggccattcgtgctgcgcgacattaccttgatcttgagtatcggtatctcattgggtcttcatatagtcggagtcatcgtctcgaccttggtgcgaataatagcatgcctatcgaaatttcgctgaagactgctgcatagacaacggcctatgagccatttgcagtgtccatt

SEQ ID NO: 50256 - DNA, 289 bp, Glycine max
gaagcctttagcctcattgacaaggattctgatggtgtgttttcttggcaccttgatgatttgttgttcactttttcattttgatgtgaaaaggggttttagcattgattttgacttttttttttggaaattgttggtgatgtctaggattcattactgtggatgaattgacaaccattatccgatcattagaagggaatccaacgaaagaagaactccaaaacatgattagtgaggtcgatattgatgggaatgggagtatagattttgaagagttcttgaatattat

SEQ ID NO: 50257 - DNA, 279 bp, Glycine max
attccacaaaaagatgcctccagaagcaattgatcttgcatcccggcttttgcaatactccccaagtctccgatgcactgcgcttgaagcatgtgcacatcctttctttgatgaacttcgagaacccaatgctcgcctgccaaatggtcgtccatttcctcctttatttaacttcaagcaggaagtaagtccttaaattatctgtcttcatcaaatttgtgctttggcagtaaactatttgtacagaatttcaaaattaggaataaaatgtgatactgt

SEQ ID NO: 50258 - DNA, 269 bp, Glycine max
cgcagtttcttcctttctctgctctgtgccttctctgacacatttggtgccttgtacagcgtgtgttggcaagtaggtggtatggcgaaggacgttgaggttgctgcgcgtggctccttctctgggaatgactaccacgaccctctaccagcaccactcattgatgctgcggagctcacatagtggtccttttacagggctcgcattgctgaattcattgccactttgctcttcctctacattcatgtgctcacagtcatagggtacaa

SEQ ID NO: 50259 - DNA, 267 bp, Glycine max
gtagtactgatcaagggtgtctgtttctatgtctctgtgtgtttcgtcactttctctcgtttcaatcgaaaaagatcatgggtagaagattagtcgtcggtggcaactggaaatgcaatgggaccactgaggaggtgaagaagattgttactactttaaatgaggctaaagtccctggagaagatgttgttgaagttgttgtgagccgccttttgtgttcctccttttgtagaggtttgctgcgcctggatttccatgtctcggccc

SEQ ID NO: 50260 - DNA, 264 bp, Glycine max
aaactaagatagttactcggagggaaaaagagaaagaaaaagcttgagagatggagaacttccctgtgatcaacttggagaatatcaatggtgaggagaggaaggctatcttggaccaaattgaagatgcttgccagaactggggattttttgaggtaccccacaaccacaaacttgcttacaaaagctgtcatactcatactcaaattaatacagtatatccatctatacatctgcaacttaaagttttcttaatcttgttca

SEQ ID NO: 50261 - DNA, 266 bp, Glycine max
agcagcccaggaacatcagttcagaagcaaagaaaaacattcctttctatatgtttattgatgaagaaacagaaatgtatatgaagaatgccagtattttgagtagcagcaggagagttggattatggagaatcatcattgtccgtaatattccttatgctgattctcggcgtaacggaaaggttccaaagcttcttttacacaggatcttccccaatgtccgatattcaatatggattgatgggaagcttgagcttgttgtggac

SEQ ID NO: 50262 - DNA, 245 bp, Glycine max
tatgaatccagcttggtaggggaaatccctgaagccattggacacatggtggcattggacgaattggatttgtcaaaaaatgatttaagtggacaaattcccaatgatttgttcatgctgaaaaatctgagcatactgtatctttaccggaacagcctttctggggagatacctggagtggttgacgcattccacttgacagagctttctctttcacagagtagacttagtgggccgataccaga

SEQ ID NO: 50263 - DNA, 256 bp, Glycine max
gccaggcaagccccactcaaccaccacacctctcctcgttcacgctacccctttctgctcttcttctacctttcaagttttaaaagtataaagatggcagagacattcctatttacctcagagtcggtgaacgagggacaccctgacaagctctgcgaccaaatctccgatgctgtcctcgacgcttgcctcgagcaggacccagacagcaaagttgcctgcgaaacatgcaccaaaaccaacttggtcatggtct

SEQ ID NO: 50264 - DNA, 196 bp, Glycine max
  unsure (1)..(196): unsure at all n locations
ctnctttgtgtgtgcgtgtccgatcgagccagttgggtgcccatggctacgatcgnacacagcagtctcagtgccaaagtggttctgctcggggacatgggtcctgggggatccaggctcgtgttgcgcttggtcagggcgcaatttctcgaatttcatngatcaacaataggcgcagcgttcttttcacagacgc

SEQ ID NO: 50265 - DNA, 270 bp, Glycine max
ggccaggcaagccccactcaaccaccacacctctcctcgttcacgctacccctttctgctcttcttctacctttcaagttttaaaagtataaagatggcagagacattcctatttacctcagagtcggtgaacgagggacaccctgacaagctctgcgaccaaatctccgatgctgtcctcgacgcttgcctcgagcaggacccagacagcaaagttgcctgcgaaacatgcaccaaaaccaacttggtcatggtcttcggagaaatcac

SEQ ID NO: 50266 - DNA, 275 bp, Glycine max
aggaattgttgtaactttgtggttgctacattctctcagtttctagattctatcttcgctatggtccgcagattctatgtgcgtgagtgagtatggctagaaaaggtgaaggtcctgctatcggaatcgatgttggaacgacgtactcttgcgttggcgtgttgcaacacgatcgtgttgaaatcatagtcatcgatcatggtaacagaactactccatcctacgttgcttactctgacgcagaacggttgatcagcgatgcggcgaataacagg

SEQ ID NO: 50267 - DNA, 222 bp, Glycine max
gattatcgtaggtcttcgggaatagcgctagaatggcttcaagtcaggaggaggtgactcttttgggagctactggaagcccatttgtgtgcagggttcatattgccctcaagttgaagggagttcaatacaaatatgtcgaagaagatttgaggaacaagattgaactgcttctcatatccaacccagttcacaaaaacgctccagtgtttattcgcaatg

SEQ ID NO: 50268 - DNA, 184 bp, Glycine max
aagttctaaggtatctactctcgaattcaagatggtggctggatgaatacaagtttcatggatttcgatttgatggtgttacatcaatgatgtacactcatcatggattggaggtagcatttactggaaattacaatgagtattttggttttgcaactgatgttgatgctgtgatttacctgat

SEQ ID NO: 50269 - DNA, 267 bp, Glycine max
cttcaagggcaagtaccatgatgagcttatcgccaatgctgcgtacattggcactcctggaaagggtattcttgctgctgatgagtcaacagggacaattggcaagcgtttggccagcatcagtgtagagaacattgaatccaacaggcgagctcttagggagctgcttttcactgctcctggtgttcttcaatatctcagtggtgtcatcctctttgaggaaaccctctaccagagcacagctgcaggcaagccctttgtgaatgt

SEQ ID NO: 50270 - DNA, 275 bp, Glycine max
attcgcagagccgctttctttgtttttggactgagagattaccaaaacaaacccacgaatttttggtgtggcagatcacgattcctcagaaaactgtaatgggttggtgtccaatgatgtgctggatttggttggccctgatgctaggcttctctatgtgggcaagactgctggctatcatagcagaacacaggaggagatacatgagcttcttttgagttttgcagaagctggggcaactgttgtgagacttaaagggggtgatccattggtgt

SEQ ID NO: 50271 - DNA, 270 bp, Glycine max
tgagagtgaaacattcttgcagaaggcgatccagcagcaaggtagagccagtgtgatggacacgatccaagagattcaagagaggcacgacacagtcaaggaaatagagagaaacctaaacgagctccaccaagtgttcttggacatggccgtgctggtgcagtcccagggcgaacaactggacgacatcgagagccacgtggcgcgcgccaattcgtacgtgcggggtggggtccagcagttgcacgtggcaaggaagcaccagaagaa

SEQ ID NO: 50272 - DNA, 266 bp, Glycine max
gtgcatcccatattctggtatatgatcggaagtctcaaaggcttgttgaagaaataattgacaaaaaaattgtattgtccatgagagccatttatcagtcaaaaataggtcttggcctaatggacataggggtgaaggagctcttgcaaagcatttctgaaaagcaaggagcacgaatggattcacctgaatcgtctgcagatataccaaaatttattgaatcttttaaggatcaaatcaatttggctgaagtcaagtatccactg

SEQ ID NO: 50273 - DNA, 259 bp, Glycine max
ggaatggatgccataaaactggagggagggtcgccttcgagaattgttgcagcaaaggctattgttgaggctggaattgctgtcatgggccatgtaggccttactccccaggccattagtgttttaggggggtttagacctcaaggaaagaatgttgctagtgctgtcaaggttgtagagacggcattggctttacaagaagcagggtgcttttctgttgttctagagtgtgtgcctgcaccagttgcggctgcaacca

SEQ ID NO: 50274 - DNA, 259 bp, Glycine max
ttctgaaccaacacaatgatggaatggaagggtcttgcgttcttctgcggtttgatagatagctagccatgttggcatgaagatttgagcgggaaaataataagacaacatacataacgttttctcaaaacggcagtttgcctgcactgatcagttcttagagcatgaattcagcatccccgcagtttgtttcctcaagaaggatgagtgtgtacgatccgatccaccagattagtatgtggggagaaggcttcaaaag

SEQ ID NO: 50275 - DNA, 208 bp, Glycine max
caggcaagccccactcaaccaccacacctctcctcgttcacgctacccctttctgctcttcttctacctttcaagttttaaaagtataaagatggcagagacattcctatttacctcagagtcggtgaacgagggacaccctgacaagctctgcgaccaaatctccgatgctgtcctcgacgcttgcctcgagcaggacccagacagc

SEQ ID NO: 50276 - DNA, 102 bp, Glycine max
gttttggggacacatagtaatggcttatgcgttcaccttttggactcgctatgtttagctaaaggagtatgggaaggttgcaacaatgagacttggctttct

SEQ ID NO: 50277 - DNA, 247 bp, Glycine max
tgaacttgctgatgaatcacatggacccaagtctttgacatcacgatatagtaacctttgttgggaagccatcaaatatgctgaagaaggggcattgactgtggaaacttatgatactgcaattagtgctcttagagaaagtggaaagaagatttctttcatgaggagaagtgttgctaaagttgccccacccagtcatccagtcagtgggactgcttatgatgacagaaaatcccctacttcagca

SEQ ID NO: 50278 - DNA, 268 bp, Glycine max
ccataattgtaatcccacaaatgtttcctcagctgaagtggttctacgtggtggtcgcatacatcttagcgccatccctggcattctgtaacgcttaccgaacgggcctcaccgacatgaacatggcacacaattacggcaaagtggcactctttgttatagcagctatgagcgggagagacaacggggtggtggcaggactcgtaggttgtggtctggttaaatctgtggtctccgtggcttgcactctgatgctcgatttcaaaac

SEQ ID NO: 50279 - DNA, 263 bp, Glycine max
ctctctctctttctctttctctctcatccagatcttgcaaaaaaaaaaaaaacccaatggcagcgagcgctcccactccacgcgaagatttcgtgtacatggcgaattggcggagaaggccgagcgctacgaggagatggtggatttcatggagaaggtctccgcctccgccgaaagcgaggagctgaccgtggaggagcgaaacctcctttccgtggcctaaaagaacgtaatgggagctcgccgggcctcctggcgaataa

SEQ ID NO: 50280 - DNA, 259 bp, Glycine max
ggccaaggtggggtgaaccgtgacaagggagcaagtgatcaaaagcttgaaaggggtaatcttgcattggagaagagtgcgcatagaggtaatgaagtaagagtaattaggggtttgagggatccacaacatccaactgggaagatttacgtctatgatggcctttacaagattcaaaattcctgggtggagaaagcaaaatctggtttcaatgtattcagatataacttagtcaggttgcccggacagcctcaagctt

SEQ ID NO: 50281 - DNA, 255 bp, Glycine max
gttctggtttacatgccttctgggcagcttgccaaagacgttgaaaagatgtctgatgaagcagccgtcaacttcgctttcatgcagctcatgaagattcttccagatgcttcttcaccggtaaccatactaattttgctcttattagtttcacttttagccgtgcaagaaaaatgaatcctttcatcactaaaacattgtctaaaatacgtaggcccttatataatttagccttattgcaattttgtcctagta

SEQ ID NO: 50282 - DNA, 260 bp, Glycine max
tgctgtttcaactccattagccttgattattgatggtaccagccttgtttatattcttgacagcgagcttgaagaagagctctttcaactagcaaatagatgttctgttgttctctgttgtcgagtggctccgctgcagaaggctgggattgtagcccttgtgaagaataggaccgatgacatgacactagccattggagatggtgctaatgacgtatcaatgatccaaatggctcatgttggagttgaatcagtggaca

SEQ ID NO: 50283 - DNA, 261 bp, Glycine max
gccaaccattaaccgagccaatgtttatgtgggtttccaagtgcagctagatctgactggtattttcatgcatggaaaaataccaactttgaagatatcccttattcagataagaagagctcacttgtggcagaagatccacgagagtgttgttatggatctctgtcaggttttggatcaagagttggatgctttggagattgaaactgttcagaaggaaacagtgcatccaaggaaaagctacaaaagaacagttcttgt

SEQ ID NO: 50284 - DNA, 273 bp, Glycine max
gtcgcgcaagaacccttttccttcgcgtcctggaacctcctaatcacaacaacgcttcgctttcccaaacatttacccctggattctccttccacacgctctcgcactcccaggaaaaggatggcatttgccccaaaccgcttataacttttgttttaggaggccctggtagtggaaaaggtacacaatgtgcaaaaattgttgaaacctttggatttaagcatctgagtgctggagatcttttgagaagggagatggtttctgatagtgaat

SEQ ID NO: 50285 - DNA, 266 bp, Glycine max
cgccgtcagcggcactcgcagaacctccctcttaacctggctcacttccgtcatcaccgtcttcatcatcgccttcatcatcgtagtcggcttcgtccacggaaaagcctccaacttgacgccgtttctcccttacggcgtcgacggcgtcttcaacgccgccgcagtagtgtattggtcctactccggtttcgacatggttgccaccatggcggaagaaacaaagaacccttcgagggatatccctattggcttagttggatcat

SEQ ID NO: 50286 - DNA, 260 bp, Glycine max
gcttttgctgctgcttcagattcccacatcttgaatatagcttcagtgagtctttctctggccaaatctatatcaattcttggcttggcataactccttctgctctaagcacaggatgcggtgcgtctgaaggatgatggatccactcagttggctttcttgccatctcagaattctattccggtgaactactctgatgtgttggagataagaaagaccaagggggtgaagattttgaggcctaattctgctccaggagc

SEQ ID NO: 50287 - DNA, 265 bp, Glycine max
tttgcacaccctgttgagtttgatagccttgtcttttctgggtatcttcctagtcttttgtttcatcatgttaaccataattataggaaaatcaataggggaccctgattatgctccagtaaaaggcacagtgtttaaccagctattatacttcaacacactccatgactaccatgctcaactggccaaaactaatccaacttttcggctactggctccggatcaaagcgagttgtacaccgcagacccgcgaaatgtcgaacac

SEQ ID NO: 50288 - DNA, 259 bp, Glycine max
tacgtgctgaagtcctttcagctcagcagggtcaagtggctcagccatcaaatgttgagtctcaaaacactggggatattgacccagagttcctagcagctcttccagctgatattcgagccgaagttctagctcagcagcaagcacagaggttgcatcagtctcaggagctggaaggtcaacctgtggaaatggatacagtctcaataattgcaacttttccatcagatttacgagacgaggttctcttgacatcacc

SEQ ID NO: 50289 - DNA, 227 bp, Glycine max
tgcctttgggatttcaaaagaaactatgcaaaatgtttgtaataagtttgtggtgaaagacgaagatttgattttattggcttatcccaagtcagaccaagggagatcccaagtggatccaatctgtgaccatctgggatcgctcaccctggatagagactgatgtaggatatgatatattaatcaaaaagaaaggaccacgactcatgacctcccatcttcccatg

SEQ ID NO: 50290 - DNA, 221 bp, Glycine max
cttggtttcggtttcaggtagactggactcctgagctacataaaaaatttgtgaaggctgtcgaacaactaggtatcgatcaagccattccttctagaatattggagataatgacagtggaaggcttgacaaggcacaatgtggcaagccatcttcagaaatatagaatacacaagagacaaagtgcacccagggaagaagatcggaaatggcataatcaa

SEQ ID NO: 50291 - DNA, 220 bp, Glycine max
cttctccaacctctcagtttctcttgccttcaccagatggctacatgaattttctctcccctcagtctggttatccaccactgttgtcccctggcattcagtttccatctccttttactccccatttccctttgtcaccctttgcacagtcggggattttaggccccgggccgcagcctccactttcgccagggctgtttcctttgtctccttcaggttt

SEQ ID NO: 50292 - DNA, 263 bp, Glycine max
gtctaagaaggagtgtgatttgattcgaaagcagtggcatataattgttgatggcggtgatatcccacccccgattaagaattttaaggatatgaggtttccggagccggttttgaagaagttgaaagctaaggggattgtacaaccaacacccattcaggtgcaaggtctgcctgttatcttatctgggcgggatatgattgggattgcattcacgggctcaggaaaaactctggtctttgtgcttccgatgatcatgatgg

SEQ ID NO: 50293 - DNA, 271 bp, Glycine max
ggccaggcaagccccactcaaccaccacacctctcctcgttcacgctacccctttctgctcttcttctacctttcaagttttaaaagtataaagatggcagagacattcctatttacctcagagtcggtgaacgagggacaccctgacaagctctgcgaccaaatctccgatgctgtcctcgacgcttgcctcgagcaggacccagacagcaaagttgcctgcgaaacatgcaccataaccaacttggtcatggtcttcggagaaatcacg

SEQ ID NO: 50294 - DNA, 265 bp, Glycine max
ggggaaaggagaatggcaggtcttgcaaaggagtacccaaaattggtcaggaaggaaacgctgttggagccatctgaccttcgtttcttccaaaatcattcatcccagatggcagcattggattatcttgtctcgttagagagtgatatttttgttcccacatatgatggaaatatggccaaagtggttgagggccaccgcagatatcttgggttcaagagaacgattttattgaacagaaagctcctagttgaattgatagatc

SEQ ID NO: 50295 - DNA, 132 bp, Glycine max
gatattcccagaccgcgagaggactgacagtggcacctacggctgtacagctatcagcaacatgggcagctactaggcctactacaccctcaatggtaatgacccgagtccggtgccctgctcctcgagtac

SEQ ID NO: 50296 - DNA, 121 bp, Glycine max
catcggggcgctgagccaggtctccggcgtgacaggttgccagtggggcgacgagggcaaagggaaactcgtcgacatattggcccagcacttcgaaatcgttgctcgctgccagggtgga

SEQ ID NO: 50297 - DNA, 125 bp, Glycine max
cggctcgagcagctttccgttgcacaaacagtgaagtgacagtccagcccagcccctatttgagttaccggctacccaaggactttgtagacctctctactggggaggacgctcacaagctaata

SEQ ID NO: 50298 - DNA, 274 bp, Glycine max
gtttcctcaaaagaggtagcacggctgaagaagttggttgcatattggaaacaacaagctggtagaacaggttttaaggaagcgctattttaatgtaatagtagacatgcagggcaagatcagagtttactgtcgactaagacctcttagtgacaaagagattgttgagaaagaaagagaagttcttactgcagttgatgaatttactgttgaatacccatggaaagatgatcaactgatgcagtacatatatgaccgagttgctgatgctaat

SEQ ID NO: 50299 - DNA, 269 bp, Glycine max
gtgatccgatccagaggttaggtgcctacatgttggagggtctaagagcaaggttggagtcctcagggagcataatctacaaggccttgaaatgtgaacaaccaacaagcaatgatctcatgacttacatgcacatcctgtacagatttgcccatattggaagtttgcttacacatctgcaaatgctgtcattggagaagcaatgctgaatgaatcaagaattcacataattgacttccaagttgcacagggcactcagtggctgttgc

SEQ ID NO: 50300 - DNA, 259 bp, Glycine max
cggctcgaggtatcactaaaaaaagtatcaggaatccaggcagcatctccagagcctgaaaatattaatgcagctcttcaagaaacagaagtgccttatatatctattgcatgtgatttaattaaagaaacaaactttctgctgaaccagctccgaatttctctgattattcagaaatggcaaaagttgaacagccagtgcctgatcattctgagctagttgaagattcctcacctgattctgagcgagatgacttatt

SEQ ID NO: 50301 - DNA, 262 bp, Glycine max
cgagatctaggcgagggccacttcggcaaggtcagcttgtactactacgatccgaccaacgacggcactggcgtgatggtggcggtgaaagcccacaaggcatcgtgcggcccccagcaccgctcgggctggaacacgagatcgccattctgcacacgctctagcacgagcacatgcatcaagtacaagggctgctgcgaggaccaaggcgagaagtcgctgcagctggtcatggagtacgtgcccctgggcagcctccgag

SEQ ID NO: 50302 - DNA, 254 bp, Glycine max
tttctaatgtcattctcgttctgttcaaacactctctctcacggcatcagataagaagactaggatcggcatcaacgggtttggaaggattggccgtttcgtggccacggctgccctccacaggaatgatgtgaacttgttgctgccaacgatcctttcatcaccactgactacacgacatacatgctcaagtacgacaccgctcacggccagtggcagcaccccgacgtgaaggtgaaggactctaagacctt

SEQ ID NO: 50303 - DNA, 278 bp, Glycine max
tgcagttatggaatgttgcgtttcacagtacttctccgagatgggttcactctgtgtatttggctgccattgcggctgactatgccagggaggtggaggcggggctgatggagtacaagccagatagcatcatcagtgtccatcgctggatgcggcatatgccatggtgggttgctagagtggcaaggtgtgcaggggagagtgatttttgtcacagtgatcacggaccttagcacatgtccagcctaattggtcgcatccttgggtgaatagatgtt

SEQ ID NO: 50304 - DNA, 270 bp, Glycine max
caggagggtctggtgtttacccgtatggacgcctgagaataatgtccagatatcctgtaccaaatatgtgatgtgactaagcgagagactgatctatcatctgcggagttcatagagaaatttgggatgtccaaggatgccttttacaagttacccaaatggaaacaaaacaaactcagaatggctgttcagtgattctgattgcttgagagtgttcttagcctgcggtcagctccctgcagtgaggtttcagtgaggaactagacatgt

SEQ ID NO: 50305 - DNA, 271 bp, Glycine max
ctggagtgcagatcgtcccccgggcaatgaaccatgagattggaacatcaggaggaaaatatcggcgggggcagctaaagtagtggaataccttgcacgacagagcaaaccctcctgtcagtgatagagacggcatatgcagcgaggatattactggatgtaaggttagcgatccaaagcgttcagacggtggtcttgcaaagcttgttccgagtggtgacaaatcacacggttcataccgtgtcatgggaacttatgggtacggtgcccc

SEQ ID NO: 50306 - DNA, 264 bp, Glycine max
tgatcctgttgggaaggattctgtcgatatggcaaaaaatcttcctagggaaatgctgattaatcttttgaattgtttggaatcaacctttgcgatatgtcttgtttgcaacgatcctcctgaagagcctgttattacgatgtgtggtcatgtcttctgttatcaatgtgtatcagaatatttgactggtgatgataatacgtgcccgtcagttaattgtaaagaactaattggcgatgatcttgttttctccagagcgacttt

SEQ ID NO: 50307 - DNA, 274 bp, Glycine max
ctaatatattccattctctctgtgtattgccctacctctcgcttcaagatgcagatgcttcgtcaagactcgcaccggcaagaccatcagccgtgaggtgtatagctcggacaccatcgacaacgtcaaggccaagatccaggacaaggaaggaatccccccggaccagtagcgtctcatgttcgccggaaagctacttgaggacggccgtaccctggctgactacaacattcagaatgagagtactcgtcacctcgtcctccttctccgtggt

SEQ ID NO: 50308 - DNA, 239 bp, Glycine max
tcttcagttctcgttgttgtgctgcgctgtccttgaactaggggttttcaatttcggttcagtcgttgataattaaatatgtttttgagggcacctgagaagagcgagaatacgagttactactagatcctcggcgtctcgaagaacgctgcgcatgatgatctgaagaatgcttactagatagccgccatcaagaatcaccctgacaatgtcggtgatcccgagaagtttaaagagct

SEQ ID NO: 50309 - DNA, 268 bp, Glycine max
atcaaccttcgtgtcttgcaggttcgtgatcattttcattaccagaaggtgggtggcaaattgcaatggctaagcatgatgttgatggtggttccttctctgcaaaggactatgatgatcctcctccagcaccattgattgatgctgatgaactcacacagtggtccttctacagggcttgtattgctgagttcatggccacaatgctcgtcctgtacgatcacagtgctcactttgattgggtactgtagccagattgatgtaaagt

SEQ ID NO: 50310 - DNA, 255 bp, Glycine max
tctctcactcgcgaacacacactgaactagagaacatcattggagtcttggcggatgagtccttcagcattatcatgccttattgcgtccaaagaggccttattggcgagatcattagcagatttgatggtgtaggtgtctactttgaaaggtgtgtaactgttactttggacctgcgtgttgtcttataagcactatgctgatttgtctgccaagcctttctttagtggtgtggtggattacatgatctctggc

SEQ ID NO: 50311 - DNA, 257 bp, Glycine max
aggctcgaggcccactgtaaggagtataaaaatctgaattccttttttgccatcgttatgagactaagtaacgttgctgtgagccgcttggcactaacgtgggagaaactggccaggcaagttcaagaagttctatgcggagtttgaaagtgtaatgcgcatgattgcaaatacggcactacagtgagatgctacaggagccaacccttcaatcctgatgcaactcatgctagtaagaaggagcaggatttccggag

SEQ ID NO: 50312 - DNA, 261 bp, Glycine max
cattgtaatcctcattacatgctgtttggcaagatctggatgcagttacaagtgaccgtaatagacttatctcattatacaatgacaaagataaggaactacaggctgctattctagacaaaaggaatatggaatctaggatgtccaagttaaataatgcggtgatagagaacactgctaaaaaggatcttgctaatgctggaaatagacaagtgagtcaaaagcttgatgatgagctagaagtttgcaaatatgagctgc

SEQ ID NO: 50313 - DNA, 270 bp, Glycine max
cttgagaccatggcgcatagcttgaaatatccaggaggtattatagagcatatagctggagatttgaatgccgattctgttcttggcacagcagatgtagtgatatatggatcctttcttgaagaacagtcttttccagagattttgatcaaagccatgtcctttgagaaaccaattattgcacctgatgttcccatgatcagaaaatatgttgatgacagggtgaatggctatcttttcccaaaggataatattagagttctgagacaa

SEQ ID NO: 50314 - DNA, 273 bp, Glycine max
caaacttgtgcggttgcatgctatagcattgctgttggaggaggatttgcttcgtatctgttgggattaaacaggacgacttatgagttgtcaggagttggaaacgagggtaataatccaggtgctatcaaagaacctggatttggttggatgactggcttcctttttgtggtttgctttgttggtctcttggccttgattccactcagaaagatcatcatagttgacctcaaattaacttatccaagtggcttggcaacagcagttctcatc

SEQ ID NO: 50315 - DNA, 268 bp, Glycine max
cgctgctcatctggtcaacaaagactatctagctaaatacgagaaagccgttaacctgatgaaaaatctcccgtcagatgatccacgtagtttcgcgcaacaagccaaagttcattgtgcttattgcgacggtggatatcaccaactaggcttccctgaccttgatctcgaagtgcacttctcttggctcttctttccttaccacagatggtatctctatttccatgaaaggatattggcgagcttgatcaatgatccaacctttgct

SEQ ID NO: 50316 - DNA, 273 bp, Glycine max
cacttgtcggaagacttaacaagaaaagttccaagggactgactgagcttcagagaatgggaatagggcttgttatagctgtaatggcgatggttacagctggaatagttgaatgctacagacttcagtatgcagacccagtatgcccccactgcagtggcacaagctctttaaccatcttttggcaaattcctcagtacacacttattggagcttcagaggttttcatgtatgtaggccagttagagttcttcaatgctcagacgccagatg

SEQ ID NO: 50317 - DNA, 255 bp, Glycine max
ccgtgatgttgaagctctaggcgacacgccagcctttgtgtcgcacattggagacattagtcatgcaagaggttattcctggttgtgggaccattttttcgcccagattgaacctgttgcctcccaagtggcataccatgtttgcattggcaatcatgagtatgactggcctttgcagccatggaaacctgattgggccagttatggaaaagatcggggtggtgagtgtggtgtgccttacagtttaaggtttaa

SEQ ID NO: 50318 - DNA, 269 bp, Glycine max
gaatgcctcctggccgtggccctggcaggcgccccttaccaggctgtgggcttggtccaaggcactacacctgtactgcaggggctcaatggagctgtataagaagccagaagtgcctctccgcagggacctgcccctgctcctattccggactcagacctctgaccctgcaatgctgcctaccatgattggcctggcagaggcaggcgtgcggctgctgtcctaccagacttcactggtgtcagatggggagacctggcacgtcatgg

SEQ ID NO: 50319 - DNA, 258 bp, Glycine max
cgcataaaaagagggaccatatgatgtggtggttctaccacgaggtaatctgggcgcacagaatttatctgagtctgctgctgtgaaggagatactgaaggagcaggaaaaccggaagggcctgatagccgccatctgtgcaggtcctactggactgttggctcatgaaataggttttggaagtaaagttacaacacaccctcttgctaaagacaaaatgatgactggaggtcattacacctactctgagaatcgtgt

SEQ ID NO: 50320 - DNA, 260 bp, Glycine max
taaatgcaccgttctctatcctgcttctgcaaaggctagcaatgagattgaggaaggactttcaaaccgtggatttgaggttactaggatgaatacatatacaacggtgccagttcaacatgttgaccatacggttctaaagatagcacttgctgcccctgttgttacagtagcttcaccatcttctattcgtgcctggaagaatcttctttcagattctgagtggaacaattctgttgcatgcattggtgagacaactg

SEQ ID NO: 50321 - DNA, 212 bp, Glycine max
gaagtttttaaagatttcactggaacgatacgttgtgaagacccaaaccccaatctttacacgtttgttggaaacttagagtacgagcgccagatttatcctcttgatcctagtcaaattcttctccgagattctaagctcaggaacactgattacatctatggggtggccattttcactggtcatgacagcaaagtcatgcagaattccac

SEQ ID NO: 50322 - DNA, 253 bp, Glycine max
cggctcgaggcagagctggtagagtcttggtctttgtaatgggaaaagaaggggtccatggaggcggattgactacgaaggcatactcaatggcaaaatacttgagagactctgggttctagctgctaggcagactgttaagtattaggggaaaattgctcttaaactttcctagctataagcttaagtcttaattctggaaattgtattagcaatgcagggtgatggggtatgaacctgtgtctccgttgta

SEQ ID NO: 50323 - DNA, 282 bp, Glycine max
cgtgtggaaatcttgcggaggctgttggtgacctcgcaggctcgggcagtggctccaggtggagccaccaggctgacagataaggcagtgaaggactattccgcttaccgtccttcccttcttctttgggccctcgtcgatctcatttacaacatgtttaagaatgtgcctaccagtaacacagagggaggctggtcctgctctctcgctgagtacatccgccacaacgacatgcccatctacgaagctgccgacaaagccctgaaaaccttccaggaggag

SEQ ID NO: 50324 - DNA, 275 bp, Glycine max
gtcttagggcgctatgatatcggtctggttcggttcgactctaaacgtcatcgattcaaactcggagttagccaacgatgttctgacggagcacgatcagcagctggtggaccggcaccggagccggtcggcggcgaacttcacacgcgactggaacgatctcatatgggccgaatattggccgcactatgtgaacgagatgaagctgtgcacgctcgaggtttccacgccgaagcgactcaaatctctcagatccattatggacgacgacgtca

SEQ ID NO: 50325 - DNA, 267 bp, Glycine max
cccaattccattcattcattcattcgttcttcttctttcaccaacaacaaagaaaacagagaaactttcatttcatatattttcatcatcgcagcaaaggaatcaatcaatcaaaaaccatggcaggcttcagtggcgacgaaaccgctcctttcttcggcttcctcggtgccgctgcggccctcgtcttctcctgtatgggagcggcgtacggaacggcaaagagtggggtgggggtggcgtcgatgggcgtgatgaggccggagc

SEQ ID NO: 50326 - DNA, 264 bp, Glycine max
tcgagatgaaccatcagttggcttgtgatctagaagctggtggctgtggcaagctcaaccacatccatcacttactttcaactccaccccatgtttttatgacagtcctagcctggcaaaatacatgtgagagtgccaatgatataacagagactctggcagccctgagcaccaatatagatatcagtgtcctttatcctggtttagatcctaaatgcatccataacttggtgtcagtggtttgctactacgggcagcattatc

SEQ ID NO: 50327 - DNA, 258 bp, Glycine max
ctttattctagttttgttccaccacttgtctatgaggttcttggaagctcaaaggaccttgcagttggaccttttctattgcttctcttgtgatgggatccatgttgcatcaggaagtgtctcccacaacagatccaattctgtttcttcagctagctttcacttcaacattatttgccggtctctttcaagctttgcttggaatcctaaggctaggcttcataattgattttctatctaaggccattcttattgggt

SEQ ID NO: 50328 - DNA, 255 bp, Glycine max
cttagataccttggatgagcctgaagccaaggcatcaatgatctggataattggtgaatatgcggaaagaatcgacaatgctgatgaacttcttgaaagtttcttggaaagtttcccagaagaaccagcacaagtccaactacagttgctgactgctacagtctaacttttccttaagaagccaactgagggcccacaacagatgattcaggttgttttgaacaatgccacggtggagacagataatcctgattt

SEQ ID NO: 50329 - DNA, 260 bp, Glycine max
gagaaagtccttgctgggaaatcgcagattgaggactactttccagaatttgctcgctacactactcctgaggatgctactcccgagcccgggcaggacccacgcgtgacccgggccaagtacttcattcgctatgagtttctgaggatcagcactgccagtggagatgggcgtcactactgctaccctcatttcacctgcgctgtggacactgagaacatccgccgtgtgttcaacgactgccgtgacatcattcagcg

SEQ ID NO: 50330 - DNA, 247 bp, Glycine max
ctgagattaggggattactcaatacacttccacagttcactggttctgcgggaatgtttttctcctactgtatggtgtttgggatgtcactgatgaaggcgccaagctggagaatcatgttgggtgttctttcaatcccttctcttatttactttgcactcacactgttgttcttgcctgagtctcccagatggctcgtcagtaagggccgaatgcttgaggccaagaaggttttgcagcgccttcg

SEQ ID NO: 50331 - DNA, 265 bp, Glycine max
cccagaggagactcttccactctgatctcctcaatcatcttcacaacctccaacatgcacggcctcttctccgcctgcgccgccacgcacgccagtccaccgtgcagcatcgccaccaactcatcctctatgttcttgtacctcagcagctcctggtcaaacacctccgaagacaagctcgcttgattattgtctcatgcatgcttgtcatttttagttccattgtgtgttagttaccgttttctttctaaaactttgctgttct

SEQ ID NO: 50332 - DNA, 263 bp, Glycine max
gaaaaagaaacagagagaaaggatggcagaaattgaaaaagtaaaaaagagaagagaggaaagggcacttgagaaagcaaggcacgaggaagaaatggcactgttagccagagagcgtgctcgagttgagtttcaggactgggaaaaaaaagaagaggagtttcattttgatcaaagcaaagttacgtcagaaattagattgcgtgaagggcgtgccagacccatcgatgtcctaaccaagcatctcaatggctctgatgatt

SEQ ID NO: 50333 - DNA, 263 bp, Glycine max
gagaatatcattctgtcatttaatcttcaaacatcagatattatgcctgcatttccatacactgccccattctcctccatggtgcccgatgcgtgtcgcattgtgagatcctttatcaaaggctctgttgattacttgtcttatggcatacatgtgaatttctttggtgttgtgagaaagtacttggacatgttcctgattgatgtactaaatgtaacactgcttgagaaaatcaatagtgacaatgtcactgtacctcaact

SEQ ID NO: 50334 - DNA, 251 bp, Glycine max
ccaaaataaggatctagagctaattgaacagatcgagatttgccatgaagatgataaaatttttgacaaaatgcatagactgaaggtggcagacgttgaaaagcttacccagaccgtgagagaactataagaggctgtccttgcagagtggtgcagctggcaaatgctgtgagagatttcaacggaaatttcaagaaatgaatgaagaaagaaaaactcttgaccgggagttagctcgtgccaaggtaaca

SEQ ID NO: 50335 - DNA, 260 bp, Glycine max
gtcaaggctgagaacgggaagcttgccatcaatggaaatcccatcaccatcttccaggagcgagatccctccaaaatcaagtggggcgatgctggcgctgagtacgtcgtggagtccactggcgtcttcaccaccatggagaaggctggggctcatttgcaggggggagccaaaagggtcatcatctctgccccctctgctgatgcccccatgttcgtcatgggtgtgaaccatgagaagtatgacaacagcctcaagat

SEQ ID NO: 50336 - DNA, 243 bp, Glycine max
gttgtagttgttgatggttaccaaggccagcctttgatctttacacctgttaattgtaacaaaggtgtcattcgtgtttccactgatctcaacatctatttccccgttgccagaagttgtccacagaccacagtgtggaagcttaaggactatgattattcagcatcacagaggtttgtgacaactggtggtgatttcggcaaccccggttcgcaaaccgtggcgaattggtccaggatttag

SEQ ID NO: 50337 - DNA, 257 bp, Glycine max
cagaattctctaaaagagatctttttctgctctttgaagaaagaagggtctttgcttgattttggagatgtctctgctctcagatctcatcaaccttaacctctccgataccaccgagaaggtgatcgcagagtacatatggatcggtggatcaggaatggacctgaggagcaaagcaaggactctcccaggaccagttagcgacccttcagagcttcccaagtggaactatgatggttccagcacaggtcaagctc

SEQ ID NO: 50338 - DNA, 261 bp, Glycine max
tgttataaaacttatatttcattaattatttagtaaaaattcaacttttacatagacatcatcataagatcaaaaaaatacaaaagaactgcaactaatacagatcatgctattaccgtagttggttatggaaaatctcgtggtggtaccaagtattggctggtgaaaaattcatggggcgctggatggggtgagaaagggtatataaggatgaagagagatatacgtgccaaggaaggtttatgtggaattgctatgaat

SEQ ID NO: 50339 - DNA, 247 bp, Glycine max
  unsure (1)..(247): unsure at all n locations
atcactcttcttccatagtttcgtctgtgtctgtaactctgcatttaccaagagcagatattataagatgggagacgctgaggatattgaaccccttgtttgcgaaaatggatctggaatggtgtaggcaggatttgtaggagacgatgcaaaagagaaatganatatagcattgttggtcgtcctcgtcacactggtgtgatggttggtatgggccagaaagatgcatatgttggtgatgaggcac

SEQ ID NO: 50340 - DNA, 253 bp, Glycine max
tgctgccgcgcctgcaggcccgctactactccatcgcctcatcctccaaggtccaccccaactctctgcacatctgtgcggtggttgtggagtcgcagaccaaggctggccgcatcaacaagggcgtggccaccaactggctgcgggccaaggagcctgccggggagaacggcggtcgtgcgctggtgcccatgttcgtgcgcaagtcccagttccgcctgcccttcaaggccaccacgcctgtcatcatggt

SEQ ID NO: 50341 - DNA, 254 bp, Glycine max
ggagcagcagcagctcatcgacgaccacttcctcttcgacaagcccgtgtcgcccctgctgctggcctcgggtatggcccgcgactggcccgacgcccgcggtatctggcacaatgacaataagaccttcatggtgtgggtcaacgaggaggaccacctgcgggtcatctccatgcagaaggggggcaacatgaaggaggtgttcacccgcttctgcaccggcctcacccagattgaaactctcttcaagtcta

SEQ ID NO: 50342 - DNA, 254 bp, Glycine max
tgggctatgaagatgaggaacgttccagattactcttggtggaaggctctatagctgagaagtggaaggatcgactcggtaaaaaagttaagcgctgggatatgaagcttcgtcatcttggactcagtaaaagtgattctagcaatagtgattccactcagagtcagaagtctggcaggaactcgaacccccggcaagcacgcaactaaatcccgaaatacaaaaagtaacacagtggacttcctattaagact

SEQ ID NO: 50343 - DNA, 227 bp, Glycine max
cagaaaagatgagcggcggtggtgggtcttcgagttgtgctacggttccgatcccagacaatgtacgcaaaatcatccaggacatccgtgagatcaccggcaagcagcacaccgacgacgaaatctacgccatcctccgtgaatgctccatggatcccaatgagaccgctcagaagcgtctctatttagatacttttcatgaggtgagaaggagacgtgaccgaaag

SEQ ID NO: 50344 - DNA, 158 bp, Glycine max
gaactgcatgatacttccttaagaatggctgccaagggtgtcattagagaagttctggactggcgtaactcccgctctgtcttttaccagagactgcacaggagaattggtgagcaatcactgatgaacagtgtgagagatgcgctggtgaccaattg

SEQ ID NO: 50345 - DNA, 197 bp, Glycine max
ctaatttcatggttgctgatctaccttttttgtgacaggctgtttctcattgggctcagtaaatttgggaaaggagattggagaagcatttcaagaaatgttgttgtgacaagaacaccaactcaagtagctagccatgcccagaaatactttcttccgccagaattcgggtgaagatagagaggaagagatcaagc

SEQ ID NO: 50346 - DNA, 268 bp, Glycine max
ggacaagggaggcattaatctcacagccacttgcccccagagtgagctggatgctgaaactgtgaagagcattctggctgaatacaagattcataatgccgatgtgactctacgtagtgatgctacagctgatgacctcatgatgtggtggaaggaaacagagtttatatcccctgtatctatgtgttaaataagattgaccaaatctccattgaggaattggatatcatctataagggaccggtatgtgtacccatctctgcccatc

SEQ ID NO: 50347 - DNA, 287 bp, Glycine max
gtaaaacaagtagttgagaactaagaagaaggaatggcttcctcaatgatctcctccccagctgttaccaccgtcaaccgtgccggtgccggcatggttgctccattcaccggcctcaaatccatggctggcttccccacgaggaagaccaacaatgacattacctccattgctagcaacggtggaagagtacaatgcatgcaggaatggccaccaattggcagtaagaagttcgagactctttcctacttccagacctcgatgatgcccattggcaaaggaagtcg

SEQ ID NO: 50348 - DNA, 293 bp, Glycine max
cttcgctacgctgtgctgtgtggccgagtatctgagatgacagaggactattcagttggaaacttgatgggaaggaccgatgcttacttgaatgaagtggcactaaagaccattgcaggggctgtgtctgttttacatatgtcagagaatctccttgcaatagcagagagagcacagttggtgagtagatgcatagatgccattgcatttatagcatgcacagaaagccaattctgttcatctgcaagaagtagagtggttctgtgggagtagtgtcttccatggcatcaaac

SEQ ID NO: 50349 - DNA, 290 bp, Glycine max
ctactgttaaagctgcatatgctgagttgcagtatgctcagtcaccttttgaccctgatggcattgaagctgctgatcaattgctagtgtctgagttgaagaacttatctgagctaaagcaatgttacttgaagaaacagtttgatccttcacccaagactgcaatactcgaggccgaatccaaggaattgcagggtgtgatcaaaacctacgagatcatggggaagaagttggagtcacaggtgaggctcaaggattccgagataatttttcttagggagaagttggag

SEQ ID NO: 50350 - DNA, 113 bp, Glycine max
gtacagtgatggtacttgccaggagtgattgccttgaatatggaggacggaacattacatcggttccaagcttcttcaacaattttggccacagggggctatggcagagcata

SEQ ID NO: 50351 - DNA, 284 bp, Glycine max
tggatttcatgcaaatttgttggacacaagacaaaattctttttgctttgggaggacattgaagacatccaaatcattcctcctacattttcatcgatgggcagtccgataattgtcataactctttggccaggaagaggtgtggatgcaaggcatggtgcaaaaactcaagatgaagaaggcagactgaaattccggttccagtcctttgtgtctttcaatgttgcaaacaggtagactgggaaattttatgttattagacaggcttggttcttctatatgct

SEQ ID NO: 50352 - DNA, 292 bp, Glycine max
gttttcagtagtcttgctttgcattacagcagcacaagggaaagaacagcttcactcaaacagtgaatggccaaaatctttttcagttattcgtgatactgatggtatctgcaaagtggcagagacacaaggttacacatgtgaagaacataaggctacaacagaggatggctacatcctgagtttgcagaggttgcccgcgggacagtctggtaagaaagcccacaagccaccggtgctattacaacatggtctcttttgtgatgccatagtatgggtggtcaatcctcca

SEQ ID NO: 50353 - DNA, 289 bp, Glycine max
ctagtttcttacaaggctctactctactgcttcaccttctgcactagaaaattcagtggtgatacatggcttcggctactctctctgtagccaaaccagcccttcaggcaaatgggaaaggcttctctgaattctctggcctccgcagctcatcaggcttccttcccttttctagaaaatcttcagaggatttccattctgtcattgccttccagacctatgcagttggaagcagtggaggatacaagaagggtgtgacagaagcaaaactgaaggttgccataaacgg

SEQ ID NO: 50354 - DNA, 289 bp, Glycine max
aattatggcattcactttgaccacccttccaacgcccaatgtgtctgtgacgtccttcacccgacgcaccgtctccaactccaaaccaaccctttcatgcaccctctcttcccacccttttaagagagagtacacgagcgtgatgatagtgccgacggggattggcgccgctattggaggatatgccggtgacgctttgcctgtggctcgcgcactctcctccgtcgttgattgccttatctctcaccctaacgtgcttaatgcagcaatgctatactggccaatgcca

SEQ ID NO: 50355 - DNA, 283 bp, Glycine max
catgccaagcctcatccagacccctacctgaaaggtctcgaagctctgaaggcatcaaaggaccacacatttgtatttgaggattctgtttcagggatcaaagctggagttgcagctgggatgcctgttattggtttagctactcgaacccagaaaatttattgatggaagcaaaacctgcctttctgattaaggattatgaggatccaaaattgtgggcagctttggaagaacttgacaaggctaccagtgctcgttcagtttgaattactagtgcaactga

SEQ ID NO: 50356 - DNA, 280 bp, Glycine max
gaaaatgttagaaatattcctgttcttaacttgtagctgttcattgcatctgatatccacatttgactgaattctctaggtatgaaggtgcacgtactgcagaagcccttgcggcgtttgtgaacattgaagcaggtacaaatggaagatagcttctgttccatccagtgtggtagttctctctccagataactttgatgaggttgtcttggatgaaacaaaagatgttctggtggaattctatgcaccatggtgcggtcattgcaaggcccttgcccct

SEQ ID NO: 50357 - DNA, 100 bp, Glycine max
cactactaccctcttcatagttgagctctgtctcattggcttggccgagggtagaggatgggctgacataatcaagccaggctgtgtcaacactgacccc

SEQ ID NO: 50358 - DNA, 278 bp, Glycine max
gagggttgctgtaggagataagattgcagtagtgctaagtgctaacacctgcagtgaacaatggcctctgcatcagcatctctgctcaagtcttcacttgttcttgacaagtctgagtgggtgaagggacaaacccttcgcaaccttctgcatcagttgtgagatgcaaccccaccaccccatcaggccttaccatcagagctggttcctatgctgatgagctcgttaagaccgcgaaaacagtggcttcaccagggaggggtattttggccatggat

SEQ ID NO: 50359 - DNA, 275 bp, Glycine max
cagccactttcccaacccaaaacctctcttcaaccctttctttctccaatcccaaaccatcatgtatcttccccgccaccacatcctcaccagactctccccttatcgccgccacttctcccactccgccgccgccgtctccggcctccggcgccgcagcccctcacctacctggacggcttcccccgccccgatcccaagcacgacgagacgatcctcgccatcccccgcgccgactccggcaagaacatctccgccaaggaacgccgcgccgg

SEQ ID NO: 50360 - DNA, 299 bp, Glycine max
ctcttcatcaccctcatcctcatcactttcattgccttatcaacatccttcgccttcgcctttctctacttctcttcaaaaccaccactttcaccttctccttcttctctctctctcttctcatcaaaagctcgtcctctctccaaactcaaacgccccgtcgtcctcctagtctcctccgacggctttcgtttcggttaccaattcaaagccccaactccccacatttcccgtttgatcgctaacggaaccgaagctgaatccggtttgattccggttttcccctctctcactttccc

SEQ ID NO: 50361 - DNA, 293 bp, Glycine max
agagtataatgtgagcctgcagcagtacaatagtcgtcttcagtcagatcttgaaactgctaatgaggcccataaacgacttgaatcagagaaagcaaccattgttgagagccttagcaatgtaagaggccacaataaggcattgcaggatcaattggtatctcttaaagtttcacaagacgaggctataaagcagaaagaaattttaggaaatgagctcaaatgccttcgtgaagagttaaaacaaattagagatgatcgtgatcaccaattgggtcaagtaaatgctttaa

SEQ ID NO: 50362 - DNA, 283 bp, Glycine max
cggctcgagcggctcgagatcttttcttactcgttcaggcaaatagcaactgcatacggcccttgcggacacaacagggattacattttccttctagaaaaggccatgcatgatattggtaagttatctccttaacatacacatacatgtgcagtcaaacattattctttgcatgacacgagcttcgcatttatattttgatgtgcaggccatgaggatgacttggtgatagagcttgccaatgaagtgaagaaagtacttggagtgggaaatgtagtaccaa

SEQ ID NO: 50363 - DNA, 271 bp, Glycine max
tctcgtgccgctcgagctgattcggctcgagtgcaattgaagttatagcctagcctccataaactcattcctcaagacatcatcatccatggctgcctccgtctccactgtcggagctgtcactcgagctcttttgacctgaatggttctggagctggagcttcagctcccagttcagccttctttgggaccagcttgaagaaggttattgcctcaagggtccccaacagcaaggtttccggtggaagcttcaagattgttgctgtagaag

SEQ ID NO: 50364 - DNA, 285 bp, Glycine max
gttaaaagccttagccttccctacaactccaaactcgatagacatcgtcatccatggctgcctccgtctccactgtcggagctgtcaacagagctcttttgaacctgaatggttctggagctggagcttcagctcccagttcagccttctttgggaccagcttgaagaaggttattgcctcaagggtccccaacagcaaggtttccggtggaagcttcaagattgttgctgtagaagagaagaaagagattgaagagacccagcagaccgacaaggacagatgga

SEQ ID NO: 50365 - DNA, 281 bp, Glycine max
tattgctctgagaatttcctcataatttcaacggatttatctgaaggttccgctgaccataaagatacgttgggtgcaccactgtgcccttgccggcattatgatgataaagctgctgaggttgcacaaggattttggaattgcccttgtgttcccatgagagagaggaaggaatgccactgcatgctatttctcactcctgataatgattttgctggcaatgaacagactatcaccttggatgaaattaaagaatcaacagccaacatgtaacagattat

SEQ ID NO: 50366 - DNA, 228 bp, Glycine max
tagaaatctagctggagagattgatctgagaatacaacaatacgtttaagtgaagaagcacccataaataatctcatggacattgtgaaccacattgtagcttttcacatgatgcataatgtagaaactgaatctgttgatcttttaataaaagttaaagatctaagaaatgtatgaatgagacatattagacaaaccaaattattaaaaggacttgcctatatctca

SEQ ID NO: 50367 - DNA, 274 bp, Glycine max
cttccctacaactccaaacaggaagacatcttcatccatggctgcatccgtctccactgtcggagctgtcaacagagctcttttgaacctgaatggttctggagctggagcttcagcacagcgttcagccttctttgggaccgcttgaagaaggttattgcctcaagggtccccaacagcaaggtttccggtggaagcttcaagattgttgctgtagaagagaagaaagagattgaagagacgcagcagaccgacaaggacagatggaagggtc

SEQ ID NO: 50368 - DNA, 283 bp, Glycine max
gacggaaagactactctcttacatttcgttgtacaggaaattgtcagaaccgagggttctcatatttctggttctaatcatccccatgcctctgacaatggccaccaatatactctccaagatgaggttgacttcaagaagcttggtctgcaagttgtttcaggcttgagtggtgagctcaccaatgttaaaaaagcagctgctatggattcggacgtgctcagtagtgatgttgctaaactttccagaggaatcgaaaaagttgtgcaagttgtaaaattga

SEQ ID NO: 50369 - DNA, 272 bp, Glycine max
ggtcccaattcctcatgctactgtgctttccaaaatggcttattctaaggatgagaacagatacaagaagcttctatgcagtgtggatcttacgaaggacttctttttcagctactcctacaatgtcatgcttagtctttaatggcacttctctgtttggaatattgcttgggtaggatcactgttgaccctttttgtttggactgagttcttaactcgtggaatcaggaatagtctccagaatacttcctggactatagccttagtgtatg

SEQ ID NO: 50370 - DNA, 125 bp, Glycine max
atccagcgcggctcttgcttctacaaggatcccttcaaacacaaggttcccatccaaggcctctcactctttcccaacccaatgcgccttaaagagacttgaggtgacagaattctctgggctta

SEQ ID NO: 50371 - DNA, 269 bp, Glycine max
ggctatacgaggttctctcataacttccttcatattttatttgtccaatcttccaggaagttatgagagatccacatgtagctgcagatggttttacatatgaagctgaggctatacgaggatggcttgatggtggtcatgacaatttcccaatgactaacagtaagcttgcacatcacaatcttgttcccaaccgcgctcttcgctctgcaatccaggactggcttcaaaaccactgatcaagctcattatttttctctgcccatttg

SEQ ID NO: 50372 - DNA, 274 bp, Glycine max
cttggttaagaaacctctcaaagtttgccaccaagagagcatcatcatctcaaagacccaaaaacactgacccattttgtcttttaccctccttcacttttctctcccacttcagcagcaccaacaccattgaggagaaaccttgtgtggagcctgttgagtacaattattcgggcttggagccaacaaggccccatgagaagccacgtgtggtggtgctgggttctggttgggccgggtgcaggctcatgaagggcttggaccctcgtgtgta

SEQ ID NO: 50373 - DNA, 291 bp, Glycine max
tcgagcttccagagtgatcaacatatgtgaggacatctttgctggatttaattgtacacttcgtggaggtaatgtcactcaccatgagtacattcaggttggaaagggaagggatgttgggttgaatcaagtatcaatgtttgaagcaaaggttgccagtggaaatggggagcaagtcctaagtagagatgtgtacagattgggtcataggctggattttttccggatgctctcattcttctacactactgtggggttcttcttcaacactatggtggtggttctgactgt

SEQ ID NO: 50374 - DNA, 288 bp, Glycine max
ggatatcgattcaatctaatataacaggacctgggcaaacaattctcctcaaagaacgttgacttgtgacccattttctcagccagaatatcagctaatgtttttgacagaatggaaacttgggtagcaaactgttgaattgtcgcgctaaagtgtcggatccaccagaacccagcatatcagttaaaggaatatgaaatgcttctgacagaatggaaacttgggtagcaaactgttgaattgtcgcgctaaaagtgtcggatccaccagaacccagcatatcagtta

SEQ ID NO: 50375 - DNA, 275 bp, Glycine max
agcgtgctagggttcatcaggtgttgtagagagacacatctattgacactgtgaattactcaagagggctcgacaatcccacaaagtagaaaaagaggttatgttatggcgggcaaaggtgttagttcggtggctaaggcggtacagaatatcagtatccttggcgtgagaagttggggaaatataaggatgagcttgccaagggtgtgtggggatactgggagctgggggcatggaagccgctgagtatcagtgctcggcatcgtgctagaatt

SEQ ID NO: 50376 - DNA, 282 bp, Glycine max
gcagaaactggtggaagcttttgatttgttccgagagatgatgcgcaggggtctcccgcctgatgaggttacttatactagtttgattaatgcttattgtgttgatggggagttgagtaaggctcttcgtttgacatgatgaaatggtcagaggggttttttgcctgataatgttacctatagtgtgcttattaatggacttaataagaaagctaggacaaaagtagcaaagaggcttcttctgaagttgttttatgaggagtctgtaccagatgacgtaac

SEQ ID NO: 50377 - DNA, 291 bp, Glycine max
aagaatagttcatgcatttatttcttgcattactactgggaatgttaaggtccagtggaatgtttgtcatgctctaggcaacttattcctcaacgagacattaaggctgcaagatatggattggactccagttgtgtttggtgttcttctgcaactattacgtaattcatcaaattttaaaatcaggatacaagctgcagcagcattggctgtgccaatgtcaatgcaagattatggcctatccttttcagagattgtgcaatctgtagagcatgtaatggagaatattga

SEQ ID NO: 50378 - DNA, 280 bp, Glycine max
cagcattgctgtggggatttatattttgcttcgtgctgttgaccggtttgctgctaattacaacagctttccaggacagtttgacagtgcaatggatgaagatatacctcgattaaagagcacagcaattggcctacttaatgacttgggatgcaatggagccactttggctgaggaccttatcaatgagatgtgtcgatttggtgcggcagagcttcatgctgttgctgctttggttggaggaattgcatcgcaagaagtgatcaagctcataacaagg

SEQ ID NO: 50379 - DNA, 291 bp, Glycine max
ccgcaaataatgctggggcaatattagttttaggtagagaccttgttgtggttcctaaactaatccatccattaccaccagcaatttcttcaccagaaacatcaccagaacctcatattgaagatacatggatgcaggagttgaatgctaacagaccgccgacgccaacaagaggccgtcccccagtaacaaacgaccgagcatgatgccatttacgggagtctccgagcctgtgaacttaatccctgcagaaagttttggttctcatcactccatcagcaggccttgata

SEQ ID NO: 50380 - DNA, 291 bp, Glycine max
cttaccttttctcttaatccaaatacgatggcagccatggcaaccacaaccctctcttcaaaccccaaactctcattcttcaacggaaagcccgtcacatattcttcccgcgtcgcgcccaccaccaaattatcctcatccaaacaaagaatccatcgtgtcacgggaaatgacgcgccgctacatgaccgacatgataacctacgccgacaccgacgtcgtaatcgtcggagccggttcggccgggctctcctgcgcgtacgagctcagcaagaaccccgccgtgagcgt

SEQ ID NO: 50381 - DNA, 285 bp, Glycine max
cgaagggctatatagcataaacatttgagtcttcattgcacaatgtcgacctcttccattaacgggtggtgcctctcttccatctccccagccaaaacctctctcaagaaggccacattaggcccttctgtcttcgcaaccgttagcactccttcttctccttcttcttcttcttcttcttccttcccttctctcattcaagacaggcctgtctttgctgcccctgcccccatcatcaccccaactgtgagagaggatatggcaaaggaatacagcaagctattg

SEQ ID NO: 50382 - DNA, 279 bp, Glycine max
tacaggtagattggaggatgctgtcaactatggcacaaaggcactctcaaaattagtgtccgtatgtgggccttaccatagaatgactgcaggagcatatagtctcgtggctgtagtgttgtaccatactggagatttcaaccaggcaactatctatcagcaaaaggcactagatattaatgcaagagagcttggactggaccatcctgatacgatgaaaagttatggagatcttgctgttttctattatcgactccaacatacagagtgctttacagt

SEQ ID NO: 50383 - DNA, 277 bp, Glycine max
tcggctcgaggtagtttggacttgttggatatggaattagtggtagtaaacattgatgtggaaggtggctatgctgtttgatttgctttttttttttatattttcccttgttgggtttggtgggggttgggggtttgtttgttgtagatttgtcagtggtacggaacaaggatccagagtggttcttcttctgtccgcaggccggaagtatccgaacgggcacaggttgaaccgagctacgagtcatggctattggaaggcaacgggaaaggatcgg

SEQ ID NO: 50384 - DNA, 270 bp, Glycine max
taggcccgtactctctaatattccatactacaaaaaacatggatatggggtggagaaatttaactcgaccttgtatgatgaatgggttaacaagggcaatgcaccggcactgcccgagactcttaagaattacaacaagctggtgtctcttggcttcaagattatattcttgtcaggaagaacactggacaaacaggccgtaacagaagcaaacttaaagaaggctggctaccacacatgggaaaaattattctcaaggatccacaagat

SEQ ID NO: 50385 - DNA, 245 bp, Glycine max
caatatttttggaagaaggttttcttgattacatgaacaaggagcatcaatcatatcgttatgataaaaatgaatatgaaggcttgccatttgattttcacggtggatatattggttacattgggtataacctcaaagttgagtgtggtgtgaaatcgaaccgtcataaatctaaaactcctgatgcatgctttttcattgctgataatcttgtagctagtgaccacaaaaatgatgatgtttat

SEQ ID NO: 50386 - DNA, 270 bp, Glycine max
gtcacactaaataaaagaaggaatagaagttctgcataacactattgatgcagcattctgtaaaacatttactcttatgaatattgaaacgtgtattcaggtaattcggcaaggaagtgatataacacttgttggatggggagctcaattatctataatggaacaagcttgtcttgatgctgaaaaagaaggaatttcttgtgaattgattgatctgaagacactaattccttgggataaggaaacagtagaggcctcagttaacaagac

SEQ ID NO: 50387 - DNA, 285 bp, Glycine max
tggccatagaactcaaatgccctatctgttggagtttgctcgattctgctgtgtcgcttacctgcaatcatcttttctgcaactcgtgcattttcaagtccatgaaatcagcctctgcttgtcctgtctgtaaaattcctttcactcgtcgagaggttcgccgtgctcctcacatggacaacttggtcagcgtatatatagacatggaagcttcttcaggagttaatacatttgtaacccataatgcccctgttactaacttatcagatggagaaaaggaatgtg

SEQ ID NO: 50388 - DNA, 297 bp, Glycine max
ggtcaccctcccctcggatggtcagatacattggcttacctggtcttgcctgtgttgctggtcgtctctcagtacatcactgtccaaataatgcagtcatcacagcctaatgatcccaacatgaaaagttctcaagccttgaccaatttccttccattaatgattggttactttgctctctcagttccttctggtcttagcctttactggttaacaaataatatattgagcactgcacaacaagtatggcttcaaaagttaggaagtgctaaaaatctgtgaggcaagtcccagatg

SEQ ID NO: 50389 - DNA, 292 bp, Glycine max
gcagaaagaaattgcaccaatcaaggatgggactactggaacagttatagttctcacaactccagatgcaagcattgtgcgctgggcatctggagttgtgagaactataactgttccagtagtcccagcgcacaatgcttgcatatcagggcacatcttcaactgttaactatgatgcatccttagctaatgcagtttccaagacaaacatacttgccgacgaagggtatctatttgaacttcctgataccattaaaacaataaccaaagcatgtgagaaagcacggtcgaa

SEQ ID NO: 50390 - DNA, 287 bp, Glycine max
ctgtttcccatgatcagctttttagcattattgactattccccaagctgggcatttgaagggtcagaaattaaggttatcatttctgggagaattcctaagaagtcaacatgaagcagaacaatgtaagtggtcatgcatgtttggtgaggtagaagtgccagcagtgatcattgcaaaaggtgttctttgttgtcatacacctccacacaaggctgggagggtacctttctatgtaacttgttccaataggttagcatgtagtgaagtgagagaatttgatttcca

SEQ ID NO: 50391 - DNA, 277 bp, Glycine max
gataaactcaaaagccggagagaaatttttcagctttctaccgggggaagttctgcttgcatcgttggatggattcataaagtgtgtgatgctgttgaagtagctggaaaaaatgtcatgtcaacatcatcaactgtgacaactgagcttgtcgatcacagatatggagaacaagcagctgaagcaacaagtgaagggtttagtgctgctggtcatgctttgggtactgcatgggctgcttttaagattaggaaggctctcaaccctaagagtgttc

SEQ ID NO: 50392 - DNA, 279 bp, Glycine max
aaattaaggcttttctataatgcttatggtactatgagcaaatctgatataacttctgataatgtcttttctttaaccccaggttattgctgaatatcttcaaaaaatcgatccaaaatcagatggcgcaaagagggattgggttgctatttatgatgaatgtgcctctgtcttatatcaggagattgattacaccaaggaggctgctaatgcagaattgtctgcaagtaactttaagaacatggattatgtgaaagttcctacaatctactgggatta

SEQ ID NO: 50393 - DNA, 271 bp, Glycine max
cttgcggttaaggttttagcgcagcttcttctagatttcaggcagatgggtaacgccaacgttcacatcagtattgcggtcattggccatgtcgactctgggaaatccactaccactggtcactgatttacaagcttggacgcattgacaagcgtgttattgcgaggttcgagcacgaagctgctgagatgaacaagaggtctttcaagtatgcctgggtgctggccgagcttaaggctgtcgtgtaagagcgaatcatcattgatattgc

SEQ ID NO: 50394 - DNA, 265 bp, Glycine max
ctcgagccgttcgtacacaggatgctgccgcgtggcttgaatatattgaatcaaaagccatagagcagcaagaagcaactaaaaatggaactccaaagcctgatgcatccattgcaagtaaaggtcaccttagcgtgtcagatctcctggattttattagtcccaacccaaaaggaaatgatgctcggaggaaacagaggcgtacaaagatactctcaacaagtgataacaacatcaagaacatgatgaagcaatagctgatgag

SEQ ID NO: 50395 - DNA, 267 bp, Glycine max
tgaccctgcccaacatcaaggttcctctcattcttggtatctggggaggcaagggacaaggaaaatctttccaatgtgagcttgtctttgccaagatgggaatcaaccccatcatgatgagtgctggagagttggaaagtggaaatgcaggagagccagcaaaactgatcaggcagagataccgtgaagccgcagacttgatcaagaagggaaagatgtgtgctctcttcatcaactatcttgatgcaggagctggtcgtcttggtg

SEQ ID NO: 50396 - DNA, 274 bp, Glycine max
caggaagctgctaaacgtcaagaatcaaacggttctggggctgaagtggaatacaaacctcttcccagtggaccaaatggtgccaatgaaaaggacaccaaggaacaagaggtgactattattgaaaatgtatattggaaggagtttggccttcttgtatttgtttgggtttcattccttgcactacagattgccaaggaaaactatacgactacttgttcaacattttattgggtactgaacttgttacaggttccagtttcagttggagtaa

SEQ ID NO: 50397 - DNA, 265 bp, Glycine max
gttgccattctcatcctcctctgtctctctctctccaccattgccatggatccttacaagctccggccatccagcgccttcaattctcccttctggactacaaattctggtgctcctgtttggaacaacaactcctctttaaccgttggagctagaggtccaattctgcttgaggattatcatcttgtggagaagcttgcaaactttgacagggaacgtatcccagaacgtgttgtccatgccaggggagctagtgcaaagggtt

SEQ ID NO: 50398 - DNA, 269 bp, Glycine max
agagaggctcctaagggaacaaggccttcaaggaaacccctacaggatattggttggggacttaaaggagattgtgaagttgcaaatggaagcaagatccaaacccatgaatctctcccatgatattgtgccacgtgtgtttgcacatctgcatcagagtgtcctcaaacatggtatgcttttgtttcttagagcatctccaaccggaggtgctttgtttgcaactatcatctactgtttgcctctttagtgttatctattttgttact

SEQ ID NO: 50399 - DNA, 265 bp, Glycine max
gtagaactagtgatgcaggacaccagcattcttggtgctgaaagtcaccctctccatttgcatggctttaacttctttgttgttggtcaaggttttggtaactttgatccaaagaaggaccctgtaaacttcaatcttgttgatcctgttgaaaggaacacagttggtgtcccatctggtggatgggttgcaatcagattcctaactgataacccaggggtatggttcatgcattgccatcttgaagtccacaccagctggggtc

SEQ ID NO: 50400 - DNA, 263 bp, Glycine max
gacaaacacttcgccaaccttctgctgcatcagttgtgagatgcaaccccaccaccccatcaggcctcaccatcagagctggttcctatgctgatgagctcgttaagaccgcgaaaacagtggcttcaccagggaggggtattttggccatggatgagtccaatgctacctgtgggaagcgtttggcttcaattgggctagagaacactgaagctaaccgccaggcataccgtaccctccttgtgacagttccaggacttggt

SEQ ID NO: 50401 - DNA, 195 bp, Glycine max
cttgttcctccgctcaacaactataataacatctttctctctccgaacagatcacactatggccacctcaagcgccaaatcagtccatgatttcaccgttaaagatgccaagggaaatgatattaatcttggtgactacaaaggaaaggtccttatcattgtcaatgttgcctcacaatgtggcttgactaattc

SEQ ID NO: 50402 - DNA, 276 bp, Glycine max
acgcaagctgcatacaatgattggttcatgtcgctgtacaatgtattcttcacttcacttcctgtaattgcattgggagtgtttgatcaggatgtctcttctaaattatgtctcaagtttccattattatatcaagaaggcgtccaaaacatccatttagctggaaacggatcatcggttgggcattgaatggagttgtgacttctgccatcgtattcttcttttgcatccgtagtatggaataccaggcattccgtaaaggcggtgaagtcatgg

SEQ ID NO: 50403 - DNA, 289 bp, Glycine max
caacatttgaagagctcatggctgaaggatgcatcactgattgcatgttgcttccttcagccataagaactcaacatttgaagagctcatgtcatgtataccacaaactcaataatatcttttcattgtcaaaacaacagtgctactttgaggtcctcacaacaatattaaagacattaaaacatagggagaaagagtgtcttcaaatgaatttacatgtctgtttacaatgtttatttctcagagatgtcttcaattttctttagggaaagaggtggaagcaacactt

SEQ ID NO: 50404 - DNA, 284 bp, Glycine max
atactaattcgattaaatctaacgtacgtatacaatcaaataaatacattatgtcagactttagaaattctatgttgaaaatctttcttgtgttcttatctattacttgattatattatttaggaagagcggccccccctttttttagtaagaaattgtcagaaattcaagaaacccatgaaatttataaaaaaggaacaaaaatagatgtcgaaaaaaatttgcaaagagtacaaactatacttaaacaacaatgatcctacaataaagagggttttctttct

SEQ ID NO: 50405 - DNA, 271 bp, Glycine max
catggaccgctgaagatggccccacaagaatgacatttaacgacaaacgagtggttaaatacaacatcttctctggaacttcaatgtcatgccctcatgttgctgctgcagctgttcttctcaaagccatacaccctacatggagactgctgctataagatctgccctgatgactacagccatgacaacagacaacacaggtcatccattgactgatgaaactggaaatccggcgacgcctttcgcaatggggtctggtcacttcatcccc

SEQ ID NO: 50406 - DNA, 281 bp, Glycine max
atatactacgcctaaaagatcccaacaggcctttccccactggtcaagccagtgatgctggaggtgttggtcttttaaagtggagaatgcaaagtactgatgagtcaatggtgccgctgacaatcaactgttggccctcttcttctagaacgaaacttatgtcaacattgaatatgaggcttcatcaatgtttgatctgcggaatgttgtgatctctgtacctcttccagctcttcaagaagcaccatctgttaggcagattgatggggaatggaggtatg

SEQ ID NO: 50407 - DNA, 281 bp, Glycine max
ctccatttccatttcctctctctcagtttccaagaatcttaagctatgggaaagtcttacccaaccgtgagcgctgattaccagaaggccgttgagaaggcgaagaagaagctcagaggcttcatcgctgagaagagatgcgctcctctaatgctcctggaagagaggacaaacctgagccaccaccagagggtcgcttgcccgatgccactaagggttctgaccatttgagagatgtgtttggcaaagctatggggcttagtgaccgagatatcgttgct

SEQ ID NO: 50408 - DNA, 276 bp, Glycine max
gctgggctggctactatgattgctgctatgcgacctgatattgataacattggtgagtatgttaggtacactactgctagggcctttagtgttgttgcttctgcacttggtattcctgcactgttgccattcttgaaggctgtggtcagagtaagaaatcatggcaagctaggcacacagggattaagatcgtgcagcagatcgccattttaattggttgtgcggtgttgccacatctgagatctcttgtggaaattatagagcatggtctgaatg

SEQ ID NO: 50409 - DNA, 314 bp, Glycine max
gctcggacattggctcgagctcgagcactcgcgcagctcgaggtggtaatggcagcgtcactccaagcagcagctactctcatgcaacccaccaagttgagcatgatcaacactttgcagcaaaagtctactcagtccatttccaaggctcttggtttggaacctgttggagctaaaaaggtcacatgctcccttcaggctgatcttaaggacttggctcacaagtgtgttgatgctaccaaaattgcaggatgcgctcttgccacctctgccctcgatgtctctggggcaagtgctgaaggtgttccaaagat

SEQ ID NO: 50410 - DNA, 267 bp, Glycine max
gagaactgtaagttgctgttagttgacaaaaagataaccaatgcaagggatcttatcaacatactggaggatgctattagaagtggataccctatattaattattgctgaggatattgaacaagaaaagcagcaacaatgtcgggtcgcggaaagggtgggaagggtttaggaaagggaggagcaaagaggcatcgcaaggtgctccgcgacaatatccagggaatcacgaagcccgcgattcggagactggcgagaagaggtggcg

SEQ ID NO: 50411 - DNA, 288 bp, Glycine max
  unsure (1)..(288): unsure at all n locations
gcgtagtagctcggaatcggctncgagggtncgagtcgacgataggatttctcactgataacgctgcttcctttaatgctctcatactatacatagagcaccgttactatgggaaatcagtaccatttggatcgagggaagaagcactgaagaatgcaagcactattgggtatttcaactcagctcaagcaatagcagattatgcatcagtcctcatacatattaagaagacattacatgcccaaaagtccccggtgattgtgattggaggatcatatggaggaatgc

SEQ ID NO: 50412 - DNA, 279 bp, Glycine max
cttcgtcaagcaaaggaagctgctgcttattctcgaacttggagaggacacatgcagaatctacttggctatgcttgttctgtatattgtgtgtataaaatgatcaaggtattgtgatgtcaataatcaataattatttattcttagaaagctaatgattgtaactggtgggttggagctttcttaaggcatagatggtttgcatgaattgcatgatcgatctgtatatctatttactgaataatgctgcttgaactaatcatcgtttgttctgatagc

SEQ ID NO: 50413 - DNA, 273 bp, Glycine max
cggctcgagcaaggttcctctcattcttggtatctggggaggcaagggacaaggaaaatctttccaatgtgagcttgtctttgccaagatgggaatcaaccccatcatgatgagtgctggagagttggaaagtggaaatgcaggagagccagcaaaactgatcaggcagagataccgtgaagccgcagacttgatcaagaagggaaagatgtgtgctctcttcatcaacgatcttgatgcaggagctggtcgtcttggtgaaccacccaatac

SEQ ID NO: 50414 - DNA, 286 bp, Glycine max
tgcaaaaacatctaggaataacaactctagcagatttggaaagttgattgaagttcatttcagctccatgggtaaaatatgtggggctaaaattaaaaccttattgttggaaaagtctagagttgttcaactggccaatggtgagagatcatatcacatattttatcaactttgtgctggatcttcttctgatctttaagagagactgaatcttagagcagtctgtgaatataaatatctagttcagagtgactgcacatcaattgatgatgccgatgatgctaaa

SEQ ID NO: 50415 - DNA, 289 bp, Glycine max
ctgatttacaagcttggaggcattgacaagcgtgttattgagaggtcttgagaaggaagctgctgagatgaacaagaggtctttcaagtatgcctgggtgctggagcaacttaaggctgagcgtgaaagaggaatcagcattgatattgctatgtggaagtttgaaacaacaaagtattattgcacagttatcgatgcgcgctggacatagggattgcattaagaatatgattactgggacatcccaagctgactgtgctgtactcatcatcgattcgaccactggtgg

SEQ ID NO: 50416 - DNA, 273 bp, Glycine max
agggaaggaacttctgacgatatttgggcttgctgctcctgtttttataacattgatgtcaaaggtggctttttacgcactacttatatattttgctacatcaatgggtacacatacaatggctgctcatcaagtcatggtccaaacctatttaatgtgtaccgtatggggtgaacctctctcccaaacctctcaatcatttatgcctgaattgatatatggagtaaatcggagtttgtcaaaggcccgaatgcttctaaggtctctcgtgat

SEQ ID NO: 50417 - DNA, 286 bp, Glycine max
gtagctgattgtatgggctccaacaagagaaaaagcaattgaacgcatgaaaagggcacttgatgacactattatcacaggagttcctactacaattgattatcataaacttatccttgacatagaggatttcagaaatggaaaggttgatactgcttttattccaaaacacgaggaagagttggcaatggtaagaacccaatataaccttgaaaatattaatgtccctaacaatggatttaaaaattactttcgttgttgaagctgaccaattttggtaggaaaa

SEQ ID NO: 50418 - DNA, 286 bp, Glycine max
tgagagtagagtgaaggttaaggccgcagttacttttcaagtctgaggttagacagaggaatcgatgatataacagatttgctcggtaaatctctcctcttagagcttgttagctctgagcttgaccccgtgacgggactagagaaggaaacactgaaagcgtatgcacacaaagcaggaaatggtgaggagtcggttaagtacgaagctaaatttggagttccaaatgattttggagacgttggagctgttcttgttgagaatgagcatcacaaggagatgttcc

SEQ ID NO: 50419 - DNA, 297 bp, Glycine max
actttctccggccggattccgacggagctcggcgattgtattagtttagttatggtcagacctgaatatcaatatgttggactggaccgttcagccggaggtgatcaagcagtcggggaagatcgccgtgaatttcatcagtgggaagacgtatgtgttataaagaacgatgggagcaaggagtgccatagtgcggggaacttgctagagcatgcggggatcagtcagcagctgctgaacaggatttcgacgagtaatccctgcattttcactagggtttatggaggtaagttgcag

SEQ ID NO: 50420 - DNA, 278 bp, Glycine max
cagagcccgaaggaaacgtatgtagtagggaaataattgttgagttggaagaaagagtggacaagattgtcaatatcgataacatttactctgatacgcagctttgtgcaacctatgtttgtgacatctacaaacacctactgaatccgaggaaaagaaaaggccttccactgacttcatggacacaattcagaaggacataaatgttagcatgcgcgctatattggttgactggcttgttgaggtggctgaggagtatcgtcttgtacctgaaacat

SEQ ID NO: 50421 - DNA, 286 bp, Glycine max
tctcgagcggctcgagcggctcgagcggctcgaggaacaagatgatgcaatgtcttgctccaatctcacagtgttggtgtcctcaaaaccttgcctttccgatccctccaatctctcattccgctctgtgctcaacccttttcagtcccttcacaaaacccaacttcataccctccttcacgctcctcaaccacccaaattcagtgtggtctgagagaactcagaacccgcattgattccgtgaagaacactcagaaaatcaccgaggctatgaagcttgtggctg

SEQ ID NO: 50422 - DNA, 282 bp, Glycine max
tctcgagccgattcggctcgaggaaaaaaaaaataaaagagaagatcatggcctcatctagacactctaactctccctgtgactgcctgcaagttcttgagaagaaaatgcatgccggattgcattttctccccgtatttcccccagaagagcctcagaagttcgccaatgtgcacaagatatttggagcaagcaacgtgagcaagcttctaaatgaggtgcagccccaccagagggaggatgcagtgaactcactggcctatgaagccgaggcacggctaa

SEQ ID NO: 50423 - DNA, 275 bp, Glycine max
cattgttccagatcaagtatttttgatgcaaaggctggaattgcattgaataagaactttgtgaagcttgtctcttggtatgacaacgagtggggatacaggtaatccacctttaaccttttcttgtatgtgatagtggttagtgcgccaataagttgttaattagttcaaaaatctaatcacgcgaattttagatgctatattatgtattcagcttgatctaatactaataccctatgtgtgcctggttctgcagctcacgtgtcattgacctg

SEQ ID NO: 50424 - DNA, 288 bp, Glycine max
gataatagtagcttgctcagcagggggtacaatgaaaccgtcacaaaatctacccgaaggtcaacaatcaaggtattgattattttgaatttcttgtggctaattgcctatttgcttctttggatttttaattttgcacatagaatttcatacatgcaataagattatggtccgaaattggttgaagagattttatgaaatttattaattttgcatggcaattctgaggtaatccttttagatgtgtttgcactttgcatccaacctcggactcaagacattgaaaaa

SEQ ID NO: 50425 - DNA, 275 bp, Glycine max
agcgtgataggttcgaaatgttcaagggtttttgcgagagtgtcgtcaacaagatgatggctcagcaagaagagattcacaacaggctcctcgaggacatgctcaaaagggaccaagagaagttcgccagagaggaggcgtggaagaagcaagagttggataggatgaacaaggagcttgagattatggcacaagagcaagccattgccgggggtagacatgccaccataattgaattcttaaagaaatgcgcaacaacaacaacttcattatca

SEQ ID NO: 50426 - DNA, 274 bp, Glycine max
attgggagttaggttctgcacgctctgcttccagcgagtgttctttcttcgtttcaacaccttaatttgcacacgctgcttcttcagcttgagaaatggcacaagaaacctttctattcacatctgaatctgtaaacgagggtcaccccgacaagctgtgcgaccagatctctgatgcagtgctcgatgcgtgccttgaacaggaccctgacagcaaggttgcctgtgagacatgcaccaagaccaacatggtcatggtctttggagagatcac

SEQ ID NO: 50427 - DNA, 287 bp, Glycine max
tttgggagttaggttctgcacgctctgcttccagcgagtgttctttcttcgtttcaacaccttaatttgcacacgctgcttcttcagcttgagaaatggcacaagaaacctttctattcacatctgaatctgtaaacgagggtcaccccgacaagctgtgcgaccagatctctgatgcagtgctcgatgcgtgccttgaacaggaccctgacagcaaggttgcctgtgagacatgcaccaagaccaacatggtcatggtctttggagagatcacaaccaaggccaac

SEQ ID NO: 50428 - DNA, 285 bp, Glycine max
ccaattcaagcgtgcataggatcaaaagtgatcgctagtgaagcgatatccgcaataaggaaggatgtactagccaaatgctacggtggggatatttcgagaaaaaagaaattgcttaagaaacaggctgaaggaaagaaaaggatgaagtctattggtaaagttgatgttccccaagaagctttcatggcagttttgaaacttgaaaaggaggtaatatgatcgtgtttacgtgtaagttgcaacatgatatgaaattgtaaatatattaagaaaatattagaa

SEQ ID NO: 50429 - DNA, 265 bp, Glycine max
gcgacaccgtaattgaaaatccaacacaagagaaaagggcgttagggtttcgaagaagaagaagatggaagacattgttgatcacttggctttcgagcggaacaagacgcagttcgatgtcgacgagatgaagatcgccggttctcttcacgcttttgaagtttctgacaaaatggctcgcctcgtcgccagcgatccggcattcagaaaggatgacagagttgtgcttgataggaaggcgttatttatgaacactttgaggaaa

SEQ ID NO: 50430 - DNA, 150 bp, Glycine max
tgcctccgctactgcattgtcgccggcaataaggccctcgaaaacgccgaccttgcccccgacaaccactccaagattgataaggagcgtgctggtgttcttgtaggctctggaatgggaggcttaacggtgttttctgacggtgttcag

SEQ ID NO: 50431 - DNA, 114 bp, Glycine max
gcgaagagaaagattaaagttcctctcgtctcctcaggggaaggatgagtactccaaatgggtggttggaagccagagaagtctccttgaggtgatggctgagtttccatcagc

SEQ ID NO: 50432 - DNA, 280 bp, Glycine max
tgttgcaactgcagttgcaacaagtactcttttgactacgttgagaagatcacaaatgagactctagttttgggtgttgggacggtgaaggcccaattcgagggtgctgaaatgggtgttgcagctgagaacggtggctgcaactgggatcaaactgcacttgcgacccatgcagctgcaagtgagatcaacatgcataaccttcaaacacaacacatacttattatttattgatacatgtattacagctatcaataaataataagtatgtgttgtgttt

SEQ ID NO: 50433 - DNA, 286 bp, Glycine max
acgagcagccgctcgaagtctagaacctcgagcagctcgagcgacaacaagaactctctctcaccaaagccttcctagaacgaaaaaaaaaagaagagcaattttccctcaccaaagaagaagaagcaaacaatggccgatcaacttaccgataacagatctccgagttcaaggaagccttcagcttgttcgacaaggacggcgatggttgcatcacaaccaaggagcttggaactgttatgcgttcattggggcaaaacccaactgaggcagagctccaggacat

SEQ ID NO: 50434 - DNA, 281 bp, Glycine max
tctaaatttatcattgctagcctgttagctttttccttgggatgcatggcttttgtttgtaaagctatggttacttgatttgtcttttgcaggatctgggtccagttacttgtatggtttctttgaccaagcctggaaagagggaatgccaaggatgaagccgaggatttagtaaaaaaggcagtttcactggctattgctcgtgatggtgcaagtggtggggtggtgcgaacagtcataataaactcagagggagtgaccaggaatttctaccctggcga

SEQ ID NO: 50435 - DNA, 283 bp, Glycine max
gaggcggaggaggcagcaacccgctgccgcctcgtcagtgcaagacagggttgggagcagcagtgggaatttgagtgtgtcttcaagagagggctcagcttctgcctctgcctctgcgcagaatgtgttgttgggccaactcgatgacgagatactagtgttgcaaagcatttggaatcagccaatacaatattttcatttgcttggtggactattggattctactgggcatcagctgggggtcaagcattagcccaagactctcctcagctttactggctat

SEQ ID NO: 50436 - DNA, 281 bp, Glycine max
tgttgctattatcatccgcagctgcttctattcgcaccgcaaacactgagccatggccgtcggaaagaacaagcgcatctccaaggggaagaagggtggcaagaagaaggcagctgatccctttgccaagaaggattggtatgacataaggctccttctgtttttcaagtgaaaaatgttggcaaaaccctcgtctctcgtactcagggtaccaagattgcttctgaaggactcaagcatagagtgtttgaggtctccatggctgatcttcaaggggatga

SEQ ID NO: 50437 - DNA, 296 bp, Glycine max
actcgagccgaatcggctcgagcggctcgaggctcctcaaaacatacttaagattgggtcacagcagaagttcatgagtaatgatggtaattgtgaggactatggaccctcggcattcccagtggaggaggtgcataagattgctgtgcttgattaagattggctaatgcagacaggcatgctgggaatatattgatcagaaaggaggcagatggccagataaagctcattcctattgatcatggctattgtctaccagataaatttgaagattgctcatttgattggctttactg

SEQ ID NO: 50438 - DNA, 280 bp, Glycine max
gccttagccttccctacaactccaaacctcgagacatctccatccatggctgcctccgtctccactgtcggagctgtcaacagagctcttttgaacctgaatggttctggagctggagcttcagctcccagttcagccttcttcggaccagcttgaagaaggttattgcctcaagggtccccaacagcaaggtttccggtggaagcttcaagattgttgctgtagaagagaagaaagagattgaagagacccagcagaccgacaaggacagatggaaggg

SEQ ID NO: 50439 - DNA, 294 bp, Glycine max
aatatagcccaagccctatacaaccaaaccctaacacacacccatttgattcagtttccatggctagcctcaaggttgcatttttggctgcagtgctctgcatggttgtggtgagtgcacccatggcacatgcagctatcacgtgcgggcaggtgacgaatagcctgatcaattgcatcggttacctccagaacggaggaacgccgccgtcgggatgctgcaacggagtgaagagcctcaatgccgccgccaagaccaccgccgaccgccagacggcgtgcaactgcctcaagt

SEQ ID NO: 50440 - DNA, 288 bp, Glycine max
gcgtttgatgaccgccgcaactgccttccggctaggccggcccagcgctccgccgggcaatgtaagtcgtttttgtcgcaccctgtcgattgtaattcgtttaggtgtaagccttttgttccttcattgccccctcctcctccatatcactactaggttatttctgaagaatataagccaataaaaaacgttgttgatagcaggaagatgcacttcgcaattgcacaaggaaaacaacggaagccaagtttccgcgcattttgtcacataagataaacgaagtgtcaa

SEQ ID NO: 50441 - DNA, 288 bp, Glycine max
gatcaatgcagctgcggatcatgctggacattcagcacatctggtggtatagtatcttcctatgctcgtgcatatgggtatagtatgtctcgttctgagcagcatctagtggattgtgctggccgtttcaacaactttggctgtaatggtgggttgccatcacaagcctttgagtacatcaaatacactggaggacttgagacagaggaagcatacccctacactggaaaagatggtgtatgcaaattctcagctgaaaatgttgccgttcaagtcattgactcggtc

SEQ ID NO: 50442 - DNA, 286 bp, Glycine max
ctcgagccgatctttaaatgatgtgattcaataccgaaatcctaaggataatgttgtcattaaggatggtaggatcaccaaagatggtattatttgtacatgttgtgataaggtgctcacattatcagagttcaagtttcatgctgggtttacagtgaatcgcacctgcttgaatattttcatggagtctggtgagccctttacactctgcctccttcaagcttggtcagctgaatacaaagccaggagaagccataatcaagccgtacatgctgatgataatgat

SEQ ID NO: 50443 - DNA, 273 bp, Glycine max
gctggatcaaattgcacaatggacagctacacacttcagacagttctaaggagaggtgcaaccccctttgaatcatattttttacctgtggctgttggtgaaggagcatcttctgccaattttcctcttgagccacttttaaacaagtcatcaaatgtgggagaaagtggtgacatttggacttattttactttggatattccccgtggtgcagctggacggaatattcacatacggctatctgcagatgtgaagatcagttatgaagtctat

SEQ ID NO: 50444 - DNA, 183 bp, Glycine max
gcgactctctttccttccctctttttccgaatctgaatcgaaatggcttcggagactgagacgtttgcttttcaggccgagatcaaccagctcctcagtctaatcatcaacaccttctacagcaacaaggaaacaaatcttcgagagctcatcagcaatgcctctgatgctttgaacaagatt

SEQ ID NO: 50445 - DNA, 288 bp, Glycine max
ctcgagccgctgaaatccagaaatcagtaagataagcagcacatggcctgcgacttactaacgaggttgctatgtctattgcaagcaaggcggtaaggaagatttttattaattacataaaacgtgcacgggcagctggaaatcgtaccgagtctgcgaaagaactgaagaagatgatagccttcaacaccttagttgtaactaatttggtggaggacattaaaggggagtcaactgatatttcctctgaagaacctgtgaaagaggacattacacaaactgacgatg

SEQ ID NO: 50446 - DNA, 281 bp, Glycine max
  unsure (1)..(281): unsure at all n locations
aaactattgtcctgtctcaatcttatgtacgcactcttgctggattagctcttcgtgtcattcgtgatcctgctccaggtggttctgacttagtagataattccaggagggcatatacagcttatgctgtggttgagatgctccggtatttaatacttgtggtgccagatacttttgctgctctggattgctttcctttaccatcctctgtaatttcacatacaatgaatgatgggagttttgtactanaatcaactgaagctgcagggaagatatattat

SEQ ID NO: 50447 - DNA, 283 bp, Glycine max
tataggattcgagtgttcccttagttgtcaaatgggctgatactgaaaaggaaaggcaagctcgtagagctcagaaagcacagtcccaagcttctaatgtaccacatactgattctcagcacctgtcaatgtttggagccttgcctatgagttatgttcctccgtataatggatatgcttatcaggctccgggaggttatggcctcatgccataccgcatgccaccaatgcagagtcaacatggttaccataatgtgatgcctcacatgaatcaagtaaatgc

SEQ ID NO: 50448 - DNA, 278 bp, Glycine max
ataatggcagcgtcactacaagcagcagctactttcatgcaacccaccaagttgagcaggagcaacactttgcagcaaaagtctactcagtccatttccaaggcttttggtttggaacctgttggagctaaaaaggtcacatgctcccttcaggctgatcttaaggacttggctcacaagtgtgttgatgctaccaaaattgcaggattcgcccttgccacctctgccctcgttgtctctggggcaagtgctgaaggtgatccaaagaggctaacctt

SEQ ID NO: 50449 - DNA, 275 bp, Glycine max
aaataaagtgttagtgtctttgcaacagaagttcccttctgtatctaagtccttattgaagaataaagtgcgtgaagtatctgactatgttgataaccgcttgcaggtgaagaaagaagttctggataagcttggctcggcagttaaacctgaaaaaagcagtgggggaccaaggagcattgctgcatttttttcaaaaaggtgcttgcccccgactggggaaggttcgaaacctggtgaaacttcaccactgccacccctgaaatcatcttctg

SEQ ID NO: 50450 - DNA, 278 bp, Glycine max
ataatctcaagttcaaccttgtctcggtaaccctatgttcaagcctcatggtgttcctcgccaccctctacttcatgacccgtccaaggggggtgtacttagtagattttgcatgctacaagcctgacgtggattgcacgtgcacgcgggagattttcgtggagaggtctggtctcacaggctcattctcggaggagaacttgtcctttcagaagaagatccttgagaggtctggtttggtgcagaagacgtatcttccgcccgcaatcttgagtttg

SEQ ID NO: 50451 - DNA, 267 bp, Glycine max
aacagcatgaatgggatggtatataaggagaactatagaggcaaagaagagagtactgatgagcgcgaaattgaaacgctaaagatggagaagaagcaatcggaggtgatggagcagttggtgaagcaagcctctgcttcccccaacgctaacgcactcacttccatcctcgtccaagccacttctcaccccaacgtcttctctttctctcaatttctcgccctccctaaccttctacagcttgaagcaactgagaattctacttat

SEQ ID NO: 50452 - DNA, 272 bp, Glycine max
cttggtgtgaaacagatgatttgctgctgtaacaaaatggatgctactacacccaagtattccaaggccaggtatgatgaaattgtgaaggaagtctcttcctacttgaagaaagtaggatacaaccctgacaagattccttttgttcctatctctggttttgagggagacaacatgattgagaggtccacaaaccttgactggtacaagggtccaactctgcttgatgcacttgaccagattagtgagcccaagaggccctctgacaagcc

SEQ ID NO: 50453 - DNA, 277 bp, Glycine max
gttcatgggatggcagttatagatggcatggagtggaatgtgattttcaacaatgcgttaattgatgcttatgggaaatgcagggaacccaatttgtggttttctgtgttttgttggatgccagatagaaatgcggtgtcttcgacatcaatggttgtggcttagactagagcatgtagattggttgaggcttgtagggtatttaaggacatgccggttaagaatacggtttcttggactgctttgataccgggttttgtgagaaatggacgttgta

SEQ ID NO: 50454 - DNA, 283 bp, Glycine max
ctaattggtaatggatcaagtgggcctcaaaatgtgaatgttgcccttagtgttgacaaccagtgggtcaacggaggacaagttgaggttgctgatgacaggtggcatgaaattggtgggtcctttagaattgataagcagccatctaaggttatggtttatattcaaggtcctgcttctgttgttgatcttaatgcttgctggacttcaaatttatgctgttgatagacatgcaaggtttacatatttaaggagacagacagacaagatccgtaagcgggag

SEQ ID NO: 50455 - DNA, 276 bp, Glycine max
atgcatctctgtatttaatgcttttaattattatatgcatctctgttcaaaattgttattttatagattggatggaggaagcatgtgaatttcgaagttgggctgaattgattcctgatgcgctcggggtaatcttcaccaatctttctcttcaggagagggtaacagtgatccccttgatgtctatctcttgccagcagtaaggtccagttactgctggcaagagatagacatcaaggattggagcaaccgatgccagcccgaccaactcgatcg

SEQ ID NO: 50456 - DNA, 290 bp, Glycine max
gtatggatgtgcatcatccttagtagttgttggtggaagatcatggtgacaggtccaggtctctactctgacatctgctagagatctcgagatcttctgttcaacgattatcagtatgatcacaagttcaccatcactacttacacttccactggagtggaaatcacttcaactggagtcacgaaaggtcgaatatctttggccgatgttagcactatggtgtagaccaagaacatcataactgatgtcaaagtggtctctaactcagtgctgcgtacaaccattactgt

SEQ ID NO: 50457 - DNA, 274 bp, Glycine max
aaaagccttagccttccatacaacttccgaccccaagacatcatcatccatggctgcctccgtctccactgtcggagctttcaacagatctcttttgaacctgaatggttctggagctggagcttcagctcccagttcagccttctttgggaccagcttgaagaaggttattgcctcaagggtccccatcagcaaggtttccggtggaagcttcaagattgttgctgtagacgagaagatagagattgaagagacccagcagaccgacaaggac

SEQ ID NO: 50458 - DNA, 218 bp, Glycine max
caattctccacaagagtggacattcttccacaagaatatgtagagaagttgtctgaacttcaggatcaagttcctccatttccctcagagtctgctatagctattgtcgaagaagaacttggaagtcctttagcaggtgtcttcgatcattttgagtatgaaccaatagctgctgcaagtcttggtcaggttcatcgtgcaagattaaggggacagga

SEQ ID NO: 50459 - DNA, 251 bp, Glycine max
gtaaatttccattcaggtcacaagaaatggatacagacaaaacatgtcaatatatgaattacgtcctggtgacattgtgcatcttgccattggtgacccagtccctgctgatggactatttgtctcaggattttctgtgttgatagatgagtcacgcttaacaggagcacgtcagccagtgatggtgaattctgaaaatccatttcttctttcggggaccaaggtccagacggttctgcagatgttggtta

SEQ ID NO: 50460 - DNA, 277 bp, Glycine max
attatgatgatcaaccattatcgagtaccgagacgaactgccctattggttctaaaaatgcagataacggattgcacagtgcgatgccatatgctggtgctcgatcctcttgcataagtggcttggatgagagttgccatgaatgatgaccagagtatacagatcacagaactcaagttgcaatggcctgttggggtctatcgagccaagcgtagatggtgcttgtcagggactcctatccagaatgcaattcatgatctctacagttactttagat

SEQ ID NO: 50461 - DNA, 283 bp, Glycine max
ctcgagccggctcgagcggctcgagcttaatttagtaaacaaacagccaatcccagatttaaaggttcatatcaatatggcaatattgtcaagttttacaccattgactattcctagtatagtcttgttagtggttggagtcttagtctctggggctgaagtaggccaagggctttctttgtgtttggagattcacttgttgatagtggaaataacaattacttggctaccacggcacgtgctgatgcccctccttatgggattgattaccctccaagtcata

SEQ ID NO: 50462 - DNA, 267 bp, Glycine max
ctgagtcatatcgcttagtcatgtacatttactaatcgatgttgtgatcactgcctggaaaggttgtgtgtgtcaccggcgcgtccggttacattgcttcctggatagtcaaattcctcctccttcggggctacaccgttaaggccaccgttcgcgcacaagtgatccgaaaaaaacaaaccacttgattggcctcgacggtgctaaggagagactgcacctctacgaggcgaatcttctcgaagaaggttcctttaactctgtcgt

SEQ ID NO: 50463 - DNA, 302 bp, Glycine max
cttccaacacttattcctttttttttttccctcttgtcattactcaaattggaaacattatttgaagctatcaaacaacaatcttgcttctatcaaccctcagccatggtgttttctttcaaccaaagcttctgcctttcttcttcgcttctccttctcctcatggccctctgtgtttcttctctttctgacaccgttttcaactctcaagcagcgcataccgctcggaaccttcttcaggctaaaaaaagttgttctgtgaatttcgagtttttaaactacacagtaatcacaagcaaatg

SEQ ID NO: 50464 - DNA, 299 bp, Glycine max
ggataaaaaaacatatgcgggtatgcactcatggtttgcactgaatccagtcacccctgccatagttgaaataaaaagcattcaccaatttgactggttgactagagagaatgtcccagtgcttgaagccgtagaaaatcaaaatgggattaggaattactaccatgggaatcatattgcaggaaccaatctcagtgacaccagtccacgtaaatttgcatctaaattgcaggccagaagtccaaaatacatatctttactcaaccatctccgcatatacttaccagagcttttcccaa

SEQ ID NO: 50465 - DNA, 295 bp, Glycine max
aaataattttagtattttaaggactatttaggggagagagtaatatttgagggactaatttgatggtttactcaataatttttacacttttccatgttgttaacctggttgttttgttttatgtgtcttctttctgtttttcatagaatatagacggtgtgaactacttccacgtaaaggttgctggattgctatttgttgctactactagagtcaatgtctccccttctcttgttttggaacttttacaaagaattgcacgtgtcatcaaagattaccttggtgttctcaatga

SEQ ID NO: 50466 - DNA, 291 bp, Glycine max
cttttgagcttgttatagtacagacgaatcacgtataattgaacaatgaatgccacagcatccaaaccagacagactacactaaaggatggagtgcaagggtgacactttttaactggggtgacactaattttgcagactggtttgccgcagtacaaatggacaaagcagcttcgggttttgagaaaatgtattcattcaatgcaactcttctagatggtgtaaacaatacaataatcatgcaaggtttgccaggattgaactaccttgtagcagaagcagatggagctga

SEQ ID NO: 50467 - DNA, 286 bp, Glycine max
agggtttgcaactgaatgaggctctcacctcgccacgtaatcttttaagcaattaaagaaggaataggataatgattagtgaaaaaagaaaaggctaagcgataattattttgggtaaaagaccaaatgcactagcctatgctttctacacatgttgaggttgtgtaatttgtaatgtacgtaggtcaatgcctctatgaatattgactattaaaacctgtttaatttccactgcagccactgccataagtcccaaacaatgcttcaaaccctaccaacactgcag

SEQ ID NO: 50468 - DNA, 274 bp, Glycine max
ctgatgttttggaagggaatgatggaaatgataacagtaatccttcacgtgattctagctcatgcagcagttctatctctgtatcaaaggaacctgtccatgaagcttggcctcttcaccgcaagaaaattagaaaagttgtcatcaggaaagataaaagggcccgcaagaaagaggaaagctttgagaaagctcttttgattgccaacacaaggacaaaagttgatgttgcatggcaggatggaaccatagagcgtggactaaatctacgagt

SEQ ID NO: 50469 - DNA, 274 bp, Glycine max
gttgagaacaataaattgtgtgtatctgtgcactaccggaatgtagatgaaaagtattggaattgggtggggcaacgtgttcatgatgttctgaagggctatccacgtttgcgcttaactcatgggcggaaggttttagagatccgacctgtgattaactgggataagggcaaagctgtcacgtttctacttgagtcacttgggctaaacaattgtgatgatgtgcttcctatatatattggagatgatcggacagacgaagagcatttaaggt

SEQ ID NO: 50470 - DNA, 280 bp, Glycine max
gacgaggtgcgaggccttcaggtttagtctcaggtgcgcggaaagtgaagcgacgtgaagatggaggtgggccaggcggcgtctggtaccgatggtgtccgggagcggaggggctcgtccgcagctagaaggaggagccaagatgagcccgttcagtcggggatgaacgggattccgaaacactcctactggctggatctctggctcttcatccttttcgacctggcgttgttcatcttcgtgtacctcttgccctgattggtttgctgagagtctagaa

SEQ ID NO: 50471 - DNA, 282 bp, Glycine max
tggacttcgacagtccgtcatcagcacagaaggctgtaactgcactgaaatccagtggtgtgcaggcacaaatggcaaagcaacaggagcaagaccctacaaatttatacatctcaaacctccctctgtcaatggacgagcaagagctggaggggatgctgaagccctttggccaggttatctccactcggatcctccgagacaccactggggccagcagaggggtcggctttgcaaggatggaatccacagagaagtgtgaagccatcatcacccacttta

SEQ ID NO: 50472 - DNA, 283 bp, Glycine max
cccggcaccatgtcggagaagagcgtggaggcagcggccgagctaagcgccaaggacctgaaggaaaagaaggacaaggtggaggagaaggctggccggaaagaacggaagaaagaagtagtggaggaggaggagaatggagctgaggaggaggaagaagaaactgctgaggatggagaggatgatgatgaaggagacgaagaagatgaggaggaagaggaggaggaggatgaaggccccgtgcggaagagaactgctgaagaggaggatgaagcggatccca

SEQ ID NO: 50473 - DNA, 278 bp, Glycine max
gtccctgttcagcgcccggccgtgtggagacccgggagccagtccgggcctctgaggcgaagatggtggactacagcgtttgggatcacatcgaggtgtcggacgatgaggacgagacgcaccccaacatagacacggccagcctgttccgctggcggcaccaggcccgggtggaacgcatggaacagtttcagaaggagaaagaagaactggaccggggctgccgggaatgcaagcgcaaggtagccgagtgccagcgcaactgaaggaactggaag

SEQ ID NO: 50474 - DNA, 284 bp, Glycine max
ggtccaacatggctccgcggttgtgcatcatctctgcagcagcacggcggctgctaaggaagccgggaccctgtgttggggacctcgcggctgcgcgtgctgtgcgattctattccaaggacagtgaaggcagctggttccgctccctctttgttcacaaggtggatcctcggaaggacgcgcactccactctgctgtccaagaaggagactagtaatctctacaagatccagtttcacaacgtgaagcccgaatgtctggatgcctacaacagtctgacggag

SEQ ID NO: 50475 - DNA, 281 bp, Glycine max
gttcgaggcgccgccgccgctgcagccgccggagccgagatgcctaaaggacgtagagagggaggccataaaggccgagtgaggcagtatacaagccctgaggagatcgatgcccagctacaggctgagaagcagaaggccaacgaagaagatgaacaagaagaaggtggagatggggcttcgggtgaccccaaaaaggagaagaaatctctagactcagatgagagttaagatgaagatgatgactaccagcaagagcggaaaggtgtggaaggctcatt

SEQ ID NO: 50476 - DNA, 284 bp, Glycine max
cacttaacagggtcatgtgcccagtttgtgcttactcagccagactctgtgtctacgaatctcggaagcacagtcaaactgtcgtgcaagcgcagcactggtatcattggaagcaattatgttaactggtaccagcagcatgagggaagatctcccaccactatgcattgagtagggctgatcagtgaccagatggagtgcctgacagggtctctggctccattgacagatcttcgaactcagccctcctgacaatcaataatgtgcagactcaagatgtagct

SEQ ID NO: 50477 - DNA, 279 bp, Glycine max
gccagaggtaacctgtgaagatggttcgctactcccttgacccagaaaaccccacgaaatcatgcaagtcaagaggctcaaaccttcgtgttcactttaagaacacccgggaaactgcccaggccatcaagggtatgcatatccgcaaagccaccaagtatctgaaggatgtcactttaaagaagcagtgtgtgccattccggcggtataatggtggagtcggtaggtgcgcccaggccaaacagtggggctggacacagggacggtggccaaaaaaga

SEQ ID NO: 50478 - DNA, 277 bp, Glycine max
gggaaagcatgggacaccggtatattgaggtgttcaagtcacacagaaccgagatggattgggtgttgaagcacagtggtccaaacagcgccgacagtgccaatgatggctttgtgaggcttcggggactcccgtttggatgcacaaaggaagaaatcgttcagttcttctcagggttggaaattgtgccaaacgggatcacactacctgtggacccggaaggcaagattacaggggaggccttcgttcagtttgcctcacaagagttagccgagaa

SEQ ID NO: 50479 - DNA, 279 bp, Glycine max
gcgcgagctcggaacgagaatccacgagttgtaagaaaatggcagacaagccggacatgggggaaatcgccagcttcgataaggccaagctgaagaaaaccgagacgcaggagaagaacaccctgccgaccaaagagaccattgaacaggaaaagaggagtgaaatctcctaaaagcctaggaagatttccccaccccaccccttcatctccaagaaccccctcgtgatgtggaggaagagccacctgcaagatggacgcgagccacaagctgcactgt

SEQ ID NO: 50480 - DNA, 283 bp, Glycine max
gcagagagaagcagactccttagtttcaggggacctagtgctaaagcctacagccatgacctggaacctaaaggtgaagatgctggggggcaaggagttcctggtgtccatgacaaactccatgatgctgtcagaactgaagaagcaggttgctcagaagagtggtgtgccagctttccagcagcgcctggcccaccaaagcggtgaaatgctacaggatggtgttgcccttatcaggcagggccttagttctggcagcacagtcatgctgatggtagagaac

SEQ ID NO: 50481 - DNA, 280 bp, Glycine max
ctcagttctctttagacaccagtgtctgaagttccctgtgattctatggcttcagtgtgaagaactgtggagcccagcctgccctgcacttcaggaccctgtcccttcactgcccgctttcccttccacattcagccttgctggtccagcctgggggtggagggtggggacatctgcatcctgtccccctgtgctaccctgagcttcagcccctcacttccaccctgagaataagaatctgagtgtgaacttgattgttcacatccttgacacaagtgta

SEQ ID NO: 50482 - DNA, 276 bp, Glycine max
ggctggtgttgcagagagactcagggcctacctggagggcacgtgcgtggagtggctccgcagatacctggagcacgggaaggagacgctgctgcgcttagatcccccaaaggcacatgtgacccttcaccccagacctgaaggtgatgtcaccctgaggtgctgggccctgggcttctaccctgctgacatctccctgagctggcagttgaatggggaggacctgacccaggacatggagcttgtggagaccaggcctgcaggggatggaacctt

SEQ ID NO: 50483 - DNA, 281 bp, Glycine max
gctgtgtaatcactgagacgcggaggggcttgcggcttctaaaatgccggattacctaggtgcagaccagcggaaaaccaaagaggatgagaaggacgacaagcccatccgagctctggatgaaggggatatcgccttgttgaaaacttatggccagagtacttattcgaggcagatcaagcaggttgaagatgacattcagcaacttcttaaaaaaattaatgagctcactggtatcaaagagtccgacactgggctggcccctccagccctctgggatt

SEQ ID NO: 50484 - DNA, 277 bp, Glycine max
gcagcagcagcagcagcagcagcaccagcagcacttgggggaaaagctagaggctagagtcatggatgaccagcgcgacctcatctctaaccatgagcagctgcccatcctgggccagcgtgctagagccccagaaagcaattgcaaccgtggagtcctgtacaccagtgtctctgtcctggtggctctgctcttggctgggcaggccaccactgcttacttcctgtaccagcagcagggccgcctggacaagctgaccgtcacctcccagaacctg

SEQ ID NO: 50485 - DNA, 274 bp, Glycine max
ctcacaaaggcttgcagatgcaaacattcttttctcggagttttctagccttaaaagcattgtaatgtggaccgctttaatttcaggacatattcaaaatgagtgcagtgatgtggccttaaacttgtatcgagaaatgcgtgacaacaatatctcacctgaccaagcaacatttgttactgttcttcaagcttgtgctctcttatcctcgttgcatgatggtagagagatacattctctaatcttccatactggttttgacttggatgagtta

SEQ ID NO: 50486 - DNA, 274 bp, Glycine max
catttggggacattttgatgacccagtattcatcatccctggctgtgtcagaaggagagaaagtgactatgagctgcaagtccagtcagagtcttttatggattggaaatcaaaggagctgtttagtctggcaccaaagaaaaccagggcagactcctaaaccactgatcacctgggcatccaatagggaacctggggtccctgatcgttttataggcagtggatctggaacagattttactctcaccattagcagtatgcaggctgaagatgt

SEQ ID NO: 50487 - DNA, 297 bp, Glycine max
gtggttagcaagatgaacaaagatgcgcagatgagagcagcgattaaccaaaagtgtaatagaaactggagaaagagaacgcctcaaagagttgctgagagctaaattaattgagtgcggctagaaggatcagttgaaggcacactgtaaagaggtaattaaagaaaaaggactagaacacgttactgttgatgacttggtggctgaaatcactccaaaaggcagagccctggtacctgacagtgtaaagaaggagctcctacagagaatcagaacattccttgctcagcatgccag

SEQ ID NO: 50488 - DNA, 289 bp, Glycine max
cataagtgtagttttagagtcctcactgcttggtccccaaagccttattacttaccttttagcgctggctttaattaggtttgcaacgtgctgcctcagccccctgcaggcaggcccaggtaggactgctggaggctgtgcttttaactttgtaacagacatttccgaaccaaaggctgctgggtttgcatgtttacaggctccaccctagggccagtgtcagagctggctttggggagctgggcaaggaagaggaggcccagcccagactcttcctggcctttctcaa

SEQ ID NO: 50489 - DNA, 287 bp, Glycine max
ggctgatacggacccgcgctatccccgctcttccatcgaggatgacttcaactatggcagctgcgtggcgtcggccagcgtgcacattcgcatggcctttctcaggaaagtctacagcatcctgtctctgcaagttctcctaacgacagtgacctctgccctgttcctgtatttcgaaaccttgcgtacttttgtccatgacagccctgccttaattgtggtgtttgctctcggatctctgggcttgatctttgcgttgactctgcacagacacacgcatcctctga

SEQ ID NO: 50490 - DNA, 291 bp, Glycine max
cccaggaagactacaaacacactctaaggactaccctccctgctcaaataagcccatttcctgccttgctgaagatttataaactggacattgctgaggaatttccaggcaggctcatctataatttgcaaaatggtgaatgaatacaaggacattgttcttataaaaggattagaggatatgaaggactatgcatttagaaccatcaagtccttactaagaaaagaactagacctaactacaaaaatgcaagatgattatgacaggattcaactggctgacctgttggag

SEQ ID NO: 50491 - DNA, 289 bp, Glycine max
gtctttgtgaaaaacccggatggtggaagccacgcctacgccatccacccacttgacttcgtcctgagcctgaagcagcagatcgaagataggcagggccttcaaagccaggagcagcagctggagttccagggccgcgtcctggaagactggtttgactttaaatcctatggcatccaagatagtatcacgatcatcctatccaggaagagggaggggaaagccccatctgcgcccagctagcttcctctgcctcttttgctatctcatcctaaagtcagcctagtca

SEQ ID NO: 50492 - DNA, 288 bp, Glycine max
gaaaaggcggagaagcctgataaaaaggagcagaaacctgcagccaagaaggctggcggtgatgctactgccccccgggcccggcccgctggtgcggtcaaaaagagtagttctaaggctaaaaagctgaggaagagtaagccccattgcagccggaaccctgtcctggtgagaggaatcggcaggtattcccgatctgctatgtattccagaaaggccttgtacaaaaggaaatactctgctgccaagacaaaggttgagaagaagaagaagaaagaaaaggtcctt

SEQ ID NO: 50493 - DNA, 289 bp, Glycine max
atcttggcgtctgatcttggttggggcttgtcccgcacctaaggcaagaggatggtggctgcaaagaagacgacaaagtctctggagtcaatcaactctaggctccaacttgttatgaaaagtggaaagtacgtgctggggtacaaacagactctgaagatgatcagacaaggcaaagcgaaattggttatcctcgccaacaactgtccagctttgaggaaatctgaaatagaatactatgccatgttggctaaaactggtgtccatcactacagtggcaataacattg

SEQ ID NO: 50494 - DNA, 284 bp, Glycine max
gcgccggcaagatgggtaagtgtcgtggtctccgtactgcccggaagctccgcagtcaccgacgggaccagaagtggcatgataaacagtacaagaaagcccacttgggcacagccctgaaggccaatccgtttgggggtgcctctcacgcaaagggaattgtactggaaaaagtaggggttgaagccaaacagccaaattctgccatccggaagtgtgtcatggtgcagctcattaagaacggcaagaagatcacagcgttcgtgcccaatgacggttgcttg

SEQ ID NO: 50495 - DNA, 285 bp, Glycine max
gcctgcaaaggttaattaaaaactgttttgcagccaacaagcgccgggcttcagtgatttaataatggaatatttattattctgttatgcaaatacatttattgggtaactgctttggttgagtatgtcttgctcagcgtggctactatgtatccttctagaaattttataagatgaaaagagattttttttaaatgaacatcgtgtcattttagacggtgctctaagcctccatcttttttttttcttccacagcaattgaacaagagaagcaagctggcgaat

SEQ ID NO: 50496 - DNA, 286 bp, Glycine max
gatctcttggccatcaatttgtcctccatccatgtgtttcagtgccttctctgcttcatccggattctcgaattccacgtacgcatagcctttggatagatgaggatgcatcctttccacaggcatgtcaatcattttaattttcccgtaagtagaaaatatttccatgatatgatccttggtcacattcctggtgagcctcccaatgtgcactttggtgggtttaggtgaagggctccgccttttcctctctttttcatctcttttaggtggtttggatttggag

SEQ ID NO: 50497 - DNA, 285 bp, Glycine max
cacacatcttctcaacccagatggggaacctatagccacgccatatatggctaatatgatagtccaaattgatcaactactggcttttattggggtttctaactggaatgtggatgaggggttccttacaggagcagaaatgactcaaagacagctgtattaccgaaacccatcccccaccttgggtgacagctcacaagtgccgagcacctagagcatactgcatagcctgcaggcagctcaacaggctggaggctgtcctctccatgcacctaccccagttgg

SEQ ID NO: 50498 - DNA, 304 bp, Glycine max
attttataagtgttaattcttgattttgatattggtacaaataaaactatatatacataggtcaaaaagagttatacagtgtaaaaccaaagaaatcaatgaatttttgcaccaaaaaagtgtgggaaatatttttaaagacatgaaacccaagaagacagtgcagtcgttaatgtttcctttattggtctgtagtaacttcaagttcattctatgggacatgcttctgtcacagggcttttgttgacttcattcatctcctgggaattggtaagcatcatgtatctgacaataaagcagtaat

SEQ ID NO: 50499 - DNA, 301 bp, Glycine max
gctcgagagccacccagcccggcaatggtcctctttgtggagctggtccaggtatttctaaccataatgagcttcctgggtccccggggagtatgggccatcaaggccgaccacatgggctcctacggaccagccttctaccagtcttacgacgcctctggacagttcacacatgaatttgacggggaacagattttctctgtggatctgaagaagggggaggtcgtgtggcgtctgcccgagtttgcagacttcgcgtactcggactttcagagcgggctgatgagcatctccatgatca

SEQ ID NO: 50500 - DNA, 299 bp, Glycine max
gcctcaggcgctgccgccgccactgctgctgcaggatccgccgcagccaccagtctcgcgcgtcgtcgctccctccttggacagtaattttatgaataagcatcagaagccggtactaacaggccagcggttcaaaacccggaaaagggatgaaaaagagaaattcgaacccacagtcttcagggatacacttgtccaggggcttaatgaagctggtgatgaccttgaagctgtagccaaattcttggactctactggctcacgactagattatcgtcgctatgcagacacactctttg

SEQ ID NO: 50501 - DNA, 287 bp, Glycine max
gcttgaggaagcttgagagcctgttggggagcttaaaagatgagaggctgaggggctcggttgacctgcgtatgtttgctttgagcactgcggtccgaccaacagctcatcatgttcctggcgcgcctgacttcacagctggtcaggagtgttgttccctgggcaggtttcagtcgttcctggcctggctctggggtgattggcagccatgcttttcgactcctttacagtttgcagcctgcaagcccaagtcgggctgcctccctccctggtaagaaggcccagtt

SEQ ID NO: 50502 - DNA, 285 bp, Glycine max
cttgatgacactgcagctgatggacttctgtttgaggatcctgcccctgtgcagctcctatatggaagtgcccacctaccttaacttcaagtccatgaaccacatgaattacctgccgagtcaggatggcatgccacgcagccagttcatcaacatgatgctcatctttacagtggcctttatcaccgtgctcatcctgaaggtctacatgttcaagtgtgtttggacatgctacagattcgtgaagcacatggatacggccgtggaggacagcagttgctagct

SEQ ID NO: 50503 - DNA, 280 bp, Glycine max
gttcaaggaccccaatgcccccaagaggcctccttcggccttcttcttgttctgttctgagtaccgcccaaaaatcaaaggcgagcatcctggcttatccattggtgatgttgcgaagaaactaggagagatgtggaacaacactgctgcggatgacaagcagccctatgaaaagaaggccgccaagctgaaggagaagtatgagaaggatattgctgcctacagagctaaaggaaaacctgatgcagcgaaaaagggggtggtcaaggctgagaagagc

SEQ ID NO: 50504 - DNA, 290 bp, Glycine max
gagagagagagagagagagagagagagagggagagggagagagatcgggaacgggagcgggagcgagaaaaagagaaagacaagaaaagagacagagaagaggatgaagaagatgcatatgaacgaagaagacttgagagaaaactgcgagagaaagaggctgcgtatcaagagcgccttaagaattgggaaatcagagaacgatagaagactagggaatatgagaaggaggcggaaagagaagaagagagaagaagagaaatggctaaagaggctacacgattaaaaga

SEQ ID NO: 50505 - DNA, 292 bp, Glycine max
cttagtgttggtggggttaggggtaagtggtcactttccaggtcttcagtagattatgtcatggagtaggggtaaggggttctggtgggtgggtcctgtgatctgagagcataggccctaagtagcattgtgggacccagtactaagagtattcctggtagatttgactcacattcattctaatagtgaactcttttgtgttttgcctcttgtagtctgatatccttttgggcattctggacaagttggaccctgtcatgtttttcaaatgtccttccccagagtctgctaa

SEQ ID NO: 50506 - DNA, 294 bp, Glycine max
cgaggaacaagccctggtgatcgaggagcagctgcgaagggcggcttacctgaacatgtcagaggacccctctcatccgtctatggcccttaacacccgttttgctgaggtggagtgtttggcagaaagtcaccagcacctgtccaaggagtcgatggcaggaaataagccagccaatgcagtcttacacaaagtcctaaaacagctggaagaactgttgagtgacatgaaggctgacgtgacacggctcccagccaccattgcccgcatccccccagttgctgtgaggttaca

SEQ ID NO: 50507 - DNA, 302 bp, Glycine max
gatcgatttccctttgtgcttagatggaaaggaaaacaaagtggccctactgcaaatcgtgatgtagttttctatcggaaggctctggattccctaaaaccatgtgatgtggagtggctaccataccgaaacatggacagcatggtaattccagaacatatcataagcactttaattcttgggaggtcacagacaatgctgatttgctttgacaaggcagaaagacatcttccaaatcgatgcttaaggcaatatggcatgcttcaatcaattccggatgatgtggagcgttgggagaggaa

SEQ ID NO: 50508 - DNA, 290 bp, Glycine max
ctactccaaccgcacttctgctccgcaattatcatgggcaaggtcaagatcggaatcaacggatttggaagaattggccgtttggtagccagagtggctctgcagagagacgatgttgaactcgttgccgttaacgaccctttcatcaccaccgattacatgacatacatgtttaaatacgacagtgttcatggacactggaagcatcacgatgtcaccgttaaggacgagaagacccttctcttcggtgacaagccagtcactatttttggacacagaaaccctgaaga

SEQ ID NO: 50509 - DNA, 307 bp, Glycine max
gtgcggttgaggcggggatcgctgctgccggtctctcgttttcatcgcagacacttctgctgcaaagatggtcacgtacctaaaacccgaaggactttctgtaagaaatgtggcaagcaccagcctcacaaagtgacccagtataagaagggcaaggattccctgtatgcccaaggaaagcggcgctacgaccggaagcagagtggctatggcgggcaaacaaagccaatttttcgaaagaaggccaaaaccacaaagaagattgtgctcaggcttgagtgtgttgagcccaactgcagatctaaga

SEQ ID NO: 50510 - DNA, 302 bp, Glycine max
cggcggactgcagcagctgcagcagtggcaggagttcgatatccccacgggccgggaggctctgcggggcaacacagcgccctgctacgggtggccaactactgtgaggataactacttgcaggccacagacaagcggaaggcgctggaagagacgatggctttcaccacccaggccctggccagtgtagcctatcaagtgggtaacctggcggggcacacgcgtcgaatgctggatctacagggtgctgccctgcggcaggtggaagccaagatgagcacactgggccagatggtgaacat

SEQ ID NO: 50511 - DNA, 303 bp, Glycine max
gcgccgagcgatgggcatctctcgggacaactggcacaagcgacgcaagaccgggggtacgacaaaaccctacacaagaagcggaagtatgagctgggacggccggccgccaacactaagattggcactcgccgcatacatacagtccgagttcgaggaggcaataagaagtatcgtgctctgagattggatgtgcggaactttgcctcgggctcagagcgtcgtactcgcaaaacaaggatcattgatgctgtctacaatgcatccaataacgagcttgtccgcaccaagaccctggtgaag

SEQ ID NO: 50512 - DNA, 252 bp, Glycine max
gacgacctagatcactatgagatgaaagaggaggagccagcggagggcaagaagtctgaagatgctggcatggaaaagaaaacctggccatcctagagacaattaaaaagaaccagaggcaagattacttaaatggtgcagtgtctggctcggtgcaggccactgaccggctgatgaagcgagctcagggatatataccgatcacagagtttcaaaggcggaaactatgcagtcgaactcgtgaatcacagt

SEQ ID NO: 50513 - DNA, 237 bp, Glycine max
ggcggcgaatcacttataaatggcgcccaagcaggacccgaagcctaaattccaggagggcgagcgagtgcgtgctttcatgggcctcttctttatgaagcaaagtgtgtaaaggttgccataaaggacaaacaagtgaagtattttatccattacagtggctggaataaaaattgggatgaatgggtgccagaaagcagagtgctcaaatacgtggacgccaatttgcagaaacag

SEQ ID NO: 50514 - DNA, 182 bp, Glycine max
tgttgctcttggtgttgaatcgcaaaccggctccgccatgggagtagaggatgaacgatagatgctcactggctccgagaccccaaagaggaagaagaggaagagttagtggaccccctgacaacagtgagagagcactgtgagcagttggagaagtgtgtaaaagcccgggaaagactaga

SEQ ID NO: 50515 - DNA, 203 bp, Glycine max
ggcaaagacactgtaagtaccgagatctatccgggtatattcggaactgcggagtctgaccgccgtgcatgctactcagctcacactgtctctttctcactgtgggagtagctatgggaaaggtcacacttccttgctttcccctcaaaccagcaggggtttcacttctcagtctcccaacgcactgcacactgctcgcagca

SEQ ID NO: 50516 - DNA, 265 bp, Glycine max
gacctggtctagcacgatgcgccatcatgggtgttcacattcgccacgacaaggaccggaacgttcggccaaagagcccaggagccaggatatctacctgcggctgctagtcaagctgtacaggtatctggccagacggaccagctcgaccttcagccaggttattctcaaaaagttatttatgagccgaactaaccggccaactctgtccctgtgccgaatgatccggaagattaacttccttgtcgggggaataaactgctgt

SEQ ID NO: 50517 - DNA, 252 bp, Glycine max
cttactgcatcagctgtcgatgcaaccccaccaccccatcaggtctcaccatcagagctggttcctatgctgatgagctccttaagaccgcgaaaacagtggcttcaccagggaggggtattttggccatggatgagtccaatgctacctgtgggaagcgtttggcttcaattgggctagagcacactgaacctaaccgccaggcataccgtaccctcctcgtggacagtccagggcttggtcagtacatct

SEQ ID NO: 50518 - DNA, 297 bp, Glycine max
ggccttcggaaacgcaacgcagtgcaacggagccaaggagtcctgtgacataccatgaggtgatggatccgtgagagctcattgaataaatgtgctgtgacagcatctgaggataccccttttctcagctcttcacctcagcagagacggcatcttctgcagtttccaacctcaagcctcgcggcagattctctggtctactgtctggctggggttctccgtctagctcctgtatgcatattctatgttgcaccatttatagtaattcgtctgtggcacatatcacagagctcctcc

SEQ ID NO: 50519 - DNA, 294 bp, Glycine max
  unsure (1)..(294): unsure at all n locations
gtgccacctggaacggttgttcgaatgagtggcgaggataacgtgctgttggagatggtgtatcgggacagaaagggttgctgttgccaggtggtagaggaggcagagggaatgcttcattcaagtcagggactaataaggtccccaagattgccgagaatggggaagagggtcctgaaatgtggttggagttagaactcaagctggttgcggatgttggtatagttggtgctccgaatgcaggganaagtacacttttgagtgttgttagtgctgcaaagacggctgttgcta

SEQ ID NO: 50520 - DNA, 104 bp, Glycine max
ggctgagactagtcggagaagacaaggccggtggagaggtctgacaacagcatgtacacgcccaccctgcagagtggctctccattcccagcctcagtccagga

SEQ ID NO: 50521 - DNA, 293 bp, Glycine max
gcagccatggctcgtggtcccaagaaacatctgaagcgcgtacggctccaaaacactggatgcggataagctgactggcgtgtttgctcctcgtccatccactggtccacacaaactgagggaatgcctgcctctgatcattttcctaaggaacagacttaagtatgccctgactggagatgaagtaaaaaagatttgcatgcagcgattcattaagattgatgggaaagtcaggaccgatataacctaccctgctgggtttatggatgtcatcagcattgacaagactggag

SEQ ID NO: 50522 - DNA, 290 bp, Glycine max
gttagttgttttgtttgtttttttgtaattccttattttatttttttgactgagaaagaacaaaggctgggtgagtatggaggtagggagctaggacccatgcagaaggagctggctgagcagctgggcctgtctaccggggagaaggagaaattgccaggagaactggagcctgtgcaggccgcccagaacaagacagggaagtatgtgcctcctagtctccgggacggggcaagccgccgtggggagtctatgcagccaaaccgcagagctgatgacaatgccaccat

SEQ ID NO: 50523 - DNA, 289 bp, Glycine max
aattttccagccacggccggcggctcgcagagtacaataaacagggacggagaactatttgatggaccccccttcctcatgatgcggtggagaagccgcggccactcggtcctgccagatgttcttggggttactgtacaaggggagaacgagcagagctaaacaagaatttaaaaaggacgaaggaaggagaccgccatcctgctcagatacaaagatctaagagggttgtttcccccgcatcctccaaagctgtgagcatcagaactaatattttcccaaagagtgc

SEQ ID NO: 50524 - DNA, 286 bp, Glycine max
ctttggcctcgccggtagaagcaagatgacgaaaggaacgtcacctttggaaagcgtgcaataagacgcacacgctgtgccgccgctgtggctccaaggcctaccaccttcagaagtcgacctgtggcaaatgtggctaccctgccaagcgcaagagaaagtataactggagtgccaaggctaagaggcgaaacactaccgggactggtcggatgaggcacctaaagatcgtctaccgaagattcagacatggattccgtgaaggaacaacacctaaacccaagag

SEQ ID NO: 50525 - DNA, 256 bp, Glycine max
gaaaaggcccgtggagaggtctgagaacagcatgtacacgcccatccctcagagtggcctccattcccagcctcagtgcaagacccaggcctacacatatggcgtgtggagaagctgaagacggtgcccatagcacgatagaaccatggcatctttttttctggggattcctacctagtggttcacaatagcacggcagaggcctcccatctgcacctgtggataggccagcagtcatcgcgcgatgacatggggc

SEQ ID NO: 50526 - DNA, 287 bp, Glycine max
gagagagagagaatggcagcacttggtggcaatcgtgatgtggcaggaagccagaacagccttgagatcgatggtttagctcgctttgctgttgaagaacacaacaaaaaacagaatgcccttttggagtttgaaaaggtagtaagtgcaaaacagcaagtggtttctggtaccttgtacaccatcactttggaggcaaaagatggtgggcaaaagaaggtttatgaagccaaagtttgggagaaggcatggttgaacttcaaggaggtgcaagagttcaagcttgt

SEQ ID NO: 50527 - DNA, 284 bp, Glycine max
caacatcaaggttcctctcattcttggtatctggggaggcaagggacaaggaaaatctttccaatgtgagcttgtctttgccaagatgggaatcaaccccatcatgatgagtgctggagagttggaaagtggaaatgcaggagagccagcaaaactgatcaggcagagataccgtgaagctgcagacatgatcaagaagggaaagatgtgcgctctcttcatcaacgatcttgatgcaggagctggtcgtcttggtggaaccacacaatacactgtgaacaacc

SEQ ID NO: 50528 - DNA, 272 bp, Glycine max
ggatgattggagcttggagagacaggatcataatgtgcacagggacatatgggcctactcctgcccttatcaaggccgttctggactccggtgccaaagctattgtttgttcttcaagtgaacctccagagtctcagtcgatcactgttgatggtcacatagagtggaatgtgatggaaaatgggaagtttgaaattggagaagatgaagcagatgatgagaacgtaccggctagtccggtaagcgactgggaagatagtgacgctgagaga

SEQ ID NO: 50529 - DNA, 276 bp, Glycine max
caacaaagtcaactatgccaaagcatagttgtttgttgatacattggcatagttgactttgttgaatcgaaccacaacagggtagcgagtgttggggtcatgatcaacagcaaccactgaaccggagcctttgtaccagtaagattccttcctaagaatcttcggccttcataaaaccaagcgcacgcttccgccactcactctcacccctcctatcccccactttcaagccatattcttcttcagcttcggccttagttcccgaacttgatattc

SEQ ID NO: 50530 - DNA, 289 bp, Glycine max
ctcgagccgctcgaggcttcctcttcccgccactgctctgcctcggaatccgctcttttcacaacaccgacgacgacggcgcgttcttccactattcagaagcgccggagtaccgaaacggagcgggttgccccgtttcgtcaacccgtggttccctcccttcatgggacccttctctggtccacatcgtcatgatcctcgactccggctacctccgcggctccatcgtcgccgtgatatccgtcctccgccactcctcgtgctcggaaaacgtcttcttccacttcat

SEQ ID NO: 50531 - DNA, 288 bp, Glycine max
ctgccgtggtgctttcaccactgcttaccactaaccttcctctcactctctgccgctgcaagcttggctttatttccccaatggccgcttgtggctatatatctgctgccaacttcaattatctcgttggcgccagaaacatatccaaattcgcttcttcagacgccacaatttcgttttcatttggcgggagcgactcaatgggtcttactttgcgacccgctccgattcgtgctcctaagaggaaccatttctctcccttgcgtgtcgtttgcgtcgattatccac

SEQ ID NO: 50532 - DNA, 211 bp, Glycine max
ccaatctcaaacagtgcaaaaacactgcgaaatattttcaaccgcaaaacaaataacattcaatttccaaaattgccataatcaaccatagctgacagaagaagcagtaaccatcgtcgtgagcgaagatccataataatacagttaaattgcataccactcattgggtacgatttgacgacgcgaagatggagttggacgatctgactca

SEQ ID NO: 50533 - DNA, 280 bp, Glycine max
ccaaaaaatggaggtctgtaaaacccctttacctgaggtaaccagcattatctaaaccacaaacattgggagactttcttttgcaggagttagctgaaagtctttgttgggaaaagaagtatgaaaagggtgatatggctatttggagaaagataataaatgctaaatcctgcaaaagaaagtctcccaatgtttgtggtttagataatgctgatgatgtgtggtaccaaaacatggagggctgtaaaacccctttacctgaggtaaccagcaaaaatga

SEQ ID NO: 50534 - DNA, 293 bp, Glycine max
ttaattcctccacttcactccatgcatcaccatattcttgaacctcacacacatgtacagtagcatggctgcaaccaacgaagcagaagaagcagcaggaggcaaaagggtccaatacccactggactcttcctcctacaagctcctgaacgagatcggcgaaggcgtgagcgccgtcgtctacaaagccctctgcatccccatgaactccgccgccgtcgcaatcaaatccatcgacctcgaccgctcccggcccgacttagacgacgtccgtcgcgaggccaaaccctatc

SEQ ID NO: 50535 - DNA, 297 bp, Glycine max
gcagtttctatagtgagggatcaactgcgaaaacacggaaacattcagcaagcatgtgaagcacttgcagaagccgctttggatcgacgtacacaggataatgtcagcattataattgctgatttagggaggacagactggaagaatgcgcctctggagcgacaaaatactatacttgagctggtccaagctcttgcaaccattggaattgtgtccattggaatctggttttcatcacagctttctttatagattaaaaaaataccagtcatgtacataaaacagattatcattctg

SEQ ID NO: 50536 - DNA, 292 bp, Glycine max
cccagggttaatgacatggtcatcatccctcatgtcctcggtccaatggccagggttaatgacatggtcatacacaattgagagatgatgcccttgaacccgctgatctcaatgacaggaacatgattgtggtggatgttggtggcggcacgggtttcaccactcttggtattgtcaagcacgtggatgccaagaatgtcaccattcttgaccagtcaccccaccagctcgccaaggccaagcagaaggagccactcaaggaatgcaaaataatcgaaggggtgccgaggat

SEQ ID NO: 50537 - DNA, 267 bp, Glycine max
gtgcgtttcgctcgtgccggatcagcagcccaacatggatgaggtggtgcacatgatccaggatattagccgaagcgagaccaccgatgacggcttacgccaatcgtccgatgatccttctaaaggatcggacggtcacacacccccgcaggacgctaggactacccctaggtcggacacgtcgtagtagtgaagctgtaaaggcaaaagaagaagaagaagaaaaaaaaaagaaggaaaagaaaaagaaaaattcgttggaattgg

SEQ ID NO: 50538 - DNA, 288 bp, Glycine max
ctcgagccgtgcaaatcaaattacagagtcagctttgactgataacagacacaatttgggctaagtagattttccaagcaaaatgaagcagcttgcttatattatgtaacttaccttatttgtgctttgcagtggtgttgatgtatatactgctattgctggggctgttggagctctatatggacctcttcatggtggagccaatgaggctgtcctcaaaatgttgagtgaaattggaactgttgagaacattccagcattcattgagggtgttaaaccaggaaacgg

SEQ ID NO: 50539 - DNA, 291 bp, Glycine max
tttttgtaaccttttagcaagaaaaaaatctctttctccagtagaaagataatgaatgttcatttgatcttgatcttttcggattgaaaaagagatttttgtaaccttttagcaagtaaaaaaaaaagtaagacataaattgtttcgtttcaatccttctgataaaaaagaaagaaggatttcagattattcaatatttaatcaaatcatatctatagatcattgtcattttacacatcctactattttccatgatactacggatttattagcaaagaggggagaaataga

SEQ ID NO: 50540 - DNA, 284 bp, Glycine max
gttggatgcatttctatttctaactaattattgtgcttattattattgttgagaaagaaaagaatggcaaagttaataaaattctttgagttgaacacaggggccaagattccttctgttgggttaggcacttggcaagctgagcctggtgttgtagccaaagctgtcaccacagccattctggttggatacaggcatattgattgtgctcaagcgtataacaatcaagcagagattggttctgctcttaagaagctttttgatgatggtgtggtgaagcgtga

SEQ ID NO: 50541 - DNA, 282 bp, Glycine max
accctgacaagattccttttgttcctatctctggttttgagggagacaacatgattgagaggtccacaaaccttgactggtacaagggtccaactctgcttgatgcacttgaccagattagtgagcccaagaggccctctgacaagcccctcaggcttccccttcaggatgtgtacaagattggaggtattggaactgtgccagtgggacgtgttgagaccggtgtcttgaagcctggaatggtggtgacttttgcaccaactggactgacaactgaagtca

SEQ ID NO: 50542 - DNA, 188 bp, Glycine max
gtcatacatcatggataccatacaaagtcatcctgcacaagctgctcttggtggtggtgttcggaatttgcaaagaatccgtgccttccttcggattcggttaagggattatggcttactggattttgatgctggagatgctcggcggcagctcctgttgataccacatggcagcagatatatttttg

SEQ ID NO: 50543 - DNA, 142 bp, Glycine max
gttattgcctcaagggtcttcaacagcatggtttccggtggaatcttcaagattgttgctgtagaacagcagaacgaggttcaagagacccagcatatcgaaaaggacagatggaacggtcttgcctatgatatctcagacg

SEQ ID NO: 50544 - DNA, 294 bp, Glycine max
ccgcaggatgtgcttgggcatttggtatgaacatttttgacttggttgcatggcggaaggcaaacgtgaccacaagatatcactattggcaagagcagaatgctgatgggactctctggaagctggggacacttcctcctgctcttctttgtttttatggtttgacagagccacttgacagaagatggcatgttttaggattgggttatgacctaaatattgacaaccgccattgaaagtgcagcagttattcacttcaatgggaacatgaagccatggttgaagttagctata

SEQ ID NO: 50545 - DNA, 291 bp, Glycine max
aattactttgttttcagcctgtcttgtggagcattaattgcagtaacttttgtggtatggattgaagacaacaagggatggaagtggggtttagtggtctcaactgcatcaatacttctctccattccagtttttcttcttggctctcacaagtacaggaccaagattccagcaggaagccccatcacatccatgttcaaggttcttgttgcagcaatttgcaacaactgcagccaagaattcaagcaatgctgtcataagcatgactacaggtccatctcatgcaactga

SEQ ID NO: 50546 - DNA, 166 bp, Glycine max
cctttgtattatggcagagaatgcaacttgcggtaaaactacttatgttcactgtaaagctggtcgggggaggagtacaacaattgtgctttgttatctggttgaatacaaacacatgacgcctgctactgccctggaatatgttcggtctcgaagacctagagtg

SEQ ID NO: 50547 - DNA, 199 bp, Glycine max
ggcaattgcaggtgcaatagttggagcagcaggaggaggatggatgaatgatgcttatggaagaaagaaggcgatctgattgcagatgtgatatttattatgggagcaattgggatggcagctgcaccagacccttatcttctgattctgggacgttttctcgttggtatgggtgtcggggttgcctctgttacctctc

SEQ ID NO: 50548 - DNA, 298 bp, Glycine max
ctcttcttctcttgcggctagggttttagcgcagttgcttctagatttaaggaagatgggtaaggtataggttcacatcagtattgttggttatgtggccatgttgactctgggaagtccactaccactggccacctgatctacaagcttggaggcattgacaaggtgttattgagagatttgagaaggaagctggctgagatgaacaagaggtctttcaagtatgcctgggtgcttgataagcttaaggctgagcgtgaaagaggaatcacaattgatattgccttgtggaagtttg

SEQ ID NO: 50549 - DNA, 299 bp, Glycine max
tctcgagccgcatcggctcgagccgcgaggggtgtttagggctcacgagatcactttgcatggtgaccatcgatcggccgtttatcgacagacttccgacctactccgccacatttgtatgtcttgaatcagcagaagcctttggccttgatgccaataacttgagtacatcactgatcacttccggtacaaatttgcaaatgagaggctgagaagaacagcaagatattactcatccaattggagaacttgggctgctgtcaacattcaatttgcttggagacgttacaggcagagga

SEQ ID NO: 50550 - DNA, 294 bp, Glycine max
aaattattacggaggtccacatggaggacatgttgtgaggatgcaacgaaatggcatggggcctggatggcggtgagtggggtgcaccagcaccacctcctccaatgatgatgagtagtgctgagtttagctccaattactcgacgggaccggccccgtgcctcctccctcaccaaaccttgctctgggcctcaaagggggcaccttcacttacgaggaattagcagctgccaccaacggattcaatgatgcgaatttgataggacaaggtggattcggctatgtccataaggg

SEQ ID NO: 50551 - DNA, 284 bp, Glycine max
gccaacaatattgatgatcatgtctaaatttgaaggctttggatctatatcttctctggagagaagatcagcttctagatattatcttttcaattttgggaatatattccttgggaacatacttactggaacagcatttcaacagctgagctctttcattcaccaaccagccgaccaatatcctgtaacaattggcactgctattcctttaaaagcaagttttttcattacttatataatggttgatggatgggccagtatagctgcagaggttttgatgttga

SEQ ID NO: 50552 - DNA, 282 bp, Glycine max
cttacatccagggcaggactttccatggcattgggagcatttttgagctggtttactactggcagatactgaattttgccttacaggttgaatctgatattgctccatatcgtggccttcttttggggctcttctttatgacggttggaatgtcaattgatcctaaacttcttgtttcaaacttttcagtcatcatgggcgcactaggactcttaatatgcggaaagactatcttggtttgtttgatgggtagaatgtttaggatttctctcatttctgcca

SEQ ID NO: 50553 - DNA, 281 bp, Glycine max
ctgcatcttcctagatgatgactattctgtcaagattgcaggatttggtctgatcaactccaatttttactatggttctcacttacacaagaactatgaagcatttgacatctgcaaaaatgatgtttacgatatgggtgtgttgcttcttgagattatctcaggctcaaatcagttggattcaccaactttggctttacagcatgtaagggctggaaaatttgaagaaattttggacccatttctttgctatgatgaacaaccacattaccgccaagagc

SEQ ID NO: 50554 - DNA, 280 bp, Glycine max
aggatttcaagctcgccgataccgtgattaggggtttgttgaagtattggccggttaccaattgccagaaggaggttctcttccttggagaacttgaggaggtgctggaggccacgcaagccgcggagtttcaacgatgcatgattccgctttttagacagatttcacgctgcctcaatagctctcactttcaggttgcagaacgagccctcttcttgtggaataacgagcatattgtgagcttaattgcccaaaacaggactgtgatactaccaataat

SEQ ID NO: 50555 - DNA, 281 bp, Glycine max
ggcagcgtcactacaagcagcagctactttcatgcaacacaccaagttgagcaggagcaacactttgcagcacaagtctactcagtccatttccaaggcttttggttaggaacctgttggagctaaaaaggtcacatgctcccttcaggctgatcttaaggacttggctcacaagtgtgttgatgctaccaaaattgcaggattcgcccttgccacctctgacctcgttgtctctcgggcaagtgctgaaggtgttccagagacgctaaccttcgacgaaa

SEQ ID NO: 50556 - DNA, 279 bp, Glycine max
ggcagcgtcactacaagcagcagctactttcatgcaacccaccaagttgagcaggagcaacactttgcagcaaaagtctactcagtccatttccaaggcttttggtttggaacctgttggagctaaaaaggtcacatgctcccttcaggctgatcttaaggacttggctcacaagtgtgttgatgctaccaaaattgcaggattcgcccttgccacctctgccctcgttgtctctggggcaagtgctgaaggtgttccaaagaggctaaccttcgacga

SEQ ID NO: 50557 - DNA, 289 bp, Glycine max
gcaaacttggagaggtgggtttcgacgattacctctttgacatcaacaacagacacagagttctcagttacgtttgagtgggatgagagcatgggtgttcctggggcattcataatccgaaacaatcaccatagccagttctacctcaagacactgaccattgaagacattccagggcatgatggtcctgttaattttgtctgcaattcttgggtctaccctgctcatcgttacgcccatgatcgtgtcttcttcgccaacaaggcttatcttccatgtcatacacctg

SEQ ID NO: 50558 - DNA, 281 bp, Glycine max
tatctttcatcttttcagcaggccattctctgaaagcacctcctgatccagttaaaagatattaagcttgctgatgcattaaagcatcccatatggagtttggggagaaaaataactattgactctgctacccttttcaataagggtctagaagtaattgaagcacattacttgtttggagcaagctataacaatctcaatatcgtcatagcttgctccaaacaagtaatgacgatattgagattgttattcatcctcaatctatcatacattccttggtt

SEQ ID NO: 50559 - DNA, 293 bp, Glycine max
ggagcaacatggatttgcgaggaacaaaatctggtttattgagaaagatcctccatcgcttgctggagatttcaatggaaaagtttatattgacttgcttctcaaaccatcagaagacgatatgaaaatatggccacatagattcgagtttcgcctaagggtctctttggccgcagatggaaatttgactttgacatctcgcatcaggaatgtcaatggcaagaattttagtttctccattgcatatcatacatatttttccgtctcagatatcagtgaagtgagggtagaag

SEQ ID NO: 50560 - DNA, 292 bp, Glycine max
ctcttcctcaccgattgctagaatggaatttcgatgctcagtcatctcttttaccattctcttctctcttgctcttgcaggagagagccatgtccatgcatcgctacctgaggaagattattgggaagctgtttggccaaacactcccattcccactgcactgcgagagcttctaaagcctctccctgcaggtgttgaaatcgatgaactccctaagcaaattgatgatacacagtacccaaaaacattcttctataaagaagaccttcatccaggcaaaacaatgagagta

SEQ ID NO: 50561 - DNA, 283 bp, Glycine max
acattggctatggttgagcatgttggtttcagagctttcataaaaaatctacagccattgtttgaacttgtgtcgttgaataaggttgaggctgattgtattgagatttatgagagagagaggaaaaaggtgaatgagatgttggataaattgcctgggaaaatcagtcttagtgctgatgtgtggaatgctgtggacgatgcagagtatttatgtttgacatcaaattacattgatgaatcttggcagttaagaaggaggatattaaattttataaggattg

SEQ ID NO: 50562 - DNA, 305 bp, Glycine max
agaaaacagtagttgagaactaagagaaggaatggctcctcatgatctcctcccagctgttacaccgtcaacctgccggtgccggcatggttgctccattcaccggcctcaaatccatggctggcttccccacgaggaagaccaacaatgacattacctccattgctagcaacggtggaagagtacaatgcatgcaggtgtggccagcaattggcaagaagaagttcgagactctttcctacttgccagacctcgatgatgctcaattggcaaaggaagtcgaataccttcaaggaaaggatgga

SEQ ID NO: 50563 - DNA, 311 bp, Glycine max
ctcgagccgttcttttagaactccctctgaccagatcagtgttgcacattcaatatctctggggagcatatgtgaggatgcagaaattgtggacaaaaaacaaaacttaatgaactttgtccctactcttcggtctggagagtggtctgatattggagatcgcacttccatggaggatacacatatatgcatcggagacttggcagaaaaatttggcaataacgaactttacaaggaagctatttcctcttatggtgtatttgacggacatggacggaagagcgctgcacaattcgtcgtgatcatctgcc

SEQ ID NO: 50564 - DNA, 317 bp, Glycine max
  unsure (1)..(317): unsure at all n locations
gttggctatatgttgtgtattatcaacgatttccacagagggtggtaaaatgatgataatacacaacatatagccaacgtaacagaacccgttaatttgtgtattgaattaaaaattgagaggaatcgtgggtatcgtataaaatcactanaaaactttcaagatggaagttatcctatagatgccacatttatgcctgttcgaaatgtaaatcatagtattcattcttatgtgaatgggaatgaaaaacaagagatactctttctcgaaatatggacaaatggaagtttaactcctaagaagcgctttatgaagct

SEQ ID NO: 50565 - DNA, 291 bp, Glycine max
cttctttccaaatcccaactactactcacacttcattgaagtcttagatcctgggcaaccattgtaagcatcatggccgccaagatctttgacagtcgtggcaatcaaaccgtcgaggtggatttgacatgctccgatggtacttttgctagagctgctgttccaagtggtgcatccatgggatttatgaggcccttgaattgagagatggaggatctgactaccttggaaagggtgtatcaaaggctgttgacaatgtgaacaccattattgcccctgctttggttggca

SEQ ID NO: 50566 - DNA, 298 bp, Glycine max
  unsure (1)..(298): unsure at all n locations
ctcgagccggtgagtttgttgatcgagataactagaaacagtgtgatgaaaatgaaggtccatggtttcttcggtgctacaattttgggacgatggcaatggcatgcgtacgatatggtccctcttcggatggacaatgggtaatgtggccggaattcggaagtggaattcggcaatttgaaggctgctgtgggagcccacaacatctttggctttggagaccattctgaagagtgccgtgaagcaacaaaggaatacatccatggcgaacaatatagatcagactccanaaacagta

SEQ ID NO: 50567 - DNA, 289 bp, Glycine max
ctttctctctcccttagtcaaagggactcgttgttcttctcccaggttatttagaaaagcaaaatggtgaagatttgctgcattggtgctggatatgtggggggtcctactatggcagtcattgcacttaagtgcccatccattgaagttgctgttgttgatatctctaaatcccgcattgcagcctggaacagtgaccagcttcctatctatgaacctggccttgatggtgttgtgaagcaatgccgtggcaagaacctcttcttcagcactgatgttgaaaagcatg

SEQ ID NO: 50568 - DNA, 290 bp, Glycine max
cggctcgaggcagcgtcactacaagcagcagctactttcatgcaaccccacaagtttgagcaggagctacactttggcagccagaagtctactcagtccattttcacaggctgtgggtctggaacctgttggaactataaagggcacatgctcccttcaggctgatcttaaggacttggctcacaagtgtgttgatgctaccaatattgcaggattctgccttgtcacttctggcctcgttgtctctgggagcagtgctgaaagtgttccaaagaggctaaccttcgacg

SEQ ID NO: 50569 - DNA, 339 bp, Glycine max
acaaaacccgcgttctactcacacaccattagcgatgggcatcaccgtcatgtcgccagctctctgacacagagcatgaccgaagtcaggggttgttcgtctcgttcgcaggacatggcagtggcttggggcaccacctgccccactgccccaccatcggtttcccaccatcgttgaggcatttgaaggttctggaagaagatttggatgcccacatgaattttggaggcaatggtggaaaattacaggggaattttagagtacaagacgataagaagcaccgtgccacgtatcaggctttgggtgattcagaacagaagctccagttttattcggcta

SEQ ID NO: 50570 - DNA, 316 bp, Glycine max
  unsure (1)..(316): unsure at all n locations
ctcanacttgcttctccttagttcaaacatggagtggcatagaggccacaccataggccaaggctcatcagccaccgtcttccaccgctacgtgctgccgtggtgtcttggctgtcaagtcatcggagctgccacaatcagagcctctgaaaaaggagcagaaaattttctactctctaagtagtctctatgtggttgcatacaaagggtgtgacattaccatggagaacaacaagctcttgttcaacctcttcatggagtacatgcccttcggcacgcttgctcaggcgactcgccggtgcgatggtcggctcca

SEQ ID NO: 50571 - DNA, 296 bp, Glycine max
cggctcgagcccattgtttctcttgctttcttcatacatggattgcctaggcctctgttcacacgtcctaatgccgacattttaatttctcctggattatatctgcactaggtaatcacaacaactcaaagaaaagaaggctggccaattcaaatcagtttaggtgtatcagatccaaagattggttgtcagatatctgaactccctaaaattccttgccaaagtaacgagtttgacagtgagcttcttcgtggtgtgcgcctccattttgatagtccagggatttggaaaaggca

SEQ ID NO: 50572 - DNA, 287 bp, Glycine max
  unsure (1)..(287): unsure at all n locations
accgtggacttacaatgacccacttcgtgcaaagtataatgacaaaatggcagcaatgaatgcacctatagtaaaacctaaaggaagcaagaagttgaaagattgggaatctagggaatctggatgaacttgaagttacaaaactatcatgaagatatagtcctttcagttatagctcacggattaataccagattagatatcaccttatcctatgtatgcttgtgttctgtcttaatacagaatgtanagtagttcatcacggctcaagcatgttatggatcttgg

SEQ ID NO: 50573 - DNA, 287 bp, Glycine max
ataagggctttgaccccaaggatgataagggctatagctgaaagaaccaaacaaagaaaatcacgttccaaggtggacaatgtgcttcctaatgtgatgtcaatgcattcagttagcctgattcttgaggcaattttgcttaaatctaaatcctctgaagaacttgggcgatacactgaggctgcaaaggagtgcagaattgttgtggatacagttgagtctgctcttcctaatggaatgcctgagggtattggtgaagattgtaagttgcaagaaatgttccacga

SEQ ID NO: 50574 - DNA, 282 bp, Glycine max
atggattctacattgctccagcttatatgggcaagcttgttgttctcatgtccaagaacttcatgaccctgcccaacatcaaggttcctctcatgcttggtatctggggaagcaagggagaaggaaaatctttccaatgtgagcttgtctttgccaagatgggaatcaactccatcatgatgagtgctggagagttggaaagtggaaatgcaggatagccagcaaaactgatcaagcatagataccgtgaagctagcagacatgatcaagcatggaaagatg

SEQ ID NO: 50575 - DNA, 278 bp, Glycine max
attggagatcccttgaagcagaaaagactcatacttttgataaaattacacatgctatccgatcatctatagagagtcaagaaggaatccatgatctagcctactggctttcaacaacatcaacacttctgttttatctacaatgtacaatgaaggccagcaatacaactaaggcagtgtcacgtaatcgaaactcgcccgcctctttgtttggcaaaatggcacaaggtttacgttcatcttcaatgggcttggggatttcaagtggctacagtgga

SEQ ID NO: 50576 - DNA, 262 bp, Glycine max
cagcatcaacatacctagcgcgtgcagatcatagggatacgcagccataggtcgaagacccgcgaggtgttataggcgaattaagagcagaccataccccaggtcacggtgttgccgtggtgttcctgataccaagatcaggattcacgatgttggtatgaagaagaagggtgttgatgagtttccgttctgtgtccatctggttacttgggagaaggtaagcgtttctaggtgaggccctgggagctgctcgtattgcttg

SEQ ID NO: 50577 - DNA, 259 bp, Glycine max
gaagtcgccatgcacatcaaatggataactcaaccagagatggacctgatgagacaccagagatggtgactcgtccaccaagatcagtttcacttccccatgaacaaacagaagccgtggaagttaaaaaagtatatgctcgtgctgcttcatttcagcctgagaggtcgaatgaagctcggcatgtacatcccaagttacctgactgtgatgatttagctgctaggattgcagccttgagaggaacataagtaataga

SEQ ID NO: 50578 - DNA, 256 bp, Glycine max
  unsure (1)..(256): unsure at all n locations
cacaattagttgtgcaaatctcaagactgctttctttcttgacattgctttcattgcggtcacaacatatatcagcatcatggcagctcatggagtgcctctaaattcaagtgagncagcccatgctgaagcaggggcaggggagtcaggtagtgcagaagaagctttcatgtgggaattatgtgggacattcatatattttacagcccctgtatggataattctgtctgttactgctctgacatggattgggtgg

SEQ ID NO: 50579 - DNA, 258 bp, Glycine max
tgcatgtgtaaggagcataacaataagttttgcattgtgttgggttgcatcggttcatgatgttgtgcccggtatggtgatgcttcagaagtcagtggtgatgcctaaatcagggatggcactgagcattgcagcttcgatgctgacacaagttatcggctcgagagcggagcgaatccggcttaaaacaatagctgttgagatgggatgagtgaaaacatagacagtatgcagcatggaaagcgataatagtccatg

SEQ ID NO: 50580 - DNA, 247 bp, Glycine max
cagctatcttgtttgctttcgtcctgcacattggtgggaaggggctttggctggggatcatatgtgctctagttgttcaagtgtcatgtcttctgatcattacaatacgtactgattgggaacaagaggcaaagaaggtgaaagacagagtctacgattctatgagagctgaggtcatagtctcgtgaacattatatattttaactggtggcacgtgaagtgaacattcctcaactgtgcacatcta

SEQ ID NO: 50581 - DNA, 258 bp, Glycine max
gaggcatttaggttgtttgaatggatggtttgttctggggttgtgcctgattcggtgacacttctggcgcttctggttgcgtatgctcataaggggttggtcgatgagggaattagattgtttgagagcatggcagggactatggagttgaacctcgtattgagcattatggtgctgtgatagatatgttggggcgtgcagggcgattacaggaggcttatgatctgcttacaaatattccgattccatgcaatgatg

SEQ ID NO: 50582 - DNA, 257 bp, Glycine max
gttttgaaagctttttgatactgatgggctttttgttcttggcaatgctgttgcagatgttgaagatttttacaaccaatgcgatcctgagaaagagaatttgtgcttgtatggctttcccagtgagcagtggaagtaaatttacctgctgaagaagtaccaccagagcttcctgagcccgtgctgggcattaactttgctagggatggcatgcaagaaaaagactggttatctttagttgctgttcatagtgatgc

SEQ ID NO: 50583 - DNA, 264 bp, Glycine max
ggccaggcaagccccactcaaccaccacacctctcctcgttcacgctacccctttctgctcttcttctacctttcaagttttaaaagtataaagatggcagagacattcctatttacctcagagtcggtgaacgagggacaccctgacaagctctgcgaccaaatctccgatgctgtcctcgaagcttgcctcgagcaggacccagacagcaaagttgcctgcgaaacatgcaccataaccaacttggtcatggtcttcggaga

SEQ ID NO: 50584 - DNA, 268 bp, Glycine max
ccaagctcttctaagtagagagtgatacaaataaattgtggtttgctcagtcaccgaaagataggagcaagatgggagccaacttatccaacatggagaatgctcataaatcatcaaagtcatcatcagaccacattctcaccttccattccactgctaaatggaagactcattttgatgcttccagagagactaacaagttgatggtaatcgatttcacggctacatggtgtggaccttgcaaatccatggacccaattatcgaaga

SEQ ID NO: 50585 - DNA, 261 bp, Glycine max
gcactgaaaggggcccatttcattgaattatgcactcaacgtaacattcccttggtcttccttcagaacatcactggattcatggttggctcaagatctgaggcaaatggcatagcaaagtctggtgcaaaaatggtgatggctgtttcttgtgcaaaggtacctaaagtcactataatggttggaggaagctttggtgcaggaaactatgcaatgtgcggtcgtgcctatagtcccaatttcttgttcctttggcctaat

SEQ ID NO: 50586 - DNA, 251 bp, Glycine max
ggcaattgaactgccggagtcggtagtgcctgaaacataccgggagtgggaggttaaagtatttgattggcagactcaatgccccactctcgctgaaccagaggaacgtgttcttcaatacaaatccattcagttacttccaactgtaggatgtgaggctgatgctgctacacggtacaacgtggatgagaggaaagtgggaggggaaaataatggacttactgcctttgcttaccaatccagtggttctt

SEQ ID NO: 50587 - DNA, 171 bp, Glycine max
acttgggatatgaatgctgctctggagtcaaaaggtgatggtgattggcgagtgtgtacagttgggaaaaatgttactattaagaataggtatgtgagcattcgtgaggagatagatagagagcaccagcgggtttgtacagcatctgttattgaaccatcatgttgaatt

SEQ ID NO: 50588 - DNA, 152 bp, Glycine max
agagcaggaagcatcgccattggcacaatggtgaaaggtcgccaaggataacgtgtaagactctacgtcaggggttcaatccttggatacaataggtccaactcatatcaatactcaagcacctcactaatccagatcgagaatgcaaactc

SEQ ID NO: 50589 - DNA, 207 bp, Glycine max
cgaggctgacgacaccatggacaagagtgcaaatcaaggtgcctgtaaaattcattgcaggtgaattggacatggtatacacctcgctaggaatcaaggagtatatccacggtggaggtttcaaggaagacgtgccgaatttagaacaagtgattgtgcagaaaggagttgctcacttcaataatcaggaagcagcagaggatatca

SEQ ID NO: 50590 - DNA, 244 bp, Glycine max
caagaaacagggtttacaagctcaatgatgaaacagcaaatcttatgagaggccaatttgaatttgaaggatgctgtggctgtgaccataagcttgcatgacaaatcgagaaacagggttgataataacagattgtcaaacggcatagctttgtgtgcgaccaagaggttggcagctaccggaggcacatattctgattgatggtgagcctgcaactgggttgccttgttgattttggcctcta

SEQ ID NO: 50591 - DNA, 237 bp, Glycine max
gtcgtcgcgtgtactttcttgcgaaacagaatggcgaaggggcaaacacaacttttttgtttttttgtagaacgagagaggacaaaatgttggggatctagagcagttccgtggtgtcgccgccggaggagctggtagctgccggcagcagaacgccgtggccgaagacgacggcagggtaagctgacgaaccggttcgttgagaacaaggcgtcgggggtgtcgctgcaggtggga

SEQ ID NO: 50592 - DNA, 249 bp, Glycine max
aacaaaacagaatgggcgtcgtggtgatcgacggcagcaccgtgcgcgactttgtgaacgacgaaaccgccttcaccaagagcgtggacgagcagttctcggcgctggacctcaacaacgacggcgtcctctcgcgctcggagctccgcacttcggcatcgacgtttccacgccgccggagcagctcgcgaagctctacgactccatcttcgacaagttcgacggcgaccggagcgtcgccgtcgaccg

SEQ ID NO: 50593 - DNA, 249 bp, Glycine max
ctccaatgctctccgcaaactctgctagatgcgccatccgacggatcacgtggtctgaatcgtgttgggcgcggtgcatgtgaaccagcttctcgaatgggaggcccaagtggagcgagacctcgacaaaatgctcgtaaaggccaatgccgccaacgaaagacgttatatagatggagatgatgattaatgcatgtcttcatggattgtcgcagttggtgaaaataatcatgagatatgttgaacttg

SEQ ID NO: 50594 - DNA, 212 bp, Glycine max
gtggaaaatcagccatgaatcttgttgctccggttgcacgtcattttcctggttttagagaccatacagtgtacaaagggcgccaggtatttttatataaaagggctcagatatttgcagcagatttgtggggtgcatttaggggccatggatatggtgagtttgaagacattggctctctaactataatggcagactatattgtcccagct

SEQ ID NO: 50595 - DNA, 242 bp, Glycine max
gcaagagtggcacttcgttggttggtgatgtgcctttctgttctgttcactcttggtcgtgcgagagggagcgatgccggagacgaagatgtttggcatgctgttttgcgaaagagtgccattccaagttcgttgcgagatcttctaaagcctggcgctgcgagtgttgcgatcgatgatcacgctatgcaaattgaagaaacacggtgcgcgagaaccttcttctatgaagaagacctgca

SEQ ID NO: 50596 - DNA, 255 bp, Glycine max
agtgaaactgatggtgctgtttggggtgccttttgggtgcttgcaagattcataagaatgcggagatagcagaattggcctttcagcatgttgttgagcttgaacccacaaatataggttactatgttttgctatcgaatatatacaccgatgctaacaacttagagggggtttcaagagttagggtcatgatgagggaacgcaagcttaggaaggatcctggatacagctatgtggaatataaaggaaaaatga

SEQ ID NO: 50597 - DNA, 251 bp, Glycine max
gttgctgtatttggtgtcgactgtgcatcaggagatacttttactgacggttcagttaaatacacaatgacttctatgaatgttcctgagccagtgatgtcattagctgtacagccagtctctaaagattctggagggcaattttcaaaagctttgaatcgcttccaaaaagaagatcctacttttcgtgttggcttggacccggagagtgggcagacaatcatttctggaatgggggaactgcatttaga

SEQ ID NO: 50598 - DNA, 232 bp, Glycine max
cgaacgaaaagctccttaacttgcacagtgttgccacaaaaaatggtgacgtgcagttggctgactttgtggaaactgagtatctgggtgaacaggtggaagcaatcaaaagaatatccgagtatgttgctcagctcagaagagttggcaaaggacatggtgtttggcactttgatcagatactcctccacgatggaggagatgcagcctgatgattactatattacctccc

SEQ ID NO: 50599 - DNA, 183 bp, Glycine max
gtgcagtgcatcatcttcatcgcctacaagcccccaggcttctacgtgtgaaaaatttgcaaagcatttgtagccgccaccccactttgtttgtttgtacttaaactacattcccatttgtttttgctttttgagattcatcatcctgtatttttggtttctgttttcggacttcaatggaaa

SEQ ID NO: 50600 - DNA, 260 bp, Glycine max
tcgatcgcacgcatggggcggagactgcgaggtgttataggtaaattaagaacgagccatggcgcaagtcacgtttctgccgtagtgttcgtgatcccaagatcaggatttatgatgttggtatgggagaagaagggtgtgatgagtttcctttctgtgtccatctggttagttaggagaaggaaaatgtttcaagtgaggccctggaagctgctcgcattgcttgcaacaagtacatggccacatttgctggaaagggt

SEQ ID NO: 50601 - DNA, 239 bp, Glycine max
ggaagccgttttgaacttggatcctaattcctttgtggattctgtcaaaagttggctatacccatctctgaaggtaacaacctcatggaaagactatcatgatgttgcatcaacttttgcaacaacagggtcggttgttgctgccttgactcttctgatgattgaactccttggaataatgacaggttagtcaatgaccaagttattttcaatttctgtttttcttaacttctggtctt

SEQ ID NO: 50602 - DNA, 244 bp, Glycine max
gaaaaagatgtgcatttcacatttgggagcataggaggaaatgggattaatcaggcaagccagggcatggccatgtcaaaattctgcctcaacattgcaggggataccccatcgtcgaatcgcctctttgatgccatagtaagccactgtgtcctgtgatcataagtgatgaaattgagctaccctttgaagatgtcttagactactcagacttttccatatttgtccgtgcctctgactctat

SEQ ID NO: 50603 - DNA, 264 bp, Glycine max
caagtttgcacaaactgtggtgtcagaatgggagaatatttctgcagcatctgcaaattcttcgatgatgataccgggaaacaacagtttcattgtgatgattgtgggatttgtagaattggtggtcgagagaattatttccactgcaataagtgtgggtcttgctattcaactagtctgcgtgataatcatatgtgtgtggagaattccatgaggcatcattgccccatttgttatgagtacctttttgactcttgaaagaca

SEQ ID NO: 50604 - DNA, 263 bp, Glycine max
ctccagacccgcacgccggcgcacagagctctcagcgccgctctcagccacagcctcccgcgcctcgctcagctccaacatggcaaaaatctccagccctacagagactgagtggtgcatcgagtccctgattgctgtcttccagaagtatgctggaaaggatggttataactacactctctccaagacagagttcctaagcttcatgaatacagaactagctgccttcttaaagaaccagaaggaccctggtgtccttgacc

SEQ ID NO: 50605 - DNA, 256 bp, Glycine max
gtataactcccattatcagcgactatggtgaagaggtacacttatcggaagtggaacagttatgctaccaaatctatccagtaccgggacgagaatacacgctagatggaagtcggtgtaacagattatcgaagaagagagcaaatggacgcgtaagtgccctgtcactggcaagaggatccaagggattcacacttgagacctgctgtaactagaggtctagattgctcggaaccgcagaccgtaaacgagctac

SEQ ID NO: 50606 - DNA, 255 bp, Glycine max
  unsure (1)..(255): unsure at all n locations
gccgagtacttcttaagccgggctgttgagatatctagcaatgaatacgaaccttctgaaagggacatagtatatgcagaaggggttactcagggaaatggtttggctttcatggagttttctcttgatgaccgtgtcccaaagtctgataattatttggagaacttggatgctcagctgccaccactgaccaagtatcaactcatttaggcccttggcattcacggaagagagagggatgatcntgtttgctac

SEQ ID NO: 50607 - DNA, 247 bp, Glycine max
ggatgggtatttggagattaaggataggtcaaaggatgtgataataagtggtggtgagaatttgagtagcgtggaggtggaggcggtgttgtacgatcacccggcggtgaacgaggtggcggtggtggcgcggccggacgagttctggggggagacgccgtgcgcgtttgtgatgctgaaggaggggctggtggcgccaccgtcggagaaggaggtggtggagttttgcagagagaggttaccgcac

SEQ ID NO: 50608 - DNA, 259 bp, Glycine max
gaaagagaagcattagcaaaagcaagaagaactagtctaagcagaaatggcctcttcagtgatggcatctgtggccctcaaacctgcccctttcactgttgagaagtcctcagttagaggccttccctccctctcaaggaactcctcttcattcagagttgtggccagtggtggcaagaagatcaagactgacaagccttatggaattaatggtggcatggctttgagggaaggagttgatgcatctggcaggaaagga

SEQ ID NO: 50609 - DNA, 205 bp, Glycine max
  unsure (1)..(205): unsure at all n locations
cgcgtcgctccgcaccagtttcaccgcacgaatatcttgaggtntggagcgatccgagataaactctgtaaacatgttggtttaccaggacctccttacaggtgatgagcttctctctgacgtcttccgttacaaggaaattgagaatggaatgctgtgggaagttgaggggaagtgggttgttaaaggagcagttgatgtagac

SEQ ID NO: 50610 - DNA, 263 bp, Glycine max
cagattcgttccaggaggatcagaatgttagaggagaatcaggctctgcagaggcagctcttacagaaacatgctagagagctcgagagcttgcggatggcgagaagaatgggatgacagcctacaatcaaaagaacaaatcgaagccaacttactaagcaagtatgaggctactatgagaagagaaagagcactggcttatgcattcactcatcagcaaaactggaagaactcgtctagatctgtaaatccaatgtttatgg

SEQ ID NO: 50611 - DNA, 277 bp, Glycine max
tgtatcatatgtaggatctgcattttttttgcagattttcgttatatgtctaacggtgtatatcataaccctctatgtctgtagctgcgacaccatttataatttcaaggttaagattcaagacaaggtatgcatccctccggatcagcagcgtttgattttcgccggatagctacttgaagatggaaggaccttgtccgattactacatccagaaggaatttttcttcatcttgtcctcaggcttcgtggtgtcatcatcgagccttccctcatgg

SEQ ID NO: 50612 - DNA, 268 bp, Glycine max
tgctgatcttcgttaagaccctcaccggcaagactataaccctagaagtcgagagctccgacaccatcgacaacgtcaaggctaagatccaggacaaggagggtatccccccagaccagcagaggctgatcttcgccggcaagcagctcgaggccggacgtacccttgctgcctacaacatcacgaaggagtcaactctccactttgtgttgcgtcttcgtggtggcctgcagatcttcgtcaagacccttacgggtaagactattac

SEQ ID NO: 50613 - DNA, 272 bp, Glycine max
atgattgttgtgactcgttcttcttcgtcgttatcttcgtcttgtgttgtttgtgtgtgggttgtggtctctcacctgaaaatgtcttgctgcggtgagaactgtggttgcggaagcggctgcaagtgcggcaacggctgcggaggctgcaagatttacccagacttgagctacaccgagtcaagcaccacctgagacctgtggtcagtgggagtggcacgcagttaaggctcaattcgagagtgctgaaatgtgtgttcccgctgagaacg

SEQ ID NO: 50614 - DNA, 265 bp, Glycine max
atgatgggtatttacacatatctgaccgcttgaaagatatcatcgaatacaaaggctttcagattgctcctgccgatttagaagctggtgttaattgtgcatcctgaagtagttgatgttgctgttacacgtgcgatggatgaagaaactggggagatcccagtggcatttgtggtcagaaagggtggaagtgtgctgtctccagagcatagtatggattttgcttgtgagcatgttgctccatataagaatgttaggaaagtgt

SEQ ID NO: 50615 - DNA, 262 bp, Glycine max
taattttttgttatgggaaataatgtccgggatcagccacaagattgaggagagcctccatgtgggatgggacaagaaagatgagcacaaaggaggacgccatggtgagcacaaatgtgaacacaaaggagaacaccatggtgagcacaaaggtgaacacagaggagaacaacaccatggggagcacaaggagggacttgtggataagatcgaggacaagatccatggtgattgccatgacaagggtgagaaagagaaggag

SEQ ID NO: 50616 - DNA, 278 bp, Glycine max
atttgaggttgttacagggatggctaagaaacaaggaaaggaaaagtcatcagtttcaaatcatagcagtaccaaatctaagtcaaactctaagcgaggttctgaatcaaagtatacaaaagcaatgcaatcaaaggacgaggatgatgagggtggtgcgggtttgggtttgggtttggaagacgaagactcagaggaacatggagataccttgtgtggggcatgtggagagagctatgctgctgatgagttctggatttgctgcgacatctgcgaga

SEQ ID NO: 50617 - DNA, 280 bp, Glycine max
gttcgccggctcaggctcccgcatcgcctacaacaagctcaccgacaacggcgctggcacccctgccggcctcatctccgcctccatcgcccatgcattcgccctcttcgttcccgtctccgtcggcgccaacctctccggcggccacgtcaaccccgccgtcaccttcggcgccttcgtcggcggcaacatcaccttacctccgcggcatcgtcttcgtcatcgcccagctcctcggctccattgtcgcctccctaactctggccttcgtcaccgcctc

SEQ ID NO: 50618 - DNA, 266 bp, Glycine max
  unsure (1)..(266): unsure at all n locations
cgcttctgagcttggtggcctgttccctccatctctccgaacctggcttcgcctgttcacttcactctacaccctctggccttttgccttgagctgggactgctttctgtctgtccggcctgcaacaangctcctgctcacaaaatcccagggacagcggtctcccctgcctgccctgctcaggccttgcccccaaacctgtactgtcccggcggaggttgggaggtggaggcccagcatcccgcgcagatgacaccggttttcct

SEQ ID NO: 50619 - DNA, 247 bp, Glycine max
cttccttgttggaacatcattgcttgcgcgcaacagtggcggattcacgtttctgcaagccattggaccgttcccttattcgcagccttgcccaatcgcacgaggttttgatcactgtggaagaagggtcaataggaggtttcggatctcatgttgtgcagttgatgcccctagacggccttcttggtggtaccttcgaggggaattttcccctcctgcgtgattctcaaattggcgagtggtcccc

SEQ ID NO: 50620 - DNA, 260 bp, Glycine max
gttgtgaatgattcgtgctaccatcaactcgtcagccactggctaaacactcatgcggttgttgagccattcgtcatagcaacaaacaggcatctgagcgtggttcaccctatttacaaacttttgtttcctcactatcgtgacaccatgaacattaattcacttgcccgcaaatccttggtcaatgcagacggtattatagagaaaacattcttgtggggtaggtactctttggaaatgtctgctgttatttacaagga

SEQ ID NO: 50621 - DNA, 257 bp, Glycine max
gtgccttcttatgaccttggaatggcacctgattcctccatgagcatgcactttggcccagatatggtgccccaggtgtacccaccacactctcactccatctccccgtatcaaggcctctccccagaagaatcagtcaacgtgttgtcagccttccaggagcctcacctgtcagatgccccccagcctgggccagatgagcctgccctttgaccagcctcacccccagggcctgctgaagtgatcgcctcaggagc

SEQ ID NO: 50622 - DNA, 255 bp, Glycine max
cgccaccatgccgccctacaccgtggtctatttcccagttcgaggccgctgcgcggccctgcgcatgctgctggcagatcagggccagagctggaaggaggaggtggtgaccgtggagacgtggcaggagggctcactcaaagcctcctgcctatacgggcagctccccaagttccaggacggagacctcaccctgtaccagtccaataccatcctgcgtcacctgggccgcacccttgggctctatgggaagga

SEQ ID NO: 50623 - DNA, 266 bp, Glycine max
gtttgttgtgagctataagctagtttatcgtgaggagaatatgaagttgtttgttttctttgttgctgcagtagttttggtagcatggccatgccatggcgcaggctaccaaaggttccctctccgaatgaaaactggctatggtgagcgttcttcggaggtaaaatgcgcaagttttaggcttgctgtggaagcacacaacatccgagcctttaaaaccatcctgaagagtacgttgaaccaacaaagactacattatggcgaac

SEQ ID NO: 50624 - DNA, 221 bp, Glycine max
aatccgaggaaacaaaggcgatgctggtcaccagatcttcatcggcgatttgttgatgcagttcaacaattacggggcccacacgtggccactccaaagcagattagagaactgatgcaggtagtaagcctcacaactgatgaagtgagaagccatttacaaaagtacaggcttcattttaaaagacctcaaggttcttcaattggccatgctaccagtgg

SEQ ID NO: 50625 - DNA, 266 bp, Glycine max
cgagagcaattaagaaataatgccagaatcgtactgcgtgaaggagagtaaaccctgtgtgggttgggttgagaaatacttggatgattgtctctgcaatttgaaagataaaatctcctttggctttggcttcataagtctcgtatgttggggagtagcagaaattcctcagataataaccaactttcgcgctaagtccagccatggtgtctccttagcctttctacctcattgggtcgctggcgacatattcaacctcctggttg

SEQ ID NO: 50626 - DNA, 159 bp, Glycine max
ctcttcttctcttgcggctatggttttagcgcagttctctccagatttaaggaaaatgggtaaggaaaaggttcacatcagtataggggatattggccaagtttactctgggacttccactaccactggccatctgatctataagcttggaggcattga

SEQ ID NO: 50627 - DNA, 153 bp, Glycine max
aatgccttgagggtctagcacgtcatttatttggtgctgtggaaatgcgctgggtggatacttatttcccatttactaatccatcgtttgaacttgaaatatatttcaaggaaaagtggttggaagttttggggtgcggagtgacagcgcaag

SEQ ID NO: 50628 - DNA, 247 bp, Glycine max
gctgaagctgagagaaagcgcaaggaagaggaggaggctcgggaaagagcagcacaagaagctgccgagaaacaagctgcattagctaacatacgtcaagagaaagctctgtctcttggtgaagaacctgcaaaaggacctaatgttacacaggttttggtacggtttccaaatggtgaacgcaaggaaaggaggttcaacagcatagtgacaattcaatctttatatgactatgttgcactcactt

SEQ ID NO: 50629 - DNA, 156 bp, Glycine max
gctgcctgcttctcatgttattcacactgttggcccaatatacagtgctgatattaatcctgctgcctctctggcaagtgcttacaggaatactttgatggttgcgaaagaaagcaacattcagtatatagcattcccagccatatcatgtggtgt

SEQ ID NO: 50630 - DNA, 182 bp, Glycine max
gcacaaagcaaagctcatccgcgagttaaaaaatggcagcagcgtcttccatggctctctcatccccatccttggtctggcaaggccgcgaacctcggcacatcagtcccagaagtgggcacggtgaccatgatgaagaccgtcaccaagcatgtctcctcaggaagcccatgtgtacggcc

SEQ ID NO: 50631 - DNA, 253 bp, Glycine max
gcttaaagaagaagagaaaccattatgttgacgtccaacagtgaagatctgatccatgagatcatcactgttggacctcactttaaggaggctaacaacttcctttggccatttaagctcaaggctcctttgggtggcttaaagaagaagagagcccattatgtgactgggaggtgatgctggaaaccgggagaattacatcaatgagctaatcaggagaatgaattgagctgtagcactgttcatcatttga

SEQ ID NO: 50632 - DNA, 263 bp, Glycine max
ctgggtgtggccggtgaaagccaattatcgggttgagtcgtgtggaggcaaggtaccaaagtctccaaaagtcaacagacaggaacttaaacaatgaagactgcaaagggcaagggagcagcgaggccctcaaaagaatcactgaagcctgttgatgaccgaaaggttggaaagcggaaggcttctggtaagcctgagaaaagcagagcaccaaagaaggagaagaaggccatgaaagaccccaacaagcctaaaagaccacg

SEQ ID NO: 50633 - DNA, 204 bp, Glycine max
cttatgtcaaggcaactcgagcgtcacgcactttgcaatagagggcgatgtgtgtgagatggatggtgtgatacacagtacagtggaagtgaatggcataaaaatgcacatagcagagacaggagagggtccagtggtgttgttcctccacggattccctgagctactggtactcatggcgccaccagaatctctctctcagtc

SEQ ID NO: 50634 - DNA, 165 bp, Glycine max
cgacagtccagtgcctacaccacgctcctccgcaccgcgctcttcggccccgacttcgcgccgccgcccacgccggagaaaacggcctcgccggcgatgacgctccccagccgaaatattgtccggtacaagacagagacgcgccagtccatgcactcgctctcg

SEQ ID NO: 50635 - DNA, 260 bp, Glycine max
cgcgagctcgatggcggcgatgagggagatgatattccgaatagcggttatgcagcccgttcacatcgatcctgaatccataaagccacccaagagaaggaacgtgaagatctccaaggatccgcagagcgtggcggcgcggcggagaagagaaaggataagcgagagaataaggattcttcagagattggtccctggcggcaccaagatggacactgcttctatgttggacgaggccattcactacgtcaagttcttga

SEQ ID NO: 50636 - DNA, 188 bp, Glycine max
gtctcagagggtctgtgacacacaggagcaagtgcaagatagcgtttattggccatttatacccactgtttattgaacatggcacagattttaggctccctctaacgcaatggcagatgagaatctcaaaatcctctcccaaatgcaagtcccattacatcaaacatgtggagttcttaattgtggaa

SEQ ID NO: 50637 - DNA, 250 bp, Glycine max
cggcactcggctcacgcttacagtacactcctcccacggtttctccaccaagatggatatggctcccaaaccgcctagtacgggtctgtttgttggactgaacaagggacatgtcgtcaccaagaaggaattgcccccacgcccctcggatcgtaaggggaaaacaagcaagagggtgcactttgtgaggaacctcataagagaggttgctggttttgcaccctatgaaaagcgtataactgagttgctg

SEQ ID NO: 50638 - DNA, 243 bp, Glycine max
aacagtttctatcattggaaccccataaaagtgggtacaatgttctaatgtctaacatatatgcatcagcaaatagatggggtgatgttgcatatataaggagagctatgaaagatgagggaatcgttaaagaaccaggtgttagctccattgaagtgaatggattacttcatgaattcataatgggagatagggaacacccagatgctaaaaaagtttacgaaatgatcgatgagatgagag

SEQ ID NO: 50639 - DNA, 256 bp, Glycine max
atgctattctcatatatcttgcttctgcatttccaggagttgcagaccattggtacccggctgatctttccaggagagcaagaattcactcggtgttagattggcatcaccagaatttgcgtcgtggagcagcttcatttgttctaaatactgtactagctccactattgggcctacgagcaaaccaacaagcagctgctgaagccgagaaaattttgatttcatctttgtcaacaattgagaacatttggcttaa

SEQ ID NO: 50640 - DNA, 249 bp, Glycine max
gttttgaagagctatgcatcaagaaagaagccattgagggagaagagaagttttgtgcaaaatccttgggaacagtaattggttttgccatttcaaagctgggaaagaacattcaagtactttcaagttcctttgtcaataagcaagaccaatacactgtggaaggagtgcagaatcttggagacaaagcagtgatgtgtcataggctaaatttcagaactgcagtattttactgccatgaagtccgtg

SEQ ID NO: 50641 - DNA, 244 bp, Glycine max
atttctcttcaactatcatgctactttgacaccatttgacattcacttaagtgatccacatcctcagggtgcagaatatggccctgttatcgaagtctacgtacctgccagcgaatgagtggaagcttacatttagttactggcaaacgcctatgttgttgtgaatgatgcatgctaccattacatcattagccattggctaagcactcacgcaattgttgacccatttgtcatatcaacaaac

SEQ ID NO: 50642 - DNA, 242 bp, Glycine max
cccaaatttgattgtatgaaccagtagcttttgcttgtaaattgaattgatgaagtgggaaagtataaccctttcttctcctacttcttgtactccaaactccaacaccaattggttggtggaaaataatagcaggagcacaaaatggacccctgaagagaacaagctctttgaaaatgctcttgcagtgcatgataaggacaccccagatcggtggcacaaagtggctgagatgattcctg

SEQ ID NO: 50643 - DNA, 241 bp, Glycine max
ctcagcatctaagggttcattggagtggaaccctaattttaaccaaagaagttacattttctttcctaagctgcctttattttttcaaatgattattttgtgctcaatggggtgtgtttgttttgcaggtatgagcttgggaggcagccagcaaacacaaagctatcaagcaacaagacggttaggaggattagggttcgcggtgggaacgtgaagtggcgcgctttgaggcttgatactg

SEQ ID NO: 50644 - DNA, 257 bp, Glycine max
gagaatggcagcacttggtgggaatcgtgatgtgacaggaagccagaacagcgttgagatcgatgctctagctcgctttgctgttgaagaacacaacaaaaaacagaatgcccttttggagtttgaaaaggtggtaactgcgaaacagcaagtggtttctggtaccttgtacaccatcactttggaggcaaaagatggtgggcaaaagaaggtttatgaagccaaagtttgggagaagtcatggttgaacttcaagg

SEQ ID NO: 50645 - DNA, 263 bp, Glycine max
gacgggaacaaagttggtttggggaggagaggtggcactttggtcagaacaatctgatccaactgttttggatgcaagaatttggccaagagcttctgcactggctgagtcaatgtggtcaggaaatagagatgaaaagggtgtgaagagatatgcagaggccacagatagattgaatgaatggagaagcagaatggtaagcagaggaataggtgccgagcccattcagccattttattgtgttaagaatcctggcatgtgta

SEQ ID NO: 50646 - DNA, 266 bp, Glycine max
tgggggtcagctttcgaagattttggagatgcaatcactacatgagttgggcttttctaaaagatatgtgagatgtctgcaagtatgttattctagttcaaactttcaaagtttctgttgagtgtttagtagtatagagataactatacatttcttattctatttttatcaaggcttctaatagttgcctgctacaatggtttacagatgtcggaagttgtcaatagcatgatagacctaatagatatctgtgctgagcacaaaat

SEQ ID NO: 50647 - DNA, 270 bp, Glycine max
cgaatttgttgtcatggcaacagatgggatttgggacgttctctcaaacaaagcagtggtggacattgtggcagccgcgccaaggcgtgccttggctgcacgagcgctggttgagtcagcggttcgctcatggaggtacaagtatccaacctccaaagtggatgactgtgctgtggtttgcctctttctggactcggactcggactcccacaaagtgtgtagtgcttccaatgtcatcaagtccaaggaacaacctagttcaggtatcca

SEQ ID NO: 50648 - DNA, 263 bp, Glycine max
gaagatgccgatcagaaacatcgccgtcggaaggcctgaagaggcgactcaccccgacacgttgaaggcggctttggctgagttcatctcaaccttcatcttcgtgttcgccggctcaggctccggcatcgcttaaacaagcttcacgaccaagggcgctgcaacccctaacggcttcatctccgcttccatcgccaatgcattcgccctcttcgtggccatctccgtcggcgccaacatctccggcggccacgtcaaccccg

SEQ ID NO: 50649 - DNA, 249 bp, Glycine max
agatgatacaggacaaggcaactacttcagatgatgccaaggaggttccgcagtgggttgaaatgccagtaactctaaaagcagatgttcagggtactgtgaagccgtcactgaggcattgaaaacttcaaatagtgctcaggtttacggaaatgttgtccatgttggcgctgggcctatgcctcaatctgatctagacttagcacaagcttgtgcttgcatagttggattcaatgtaaaaagtccacc

SEQ ID NO: 50650 - DNA, 248 bp, Glycine max
ctttcttccaacctctcaagtccaacctacccctttttcttctcccaccatcttcaccgtcttcttcctcgatcatgtctcacttcaagggcaagtaccatatgagcttattgccaatgcttcttacattggcactcctggaaagggtattcttgctgctgatgagtcaacagggacaattggcaagcgtttggccagcatcagtgtagagaatgaatccaacaggcgtgctcttagggagctgcttt

SEQ ID NO: 50651 - DNA, 287 bp, Glycine max
gaatttgtctagtaggttttctgacttcggtcggaaaacccctcccaacctgactggtttctaatatcagcaagtagttacagtcctcgccgagctgtggggctggggactttcggcccactctagtttcctaggaagtacgcgtgtgctagattcacgctcgggaacttccgcctcctgcaatacagcttcctttctgcctccactagtccgcagccgtgggggaggcggctggctgcaggctcctccggatctcagtgttcacactattcaagcaccgagtggcg

SEQ ID NO: 50652 - DNA, 293 bp, Glycine max
gtaatttttaattgaaaatcatgttgtgaaatatatctacccaaagaggtaacatcctataaatagtaataattaatttagctgcagccttttcaggtattaaattatatgacaaacagttaaaatgaatttaagagtaaacataaggcatagttttcagtgaacattaataatttctcaatttgcagattagcatctgcaaaggtatcttcttccattgcataaaatgccttttaatagttaactaatcaaatattctgaatgacttcaaaaatttgattgaaaatttgaga

SEQ ID NO: 50653 - DNA, 285 bp, Glycine max
gtcgacagctgggggaagagaatgaggagtttgcactccgtgtacaacagctggtggccaaagaattgggccagatagggacacggctcacgccagcagacaaagcagaacacatgaagcgacagagacaccccagattacgcccccagtcagtgcagtcttcttttccttctcctcccagcccttcttctgatgtgcaactgaccattctcgctcaaagagtcaaggaggttttgccccatgtgccattgaatgtcatccagagagacctggctaggactgggt

SEQ ID NO: 50654 - DNA, 284 bp, Glycine max
catcatttgctgtccagttatacattttaataagtccatgctcagtgtgtatactaaggaagcaaaccatcccctgagctatgcaggagaaaaatcccactaaagaaaaagtcacttgatttttaatagccaaatcaccttgctcccagttcttctgtcttctaactccatggaaattctattgggagttctcagtggggttttttttcaaccttaggaaacacttctggtctctgaactctaataatcaataagtaaaaatgaagaaaccacaagctatcaca

SEQ ID NO: 50655 - DNA, 282 bp, Glycine max
gcatggagtgctgtcggggccgcttggcgcgagtgtttccccctgcaaggtcacgatgtagcacgctggtttcccggccacatggccaagggactaaagaagatgcagagcagtctgaagttggtggattgtgttatcgaggttcatgacgcccggatcccattttcaggtcgaaaccctctgttccaagagctacttggtctgaagccccatttgcttgtcctgaacaaaatggacttggcagatcttacagagcagcagaaaattgtccagcacttagaa

SEQ ID NO: 50656 - DNA, 273 bp, Glycine max
gttccggcgacatggctaaacgcaccaagaaggtcgggatcgtcggaaaatacgggacccgctatggtgcctccctccggaaaatggtgaagaaaattgaaatcagccagcacgctaagtacacttgctccttctgtggcaagaccaagatgaagagacgagccgttggcatctggcattgtggttcctgcatgaaaacagtggccggtggggcctggacctacaataccacttctgcagtcacagtgaagtctgccatcagaagactgaagg

SEQ ID NO: 50657 - DNA, 288 bp, Glycine max
caaggagctctgatgaccagaaagatgatatcccagtggagaactatgtggctcagcgttatgtggaaaacccctacttgataggaggccgcaagtttgacctgcgtgtctacgtgctagtgatgtcgtacatccctctgcgggcgtggctgtaccgtgatggcttcgcccgcttctccaacaccagattcacattgaatagcatcgacgaccactatgttcacctcaccaatgttgctgtgcagaagacatcacctgactaccacccaaaaaagggctgcaagtgga

SEQ ID NO: 50658 - DNA, 274 bp, Glycine max
ggtgcacctggccaagagcagtggttcagccttgactgtgtggggtacggggaagccgcggagacagttcatctactcactggacctagcccggctcttcatctgggtccttcgggagtacaatgaggtggagcccatcatcctctcagtgggcgaggaagatgaagtgtctatcaaggaggcagctgaggctgtggtggaggccatggacttctctggggaagtcacttttgattcaacaaagtcagatgggcagtataagaagacagccagc

SEQ ID NO: 50659 - DNA, 278 bp, Glycine max
cggacgctcaagatgtcgaagcgaggacgtggtgggtcctccggagcgaaattccggatttccctgggtcttccggtaggagctgtgatcaactgtgctgacaacacaggagccaaaaacctgtatatcatctctgtgaagggaatcaagggacggctgaacagacttcctgctgctggtgtgggcgacatggtgatggccacagttaagaaaggcaaaccagaactaaggaaaaaggtacatcctgcagtggtgattcgacaacgaaagtcatatcg

SEQ ID NO: 50660 - DNA, 278 bp, Glycine max
gtggcccagggaggcgtttcgggtactcacgatgaggtcgctggtggttgtggtgttggctctgttagccgtcagtcaagcagaagaaggagccaggcttttggcctccaaatcattgctcaacagatacgctgtggaagggagggacctgaccctacagtataacatctacaatgtcggctccagtgcggcattagacgtggaattatctgacgattccttccctccagaagacttcggcattgtctctggtatgctcaacgtcaaatgggaccgga

SEQ ID NO: 50661 - DNA, 288 bp, Glycine max
tggtcctgaaggatctgggtctgctgctggagaaagcaaacccgttttgactgaagaggagaggcaagaacagactaagagaatgttggaacttgtggcgcagaagcagcgggaacgtgaagaaagagaggagcgagaagctttagaacgagagagtcagcggaggagacaagggcaagagctgtcagctgcacgacagaaactacaggaagatgagacacgccctcagagcaagtaggtcctgttccttcttctccccgccaggagccccctacgaagagggagtat

SEQ ID NO: 50662 - DNA, 278 bp, Glycine max
gtaaatagaccagtcttgggctttagaccagggaaaaagagaactctgagcatctaccaagcctcaccctaaaaggtctgagggcaagtctccagtgagggagaggggaggaaatgcttcatgtttgaactgcagtgaattactatggctcctgtttcaccaccggaacccatggcaactcgcacattcctcttgtctataactgccaaaggttgggtttatgtcacttcagttccactcaagcattgaaaaggttctcatggagtctggggtgtgcc

SEQ ID NO: 50663 - DNA, 279 bp, Glycine max
aggcgaatgtatcatacctgtcttactttgcttctctcttgatttaccacagtttgttcagttacgttttcatgaattaccaggagtaaatttgaacaaacacatgtgaataacttcctgtaaatgtgttttataacaagagtgtgctaaactattttctaaaattacttgtgcactttggggatttttctgtagcttgtgttttgtatgctctggattcataactggactttggcaaatagtaaacctgttatctttgttaaaacctaaaatttaaga

SEQ ID NO: 50664 - DNA, 275 bp, Glycine max
ctttctttctttccttcttcgtccttcacatctggctggggagcatctgtcttcttgtactccatagcattggactgtttctttccagaacagcagaagaggatcacaaggaacactggcaacgctacagtcagaatgtagaccacccaaagccatggacgctcttcagctgcctcccgcatctgccccactacacctggctctgcagccccatcagcagctttcttcaggccccacccatcattggcccagtcatcaactactcttcggtcacc

SEQ ID NO: 50665 - DNA, 275 bp, Glycine max
agtgaatgtgaagcaaacatggcgtcggcggcggcggcccttacgctgaggacgcgggcagcagccctgctgagtcccacagcacctacagcacttgctgtcagatccgcatccaagaagacaggtggcagttctaagaaccttggtggcaaatcacgaggcaaacactatggcatcaagaaaatggaaggtcactacgttcatgccggcaacatccttggcactcagcggcagttcagatggcacccaggcgcccatgtgggactggggaagaa

SEQ ID NO: 50666 - DNA, 272 bp, Glycine max
attgcgtcctaggcagcatagccggatcggtgctccgtgcatcggctacttggacgtgcgtggcaggcagagcaggccggaaaggagcaggttgggagtgtggtggggcccgcagcttcagcagtgccgcggtgactatggccccgatcaaggtgggagacaccattccctcagtggaggtatttgaaggggaacctggaaagaaggtgaacttggcagagctgttcaaggacaagaaaggtgttttgtttggagtccctggggcatttaca

SEQ ID NO: 50667 - DNA, 275 bp, Glycine max
tcgccttgctgaagacctctgcgatcgaggtgatgcttctggagacatcgcggaggtacaaccctgggagtgagagcatcaccttcctcaaggatttcagttacaaccgggaagactttgccaaagcagggctgcaggtggagttcattaaccccatctttgagttctccagatccatgaatgaactgcaactcaatgatgctgaatttgctctgctcatagccatcagcatcttctctgcagaccggcccaacgtgcaggaccagctccaagta

SEQ ID NO: 50668 - DNA, 270 bp, Glycine max
gtcccgcatagctcagcagccaagatgtgtgacttcaccgaggaccagaccgcagaattcaaggaggctttccagctgtttgaccgaacaggcgatggcaagatcctgtacagccagtgtggggatgtgatgcgggccctgggccagaaccctaccaacgccgaggtgctcaaggtcctggggaaccccaagagcgatgagatgaatgtgaaggtgctggactttgagcactacctgcccatgctgcagactgtggccaagaacaaggac

SEQ ID NO: 50669 - DNA, 269 bp, Glycine max
ccacaagggcctgaaagaaccgctcatgtctgtcaacggagcggtgtgggggcgtgtgcggagccgactccgagcctttcccgagcatctggcggcctgcggactgaggcctcggcgtatgggaagtgcgtgcaggcctccactgccccaggaggccgcctgagtacggacctgtgcgtacgcgagttcgaggccctgcggagctgcttcgccgacgcggccaagaagaccatgatgggaggctcctaggaagagcaatgggcacagat

SEQ ID NO: 50670 - DNA, 103 bp, Glycine max
agccctcacgtcacacgattcaaagacacctactttgtgaccggcatcgtcagctggggagaggggtgtgcaaggaaagggaaatacggcatctacacgaagg

SEQ ID NO: 50671 - DNA, 212 bp, Glycine max
gcggtgaggagctcgtgttcatacttgtagctatgccgtccaagggtccgctgcagtccgttcaagtcttcggacgcaagaaaacagccacagctgtggcccactgcaaacgaggaaatgggctcatcaaggtgaatggagtcccctggagatgatcgagccgcgcacgctgcagtacaagttactggagcctgttctgcttctgggcaagg

SEQ ID NO: 50672 - DNA, 270 bp, Glycine max
gttacatcgtatccgcgcttcttcaggggtactgggcgaggcggaccggacttggagtggcatccctgggcgggcgcggagactgcctgacgccgaaggtagccgcaggtcatgcgaggaccagacttcccttgaggataccgtgggggctcttcgtatcaagatgtaacaagatgaagctcactttcctcccacatgagggcttttgtgcgggtgtaccttggcactctctatccagaggacttgaggatcatcatgctccctgcctct

SEQ ID NO: 50673 - DNA, 266 bp, Glycine max
cccaagcaacagctgctgctgctgctgtcataccctggaccaagcatggacaagctgctgctttggatgtctgtcttcaccagccttctttcagaagcctttgctcagacagacctcaatcagaaggtatttgtgttcccagagaatctgaaactgattatgtgaagctgatcccatggctagaaaaaccgctgcagaattttacactgtgtttccgagcctacagtgacctttcccgctctcagatcattccaacctacagtgta

SEQ ID NO: 50674 - DNA, 240 bp, Glycine max
tctccatttcagtcctttgtattgtacttttacttgtttttttttttaattgcccatggcacacacttaaaaccatcaggagtcaggcattttgcatattgcctccaaaatctaataaactggaccaatcacagggaaaaaaaaaaaaaaaaaggggggccccccgattagggacctcttcaccccgggatttattccgggccgggaacttgagggggtacaagtttccccaaaagggag

SEQ ID NO: 50675 - DNA, 264 bp, Glycine max
gcaggtttgcttgaagcaaacgcatcaagcgatttcccggggtagttattatacctcgctggggagtgagagttgctggggcacctggctggtcactgtctcgaggaggctcggtgtgctggctaagagccaccagaggaagcagatcatcttacaactcggtgccatgatgctggccgctcgtctgtccagacccctgtcacagctcccaggaagagctctaagtgtctgtgatagagaaaatgggacaagacacacactgtt

SEQ ID NO: 50676 - DNA, 261 bp, Glycine max
agacctccgcctctttgaacccagattcgaggcttcccctggccgaaatatgtcttcgccatggcgctcagcgatgcagatgtacagaagcagattaagcacatgatggctttcatcgaacaagaagccaatgagtagcagaagaaatcgatgcaaaggcagaagaagagttcaacattgagattcgtcgtcttgtgcaaacccagagattgaagattatggaatactatgagaagaaggaaaagcagatcgagcagcaga

SEQ ID NO: 50677 - DNA, 100 bp, Glycine max
catccctcttcagaagggagggatcccttggcgagagtttggctcagaggtggcatgaagcatgctctgctctctcttaccctagaaggtccttcggatg

SEQ ID NO: 50678 - DNA, 256 bp, Glycine max
  unsure (1)..(256): unsure at all n locations
acggagtggaagaaccgctgcatgggtcaagcctcctcaactatgacctcaatcggccaggattccacacaacataagatattaaaataacatcccatcctcaacgcttggaatattgaggggcttatttactttctattgaccaactttcttcctctcaaccactctggatctttcntgtaagaagtccttcctgtctcaaaggtactctatgatcttcgctcaccttcagcaaggcacgagcaatgtcaagaga

SEQ ID NO: 50679 - DNA, 254 bp, Glycine max
gaagcctgtgcctactcccgctacagaaccactgtgcccatgagagttggattttgaaggcagaaaggcgctcctcccttgcaattagatcaggaagaagtggccgtgggcacacctgaggaagcaaagtcggcacgcagctggcagcagccatcgccgcaacataagctcccgaggaaggagtccagagacacacagagcccgatgagtaccgagacaggccctgtagctgatgatcccactctgaggagaag

SEQ ID NO: 50680 - DNA, 238 bp, Glycine max
ggggctgtgtccctgcaggatggggaggtgattggagtgaacaccatgaaggtgacagctggaatctcctttgccatcccttctgatcgccttagggagttcctgcatcgcggggagaagaaaaattcctgtttggaatcagtgggtcccaacgccgctacattggagtgatgatgctgactctgacccccagcatccttgctgagctacagctccgagagccaagtttccctgatgt

SEQ ID NO: 50681 - DNA, 258 bp, Glycine max
caattactactttctctctctttgtaacttgtaagcatggagtcctcaatgatctatgcttacctcttcctttgcatgctcatcctctcctccgccactcccattctcggttgtggctactgtggcaaacccccaaaaagcacaagtctggtaaaacaccaaagacacccatactacccgttgttaagccaccagtcacaatccctcccattgttaagccaccagtcacaatccctcccattgttaatccaccagtca

SEQ ID NO: 50682 - DNA, 252 bp, Glycine max
aaggacaacacagctaagctcttcgactccacaagtcttgaacatcagaagactttccgaacagaacgtcccgtcaactcggctgctctctctcccaactatgaccatgtggtgctgggaggtggtcggaagccatggatgtgaccacaacctccaccaggattggcaagtttgaggccatgttcttccatttggcttttgaggaagagtttggaagagtcaagggccactttggacctatcaacagtgttg

SEQ ID NO: 50683 - DNA, 258 bp, Glycine max
cgcgagatggtgttggagagcactatggtttgtgtggacacaggtgagtacatgcggaatggagacttccttcccacccggctgcaggcccagccggatgctgtcaacattgtatgtcactcaaagacccgcagcaaccctgagaataacgtgggcttgatcacgctggccaatgactgtgaggtgctgaccacactcacccctgacactggccgaatcctctccaagctcgacactgtccagcccagaggcaatatc

SEQ ID NO: 50684 - DNA, 257 bp, Glycine max
cccaggcagaaggggtaaaccccactggggcgtgattgttcgtgatcttgtgcctgtcatttgggtcttgctctgcaagccaaattagtgccaccaggctccagcgcaactatgaacttagagcgggtgtccaatgaggagaagttgaacctgtgccggaagtactatcttggtggatttgcatttctgcctattctttggttggtcaacattttctggttcttcaaagaggccttcttcgctccagcctacacaga

SEQ ID NO: 50685 - DNA, 257 bp, Glycine max
gttctagatcgcgagctgccgcctcactgctcactgtggagccttgaacctgatcctgtctgcagccacgtttttacggtcatgtcctgctacccagaggccttccttttccctatgctggtacccagcttcccagtcggcagccagagctcaacgtgccccagcttgctgcaccctgagttcccctggctctgagacaagctagcttgctctgccgaagtgtcaccccaccccagcacacccagtccgcaccctct

SEQ ID NO: 50686 - DNA, 254 bp, Glycine max
atttgcctaatagtttcttactatttccatgcccctcacagaaaaaaactatcatctgcaaaacaaatattctccatatttttgggggatagtgttcctcagattatttcagtggtgacacactgaaatgagtatgttactgaagatttaaaaggcactcgatgctagccacagatactcttccaagaggcagtagagacacagattatacattgcaaatgaaacaacctttgtcccccccaccccccatatta

SEQ ID NO: 50687 - DNA, 250 bp, Glycine max
ataaacttaagataatacttgaactgtgttatagtaagtgaaaaattactattttgtgtttgaatattgaaaaaaatttcagtaacttctgataaacagttaatgtatagtttcttatgtaggtactatcattcttttttttttattgctctagggtttactagtaaataatgggatatttaaaaagttgtttattcttcaggcctcattggtgtacaatttcagtattgaagaagaaatttgatgctgt

SEQ ID NO: 50688 - DNA, 138 bp, Glycine max
cggctcgaggtgaccaaagacttgaccactcaaagtccagctccctgtaactgctagacatggacaccggtgtgattgaaggtggattaaatgtcactctcaccatcaggctacttatgcacgcacaggaagttggca

SEQ ID NO: 50689 - DNA, 255 bp, Glycine max
cttgtattgttcccttttaggtgacgattaggaagggattggcacacttaggtccttaagccccatgacaggaaatggtgggatattctcaggtccgaatcctcatcaccttcctgattccccaccctgccatggcctggaactgactgggtggctgagggatgcacgaggacaaagactaccgagatccgactcctaaaggcagggtctgagtctgccagatggagggggtgctaagaggttggcccaggagtc

SEQ ID NO: 50690 - DNA, 252 bp, Glycine max
gcatactgtcgtagacatgaatcagtagttcggcggggcataagttgccgatgtcgcagtgtgtgtcggtggtggagaaggtgtactgagtcgtgactacggtggcctagatcctctacatcatatcggtgaaagggatcaaagggcgtttgaaccgtctcccctcggcttgcgttggcgacattgtgatggccaccgtgaagaaggggaaacccaatctgaggaagatggttttgccagctgtcattgttc

SEQ ID NO: 50691 - DNA, 252 bp, Glycine max
atgggctctgtggaggaggcagtgcaggcactaattgagctgcacaaccatgacctgggcgagaaccaccacctgcgagtgtccttttccaagtccaccatctaggtgcctgtgggcctgcgaaagcttccgccattccagaaaagccactttaaaaagcagctgaagtgaccttacagaccagagattttatttttttaaagagagatcagtttacctgtttttaaaatttttgtatctagcccactttgc

SEQ ID NO: 50692 - DNA, 252 bp, Glycine max
gcgctggcccgcctggcacctttcggtcgcgttggaggccgcctgcttcggggctgccgcgcgcgggcagctggagacggtggagtccgtcatgttggcgatggtggacacattcagccccggtacagggagtttccccagcttacccagtcccaggtgatccatggtgaggtcttaagctcactcatgtggttctggattctttggagattttggcatgactcggatgctgtgcagggtcacttttcatat

SEQ ID NO: 50693 - DNA, 256 bp, Glycine max
ggcatgttgtataatagaccatattcttgaacattctggacagattctctgggcttgtctgttttatcaatggcaactatttaccagttgaaaagtgggaagcaataatattcatctgaccagttttctcttaaagccatttccataatgacaataatgatgggactcaattatattttttatttcagtcactcctgataataaaaaattgaagaaataaaaatatccaaaaccaaaaaaaaaaaaaaaagggggg

SEQ ID NO: 50694 - DNA, 255 bp, Glycine max
ggcggacgcagtactcttcgagtttctgcacaccgagatggtggcggagtgtgggccccagacccggaccctggctcggggggaaagaagaagagcttgtcagtcctggagggcctgggcttccgcgtggggcaggctctcggtgagaggctgccccgggagacgctggccgttagggaggagctagatgccctcaagttcttgtgacgagatctgtgggcggccagttccaaaagcatatggacggactccgca

SEQ ID NO: 50695 - DNA, 253 bp, Glycine max
accaaaatcactcttcagcccttcctgtggctgttaggtcgacctgtctcccctgcctcttcccgctcccctcaagccaactatgcagcccaccagaaggctctggcggttcccatgggccctagaagcaccagccccttgatcacctggggtttgccatcaccgtgtccctgctgttcctcatgcccttctgccacctctgggggaaggaaaccaaaggatctcagtgggggttggggagcttcagcctctc

SEQ ID NO: 50696 - DNA, 247 bp, Glycine max
gtgatggagcaccagcagcagcaactgagaaacttgcgagactttctgttggtctacaatcggatgacagaactgtgcttccagcgctgtgtgcccagcctgcaccaccgagctctggacgctgaggaggaggcctgcctgcacagctgtgctgggaagctcatccattctaaccaccgcctcatggccgcttacgtgcacctcatgcccgccctggtccagcgccgcatggcggactacgaggctg

SEQ ID NO: 50697 - DNA, 251 bp, Glycine max
agagaggccggatccgaagggagcggactgcagctaccggagttggtgagcgcagtccccggccttccgctctttccattacagtacgcacctgtcacgaccggcatcgcgaaggatcagtcatgggactttgcaagtgtcccaagaggaaggtgacgaacctgttctgctttgaacaccgagttaacgtctgcgagcactgcttggtagccaatcacgccaagtgcatcgtgcagtcctacttgcagtgg

SEQ ID NO: 50698 - DNA, 251 bp, Glycine max
cagaaggacaagacagtttttaatcactgcttcacaggcagtggtgtcattgactggctggtttctaacaagctagttcggaaccgccaggcaggcctcatgatctccgcctccctgctcagtgaagggtacctgcagcctgctagcgatctgtccaagaatgcagcagatggaatagctgaaaaccctttcctggacaaccctgatgccttctactacttcccagacagtggattcttctgtgaggagaa

SEQ ID NO: 50699 - DNA, 165 bp, Glycine max
gtcaggccacccagatggcttaaggcaggacaacctaagcctgattcttgagacctatatggaagacagatttgattcttaaaagctgtcctgtgacctaccatggctgtcctccaaaagacccaacaagcagctgaaagagtcaactgcagatatttacaccca

SEQ ID NO: 50700 - DNA, 149 bp, Glycine max
gtgggctggaacggttccaccttcgcttgagcccgggcctcacttacctgcaccgctgttcttcgagtcttgctgcacgccccgttctgtgtttatccacccgtaatgatggccaccttccggtcgggagaaataaatggtttgagacc

SEQ ID NO: 50701 - DNA, 224 bp, Glycine max
cggggggaccagcagagccgaggccccaggaccacctccgacatgaccatgcggacagcatccacgagacaaccaagtacttgagagagacctggccagaggataccgaggacaatggcgccaccccaatttctcccaccccaaggagtggttccacgacagggatctgggccccaacaccaccatcaaactctcgtaggccactcggagccccaggacagggg

SEQ ID NO: 50702 - DNA, 248 bp, Glycine max
gcagccgagagaacatggcagcagatgttaagatttctctctacacatctacaggaggattcttcagcccttcaccaaggcgagaagtttctatcaaagacatgctggtttattcaaaaagatcctgcttggtctcttgtgtttagcgtatgctgcctacctcctggcagcttgcatcctgaacttccggagggcactggccttgtttgtcatcacctgccttgtcatcttcatcctggcttgccact

SEQ ID NO: 50703 - DNA, 249 bp, Glycine max
ggaggaagggctgttccagggcctcagtcacctttgggacctcaacctgggttggaacagtctagtggtcctgcctgacacagtgttccagggactgggcaacctccacgagctggtgctggctggcaacaaactgacttacctgcagcctgcgctcttctgtggcttgggcgagctgcgggagctggatctgagcaggaacgcactccgaagcgtcaaagctaacgtctttgtacatttgcccaggct

SEQ ID NO: 50704 - DNA, 231 bp, Glycine max
  unsure (1)..(231): unsure at all n locations
cagcacaacacattgtaaggtgggctctgtggtgtctgttggctggctccgatccaagaaggctgttgactggcgactgtttcgaaacatttttatggcctggtttgtcaccgtccctatttctggggttatcagtgctgctatcatggcagtgttcaagcacatcattctgccatagngaagcngagctcagatnngtgacagtgncggggaccagcgcacacaccccgg

SEQ ID NO: 50705 - DNA, 248 bp, Glycine max
gagggaaagaagctgaaggaaaagctgaagcccctgatgaaggtcgtggagagtgaggactacagccagcagctggagatcgtatgcctcatcgacccaggctgcttcagagaaattgacgagctgataaaaaaggaaacgaaaggcaagggttctctggaagtgctcagtctgaaagacgtggaggagggagatgagaagtttgaatgacaccgagtaggtcctcagcgcagacaacagcgggcgtc

SEQ ID NO: 50706 - DNA, 245 bp, Glycine max
ccaggttagcactggcactgggtttgttgatggggaaaagatgtcaacattaaatctatattctgattgtgctgggagttatacttagtgttttaaaactgggggctggaggggcggctcaggagttgggtctcaatttcaaggccagttttgatgctgtcccccagtcccaaaaggagatgttaatgttggtcgttgagactgtctcctttacagctctgactagctttgtactgagctatcag

SEQ ID NO: 50707 - DNA, 243 bp, Glycine max
agtgcgaagaaagctcgataacgcgcagattgaatcgctgtacgctggactagttggtgctgggatctcagtgagagtctccttggattacgtactcttcctcgcatgtcagagctacaggacaatcctcaatagctggaggtaaagttgtaaacgactccggaaagggtaggacaaaggcggtatgcggatccaagcgagcgggcttgcagttcgctgtagaccgtatacatcgacacctaa

SEQ ID NO: 50708 - DNA, 199 bp, Glycine max
tattacctgacactgttaatatttaatgccccccacctctgcactggtcgccccacggcagacactatccccgtagtggaggccacaggaagatcgtggagaagccctggtggctggggaaatgacagagctgtgagctaaccatggtggcagtgccaaggggacggagaatcccttcgagtatgactatgaaacggtc

SEQ ID NO: 50709 - DNA, 255 bp, Glycine max
actccgacaaatgcaggaatgtgctaaaaggattgcaaaggtttctgcagaggcaaaactggagattgatgaagaaacttacttaagctcattcaagcctcacctgatggatgtggtgtacacctgggcaactggggccacatttgcccacatctgcaaaatgacagatgtctttgaaggcagtataatccgttgtatgaggcgcctggaagaactgcttcgacagatgtgtcaagcagcgaaagccattggaaa

SEQ ID NO: 50710 - DNA, 166 bp, Glycine max
gtcccctcagagaataccgatatacacatggctaaggacccaggagacttcacgggaggcctcattaggtgaaaggacgatgttctgggctgtacatgaaattggatctgtagacactgtgtttccttcactgacttgtaatgtcacgcagctggagttgatgcca

SEQ ID NO: 50711 - DNA, 182 bp, Glycine max
ggacaaggcagatgttcagtccatcatcggcctccagcgcttctttgagacacgaatgaatgatgcctttggtgacaccaagttttctgctgtgctggtagaaccaccaccactgaaccttcccagtgctggcctaagttctcaggagctgtctggtcctggtgatggcccctgaagctggg

SEQ ID NO: 50712 - DNA, 134 bp, Glycine max
ggacatcctggaccagtcggtcctgctggcgtacgtggctctcagggtagccaacgtcccgctggtccccctggtccccaagggcctcctgggcctcctggtgtcagcggaggaggctatgacttaggtttcga

SEQ ID NO: 50713 - DNA, 248 bp, Glycine max
cttgagcagggagtgtgctgtgggccgagcaggggctgcaggggagtgggagtgcagattgaaaaatgcagaccaccaaggcactgctcatttctccagttctgatccgctcctgtaccaggggtctaatcaggcctgtgtctgcctccctcctgagtagaccagaggctccatctaaaaagccttcctgctgcagctcccctctccaggtggccagacgggaattccagaccagtgttatttcccgg

SEQ ID NO: 50714 - DNA, 244 bp, Glycine max
cttcgctcctgactggttacgcggcaaggccaaggtagaccagacgactatccagcggctcctggaggagaatgaccagctgatccgctgtatcgtggagtatcagaacaagggtcgagcgaacgagtgcgtccagtatcagcatgtgttacacagaaatctcatttatttggccaccatcgcagacgccaacacaagcagtcttacaaaggcagtggagtagtcttccagggggctgtgatga

SEQ ID NO: 50715 - DNA, 159 bp, Glycine max
gacaagactcacttatcacaaagtggtgggtaagcatggaaaacaggaatggaaaacccaagaagaaacatcacggaagaggcttaaaggcagctaaaactaaaacccttaaataacttcagagaaaaatggaacattttccaaaagaatgcttatcct

SEQ ID NO: 50716 - DNA, 160 bp, Glycine max
gggctacaacactcacttctcctgtgcttgcctgccacctgacccatttaatctctcagtatctaatgataccacactatacccagaggacctgccaaccgtttcttctactgacatgtaccacaatgctatctttgactgggcctacttgtcaaagaaa

SEQ ID NO: 50717 - DNA, 129 bp, Glycine max
cacagacatgggtgtgcctactcatctcctgggtttgttgctgctctggattacacatgccatatgtgatatccggatgacacagtctccagcacccctgtctgcatctcggggagaaactgtcaacat

SEQ ID NO: 50718 - DNA, 161 bp, Glycine max
gatgccctgtgtgtcatccggaacctcatccgtgataaccgtgttgtgtatggaggaggggcagctgaaatatcctgcgccctggcagtcagccaagaggcagacaagtgccccactctggaacggtacgccatgagagctttcgcagacgccttggaggt

SEQ ID NO: 50719 - DNA, 154 bp, Glycine max
aaactgattgagattgagaactttaaatcgtacaagggtcgacaaattatcggaccatttcagaggttcaccgccatcattggacccaatggctctggtaagtcaaatctcatggatgcaatcagcttggggcttggagaaaaaccggaacctt

SEQ ID NO: 50720 - DNA, 241 bp, Glycine max
tgaagcagctgtcattgatgaagatgtcctgcgctaccagtttgtgaagaagaagggctatgtgaggctacacaccaacaagggtgacctcaacctcgagctgcactgtgacctgacaccaaaaacctgtgaaaacttcatcaagctctgcaagaaacagtattatgatggtaccatctttcacagattgatcaggaactttgtgatccagggtggtgaccctactggtacaggcacagga

SEQ ID NO: 50721 - DNA, 149 bp, Glycine max
atttcaaatatcctcaacaaggaagaaggcctgatccagcgcttgaaaaatgggcttcaggactgttccacacacacccagaaagactggaacgcgctgacccacagaaccagaacgccatctgtccaagtagcccaaaccgctccttt

SEQ ID NO: 50722 - DNA, 156 bp, Glycine max
gtcatttaaagattgagaccaagattgaaagcatggctgacctcaagcagctcatggacaacgaggtgttgatggcctttacctcctatgcaacgatcattcttgccaagatgatgttcctgagctccgcgactgcattccagaggctaaccaaca

SEQ ID NO: 50723 - DNA, 161 bp, Glycine max
gctcgagcagcacaaagcgggttactgtctgttcaagctaccatcttcctctctctttcttagtgcctccttgccagaagttaaaatggcccaagaaactttcctattcgcatctgaatcagtgaacgaggggcaccctgacaagctctgtgcacagatct

SEQ ID NO: 50724 - DNA, 256 bp, Glycine max
ggaagttctacacttttttgtttggattgatcgagtgtactttttcttttcgagattggcttggtgtgcagtggaaagagggtggaaaagagtggtaagggggagggcggcgccccaaataaacaaaaaaaaaaaaaaaaaaaaaaaaaaaggggccccccccaaaaaggaccccctccacccgggaaataattccgggccgggacctaagggggaaacaattttccccaaagggggccctaaaaaaacttgggga

SEQ ID NO: 50725 - DNA, 244 bp, Glycine max
gttgcctggaagggaggagggggctgagccctgcggagccagggggcgtgggggctgggagtgtaggccaattggcagggcggggctgccttcgatctggccacttctcttaatcatcgctcttctgatccagggggcattgtgtgtcccagtgtgcaagaatagccccagaagaggaaaggctgagcccagagcgcttcagcagggaagattcccttccccccgcttcaggctgctgagcact

SEQ ID NO: 50726 - DNA, 235 bp, Glycine max
aaagagcgtcgtagtcgcaaccctaatcagaagaagcgcagttcgaagcgagtgacagccaccagccatgggtcgtatgcacagccgcggtaagggtatatcctcttctgctttgccctacaaaaggcacctcctagctggctcaagatctcttcgcaagatgtcgaagaaaatatctgcaagtttgcgaagaaaggtttgaccccgtctcagattggtgtcattctcagagatt

SEQ ID NO: 50727 - DNA, 238 bp, Glycine max
ctgcctttggcattgcaagctctctctttctttgcttttgctttctcctttttgtttcttcaacgttgcaactatgcatggcaattcgctggctcagacgcgaggtgtatctactgttcactgcggttagtgctgctgttgggatctgtggattccaattggtttgtaatatctgcatcagacctgaagtcagggtgtacaaggctggaagaatggcatgagtgttggagaactttgc

SEQ ID NO: 50728 - DNA, 210 bp, Glycine max
actttctcgtagacgcaataacgcacgtcaaccgggcacttgtcagaaacatggcttcctaatcgtcggggggatatgggcatagctaagctcaaactaaaccgttaatttgggatccaattcggttccctaggtggtatcgggaatgcattttggattgtaataatatcgagtcatgctgatacagaatcctgggttcgctattgattc

SEQ ID NO: 50729 - DNA, 280 bp, Glycine max
cgcaaatcgctccacgttgatatcccatgtctcacaaaatttaatgtttttttttttcatgtgctccaggtttcactgacctacaaaggatagcaattgggcttgtattttccatttttggaatggcgcctgcttctgtatgcgagaggaaacggttatccgttgcaaaaagtgttagtggcggcaaccaagcaacaacaacacttcctataagcgttttccttctgatcccacagttcttcttggtgggttctggtgaagcattcatatacacaggcca

SEQ ID NO: 50730 - DNA, 120 bp, Glycine max
catcatcaccgttgattgaagcagatgccgatcagaaacatcgccatcggtaggcctgaagaggctactcaccccgacacgttgatggcggggttggctgagttcatctccaccttgatc

SEQ ID NO: 50731 - DNA, 259 bp, Glycine max
aagtagttgagaactaagaagaaggaaatggcttcctcaatgatctcctccccagctgttaccaccgtcaaccgtgccggtgccggcatggttgctccattcaccggcctcagatccatggctggcttccccacgaggaagaccaacaatgacattacctccattgctagcaacggtggaatagtacaatgcatgcaggagtggccaccaattggaaagaagaagttcgagactctttcctacttgccagacctcgatg

SEQ ID NO: 50732 - DNA, 258 bp, Glycine max
gtcaaattacagtgtcatatgcttataagaaagacactaagggtgaacggcatggtaccccagcagaaagagttttggctgcaagtaatccaactacacagaagagcaggcctcatactttatttgccagtggacctccaacacttcccagtgctcctcaggctaatggggttgctccagtgcctccccgaccctttgttaatggggttgctcctgctgcaattcctaccctccgtccaccaccccctcaggctgctg

SEQ ID NO: 50733 - DNA, 262 bp, Glycine max
atcgcattacaaatgcgatgctctaacctctgagctaagcgggctaacataaccaaaatatgcgtatgcataggaatttaataaaagggatcttaattataaattgttagttatttataacataattcaaattaatacaaacatagaaaatatagaatatccaatccaatatttcttatttatattatttttttgatattttagtgcataacataaagtacaaaatagggattaataattcatattaatataataaatttcg

SEQ ID NO: 50734 - DNA, 262 bp, Glycine max
gaaaaagttgcaattgcttttatgctcttaaatacaccaccagggaccccaatcagggttatgaagaatttaagagtttgtgcagattgtcatatggctatcaaactcatagcaaagatttacgatagagagattgttatcagggatcgcagtaggttccatcatcttagaggtggttcatgttcctgtaagattactggtaatatagtaatcatcaggatttgataatggcatcttgagagtcaagttctgcattgatttc

SEQ ID NO: 50735 - DNA, 247 bp, Glycine max
gagagaggtagggctactgggtggaagcctgaccctattactttctctgtgttggggaagatgtttggggaggctggggactatgatggcattaggtatgtgtttcaggaaatggagtctgttggggtgcagcctaatttggttgtgtacaacaccttgttggaggcaatgggaaaggccggacgcccgtgttcgccagggggttgtttgaggaaatgattgagttgggaattgtgccaaacgagaa

SEQ ID NO: 50736 - DNA, 260 bp, Glycine max
agcttcctacgatgaaattaaaaatgctatcaaggaggaatcagagggcaagttgaagggaattcttggttacactgaagatgatgtggtctccactgactttatcggcgatagcagatcaagtaatttttgatgcaaaggctggaattgcattgaataagaactttgtgaagcttgtttcttggtacgaaacgagtggggatacagctcacgtgtcattgatcttcttgtattcgttgccaagaagtctctttaaggtg

SEQ ID NO: 50737 - DNA, 286 bp, Glycine max
accgtttgggcggatgcggatacctggtttgagaggcagcagcaggaggaggagatgaaacggattgaggcagagaatcgtgcagcgatgcaggcggcggaagacttgcaccggaagcaagtagcagagcaacgggagggagagaaggaggaggagattgagatcaaggatgatcctatggccaaggctgaagcggaggttcttcaaaatcaatgacttgtcaaaatgacgcaacttggtgagggaaacgctgggttttgctatttgtctgcctcattgtaatgtc

SEQ ID NO: 50738 - DNA, 241 bp, Glycine max
  unsure (1)..(241): unsure at all n locations
attatagatgaggttcttggtaattgtgaaatttttgaggaaaggaaagtatataatgagaggtttaatatgttaaatggatgtctatatggttaaacagaaaatataatatatngtggtggagctgatcagttcatagaggaagcagagtgaagtttgcatgatgcaatcatgattgttaggagggttttgaagaattcaaagtgggttgctgggggaggtgcaatagatatggagataa

SEQ ID NO: 50739 - DNA, 226 bp, Glycine max
cttgagttaaaaaatggcagcagcttcttccatggctctctcatccccatccttggctggcaacgccgtgaagctgggcccatcagccccagcagtgggaagggtgaccatgaggaagaccgtcaccaagcaggtctcctcaggaagcccatggtacggcccagaccgagtcaagtacttagggccattctctggcgacctcccgtcctacctaaccggcgacttc

SEQ ID NO: 50740 - DNA, 269 bp, Glycine max
cgcagcatggggtggtacctacgaggtgttataggcacgttacggacaaatgtaaacgggatcacgtctctgacatggtgttcattaaatatgagtggtccgtcaagtaagaatgtgctttcatttaaatggtataatcagaggaggaaattcatgggaagaagatgaaggattggttaagatttagtgttgcattttggcatacattccgtggaacaggtgctgacccatttggtgcacctaccaaatactggctatgggaagatggt

SEQ ID NO: 50741 - DNA, 287 bp, Glycine max
tctgactcacacccacaatagtcgggggcagcttcaaagtacctccacattgtctcctactcttactgttctcttctcttctcatcatttttattttttccaatcaaaccaaacaaaacataagcaccgctcttttctctccgatggttctttcacactagtttcatcacaactataggcattgattttaagataagaaccattgagcttgatggcaaacggatcaagctccaaatttgggatactgcagggcaggagcggtttcggacaattacaactgcttacta

SEQ ID NO: 50742 - DNA, 152 bp, Glycine max
cttgcatgccccggttgcaccaactctatgtacccgcctatccatcagtgccacaacggtcacacactttgctcaacttgcaagacaagggtacacattcgctgcccaacttgccggcaggaactcggtgatataaggtgtttggcattaga

SEQ ID NO: 50743 - DNA, 255 bp, Glycine max
ctccaggcatgagacagacgctgttgtttagtgccacatttcccaaagagattcaggctcttgcctcggattttctttcaaattatgtgtttctggctgttggaagggtcggttctagtactgatctaattgctcaaagagtagaatacgtgctcgagtcagacaagagaagccacctcatggaccttcttcacgctcagagggaaactggagttaatggcaagcaaggtttgacattagtttttgtggaaacga

SEQ ID NO: 50744 - DNA, 254 bp, Glycine max
gctttggcatttgttattgatgggatttattatggggtatcagactttggatatgctgcttactcgatggttctagttggactagtttcttcaactttccttctggtggcggctccagtagggcttcctggagtctggactggattgtttattttcatggctttgcgtgttctagctggagtttggaggttgagcagtaaaagtgggccttgggatacaatctggtatagagatggagcagaagattgaccaac

SEQ ID NO: 50745 - DNA, 258 bp, Glycine max
ccgagagcttggtcatgggagtggcaccagttaaggctcaattcgagagtgctgaactgggtgttcccgctgagaacgatggctgcaaatgtggagctaactgtacctgcaaccctgcacttgcaagtgaggtgttggagagctaaagcttcaagcagaaatggtccttagaaataatgatacaaactatatgtagtttcaacacttcacaattatgtagcatgtatcatgttgcactctggcgactgctgtctaaac

SEQ ID NO: 50746 - DNA, 171 bp, Glycine max
atgggagaccagacgaatactcatagcctcaggtatgccagcgcttatgctgtaaacgcttgctcacaatcttctgcactcataaagccttcacaggccagtactactggtggataacaatctactggggccaaaacattgacgacggcaccttgacttccacatgcgaca

SEQ ID NO: 50747 - DNA, 258 bp, Glycine max
gaaaaaagcgatcatagtttcacttcggccttatccagtttagggtttcggttctctaccctatctttcacgtatcgaaaccttaaatttacgatcaggtctgagcaatctggttggtagaacctttggtcttagtgagtcaagttttatgtctgaattagacgatcaaattcctactgccttcgatcctattgctgatgcaaatgctgatgactcgggtgctgggtcaaaggagtatgtgcatattcgtgtacagca

SEQ ID NO: 50748 - DNA, 100 bp, Glycine max
agaatacctatttgggaggattgatatgcagctcaagctcgttgctggcaactctgctggcactgtcactgcttactacttgtcatcccaagggccaaca

SEQ ID NO: 50749 - DNA, 226 bp, Glycine max
agacgcacaagtagcagagaactacgaagtcggaaatggcttcctcaatgatctgctccccagctgttaccaccgtcaaccgtgccggtgccggtatgggtgctccattcaccggcctcaaatccatggctggcttcgctaggatgttgaccaccaatgacattacctccattgatagcaacggtggaagagtacaatgcatgcatgtgtggactccaattggcaa

SEQ ID NO: 50750 - DNA, 270 bp, Glycine max
cgagcagtgctttgttttttctgtttctgactgttcttgctgcaaaagttagcttttgcttttctaccaaggtttatgtagtgtacatgggaagcaaaagtggggaacacccagatgatattctgaaggaaaatcatcaaattcttgcgtctgttcacagtggaagcattgaacaagcccaagcttctcatatttatacctacagacatggtttcagaggctttgcagccaaactcagtgatgaacaggcttcccaaatttctaaaatgc

SEQ ID NO: 50751 - DNA, 293 bp, Glycine max
tggaagatctgtcaaaggtggataggaaaaggacaccttggctgcttgtgttatttcatgtgccatggtataatagtaacaaggctcatcaaggtgcaggagatgatatgatggcagctatggagccgttgctttatgctgctagtgttgatttagttatcgctggtcatgttcacgcttatgaacgttcagtatgtctttatggtttagcattttatcctctttgtaagcaccatttagtgggaaccgggttttaatactctctctgattgtcagaacgtttgtataatgga

SEQ ID NO: 50752 - DNA, 294 bp, Glycine max
gggctctcttcttgtatgctttatgtgtaaatactggtccaagttacatcttctggattatcatgcatgtcatatcagaactttatattatacttcagtacctgtatcaaattgtcatccagcactgtgggttgagtatcgatcctcatctattacgagaattaggttttccaacacacaaaatcacatctagttttgttgtcagttcattacctctctttattgtctatttatttaccctcattcaaatctccataacacctaaagatggtgaatgatgtcttctactgactt

SEQ ID NO: 50753 - DNA, 292 bp, Glycine max
ctgagcttcaggaccaagatatattaaatgccatcaaccaagagcttagagtccctggatggggggatgccaacaactcaaattactgcacttggcaaggtgtcagctgtggtaaccactcaatggtggaaggcttggatctgtctcaccggaatcttcgaggtaatgtaactctaatgtctgagctcaaagctttgaagcggctagatctttcgaataataactttgatggatcaattcctcctgcttttggaaatttatctgatcttgaagtctagatttgtcttcaaat

SEQ ID NO: 50754 - DNA, 265 bp, Glycine max
tgggaactttgagctcatggagaagagactggagccagagaacttcagatccagcatgtgctaggctcctgtattcggcctctgcactgaatttagcaaccagagtttgctttttagaccatcacgacaccagattaggagcacaaaagatacgagtccctgaagtgggcctcctatcatcgatatcagaggcacaatctgcatcaccgaaagcattaatgctgagagggtgtatggtggtggcatgcaggtaggtgcgaccatg

SEQ ID NO: 50755 - DNA, 283 bp, Glycine max
ctgctcgagcacatttcagcctatgaaaaccagaacaacaagggtgtagaaattgagaagataatacctatggatgctgctccccttggtgttgccatccagggctaatacaaagatgtgacaaagaataatttgggcgacaatgaagataactaagctaaaggtgaatgaaaaatttgcctgcagtgtaatttcatctgggcaaagcttttatagtttatagttataaggctttctaaaaagtgttgcgtattgtattatcttgaatgctgtgatttgaagt

SEQ ID NO: 50756 - DNA, 247 bp, Glycine max
ctacaagatagagcttgtctgagaatgcaatagatagatagctttggctgggcaatttcatgtacattgagaccatcaaagaagctttggaaagagaatgccctggaggtttttcatgtgctggtatccacgttctctctgtcagatatggcattgtatcgctaggaggtacccatatcactcgtaagactggaagcagggattgtacaatgctcagagctgatgtggttgcaccagttcctcccag

SEQ ID NO: 50757 - DNA, 279 bp, Glycine max
atgttgtaactttttgattcctaaattctctaaaattcgaaattctaatttcgttaggggaaagagattgtttgtgtgtgagtgagtatggctggagaaggcgagggtcctggtatcggaatcgatttgggaacgacgtactcttgcgtcggcgtgttggcacacgaacgtgcctgcaatctaattctatgttcagggtgctagtattaccccaagctacgtggctttctccgacgacgttgacggatggtcggcgatgcggcgctgtgacatgtcgct

SEQ ID NO: 50758 - DNA, 200 bp, Glycine max
aggaaaaatcatgggaaggaagagcatcgtgctcgagatctgttttatgctctctgggtgcctgatactcttatggcaagagttcagagcaatggccaatggtctatgtgttgtcccagtgtagcaccgggtttgacatattgtatgggtctgtaatttgaggagcgttatcttcaatatgctagataatgagaagcaat

SEQ ID NO: 50759 - DNA, 284 bp, Glycine max
gcacactcatcttttctacgtgctacggtctatggtgctcttctaattcggccacgactaggacactcgtacccgtttcctaaagtttatcaagaaatccctatactagttggagaatggtggaatgctaatgttgtagaggttgagcaaaatgcaacagaaactcaacagccgccaattgaatcagatgcatatacaattaatggtttacccagcgatctctataactgctctcaggatggaacataccaggtcaaagtaaagcaaggaaaaacctacttgtt

SEQ ID NO: 50760 - DNA, 277 bp, Glycine max
ggccttcatggtcagcctcaggctgggattgattatctccctgccagcatgagttccaatggtgaaccaatttccactagtgtcattgtttctggtggttatgaggatgatgttgatgagggtgatgttatcatttactctggccacggtggccaggtcaagcattctaggcaggttttccaccagaagcttgaggtgggaaatcttgcaatggagaggagtatgcactatgggattgaggtcagggctattcgtggggtgcggtatgagggtgctg

SEQ ID NO: 50761 - DNA, 274 bp, Glycine max
ctcgtctccgggaccccgtctacggctgcgtgggcctcatctccgtcctccagcacaagctccggcacatccaggtcgaactcagcaatgcaaagaaagaactcgcaaattatattggtccccaagcactacaaggaattcccgctcccatgctccaacaacaccctaacaacccttttcccggtgccatgtatgggaacatgccgactgcgacggcctccgttcacggcgggcagttggtgattcgcgacgcgcagccggtgcctcaccacca

SEQ ID NO: 50762 - DNA, 100 bp, Glycine max
ggagaatctgaatttgaaggctactgagttgaggcttggacttcctggatcccagtcacctgaataggatccggatcttttctcgttgagctcaacgaaa

SEQ ID NO: 50763 - DNA, 218 bp, Glycine max
ggttgtgttccacatggctgctccgaactcttccattaacaactaccagcttcatcattccgtcaatgtgcaagggaccaagaatgtcatcgatgcttgcgtggagctgaacgtgaagcgtctcgtttacaccagctctcccagcgtcgtcttcgacggcgttcatggaattcataatggaaacgaaacaatgccttatgcgcattcgcctaatgatc

SEQ ID NO: 50764 - DNA, 170 bp, Glycine max
ggcatctcaaagtggtgtgataggcataaccttggtagctaattggtttttgccgctcagagataccaaatctgatcaaaaggctacagaaagagcaattgacttcatgtatggatggtaagaatccctctccccctttatgtaatttgggtgtctccaaaatacacata

SEQ ID NO: 50765 - DNA, 305 bp, Glycine max
cgggcccaattcttggtagcgggagcaaagcaggaacagcggcagaaaattgtgcaggccgacggtgaggccgaggctgccaagatgcttggaggagcactgagcaagaaccctggctacatcaaacttcgcaagatgcaagcagcccagaatatctccaagacgatcgccacatcacagaatcgtatctatctcacagctgacaaccttgtgctgaacctacaggatgaaagtttcaccaggggaagtgacagcctcagaaaaggttagaaatgagctagtcaacaagaactccacccccagag

SEQ ID NO: 50766 - DNA, 304 bp, Glycine max
  unsure (1)..(304): unsure at all n locations
cctacacgcagggtttcccgaagatttaacacctatggctcctaaaggtattgttttaatatttcgaaatccggcttatgaaaattgcgaaccggtggttaagcatctatatttactctctgattaggttaattcttccagtgttactggaatggaattagctgatagtttaaagaaggctgatccaaaggcacaagccttgaaaactgctaaggctgttaagtcaggtgctactttaaagaaaaagaccaagaagatccgaacatctgttaccttccatcgaccanagaccttgaaaaaggat

SEQ ID NO: 50767 - DNA, 161 bp, Glycine max
atgatatcaaagatataccttctcctcctgatgtgagcaattatctagtttcagaggatgatggctctatttccaatggacaccgagatgcattcttgtttgatggcatggcagatgccgaggtagaaagaaattaaaggatgcactatcggcagcttcaa

SEQ ID NO: 50768 - DNA, 302 bp, Glycine max
gttcctggacattgttctggcggtatgaagtaatgagtgcctgcacttttaagggcaattgtgcgtcgcaccactactgtctgtgctaatagaattccctgcggtgcacgacttgtaatcgctctctttaacttcatccactgtgtgcccagcgaaacagacacagtcttgcgagtgaacacaagttacaacaatggctttctttggtagaattgggaatttgttacgacagacagcgagcaggcaggttagttcagaatttcgttcgcccccttcatttttcaggctatacgctgtatgtc

SEQ ID NO: 50769 - DNA, 288 bp, Glycine max
  unsure (1)..(288): unsure at all n locations
gactgcttccctaagagtgcaagtcattattggaagcattatagaaaaagtttctattcctccacttcattcaagtgttgcgctattgaagctttctggaatggaatattgtggcaccactagctatttcataaagcttcttctggagaaaaaatatgccttgccatatcgtgtggttgatgcagttgttgctcattttatgagatttctcaatgaaaccaggataatgcctgttatatggcaccagtcacttcttgcttttgtgcagaggtancaaaatgagctgca

SEQ ID NO: 50770 - DNA, 293 bp, Glycine max
ctatgagggtgttcaaagccttctaggtctcatgcataccacagggacaattcctaatgcacttcctccaccaatatcaactctattagcatcatttaattttccatgcaatccaaatgaaaatggcttgactgatggagctcgtgcattggccaagcatgcttgtaggagtagcagtggttattggggttctctgaatggaaatgattctaataaaaataggcttgcaatggatgttattaaccgcctaatatcacattgttgttggctgaatgtgtatactgttccaccac

SEQ ID NO: 50771 - DNA, 270 bp, Glycine max
atcgcatcttgtagctccgctcatcaagtataatagcatctgtctctgtccgaatagatcacactatggcacgtcaagcgacatatcagtgaatgatttcaacgttaaagatgacaagggtaatgatattaatcttggtgtctactaaggaaaggtccttatcattgtcaatgttgcctcacactgtagcttgactaattcaaattacactgcggtcagtcagttgtatgagtaatacaaacatacatgcctggaaattctggcatttcg

SEQ ID NO: 50772 - DNA, 269 bp, Glycine max
gggctggggatccaggattgggcaatgttgcatggaaagaaagagttgatggctggaagatgaagcaagataagaatgttgttccaatgagcacaggccaggctgcttctgaaagaggagctggagatattgatgctagtactgatgtgctagttgatgattctatattgaatgatgaagctcgacagcctctttccaggaaggtttctatgccatcttcgaggaaaaacccatatcatgtggtgcttatgctgcgactagttatcctt

SEQ ID NO: 50773 - DNA, 256 bp, Glycine max
ccctagcccgttttctgttcgtgaacctggggtcactcatgttttagtaacagggggtgcaggatatattggttcacatgctgctctacgacttctgaaggagaactatcgtgtcaccatagtagacaatctgtcacgtggaaatttgggggccgtcaaggttcttcaagacttatttccagaacctggaaggcttcaatttattaacagattggggatcgcgcttgctactactctaatatctatatccctgtat

SEQ ID NO: 50774 - DNA, 268 bp, Glycine max
ctcccataaatctttcagatcgtctgcatcaagttctccgttgggcacttggatctgttgagatcctgttgagtaagcattgtcctatatggtatggatatggttgtggcttgaaatggctggagcgtttttcttacataaactcgttcatttatcctttgacatcacttcccttaattgcctattgcaccttgccggctgtctgtcttctcactggaaagttcatagtccctgagattagcaactatgccagtatcattttgatggc

SEQ ID NO: 50775 - DNA, 204 bp, Glycine max
cttatgtctctcacttgcaaaacctagttttcatttcttccctcaaatttcaaaatgcgtgagatccttcacatccagggtggccaatacagcaaccagatcggcgccaagttctgggaggtgagttgcgctgagacgggctcgaccctaccggaaggtacggtagggactcggagttgcagctcgagaagatcaatgtctact

SEQ ID NO: 50776 - DNA, 153 bp, Glycine max
caaatacatggtcatccacggtgagcctggtgctgtcattcgagggaagaagggtcctggtggtgatactgtgaagaagaccggtgcggccttgatcattggcatttatgatgaaccaatgactccaggtcaatgcaacatggtagttgaaag

SEQ ID NO: 50777 - DNA, 198 bp, Glycine max
ctcggcgttcgtgactcagccgccccatcccgagtcgctaaggggctgcggggaggccgcagcaccttctggaagacttggccttccgctctgacgcagggccgaggtgggcagtccaggccgagatgcggcggccctgaaggtgagtgaggccctcggcagctgcagccggggtgtctggtacccccccggcgtggt

SEQ ID NO: 50778 - DNA, 208 bp, Glycine max
  unsure (1)..(208): unsure at all n locations
ctgctacttcctactccaaccgcacttctgctccgcaattatcatgggcaaggtcatgatcggaatcaacgtatttggaagaattggccgtttggtagccagagtggctctgcagagagacgatgttgaactcgttgccgttaacgaccctttcatcatcaccgattacatgacattacatgtttaaatgtcancatgttcatggaca

SEQ ID NO: 50779 - DNA, 105 bp, Glycine max
aaggattctacccgccgctcgatgggaattgcgcttcaaggcgtctcgtagggctaatccgcctcacgagggtcaccaacggcacgtgcctttggggggccgagg

SEQ ID NO: 50780 - DNA, 244 bp, Glycine max
gtgaacccactcagttgaagaatcaatctctccctttcacctttctccatagcctaccacttatacacttactctgctttcatctatctactctcacttctcatcacactctgagacacagagagagagagaacaataaaagaaagggagtgatgggtgtgagactcagtgtttactaattataatgaacaaagtactacacatcctcttctacactgaagaagatggcaattcagcaccacaa

SEQ ID NO: 50781 - DNA, 290 bp, Glycine max
  unsure (1)..(290): unsure at all n locations
cacagcatataagctgtttacaggttctgcatggatgatgctctctcgccaatttgttgaatatttgttatggggatgggataacttgcctagaattgtcttgatgtattatgccaattttctatcctcccctgaagggtattttcacacagcatacgataatantgnggngtnccggtacaccacggtggggcangacctccactgcatatcaggggacaaccctccaaaacatcatccagatttccttaaatagtataacttccagaagatggttgacagtaacactc

SEQ ID NO: 50782 - DNA, 273 bp, Glycine max
  unsure (1)..(273): unsure at all n locations
ggctcgagggccattcaagcaaccaaagtagtgtttaaccatctgtatgatccagtttcacttgtcagtgatcacgacatcaacgcaaaagctagtggaccaaggcatatcgggtcaaagctacaatggatgatctgtggtatgagccatgtgaagtaaatagtgagagcggacgtgcttattttacctncaatgcgnnntggaagaactgcttgcacatgcaaatggagattgtttcagatgttcctccatggcaattaattccagctgaag

SEQ ID NO: 50783 - DNA, 281 bp, Glycine max
aagaagttggagctgatgctgtctctcatgggtgtacagggaaaggaaatgatcaggcatgcgttactattaggttcacaacactaatcatgtcatttattatgctaacactttctatataaacttttaggttcgatttgagcttactttctttgctctgaaccccaagctaaatgttgtggctccatggagggagtgggatattacaggtagagaagatgctatcgagtatgctaaaaagcataatatacctgttcctgtgacaaagaaatccatttata

SEQ ID NO: 50784 - DNA, 274 bp, Glycine max
gcaagaatggcacttcgttgcttggtgatgtccctttctgttctcttcactcttggtcttgcgagagaaagccatgccagagacgaagatttttggcatgctgtttggccaaacactcccattccaagttcattgcgagatcttctaaagcctggccctgcaagtgttgaaatcgatgatcaccctatgcaaattgaagaaacacagtacccgaaaaccttcttctataaagaagaccttcatccaggcaaaacaatgaaagtacaattcagca

SEQ ID NO: 50785 - DNA, 175 bp, Glycine max
cgaacatcagatattattggtagaaatggacaatggccttggctgcagttgtcttccaaatgggtggactcataatgactcttgccccttcgtatgcagtactaatggttggaagatttctagctggaattggaataggatttggagttatgatttcccctatatatattgctga

SEQ ID NO: 50786 - DNA, 293 bp, Glycine max
agatagaagagtgtagtagaagcgaggcaatcgtggaggaggatgaacaagacgatggaagagaacgagaaagcgtttaatgttaatggaagggaagtgatacctctcctcgccccattcaaaatgggaaaattcaatctatctcacaggattgttctggcaccgttaacaagaacgaggtcatacaacttcatggctcagcctcatgctgctttgtattattctcaaagaacaacaaagggtggatttttgattggggaacctcgggggtgtcagacatgcacaaggtacca

SEQ ID NO: 50787 - DNA, 176 bp, Glycine max
gcgcttgctccagctaggtgtatgtccctgaatttggctgtcaagtatgccaatgtcattcattctattgttttgcaggatgatttcttgccaagaacggccactccattggaagatatattcaaatcaatattctgcttgccctgcttgttgttcttggtttgcctgagagacac

SEQ ID NO: 50788 - DNA, 138 bp, Glycine max
gctgacttcgccgcccatggctcgcgcggtgctcaaagagaacgacaccgttttcgcaaaccgtgacgtccctgccgcgggtcgggccgcgagctacggcggatccgacatagtgtggaccccatacgggcccgagtg

SEQ ID NO: 50789 - DNA, 301 bp, Glycine max
gctgaacagaggtgtctttcatgatatcaatggatgcatttcaactggaaaggaagcaaatgtttatcatgcaactaaatctgatactcaagaacttgcaattaaagtatacaaaacatctgttctggtatttaaggatagagatagatatgtgcaaggagacttccggtttcgaaatggatactgcaagcataatcccaggaaaatggtaaaaacatgggctgagaaagaaatgagaaatcttatgaggcttaaggcagcaggaattaggtttcctacgccatatcttctgaggctacat

SEQ ID NO: 50790 - DNA, 288 bp, Glycine max
attttccactcttcctcaccgattgctagaatggaatttcgatgctcagtcatctcttttaccattctcttctctcttgctcttgcaggagagagccatgtccatgcatcgctacctgaggaagattattgggaagctgtttggccaaacactcccattcccactgcactgcgagagcttctaaagcctctccctgcaggtgttgaaatcgatgttctccctaagcaaattgatgatacacagtacccaaaaacattcttctataaagaagacttcatccaggcaaaa

SEQ ID NO: 50791 - DNA, 279 bp, Glycine max
caaaactactgtaacagaagaccgagatgtgttggtagatgcagctgctgataagatggaaagggatttgattcttcttggtgctactgcagttgaggatagactgcaaaagggggttcctgaatgtattgaaaagctcgcccgggcaaaaatcaagttatgggtattaaccggagacaagatggaaactgcagtcaacatagggtatgcatgtagaatacttagacaagacatgaaacagatagtgatcactctggattcaccagatatcctatcatt

SEQ ID NO: 50792 - DNA, 256 bp, Glycine max
cgcgcggtccttgtctccttcgtcgctacaatttctcgtaccatggcaatgccatgcgcacgatctgttccctctacgaatgcacactcgctatggtgcccgtactccggacgtgccatgcgcacagtcggaggcttgctgtggaagcacaccacatccttggctttgagaccactctgaagagtgcgttgacgacccacggaatacatccatggcgcacaatatagatcagctcccaaccagttaaccaacaagc

SEQ ID NO: 50793 - DNA, 301 bp, Glycine max
gacttaacaacaacacatagagggttacagtctgttcaagctaccatctctctctctctttcttagtgcctccttgccagaagttaaaatggcccaagagactttcctattcacatctgaatcagtgaacgaggggcaccctgacaagctctgtgaccagatctccgatgctgtgctcgatgcatgcttggagcaggaccctgacagcaaggttgcctgtgaaacctgcaccaagaccaacatggtgattgttttcggagagatcacaaccaaggcaacgttggactatgagaagattgtg

SEQ ID NO: 50794 - DNA, 282 bp, Glycine max
ctgattgctaagaattgcaaccattttactgatgaagtttgccaacagctaactggaaagcctattcctgcatgggtaaatcggctggctcgtgttggtgaggattctctttgcttgattattctgataccagataagctgtattttgtctttactatgaattcaacttgcccgtgtaatgtgcataactatgttccgttccgttgtgtccctactcccttgttcatgttttaaatgatatgctgccatgaatgtgaaacataattttgtatatgatgaccg

SEQ ID NO: 50795 - DNA, 143 bp, Glycine max
aattctgctcgagatgaattgcaagaagggcacttcgttgctttgtgatgtccctgtctgttggcgtcactcttgggtcatgcgagatatagccatgtcagagacgaatatgttgggcatgctgtttggtcaaacacacccat

SEQ ID NO: 50796 - DNA, 290 bp, Glycine max
atgttttgtgtttcgttgcgttgtgtttaggttctgatctgattttggattttggttaggttttcgcgatggcatcgaaacggatcttgaaggaactcaaggatctccagaaggatcctcctacctcttgcagcgccggtcctgttgctgaagacatgtttcactggcaagcaacaattatgggtcctccagacagtccttatgctggaggtgttttcctagtcactattcatttccctccagattatcccttcaagccacccaaggttgcattcagaacaaaggtattt

SEQ ID NO: 50797 - DNA, 282 bp, Glycine max
ctcttcctcaccgattgctagaatggaatttcgatgctcagtcatctcttttaccattctcttctctcttgctcttgcaggagagagccatgtccatgcatcgctacctgaggaagattattgggaagctgtttggccaaacactcccttcccactgcactgcgagagcttctaaagcctctccctgcaggtgttgaaatcgatgaactccctaagcaaattgatgatacacagtacccaaaaacattcttctataaagaagaccttcatccaggcaaaaca

SEQ ID NO: 50798 - DNA, 285 bp, Glycine max
gttggtcccacaataactggactgttccagaatgctctgaaggacgccatataatactggaacagtccagttggtcccaaaacaactcacttttggggacctattgccaactggggatttgtagcagctggattggctgacctgaacaaacctccagaaatgatctctggcaacatgacaggagcaatgtgtgtctattcagcattgttcatgagatttgcatggatggttcagccacgcaactatctactttttgcttgccatgcctcaaatgagactgttcaa

SEQ ID NO: 50799 - DNA, 281 bp, Glycine max
atggaaggaccaatcacaccctcaaaagtagcatatgatgcaaaagaattatatgatatgggttgctttgaaatctcccttggtgacacaattggagttggcacaccaggaactgtagttcctatgcttttggctgtgctggctgttgtccaatagataagatagctgtccactttcatgacacatatggacaatcccttccaaatatacttgtgtccctccaaatggggattagcacagtggattcctctgttgctggtcttggtgggtgtccatatgct

SEQ ID NO: 50800 - DNA, 277 bp, Glycine max
atgcccaagtatcatactgatttatgttaattttgtaatttactgttttgctaggtccatggatattatgatgaatgccagaggaagtatggcaatgccaatgcttggcggtattgtacagatgtgtttgactacctaactgcttctgcaattattgatggaactgtaaatatctttcactccctcctcttcaagtatctatcccccatgtgcctctgtgcatcttggtgctttgtgttcatggcggcctatctcctgacattcgaacaattgatca

SEQ ID NO: 50801 - DNA, 280 bp, Glycine max
cgtgacatctgcctggctttgcattctgtgttaggtttgtcaaggttcagaagtcaccttttgtgcgccttaacgaatttggaattcttagcctcttcctcgcaaagattcaagcatttttctgactggttactggatattatggccacgggagatttggaggccttcttccctgctgcaacacgtgagtatgctcctatggtcgatgaaatctggagagatcctgctgttcaggaaacatacgagagaagacaggattacataatcttcccgatgttgc

SEQ ID NO: 50802 - DNA, 271 bp, Glycine max
acttattttatatatatatatatattcatctttctctatttagcttttcactcctctaaaagtgtgtccttcacttcacacatcatagcaatggcagcacgttcctacagtcccaccatggttgccctctctttgcttctttggtcacattctctaacgtagcagaggcttatacacgcagtggaacacttcgtccttcagattgtaaaccaaggtgtacttaccgttgctctgcaacttcacacaagaagccatgcatgtttttctgcca

SEQ ID NO: 50803 - DNA, 278 bp, Glycine max
aataaattgtaatgattctaggaagtggggagcagagattatgcgtcaggattggggggaagcagctagaagtggttttaagcagtcaaaactttcaaatcagtgtaatcatcggtataagatctatgctgaagggtatgcatggtctgtgagtttgaaatatattctctcatgtggttctgttgcattaattatatcaccccagtatgaagattttttcagccgtggcttattccaaaccataatttttggcttgttgattctctaaatctatgtcc

SEQ ID NO: 50804 - DNA, 283 bp, Glycine max
cgcatgggatgttcgcgggtcgaatatctggtcgttgttgattcgaattggagcgggagaagaattgcccaagattccagaagagttatcagaagagggaaaagattttcttttgaagtgtttcgttaaggatccaatgaagaggtggagcgctgagatgcttttgaatcaccctttcgtcaacggtgaaaccgtttcgtttcagaaagttaatgagccgttgccgttacgtcgccgtcaccgaggacacactttgatttaactcactgggcttccaccgtaa

SEQ ID NO: 50805 - DNA, 291 bp, Glycine max
agcagttatagagaactgactgagattgctgagcaggccaagagaagagctgaagttgcaaggcttcgcgagcttcacacacttaagggacatgttgagtctgtggtgaagctgaagggtctggacattgacacaatccagcagcattacactgtgtaattaacaacacaagaacgttgtagatagtaaaggggcataattcaatgtgttaaatgatctgagagacaaggatgacagctgactctacttaggctgactaagtagttagttctgccgtgatatatcatcgct

SEQ ID NO: 50806 - DNA, 115 bp, Glycine max
acgatgcatattgttagggcagagatgcaccctagtgggtacctgatcagaccttgtgaaggaggtggttccatcatccacattgttgatcatatggatttagagccatggagtg

SEQ ID NO: 50807 - DNA, 289 bp, Glycine max
cttctccgctttcatgaagagggtgttcatcctgaccatcgcatctatcttcaatgccttttcagcatgttggaacccagttcccttcatcgtgctgtgtatcccgtgttgacatcatatgctactccagataaacaagcatatcctcgccattctttgagccgtgcagcattgattaccagtggcagtccgatatttttccttgatgcattcacaattctgatagtgttttattcttcgacagcagacccgacgcttccttttcctccaccccatgattgtttgttaa

SEQ ID NO: 50808 - DNA, 280 bp, Glycine max
  unsure (1)..(280): unsure at all n locations
aaacttaatcgatcatcacttcacttcactaatacatcatggcagacgagacccagaacaagtatgagagctctgaggttgatgtccangatcgtggtgtttttgactttctcggtaagaaaaaggatgaagaagacaagcctcatcctcaggaggaggtcatcgccaccgaatttcaaaaggtacatgtctcagaccaaggagagaacaagcacaagcctcttagaaaagcttcaccgatctgacagcagctctagctcttccagtgaggaggaaggag

SEQ ID NO: 50809 - DNA, 241 bp, Glycine max
gcagggttaagatgggattgacttggagatgagctttactgggagcaaatttggatcgacaaatgatgaattcagtgatgtgggttttagtgaagagcaaatgacaaagctaaagagaagtgagcagttctcagaggaaagggaaagagagattgaacaggttgtcaaatcagtccatgagcttgctcaaatcatgaaggatctctctgtccttgtgatagaccagggaacaaatgtggat

SEQ ID NO: 50810 - DNA, 291 bp, Glycine max
gtaccatgcagagatccttgcctatggatccttcatcaatttacgggcagggaggaatgcagtcaaagcctggaattgcaaatgcaggattgaatccgggagttggtagtctcacattgaaaggatggcctctaactggcattgatcaaattcgtcctggttttggagcaccagttcagaagcctctccttcagagtgcaaatcagtttcagcctttgccgcagcaacaacaacaacagatccttgcacaggttcgggcacaaggaaatattggcaattcacctgcttatg

SEQ ID NO: 50811 - DNA, 271 bp, Glycine max
  unsure (1)..(271): unsure at all n locations
cacactctctctcaccaaagccttcctagaacgaaaaaaaaaagaagagcaattttccctcaccaaagaagaagaagcaaacaatggccgatcaacttaccgatgaacagatctccgagttcacggaagccttcagcttgttcgacaaggacggcgatggttgcacancaaccaaggagcttggaactgttatgcgttcattggggcaaaacccaactgaggcagagctccaggacatgatcaatgaagtggatgctgatgggaatggtac

SEQ ID NO: 50812 - DNA, 288 bp, Glycine max
cttaaatttctccatcccgcaactaatttatttatgtatttttcctttatatatcttctttctctggctcgagcatctaaaagggttgttttgttatttcacaagatgaatacgcgcgggaagctgcacctgatgacaatggaggggattatggacaagggggtgttgaatgatttgttaagaaggcttctggaaggcaaaggatggaaccaggtgcaactctctgagtcggagatccgtcaactctacgtcaacgccacataaatctccctctctcagccaattctt

SEQ ID NO: 50813 - DNA, 152 bp, Glycine max
tctcacgaatgctattggtgttgttgatgtcatggatgatgatggggagcctcaagggttcaccatatatgttcgtggtggaatgggacgaactcataggctagacaccacttttcctcgcttggccgaaccattaggttatgtaccaaagg

SEQ ID NO: 50814 - DNA, 278 bp, Glycine max
tcatattggagtagtcaatgaaaccttagagagcatttctatagatcttggctttagtgggaatacaatggctgagggtcttgtagtaagtatatgcttaggaggtgcttttattggatctctgttcagtggatggattgcagatggtgttgggcgtagaagaagtttccagttgtgtgctttacctatgataatcggggctggaatgagtgcaacagcaaaaactctgtggggcatgcttttgggaaggttatttgttggtactggaatgggacttg

SEQ ID NO: 50815 - DNA, 270 bp, Glycine max
  unsure (1)..(270): unsure at all n locations
gttttccaggatggtgtcattcttggggctgatactagggcgactgatggacctatagtggctgatgaaaactgtgagaaaattcattatatggcacgcaacatatattggtgtggtgcaggcacagctgctgttacagaggctgtaacagacatggtaaaatcacagctgcaactacacccaancatactggtcgggaatcaagagttgttacggcactgactcttcttaagaaacactgttcattatcaagggcatgtctcagctgct

SEQ ID NO: 50816 - DNA, 278 bp, Glycine max
ttcagagtaacattagtggtgaaactcaaaactctcacataattgaggatggaaaccttgtcatttctatacaagtactacgcaaggttaccaatgattttgcttcagaaaatgaactaggccgtggagggtttgggactgtttacaagggagaactagaagatgggacaaaaatagcagtgaagagaatggagcatggggttcatttatagtaaggcattggaggcgtttcaagctgaaatagctgttctttccaaggtccggcaccggcatctggt

SEQ ID NO: 50817 - DNA, 283 bp, Glycine max
ctggaattccgtatgtctttgctccatgcattgcggtctgccgagatccaagatggggacgttgctatgagagctacagcgaggaccctaagattgttaaaactatgactgaacttatacctggtttgcaaggagatatccctggcaattccattaagggagttccctttgttgctggaaagaacaaggttgcagcttgtgccaagcactacttaggagatggtggcacaaacacgggaatcaatgagcacaacactctgatcagtgacaatggactgcttag

SEQ ID NO: 50818 - DNA, 283 bp, Glycine max
cgacctcgttggttttcctttgtaagttgtaagcatttggcaccagcaagccctgtcttcttcttcgatcagattagggcatttcatttctgcgatggccgcagcacccgctagagctcgtgccgattacgattacctcatcaagcttcttcttatcggcgacagcggtcagttcctttttcctagattcaattcaattcattgctttatgtatggacctttgatcgttaattattctaggtgtcgggaagagttgtctgcttttgagattttctgatggctc

SEQ ID NO: 50819 - DNA, 286 bp, Glycine max
tcaccgattgctagaatggaatttcgatgctcagtcatctcttttaccattctcttctctcttgctcttgcaggagagagccatgtccatgcatcgctacctgaggaagattattgggcagctgtttggccaaacactcccattcccactgcactgcgagagcttctaaagcctctcccagccggtgttgaaatcgatgaactccctaagcaaattgatgatacacagtacccaaaaacattcttctataaagaagaccttcatccaggcaaaacaatgaaagtac

SEQ ID NO: 50820 - DNA, 273 bp, Glycine max
cagagaaagatgctgaattgagaagatcggcattcaagccgaattctccggcctgcaagcggttgttgatcaagtgcttaagatcatagagaaggaagatacaaaactcttgattccttgcgtaaaggctattgggaatctggcaaggacgttccgagcaacggagacgaggataatcggtcccttggtccggcttcttgacgaaagagaggctgaagtgtctagggaagcagctatctctctcacgaaatttgcttcctcggaaaactacct

SEQ ID NO: 50821 - DNA, 185 bp, Glycine max
  unsure (1)..(185): unsure at all n locations
ggctcgaggttcttgtgatgttgcccttcaggctagaccaagcttagctttcaagagtgatggaagacgagnaagtgggaattgagattccaaggaatgagcaagatgggtcgttcacaagaagctcagtggccaaagcattgagattggcaatggtggaagaggagggaagtgcttataggaac

SEQ ID NO: 50822 - DNA, 271 bp, Glycine max
caaaaagccaatcaggagcagtatgcagaggggaagatgagaggggctgccccaggaaagaagacatctggtctgcaacagaaaaatgttgaagtgaaaacgaaaaagaacaaacagaaaacacctggaaatggagatggtggcagtaccagtgagacccctcagcctcctcggaagaaaagggcccgggtagatcctactgttgaaaatgaggaaacattcatgaacagagttgaagttaaagtaaagattcctgaagagctaaaaccgt

SEQ ID NO: 50823 - DNA, 268 bp, Glycine max
  unsure (1)..(268): unsure at all n locations
tctaggtgaaatctaaattgaagggtcatcaagagcgaattactggtttagccttttcaacctgtcttaacatcctggtttcatctggtgctgatgctcaactttgtgtatggagtattgatacatgggagagtagaaaatcagttctatacagctgcacgcagntaaggctcctgttggtgacactcgtgtgcagttccatttagaccaaatccggttactggtggcccatgagactcagttggcaatatatgatgcctctaagatg

SEQ ID NO: 50824 - DNA, 125 bp, Glycine max
tagcgaagatgtgagatcaattaagctcgatgggatgggcaggatgtgtcgctgggagcgcacaagttctcggaaacacaaccgattcggactgcggcgcagagccaagacgatggcaaggacta

SEQ ID NO: 50825 - DNA, 285 bp, Glycine max
accttgaattgaccaaagttcccaagtcctcttctaagggagccatgttgaatgatgatgaagatgcaaaagtggaaggcactggctcgggcttcatttgggataaatttggtcacatagttaccaattatcatgttgttgctaaactggctactgacacaagtggtttacaacgttgtgttcctagttgatgccaaagggaatagctttgacagggaagggaagataattgggtttgatccagcgtatgatctagctgttctgaaggttgatgttgatggatat

SEQ ID NO: 50826 - DNA, 284 bp, Glycine max
cttgtggtacactcaagcatcttttcttggcatcaaccttgtgagtgcatggtcacacaatcatagaattgtcccagcttcgcaactggggggagtgtccctcatggtctaatttcaccattgctccatttgaggttgctgggggtagattgatcacattttcaaatccatgtgattatttctcagttggcaaagtaaaggccatgaccctctctctctcagtcttggtggcaattgagatgtttaactctttgaatgccctctcagaagagaatagcttgagg

SEQ ID NO: 50827 - DNA, 298 bp, Glycine max
agggaagtgtgaatcagacatggcccgaggtggataaccccgagcgtatcccccgctatccaggtggtctgaacttgcagcacagcatggaatactggctcacccttgatcttctgtcatcaaaagttggccagccttgcactgcaattagagtgcaggattcaactcaagcagatgttatttttgtgccatttttctcatcactgagttacaataggcattccaagcttaatggacaggagaaagttagccttaacaaaaggttgcaagacagattggtacagttcttaatgggccg

SEQ ID NO: 50828 - DNA, 273 bp, Glycine max
ggataaattgtttattgtatattactatcatatatgatagttttttctgatgtggcaattatgtattattggaacagcaattgaaacaactctatggtcgattgagtggggcattgctgagcttgtgaaccacccagagatccagcaaaagttaagggatgagattgacagagttcttggagcagggcaccaagtgactgagccagacatccaaaagctcccatacctccaagcagtggtcaaggaaactcttcgtcttagaatggcaatccc

SEQ ID NO: 50829 - DNA, 303 bp, Glycine max
gcgtgtgcgaattaactcgaaaatgattccctttatttttggatcgtatgcagataggaatagatttcgtcagtgttgaaatcacgagaaattcatggctgctccaccggcaagagctcgtgcggattacgattatctcataaaacttctcttgattggcgatagtggtgtcggaaagagttgccttcttctacgattctctgatggttctttcacaactagtttcatcacaactataggcattgattttaagataagaaccattgagcaggatggaaaacggatcaagctccaaatttgggg

SEQ ID NO: 50830 - DNA, 307 bp, Glycine max
tgacaaatagaatttgttcaaagatgggtgtcattggacccaactttgaaatcccagattaaggcattcttgttaaggacaccgtcttctccttctcttgatgcccggtcaactgcatcacaggttattgctaaagttgctggcattgagttgcctcataaacagtggcctgaattgataggatccctcttgtctaatgctcatcagcttcctgcccctactagacaggctacacttgagacccttggttacatctgtgaagaagtttcccctgatgtagtagaccaggatcatgtaaataagatac

SEQ ID NO: 50831 - DNA, 296 bp, Glycine max
cgatgctcttgatcaagctcattttatcattagatgtatgattgattcttgtttatcatctgccatgttacacagatatgttgatttaatttctgagttctgcaaaatgtaacgggtagaatgtactgtcttgtgccataatatccatatttcccataatagggatgacatgaaatcttgtgactccaataacttgttattttaaccttataattcattcgtctgatatttagcttagaaaatgagggggggcttgtggcaacttgggcaatcgatcactcgccgtcttgcccatg

SEQ ID NO: 50832 - DNA, 285 bp, Glycine max
  unsure (1)..(285): unsure at all n locations
accgagaaatggaactgaaggctcaaattacggccattattgacaacagcaaggaaatgattanagcagagactgaatctggtgatgtcggtcctcttgttactgaggcagatattcaacatattgtctcctcttggactggaattcctgtggagaaagtgtcgtctgatgagtctgaccgtctcctaaagatggaagagacactgcatacacgtatcattggccaggacgaggctgtcaaagctattagccgtgctatccgccgtgctcgtgttggcctgaaga

SEQ ID NO: 50833 - DNA, 281 bp, Glycine max
ccaatataacactcaaaggcaacacagacagtcgcgtcttaataaacgctctactctgataaacctgacttctgctagtctgctctactgtatcggatcgatcttcgatctctgagaatgagaaagtgcatatcaatccacatcggtcaggccggtattcaagtcggtaacgcctgctcggagctctactgcctcgaacaaggcattcatcctgctgagcagatactaagtgataagactggtagtcaaagtgatgatgcttacataaccttctacagtga

SEQ ID NO: 50834 - DNA, 275 bp, Glycine max
gtttctttgtagcacattagttgataatttttattattataattgtgcgttgcagtttttctgtggatggcacccctataagagaattcaagaatttagaatcaattggagttccttttccgaagaggcaaccgatgaggatatactcaagcctatggaacgctgatgattgggccacaaggggtggacgcatcaaaaccgattggtccaaagctcctttcactgcatcctacagaaacttcaacgctaacgcttgtgtttggaacagaggaaaa

SEQ ID NO: 50835 - DNA, 279 bp, Glycine max
ctcgagccggcaacatgtatagaagaggtggagaagccaagcatgtgcatcgccatggaaaatctcacattgcaccagaatgttccttaccaccaccaccatcatcatcttcttcttcttcttcatcttcatcatggcagagccggtgggctaatttgcccacccgagttgctatagacctaatccaaaggttggaagccagtgaaacttcttggcctgaacgtagagcacttgtggcatgtgcctcagtttgtaagttgtggagagagataacaaagg

SEQ ID NO: 50836 - DNA, 271 bp, Glycine max
ctgagaaccaaaagaggttgaaacgacgtcagagaaacctcgtttcgggcctacagaaagcaggcattagcacccttaagaccaacaatgcaggcttgttttgctgggttgacatgaggcaccttctccattccaacacattcgaagctgagatggacctttgggaagaagatactctaccgaggtccggttgaccattccacaaggctcgtcctgcaactgtacggaacctggctggttccgaatgtgttccgctaccatgtccgaggat

SEQ ID NO: 50837 - DNA, 301 bp, Glycine max
tacgaaaatcctctgatactgttgtgttcctgaaactatgacaaccatgtcaacctcatcctcttcccaaagcctcaaaattggcattgttggattcggcaactttggccagtttctggccaagacaatgattaaacaaggccacactctcacagcaacttctcgatctgattactctcaactttgtctccaaatggggatccattttttcagggatgtcagcgcattcctcgccgcagacatagatggtatagtgttgtgcacatcgatattatcgctatccgaggttgtagggtcaatg

SEQ ID NO: 50838 - DNA, 289 bp, Glycine max
acttgctcgatcaatgccaacaagtggtgctttggaccgtgttgctgaaaaattggacctccctttctttgaggcatgctttatttttcttacaatttctttcttcttaaattattaatataaatgatataggcttcacatatttttagacagttctgaaataacagaagatggacccgggattcagggccccactggttggtgattttttgggaatcttatggatgctgggaatttttcggtttgcggggaagaaagttttggaacaggttctgaccacatgcgtgag

SEQ ID NO: 50839 - DNA, 290 bp, Glycine max
atttggcttctctaatcaacaagggatgtgttctaacattgtctcttgagtggcagaagcagatatgcattctccaaagcctctcctcctttggagccttaggatcacttcctattcttcagatgattcgcctgggaattctgatggagataacctttggagttataccctttgatcactggtttgttgtttgtttgtgtgagtgagtgtaccgtaatttctgttgtgtttgtttgagtgtgtgtgacgtagtattaagtttgagtcctgagtatgatgttcaaccttgt

SEQ ID NO: 50840 - DNA, 283 bp, Glycine max
ctcgagcgaatcggctcgacggctcgagtgcagccccaataccgcggtaaattccgaccaaggctaaatactggcgagagaccgatagcagcaattgaagtggttgctgaaatggcagctattgggtttggtcttccaaaggatgcattcacttctcttatgaagctgggcccgcatctgttagcaccaacagggagtgaccttcaaaaatatggtcaggagggaactatctttgcaggatatcactatgaccttaacttcctaacaatcatggtagaagtag

SEQ ID NO: 50841 - DNA, 303 bp, Glycine max
attcatcacatcttgctcaacagctgaaaggaatgaacttctttctgaatgcttgtgtgtcctttacacaccaaaggatgagcacttcggcattgtttcctttggaggcaatggcagcttataaacctgttatcgcatgcaatagtggtggcctgtggagtcgattaagaatggtgtaacgggattcctttgtgatcctacaccactggagttttctttagcaatggctaagctcataagtgatccccaggaggcagataacatggggagagaagctaggaggcatgttgttgagtcattctc

SEQ ID NO: 50842 - DNA, 308 bp, Glycine max
gtagcattaggtgtggctttggcaattcgttatcttcatgaggatgcagagcaaagtgttctacatagggatattaagtcggctaatgtgttattggacacagattttagcacaaagcttggtgattttgggatggcaaagttgttggatccaaggttgaggactcatcggacaggggtagtggggacttatgggtaccttgccccagaatatatcaacggaggtagggctagcaaggtatcagacatttatagtttcggggttgtggctcttgaaattgcatgtggaaggaggacttacaaagacgg

SEQ ID NO: 50843 - DNA, 291 bp, Glycine max
gttccttcttcttcttccaataatgtcttcttcattctctgttcgttctcttgctcctcttactccatcatcatcatcttgcttccccaccagctctcttataaagacatggctctgcgccgccgacaccccaacggtggctccgtcaaccagcaactctcctcggaggaggacgcttccagcttggagccagtgctcgagcagacgtctggcttctgggctcctaagcgaatcgtccaggggaggcatcagccctcaggagatagtcaagcttgagagcgctcccatgaa

SEQ ID NO: 50844 - DNA, 275 bp, Glycine max
aatcgtgtaccaaggaccaagagaaaatgtggtagagtttttcgaatcaatgggttttaagtgtcctgaaagaaaaggagttgctgacttcttgcaagaagtgacatcaataaaggatcaatggcaatattgggcacgtaaagagaaccttattgctttgtcactgtcaaggaatttactgaagcattccagctatttcacataggtcaaaatcttggagaggagctagcctgtccatttgacaagtctaaatgccatccaaatgtattgaccac

SEQ ID NO: 50845 - DNA, 173 bp, Glycine max
aatggatgggctgtgagtcgatttgtcgctgataaccctggtgcctggcttttgcagtgtcactgtggaggtgcagatcggatgggatgtgctacggtgttgttggtggagtacggagttgggaagttggaatccagagagcctcctccgctggatctgcctctttgttagga

SEQ ID NO: 50846 - DNA, 276 bp, Glycine max
gctcgtgtgtctgcttcttcactttctctcgtttctatcgatagcaaaagataaagatggggataaaattcggcgattgtggcaactggtaatgctattggacctctgaggtggtaaagttgattgttactactgtgaatgaggctaaagtccctggtgttgatgtcgtagaagttgttgtgagcctatttttgtgttccttcctgttgtaaaatgtttgctgcgccctgatttccatgtttcggctcaaaactgttgggttcgctttggtggtgc

SEQ ID NO: 50847 - DNA, 257 bp, Glycine max
aggcagtcaaggtggtgccttgacttggctagtgttctactgtatcctaaaacttgaggtggaggtgcagtcttgagtggttggggtgttgtcaattcatctaggatagaagaaattacagtgaggctaagcagacagccagactagtgtcccatgggctggttgatagaacggtaatgtttgatgccggactagcaggtcccccgttccttgaaaaaattggtgtgggatgcgagttttaggcttatcctggtcta

SEQ ID NO: 50848 - DNA, 291 bp, Glycine max
  unsure (1)..(291): unsure at all n locations
tganattgttgtaaagactctatcaaggagctcatggcaagtagtgacagagttcataaatgaagtaaaattaattgtaaaacttcagcatcggaatcttgtaaaactccttggttgttgcattcaaggacaagagaaaatgctaatttatgagtacatggcaaacggcagcctggactccttcatttttgatgataaaaaaagaaaattgctaaagtggcctcaacaattccacataatctgtggatatgcaagggggcttatgtatcttcatcaagattcccgactgag

SEQ ID NO: 50849 - DNA, 275 bp, Glycine max
  unsure (1)..(275): unsure at all n locations
ggacgtctaggagtgttatcggcgaaggggcattcgagaagcttgcctgangtgggagaagggacatatgggatcttgcacagggacttgaagcttcacaatctcttgatggaccgaaccgccatgatgcttaaaattgctgatcttggactcgctccttcatttaccgtgccaattaagaaatatacacatgagatactaaccctgtggtatagagctcctgaagtcctcttgggtgctacccattactcaatggcggtggacatgtggtccgt

SEQ ID NO: 50850 - DNA, 285 bp, Glycine max
  unsure (1)..(285): unsure at all n locations
aatactccttttaaatataccagaactatatcatctacatcaacatgagtacttnnttcagttaaataaaattactgacctatttccgtcgttaaagtataaaaacaaaaaataactctaaaaatattattcttggtataaactcatcgaactaaattgggatttgtgttggtggaatctgaatctgcagttctgggacttcagctggggaaagaaaactaatgcccacaatcaaggaagagctggatcgtcgccaacttctatacagcctcctcatgccagtta

SEQ ID NO: 50851 - DNA, 107 bp, Glycine max
cggctcgaacagctcgagcggctcgagtgtgcgtgcagtttggtgtcctgttgaagtctgtccctagccaatggccaccgaacgtttgacccgggttcacagtctcc

SEQ ID NO: 50852 - DNA, 105 bp, Glycine max
atctagctggatggcgtaggctgcagattcatcagatgaagaggaggaacacggaggtcattaaaaagcaagtagttcgccacagggctggagatggggatacca

SEQ ID NO: 50853 - DNA, 112 bp, Glycine max
tgaatacgtgagaccaaacagaggcatcgagaaatttagatctactgcttactccaactgtgctcgcaaaccatgctgatacacatccggattgatagttcgttgcatgcaa

SEQ ID NO: 50854 - DNA, 228 bp, Glycine max
atcatagtatgactggttaccagaagatgtgggaggggtaccgcgctaccactctaaacggttcagttgaggcattgtggattgtgatggcgtctcgccacagggtcttgagcccatgcatccagattatcaagactgtaccatcccagctgggctttgcacgagggagagcaccaagcaattccacaactccagaatcaagttccgatcatcgcatccagccagtta

SEQ ID NO: 50855 - DNA, 255 bp, Glycine max
cggctcgagtttgttttaattttcttcgcttaagcgctgtagtaggtggtgttggttgtttagtgcatgtgattttgatttggaattggaagaatgtggaaggttgtgcgattcgcggcggctagatcacagcagtattcgacggagattcgcggtccatgcaaggtccacaagcgtggcactgatatcctccacgaaccatggttcaacaaggatactgggtaacctgtaactgagaggggtcgataggagctg

SEQ ID NO: 50856 - DNA, 133 bp, Glycine max
  unsure (1)..(133): unsure at all n locations
atctcatcctcctcagcacacattatctgtacactctaacaaacattctcgtgcacactttcagattgtgtgaagtcanngtctgattgccgaactgatgatcaacctgctaacaggaagttagaggttgacc

SEQ ID NO: 50857 - DNA, 284 bp, Glycine max
ggatgcaacaatgtatgaagggacagatgagaaataatctggaccctctggaagagtacactgatgaacaaatctgggaggccttggataagtgtcaacttggagatgaagttagaaagaaagaaggaaagcttgactccacagttagtgagaatggtgagaattggagtatggggcagaggcagttggtctgccttggtagagtgctgcttaaaaaaagcaaggttttggtccttgatgaagccactgcatcagtcgacacagctacggataatttgattcag

SEQ ID NO: 50858 - DNA, 284 bp, Glycine max
aggttctacaagattgttcatcttgctgatggcacaaccatcaaaaccaaggtattgatcgggtgtgatggagtgaactccatagtagcaaagtggctaggcttcaagaatgcctcttttacagggagatatgcaattaggggttgtgcagaggctcaaagcaatcacgggttagaacccaggttcatgcagttctttggcaaaggttttagagctggtgttattccttgtgatggaaacgttgtttactggtttttcacttggacacccaacaaccaagacaa

SEQ ID NO: 50859 - DNA, 279 bp, Glycine max
  unsure (1)..(279): unsure at all n locations
ctcattctcattcgttcactgtcactttaccctatcctaacttatncttctctctgntntccttctacttcgcatcattggatccggacggcgttctcctcgtcatgtgcaaccttctcctcgacatctctgccgtcgtcgacgacgctttcttgcaataatacggtatcaagttgaacgattcgattctcgtcgaggataaacacaaacctatgtatgatgaattggctaacaatcctaatgtggagtacattgctggtggtgctactcataattcta

SEQ ID NO: 50860 - DNA, 267 bp, Glycine max
taaactgagcttgataggcagcaagaagagttggaccagtatgttaaacttcaggaacaactgtcaaagggagtgagagacatgaagcaaaagcacatggctgctctccttacctccattgagtaaggtattagcacgtagctataggtaatagacttggagatagaaaacatgaaccgaaaaaatagggagctggctgaaagaataaagcaggtggctgttgaagtgcaaagctggcattacagagcaaagtataatgagtcaatt

SEQ ID NO: 50861 - DNA, 269 bp, Glycine max
atcaattctccatttccagtttctcacgcacttgtcaagaatcgtaagctatgggaaagtcttagccaactgtgagtgctgattatcagaaggtcgtagtgtaggcgaagaagatgctcagaggcttcatcgctgagaagagatgagctcctctaaagctccgattagcatggcactctggtggaacctttgacaagggcacgaagtctggtagagcctgcgtaaatatcaagcaccctaccgaaatagatcacagcggtaatagcggt

SEQ ID NO: 50862 - DNA, 178 bp, Glycine max
agagtgggaggccatgaggagaagattctggtgttagtgaggctgaggcctttgagtgagaaggaaattgatgtgaatgaaacaggagattgggaatgcatcaatgacactaccatcttataccggaacacccttcgggaaggttccacattcccaagtgcacacacctttgatagag

SEQ ID NO: 50863 - DNA, 175 bp, Glycine max
ctcatatgagttctacccgcccaatactgaggatcgggtggacaatctgcatgatacgatggaccgtatggatgtgctcaagccctcgattttcgacatcacgtacaggtgctcgagtgacaacggctgatctcacagtcggaattgtcaacaagatgcagaacattgtctgtgt

SEQ ID NO: 50864 - DNA, 283 bp, Glycine max
ctcgagccgacgcaccaaccgaggccacaggccaccaccattcctaccttgttccttccccaactccgcaggctgctcatcgccctccctccgcgcccccgatccagatccagatccaggggcttgtcatggcatccaaacgtatcctcaaggaattaaaggacttgcaaaaggaccctccaacatcatgcagtgcaggtcctgctggtgaggatatgttccactggcaggcaaccatcatgggtcctcctgatagtccatatgctggaggtgttttcttggt

SEQ ID NO: 50865 - DNA, 267 bp, Glycine max
ggctcgatgttgaaagaatggctgctagagctgggtttaatgctccgaggttgaatacagtcagcattagatctactgacctttcacttaattccgacattcagtctccttacttgaccatcccacctggtctcagtcctactacacttttagattctccagtgttcctttcaaattcactggcacagccatctccaacaaccggaaagttcctgttcatggttaatggcaacatgcggcactcagaattatcgtctgatgctccag

SEQ ID NO: 50866 - DNA, 262 bp, Glycine max
aatgacgagaatgccacgcaaattagaagtgaaaacgaggcgaaggctgcagctaagaacatatttcagaatgttgctagacgcgggtgcaggtatatatacccggatgacttgatgcgctttatgcgagaagatgaagctgcaaaaaccatgaatctctttgaaggagcgtctgaagctgagagaatcagcaaatcggccttgaagaactgggtgtgtatttaacaaagctcagctggaaggggctgtagaagccaattca

SEQ ID NO: 50867 - DNA, 199 bp, Glycine max
gatgttggattgtcccttaaggatggttctgtttaccgcgcttggatcacctatgatggtcctcaaagaagaatggacattcgtcttggaaaggcaaaccaagaggattatccttccaagcccatgttctcataatctatggatctctctccttatctaaatgagtacatgtttgtggggttctcagcttccacacaac

SEQ ID NO: 50868 - DNA, 250 bp, Glycine max
tgctttgtcttctctctcaacaacttcatcttcttcctcctcgttcatgtctacttcaaggtgcagtaccattatgagtgtatcttctatgctgcgtacatcttcactcctggaaagggtattcttgctgctgtgtaccatcagggactattggcatgcgtttggtcagcatcagtgtagagaacattgaatccttcaggcgagctcttagggtgcagcctttcactgcccctgtgttcttcaatatctc

SEQ ID NO: 50869 - DNA, 248 bp, Glycine max
tgccgacccgagcgaatcggctcactcactgctcgcttcttccttctctcatcaacaacatgtccatcttcgtcaagacttttacccggcaagaccatcaccctcgaggtcgagagcagcgacaccatcgacaacgtcaaggccaagatccaggacaaggaaggtatccctcctgaccagcagaggttgatttttgctggtaagcagctggaagatggtcgcactctgctgattataacatacaaaag

SEQ ID NO: 50870 - DNA, 288 bp, Glycine max
agcaagtacccaacatctccgccttggtcaacctcaagtcgattttcctcagcgagaacaacttctccggcgattttcccgcctccgtcgccctcctccaccgcgtgaaagtcattgtactgtcgcaaaaccatatctccggcgaaattccggcgtcgctgctgaatctccggcgactgtacgttctctacttgcaagacaacgcgttgactggacgcattcccggtttcaaccagagcagcctcaggtatttaaacgtttcgaaaaaccgtctatgcggcgagattc

SEQ ID NO: 50871 - DNA, 277 bp, Glycine max
ctcgagccgctgtttagaaggcttagtgcctggagaatttggatatccctttacattcagctcatctgaacagggtctgcaagattagaatgacactgtttagaaggcttagtgcctgaagaatttggatattcttttacattcagctcatctgagcatggagtactaaatgatgtagaaggtgcttgatgagcctaattttgtggaaaactatttcaagagctcacgactacattttataggaacctggcggaatcggtatcgacagcgttttcca

SEQ ID NO: 50872 - DNA, 289 bp, Glycine max
acaagcgggaggttgtttttacatcaaacagaatcccaaataatccattaaaatgagaatttataaagacatttttactggtgacgaaatgttttccgatacatataagattaaattagtagatgaagtaatatatgaagtttatggaaaataattcaacgtagacaaggtgatattcaacttgatggggcaaatccttctgctgaagaagctgatgagggcacagactctgctgtggaatctggagtagacattgttctcaatcacaggttatgtgaaacttacgctt

SEQ ID NO: 50873 - DNA, 280 bp, Glycine max
acaggtcttacggaacaagccggatttccgacggtaaccatggcctaccataagcaatgctgcaaaagattttgtgaagaaattgttggtaaaagagcctcgtgcaagatatactagttctcaggctctatgtatgtatgcaactgtgtgtattctgattagtgagaaggctgtttattaccatatcttgtttcctatccttgaaataaatataattacattttgattgctgcctaaaatttagggcattcatcaatgctttaagcactgaatctatagc

SEQ ID NO: 50874 - DNA, 173 bp, Glycine max
  unsure (1)..(173): unsure at all n locations
actcgctctatgtctcagtctctgtgtttgcggctgaggatttcgaacgagtgacctgcctcgnttctcgcaaagtttaagtaatcattggtaaggaaaaggttcacatcaacattgtcggcattggacatttcgactctgggaatcaactatcactggtcacttgatctaca

SEQ ID NO: 50875 - DNA, 278 bp, Glycine max
aggatacttagtttcaagaggcggtgcagaccctctacttcactgatcttgaaactaagtattctggatctccgttttaacaaaatttcaacagccaaatgtctaggccaacttgcagccaactataatactttgcaagctatcacttggatgggaacccggcccagaaaaatgttggagatgaacagatgaagaaatatctgcaaggccttcttccccatcttgtctactacaatcggcagcctatgaaagtgaactctttgaaggatggagcagaa

SEQ ID NO: 50876 - DNA, 270 bp, Glycine max
attcaatttgcaacctaagtgaggatgcaaaaacaattcacatcatagactttggcatccgctatggcttcaaatggcctgcacttatcagccgtctatcaagacgccctggtgggccacccaaacttcggatcacgggatagatgtgccacaacctggtttaagaccacaagagagggtgctcgaaacagggcgcagacttgcaaattattgcaagcgtttcaatcttccatttgagttccatgctattgcacagagatgggacaccat

SEQ ID NO: 50877 - DNA, 153 bp, Glycine max
ggagtttttaagcttaaactcttattacctgaggaatatccaatggctgccccaaaggttacgtatctgacaaagatttatcatcccaacatcgacaagcttggtaggatatgcctcgacattctcaaggacaaatggacccagcacttcaga

SEQ ID NO: 50878 - DNA, 157 bp, Glycine max
agagacagaagttccattactggtttatgaatttgttaatcatggcaccctatttgattttatacacaccgaaagaaacataaatgatgcaacttggaaaacccgtgtaagaatagcagcagaggcagctggagctctatatatctgcattcagaag

SEQ ID NO: 50879 - DNA, 278 bp, Glycine max
ggctcgagtttagttttgcaaaatattagaaactttatcaagccaaagcgatatgtgttgttccgagactatgctactggagaccttgctcaggaaaggttctctagcaaggatcaaaagattagtgataacttttatgttagaggtgatggtcctcgtgcttactatttttcaaatgagttcttgacaaatttattcaaagaaaatggttttgatgttcacaaacatcatgtatactgcaaagcgttgagaaccgctcaagggagttgataatgaat

SEQ ID NO: 50880 - DNA, 281 bp, Glycine max
gaagatcaatgccaagcttggtgggttgaattcattgttaggcgttgaacattctccttctcttcctgttgtttccaaagctcccaccctcattctgggaatggacgtgtcacatggctcacctgggcagactgacattccttcaatgctgcggtggtcagctctagacactggcctctgatatcaaagtatagggcatgtgttcgtacgcaatctgcaaagatggaaatgattgataatttgttcaagctagtatctgaaaaggaagatgaaggcatcat

SEQ ID NO: 50881 - DNA, 275 bp, Glycine max
cgcttttcttgtttcagtggaaatggccgaaactcgagacgccgccgccgatggggtgcccggaacctccgccatatgggaaatgagacccgagaccgcgacacatgcgggaatcgggtcgggtgggattcggagggtgatttccgagcggagattgatacgtcaccgccgtttgggtcggtgaaagaggccgtgacccgttttggaggtagcgggccttggataccgttttttcagaacaacattgaagattttgacctaaagaaagtggagga

SEQ ID NO: 50882 - DNA, 158 bp, Glycine max
ctgtatttgattatggagcacattggttctgatcagcagacatagcttattgtgcccaccaaacatcatgtggagtttctcaacgtattgtttggtgaagagggtatcgagccatctgtgtgttatggcgacatggatcagatgctcgcaaaatccat

SEQ ID NO: 50883 - DNA, 268 bp, Glycine max
gttcctgaagatacagataaacagaggcaaataacttcagaggtttcatcccgtcttgctgacttagaggcaactttggatgctgggattaggcttcggaataaggctctagcttctgtaggaggccatttaacaaatggatggacatggtaagaagagagaaggctgtgtacgatacacctcacatgttaaattttgatgtcaccaaaaaatgccttgttggagagggctggtgccctatatttgcaaaaacacagattcaggaggc

SEQ ID NO: 50884 - DNA, 196 bp, Glycine max
agctttatcctgatgcatgtggcgggggaggacgtggttggataagccaaggaatagttagttatggcagaggacatgggacaagagaaacttgtgctctgcatactgccagactttcatgtgatacacttgtggatttttggtcagcactgggagacgagatgcggctttctcttctaagaatgaaggatgaaga

SEQ ID NO: 50885 - DNA, 267 bp, Glycine max
gattgagcatcatagaacgaaggtcacactactatctatggttgacgacgtggacaggagatacgatcagtagtgcgagcatatgcacatggtagtgaactcatttgacctgatgatgcgatttggggcggcagtgccatacacagcactggcgcagaaagcaatgtctcggcatttccggtgtctgaaggaggcgataacagcgcactgaagcaaagttgtgaagtacttggtgacaaagatggggctgcaagctcaggatgtttg

SEQ ID NO: 50886 - DNA, 276 bp, Glycine max
cttggggttattttcattcctgctgttgcttatattttactggctgtgttttacctgcctgagtctcctaggtggcttgtgagcaaaggccggctactcgaggccgaaagagttctgaaaaggcttcgtggcatcgaagatgtttcaggggaattggcgttgctggcagagggtctcagccctgggggtgaagccacatccatagaagagtatgtggttgccccagctagtgagcttcttgttaaccaggaagcagagcaagattatataaagttg

SEQ ID NO: 50887 - DNA, 300 bp, Glycine max
cattggctatggtcttgaactgtcccgaatagttccccttattatctaccatttgaagagaaaatatctttgcaagactgaagctgagttgaaagaagcttggcgtccaggagatcttggttatggaactagagttcctggtgacatgctgattgtcacaattgtgctctgttactctgttattgctcctgtgataatcccatttggtgctctatattttggtctaggatggcttgttctgcgaaatcaggtgattcttggaattttgtttaatgaacccagttttatgttttatgtggt

SEQ ID NO: 50888 - DNA, 306 bp, Glycine max
tggctccgcctctccagatccaaatccaactgctccaaggggacatgtgcaatttgcctgaactcaatgaaagcagggcaggggcatgccatttttactgcagagtgttctcactctttccattttcaatgcattacatctaatgtaaaacacgggagccggatttgccccgtctgcagagcaaaatggaaagaggttccttttcagagtcgttcttctaaggtctcccatggcatcaaccgagtaaattcaccgcgaatgatcctggacaactctactagggagggttcctacccaacaagctag

SEQ ID NO: 50889 - DNA, 301 bp, Glycine max
taactatgagaagcgcctacagttgcatagtccacccgaaaagaaggagaactactaatgaagcctgtggacctaatgcgagcagttgttcctgttttccctccatcagtctccaaacttgtaagagagggatacttgaatggtgaaagaagtcctggccatttattctgtctcccttcagaattttttatgctttttgatgtagacaacgacggacttatatctttcaaagagcatatcttttttgtaactctgttagcatccaagaatcaagtttttctgcggcatttaggatgtttga

SEQ ID NO: 50890 - DNA, 284 bp, Glycine max
gcgaccgccaaatcaacgaactcattggatccactgattttgtggagaaggggacaaaaaatgttgtgtttagaacctgcgatgaagaaaaggatacggttgtatttcaaataggcacatcagatgctgtgagggccctagctactgctcagttagtgtgtaatgatgttgctgctgtagatattaacatgggttgcccgaagtcattttctgtgagtggtgggatgggtgctgctctgttgtccaaaccagagcttattcatgatatcttaacaacattaagg

SEQ ID NO: 50891 - DNA, 293 bp, Glycine max
tcttggataaagataacaagtataactgcagcagatgtaaaacatacgagaaagccaggaagaacttgacagtgttggaggcaccaaatattcttacaattgtattaaaacgatttcagtctggtaacttcgagaagttgaataagtcggttcagttccctgaggtcctgaatatggctccatatatgagtggaacaaaagataaatctccattatacagcctttatgcagtggttgtccatttggatatcatgaatgctgcattttcaggccattgtctgttatgtgaagaa

SEQ ID NO: 50892 - DNA, 280 bp, Glycine max
cgagaacaaaaaaaaaaacgtgattcgctcttctcttcgaatataccacaaaaccaacaaacgagaagaggagtgagagaagatggggttgacgttcacgaagctgttcagcaggttgtttgcgaagaaggaaatgaggatactgatggtaggtctcgatgctgctggtaagacaaccatcttgtacaagctcaagcttggagaaatcgtcaccaccatccccaccatcggatttaatgttgagactgtggagtacaagaacatgcttcactgtgtggga

SEQ ID NO: 50893 - DNA, 234 bp, Glycine max
tgcaggttgagaaccaggaggtgattgctgaactagttgaccagtgtcgctcataccaaaagcgtgttatacctcttgtaaatgagacttcggatgagcagcttttaggtcagggattggcactgaatgacagtcttcagcgagtgctttgtcaacatgacaatattgtaaaaggacctccagctacaggcacaagaggaacagaaacgtcaactctgccaattgtatatgtaa

SEQ ID NO: 50894 - DNA, 285 bp, Glycine max
tcgctctctcatatctcatacagactacagtaatattttatttgcactactactactactttatttaagcagaagcaggcgagtgaggaacagcgaagagtgaagagaatggctcccaagggtttaacctttctagctgtgttaatatgcgtttcagcactgtcactgagtccttctgttgcgggggaagggcaagataatggccttgttatgaacttctacaaggaatcatgccctcaggctgacgacatcatcacagaacaagtcaagcttctctacaagcgc

SEQ ID NO: 50895 - DNA, 277 bp, Glycine max
ccgattgctagaatggaatttcgatgctcagtcatctcttttaccattctcttctctcttgctcttgcaggagagagccatgtccatgcatcgctacctgaggaagattattgggacgctgtttggccaaacactcccattcccactgcactgcgacagcttctaaagcctctccctgcaggtgttgaaatcgatgaactccctaagcaaattgatgatacacagtacccaaaaacattcttctataaagaagaccttcatccaggcaaaacaatga

SEQ ID NO: 50896 - DNA, 273 bp, Glycine max
aatttatatgtaaaaccaattagtgcttcctactttcatacatacacagcacagtcatatacacagaggcagagagcatgcactatgactgtgctgcgtatttatcaaagtaggaagcaataatttatatgtaaaaaaaatggccaagcaatataaggttaaaacttacgtaagtaaccattaccttatcttgtatacccaagtgttttttaaatctgcttttccaaatataacactatgttaaacatagcacatagcaaagaggggggcggc

SEQ ID NO: 50897 - DNA, 297 bp, Glycine max
agactattgaagcagaagcagcccacggcacagttacccgccattttagggttcatcagaagggaggcgaaaccagcacaaatagcatagcatccatctttgcctggacaagagggctagcccacagggcaaaactggatgacaatgctaaactcttggatttcactgaaaagctagaggcagcttgcattggagtagtagaggctgggaagatgaccaaggatttggcacttattcttcatgaattcctctgtgttcaaataatgctcccttctcgagccgaatcggctcgagcgg

SEQ ID NO: 50898 - DNA, 209 bp, Glycine max
caggtttaaatgtggtggctactgagaacattgtgttttgtccatgtgattggaagcatattttgttttttgaatgccaaaccgaagaatcctgaagccaatatgaatgttagtcagataatttcctactggggctatgaaagtgaagaacacgatgttatgactgaggatggctatatactcttaatcttccggattccacacaacat

SEQ ID NO: 50899 - DNA, 294 bp, Glycine max
caagaccctatgaatatacatctatgaagaacatgaatgagtccaagaatggattttggggtgttctggccagaaaagccaaatcaattattgaggatgataatgtaccccagcaatctgaaatgtctgggactgggaggtcccaatttcctggtgtagcatctaggagcaagttccaaaattcaaatcacttagaggatagcaatctcaaaagggacggtccatcatttataaagggattggatgctatcacatcttctcttactcatattggtggtaccattggtaaatcct

SEQ ID NO: 50900 - DNA, 287 bp, Glycine max
atcagattggaaagcccacaccagaacctgtggcactagagaatacaaatgcgactgtggcaccctcttctccaggaaagacagcttcattactcatagagcattctgcgatgcattggctgaagagagtgctaggctcacatcagttacaacaacaaatctaaatttcaagagtgaagagggtggtaataatgtgatgaactcgcagcagcatggtttgggaggacatggactaattggagcacaaagtcttcaaaatgtttctggcattccacaatttggttcac

SEQ ID NO: 50901 - DNA, 251 bp, Glycine max
agaacaaccgacaggggctgcctcaacatcgagctggtgtttctattcttgttggtcaccatccccatgtgctgctatgcagtggttctggctgcagtattctagatgaagttattagaggtaccattaactcagctgtgactttacatgactatgtgagatagttaagccatatgtacaagatcattttactgaaaaggctgtgaagcaattcaagcagtgttttctagatcagaccgacaagactctgg

SEQ ID NO: 50902 - DNA, 163 bp, Glycine max
catgcactttatggctgtgccgagagagggaccgttgagtatgatataaaggctaggattatggactatttgaatattcctgagaacgaatatggccttgtgtttactgttagtaggggatcagctttcaagttgctggctgattcataccctttccacaaac

SEQ ID NO: 50903 - DNA, 251 bp, Glycine max
ggaagtgggtgtggagagatcgaagagcaaggctttagagggtagttttgggttggatgtggtttcagaggcatagttaacggtgaagggttttgcggagttgaggaataccaagctcgtgtgcactgttggtcctgcttgcagctctatggaggatttgagaacttggctcttggaggcatgagtgttgccaggctcaacatgtgccatgggaccagggagtggcaccgtgatgtgattaggaatatcaa

SEQ ID NO: 50904 - DNA, 296 bp, Glycine max
cagcctcctcatgagaagccaaccatctacaagcctccttatgaaaaaccacccattcacaaacccccattcgagaaaccacccatttacaaacctccattcgagaaaccacccatttacaaacctccattcgagaaaccacccatttacaatcctccattcgagaaaccacccatttacaaacctcctttcgagaaaccaccagtatacgagccactcctttggtgaagccaccaccatttgaaaagccacccttttacaaacctcctttcgagaaaccaccgctttacgagcca

SEQ ID NO: 50905 - DNA, 287 bp, Glycine max
gccacatcactaactgatcctcaaaggcttgctcgttctgcctccaatcttgaaaatgaattgaggcattggcgaaacacctttgagtcttggatcacttctcaaagatcctatattcatgctctaactggctggcttctaagatgtgtgagatgtgagcatgatacatcaaagttagcatgctctcctcgtaggtccagtggtactcatccattatttggactttgtgttcagtggtcaagacgtctagacgccctccaagaaacagcagtgcttgatggcataga

SEQ ID NO: 50906 - DNA, 281 bp, Glycine max
tctgtttctgtctctgtgtttgcggctgaggattccgaacgagcgaccttcttcgtttctcgcaaagtgtaagtcttcatgggtaaggaaaagactcacatcaacattgacgtcattggacatgtcgcccctgggaagtcaactaccactggtcatttatctacaagcttggaggtattgacaagcgtgtgattgagaggttcgagaaggaggctgctgagatgaacaagaggtcattcaagtatgcctgggtgcttgacaagctcaaggctgagcgcgaa

SEQ ID NO: 50907 - DNA, 300 bp, Glycine max
cttcgatgtaaaagtgccagcactgcctctgcctcccctacctccactaggtggtccaaggcagagatttctagttagtctcgtggtgtcaatatgattatatggagcctggacaatcgctttgtgcttgccgctattatggattgcagtatatctgttggaatgcagttgatggcagcttagtgcactctttgactggtcatactgaatcctcttatgttttggatgttcaccctttcaaccctcgaatagctatgagtgctgggtatgatggacgaaccattgtgtgggatatatggg

SEQ ID NO: 50908 - DNA, 292 bp, Glycine max
gctgcatatcgaggtcttgcctttatgtatgactggttcatggaaccactttactctggaacatatcctgctgtaatggttaacagagttggaggtcgtttgccaaagtttaccaaaagggaatacttgatggttaaagggtcctatgatttcatagggttaaactattacacttcaacttatgcaactagttctccttgcccacgtgaaaggccaactgcctttacagacgcctgcgttagatttactactgtaagaaatgggcttctcattggtccaaaggcagcctcag

SEQ ID NO: 50909 - DNA, 323 bp, Glycine max
tcgaaagtgctacctctatttaggaacatacaccacagtccagacaacttcaaggagccagaaaaatttgatccctcaagatttgaggtaattattgtgctgaaaccatgttttacctaccaacctcagttttgttgctattcatgtgtgataccaagtccaagaccttgacagattctgtttaattatttgccaggctgctccaaagcccaacacttttatgccatttggcagtgggatccacatgtgtccagggaatgaattaggaaagttggagattttggtcctctacatcatctgaccacaaagtacaggttggtaaa

SEQ ID NO: 50910 - DNA, 157 bp, Glycine max
gaagaaggctaatttaatatttgtgttcttcctgttgaggaaacttatacttcccttctactccttcaccttgtgttgcatcatactacccttgacaatgttcatacctgagtctgaactgcccctttgggtgatatgttatgtccccatcatcaat

SEQ ID NO: 50911 - DNA, 133 bp, Glycine max
cctcgggagtaggcgatttcaaccccaaaattggccctaagaacttgaacctggttgatcctgttcaaaggaacacgatttgagtaccagctggagggtggactgcatttagattcagagcgggtgatccagg

SEQ ID NO: 50912 - DNA, 279 bp, Glycine max
ggaaaaggaattgatggcagctcgagaccaggtcaacactcgaaatggtgtcgtgcaaacagttaatggtgttaaccgcaagtacagtgatgcaagatctgggaggaagggaagaatttctagccgtgctaatgaaagtttgggagttggtatggatgagtttgagtcatggagtcttgatgctaatgatctgaagatggaactgcagtctaggagacagcgagaggctgcccttgatgctgcattagctgaaaaggaatttctagaagaggaatacat

SEQ ID NO: 50913 - DNA, 292 bp, Glycine max
atccaggcaaaacaatgaaagtacaattcagctagcctccctttcaacaaccatggggtgttggtacatggttaaaggaaattaaagacactactaaagatggatatagttttgaagagctatgcatcaagatagatgccattgagggagaagagaagttttgtgcaaattccttgggaacagtaattggtttttccatttcatagctgggaaagatcattcaagtactttcaagttcctttgtcaataagctagaccaatacactgtggaaggtgtgcagaatcttggaga

SEQ ID NO: 50914 - DNA, 293 bp, Glycine max
  unsure (1)..(293): unsure at all n locations
atcgtgcttatatgaatctgaagaccatcagaccaagcatgggactgttggggcagctatttcagaataaaagcataggctggtcagaatttcagcgtgcaattcttgatggacataagaacagacaagggcagataagattaaggaaggagaagcaatcaatttatacgtatcctgctcctgattgcatgtgtagagcttaatggaaacaagttttggctgttataaattgatctttagcttaattacggttttggcttatttagtttctccanaattcattttttctctcc

SEQ ID NO: 50915 - DNA, 254 bp, Glycine max
  unsure (1)..(254): unsure at all n locations
ggttcttcagagaaacatcaaatggactcacacggagatgannagacaatgcacaatagtgaaggctcttttgctggagatggagaactcgttcaagctcctcttgggctgtttcctcgactctggcctgcaaatgctgatgcatcagagggtacccaaattttcaaagtgattgaatatttccgattattaggccgtgtaatggctaaagctcttcaagatggacgcttattggatttaccattgtcagtggc

SEQ ID NO: 50916 - DNA, 276 bp, Glycine max
ctgatactgaatcctagattattcaatctgatggtcttgctgcagctctgttctccgctgttgaaggtttcgcttagtgcttgggctaaggaataagccctgcgcttagctcgactcgatcagcagtggattaggtggagaagatagcagtgagcgactccgctcttgttgaagaagctggtctttcatcccagtgctatcaatgagtcaatgtggctccaggatagagaaaagataggctcttccttctgttgtcacaagtttgttgactcacca

SEQ ID NO: 50917 - DNA, 283 bp, Glycine max
attgaatattggtggtatatctggtgctgctgcattaactgggggaactttgttggctattactggtgggttagctgcaccagcctttgctgcaggtcttggtgctttagctccaactttgggtactctgatccctgtaattggtgcaagtgggtttgctgcagctgctagtgctgcaggaactgttgctggttctgctgcagttgctgcatcatttggagctgctggatctggacttactggaagcaaaatggctaggagagttgggggtgttgatgagttt

SEQ ID NO: 50918 - DNA, 291 bp, Glycine max
tgtttgatcctactgatcaggagattcttgaacatttggaagcgaaggtgcgctctgatattcataagctctcatcctttaattgatgagttcatccctactcttgaaggcgagaatggaatctgctgtacccatccagagaagttgccaggagttagcaaagatgggttgatccgacatttctttcacaggccttccaaagcatacacgaccggaacaaggaaaaggagaaaggtgcacacagatgcagatggcagtgagacacggtggcacaaaacaggtaaaactagg

SEQ ID NO: 50919 - DNA, 108 bp, Glycine max
atttgtctctggaaaaattgttctgacaggagccaaggttagagatgagacttacacagcttttgagaacatatatccagtgcttactgagttcaggaaaaaccaaca

SEQ ID NO: 50920 - DNA, 289 bp, Glycine max
ctcgagcgtaagtacaatcggtgtctcgaaggattctcaactcagagctgccaaggatttaaaggcagtgtctgacagctgcgaacaagaaaactcccaagatggggaatcatttttcacgcacagctataacataatggcccaaagatggaagcaactgagagcagtagttgaggccggtgatttgttcactttgccacaattttctcctgcattctgcaccttctttggtcaggagacggagcctcaaccagctttcatatggttgaagtgtgaaggagatatagag

SEQ ID NO: 50921 - DNA, 285 bp, Glycine max
attcgagcgattcggctcaggttttgaagagctaaacatgggtttattcaggaagtgcatggaacccgtggagaagtgtttgcgggatgccaagatatataagagtaccgtccatgatgttgttcttgttggtggttctactaggattcccaaggttcaacagttgttgcttatggtgctgcagtgcaggctgcgattctcagtggcgagggtaatgagaaagtgcaggatcttcttttgttggatgttactcctctatccactggtttggagactgcaggagga

SEQ ID NO: 50922 - DNA, 288 bp, Glycine max
gctcttctaacttctgggttcagccttgatgatcccaacactttcggtaacaggattcacaggatgctgaagcttggactgagcattgatgaagatgctggtgaagcagatgctgacatgcctcctctcgaggacgccgatgctgatgccgatgctgagggtagcaagatggaagaagttgattaaatctaacttaattattgatttgcctttgtgtttttagaaacaatgattggggaacagtcttttactatgtttatgttttgaattttcgaaattttggaatgt

SEQ ID NO: 50923 - DNA, 246 bp, Glycine max
taacactgtatattggtttctaacttggactcccaccagtgaagagaacgagctagcaaagaacccatccaaaatgaagcaattggtgttgagacaggttgagaagatgccaagtgatattaaaacctttatagagacaacagagaccaacgacatacccacatctccattgaaatatagacatgagtgggagctcatgttggggaaaattagcaaaggcaacgtttgtgttgttggagatgcatt

SEQ ID NO: 50924 - DNA, 108 bp, Glycine max
tagcggtgtggacatgatcaggcgctgactttctcatcaccaatcaattgggctttcgatcttatgtaaagaggtacttgatgtcccaacatggctgctttgcaggtg

SEQ ID NO: 50925 - DNA, 279 bp, Glycine max
tgctcaaagtcatagttatctcttcgtctaccgttgcaattgtcaatattcgtcgaacgattattgcttagctctccactgcatgcgttgacaactatgcagaaagtagtgttatagttggacttacatggtgatagtatcaagcaataagctatgaagtcagcatctggcctttcaggaggtgaatcagtttctgttgacatgaaagacatgaagatgatcgttttgggggatattgatccagtgagtgcagtgtccaaactacgaaagtgttgtcac

SEQ ID NO: 50926 - DNA, 151 bp, Glycine max
agagaagagagatggatccagacgcgttggcaaaggcattcgtggagcactactacagcaccttcgacaccaacaggaacggcttagcgaatctctaccaggagggttccatgctcactttcgaagggcagaagatccaaggcgcttccaa

SEQ ID NO: 50927 - DNA, 297 bp, Glycine max
aaaaatgaagtaacagaaaaagtaccagaaaagggagggacctgtagcaccaacagcggataggagtggataccggcagaataatccacggaggggatgagctgccggagctccagggtgggagagaagtcgccgaagtcctcgatggcggcagtggtctcagcctccacgaagagcacgccctgagcgtcgcagtatatctccacgcgcccgtcgtcgtcccggcggatgcgtgcggccattgggtagaaagggaccaagaccttgctcaattcctccttcatcaccttggcgtcg

SEQ ID NO: 50928 - DNA, 218 bp, Glycine max
gcagcagttactatgctagatcgctgacattgctaatgtcatgcaaaagcatagtcaatccgccttttccatcaagtgtagagaagcctactccccagttaagtaccctggacaaatcatttccggtgccaaggggaagaattgccacaggaggaggtgactcaaaattgtgtctttctatagcatcaaggacccatgcaacagtgccatccacacaa

SEQ ID NO: 50929 - DNA, 290 bp, Glycine max
tgttaagagcagagtttcgtcttcccagtataacggatgaggaagcaactcctgagagaaatggtcctatacgtgtaaaatttgaaataccatattttactgtatctggaatacaggtaagatatttgaaggttattgagaaaagtgggtatcagctcttccatagatgagatacataacgatggccggagagtatgaattaaggcttatttaagaacttgtatttttctttggtgttggaattccaccaaataacagggtcagcttccatgatcaatggttttaaagtg

SEQ ID NO: 50930 - DNA, 182 bp, Glycine max
cttcctcttcctcagtagtgcgattttcgattctcttctctgcaactatgcctaaccctaaggtcttcttcgacatgaccatcggcggtcaacctgccggccgcatcgtgatggagctctacgccgacgtgactccgagcaccgccgagaacttccgcggctctgcaccggcgagaagggcg

SEQ ID NO: 50931 - DNA, 238 bp, Glycine max
ccccatttgtgaaaccatgaagtggccaacatggaagtccaagtccaacaccatggcaatatctgtggtgtttcttcacctgagtttctccatggaggtgttctgtcacccttctcatgcagacacaattgctgcgcttcctggccaaccccacgtaggctttcaacagttctcaggatatgtcacagttgatgacaagaaacaaaagtctctcttttactattttgctgaggcagaa

SEQ ID NO: 50932 - DNA, 248 bp, Glycine max
ttggaacatgcattcagcgtggacaagcagatagcgaaaaacctacaaggagagaacgaaggggaagacaagggagccattgtgacagtgaaaggaggtctgagcgtgataaaaccacccacggacgagcagcaacaaagaccccaggaagaggaagaagaagaagaggatgagaagccacagtgcaagggtaaagacaaacactgccaacgcccccgaggaagccaaagcaaaagcagaagaaatgg

SEQ ID NO: 50933 - DNA, 252 bp, Glycine max
agcagaccactcggtaggaattccaacacacagcattataactgcaaatgaatggttggtttagacttgagagagtttctgatgatgaattcaataactataagcttgtgttctgtccacagcaagctgaggatgacaaatgtggggatattgggattagtattgatcatgatgatggaaccaggcgtttggtggtgtctaagaacaaaccgttagtggttcagtttcaaaaacttgataaagaatcactgg

SEQ ID NO: 50934 - DNA, 257 bp, Glycine max
atcgagccgctcttcttctaccacacttcaattcaaaggccacagtgatactagtgattaatgaaggagatgcaaacattgaacttgttggcattaaagaacaacaacagaagcagaaacaggaagaggaacctttggaagtgcaaaggtacagagctgaattgtctgaagacgatgtatttgtaattccagcagcttatccatttgtcgtcaacgctacctcaaacctcaatttccttgcttttggtatcaatgct

SEQ ID NO: 50935 - DNA, 270 bp, Glycine max
ctcgaagttacataccggattacagcatcaaactcttcttcttcgatttccattgggaacgttactttttcttctactttctcttcattttcttcgcgcttcgatcttcagtcccaggacgttaacctctagcccacgagaagtacatcatggacaagatccaaggccgcggcgatgacgatgatgatgatgacgacgacaatcacattctcaggaccatgcggggaagaatcaactacataaggaggaacgatggaaaagacgaagacg

SEQ ID NO: 50936 - DNA, 263 bp, Glycine max
atgaggatgaggagcagcagcgagagagcgaagaaagtgaagattctgagttacgaagacataagaataagaacccttttctcttcggctctaacaggttcgaaactctcttcaaaaaccaatatggtcgcattcgcgtcctccagaggttcaaccaacgctccccacaacttcagaatctccgagactaccgcattttggagttcaactccaaacccaacaccctccttctccccaaccatgctgacgctgattacctcatc

SEQ ID NO: 50937 - DNA, 280 bp, Glycine max
  unsure (1)..(280): unsure at all n locations
taacactttccttagtgcaatatggggaagcccttcttcactctctctgctttcttgcccttgtgctatgctcactgcttcgtggcgagtggcatcgctattggctgattgactctaccatgcaangttgcatgcggagatcgccaactcgcagcaactctcatacgcgttgtgaacccgatccacgcgcgttggagtccgaagggggtcttattgaaacatggaactctcaacaccctgagctgcaatgcgccggtgtcactgtttccaaacgcaccct

SEQ ID NO: 50938 - DNA, 251 bp, Glycine max
gttcactatcctagtataccttaataaataatttaagatactatgatgagagcacggttcccattactgtacctgggacttgttttcctggcttcagtttctgtctcatttggcattgcttactgggaaaaagagaaccccaaacacaacaagtgtctccagagttgcaatagcgagagagactcgtacaggaaccaagcatgccacgctcgttgcaacctccttaaggtggagaaagaagaatgtgaaga

SEQ ID NO: 50939 - DNA, 277 bp, Glycine max
gtcgagggcctccaagtctttgttgatggaagatggtactctgtcgctcctaaagaagatgctttcgttgtcaatattggcgacacatttatggctctatcgaatgggatgttcaagagttgcttgcatagagcagttgtaaacacaaaattgtgagaaaatcacttgctttcttcctatgtccaaatagagacaaagtggtcacccctccaaaagatctaatcagctacgaaaattcaagaacatacccagatttcacatggccaagccttcttga

SEQ ID NO: 50940 - DNA, 262 bp, Glycine max
ctcgagccgtgaaattttgataaaccgcgatcacaggttgccgcaccttaaaaccggaaacaaaagcaatcgttacttgatttcaagaatctctcaatttctttctacttctttgtgtacgatttcttaagggaagaaaatcactctctgtgctggccacagacttcgtgaatcattttcttttccacttttagtttatttgctgaacactctcctatttgatataggacttcgtgtcagatttaaacttcttctgtctctt

SEQ ID NO: 50941 - DNA, 245 bp, Glycine max
cacgcatctgtcttatggcgcggagttttctcgtgccgtggagcagaagcaggtggctcagcaggaggccgagaggtcgaagtttgtggtgatgaaggccgagcaggagaggcgggcggcgattattagggcggagggagagagtgacgcggcgaactgatttcggatgccactgcgtccggcggggatggggctgattgacttcagaaggattgaggcgtcaaggaaggtcgctgcaaggttgg

SEQ ID NO: 50942 - DNA, 274 bp, Glycine max
atgttttcttatgtgagtatgagtatgacatccattggcacagcttcaaacgtcttgctgacattgacaatgaaacagagaatggtgaagagtctgacagtgatgaagactggaatgttggcaaggaatcagactccgatacagatgaagatgttgaatatgaagaagaaaatattaaaaatgcaacaatctcagccatcaagaagccatcacttagctgcaaatctgtacaagggacggttctttggacttcaaaagataggcacaaaaacga

SEQ ID NO: 50943 - DNA, 249 bp, Glycine max
ctcgagccgattaacacttccttagttcaatatggggaagccttaactctctatcttccttccctttgcttgcaactcttttcgagtgcatgctttgctattggctccagcagactaccgagtgccaattcaacagcttcaacgcgttggaccccgaccaccgcgttgagtccgaagtggtttgatccaaacatggaactctcaacaccctgagctgaaatgcgcgggggtcactgttccaaaactcac

SEQ ID NO: 50944 - DNA, 274 bp, Glycine max
aaataatttaagatactatgatgagagcacggttcccattactgttgctgggacttgttttcctggcttcagtttctgtctcatttggcattgcttactgggaaaaagagaaccccaaacacaacaagtgtctccagagttgcaatagcgagagagactcgtacaggaaccaagcatgccacgctcgttgcaacctccttaaggtggagaaagaagaatgtgaagaaggtgaaattccacgaccacgaccacgaccacaacacccggagaggga

SEQ ID NO: 50945 - DNA, 272 bp, Glycine max
tctgaccaatgttttggcgaagtctcattgtgcagaattcatcacctgacatctacaaccctcaagctggtagcatcacaaccgccaccagccttgacttcccagccctctggcttctcaaactcagtgcccagtatggatcactccgcaagaatgctatgttcgtgccacactacaccctgaacgcgaacagcataatatacgcattgaatgggcgggcattggtacaagtggtgaattgcaatggtgagagagtgtttgatggagagctg

SEQ ID NO: 50946 - DNA, 102 bp, Glycine max
ccaacaaggtagtggtattcttggcatgatattcccgggttgtcctagcacatttgaagagcctcagcaacaaggacaaagcagcaggtgccaagaccgtca

SEQ ID NO: 50947 - DNA, 258 bp, Glycine max
ctatatcctagtataccttaataaataatttaagatactatgatgagagcacggttcccattactgttgctgggacttgttttcctggcttcagtttctgtctcatttggcattgcttactgggaaaaagagaaccccaaacacaacaagtgtctccagagttgcaatagcgagagagactcgtacaggaaccaagcatgccacgctcgttgcaacctccttaaggtggagaaagaagatgtgaagaatgtgaaattc

SEQ ID NO: 50948 - DNA, 256 bp, Glycine max
caacacattaacctttctcattccccatctcctcaccttattcagccactgctaatttctagggttccgaaatggacgctggcggtaagatcaagaagggcgccggatgaagaaagggcggcggccctaagaagaagccggtttcaaggtccgtcaaggccggtctccaattccccgtcggaagaattggccgttatttgaagaaaggaaggtacgcccagcgtgtcggtaccggtgctcccgtttacttggccgc

SEQ ID NO: 50949 - DNA, 222 bp, Glycine max
ggagaatgaaaatgatggccattcctattcttctgctgggagtagaactgttaaggaacctagagttgtagttcaaaccacaagtgaaattgacatacttgatgatggatataggtggcggaaatatggcacgaacgtagttacaggcaatccaaacccaaggtatttccatcttttagattttaatagaagagtttaactgtgatgtactattggactagt

SEQ ID NO: 50950 - DNA, 259 bp, Glycine max
caaacttaattattaacacttccttagttcaatatggggaagcccttcactctctctctttcttccctttgcttgctactcttgtcgcgtgcatgctttgctattagctccagcaagctcaacgcgtgccaactcaacaacctcaacgcgttggaacccgaccaccgcgttgcgtccgacggtggtttgattcacacatggaactctcaacaccctgcgctgaaatgcgccggtgtcactgtttccaaactcaccctca

SEQ ID NO: 50951 - DNA, 241 bp, Glycine max
cttaattattaacacttccttagttcaatatggggaagcccttcactctctctctttcttccctttgcttgctactcttgtcgagtgcatgctttgctattagctccagcacgctcaacgagtgccaactcaacaacctcaacgcgttggaccccgaccaccgcgttgagtccgacggtggtttgattcacacatggcactctcaacaccctgcgctgaactgcgccggtgtcactgtttc

SEQ ID NO: 50952 - DNA, 244 bp, Glycine max
atgccacgtcactggcaagtttgatacaaaaaacattgaactaattgtgccaacctatccggctgctgccctactgctattcaacaatgctgataggttgagctattcagagattttgactcagctgaacttgggccatgaagatgttgttagattgctccattcactgtcatgtgcaaaatataagatacttatcacggagccaaacaataaaggtatatctcaaaatgacatctttgagttc

SEQ ID NO: 50953 - DNA, 257 bp, Glycine max
ttgtctttgaacactcatcaccatggccaagcttgttctttccctttgtttccttcttttcagtggctgcttcgctctgagagagcaggcacagcaaaatgagtgccagatccaaaagctgaatgccctcaaaccggataaccgtatagagtcggaaggtgggttcattgagacctggaaccctaacaacatattgagtggcttcgcccctgaattcttgaaagaagcgttcggcgtgaacatgcagatagtgagaa

SEQ ID NO: 50954 - DNA, 260 bp, Glycine max
ctcgagccgattgtctttgaacactcatcaccatggccaagcttgttctttccctttgtatccttcttttcagtggctgcttcgctctgagagagcaggcacagcaaaatgagtgccatatccaaaagctgaatgccctcaaaccggataaccgtatagagtcggaaggtgggttcattgagacctggaaccctaacaacaagccattccagtgtgccggtgttgccctctctcgctgcacccttaaccgcaatgccctt

SEQ ID NO: 50955 - DNA, 256 bp, Glycine max
cggctcgagctctactggatgatattggtatagatttacctaaagcaccaagtaattttggtgagataattggaaaactaattttggctgggggattggattgtaagctggtgagagagattctcaagaaggtggatgatggcatgttccagagagcaatatttgacagtgtggtgggggccattagatctgcatctgggcaagccgtgttggatgctcaaacatctgatattgaggcctgccagagtatgctcaa

SEQ ID NO: 50956 - DNA, 259 bp, Glycine max
ccaacgttcaaagtacgagaatttcgcattccaacgcacagcccctacgcggacaatgaatgctagtgagtgtgttgctaggggctgtgcgttggaatgcgcaattcttagtccaacgttcaaagtacgagaatttcaggtcaacgaaagccttcctttctcgatttctctttcatggaaaagctctggtccagatgcacaggacaatggatcagaaaatcagcagagttcccttgtttttcctaagggtaatcccata

SEQ ID NO: 50957 - DNA, 245 bp, Glycine max
gtgcggtttcctttgttggtgttgctgggaactgttttcctggcatcagtttgtgtctcattaaaggtgagagaggatgagaataaccctttctacttgagaagctctaacagcttccaaactctctttgagaaccaaaacggtcgcattcgtctcctccagagattcaacaaacgctccccacaacttgagaaccttcgagactaccggattgtccagtttcagtcaaaacccaacacaatcct

SEQ ID NO: 50958 - DNA, 186 bp, Glycine max
cacccaacaccctccttctccccaaccatgctgacgctgattacctcatcgttatccttaacgggactgccattctttccttggtgaacaacgacgacagagactcctacagacttcaatctggtgatgccctgagagtcccctcaggaaccacatacaatggggcaaccctggaaaaaagggaaa

SEQ ID NO: 50959 - DNA, 242 bp, Glycine max
cttttggataattgtagtattaaggtacttgtaattctctttgccaatgatggaagcttttaatgtgccaggtggaccagcttatttttgaggaattaatgcgtgaaagatttcctaaactggttaatcatctggattacttgggagtgcaggtggcatggatatctggatcttggtttctatcaatctttgtaaacataattccttgggaaagtgttcttcgagtttgggatgtgctacta

SEQ ID NO: 50960 - DNA, 259 bp, Glycine max
gtcattgacaaagagaggagaggagactatttgggaaaaactgttcaggttgtccctcatatcactgatgctattcaagattggattgaaagagtggcccacatacctgtagatggaaagaccagtccagctgatgtatgtgtcatagaattgggtggaaccataggagatattgagtccatgccatttattcaggcattaggacaattctcatacagagtaggtgctggcaacttttgcttagttcatgtcagccttg

SEQ ID NO: 50961 - DNA, 171 bp, Glycine max
atttgaaaagaatggtcaaactcaggcactaattcagtaccctgatatcataacggcatcagctgctagagaagctctagaggggcattgcatatatgatggtggctattgtaagcttcatctatcatactctcgtcatactgatctcaatgtaaaggctttcagtgacaa

SEQ ID NO: 50962 - DNA, 201 bp, Glycine max
agacgtttgagaagccacaacagcaatcaagcagaagaggctcaaggtcgcagcagcaactacaagacagtcaccagaagattcgtcacttcaatgaaggagacgtactagtgattcctcctggtgttccttactggacctataacactggcgatgaaccagttgttgccatcagtcttcttgacacctccaacttcaaca

SEQ ID NO: 50963 - DNA, 238 bp, Glycine max
cacacttccttagttcaatatggggaagcccttcactctctctctttcttccctttgcttgctactcttgtcgagtgcatgcattgctattagctccagcaagctcaacgagtgccaactcaacaacctcaacgcgttggaacccgaccaccgcgttgagtccgacggcggtttcattcaaacatggaactctcaacaccctgagctgacatgcgccggtgtcactgtatccaaactc

SEQ ID NO: 50964 - DNA, 251 bp, Glycine max
catttgcacaatgagacttcgccaaaacattggtcagaattcatcacctgacatctacaaccctcaagctggtagcatcacaaccgccaccagccttgacttcccagccctctggcttctcaaactcagtgcccagtatggatcactccgcaagaatgctatgttcgtgccacactacaccctgaacgcgaacagcataatatacgcattgaatgggcgggcattggtacaagtggtgaattgcaatggtg

SEQ ID NO: 50965 - DNA, 247 bp, Glycine max
ctttataaacagatgtataaaaataacatatttcatttagcttctatatgctcactataactagttatttcggttttttactagtggttttaattataacctcatctctatacattggtctgagtaaaatacgacttatttgatttgtaattttgagaggaatagtcaattttggaataagacattcattagttccttactgtgtcaatttacaattctcggtcgttgagattcatgatcaatacag

SEQ ID NO: 50966 - DNA, 243 bp, Glycine max
gtggaatcatcaaagcggatataggcattaaagatggtctcattgtttcaattggaaaagcaggaaatccagacatcatggatgatgtattttttaatatgatcattggggctaatattgaagttattgctggagaagggttgattgtaacagcaggggctatagattgtcacgtgcattatatatgccctcaattagtagatgaggccatatcaagcggcatcacaacattagtgggaggtg

SEQ ID NO: 50967 - DNA, 252 bp, Glycine max
gccgtttctattattgacaccaacagcttggagaaccagctcgaccagatgcctaggagattctatcttgctgggaaccaagagcaagagtttctaaaatatcagcagcagcagcaaggaggttcccaaagccagaaaggaaagcaacaagaagaagaaaacgaaggaagcaacatattgagtggcttcgcccctgaattcttgaaagaagcgttcggcgtgaacatgcagatagtgagaaacctacaaggt

SEQ ID NO: 50968 - DNA, 247 bp, Glycine max
gtcaaatagtcgaaactcatcgttcataagacgaggggatactcggcggaataggagtcctgtgcattcagggttatggatatctattgagctggtcctactcctgagccagattgttgcatctataattgttttgtctttgtcaaggcatgaacatccgcgtaccccgttgtttcaatggatcattggttatgcttctggatgtgctgctaccctccctctactttattggcggtattatcatcat

SEQ ID NO: 50969 - DNA, 247 bp, Glycine max
tatatatactatgatgagagtgcggtttcctttgttggtgttgctgggaactgttttcctggcatcagtttgtgtctcattaaaggtgagagaggatgagaataaccctttctacttgagaagctctaacagcttccaaactctctttgagaaccaaaacggtcgcattcgtctcctccagagattcaacaaacgctccccacaacttgagaaccttcgagactaccggattgtccagtttcagtca

SEQ ID NO: 50970 - DNA, 241 bp, Glycine max
gaccgagctagctagctagcaagcaagcacagagatggaggcaaagcgaggccatgccctcatgtgcttggcacgtgtttcactcttcctctgcgctctaaccctatccgctgctcacggaagcaccacggttcaagacatcgcgagaaagttgaaactcggggacaacgagcttctgcgcacggagaagaagttcaaggttttcatggagaattacgggaggagctactccacagaggag

SEQ ID NO: 50971 - DNA, 250 bp, Glycine max
tctcgagccgaatcggctcgagattcacccaacaacgttgcttattcacgcaactaaataaatcctgaagagtactatcttatttgctctctttctagtttgtgccttcaccatctcatacctgccttcagcaccgctcagttcgtgctcgacactgatgatgatcctcttcaaaacggtggcacatactatatgttgccagttatgagaggaaagggcggtggaatagaagtagattcaactggaaaag

SEQ ID NO: 50972 - DNA, 250 bp, Glycine max
caatatcctagtataccttaataaataatttaagatactatgatgagagcacggttcccattactgttgctgggacttgttttcctggcttcagtttctgtctcatttggcattgcttactgggaaaaagaaaccccaaacacaacaagtgtctccagtgttgcaatagcgagagagactcgtacaggaaccaagcatgccacgctcgttgcaacctccttaaggtggagatagaagaatgtgaagaagg

SEQ ID NO: 50973 - DNA, 244 bp, Glycine max
gttgttgccgtttctattattgacaccaacagcttggagaaccagctcgaccagatgcctaggtgattctaccttgctgggaaccaagagcaagagtttctaaaatatcagcaagagcaaggaggtcataaagccagaaaggaaagcatcagcaagaagaagaaaacgaaggaggcagcatattgagtggcttcaccctggaattcttggaacatgcattcagcgtggacaagcagatagcgaa

SEQ ID NO: 50974 - DNA, 244 bp, Glycine max
ttcatggcgaacccagaaaccgacgaagtgttcgcgaactgagtttgcttcctctcagaaactcggaactcggtgctgactcggacggtgctggtggtgatgacgtggcagaaccttcttgttgtgaaagcctgcgtctttcgctaagactctgactcagagcgacgccaacaatggtggggtgttttcggttccgcggtactgcgcggagacaattttcccgcgtctggactacacggcggag

SEQ ID NO: 50975 - DNA, 246 bp, Glycine max
gttcaatatcctagtataccttaataattaatttaagatactatgatgagagcacggttcctattactgttgctgggacttgttttcctggcttcagtttctgtctcatttggcattgcttactgggaaaagagaaccccaaacacaacaagtgtctccagagttgcaatagcgagagagactcgtacaggaaccaagcatgccacgctcgttgcaacctccttaaggtggagaaagaagaatgtg

SEQ ID NO: 50976 - DNA, 241 bp, Glycine max
ctccattggtccttcaacactcatcagtcatcaccatggccaagctagtttcttcccactgtcacctgcttttcagtggctgctgcttcgctttcagttccagagagcagcctcagcaaaacgagtccagatccaaaaactcaatgcgctcaaaccggataaccgtatagagtcagttggagggctcattgagacatggtacgctaacaacaagccattccagtgtgccggtgttgccctc

SEQ ID NO: 50977 - DNA, 270 bp, Glycine max
cttactggacctataacactggcgatgaaccagttgttgccatcagtcttcttgacacctccaacttcaacaatcagcttgatcaaaaccccagagtattttaccttgctgggaacccagatatagagcacccagagaccatgcaacaacagcagcagcagaagagtcatggtggacgcaagcaggggcaacaccagcagcaggaggaagaaggtggcagtgtgctcagtggcttcagcaaacatttcttagcacaatccttcaacacca

SEQ ID NO: 50978 - DNA, 247 bp, Glycine max
tgcagaccgagctagctagctagcaagcaagcacagagatggaggcaaagcgaggccatgccctcatgtgcttggcacgtgtttcactcttcctctgcgctctaaccctatccgctgctcacggaagcaccacggttcaagaagaagcgagagagatgaaactcggggacaacgagcttctgcgcacggagaagaagttcaaggttttcatggagaattacgggaggagctactccacagaggagga

SEQ ID NO: 50979 - DNA, 266 bp, Glycine max
cttcatcttcagcaacaccacttcccgtgaagaccatgacatgttccaccagcagcaccatcctgactactacctcttccacttcttgggccatgttgaagtcagatgctgaggaagatgcagagaaaaaccattgcaaccgatacatgcatgaccaacttgatgcaactttgtcttccaccgcttccatggagctttctcaacagcaaaaccctgatcctggccttggtggcactgttggagagtgcatggatgatgttatggac

SEQ ID NO: 50980 - DNA, 269 bp, Glycine max
acggtgccttgacaccatcgacttctgctacaaaccttgcaagtccagtgcatgaggatgatggactcggatttagtcatcagaaactctctgacttgcttcaagccctagaggcctccatgacttttgtgtgggggcgacgactagaacgtggtgtagaaagctcgcaatggccagctgtttgcttgtggcttatcttgggcggtactgtcgaaagtgaagaaagaggttaagaagaaaggctcttcatcttctaaggatggcactaa

SEQ ID NO: 50981 - DNA, 254 bp, Glycine max
cttaattattaacacttccttagttcaatatggggaagcccatcactctcactcttactaccctttgattgctactcatgtcgagtacatgctttgctattagctccagcaagctcaaagagtaccaactcaacaacgtcaacgcgttgaacaccgaccaccgagttgagtccgaaggtggtttgattcatacatggaactctcaacaccctgagctagattgcgccggtgtcactgtttccaaactacatctc

SEQ ID NO: 50982 - DNA, 246 bp, Glycine max
tcaatatcctagtataccttaataaataatttaagatactatgatgagagcacggttcccattactgttgctgggacttgtattcctggcttcagattctgtctcatttggcattgattactgggatcaagagaaccccagacactgcatgtgtctccagcgatgcaatagcgagtcagactcgtatagggaccatgcttgccacgctcgttgcaacctccttaaggtgcagatagaagaatgtga

SEQ ID NO: 50983 - DNA, 245 bp, Glycine max
gcaagatagctgccgcaagcagctccagggggtgaacctcacgccctgcgagaagcacatcatggagaagatccaaggccgcggcgatgacgatgatgatgatgacgacgacaatcacattctcaggaccatgcggggaagaatcaactacataaggaggaacgaaggaaaagacgaagacgaagaagaagaaggacacatgcagaagtgctgcacagaaatgagcgagctgagaagccccaaat

SEQ ID NO: 50984 - DNA, 246 bp, Glycine max
aaagggcatttggatatgttttacttcctcttagcagcactcaccgcagctgatcttgtaatatatgtactgatggctaggtggtataaatatatcaaatttcaaggaaacaatgagaatgacacaacaaagaagaccctgaagtaggagtgtagagaaattacaattttcagggtatagtgggctctttgttgtgatactagagaaattcaattttgcatttcgcctagtggagcaaagatacta

SEQ ID NO: 50985 - DNA, 163 bp, Glycine max
attgtctttgaacactcatcaccatggccaagcttgctctttccctttgtgtccttcttttcagtggctgcttcgctctgagagagcatgcacagcgaaatgagtgccagatccacaagctgaatgtcctcataccggataagggtatagagtcgtaaggtgg

SEQ ID NO: 50986 - DNA, 240 bp, Glycine max
agggtctaataaaatgagtatggtacatatctatttgaagattgttagtcaaaaagaatgggcaagagagaagcatatttagggcaatgacattcttaaagaaattaaaaagctaacagcaaaaacaattaataaagatgagtttgaagaacaacatggtggtgctaaaggtgtgtttgttgcttcttttccttgtgggggttacagctgcacgcatggaactgagcttcttcaaaagtg

SEQ ID NO: 50987 - DNA, 244 bp, Glycine max
gcggtttcctttgttggtgttgctgggaactgttttcctggcatcagtttgtgtctcattaaaggtgagagaggatgagaataaccctttctacttgagaagctctaacagcttccaaactctctttgagaaccaaaacggtcgcattcgtctcctccagagattcaacaaacgctccccacaacttgagaaccttcgagactaccggattgtccagtttcagtcaaaacccaacacaatcctt

SEQ ID NO: 50988 - DNA, 241 bp, Glycine max
cttcatttgacgaagagtgagagagtcttatctgtcgtctctgatctctgatcgcatcttcattccgaaaatggctgtttcggctatcagtggagcgaggctaactctagggatgtctctttcctgttccacgcgatgtataagatgatggatggccgcatctatcgacctctagacagctaagatactcagtcttaggaggtccgaggaagctttcgctgtggccaaggattgatgtcca

SEQ ID NO: 50989 - DNA, 246 bp, Glycine max
gggaggggtgctgatcgttccacaaaactttgcggtggctgcaaaatcccagagcgataactttgagtatgtgtcattcaccagccttgacttcccagccctctggcttctcaaactcagtgcccagtatggatcactccgcaagaatgctatgttcgtgccacactacaccctgaacgcgaacagcataatatacgcattgaatgggcgggcattggtacaagtggtgaattgcaatggtgagag

SEQ ID NO: 50990 - DNA, 188 bp, Glycine max
cattgtctttgaacactcatcaccatggccaagcttattctgtcccttagtgtccttctattcagtggctgcttcgctctgagagagcaggcacagcaaaatgagtgccagatccaaaagctgaatgccctcaaaccggataaccgtatagagtcggcaggtgggttcattgagacctggaaccctaa

SEQ ID NO: 50991 - DNA, 267 bp, Glycine max
gcaaaggattatggaagttatgctctctccttcacatcccttgccttatcagtaaggtacccttttgcatagtcaagggtgtcagaccccgcaagctggttcccagaaacgtagttgtaaatccaagataaagcagcaatggcagccacaccacagcccccagagaacaaaaagccagatgcaaccaggaacagcacaaacgcagcagggacaaggatggggctgagttcaatatcctagtataccttaataaataatttaagatac

SEQ ID NO: 50992 - DNA, 269 bp, Glycine max
cttctcccatttcctctcagaaccctcgatcactcccacgcgctcctatatcctctccttcaccgtcgctctctccaacgatcacaacaacatcgtcatcccatggcaaacgccgcatctggtatggcagtccatgatgactgcaagttaaggtttttggagctgaagacaaagaggacacaccgtttcatagtttttaagattgaggagcagcagaagcaggtcattgtggagaagcttggtgagccagcccaaggctatgaagattt

SEQ ID NO: 50993 - DNA, 258 bp, Glycine max
  unsure (1)..(258): unsure at all n locations
gaacaccacgcgcctccaacaactcatgtggccantaaacgagctaagctccccctacggcgacaccgaccagaaactggcctcgtacttcctccaagccttcttcagccgcatccaccaagccggggaccgaacctaccgaaccttagcttcggcctcggagaaaacatgctccttcgaatcgacccgcaaggcggtgctcaagttccaggaggtgagtccctaggacaaccttcggccacgtggcgtccaatggcg

SEQ ID NO: 50994 - DNA, 258 bp, Glycine max
ctggaaagcgtgaacaagacgaggacgaggacgaagatgaagataaacctcgtcctagtcgaccaagccaaggaaagcgtgaacaagaccaggaccaggacgaggacgaagatgaagatgaagatcaacctcgcaagagccgcgaatggagatcgaaaaagacacaacccagaagacctagacaagaagaaccacgtgaaagaggatgcgagacaagaaacggggttgaggaaaatatctgcaccttgaagcttcacg

SEQ ID NO: 50995 - DNA, 246 bp, Glycine max
catagtagtgttggtgggttgcaaagatgcttgggggtcttctccataggggtcataagataaaagggacagtggtgttgatgcgcaagaatgtgttggacgtgaatagcgtaaccagcgttgggggaattattggtcaagccaacggaaaagggaaacttggaaaggctacctttttggaaggtatcattacttcattgccaactttgggagcaggccaatctgcattcaaaattaattttgaat

SEQ ID NO: 50996 - DNA, 243 bp, Glycine max
tcaaaccttgctctatactacacagtacacacactagaagaataatggcttccatcctccactactttttagccctctctctttcttgctcttttcttttcttcttatccgactcagtcacccctacaaaaccaataaaccttgttgttctacccgttcaaaatgatggttccacagggctccattgggccaacctccaaaaaagaacccctctaatgcaagtaccagtcctggtggacctca

SEQ ID NO: 50997 - DNA, 250 bp, Glycine max
caaaacaaccagaggaagatgatgtgggtttcgtattttctgtggactgtagatcccgcttgaatcctccgattcctgcaacgtattttgggaactgcgtcgcggggcaaaaggttgtggctgtgacaaagaacttggttggaataagcgatggttttatcagtgctttggaagggataagcgaggctttgaatatagtgaagggtgagggagtgctgagtggagcagaaacttgggtttcgttaatgct

SEQ ID NO: 50998 - DNA, 253 bp, Glycine max
gtattaaagaatttaagatatactatgatgagagcgcggttcccattactgttgctgggagttgttttcctggcatcagtttctgtctcatttggcattgcgtattgggaaaagcagaaccccagtcacaacaagtgcctccgaagttgcaatagcgagaaagactcctacaggaaccaagcatgccacgctcgttgcaacctccttaaggtggaggaagaagaagaatgcgaagaaggtcaaattccacgac

SEQ ID NO: 50999 - DNA, 259 bp, Glycine max
ctcaagctcaacagtcctacttgcaagggttcagcaagaatattctagaggcctcatacgacaccaaattcgaggagataaacaaggttctgtttggtagagaggaggggcagcaacaaggggaggagaggctgcaagagagtgtgattgtggaaatctcaaagaaacaaattcgggaactgagcaaacatgccaaatctagttcaaggaaaaccatttcttctgaagataaacctttcaacttgagaagccgcgaccc

SEQ ID NO: 51000 - DNA, 253 bp, Glycine max
  unsure (1)..(253): unsure at all n locations
cgaaaacagtgttccaaaatccacacacactctctctcntcatggcgttgaacaatggcgtccccgccaccggcaccggcctcatcgtcagcttcggtgagatgctcatcgacttcgtccccaccgtctctggcgtgtccctggccgaggcccctggcttcctcaaggaaaacggcgttcgcggcgacggcatcaactttgaccagggcgcacgcaccgccctggccttcgtgacctaacgcgccgacgggga

SEQ ID NO: 51001 - DNA, 137 bp, Glycine max
ctcgagccgcaaggtgagcgtgatggttcaaattaatatgttgattatcaacctggttctctcaacaccacagaccaactcataaaggatttggactattacgacattgttttccacatagtagatatgccctatgc

SEQ ID NO: 51002 - DNA, 252 bp, Glycine max
aaatgaccaagttcacaatcctcctcatctctcttctcttctgcatcgcccacacttgcagcgcctccaaatggcagcaccagcaagatagctgccgcaagcagctccagggggtgaacctcacgccctgcgagaagcacatcatggagaagatccaaggccgcggcgatgacgatgatgatgatgacgacgacaatcacattctcaggaccatgcgggagcgaatcaactacataaggaggaacgaaggaa

SEQ ID NO: 51003 - DNA, 255 bp, Glycine max
  unsure (1)..(255): unsure at all n locations
gtgcggtttcctttgttggtgttgctgggaactgttttcctggcatcagtttgtgtctcattaaaggtgagagaggatgagaataaccctttctacttgagaagctctaacagcttccaaactctctttgagaaccaaaacggtcgcattcgtctcctccagagattcaacaaacgctccccacaacttgagacccanncgagactaccggattgtccagtttcagtcaaaacccaacacaatccttctccccca

SEQ ID NO: 51004 - DNA, 254 bp, Glycine max
gattcagtagccactgatgtgaaacaggctatcaaggacaacattttaaatcaaatcaccaatggttctcaaatgataaaactggagaaggatcctcatgctgcatttgctttaattattgatgggaaaactctgacatatgctctagaagatgatatgaagctcctatttttgggattggctgttgattgtgcatctgtcatctgctgtcgtgtgtctcccaagcaaaaggcattggtaaccaggttagtgaa

SEQ ID NO: 51005 - DNA, 244 bp, Glycine max
gttctgcaagtgaaggaattattattagtgttagccctaaacttcaccttcaaccatgaccacagtgccaccacacagtgtccaagtgcacacaacaacacaccgctacgaagccggcgtcgtcccgccggctcgttttgaggcgccgcgttacgaagccggcatcctcctgctcctggcaggactgaccctggctggaactctcaccgggctggtggtggcaacaccgctcttcatcatcttc

SEQ ID NO: 51006 - DNA, 257 bp, Glycine max
caatttcttattttactatgttcaactctatgtattcctctatccgtagagtacattgaatgtacagaaatggctataacagagtttctgttattcatattaacagctactctaggaggaatgtttttatgcggcgctaacgatttaataactatctttgtagctctagaatgtttcagtttatgttcctatctactatctggatataccaagaaagatgtacggtctaatgaggctactatgaaatatttactcat

SEQ ID NO: 51007 - DNA, 258 bp, Glycine max
ataaaattcttccaccaagttatggagcgacttgtgttgcttcttttctccctcttaggtctctcttctagttccagcatatcaactcatcgttccatattggaccttgacctaaccaagtttaccacacagaaacaggtgtcttcactgttccaactatggaagagtgagcatggacgtgtctaccataaccacgaagaagaggcaaagagacttgagattttcaagaataacttgaactatatcagggacatgaat

SEQ ID NO: 51008 - DNA, 256 bp, Glycine max
ccgaggtaagaggcttagcaaggagaatcatcgtagaaaagaagaaagagtttcaagagaaagaaactctggacaccttggatctgttatcacggtttttgtgctctggccactccgacgaagagttcgttatggatattatcataagcttcattttagcggggagggacactacctccgcggcgctaacgtggttcttctggctgatttccaagcacccgaaagtggaggaggaggtggttaaggaggttatgga

SEQ ID NO: 51009 - DNA, 133 bp, Glycine max
  unsure (1)..(133): unsure at all n locations
ctcgagccgaatcggctcgagtattagtgcaataaaattggttgcgatgactangaatacgcaccataaccttaaaagtagtttctagggtacataggaagtagtttaaaggttatggttcttattattagtg

SEQ ID NO: 51010 - DNA, 132 bp, Glycine max
gcatcatctcaaagaaattaagagagtgttcattgttcctcactgaccaagccatggcgatgagaaccaaactttctttagctatctgtttctattttctgttagccttattatcaaacctagcctttggca

SEQ ID NO: 51011 - DNA, 224 bp, Glycine max
ggctcgaggtcgcagaagcagcagctacaggtcagtcaccagaagattcgtcacttcaatgaaggaggtgtactcgtgattcctcctggcagttccatactcgagctataagactggcgatgaaccagttgttgccatcagtcttcttgacacctctaactgcaataacgagcttgatcaaacccctagggtagtttaccttgctgggataccagatatagagt

SEQ ID NO: 51012 - DNA, 219 bp, Glycine max
  unsure (1)..(219): unsure at all n locations
gcgtaaaactgtttctcttctggaagaatatttcaatgtccggcttttggacgaggcattacagtgtgtggaggaactaaaagctccagcttattaccctgagtttgtcaaggaagctatttcccttgctctagantaaagntcgccaatcgcctaaccatntgccaaacgtattanatctgtccatcaagaagangctctcagccagagacagatgga

SEQ ID NO: 51013 - DNA, 203 bp, Glycine max
  unsure (1)..(203): unsure at all n locations
tctctccattgtctttgaacactcatcaccatggccaagcttgttctttccctttgtttccttcttttcagtggctgcttcgctctgagagagcaggcacagcaaaatgagtgccagatccaaaagcataantcccataaaccggaataccgaactgagacggaaggcgtggatctatagaccagtaacccaatcaacaagcc

SEQ ID NO: 51014 - DNA, 118 bp, Glycine max
cagagacagagcaagcgttcttaagcgccatccttgagcaaccaattagtgtctctgattctgtactctcatctgacattattagagtttcatatccgtcaattgtaaccttgtcttg

SEQ ID NO: 51015 - DNA, 229 bp, Glycine max
  unsure (1)..(229): unsure at all n locations
ctcgagccgaatcggctcgagcgtgataaaaccacccacggacgaccagcaacaaagaccccaggaagaggaagaagaagaacgaggatgagaagccacagtgcaagggtaaagacaaacactgccaacgcccccgaggaagccaaagcaaaagcagaagaaatggcattgacgaaccatagtcaccantagacatcgccacaacagttgccagacatcaataccatac

SEQ ID NO: 51016 - DNA, 176 bp, Glycine max
  unsure (1)..(176): unsure at all n locations
cttaattattaacacttccttagttcaatatggggaagcccttcactctctctctttcttccctttgcttgctactcttgtcgagtgcatgctttgctattagctccagcaagctcaacgagtgccaacataacaaccttaacgcgnttgaacccgaccaccgcgttgtagccgaa

SEQ ID NO: 51017 - DNA, 240 bp, Glycine max
gttcaatatcctagtataccttaataaataatttaagatactatgatgagagcacggttcccattactgttgctgggacttgttttcctggcttcagtttctgtctcatttggcattgcttactgggaaaaagagaaccccaaacacaacaagtgtctccagagttgcaatacgagagagacttgtacaggaaccaagcgatccacgcatgattcaaccactcttaggctgagaaagaag

SEQ ID NO: 51018 - DNA, 236 bp, Glycine max
  unsure (1)..(236): unsure at all n locations
tctcgagccgattcggctcgaggttcaatatcctagtacaccgtattcaagaatttaagatatcactatgatgagagcgcggttcccattactgttgctgggagttgttttcctggcatcagtttctgatctcatttgcgattcgaaattggaaaagcagaaccccagacaaacaagagtcactgaagnagcaatatcgagaaagacactaataggaaccaagcaagctacgcacg

SEQ ID NO: 51019 - DNA, 248 bp, Glycine max
  unsure (1)..(248): unsure at all n locations
gaagcaaagcaatggctacttcaaagttgaaaacccagaatgtggttgtatctctctccctaaccttaaccttggtactggtgctactgaccagcaaggcaaactcagcggaaactgtttctttcagctggaacaagttcgtgccgaagcaaccaaacattaatcataaggagacgcnantgngaccatcacgggaaagntacaacataantaggattacgaaaacggcaccccaaaacccacgactc

SEQ ID NO: 51020 - DNA, 210 bp, Glycine max
  unsure (1)..(210): unsure at all n locations
ggcttatggaggtggagggtttgcaattagttaccctttggcagtggcattggagagaatgcaggataagtgccttcagaggtaccctgcattgtttggctcagatgataggatccaggcttgtatggcagagcttggtgtccctctcactaaggagattggctttcacgntttangatgantgcaacgagntttgacatcaagcagcac

SEQ ID NO: 51021 - DNA, 246 bp, Glycine max
gatacactaactacacccttgagaccctgcaaagtggcaagcgtcagtgcaaagcgccttgcaaaaggagctcggtttgcctgtccgtgaggatgttccgttacttggattcattggaaggctggatcaacagaaaggcattgatctcatagccgaagcaattccttggatagtgggccaggatgtgcagacatattgctgatgccatcaagatttgagccatgtggattgaatcaactctatgcc

SEQ ID NO: 51022 - DNA, 245 bp, Glycine max
caacgtgtgcgcttttcttctctttacccgttgaaacatccttagttttcaattctgaaatcttgattctgaattcatcacaatgaattcgtcaactacagtgaggaagttgcaggtggtgtcccctgttcctgcggacatagacattgcaaactccgttgaaccagttcatatctcccagattgccaaagagctcaaccttagtcccaatcactatgacctttacggtaaatacaaggctaagg

SEQ ID NO: 51023 - DNA, 247 bp, Glycine max
ctttgaacactcatcaccatggccaagcttgttcgttcccattgtctccttcttttcagcggctgcttcgctctgagagagcacgcacagcaaaatgagtgccagatccaaaagctgaatgccctcaaaccggataaccgtatagagtcggaaggtgggttcactgagacctggaaccctaacaacaagccattccagtgtgccggtgttgccctctctcgctgtacccttaaccgcaatgctcttc

SEQ ID NO: 51024 - DNA, 248 bp, Glycine max
caatgttgcagtcaaggatctcaagcgtggttttgttgcatccaactccaaggacgaccctgccaaggaagctgccaacttcacatcccaagtcattatcatgaaccatcctggccagattggtaatggatacgcaccagtccttgactgccacacttctcacattgctgtgaagttttctgaaatcttgaccaagattgacaggcgatctggtaaggagcttgagaaggagcccaaatttttgaaga

SEQ ID NO: 51025 - DNA, 249 bp, Glycine max
gcagctcgatgacggccgcaccctcgccgactacaacatccagcaggaatcaacccttgacctcgtcctccgtctccgtggtggcatgcagatcttcgttaagaccctcaccggcaagactattaccgtagaagtcgaaagctccgacaccatcgacaacgtcaaggctaagattcaggacaaggagggaatccccccagaccagcagaggctgatcttcgccgggacgcagctcgaggacggacgcac

SEQ ID NO: 51026 - DNA, 239 bp, Glycine max
ttgcagtcaaggatctcaagcgtggttttgttgcatccaactccaaggacgaccctgccaaggaagctgccaacttcacatcccaagtcattatcatgaaccatcctggccagattggtaatggtacgcaccagtccttgactgccacacttctcacattgctgtgaagttttctgaaatcttgaccaagattgacaggcgatctggtaaggagcttgagaaggagcccaaatttttga

SEQ ID NO: 51027 - DNA, 267 bp, Glycine max
cgttctagatcgcgggcggccgcccggatctagaactagtggtgatccatgggcgatgggccatgcttggagcactaggatgcatcaccccagcggtgctagagaagtggttgagagtggacttcaaggcgccagtgtggttcaaagctggagcccaaatattctccgaaggtgggcttgactatttgggaaacccaaaccttgtccatgcacaaagcatcctggcagtgctgggcttccaagttatcctaatgggccttgttgaag

SEQ ID NO: 51028 - DNA, 268 bp, Glycine max
ctcgagccgattgtaaagatggtatttttcttgaattggttttaactcaacagaggttagagaaacatccacacaaggtaggctatctttacaatcctttctgctggcagacttatggtgaattgaaaactccaacagtcccaccaattgattgtctacaaatcgggaagccaacaaacaatcggattcagacagatcatgatttatgttgatcagatatgaattcaaaattcaaatgcttagcttgctagctaaagtatgtatattg

SEQ ID NO: 51029 - DNA, 267 bp, Glycine max
cgtctgttgagggtaacttatcaagtttgggaacaaataaaactggagagagaagacgtgccaaagcagagaaaactatcactttgcaagttcttagacaatattttgctggaagccttcaagatgctgccaagaatattggtgtttgtactacaactttgaaaaggatctgccggcaacatgggataaagcgttggccttctcgaaagatcaaaaaggttggtcactctctacaaaaacttcaacttgtcatcaactcagttcaag

SEQ ID NO: 51030 - DNA, 268 bp, Glycine max
ttacattatccgtggaagatgcgtagcgtcttggcttgttaagcttctttcttctgtctaaagcgtacatgttccatggaactgtcagagtacctgctactctgaaatatcaacacttgctcaaactccacggagcactctcttcaaagcagatttcttgaattacgaatctctttgctcagcaatctctggatgcactgcagtgttccatctggcttgacctgtatcctcaattattgttcccaaccctcaggtagagacgattgag

SEQ ID NO: 51031 - DNA, 268 bp, Glycine max
gactggaccgactgccccttcgcccatccgggtgaaaaggcacgccgccgtgacccacggcggtatcactactcaggaacagtctgtcctgagtatccccgcggagggtgcagccgtggcgatgcatgcgaatacgcccatggcgtgttcgaatgctggctgcacccttccaggtacagaacggaggcctgtaaggatggcaggaactgcaagcgaaaggtgtgttttttcgcacacacccctcgcccagctgagaattttgccggta

SEQ ID NO: 51032 - DNA, 265 bp, Glycine max
ctgtaacaaatttatcaagtctgatagtttctcctgatgatgtacgtagggatattaggtcaaaaacatttctggaaagcaagaagaaaaattgccaatcaacagagtgtgtttgcagtccaagtgtttgaattgcacagactgattaaggtccaacagctaattgctgcatcaccggatgttttgcttgaagatggtgctttcatgggaaaatttcctttgatgggttctcctcctaaaaataaaaatatctcattggaagtgg

SEQ ID NO: 51033 - DNA, 258 bp, Glycine max
agcacatccctcacagtggcatgccttgtggatgggtgcaattcagatcttagcaatagtagagattatcataggcgccataaggtgtgtgagctccattccaagaccccagaggtcacaattggtggcttcaagcaaaggttctgccaacaatgtagcaggttccattcgctggagcaatttgatgaaagaaaaagaagctgcagataacgtttagatggacacaatagaaggagaagatagcccagccagaacctc

SEQ ID NO: 51034 - DNA, 242 bp, Glycine max
  unsure (1)..(242): unsure at all n locations
cttccatagccccccaaaaatgaagagcaccatcttctttgcgctctttctcttttgtgccttcaccacctcatacctaccttcagccatcgctgatttcgtgctcataatgaaggtaaccctcttgaaaatggtggcacatattcatatctatgtcatgacattaacatgcagtttggtgtgaatagagatgcagtccaccaacggggaaatgcaaagatagccctnctacnnactgtggt

SEQ ID NO: 51035 - DNA, 224 bp, Glycine max
gaaggaatctgattccttcatcagttgtgtatgattaagttatgtatttggagtggctgaatgtacttgtatttgtcattaataaaccatgtttgtgtaaaaaaaaaaaaaaaaaaaaaaaaaaaaaaaaaaaaaaaaaaaaaaaaaaaaaaaaaaaaaaaaaaaggaggaccccacaccctaacaacaagccaccccaggatattgttcatggactctttcac

SEQ ID NO: 51036 - DNA, 231 bp, Glycine max
atccgttaaacgtaaccatagatcagggctttttcatgaattacttcagatccgttaaacaactgccttgtttgttgattctattgccgtggattagggtttttattcacgagattgcttcagatccgtacttaagattacgtaatggattttgattctgatttatctgtgattgttgactcgacagatgcagatcttcgtcaagaccctcaccggcaagaccatcaccct

SEQ ID NO: 51037 - DNA, 229 bp, Glycine max
aaatgaccaagttcacaatcctcctcatctctcttctcttctgcatcgcccacacttgcagcgcctccaaatggcagcaccagcaagatagctgccgcaagcagctccagggggtgaacctcacgccctgcgagaagcacatcatggagaagatccaaggccgcggcgatgacgatgatgatgatgacgacgacaatcacattctcaggaccatgcggggaagaatcaa

SEQ ID NO: 51038 - DNA, 220 bp, Glycine max
tcaatatcctagtacaccgtattaaagaatttaagatatactatgatgagagcgcggttcccattactgttgctgggagttgttttcctggcatcagtttctgtctcatatggcattgcggattgggacaagcagaagctcagtcacaagaagtgcctccgaagttgctatagcggagaagagtcatacagggaccatgaatgcgacgctcgtagcaact

SEQ ID NO: 51039 - DNA, 228 bp, Glycine max
aatatggggaagcccttcttcactctctctctttcttccctttgcttgctactcttgtcgagtgcatgccttgctattacctccagctagttcaacgagtgccaactcaacaacctcaacgcgttggaacccgaccaccgcgttgagtccgaaggcggtcttattgcaacatggaactctcaacaccctgagctgcaatgcgccggtgtcactgtttccaaacgcacc

SEQ ID NO: 51040 - DNA, 247 bp, Glycine max
gggatccttgtacacaggaaacagcaacattggaaagtgagggagttaagattgagcggactgaaaatgtggggcaggttgtaatgtcacttgaagtggatagacagcgcaacaggctccaagcggctgaggcaatggcccaggcaagcggtgcagctgaacagggagacctaagcagagccgtacttatccttgagaactgtagaaagatgctttcagagactgtttcggccaaatctcacgaccg

SEQ ID NO: 51041 - DNA, 238 bp, Glycine max
ggcggggctaccgctgagtttaagcatatcaataagcggaggaacagaaactaacaaggattcccttagtaacggcagcgacgaagatcacattctcatcaggaccatgccgggaagaatcaactacatcaggaagaaggaaggaaaagaagaagaagaagaaggacacatgcagaagtgctgcagcgaaatgagcgagctgaaaagccccatatgccagtgcaaagcgctacagaag

SEQ ID NO: 51042 - DNA, 223 bp, Glycine max
  unsure (1)..(223): unsure at all n locations
caagcttttctttctctagttctttaattttctgatgttagcaaattaaaatagtagtgttatgcggtaagtgatgacaaagatgttgtcagttccacgggtctcactactcctnaatatangatcatgacattacagaagatgattagtagtctagctgagagtcaatgatctgaacgtcaacaacgtcgctgatctaactatacgacctgttagaggactc

SEQ ID NO: 51043 - DNA, 248 bp, Glycine max
aaggaatacgagaatgagagcgaggaggagaaggaaaaatggcttccaaaagggtttgaggagagaaacagggagcaggggatgattgttaaagggtgggccccgcagctcctcatcctggcccacccggctgtgggtggcttcctctcgcattgcggctggaactcctccttggaggccgtcaccgccggggttcccatgatcacgtggccggtcatggcggatcagttttacaacgagaaactcat

SEQ ID NO: 51044 - DNA, 223 bp, Glycine max
tggtgacactgaccattattgttggcaacggccagaggacatgacaacttcacggcgagcatttaagatagacgagaataaccctggttcagatctggccggagagactgcagcagccatggcagctgcttccattctgttcaggaaaacaaacccacattactctcacttgcttctacatcatgccctgcagttgtttgagttcggggacaagtatagggga

SEQ ID NO: 51045 - DNA, 257 bp, Glycine max
cagtgtggtacttgtgtcgtggtacttgtgtggtcatggttgaaggtgcagtttagggttttgcaatgaagatgatgaccacacaagtaccaccacacagtgtccaagtccacacaacaacacaccgctacgaagctggcgtcgtcccccccggagcccgtttcgaaccgccgcgtcatgaagccggcgtcaaagcgccctccatttaccattccgagagaggtccaacgacttcccaggtcctcgccgtcctcgcc

SEQ ID NO: 51046 - DNA, 226 bp, Glycine max
actgactcggaacacgcatggacatggccaagctagttctatgcctacgattccttctgaacagtggccgctccgctcggagagcggaggcacagcaaaatgagtgccagatcgaaaagcggaatgccctcaaaccggataaccgtatagaggccgaaagtgggatcactgagacctggaacccgaacaacaagccagagcactgtgccggtgacacccccactcg

SEQ ID NO: 51047 - DNA, 253 bp, Glycine max
agacggtaacggaaccgttaagaccatcgccgaggccattaagaaggtgccggaatatagttcacgccgcattattatctacgtcagggcaggaaggtgtgaagaagagaatttaaagttggggaggaagaaaacaaatgtgatgttcataggggacgggaagggcaaaaccgtcatcacgggcggaagaaattattaccagaatctgaccacatttcacaccgcgtccttcgctgctagtggttctggtttc

SEQ ID NO: 51048 - DNA, 244 bp, Glycine max
ggcatttcaaggatggcctttactttctcaggatctatctctatccctttctgacttacgataaatcctagcagcttccccgacttcaccccaaaggtgcatttggttgggttcagttttaattggtatttccgcaaccttccaaaaagcttacgcagattgacaaggtgttcggcctcagtccgagacttggcaatcatgtcatctacgtagacctctatttccttatgcatcctatcatgga

SEQ ID NO: 51049 - DNA, 241 bp, Glycine max
gtaatcggcgcagggaaaggaatcgaaaatatagagcaatgaagaagctgtcaaggaagttgcgcaatgaagaagacaaaaacttgtctcttccggttcacgatggagactctcgtcccttggaccctcaagagcaagaagagctggttcgttctctagaaaggagtcaagctcagcagagtcgcttatggaggagggtatttgctgctctattcttctgttacatcgtgttccttatgta

SEQ ID NO: 51050 - DNA, 249 bp, Glycine max
taaaattcttccaccaagttatgggttcccttgtgttgcttcttttctccctcttaggtctctcttctagttccagcatatcaactcatcgttccatattggaccttgacctaaccaagtttaccacacagaaacaggtgtcttcactgttccaactatggaagagtgagcatggacgtgtctaccataaccacgaagaagaggcaaagagacttgagattttcaagataatcatgaactatatcaggg

SEQ ID NO: 51051 - DNA, 248 bp, Glycine max
tctcaattcattgatgtctctaacactactccggatgaaactgcattcttccgcctcgtgctcaatcgcgagggagtagtaggatcccttataatgattcaacccacacttttccaatattcgtttgatggcccaccggtgccagtgctgctagatattcgttccatttctccagattttatcttgctctttgattctttcttctgtgtggtgattcattatgggtccaagattgcccagtggaggaa

SEQ ID NO: 51052 - DNA, 259 bp, Glycine max
atccaatcccatgatgcaggaaaaaaggtgtcatcacccaggtaaagtaccaagggggctgtggatggtcacaagaatattgttccttcttcatgggattggaggaaaaaaggtgtcatcacccaagtaaagtaccaagggggctgtggaagcggttgggcgttttctgccacgggagccatagaagcagcacatgcaatagcaacaggagaccttgttagcctttctgaacaagaactcgtagactgtgtggaagaaa

SEQ ID NO: 51053 - DNA, 257 bp, Glycine max
gaacgagggagctctttttctgccacacttcaattcaaaggccatagtggtactagtgattaatgaaggagaagcaaacattgaacttgttggcattaaagaacaacaacagaggcagcaacaggaagagcaacctttggaagtgcggaaatatagagctgaattgtctgaacaagatatatttgtaatcccagcaggttatccagttgtggtcaacgctacctcagatctgaatttctttgcttttggtatcaatg

SEQ ID NO: 51054 - DNA, 252 bp, Glycine max
atgaaatgtctatatctctaacatgatcttggctaatgtagatattgctattaggtttactggtttatatggagaacatcctgatgacacttatgacccagatgctctaccggtaatagaaaggattactatcaaggatgtgataggggtaaaagtcaaacatgccggccttatacagggtattaaaggtgacaactttgtcaatatctgcctatcaaacatcacccttaatgtgagctcaaaattgccatg

SEQ ID NO: 51055 - DNA, 234 bp, Glycine max
gttcaatatcctagtataccttaataaataatttaagatactatgatgagagcacggttcccattactgttgctgggacttgttttcctggcttcagtttctgtctcatttggcattgcttactgggaaaaagagaaccccaaacacaacaagtgtctccagagttgcaatagcgagagagactcgtacaggaaccaagcatgccacgctcgttgcaacctccttaaggtggag

SEQ ID NO: 51056 - DNA, 233 bp, Glycine max
tcaatatcctagtataccttaataaataatttaagatactatgatgagagcacggttcccattactgttgctggtacttgttttcctggcttcagtttctgtctcatttggcattgcttactgggaaaaagagaaccccaaacacaacaagtgtctccagagttgcaatagcgagagagactcgtacaggaaccaagcatgccacgctcgttgcaacctccttaaggtggaga

SEQ ID NO: 51057 - DNA, 231 bp, Glycine max
tctctccatcggtccttacacactcatcagtcatcaccatggccaagctagttttttccctttgttttctgcttttcagtggctgctgcttcgctttcagttccagagagcagcctcatccctacgagtgccagatccataaactcaatgccctcaaaccgggtaaccgtatagagtcagaaggagggctcattgagacatgggaccctaacaactagccactccagtgtg

SEQ ID NO: 51058 - DNA, 229 bp, Glycine max
cttcaagcactcatcaccatggacaagcttgtactgtccctttatgaccttctaactagtagatgcttcgcgctgagtctgcaggtaccgcaatctgagtgccagattcacaagctgactgctctcaaaccggttcagcgtatagagccagaaggtgggttcattgcgacctggaatcctagcgccaatccattccagcatcgcggtcatcgcctctctcgctgcaccc

SEQ ID NO: 51059 - DNA, 255 bp, Glycine max
cttaattattaacacttccttagttcaatatgggtaagcccatcactctctctctttcttccctttgcttgctactcttgtcgagtgcatgctttgctattagctccagcaagctcaacgagtgccaactcaaaacctcaacgcgttggaacccgaccaccgcgttgagtccgaaggtggtttgattcaaacatggaactctcaacaccctgagctgaaatgcgccggtgtcactgtttccactctcaccctcaa

SEQ ID NO: 51060 - DNA, 250 bp, Glycine max
aattcttccaccaagttatgggcttccttgtgttgcttcttttctccctcttaggtctctcttctagttccagcatatcaactcatcgttccatattggaccttgacctaaccaagtttaccacacaaaacaggtctcttcactgttccaactatggaagagtgagcatggacgtgtctaccataaccacgaagaagaggcaaagagacttgagattttcaagaataacttgaactatatcagggacatg

SEQ ID NO: 51061 - DNA, 250 bp, Glycine max
gtggcttcaactgtgcagaggcagtgaatgtggctcctattgattggttaatgcatggacaaagtgctgtcgagctttacaggttacaatgccgcaagacatccctgtcacatgacaagctgttgttgggtcagcactggaatctgtacgagcccttgcagagctagctcttggaaaggaaactccaaaaaatttgaaatggggaagtgtctgtgggaaagatggagatcttaccaaggcagttagggca

SEQ ID NO: 51062 - DNA, 254 bp, Glycine max
tgcagaccgagctagctagctagcaagcaagcacagagatggaggcaaagcgaggccatgccctcatgtgcttggcacgtgtttcactcttcctctgcgctctaaccctatccgctgctcacggaagcaccacggttcaagacatcgcgagaaagttgaaactcggggacaacgagcttctgcgcacggagaagaagttcaaggttttcatggagaattacgggaggagctactccacagaggaggagtatttg

SEQ ID NO: 51063 - DNA, 251 bp, Glycine max
gctgatatgttgcgataactgtccatctacttttcacctagcttgtttgtccactcaggagatcccagatggcgactggtactgcactaactgcacttgtaggatatgtggaaatttggtcattgacaaagacacttcagatgcgcatgattcattacaatgttcacagtgtgaacataaatatcatgagaaatgccttgaagatagagataaacaagaagtagcaatttcagacacttggttttgtggtc

SEQ ID NO: 51064 - DNA, 254 bp, Glycine max
ggcagagtggccttgctgccacgatccactgagattcagcccttgtcgctttgattcgtctgcaaaggattctacccgccgctcgatgggaattgcgcttcaaggcgtctcgtagggctaatccgcctcacgagggtcaccaacggcacgtgcctttggggggccgaggccccctactgctggtcggcaaacggacggcggcgacatcacatcgcagagaagaacagagagagatccatccatcaattccaatg

SEQ ID NO: 51065 - DNA, 249 bp, Glycine max
ggcaaaaggtgtgtggagtgctggtgcatgcgagcttatatggtgccaccacggcctatgtcattacatctgccaccagcatcagagcaatactgaaatcaaattgttatcacaaggaagggcatcaggctccttgtaaatatggggatgcagtatatatgatgctgtttggactagttcagatcataatgtcattcataccagatctccacaacatggcatgggtttcacttgttgcggccataatgt

SEQ ID NO: 51066 - DNA, 247 bp, Glycine max
tgctggattagtgcgtctcacaggttgctgacacctcaccacatcaaagaaagagttctttggagatgctttttaacattttgaaggatcatggtcatctattctcccacacattttggaatagcattttctgttctgttattttccctgtatataactcagtatctggaaagagagagatgaatctacaagaggtccattgtccaccttcttcagtatctgtgcatactgaaggaagcacatggga

SEQ ID NO: 51067 - DNA, 243 bp, Glycine max
ttcaaaccttgctctatactacacagtacacacactagaagaataatggcttccatcctccactactttttagccctctctctttcttgctcttttcttttcttcttatccgactcagtcacccctacaaaaccaataaaccttgttgttctacccgttcaaaatgatggttccacagggctccattgggccaacctccaaaaaagaacccctctaatgcaagtaccagtcctggtggacctc

SEQ ID NO: 51068 - DNA, 259 bp, Glycine max
gacaccacatactatgtggtcaaccctgacaacaacgaaaatctcagattaataacactcgccatacccgttaacaagcctaggtagatttgagagtttcttcctatctagcactgaagctcaacaatcctacttgcaaggattcagcaggaacattttagaggcctcctacgataccaaattcgaggagataaacaaggttctgtttagtagagaggaagggcagcagcaaggggagcagaggctgcaagagagcgtg

SEQ ID NO: 51069 - DNA, 127 bp, Glycine max
gtcgatatccaacaaggaaagatcagttcttcccctacgagggtcgggatgagtgctagaccctccaagaattgggggagcactcatccctaccctcgtaggggaagaactggtcgatatccaacaa

SEQ ID NO: 51070 - DNA, 258 bp, Glycine max
tggagggtacttcaggaacacagttagagaactactaagagatggcatattcaacgcagacgacgacacgtggcagaagcaaaggaagacagcaagcattgaatttcattcaaccaagttcaggcaattaacaacagaatcattgtttgagcttgtccactataggctcttgcctgtgttagaagcatcagttaagaaatctgttgcaatagacctccaagacattctcttaaggctaacttttgacaatgtttgcat

SEQ ID NO: 51071 - DNA, 250 bp, Glycine max
ctcgagcgctcgagcggctcgaacggactcgagcggctcgaggaacgatgacagtggacaacgtcggaacgtcattcctgggacttgatctagccaataacggtatgtggtcctaataatggttttgaaatgtggaattctgagtggggcaatcaaacttcatggcatttgagtttccttattgacaatcccaaataggctacagtttttgatattctcttgggaatttctcaagattttgaaattgctg

SEQ ID NO: 51072 - DNA, 251 bp, Glycine max
cgcttaattattaacacttccttagttcaatatggggaagcccttcactctctctctttcttccctttgcttgctactcttgccgagtgactgctttgctattagctctagcacgatcaacgagtgccaactcaacaacctcaacgcgttggcatccgactaacgcgttgcgtccgctcgtggtttgattcacacatggaactctcaacaccctgagctgaaatacgccggtgtcactgtttccaaactca

SEQ ID NO: 51073 - DNA, 235 bp, Glycine max
ggagaatgggggtgaccatgtcaaattggtgagggctggaaagcatcaggtggtttttcttgtaaaaggaccaatttacttggtctgcatcagctgcacagaagagccttatgagtcactaagggggcagttggagcttattcatggtcagatgattgttatactaacaaagtcagtaaacagatgttttgagaagaatccgaagtttgatatgacacccttgcttggtggaaca

SEQ ID NO: 51074 - DNA, 247 bp, Glycine max
attgtctttgaacactcatcaccatcgccaagcttgttctgtccctttgtttccttcttttcagtggctgcttcggtctcaagagagcaggcacagcaaaatgagtgccagatccaaaagctgaatgccctcaaaccggataaccgtatagagtcggaaggtgggttcattgagacctggagccctaacaacaatccataccagtatgccggtgttgcgctctctcgctgtatcttagcacgcaatg

SEQ ID NO: 51075 - DNA, 258 bp, Glycine max
attctccaaaagtatcatcaatgttgagagtgaagggagggagcaggccgccgtgggtggcgctcggtgccgccgtttgggtccagatcgcgtcggggaacacattcaccttcccactctactctcactctgtgaaatcagttctcggcttcgaccagcgccacgtcacgctcctcggcgtcgccgtcgacatcggcgaaaacctcggcctcctccccggcctcgcctgcaacaagttccccccttggcttctcctcg

SEQ ID NO: 51076 - DNA, 266 bp, Glycine max
actccagttgccattgctgcaacagctatctcatattgtcccgaagaatggaatgatattgcgggctgatacgcttccattctttgcttaacgatgaatatgtcattggttcgacctctcttgacaaagcgagggttcagcacaagctctgagaaccttgttgcttctgtgctctttgagagactgacagtggtcattcccacaattgaccctgtagtctatgcatttcaagaattctcgtctcgatggcgacaacaatatcaacg

SEQ ID NO: 51077 - DNA, 242 bp, Glycine max
ctccattgtctttgaacactcatcaccatggccaagcttgttctttccctttgtttccttcttttcagtggctgcatcgctctgagagagcaggcacagcaaaatgtctgccagatccaaaagctgaatgcgctcaaaccggatgaccggatagattcggtacgtcggatcattgagacctggaaccctaacttcaagtcattccagtgtgccggtgttgccctctctccctgcacccttaa

SEQ ID NO: 51078 - DNA, 249 bp, Glycine max
tgcagaccgagctagctagctagcaagcaagcacagagatggaggcaaagcgaggccatgccctcatgtgcttggcacgtgtttcactcttcctctgcgctctaaccctatccgctgctcacggaagcaccacggttcaagacatcgcgagaaagttgaaactcggggacaacgagcttctgcgcacggagaagaagttcaaggttttcatggagaattacgggaggagctactccacagaggaggagt

SEQ ID NO: 51079 - DNA, 226 bp, Glycine max
gtgagggggaagcccttcttcactctctctctttcttccctttgcttgctactcttgtcgagtgtatgctgtgctattacctccagcaagttcaacgagtggcaactcaacaacctcaacgcgttggaacccgagcaccgcgttgaatcctaaggtggtcttattgaaacatggaactctcgagaccctgagctagaatgcggcggtgtcacggtatccaaacgca

SEQ ID NO: 51080 - DNA, 245 bp, Glycine max
ctttccttagttcaatatggggaagcccttcttcactctcactctttcttccctttgcttgctactcttgtcgagtgcatgctttgctattacctccagcaagttcaacgagtgccaactcaacaacctcaacgcgttggaacccgaccaccgcgttgagtccgaaggtggtcttattgacccatggaactctcaacaccctgagctgcaatgcgccggtgtcactgtttccatacgcagcctca

SEQ ID NO: 51081 - DNA, 238 bp, Glycine max
aaaattcttccaccaagttatgggtttccttgtgttgcttcttttctccctcttaggtctctcttctagttccagcatatcaactcatcgttccatattggaccttgacctaaccaagtttaccacacagaaacaggtgtcttcactgttccaactatggaagagtgagcatggacgtgtctaccatagccacgaagaagaggcaaagagacttgagattctcaagaataacttgaac

SEQ ID NO: 51082 - DNA, 235 bp, Glycine max
gcaaacattgaacttgttggcctaaaagaacaacaacaggagcagcaacaggaagagcaacctttggaagtgcggaaatatagagccgaattgtctgaacaagatatatttgtaatcccagcaggttatccagttgtggtcaacgctacctcaaatctgaatttctttgctattggtattaatgccgagaacaaccagaggaacttcctcgcaggttcgcaagacaatgtgataa

SEQ ID NO: 51083 - DNA, 232 bp, Glycine max
tcaatatcctagtataccttaataaataatttaagatactatgatgagagcacggttcccattactgttgctgggacttgttttcctggcttcagtttctgtctcatttggcattgcttactgggaaaaagagaaccccaaacacaacaagtgtctccagagttgcaatagcgagagagactcgtacaggaaccaagcatgccacgctcgttgcaacctccttaaggtggag

SEQ ID NO: 51084 - DNA, 263 bp, Glycine max
cattgtctttgaacacttaataaataatttaagatactatgatgacagcacggctcccattactgttgctgggacgcgctgagagagcaggcacagcaaaatgagtgccagatccaaaagctgaatgccctcaaaccggataaccgtatagagtcggaaggtgggttcattgagacctggaaccctaacaacaatccattccagtgtgccggtgttgccctctctcgctgcacccttaaccgcaatgcccttcgtagaccttc

SEQ ID NO: 51085 - DNA, 199 bp, Glycine max
caatatcctagtataccttaataaataatttaagatactatgatgcgagcacggttcccattagtggtgctgggacttgctttcctggcttcagtatctgactcatttggcattgcttactgggaaaaagagttcccgggacacaacaagtgtctccagagttgcaatagtgagaaagacttgtagaggctccaagcat

SEQ ID NO: 51086 - DNA, 272 bp, Glycine max
tccacgatcgaggtcagatcccttatctgaatgtcttcacaccggctaagggcacacagctagtatctgcgtaactactcatcgttccatattggaccttgacctaaccaagtttaccacacagaaacaggtgtcctcactgttccaactatggaagagtgagcatggacgtgtctaccataaccacgaagaagaggcaaagagacttgagattttcaagaataacttgaactatatcagggacatgaatgcaaacagaaaatcaccccatt

SEQ ID NO: 51087 - DNA, 251 bp, Glycine max
caaatcataaaattcttccaccaagttatgggtacacttgtgttgcttcttttctccctcttaggtctctcttctagttccagcatatcaactcatcgttccatattggaccttgacctaaccaagtttaccacacagaaacaggtgtccttcactgttccaactatggaagagtgagcatggacgtgtctaccataaccacgaagaagaggcaaagagacttgagattttcaagaataacttgaactata

SEQ ID NO: 51088 - DNA, 247 bp, Glycine max
atcataaaattcttccaccaagttatgggtacacatgtgttgcttcttttctccctcttaggtctctcttctagttccagcatatcaactcatcgttccatattggaccttgacctaaccaagtttaccacacagaaacaggtgccttcactgttccaactatggaagagtgagcatggacgtgtctaccataaccacgaagaagaggcaaagagacttgagattttcaagaataacttgaactata

SEQ ID NO: 51089 - DNA, 253 bp, Glycine max
atatggaaagaattcctcttgccacatctgagggttttcctcatgtgctttcacgcaaaaatggtgacaaaggcataaggagatttgtttctggggatggtgaaaagatgacattgattccgggaactagtgttgaagaggcttacaacaagctaatagttgaacttgagaaaagtgttcctacattggttggcattgaatgtcccaaggatgagaaacttccccgtcgcaaaatttttgacaaacctaagac

SEQ ID NO: 51090 - DNA, 254 bp, Glycine max
  unsure (1)..(254): unsure at all n locations
accttaatatataatttaagatactatgatgagagcacggttcccattactgttgctgggacttgttttcctggcttcagtttctgtctcatttggcattgcttactgggaaaaagagaaccccaaacacaacaagtgtctccagagttgcaatagcgagagagactcgtacaggaaccaagcatgccacgctcgttgcaacctccttaaggtggagaaagaagaatgttanagaggtgaaattccacacaaca

SEQ ID NO: 51091 - DNA, 160 bp, Glycine max
ggagaattttcacctactctaaatttccgaggacatgcgaaaaatgataatagatctcgtcgttaacgttaattttaacataaatttttaaatcgtaatttataactaaatattacaaaatggaattcttattaaaatgaaattcaatcatttcttttat

SEQ ID NO: 51092 - DNA, 264 bp, Glycine max
gggaccaagaccacctattggaatacatcgctatatctttgtgttgtttcaacagaaaggacctttaggtcttgtggagcaaccaccaactcgagcaagcttcaacactcgttattttgccaggcaattggacttgggacttccagtggccactgtctacttcaactctcaaaaagaacctgctgttaagaggcgctgaatctagctatattgtaaccatcagtgtctctcttgagatatgcatggttggaatatacttttaag

SEQ ID NO: 51093 - DNA, 266 bp, Glycine max
tgatgtcacatgcaaaacgcattgagagagcaataactgagtctgcttgtaatacccttcttcttaaggtcaaccaagtgggaacacttacagaagtcattgaagtggtgaagctggcaaaggaagcacattggggggtggtaacactcatagatgtggagaaactatagactatttcatagctgatttatctgttggccttgcttctggtgtaattaaagcaggtgctccttgcagaggagaacggctagaaaagtacaaccagt

SEQ ID NO: 51094 - DNA, 259 bp, Glycine max
gtgagagagagcgagcagtttctaacacagtgagaggggtcttggattggcgctgttgacgctgcgtctcttcctcttctcactcgatccatccctcattcctaatcctccaatccacgcacctcagcctcacactcacatacacacatatctgaacgcgtatcgtccctcctatggcttcaaagcgcatcctcaaggagctcaaggacttggagatagacctcgcagcttcttgcagcgctggtccagtagctgagga

SEQ ID NO: 51095 - DNA, 261 bp, Glycine max
ctctcgagccgctcgagccgctcgagcggctcgaggatcaaaaaaaacactagccaacacaaccatcatggccacttctgctattcagcaatcagacttcactggtcaaactgctctgaagcagctcaatgagttcgtccgccactcggtggcgccggcaaaggtcgcactaacatgcgccgcaccgtcaagagtgctcctcagagcatttggtatggccctgaccgtcccaagtacttgggtccattctcggagcagatt

SEQ ID NO: 51096 - DNA, 258 bp, Glycine max
  unsure (1)..(258): unsure at all n locations
cactcatcaccatggccgagcttgtactgtccctttgtatccttctttacagtggctgcttcgctctgagagagcaggcacagcaaaacgagtgccagatccaaaagctgaatgccctcaaaccggataaccgtatagagtcggaaggtgggtgcattgagacctggaaccctaacaacaagccattccagtgtgccggtgttgccctctctcgcagcacngttaaccgcaatgcccttcgtagaccttcctacacca

SEQ ID NO: 51097 - DNA, 279 bp, Glycine max
ctctcactgtggtgcaatctcgcaatgagctcgacaaagggattggaacaatcatctcgtccccatatcgaatccgttttatcgccgaaggccatcctttgagccttaagttcgattcatttgcagttataatgctgtgtgttggaattcctaccgagtggtctgttgtggaggatctaccagaaggacctgctgttaaaattggtgagaacaaagatgcaatggatggttggtttagacttgagagagtttctgatgatgaattcaataactataagc

SEQ ID NO: 51098 - DNA, 132 bp, Glycine max
ggcagtgtcatctctcctttgacgacaagatgagcatcccaattccccatcggcagttattcatagacggagactggaaagtccccgtcctcaagaatcggattcccatcatcaacccttccacacaacata

SEQ ID NO: 51099 - DNA, 283 bp, Glycine max
ggaagagcacgagcagaaggaggaacacgaatggcatcgcaaggaggaaaaacacggaggaaagggaagtgaagaggaacaagatgaacgtgaacacccacgcccacaccaacctcatcagaaggaagaggaaaagcacgaatggcaacacaagcaggaaaagcaccaaggaaaggaaagtgaagtaggagaggaagaccaagacgaggatgaggagcaagacaaagagagccaagatagtgaaggttctgagtctcatagagaaccacgaagacataagagt

SEQ ID NO: 51100 - DNA, 147 bp, Glycine max
cttggtgcctcactgaccaagccagggcgagtgagaaccaaactagcggtagctatctgggtcgaagcacttgtagccttatggtcaaacctagcctttggcaagatgtagaggaaccgaggtagaggaagaagaccctgagctcgt

SEQ ID NO: 51101 - DNA, 280 bp, Glycine max
ggctctccattggtcgttaaacactcatcagtcatcaccaaggccaagctagttttttcccttggtttgctgctggtgagtggctggtgcttcgctttcagttccagagagtcgcctcaggaaaacgagtgccagatccagaaactcaatgccctcaaaccggataaccgtatagagtcagagggagggctcattgagacatggaaccctaacaacaagccattccagtgtgccggtgttgccctctctcgctgcaccctcaaccgcaacggccttcgta

SEQ ID NO: 51102 - DNA, 281 bp, Glycine max
agaggaccctagagaaagagattgcttgaaaacaattctgcacagagtctatgggaaattcatgattcataggcctttcatacggaaatctgttagcaacatcatctaccggtttgttttcgagaccgagcgacataatggaatcgtcggactgttggagatttttgggagtgtcattagcgggtttgccttgccattgaaggaagagcacaagatatttttgttgagggctttggttcctttgcacaaacctaaatctgttggcatttatcatcagcagt

SEQ ID NO: 51103 - DNA, 259 bp, Glycine max
ctcgagaacactggtgagcttctttgctttgaatttggctccacacaatagttaatgacctttcgtttttccaccactttcattttcaaggaacatggtttttcatacacacatccatatttccttgtgcaggtgactttgtgagagccaatggactccaagagggagatttcatagtgatatactcagatgtgaagtgtggcaaatatgtaagaccctttcttattttccatttttcattttcttaacatgttttgag

SEQ ID NO: 51104 - DNA, 256 bp, Glycine max
caacaacacaacacaggataaataaattaaattaaaaactagctaaattcctctctctctctctttctcttcgagggtttgggtttctcttcctcccttggagaaaaagaagagccaccgctgcgacgccgttcgtgcatttttgaggtgccgctgtcatgtttgggcgtggtggaccaaggaggagtgataactccaaatattatgatattctcgggatttccaaaaatgccagtgaagctgaaatcaagaaggc

SEQ ID NO: 51105 - DNA, 255 bp, Glycine max
attcccattcccacgcccacctcatcagaaggaagagcgaaagcaagaggaagatgaggatgaggagcagcagcgagagagcgaagaaagtgaagattctgagttacgaagacataagaataagaacccttttctcttcggctctaacaggttcgaaactctcttcaaaaaccaatatggtcgcattcgcgtcctccagaggttcaaccaacgctccccacaacttcagaatctccgagactaccgcattttgga

SEQ ID NO: 51106 - DNA, 238 bp, Glycine max
ggctcgagtgcaaacattgaacttgttggcattaaagaacaacaacaggagcagcaacaggaagagcaacctttggaagtgcggaaatatagagccgaattgtctgaacaagatatatttgtaatcccagcaggttatccagttgtggtcaacgctacctcaaatctgaatttctttgctattggtattaatgccgagaacaaccagaggaacttcctcgcaggttcgcaagacaagt

SEQ ID NO: 51107 - DNA, 153 bp, Glycine max
caaaaaccaatatggccacgttcgcgtcctccagaggttcaacaaacgctcccaacagcttacagaatctccgagactaccgcattttggagttcaactccaaacccaacacccttcttctcccccaccatgctgacgctgattacctcatcg

SEQ ID NO: 51108 - DNA, 99 bp, Glycine max
gagggaggggtgctgatcgttccacaaaacactctctcaccattgcaattcaccacttgtaccaatgcccgccaccagccttgacttcccagccttctg

SEQ ID NO: 51109 - DNA, 254 bp, Glycine max
ctcgagccgctcgagccggttgcctcaaactcaaaggatgaccctgcaaaggaggctgctaacttcacagcacaagtcatcatcatgaaccaccctggtcagattggaaatggctatgcccctgtcctcgactgccacacttctcacattgctgtcaagtttgctgaactcatgaccaagattgacaggcgatccggcaaagagcttgagaaggagcccaagtttttgaagaacggtgatgctggttttgttaa

SEQ ID NO: 51110 - DNA, 121 bp, Glycine max
gagttgtttgtgttcctcactgaccaagccatggcgatgagaaccagactttctttagctatcttcttctttgttctgttagccttattgtcaaacctagcctttggcaaatgtaaagaaa

SEQ ID NO: 51111 - DNA, 100 bp, Glycine max
ccgagaacaaccagaggaacttccttgcaggttcgaaagacaatgtgataagccagatacctagtcaagtgcaggagcttgcgttccctgggtctgcaaa

SEQ ID NO: 51112 - DNA, 231 bp, Glycine max
gttcaatatcctagtataccttaataaataatttaagatactatgatgagagcacggttcccattactgttgctgggacttgttttcctggcttcagtttctgtctcatttggcattgcttactgggaaaaagagaaccccaaacacaacaagtgtctccagagttgcaatagcgagagagactcgtacaggaaccaagcatgccacgctcgttgcaacctccttaaggtg

SEQ ID NO: 51113 - DNA, 275 bp, Glycine max
ggtctcagcgttatcagccccaagtggcaagaacaacaagatgaagatgaagatgaagacgaagatgatgaagatgaacaaattccctctcaccctcctcgccgaccaagccatggaaagcgtgaacaagacgaggacgaggacgaagatgaagataaacctcgtcctagtcgaccaagccaaggaaagcgtgaacaagaccaggaccaggacgaggacgaagatgaagatgaagatcaacctcgcaagagccgcgaatggagatcgaaaaagac

SEQ ID NO: 51114 - DNA, 165 bp, Glycine max
gataaacctcgtcctagtcgaccaagccaaggaaagcgtgaacaagaccaggaccaggacgaggacgaagatgaagatgaagatcaacctcgcaagagccgcgaatggagatcgaaaaagacacaacccagaagacctagacaagaagaaccacgtgaaagaggt

SEQ ID NO: 51115 - DNA, 507 bp, Glycine max
gtaccttatttcttcagcttcggagattccctcactgataccggcaacttgtacttcatttacccccgtcagagccccgattgcttgctccctccctacggacacatacccattttcatcgccccaacggacgatgctccgacggacgccttatcctcgatttcctcgctgagtctctggggcttctgtatctgaaaccgtatctgggtttcaagaacggcgcggtgacacggtggaatattgagcagggtgtgaattttgcggtggccagagccatggcgttggaccgcggtttctttgaagaaaaggggctcattgttgatgtgaccgcaaacttttctctctgagggttcagttagattgtttcaaggaattgctgccttctctttgcaattcttcttcaagtaaagctatcttttctttcctcttggttcattaggaagctaattaattagaaatcactgtgtctcttaaagtaattattacaaaattcaatatttttattaa

SEQ ID NO: 51116 - DNA, 390 bp, Glycine max
ctcacgcgtccgcggacgcgtgggtgccggagctgagatgactgcaggggagcatccggaacgagtaggccagcctgtgtgccagtatttcatgaggacaaggacatgcaaatttggttcatcttgcaagtaccaccaccccaggcaggcaggagcagggggcgctgctgctacccctgtgtcactaaattattatggatatccattgcgacagggtgagaaggagtgttcctattatgtgaaaacaggacaatgcaagtttggtgcaacttgtaaattccatcatccagttcctgctggcatccaaattccaccatcgccatttgccccagtttcacctttgcctgtaccagtaccttcgccgttatattcaaccatgcagcccccacc

SEQ ID NO: 51117 - DNA, 340 bp, Glycine max
tttcgttctcgcgttcgcccacgcgtccgcccacgcgttcgtccacgcgttcgaccacgcgtccgtccacgcgttcgtgtgaattgaataaatttgattgcttaatttttgcaggtaaggtgattttcggtgatgaaagagtggttcttttttagtcctagagacaggaaataccctaacgggtcccgacccaacagagtagtcgtgtcgggttattggaaagccaccggaaccgacatgatcatcaccaccgaaggttgaaaagttggcataaaaaaagccctcgttttttacattggcaaagcccccaaaggcaccaaaaccaattggatcatgcacg

SEQ ID NO: 51118 - DNA, 443 bp, Glycine max
tttccgtgtgcgagccaggtagggttttcggtgttcccctctttgtgttcgttcgcgacgatggggtccatccccgatccaggcgagttgagcgagttgactcagccgagcttcgacgagttccagcgccaaacctctctcatgaccagctgcaccctcctctggaaggagctctccgaccacttctcctccctcgagcaagacctcaaccacaaatccgaagccctcaagcgcaagattcacaccctcgacaactccacctcggactccctccgcctcctcgaccaccactattgcacttcttcctcgttctccctctttttcttcttcttcgctaaacccttttttctatctcactaacacaacaatgggagacgagaagaagggcaagcctgctgctttcggcgtgtggtccaccatcaagcctttcgtcaatggtggag

SEQ ID NO: 51119 - DNA, 396 bp, Glycine max
ttgggcgtggacgaggcggtcttgttgttgatggagcttctagaggtatccagagaggaggctcgagctaagatcgtacgtgctcatagggcttacgtgcgactgtcatggcttcgtgaggtgtatcagagtagatgccaagcccgatgttggattgtagcggtgcgtgcttacctcttccacctggtggattgtactctttttgctaataagagtgcaactcatgttcatgtggtgcatctgaagggtttttgagacctatgttagtctgggggctatggttggggagttgccgcgctggttcacatgtatgaccagctaaaggaagctttgcagacccccacacgacatatgggtgggtatttgacgctattacagtgctggatatatgagtat

SEQ ID NO: 51120 - DNA, 521 bp, Glycine max
gtttgacacttgccttggaaagggagggtacggcaccgtgtactatggaaaacttcaagatgggcgagaggttgcaataaaatgtttccatgatgagagtgagacagaagagaccattaagcaattcatgaaagaaactgcgatcttaggtctcctgcaccatgaaaatctggtttcactttatggccgcacttctcgcaattgcaacaaacacatgctagtttacgagtacatctccaatggcactcttactaaacatcttcatgaatcttctggtggtaaactaccatggcataatagattgaatattgccattgaaactgctactgccttggtatttcttcatgaatcaggtatcatccaccgtgatgtaaaagggagtaatattctgttggatgaaaattttactgtcaaagttgcagattttggattctcacggtctcttccagatcatgctactcatgtttcaactattccagtaggaactcgtgcttacatagatcctgactactatgaatctg

SEQ ID NO: 51121 - DNA, 454 bp, Glycine max
ttgaattatttttgccagaagaatatccaatggctgctccaaaggttaggtttctgacaaaaatatatcatccgaacattgataagcttggcaggatatgtcttgacattctgaaagataagtggagtcctgcccttgggattcgcactgtacttttgagtattcaagctcttctaagtgcacctaacccagatgatccactttctgagaacattgccaagcattggaaatctaatgaggccgaggctgttgaaacaggtatgtcttttttgcttgtatgataataaaatgttagttgctatttattaatgatggcatcaaacatgtcatatgcacactcttgtgaaaatggtgttgaaatcctgcagccaaagaatggacccggttatatgctagtggcgcttgatgctttgggggaaacttttggcttcaaatatctatagtggacgtgtat

SEQ ID NO: 51122 - DNA, 257 bp, Glycine max
tttcaaaaacagtgtaacaaaaagaaaaaaaggggggatttgaagttcgctgggggacattattgttctctttatttcttcttgactttggttttgcacaacagggggatcttgacatatcaagatttggaggaaaaccaaatacaaatataggccaggctttcttaagtgcctggactcaagcatgtgcatcaccaactgctgtcaaaattgtgattccagctggcacataccaaatgggtgcagttgatgtcaaa

SEQ ID NO: 51123 - DNA, 323 bp, Glycine max
gaaaaagaaaaaaaatatgaagttcggtagaattttttgaatgttctctgggttttttaaagactttggttttgcacaacagggggatcttgacatatcaagatttggaggaaaaccaaatacaaatataggccaggctttcttaagtgcctggactcaagcatgtgcatcaccaactgctgtcaaaattgtgattccagctggcacataccaaatgggtgcagttgatgtcaaaggtccttgcaagggtcctattgaggttcaagttgatggaacaattcaagcacctgcaaacccaactgaccttaaggcgggtcatcaat

SEQ ID NO: 51124 - DNA, 197 bp, Glycine max
cggctgggtgtcctgggggatcaacccgggcgcttttggcatgcagggggcgcatgtgctggccgcgtacaaagccgacaacggcgccgtcaccgtgaaaaccctcgaccttaaatcctacaccgccattgttccggggaagctgtcgttcgacgtgtgggacgtgaggggggaggaggttaggggtgtgattagga

SEQ ID NO: 51125 - DNA, 245 bp, Glycine max
cctgtcatctaagatctctcccacgggggttttaacgacaccgtggggggcttcatcggattccgatcttccttttttcttcctcaaggcatggccacactcaagagcgtctgcttcagaggatccacctttcccgtttgcccctccaatttcacgaacactagaaacaccaggagctcatgttggaggcctacacaagcaggtgtgaagtccaatttccatctcccaatgcgcagttttgagtt

SEQ ID NO: 51126 - DNA, 503 bp, Glycine max
agtctatggggttaccactggcagtcctgttcggcacttgagcacctctcctggaccacctgtttttacttcgccggtccgtccagctgctgttccttttcgcacatcacctgcattgcctcagccacttgcattttctccaggctcttctttgccaacatcatcatcgccgctgcaattttcaaatggaacatttgagtcacagcaccaagtttctgatagtatagaggaccatgttcccttgggagagtcatcctttgttcttttttcagctcataaggtattgaaacagaagaaacaagctaatgtacccagtttgggttttggggcattggtctctcctgggagggaggtttcagtgggccctcaggtaatacagcgtgatcctcatcgctgccaaagctgtggtgcttatgcaaatatatattgcaacatattgcttggatcaggccagtggcagtgtgttatatgtcggaaactgaatggaagtgagggggagtaca

SEQ ID NO: 51127 - DNA, 521 bp, Glycine max
ctttcgcgtgggcggacgcgtgggagaaggtgcgctttgacaaacttcaagctgaaagcattaggttcatggcaagagaaatactaattctccgcacactggaccacccaaacatcatgaaattggaaggtataatcacttcacaactatcaaatagcatataccttgtatttgaatacatggagcatgaccttgctggtctagtagcttctcctgacataaagttcacggactcacagattaagtgttacatgaggcagctattaagtggaattgagcattgtcaccttaaaggtattatgcatcgagacattaaagtatctaatatattagtgaacaatgaaggtgttctcaagatagcagattttggattagccaatacccttagtccaaatagtaagcaacccttaacaagtcgtgtggtgactctatggtatcgtcctcctgagctcttgttgggatcgacgagttatggagtttcagtggatctatggagtgttggctgtgtatttgctgaactt

SEQ ID NO: 51128 - DNA, 478 bp, Glycine max
gtgttacacattctgccagctgtccatttccagagtcactttagttatcaaaacaagacaactacttggtgttgcaggtcaaagaaacattcggggtggaggatgatgctacctaggaccttctttgctttcttactctttgcactgagttgcttcagatggctggaatacgcagaatccaaactacccaaactaccccaagaggaggttgatgctcttaaagaaatcactagcacgatgggtgcaacctattgggagtttgatagtgattcttgtcatagtaaaatgctgagattaacaccagagccacctaaaggatctcaaagcagcattgattgtgattgcacttctgaaaataacacctgtcatgtagttgggattaccttcaaacggctcaaccttcctggcatgcttccaccttatttggctaagcttcctaacctcacacaagttgattttgctctgaactacctaagtg

SEQ ID NO: 51129 - DNA, 480 bp, Glycine max
cttctccaaaaccatccatttttcatgttcgaagaaaacatacacaatcggggcaaactctaattgactgtgcctttcattcaatgtcctcaatggcggcttccgacgaccagcgtccgtgccgcggcctgcacaatggcgtcgttcggcccctcaaaccaggcccggatatcccgcgtcccaagaagctaccccagccggcgccgccactctcggattcctcaagcgacgaagaagaagacaccaccttgaacttgaagggaagcttgagatatcagaaacaatgttgaaggaaacaactgatgaatataaaaagtttgttggttcaacttctaccacaggaaaggaaactttgacatcgaagaaggcattcagtggcagggaagggaacctggcaatatcagaaacactttcacaagaaacaaatgataaacataaaaaaattgttggttctacttctacctctggaagggatgtgat

SEQ ID NO: 51130 - DNA, 510 bp, Glycine max
ccctcgcgtccgccagatttcgcccttgttctgggtaccaatgatgatgataaactccccaatacgtttgacttggcatacaagagggttcccgtgcatgatgtgactgtaggatcatttattctggttggcaccggcgagtctgtgccagtagattgtgaagtattccaaggcagtgccacaattaccatcgagcacttgacaggggaagtcaaacctttggaagccaaagttggagatagaattcctggtggttcaaggaacttagatgggaggataattgtggaggtaatgaaaacttggaaggaatcaactctcagcagaattgttcagttaactgaagaagcacagtcaaataaacctaaacttgaaaggtggctggatgaatttggtgaacgttatagccaagttgttgtggtgttatcaattgctattgctgttattgggccatttttatttaagtggccattcgttagtacatccgcttgcagaggttcaatttacagagcc

SEQ ID NO: 51131 - DNA, 476 bp, Glycine max
cgttttgcgtgggcggacgcgtgggcggacgcgtgggttttctcctgcagaatatgcatatacacttagagtgaacgagaagagcgacatatacagtttcggggttgtcatactcgagttggtcactggaaaacgccccgtggaccctgaatttggggagaaagacttggttaagtgggtgtgcacaaccttggaccagaaaggcgtggaccatttaattgatccaaggcttgatacttgtttcaaagaagagatttgcaaggtcttcaacattggactcatgtgcactagtcctcttcctatccaccggccttcaatgagaagagtggtaaagatgttgcaagaggtgggaacagagaaccaaaccaagtctgcaaagaaagatggaaagttatccccttattactatgacgatgcctcggatcatggaagtgttgtttaatgaaagacttgcaagggttggactatttgatgat

SEQ ID NO: 51132 - DNA, 435 bp, Glycine max
attttccaccagcccctcttgaagatgtaatagatgatggcttgatgacaatccaaagagcttctttcctgaggaaagcaggcgtagaaacaatagtagatagtgacctttttctcaatccagcgaatagagctgatttgttggagtcagcaatcaagaatattagcaggtatttggaggcctgtcgagaaaaagacctaacggaatcagtcagggagggagttgatactctactaatgtatctgtatagagctttaaattctgtcgaggacatggagaggctggcttcttctataaactggtgtgttgtggaggaattggaacaaatgctagaagagtctgggcacctacggacacttgccttcctatgtgcaagtaaaggaatgagctcaaaagctgtgcatatttggcgcatcctggcacgaaattattcat

SEQ ID NO: 51133 - DNA, 407 bp, Glycine max
gcgaaagttctctgtgattttcggcttcttctcttgattgcagctggcgtcttcatctatatccagatgaggcttttcgcaacacaatcagaatatgctgatcgcctcgctgcagctatcgaagctgaaaaccattgtacaagtcaaacgcgatcgctgattgatcagattagcttgcaacaaggacgaattgtggccctggaagattaaattggtcgttgtcttgaattctttcagaagagcagaaacgtcgagaccaagaatgtggacaaacaaagtctcttgtacaagatcttgaaagaaaagacctgcagaggctgattgataaagtgcaggttccggtggctgctgttgtgatcatggcatgtaatcgtgctgattacctggagaggactattaattctgta

SEQ ID NO: 51134 - DNA, 343 bp, Glycine max
tttttcacagatagcgctggttctaatattcactgggtatcttcgaggaatatctatctttgggcgccacttatttcgaatttatgctgttcccttgagtttgactataatttggatctatgcgtcctttttaacagctggtggagcatataattacaaaggatgcaatccagatataccaagttcaaacattttgttggatgcatgtagaaaacatgcatataccatgaagcattgcaggactgatgtttccaatgcattgtctactgctgcatgggtcagaatgccataccctttacaggggggtatccctattttccattttaggacttccataatcatg

SEQ ID NO: 51135 - DNA, 390 bp, Glycine max
cccacttgtccgcccacgcgtccgtgacgatctggggtgtgtaggtgcctcaaaagcactgttttgagcttggctggactcaatcttgcaaccctttcagccctccctagcaagtgtgggatcaacttgccctacaagatcacccccaccattgattgcaacacggtaaagtactgacagtttgctcgagggttttacgcttgttgactttattccctcttttgctggttattactgcgaaacaagtgtaaagtcaacaagcgtaaaacccagcaaaagagggaataaagatggtttaatttcctccattgtttggatcccactagggagtataataatgttgattgtccaaaatgacatatattggattttctgtcactaatatacaag

SEQ ID NO: 51136 - DNA, 425 bp, Glycine max
cccatttgttcgcccacgcgtccgcccacgcgtccgcatgcagtttgcattatacgacagttcaaatagggacaccgggagtgaagttcatggtggcgcttgatacgggaagtgacctgttctgggtaccctgtgattgcacaagatgtgctgctactgatagctcggcttttgcttcagccttcgcttcagatttcgaccttaatgtatacaatcccaatggatcttcaacaagcaagaaagttacttgtaacaacagtctgtgcatgcaccgcagtcaatgcctagggacgttgagtaactgcccctacatggtctcttatgtctctgctgaaacatctacatcgggaatactagtggaagatgctctgcacttaacacatgaagataatcaccatgaccttgttgaggcaaatgtcatattt

SEQ ID NO: 51137 - DNA, 412 bp, Glycine max
cccatttgtccgtgaatatcttactatagcaaacataggtgattgttgggctgtcttggcaactacttcagatgatggcatattaactccacatcagcttaccactgacttcaagccaaatttacctcaggaggcagaacgcataacacaatccagagggagggtattttgtatggaagatgaaccaggagtgtacagggtctggatgccaaatggtaaaacaccaggactagcaatatctagagcttttggagaccactgcatgaaggactttggactaatctccgtgcctgatgtcacacacagaaaaattaccaccagggatcaatttgtcatcttggcaacagatggggtatgcgtctcttatgtttaatgcaataactcgttgtttaagggacaggttttaatttaa

SEQ ID NO: 51138 - DNA, 474 bp, Glycine max
cggtcttttgggcggacgcgtgggcggacgcgtgggcggacgcgtgggcggggctagggtttggctggggacgttcgagatggctgagtggttgatagccccgccgccgaggccactctacaagcagcagtcgtggtcgccggacacgcttcgcgacgaggcctggcagcggcggaaggacaacagccaccacatcagcggcgacaaccaccgctgcagccaccggctgagcaagagtctctcggaggacgacttggacgaactgaaggcgtgcttcgagctcgggttcgggttcgattcgcccgaaatcgacccgaaactatcgaacacaatccccgctttggagttgtaccatgccgttaacaaacagtacaatcaccacagcttgtctaggtcatcctcttcgtcttgccttgtctctgacagcgacattgctagccccaccactatattcaatcctggggatgatttggc

SEQ ID NO: 51139 - DNA, 417 bp, Glycine max
tgtttttcccaccgctcaagccgaagatcagcagaggcttcttagtgctgttttgacaaacgaagaaacttgtttagaaggcttgcagcagagcacagcttctgatcaaagagtgaagagtgatcttatctcatcactctctgatgacaagaagcttcacagtgtttcccttgacttgttcacgaagggttgggtggccgagaagaaaatctcaacatcatggcaagtcaatgggagacatttggatttccacaatggtcgtttaccattgaagatgtcaaaccgtgtacgggccatttatgcttctgcaagaggtcacgggagaaaattactacaagataacagccaaagtgtgttggttagtgacattgtggttgttagtcaggatggaagcgggaactttaccactatcaacga

SEQ ID NO: 51140 - DNA, 449 bp, Glycine max
cccactcttccgcccacgcgtccgcccacgcgtgcgcccacgcttccgcggacgcgtgggcaagaagcaattgagagacaaggattaaaagtcttggatctggtaaatgcaggcatacagtgcagtctcagacagttactcgagtacggatattttcatgcggatcctcatcctgggaatcttttggcaacacctgagggaaagcttgcttttcttgatttcggcatgatgagcgagactccagaagaagcaagatatgccataattggtcatgttgttcacttggttaaccgagactatgaggccatggctcgtgactactatgatcttaattttttatcaagggatgttgatgtatctccaattgtgccagcacttcgaaacttttttgatgatgcacttaattatactgtgagtgagctcaactttaagacactagtggatggtct

SEQ ID NO: 51141 - DNA, 268 bp, Glycine max
aaaataatgtacacataaatctagctccaattcgtagggacttttttaataacttggggtatagctatcaagatccaacttaaacatgaagaatgttttagtaaggtcagctgcacgagctctgcttggcggcggtgggcggagctactaccgccagctctcaacggcggcgatcgtggaacagagacaccagcacggtggcggcgcgtttggaagcttccacttgcggaggatgtccactcttccagaggtaaaggatcagcactca

SEQ ID NO: 51142 - DNA, 415 bp, Glycine max
tttttgattctgatttacctaggaatgcaaatgagggaatgatggcgatggagcagacactgatgaaaggaaagcaagctcaagatgattgtgctgctgttgtgaagaagcttagggctatgctccactcatcggaggagcagcttcatgttctcaagaagcagactttgttcttaacacaattgacagcaaaaacactgcccaaagggcttcattgtcttccattgcgccttactactgagtatcataatatgaattcttctcaccaacaattcccccatcaagagaatttagaagacccccatttataccattatgccatattttcagacaacatattagcaacagctgttgttgtgaactcaactgtttccaatactaaggatgcctcaaaacatgttttccacattgtcac

SEQ ID NO: 51143 - DNA, 318 bp, Glycine max
ctgctcctgggcggacgcgtgggcggacgcgtgggcggacgcgtgggcggacgcgtgggttcacaactcaaaaagtcacaagctacagttggcatttcacaacaccaacaacaacacagtacacagcctataatctatattcttctcttcccactataactctcatttgctactacagaagcaggaggcattccctcacacttattcactgtagaaatcataaagaaaagaagagaaaaagaaatgaatgtgctcagcatcataggcatccaccaccactatcaatgattgactaggacttgactactactcttcatg

SEQ ID NO: 51144 - DNA, 454 bp, Glycine max
ttgtcgcgtgggcggacgcgtgggcggacgcgtgggcggacgcgtgggcggacgcgtggggttttatcaaaccgttgggccaagctaaagagtcaaacctaatatgtcatttaacaccatgggatattgctatgatgtctttgcactacatccagaaaggtctactcttcaagaagcctgcaacacttgttgatccacaagatttcatggagaatctgttagagaagctgaaacactctctttctctcaccctcttccatttctatcctttggcaggccaacttgtcacccaaaaaacccaagaccctccctcttatactatttttgtcgattgcaacaacactagtggagccagattcatctatgcaactttggatatcactatatctgacatactctccccagttgatgtcccacccattgttcactcattctttgaccatcacaaagcagt

SEQ ID NO: 51145 - DNA, 456 bp, Glycine max
gcagtagagtgctgaagaaagtgttgtcttggattctgcggaaacactcccaccatgcttatccaagataaggattcccaccaaagcggcataattttatggcagctgaaaaacagatgggctgcctcctcttccttatctcaacaaaatgggcataatttatcaatgatgtcaacatttcttctacacaaattggatttagtgggaaatctatcccgtaataatctccaagcaaaaaacgcagctttacttggaattttcaacttccatttgtcatgaaataccccatctatattctcatctcttgagtccctgtcaagcagtttgtatgcgctgcatacagtgtataacccagttgggtcactcaaccacacccacttgtcttgttaatgagcatttatgttgagtccttggatttcctccacaaattggcaaccatagaatgttctgcaacct

SEQ ID NO: 51146 - DNA, 356 bp, Glycine max
cccactcgtccgcccacgcgtccgcccacgcgtccgcggacgcgtgggctcgccagcgctacttccatttatcatcgcatgtcctcctcgctctccgctcaggagaaagacaaatctcgcgccgattggataaagcagctcaacgatcctctcgagaccatcgatcccgagatcgctgacataatcgaactcgaaaaagcgcgtcaatggaaggggttcgaacttataccttcggagaatttcacgtcgctgtcggtgatgcaagccgttggatcggtgatgacgaataaatacagcgaaggatatcccggcgctagatactatggaggaaatgagtatattgacatggctgagac

SEQ ID NO: 51147 - DNA, 427 bp, Glycine max
ctcacgcgtccgcttcaatcttgacccaaataaataaataaaaatggttactcttccaattggcattaggaagaattggctaacatactttcagtatgaagaagtaagggacacaccaagcgaaacaagaaacattcttctgataatcttcactttggttgcagcagtgacatttcaagctggagtgaatcctcctggtggagtttggcaagaggataaggatggacacgttgcaggaagagcaatatatgcttcagatacacaagcttactatgtcttcctcatcttcaatactttggcattttctaattccatcttggtcattctctcgctcactcacaagttccccttccatttcgagatatgtgttgccactatttccatggctgtgacttatggatcatccatttttgctgtctccccagac

SEQ ID NO: 51148 - DNA, 450 bp, Glycine max
  unsure (1)..(450): unsure at all n locations
ttctcatataatattgcttcttggttcattctagctaattttgatggctcttccaatttgtctcaccgttattgcaattttcaccctttgttgtgtcattaattgtaacaatggcgttgaagcgtttcatgacatatacccggatcttcaatccatttcagcacgttcggtgagcaaacttcagagaactggataccattttcaacctcatccaaatgggcccatgtactacaatggaatctaccatctattttaccaatacaacccaaaaggagcagtttggggcaacatagtgtggggacacgcagtatcaaaggacctcatcaattggaaagaacttgaacctgccctatacccatcaaaaccctttgacaaatacggngtttggtccgggtcagccactgtactcccgggtaaaggacccgtaatcctttatactggagtcattga

SEQ ID NO: 51149 - DNA, 404 bp, Glycine max
tttctatcgcgtccggcaggttccaagcaattgaaaatgggaaatccgaagacagaagaggaaaggattgaaagagtaattcggagtcttttaaaacttccagaaaatagaagatgcatcaactgcaatcttttgggaccacaatatgtgtgtacaactttctcaacatttgtctgcacaaattgcagtggaatacaccgggagtttactcatagagttaaatctgtgtcaatggctaaatttactccagaagaagtcactgctcttcaagcaggtagcaatgagagagcaaagcagatttattttaaagaatggaatcctctgcgccattcttatcccgattcctgtaatatacacaaacttcgagatttcattaagcatgtatatgtggaaagaagatatac

SEQ ID NO: 51150 - DNA, 414 bp, Glycine max
ctcacgcgtccgcccacgcgtccgctaggctgttatgtgccatgtgaaagttgtgctctctcagctgtggatatcatcttcacacgacttggagccaaagatagaatcatgacaggcgagagtaccttctttattgagtgtactgaaacggcatcggtgcttcagaatgctactcaagattctcttgttatccttgatgaattgggtcggggaacaagcacttttgatggctatgccattgcttatgcagtattccggcatctgattgaaaaagttaactgtcgcatgctatttgccacccactaccatccactcacgaaagagtttgcttctcatccacgtgttataatgcaacacatggcttgtgctttcaattcaaaatcggatacccactccatgcgtgatcaggaacta

SEQ ID NO: 51151 - DNA, 452 bp, Glycine max
ttgttcgcgtggggaaaaggagcagcggtccatacaattcaggagcagcatataagaatccttcaacacaagaggcatcgcctacaacaatggcagataattcaactgctcaaggaagcaacaccctattttctccttacaagatgcctaaattcaacctctctcataggtcatcacactcacacactacacttttccttacttcctattagttctctttatgactattttcttaaatctattcttttttcccctctttatgacttggattttatgcagggtggttttggctccgatgacaagatgcagagcgttgaactggattccccaggaagcacttgctgaatactacgctcaaagatcaacaccaggaggatttctcatcagcgaaggcaccttgatctctctcactgctcctgggtttccacatgtgcctgggatatattcagatg

SEQ ID NO: 51152 - DNA, 479 bp, Glycine max
tttatgatctgaactcatgaagtttgactttgatgttccttgcctgaaatcttatttgattgagaatgttgtcatcttaaaatttgtaggttcgaactatactagacataggttgtggctatggtagctttggagcacacctcttcgacagtcagcttttaactatgtgcattgcaaactatgaaccttctggcagtcaagttcagctcactctggaaaggggtcttcctgctatgattgcttctttcacttcaaagcagttgccatatccatctctatcctttgatatgttacattgtgcaagatgtggcattgattgggaccagaaagatggccttctcctgattgaagccgatagacttttaaaacctggtggatactttgtttggacatcaccgctcacaaatgctcgtaacaaagaaaatcagaaaaggtggaagtttatgcaagattttacattaactctttgctgggaactg

SEQ ID NO: 51153 - DNA, 422 bp, Glycine max
gatttgttaaattactactattttcagcaaactacttttttcttgtataatttgtctcatctaacgtgaaatacatgtgacgaatgatttaggcagatatgcaagtgagggataaaattttgatattgctggactcttggcaagaggcatttgggggaccaggtggtaaacatcctcagtactattgggcatatgaggagttaaagcgatctggagtagttttcccaaagcgttcaccagatgcagctccaatatttactcctcctcctacccatgcaaatttaagaaatatgcaagctggatatgggatgccaagcaattcatcaaaaacacttgatgaaaccatggcaacagagatagaaagtctaagtttgtcaagcttggagtccatgcgtcacgttttggaccttatgagtgacatg

SEQ ID NO: 51154 - DNA, 229 bp, Glycine max
gagtggggattctgagaatataggggaacaggtttttctgacggtgataaatgtgataacgaacatgctgtggggaggggtggtggaaggggcggagagagagagcatgggggcggagtttagggagcttgtggcggagatgacgcagcttttggggaagccgaacgtgtcggatttttttcccgggttggcccggttcgatttgcaaggtgtggagaaacagatgaac

SEQ ID NO: 51155 - DNA, 333 bp, Glycine max
agagagtgataccaagaggagagttaccatcaaaactggcatcgtgtctgttgcattatttggtgggtacttgtggtatgaatacatatacaagctggacaaggtctcatacaacaagctccacccctacacctcttggattccaattacgtgagtgttatccatttattttattccttttgctgggctttatgttttctttgtttccttgcttgaagctggaaagatagcagtcctagactaatatatggaatgcatttatatttttcttttcagctccttctattgattcttttgcctattatttttcaatgtatacatttgcttgagaaa

SEQ ID NO: 51156 - DNA, 412 bp, Glycine max
ttatacatttgcgatattctaaaggttcatattattaagagatgaaggagaaggttttcttcctttggtggtttggaatgactctgaggctttgtttcttgctcggtgccagctgttctgagaagacaacattaagaagaggtttaagggagaccttggccaagcaatcgacaacttctaaatctggggtcatggtgaattcaaacaatcgtgaacagttggtggttgacaatggtattgttgccgtcaccttttcaagacctgagggctacatccttggaatttcatataacggaattgacaatatacttgaagaagaaaaccaagatcaagatagagggtacttggacgtggtctggaatacaccgggaaagcctagtaactttcagagaatacacgggacaattttttc

SEQ ID NO: 51157 - DNA, 335 bp, Glycine max
ttcttttggaggttgttcagtatatcaaggagaataagcatggaggaaaatgcgaagtggcaacaatagaggatggaaaatttgttggtgattctgatgtgggtgaattttggagtttatttggtggttacgctcccattcctcgagattcgccttgtgttcaggaatctgagactcctcctgtaaagctattttggataaatttacagggaaaactttgtgagactggaagcaatgcattcagcaaagaaatgcttgagacagaaaagtgttatatgttggactgtgatggtgagatttttgtctggatgggaaggcagacttttttgacagaa

SEQ ID NO: 51158 - DNA, 277 bp, Glycine max
ggttagtgaaacaggtcccagtcgcacaaagctctgattctcatgcaaaaaatggtgaaagtgcctacaataaaaacactcttgttgttcaacaccgcatgctatcaaggccttcaccacacttcccactctatctccttcacactaaagcatctcctttcctctggcatgctaccccaagcccaatctctgatcctgcgactaatctctggtcgaatcccctcctgcttaatgcttcaactaacacaagcccatttcacctcttgttcaacctaca

SEQ ID NO: 51159 - DNA, 391 bp, Glycine max
cccatgcgtccgcccacgcgttcgcccacgcgtgcggcgcactcgcgcttcatgaatcagcattaccaccgctccaacacaggggaaaatgagggagatccttcacgttcagggagggcaatgcgggatggggacgcttttgatttccaagatcagagaggagtaccctgacagaatgatgctcaccttctccgtttttccttcccccaaggtctctgatactgtggttgagccttataacgctactctttctgttcatcagttggtggagaatgctgatgagtgtatggtgcttgattatgaggcgctctacgatatctgcttcaggactcttaagttgaccactcctagctttggtgacttgaaccacttgatctctgcgaccatgagt

SEQ ID NO: 51160 - DNA, 395 bp, Glycine max
actacgcgtccggtgaatttttttacatttgctgtgccaatgaaccgtaagactttatcatcagatacatgcacaactccacgataaatcgtcgaaataaacaaaatttaacgaattgaaaactctaattgaggccttgttcgtgaagcaattaagatggagataatttacgagcctcacatccacggggagattgaatcgctcatagaaagaatctatccacccagggtttgtatagacaacgattccagcagagaatgcacagtggtgaagattgatagcgccaacaggcatgggatattattggagatggcccaggtgttgacagatcttgatctcgtcatttccaaatcatacatttcttccgacggtggatggctaatggatggcactgt

SEQ ID NO: 51161 - DNA, 353 bp, Glycine max
cctacgcgtccggcagaaaccccaacgtcagaaccgtctatggcatgcgcgctatgtatggagaagactactatatctgcagatttcagaaaccaggggaaatggaggctcagatggctcaagttggcacagagtatgttctcaaaaacatccttacaattcgcaaacctggagcgtcaaacttccccaaaggagcagtttggaacaggattaaatccgaatatgtctgatgataccttaccctcttggctcacagacgatgatcttgcctattatgtttccaaatatgagaaagcgggcttcactggacccttgaactattaccgaaatatgaacttaaattgggagctgac

SEQ ID NO: 51162 - DNA, 356 bp, Glycine max
gatggcggagggggtggcgggggaggtgtagggacggtggtggggctgttcgtgaagccgctgttcgaggcaatgggggagcagaacaagggggtgcaggcgggggcggcggtgtgcatggccaagatggtggagtgtggcggtggcggcggaggaggggaggcggtgccggtggcggcgtttcagaagctgtgtccgaggatctgcaaactgctcaacagtcccaatttcatggccaaggcggcgattttgccggtggttgccagcttgtcacaggttggagcggttgcaccacaaagcttggaacatttgctgcctagcattcatgaatgcctttctagtactgattgggcaac

SEQ ID NO: 51163 - DNA, 415 bp, Glycine max
cgactacttaattatcacatttttttatatccaaaatggtcatttagcatcctaacatacatcatcatcccgggagttgatccattccactgcaaaatgaggattgagcaagagagtgatggagtctccgcttccacaaagcacctcgtctttgcgtattacgtcactggtcatggttttggccatgccactcgagtcactgaggtctctctgtctctctcccaattcatatcctttttcgttttcgcgtcatttttggccaaatggggtgcttgatcacgcattctatttcaaaattgaattttgtttctgggttttcagttttggccttgatcatctgatattttttttttgaatttttcaaagtgtgtctgttttgtggggattttttttcttgttatgtgatgtgaatttt

SEQ ID NO: 51164 - DNA, 371 bp, Glycine max
ttgctcgtgggcggacgcgtgggattcttcaatctctctcactcactcatattacacttccactcaccctgcagaacagccatgtcaacactgaaccacctctttgatcttccagaacagatatgctacgtacaatgtggattctgtacaacaatactaatggtgagcgttccatgcagcattttgtcaacagtggtgaccgtgagatgcggccactgcacaagcctcctctctgtcaacatgaagaaagcttccttggtccctttccaccttctagcttcccttactcatcttgagccaaaagaaggtgcttcagaagatggtgcaaacaagagtttgagcagctataatacatccacaatgaccaattc

SEQ ID NO: 51165 - DNA, 424 bp, Glycine max
ttactctttcgcggacgcgtgggtagcaatggccgccacaaaaccattgttaaccgacctagcctccaccattgatcgcgttccctctaacttcatcaggcccattggtgaccgtccaaaacttcatcaacttcactcctcccttgcttctattcccatcatcgaccttcaaggccttggtggctccaatcattcccaaatcatccaaaacattgcgcatgcttgccaaacttatggcttctttcaaattgtgaaccatgggattcaggaggaggtggtgagcaagatggtgaatgtgtcaaaagagttctttggtttgccggagagtgagaggctgaagaatttctctgatgacccatccaagacaacaagactctccaccagtttcaatgtcaagactgagaaagtttccaactggagagac

SEQ ID NO: 51166 - DNA, 356 bp, Glycine max
gattaggcggatctccggcggcggagcgtccaatgacggtttcatcgaagaaagcaacaccgaattcgtgtcgtacaccgtccatatccctccgacgccggaccgcaggccgctgacggcatcggaggacggaaagagcggcacgagcttcatctccggcacgatcttcacgggagggtacaactccgtgacgcgcggccacgtcatggagtgctcgatggagagcgacgcgcaggcgaaaacgtcgtcgtcggtttgcggaatgaagggctgcgacgaagaagcgataaagggaaggctgtgtggtgggccgtgcgagtgcgggttcaagatctgcagagactgctacttggagt

SEQ ID NO: 51167 - DNA, 452 bp, Glycine max
gcttatgttgaaagctttaaatgtgttgatgcttaagattttggataatgctgatcggacttcatcctttgttgtcttaatcaatcttttacggccactagattcatccaggtggccttcaccagcattaaatgagtcacttgcttccagaaatcagaagttctctgatctagtcgtgaaatgccttatcaagcttacaaaggttcttcagagcactatctatgatgttgaccttgatcgcatacttcaaagcatccatttgtacctgcaagacttgggaatggaggaaattaggagaagggctggtgctgatgacaaacctttacgaatggtaaaaactgtactgcatgaacttgtcaagcttcgtggtgcagcaataaagggtcatctttcaatggttcctatcgatgctaaacctcaacccatcatccttgcctacattgaacttaatc

SEQ ID NO: 51168 - DNA, 417 bp, Glycine max
aggtaatgctttagctagatgagatcaatctgaagctaatggttataatttcaaaattttaagagtggaggacctgtgttgtgcacgttagagtgaatcgttcaagattaatccttaacaacctgaccaccaggaacaaccagctatcattttacattgaactagaaattcatttagaagatcaaagacaaaattttccgattaaaacgtacttaaattgaagaggggttgttggcattgtgcaccaaaaaggaaaaaaaatgtggaggttaaagatagcagatggagggaatgatccctatatatttagcacaaataattttgaggggaggcaaacatgggagtttgattctgaggcaggtaccgctgaggaacgagctcaaattgaagcagctcgtcaaaacttttatgaaaatc

SEQ ID NO: 51169 - DNA, 432 bp, Glycine max
ccttgcgtccgagagtatctggaatgcaatccatgttctcatcatgcttcaaagctgcaagaatctctgccatacttattgatgatggcttacaattggacaaaaagcatgatatagaatggcataggagttttacacctcttgttggtagaatcttaagaattgaacggttggctgaggaaatccttgatgaggacttgcctgatggatcttcttggacagtggattcatttactaaagcctttgtctcaaagttaaaatcagtttctggtgagatctttggattgaaaagcatagctgcataccgcagtggcctagaaatcaatactaatgtgactaaaaaggatgctgaggaggggctgaggcaggtgttgattgctggaagcctgtccgtattgcaaacaaaaatcttattgactacatcttcttaca

SEQ ID NO: 51170 - DNA, 200 bp, Glycine max
ttcatgcgtccggaaacattatgacggattacggagaggcaggtaagacatatatcaaatggtgtgcacaaatggctttggcacaaaatatcggtgtcccttggatcatgtgtcagcaacacgatgctccccaacctatgatcaacacttgcaatgggcactattgtgacagtttttaacccaataaccctaaaagtccc

SEQ ID NO: 51171 - DNA, 285 bp, Glycine max
cccacgtgatcgcccacgcgtccgcccacgcgtccgcccacgcgttcgcttctttagcattctttcctcagcccaaagtttttgtgcattttttttcagcttatgatactagaagaagggtgtgcaaaaatgcaattttttcagccatctaaggagagagaagatgagaatgcgaagattgaagaagctggtgtggatctgaaggtgatgattgaggaaatggaatccattgatgtgccttcagggttcatctgcccaatctcccttgaaccaatgcaagaccct

SEQ ID NO: 51172 - DNA, 278 bp, Glycine max
attgatccaacaccctcctgcattatactaatgtctttgatgcttttgttgatgctgcttattttgctatgccatatttgaagtttaccaacatccctattttagtcacagagtcaggatggccctccaaaggcgactcatctgagccggatgcaaccgttgacaatgctaacacttacaatagtaacttgatcaggcatgcccttaacaatagtgggactcccaagcaacctggaattgcagttagcacttatatttatgagctttataatgaagac

SEQ ID NO: 51173 - DNA, 311 bp, Glycine max
agctctgtgaacagtttggatggagaatttgttgttgatggaagaagtgttaatggttctaaccgcggcacggtggcagccgttggatttgccatgatgtttggagcctttgtgggtcttggtgctatggtgatcaagtggcacaagaggcctcaggactggcaaaagaggaacagcttctcctcatggttgcttcctctgcacgctggtgacacaagcttcatgagcaagatctcaatgggaaagagcaacttcttctcctcgtcgatgggattaggccggtacttctccttcgcggaacttcaggaagc

SEQ ID NO: 51174 - DNA, 359 bp, Glycine max
cctacgcgtccggttttggattctggctgcacattctgaaatgaatctgttggcggccggtcatgatagtgggatgattgtgtttaagttggagagggaaaggcctgcgtttgctgtgagtggtgatgctttgttctatactagggaccggtttttgaggttctatgagttttcgacacagagagagacacaggtgctgccaattcggcggcctggatctccaagtcttaatcagagtccaaggactctttcttatagtccgagtgaaaatgcagttctgctctgttcagatatagatggtggatcttatgagctgtattgcatatccaaggatggctatggcaggggtgatttgcagg

SEQ ID NO: 51175 - DNA, 367 bp, Glycine max
ccactcttccgcccacgcgtccgcccacgcgtcctcccacgcgtccgggaacacttttaaattacagggactaaaaaagaattaaaatgtaaagtataaggactaaaaataccactttcaaactataagaactcaaaaagtaagaattatgaaactatagggaccaaatgagtaatttaacctaaattaattttgtacctgcacaattttcaatggctacagttccctttccttcaaggatgataagatcaccattgtcaattctaacttttgatacatatgatttgtccaattctctgaaaacctcttgatcgtgggtcatgtggttggtacaaccactatccattagccaacatccccttgagct

SEQ ID NO: 51176 - DNA, 235 bp, Glycine max
atgacgcgtgggttttagcatagttgcctaagttgtagattgtttgtatacttacaagtaaatacatggatgggagagaagctatggcattctctgatggctcagctccatattacatgcatagagtaggggttggagggtctggctgtggtttccaaccagccactgtgttcagaccttggtcaaacactggcatgcaagctgagtcaaacgcaaggggtggtcagggtcaggg

SEQ ID NO: 51177 - DNA, 381 bp, Glycine max
gcgattacgcgtccgcccacgcgtccgcccacgcgttcgcccacgcgtccggcggtctctcaccgcacgcactagcactgtctcactctctcacgcacgcatcatctcaaacttcttcgcactttttcacggatctgatctaactaagttctcgccatgaatcgccacaacgaccccaatcctttcgaggaagaagaagtcaatcctttttcgaatggtggtgctgctcctgcatccaaatcacgtattccaccattagcatgtcagccactgggctacggtcaaaggcatgatgctacagatgatattcctttggatactacaaatgactccaagaaaagaggtcaagagctagctgcttgggaagcggatttaaaacgg

SEQ ID NO: 51178 - DNA, 238 bp, Glycine max
ccccggcggtgcgtcgatggagatccaccaggcgctcacgcgctccgccgccatccgcaacgtgctcccgcgccacgagcagggcggcgtcttcgccgccgaaggctacgcgcgttcctccggcctccccggcgtctgcattgccacctccggccccggcgccaccaacctcgtgagcggcctcgccgacgctttaatggacagcgtcccagtcgtcgacatcaccggccaggtcccc

SEQ ID NO: 51179 - DNA, 416 bp, Glycine max
cttttaccaaaccaaaccaaaacaaaacctacgagtggtgtctttatgtttgtgagacccatacgcggtcttacttattgttcttcttcttcacttgtcctctgttttgaattgctctgctctgcatgaaacagagtcccctgttggattgttcattgcaatgaggtatattcggagcaacagcttcaagaggttcttctcattcagaagacgcacttcaagggaacagattctgagtcccaacagtaagggtgaaggaaacaatgagattcttccgcatgaagaagaaccttctcgaagaccctcttggaagtgcttcttttatgaagagttgtttgatgccaccaatggcttcagctcagaaaatttggtgggaaaaggagggtatgcagaggtttacaagggaacaatgaatg

SEQ ID NO: 51180 - DNA, 428 bp, Glycine max
ccacgcgtccgcaaatcccgcatctttctccgtgttcttgtgcaagcaagaaagcacttaaccaaactctctgtttcagctttctctgttttttcggcacaaacagatttcggctgtttttaagtatggccataaagacaatggaactattgaaagggtgcggatcacaggaagagataatggaagtgctttctgcagtggcttcggatttgggggatgtgatcgatgatgtgaacaccttgcaggtgattccactgaatggtgcattgaccaatgaagtttttcagataaactggccaaccaaaaatgatggtgaggtcagaaaggttctgattcgtttatatggggaaggtgttgaagttttctttgacagggaagaagaaattcgaacctttgagtgcatttcaaagcatggtcagggtccacgc

SEQ ID NO: 51181 - DNA, 433 bp, Glycine max
aaaaatggagaagatctgcgtcgccgttcgttttcgcccactggtttcccaagactcttcttcttcctccgtcggaactttctggaaggtcgaagataaccgcatctctctccacaagatccatggcactccactctctgcttcttcttacgctttcgatcacatatttgacgaaagaagcaccaatgctagcgtctacgagcttctcgccaaggacatcattcacgccgcgctcgacggcttcaacggaactgcatttgcgtatgggcagaccagtagtggcaagactttcaccatgaatggttctgaaactgacgcaggagtgattcctcgcgcagttggagacatatttgcgacaatggagatgatgtctgatcgagagtttctgatacgagtttcctacatggagatctacaacgaagaaattaatgac

SEQ ID NO: 51182 - DNA, 403 bp, Glycine max
gccgctggaagaggtgcccacatctagtgtccgaccgtgcctcgaacagaattgcctcctttggaggaaacctgaagtggaccttataagaatgaagcggagggtgaagaggaaagtgcctgaagctaactccaacactatgataatcattcggatacaggggtgagtgaagaaaaaagacatgcatcctaggactaggaaggtgttgtacagcttggggttgaggagaaggttcagtgctgtgtttgtgaagccaagtgagggaataatggccaagctgcagagggtggaaccatatgtcacctatggatatcctaatcttaaaagcataaaggagctaatttacaaaaaaggacatgcaaggatggaacagcgaaaagttcccttgacggataataacatt

SEQ ID NO: 51183 - DNA, 345 bp, Glycine max
cgcggacgcgtgggatgtggtggacacagctatgaagggacttcatatgttgctgatgatggcactccttttgtcatcattgatatgatgaatttgaaccatgtttgggtggacatggagacagaaacagcatgggttgaaggtggtgcaacattgggagagacttactatgcaatctctcaggaaagcaatgaacatggattctcaggtgggtcatgtccaactgttggagttggagggcacattggtggtggcggatttggtttgttgactagaaagtatggtcttgcggcagataacgtggcggatgcccttcttgtcgattgctaacggaaaattgttcga

SEQ ID NO: 51184 - DNA, 304 bp, Glycine max
cacgcgtccgcccacgcgtccgcggacgcgtgggaagaatgttcagtttgcacccacagttctgtgcggcatttctgttggtggaataaatatgttgccacaccaattcaatcttatggaaatggggatgctgggaaaagagccatgatattgctcaaacacaaagttttgaagaacatagtattaaggcgcactaaaataggcagggctgctgatcttgcacttccacctagaattgtttcattgagaagggattgcttggatattaaagagcaagattattatgaatcattatacaatgaaa

SEQ ID NO: 51185 - DNA, 401 bp, Glycine max
gggcggacgcgtgggcggacgcgtgggcggacgcgtgggatttttagtgtttgtacatttcagcttgaaatattactacaagggtttagatgcttcaaaatatcatctagtaattttatgatcatgggtttttttattttagtctatttgtcctccttcaatttttagaatatggattgttttgagaattgaagtttgattgctttttataagtaagttgtcttggaatcgtatgaaataaggagctcagttcgttcccatctttatatctgaagttttataattttgtgtttatttttttatgttaaaaataagcgttacatcaaaatggtgaggcaaacttttaattgagttataaacaatttaaattttaagtgggagagtttggagttcataaaata

SEQ ID NO: 51186 - DNA, 485 bp, Glycine max
tcttggccgttctagttcagttgttaacactcgtgtcctgttacaaatcacttgtgctcttatcgctgtttgttcctcacttttttctctcattcagtttcagtgtcacaatccatcacaaaaacgtgttcaactatactgatattggaggtacaaggatcatgcttgggaacggggttgttgggatcttggcagaatctgtgaataaatgggaaagaagggcacctttgaccccatcacactgtgctcgattactccatggtgggacaggtgtttctaggatcattgtgcagccttccactaagcgaattcaccatgatgctctctatgaagaagttggtgctgaaatatcacaagacttgtcacaatgtggtctcatccttggcattaagcaaccaaagctggagatgatattaccagatagagcttatgccttcttctcacatacacataaagcacagaaagaaaacatgcctttgctggat

SEQ ID NO: 51187 - DNA, 367 bp, Glycine max
ggtattttgttgctgctaaattgttctacttaagagttttgcttcaatcattgatttcggggctgggttttaaggtttgaaattgctgaaagtttactgaaatgaaactttcttcacctggttttagtcctccaccccaggaaggagaaaagcgagttctagattcagaactttggcatgcttgtgctggtcctcttgtttctttaccagctgttggaagccgagtggtatactttccgcaaggtcacagtgaacaggttgctgtgtctaccaacagggaagtggatggccatatacctaactatccaagcttaccaccgcagcttatttgtcaacttcataatctgactatgcatgcagatactga

SEQ ID NO: 51188 - DNA, 497 bp, Glycine max
  unsure (1)..(497): unsure at all n locations
ttttatcgcgtgggcggacgcgtgggcggacgcgtgggcggacgcgtgggttcttgctctgtattttgtttttcttttaaatttttctttaaatttctcaattgatcaaagatcttcagcaaaccggtaaattctctctctttttctacgattcggttccgagaattttcagattcacagatctgtggcatttctggcttcgtttgatctgcatttgtcatccgttaatctttttctggttctgtaaatgattgcatgtgcgtcgataatcttgaagtctcgcgcgcgttgtttgtgaatgaacatgtcgtgtgtgaattgtcgattgatggcgtgcgattagggttttgaattcngtgatcgtgttccgatttgtgttatttcagggtttgtccttgaattcgttgattcagatctagcttgatcgagtgtggtgttgcttctgatattatctgaatggtttgcttaaatcattatattttttttttcgaaatcac

SEQ ID NO: 51189 - DNA, 497 bp, Glycine max
tgtgtacgcgtgggcggacgcgtgggcggacgcgtgggcggacgcgtgggcggacgcgtgggcggacgcgtgggtgggaattggctagtacagagcaacttccagacttcatgaaaatgtgtttaagagttctttacgaaattaccaatgactttgccgaaaagatctacaagaagcatggattcaaccctatagagaccctgaaaagatcgtgggttcgattgttgaatgctttcttggaagaggcacattggttgaattctggtcatttgccaaggtcaggggagtacttgaacaatggaattgtgagcacaggagtgcatgtggtgcttgtccattcattcttcctcatggattattctataaataacgaaattgttgctatcgtggacaacgttccacaaattatacattcggtggctaaaattcttcgtctttctgatgatttggaaggagctaagagtgaagatcaaaatggacttgatgggtcatacatt

SEQ ID NO: 51190 - DNA, 467 bp, Glycine max
atttaaaagtatataactactattatatgcagggttttagctcctacagaatcaccccacaaccaatgtttacattcataaggtggttcatcaaaccaatgtattattcccaaggataattcatggccccggttaggcatataatcaagcagcataattgtcttaaaataaaatcttgtttctgttcaaagataatccaaaaatagacattctcgtccgggtggtgtagttggttatcacgctagtctcactcactaaaggtcttcggttcaaacctaggctcatacatagaattttcaagtttacttcaagagatctttgtagtcttttttatatatgctttgtgatcaaattttacagattccacaatcaaggaggacatgagttgatttgagtatgtaaagtcacagcgcaagcaagcagtgtttcatcaccatagtcttatttagtccttgcttatacatata

SEQ ID NO: 51191 - DNA, 445 bp, Glycine max
  unsure (1)..(445): unsure at all n locations
tgtctcgcgtccggttttctctctctatatccctgaagtcccgtccccccaataagaactaataagaaaaagcaaaaagtattcattggtgaaacttcatttccctgatgttcaaagtgtatctggtttcatcttttctgttggggcttctgctccttgctcaagcacatggaaatgataagaaaattgggttttatcaactcaagagaggagatttgcatctgaatttgacaaattatggtgcatcactcatatctgttattgtacctgataaacatgggaatttagatgacattacgcttggctacgatgacattgagcaatacaagaatgattcatggtacttcggagccactattngacgtgtggcaaatagaattggacacgctcagttcacattggatggccacacctataaattgcctgctaatgatcacgggaacac

SEQ ID NO: 51192 - DNA, 401 bp, Glycine max
ggctctgaaccctaatcatcgtccgtagtgaagtgggagattagagatggagttggcacaactagaagcattgtgtgagaggctgtataattcgcaggactcggtggaacgtgctcacgcggagaacacactgaaatgcttctccatgaacactgaatacatttcccaatgccaatacattcttgatcatgccttgacaccctatgcattgatgctggctagttccagtttgttgaaacaagtcactgaacatagccttgccatgaagcttcgccttgatatatggacgtaccttatcaactatctagcgaccagaggacccgagttacagccatttgtcgctgcttctttgatccaattttgtgtcgagtacaaagttcggatggtttgatgatgatcga

SEQ ID NO: 51193 - DNA, 477 bp, Glycine max
cagatgaaaactttttaggaaggctttctcaccccaggctggttaatctattgggatactgttgggacgaggataagcttcttctagtgtatgagttcatgccaaagggaagcttagactatcatctattcagaggaaacataacaccactttcttggaacacacggcttaaaatagctattggtgcagcttggggattagctttcttgcacgcctctgaaaataatgtcatattcagtgatttcaaggcctcaaatatacttcttgacgggaattacaatgcaaagatctcagattttggctttgctagatgggggccttttgaaggagaatcacatgtatctaccagggtcattggcacatatgattatgctcctccagaatacatagcaacaggccacttgtatgtgaagagtgatatctatggatttggtgtagtgctgcttgaaatacttacaggcatgcgggcacttgaca

SEQ ID NO: 51194 - DNA, 388 bp, Glycine max
gtaaatcaggactcaatgatatttctaatattggacttcatagcccttttaactggtctttatcttctcctgtttggctcatctgcttctggtgtgacttctgctcagctctattttggtggagctactctcctcctcatcttcccattatgtattcctggcattgtatatgctcgggcttggtttcggcgtaccatccattccagctttcagatgggaagctctagcttcattcttgttcatgatgatgatcttgagatgcatagagagctccatagctgtcacaatagttttgttagaaatggagatacttacagtctgcttagtgataacggatacatgtttgggagccagagggaaaaagatagtgatatgtgttgtgagacga

SEQ ID NO: 51195 - DNA, 425 bp, Glycine max
gctataacgcacatttcactattcattctcgtggggcctttttactgtgattggtgggtaactgaacttttcgagcaaaatgtctggacgtggaaaggggggcaagggtttgggaaagggaggagcgaaacgacaccgtaaggtgttgcgcgataacattcagggaatcaccaagcctgcgattcggcgtttggctcgcaggggtggtgtgaagcgtatcagtggtctcatctacgaggagacacgtggcgtgctcaagatctttctggagaacgtgattcgtgacgccgttacctacactgagcacgctaggagaaagaccgttacggcaatggatgtggtttatgctctcaagagacaaggaagaaccctctacggatttggaggctagtttgttttttttttttttttttttaatttttatt

SEQ ID NO: 51196 - DNA, 346 bp, Glycine max
tggtaaactccatgtcactgtgaggaaatccaatgcttcaagatcagacatcttctctagaaggtctcagggtctctcttccaccactccacgcccttccaaccttaccaatgctgagatatactctttgcaatcctctaggaaccctacgccgagaggctctagtttcaaccacactgatttctactccatgatggctgctggtggcaggaactcaaactttggtgcctctgatgtttatggcctttcagcttcaagagggccaactccaaggccttctaactatgatgaagatggtgggaagccaaagtttcattaccatgctgctggtggaactgggcactac

SEQ ID NO: 51197 - DNA, 465 bp, Glycine max
atgtacttcttcacaaatccaatatttttaaggattcaggaatcaaatgctgaatgctattaaaggcttctcaagatcacgtcagaatggattgttcataaattcatgttttgctcactgccaatctgagaggcaggatacatggtttgctgacaactctcctgtcattgggaacaaggcaattgctctttctgttggagactggtatttcgaccgagcagttgttaaggccattgattgtccttacccttgtgataatacatgccaccatcttgtcttcagatgagccaaatctcgtcaatctccaccatttccctcatctcattcatttggatctattattacttgcgattaggaaatatgctattcaattgggaggaatgctagtaatacacttttttgacacattttttctaacacattttattattaggtgaaattcatgcaaaagacttactaaattat

SEQ ID NO: 51198 - DNA, 454 bp, Glycine max
gcccacgcgtccgcccacgcgtccggattgacagtgaggtgattaacatgattgcacattcatctgaatttgagaatattgctgttcgggaagaagaacagaatgagctagagatgttggcacgcacatcatgtccattagaaattaagggtggtccttccaataaacatggaaagatttccattttgattcagttgtacatatctcgaggttctatagattctttttctttagtatctgatgcttcatatataagtgcaagcttggctagaataacacgggctttatttgagatttgcttaccaagaggctggtgtgagatgtctttgttcatgttggaatattgcaaagctgtggatcgccaagtttggccgcatcaacatcctcttagacaatttgacaaggacctttctgcagaaatattgcggaagcttgaagaacgtggggctgacct

SEQ ID NO: 51199 - DNA, 317 bp, Glycine max
cccgatatgccatggaatctagcaagattttgtgctgcagggctgatcaatcttagtgatatgggatacaaaacattgtctaaatactatcaagatctaatacctgatggatcctgttctcctgtatcttcaaactcaagctggaaagttagtcgatttgcatcaaattctacagaaacagatccagctgggatggttgttgtcaaggattttgtttctagagctgttgtagcacaatttagggctcatactagtccaatatctgcattatgttttgacccaagtgggacactcttagttacagcctcaattcatgg

SEQ ID NO: 51200 - DNA, 395 bp, Glycine max
gcggaaggataaaattgaagaaggaaatagaatacttgtccagaaattccagtctcagttagctcaacagctagaagatttgcacaagacggttgcagcatcggtaattcaacaagagcagcagctaacggaaatggaaaatgatatggattcttttgtatcaacaaaggcagaggctattgaaaatctaagagcgcgggtcggaaaatttaaaaacatgtgtggttctggcattaaagctttgggcaatttagctgaggagtgtaaaggaaatagtgagttaacttttgaagagttgaattctgaagtagccaagcattcatctgccttggcgaatgttattcaaggaattgcattagaagctgattcattactaaatgatcttcaaagtactc

SEQ ID NO: 51201 - DNA, 426 bp, Glycine max
ttgttgttccctgtgacggttgatgagttaaccaccttccctgttggagctgtttcaagttccaagaagatggggttcgatgaaaacaaagaaaccggagagaaaagtgatcatgcaaatgaagaacattataaaagtgaaggcgagcccttgagcaggcacgtgaatgagtcctctatccatgcaactgaagatgaggaggatgaagttggatccaaattacaattgggtcctcagtgcactcttaaagagcaccttgagaaagataaggatgatgagagtttaagaagatggaaggaacaactacttggaagtgtggatgtgaacaatgttgcagaaattctggaccctgaagtgaatattacttgtttgtctatcatctctcctgatagagatgacattgttctttccattcctgagaatggg

SEQ ID NO: 51202 - DNA, 457 bp, Glycine max
ttgtttgattggaaaattcttcactaaacagagcaagcacaggaaatggaaatttgaaagaaagaatgggacagcttaggtctgaaagttcggcctctgaaactgagggtctggcaagggatctcaagaggcagaagattctggactttaaacctggaaaggaccctggtgcaccattgcccacaaatgcttcaatttacttgtgtccaattggaaggatctgctcattttgccaatcctctaaaatctcagaggttactggaccaatgctgcattatgcaaatgggaacttagttaccggagatgcagccatgaaaccaaatgttgtacctgtgcatagaatttgcattgactgggcaccacaagtgtactttgatggtgaagtggttaagaatttgaggcagaggtggcaaggggagcaaaacttaaatgcagtaaatgtaatctaaagggagct

SEQ ID NO: 51203 - DNA, 466 bp, Glycine max
actacaataccatagcttccagcagaccaaccagtgttaacaagccatccagtagcaccatgcttctgcatcttttcagcaagcattgctgcatactttgtagggtgtagcataatgaatgctgcaccaaaacaagctgaaaaagttgcctgaggctccttaatactggttggtctgctggaagctatggtaatggaagccgtattaaactacaatacacaaggaaaatcattgatgctattcactccggaagtctcctgaatgcagagtacaagaagactgaaatttttgggcttgagattcccaccgaagtggagggtgtcccttcagaaattctggatcctatgaacacttggtcaaacaaaaaggcctacaaggagacactattgaagttggctggattgttcaagaacaattttgaaaccttcaccaactacaagattggcaagggaaacaacaacctgac

SEQ ID NO: 51204 - DNA, 337 bp, Glycine max
atcctccgcccacgactacgacgccgttttcgccgccatccaccgtcgcaggctcaactggatccccgtcctccagatgcagaagtaccactccatcgccgacgtcacgctcgagctcgccagactcgccgatagaaaccactacgctgccgccgaagacgacgacgccaaacacgaaaccgacgagaaaacgacgccgtcggagagtgtcggagatggtggtggcggtgatgaacacgaggagttatgagtcacccgagagcgagattactgattcaggatctcaagaaattgcaggctagtccaacgaacgttaatatatgttccaatcatgaag

SEQ ID NO: 51205 - DNA, 363 bp, Glycine max
acttggtgattgccggcagcataatatcactatatgaagactcttgttgagacacgaaacacagagaaatggaagcagcgtggatcacaattctggtactgatattgatcctctctctgataggcgcatggaagttgctgaactggttatggctcacacccaagagactagaaaggcttctgagagagcaaggccttcaaggcaatccatacacgcttcttgttggggactccatggaggttatcaagatcagaaaggaagccttatccaaacctatcactctcttctctcatgacatagtgccgcgtgtctcttcctatgctcaacacactcttaacaaacatggcaaaaattcttttatct

SEQ ID NO: 51206 - DNA, 368 bp, Glycine max
aggtggctccaatcatgggtattatggaaatcctgcgtctggcttatctcacccaggaagtccagtggcaaactctttatctacttcgactgttggatctggcagtcctattaggcacaatgacctgaatatgcgttttgcttctggaatgaggaatttagctggggtcatgggaccatggcacctagatgctggtaacatggatgaaaactttgcttcatcacttttggaagagtttaaaagcaataaaaccaagtgttttgagctttctgaaatttctggtcatgttgttgaattcagtgctgatcaatatgggagccggtttattcaacaaaagcttgaaactgcaactactgaagaaaaaaaca

SEQ ID NO: 51207 - DNA, 396 bp, Glycine max
  unsure (1)..(396): unsure at all n locations
atnatantttctctgcgagctttcttgtatgttttgggttccttgaggctgcatatctttcagcatgtctgctagaattccacaaaggagcttggtatctggttgtcctattggcagtgtcaatgacagtgatgctttcatggcattatggaacaatgaagaagtacgagtttgatttgcaaaacaaggtatcaaccgaatggctaatagatattagtccaggccttgggatttccagggtacccggaatcggcttcatttacaccgacatagtagcaggaatcccagctttcttttcacattttataactaatcttcctgcatttcatcaagtgttgatcttggtgtctttcaagtctatagctgcgccttatgtaccagaaagtgaaaggtatc

SEQ ID NO: 51208 - DNA, 335 bp, Glycine max
tccaaacacaaacacaaagcacgttcttctgtctctgtcttcatcttcggtgaatgatcactgatcactcatcatcatcatcatcatgggggtgttacaggagaagctctcttccttctacaagagccggtggctagtgttcgtggccgcaatgtggctgcagtcgtgggcgggcatcgggtacttgttcgggagcatctctccctgtcataaaaagctcccttggctacaaccagaagcagctcgccatgcttggcgttgccaaggaccttggtgacgccgtcgggttcatgaccgggcttctttgtgagatcttgcccattctggggcgcgct

SEQ ID NO: 51209 - DNA, 337 bp, Glycine max
gtggcagttgggttggctataacaagtgaaagtggacaaaacaatggaaagataaccctttatgttgccctctcttgcatgatggctgccatgggaggtgttatctttggttatgacattggaataacaggtggggtgacctcaatggagccatttctgaagaagttcttccacaaagtgtaccttaagatgaaattagctgatgacaaagtcagcaactactgtgtatttgatagccaactattgacctctttcacatcctctctttatgtcgctggtcttgatacttccttttttgcttcttatatcaccaaagccttcggtcgcaagccatcca

SEQ ID NO: 51210 - DNA, 300 bp, Glycine max
atggctctctgtgaacaaagatttcaaggtttggatcctccgtgagatttgaaggaactcggaggaaccgcgagcttaatgaaaagttgaggtttttaatgtcccctgcttcaaccctgcgtctacaaagagggcacgtagagtggctttcaaaccacttgtcaatgcaattcatgtggaaagcgtgcttgcactttggaagaagtcttagagtctctgtgtcctcgaatttggagagacaaacggtgcattttaggccttttttggaacccttgagggaagagaacttgaagaaaggaa

SEQ ID NO: 51211 - DNA, 299 bp, Glycine max
tgtcagttttgaagtgaatggagaaattttcgttgctcataaattggttctagcagctcgttcacctgttttcagggcccaacttttcggtccaatgaaagatcagaatacccattgtataaaagttgaagacatggaggctccagttttcaaggtttgaatgagtgctctttgtgctttatgtttttgatttatgcttgtgatgcggttggaaaatgttttggttaccctttctgttcataccctgatatacacagtcctttatgattttggaagacactttccttgcttttcccctt

SEQ ID NO: 51212 - DNA, 424 bp, Glycine max
ttcgatatttttaaagcacttgattgagagcgaccaaggtgagaatatccagttatacccgtctcttgaagataatgaggatgtgcagaaggatgttttaagagatcaaaccattgaaaatcttgctatgcgtaatgtgctgagctttatagcatcagtagaagtgagtcccgacacatttctcctacatctagagctgcttaatttcatgattattgcaatgtcaactcaacttctctgtgggccatctcctgggccaaatgatgtgaacccctttctcgatgcagcaatggatcaggacagctctctggttggtgcagttgttcgcagattgcttctaaatttcatggtccgttctaatgttccatctaatagggctacttattccatcttgtatgatggaaatcagagtagtgtgctacag

SEQ ID NO: 51213 - DNA, 399 bp, Glycine max
aaaaatggaaagcaaaagaaacttgttgtgggtgatgggcatatgcatgtggttggttctagcacatcaccgaagcggtgcggcggaagaaaaaataggcaaggagctaattaagagcatatgcaaaaacaggggaaacaatgaattgtgcatgcaggtgctttcctcggacccagacagtgatcacgcggacctagaggagctggcaatgatatctctgaaggctgcggcgtcaaatgcgagcagcattctaaatgattgtaagagaatgatcgacgaccagaatttggaacctaaggttcaacagggtttggctgattgcaaggagaatctgttggacgcagagagtcaaattcaggatgctattgcgtccatattgtccaatgacaagcttgatgc

SEQ ID NO: 51214 - DNA, 430 bp, Glycine max
atttttatcaaattggctgttctcatcctggttgtgagccagcttaccggactcccaagtgtgttaaaaagtgtgtaagtgggaaccaagtttggaagaagtcaaaacactatagtgtcaatgcatacagagtgagctctgatccccatgatatcatgacggaagtttacaagaatgggccagttgaagttgcattcactgtttatgaggtaaatgaaactcttacacactcttttgcgattaatttttctgcaacttcctttgtcaatttctgaaaacccaaaaccatcctatttaaaatttataattatacattaatatttttgagacaattgataaggtgcgtgagattgggtgtcatgtgatctgacatgcaaagcatattataaaatacaaacttatggataggtgtttagaggaaatatttacc

SEQ ID NO: 51215 - DNA, 455 bp, Glycine max
ttctttcgtccggttaagaacgcgttttatcatcccggctgtgatggtggacccaagtgttcttccgctcaaatagaccaggcagtggaagttgcaaagaaagtggattatgtggtgctggttatgggattggatcaaagtgaagagagggaagaacgcgatcgcgttcatcttgacttgccgggcaagcaacttgaactcattaacggcgttgctgaagcttctaagaaaccagttattttggtcctccttagtggagggcctttagatatcacttcagccaagtataaccacaaaattggaggaattctctgggctggttatccaggggaacttggaggcattgcacttgctcagattatctttggtgaccacaatccaggagggagactaccaactacttggtacccaaaagattacatcaaagtaccaatgacagacatgaggatgcgagc

SEQ ID NO: 51216 - DNA, 447 bp, Glycine max
ctagcttacataccttctccaatggctcttgccgatgacactactcgcccctcccgagctcagagaagaggaggaggcacccgctctttcttctcgcgccttggatcttcatcggacgctaaagctccgcaaattggttcctttcggtttccggagaggcctcaagtttcgtctggtgttgttaatttaactcaaagacgctcctcggtgaggccactcaatgccgaaccgcaacggaatgattctgttgttcctcttgcagcaactatcgttgctcctgaggttgagaaggagaaagaagattttgagcaattagcgaaagaccttgaaaattcatctcctcttgagattatggataaggccctcgagaaatttgggaacgacatcgctattgcctttagtggtgctgaagatgttgctttgattgagtatgcacatttgacgggt

SEQ ID NO: 51217 - DNA, 215 bp, Glycine max
tttattttggcgtttgtgatcgagcgattcgggaagtacgtcaagactctcccctccggactccacttccggattccctctggtgatagaatcgcttatgtgcatccgctcaaggaagaggctattagcattcccgaccagagtgctattaccaaggacaatgtcaccatcatcatcgatggtgtcctttatgtcaagattgtggatcctaagct

SEQ ID NO: 51218 - DNA, 462 bp, Glycine max
cgtccgcccacgcgtccgcccacgcgtccgagcggctactctgtttcaggaggtttacacggtgttggtttgtctgttgttaatgccttgtctgagtcgctagagataacagtttggcgtgatgggatggaatacatgcaaacatattctcgtggaaaaccagtgtcaattctgaaatgccttgtgcttccagatgaaaggaaagatcttcgagggacacgtgtcagattttggcctgacaaagaagtattcaccactgctattcagtttgatcacaacacaatagctggacgcattagggaattagctttcctcaacccaaagcttacaatcacgcttcggaaagaggacaatgatccagagaaagttcaatataatgaatatttctatgctgggggattggttgaatatgtgaaatggcttaacaccgataagaaagctcttcatgatgttctgagtttt

SEQ ID NO: 51219 - DNA, 504 bp, Glycine max
ccctttctttcgcccacgcgtccgatgcacacgggttagggaaacagtttcgagttgtagtggtagactctcgtccaaaacttagagggaaacttttgcttcgtaggctagtggagaaaggtcttagctgtacatacattcatataaatgctgtttcctacataatgaatgaagttactcgagtctttctgggtgcttcatcagtgttgtctaatggaacagtttattcaggagttggtactgcttgtgttgcaatggttgcccatgcattccatgtccctgttttagtatgttgtgaggcttataaatttcatgaaagggtacagcatgattccatatgctcaaatgaacttggtgatccagacgtcatttctacggttcagagtagagaggatgtcaaccacttggaagcttgggccaatactgaaaatctgcaacttctaaacctgatctatgatgctacaccttcagattacgttttcatgataatcacagattatggca

SEQ ID NO: 51220 - DNA, 329 bp, Glycine max
tttcatgcgtccgcccacgcgtccgcccacgcgtccgcccacgcgtccgggaaaccccaacaacaacaacttgtttgatgggcgccaaggagagagtgatcattggagtgagctcgacactgatctttatcactggacaaaggcattgcgccctgtgcagtggtttcctggtcatatagcaaaagcagaaaaagaactgaaggagcagctcaagttgatggatgttgcgatagaggtgcgggatggacgaattccgatgtccacaagtcatccacagatggaactatggcttggaaatagaaagagaattttagttttaaatagagaag

SEQ ID NO: 51221 - DNA, 290 bp, Glycine max
ttttatgtgttcgcccacgcgtccggaaatggccaccacttctgcttcattcgcgagcttctccgtcatcttgcgaccttcttcgtccaatccccaattcttcctcttctcctctattggaacctcgccgacaccgatcgggtcctccacgaactcgaagaggctcttttagtgtctgattttggtccaagaatcactattaaaatagtggagaatttgcgcgaggatatattttcagggaagctttaatcagggaatgagataaaggaagcactgaagaggaatgtttt

SEQ ID NO: 51222 - DNA, 401 bp, Glycine max
ccctttcgtgtttccacgcgtgcgcccacgcgtgcgctcagattcaggaaattaaagaagcagtccaacttcccctgacgcatcctgaactgtatgaagacattggtatcaagcctcctaagggagtcattttatacggcgaacctggaactgggaagacgttgctagctaaggctgtggcaaactcgacatcagcaacctttttacgtgttgttggtagtgaattaatacaaaaatacttgggagatggtccaaaacttgtgagggaacttttccgagttgctgatgatcttaccccatctattgccttcattgatgaaattgatgccgttggtacaaagaggtatgatgcccactcaggtggagaacgtgaaattcagaggactatgtcggaggtgctg

SEQ ID NO: 51223 - DNA, 260 bp, Glycine max
cccatcgtatgatggaatggagacattgcggcgttttctgtttgatgtttgtggtgtgggagcagggtggaagatggaggatgtgatggaggaggagataatggtgattaaagaaacggtggggcctgatgagcatgtgatttgtgctttgtctggtggtgtggattccactgttgctgctactctggtgcataaggctattggggataggcttcattgtgtgtttgtggataatgggttgcttaggtataaggagaggg

SEQ ID NO: 51224 - DNA, 421 bp, Glycine max
ccgttcactacccaccgcccctgacccagcagtccccatcactttccaatcccaacaacaacaccaacaacctcgtaaaaacctcggcttccctgagcgagtttccgaaccgaaggaacccactttccccttcgaccgtgccctccgaaccgccgacaacaagagcgactcatgcggaggacgctacatcttcgtccacgaccttccctcgcgcttcaacgaggacatgttgaagcattgcagaagcttatccctttggaccaacatgtgcaagttcactaccaacgccggcctcggtcctccgttggaaaacgtcaacggcgtcttctccgacaccggctggtacgccaccaaccagtttgccgttgacgtcattttcagcaacagaatgaaacaataccaatgcctcactcgcgatccc

SEQ ID NO: 51225 - DNA, 467 bp, Glycine max
ctattttgttatgtcaatgctcatgccctgatataatttcatttcttgattgttagaagggtgagtaaaagtttttaatatgatttgaatcaaataagcagctgtaatggcccttgatgtttataggtagtgaaaacaagcagcttaaattggactggcccacgaggtttaggatttgcattggcatagcaaaaggtttagcatttctacatgatgagtcaagattcaagatagttcacagagatatcaaggcttctaatgtgttactcgatgacaaattgaatccaaagatatctgactttggcttggctaagcttgatgaagcagagaagacgcatatcagcacccgagttgctgggactataggatatatggcaccagaatatgcattatggggctaccttactgacaaggctgatgtttacagttctggagttgtggcattagaaattgttagtgggaaaagc

SEQ ID NO: 51226 - DNA, 415 bp, Glycine max
cccactctttccttccacgcgtccgcaacccccaagtttcatgcttttctcaaaagggtttttcaataatcacagacttcattgttgggaaggcactgcacgccttttgcgtgaagggtgtcattcacctaggcacattccaggcaaacaccttgatcagcatgtactctaagtttggcagcatcgagcatgcacaacacgtgtttgataaaatgcctgagagaaacgaagcttcttggaataacttgatgtcggggtttgttcgagtggggtggtatcaaaaagcaatgcaattcttttgccacatgcttgaacatggtgtcaggccaagcagttatgtggctgctagtttggttaccgcgtgtgataggtcagggtgcatgactgtcggggcatttcaggttcatgcccatgt

SEQ ID NO: 51227 - DNA, 412 bp, Glycine max
  unsure (1)..(412): unsure at all n locations
aaatantgttttggcttttgtgtggctttcaaagctatgttttggaaaacaattattcatagtttcataatctccatgcaaacttgttacttgtccatccccactccatcatgcatgagctagccacaaccttatatatagggggttctatcatcctctatactcgtggtagttgtgtgacacagaaattaagctagagctacatagttttttttcttttctcaccttccttctctcccttcagacaagggacgaaaaatcagagagagagaaattccaaaaccatgtcgtcccacagtcatctaagtttcgcctttggggttctaggtaacatcgcctccttcgtgtgctttctggcaccactaccgacattttatagagtttgtaagaagaaatcaaccgaagggttcca

SEQ ID NO: 51228 - DNA, 420 bp, Glycine max
ttcctcttacaacggcttcgctgccactctcgaccctcaacaagcccacgcgcttcgagcttcccattccgtcttggccgtctacgaagacacgcgctacacgcttcacaccactcgcacccccgagttcctgggccttcaggcccattccgccttctggcaagacctccaccaggcctcacacgacgtcgtcatcggtgtcctcgacactggcgtctggcccgaatcgcaaagcttcgacgactctcaaatgccgcaaatccccacgcgctggcgcggtaactgcgagtccgcacctgacttcgacccttctctctgtaacaacaaactcatcggagctcgcagtttctccaagggctaccgcatggcctctagtaacgctagaaaaaccagagaccctgctaccccgcgtgaccttga

SEQ ID NO: 51229 - DNA, 392 bp, Glycine max
ccactcgtccggattgttccttgcaccttcccctgtgggtttcccaaactgaaagagcttccattgagaggcggttagatgagtggactctgttactgaaagcaagtggggctgatattgcctcccttgctgcttgcttgaggaaacccctgcgccctctctggatttcgcagaaaactgtcatctggttgaatgaagtgcctcaccatgaatcttgggatttcacacccatcattcttctctccgcgtcgtcttcttcatcggtcgttggcgcgagccaacacaggactacctctgagttcagctggaattacattcccggtgctggagacgacgaagaaagctgggctaggggtttaactcctgctttcttctggaaacatgtttatgat

SEQ ID NO: 51230 - DNA, 344 bp, Glycine max
gatacagtttgtaggcaggggagtgttgcgttggacaaggctcttggcgttgaaggtgaggataagaaagctcctaagcagagcgttatcattgtgtctgagttcattgggtgttccccttcgctcagtggagccatcagggtgaatccgtggaacattgatgatgtcgctgaggctatgaattcggctgttacaatgtcggaggcagagaagcatctgcgccacgagaagcattacaagtacataagctctcatgatgtggcgtactgggctaggagttttgatcaggacttagatagagcttgtagggagcattactctaagaggtattggggtgttggatt

SEQ ID NO: 51231 - DNA, 423 bp, Glycine max
tcctcgcgtccggttgccccaaacactgtggtatacaacactttgcttcatgcactttgtaggaatgggaaggttgggagggccaggaatttgatgaatgagatggaggaccctaatgacgttacctttaatattttgatatctgggtattgtaaggaaggaaattcagttcaggctcttgtcctgctggagaagagttttagcatggggtttgtgcctgatgttgttagtgttactaaggtgctggagattctgtgcaatgctggccgcaccatggaggcggccgaggttttagagagagttgagagcatgggaggtttgctagatgttgtggcttacaacaccctgataaaggggttttgtggagcaggcaaggtgaaggttgggcttcattttttgaagcagatggagaacaaaggctgt

SEQ ID NO: 51232 - DNA, 363 bp, Glycine max
aatttgtataaacttagtttgttttttttctcaccaagccgttggtttctcagtgctcacgccaaagatcattctttcttcttctgaattgaagaatggcacaagatattgctactccaccagtttcttttgattttgaactcttggttggtgatcaccttagaactgtcacagcctcatccaacagcagcaggacagacccatggattgaacctgaaaggttgaaactcagacacaggattggtcggggaccctttggtgatgtttggttagcaactcatcattaatcaactgaagattatgatgagtatcatgaagttgctgccaagatgttacctccaatcagagaggaacatatgaaga

SEQ ID NO: 51233 - DNA, 294 bp, Glycine max
tgcctcatcgtccgggcattggctatggtcgcaggtggttcttcaggtggtgaaaaccgtgctcctgcaacaacttcccatcttaggcgtgatacttcattgatggaacgaaaacagactaaactcactacgttttcaagctttcaaaaaccttcagaagtccctaataaaacatcaccccttccaaaggacaaagcttctgcaaaagctgctgctttggcagctgctcgtgatcttgagagatttgcaaaaattggttctggaagaggtcttagtgcttgtgcaatggccaca

SEQ ID NO: 51234 - DNA, 263 bp, Glycine max
gataggtgaaagctgttccttcgggggattgcgtgttcatcatgggcatgcctaccgggaaacctggtcctttgcctgaaaagtccatcacgttatcatctctaatggctcctagactggcgcgtagaggtggtgtagatgagccgtttgcgtgggaaagtagagagtttctacggaagctttgcattgggaaggaggtggccttcagagttgactacactgtgccatcgataaatcgtgactttggcacagtttttattggg

SEQ ID NO: 51235 - DNA, 385 bp, Glycine max
ctatagagcattttgattgcgttcttcagaacctagaatggatattattgcatttgatattgtgactggtcttttatattaattatcttcttttctcttttgaaagggaccacaatatgtgtgcacaaacttctggacgtttgtttgcacaaactgcagtggaatacatcgggaattcactcatcgagtaaaatcagtttcaatggctaagtttacttcacaagaagttagtgcacttcaagaaggaggcaatcagcgtgcaaaagaaatttattttaaagaatgggatgcccaacgtcattctttccccgatagcagtaatgttgacaggctccgagactttattaagcatgtttatgtggatagaagattcactggagataag

SEQ ID NO: 51236 - DNA, 463 bp, Glycine max
aaatacttcgatttcgcactcctttggtcaaccttcttgacatttgttcttttttattattattattcttatgttgttgtcgtgtgttgtgtaattgcagccgcaaggggattacatagagcgtcacagaagagactatggctaccgtctcgatcacttcgagcggaagcgcaagaaagaggcgcgtcaagttcacaaacgctctgcaattgcccagaaggctctgggtattaagggcaaaatgattgccaagaaaaattatgctgaaaaggcacagatgaagaagactttggctatgcatgaagaatcaacttctaggcgcaagactgatgataatgttcaggatggagctgttcctgcttatctccttgatcgtgataacacgaccagagcaaaggttcttagcaacaccattaagcaaaagaggaaggagaaggcgggaaaatgggatgttcctctacct

SEQ ID NO: 51237 - DNA, 325 bp, Glycine max
ccgggacttcgccgggaactgagtacaactccgtcaccgacgagtacgttgaggtcactctcgatgttcaagacgatcacaccatcgttctccgcggcgttgagccggtgactgtcgctaacgtcgacgacggcgtcgccacaagcggaaacgaaactccggcgtcctctgcgtggtcgccgtccatcaggaggagctctcccaaccggtggcggcagttctcgcaggagctgaaggccgaggcggttgcgaaggcgaggcagttctcgcaggagctcaaggcggagctgcggcggttctcgtggagccaaggcggatctgaagc

SEQ ID NO: 51238 - DNA, 190 bp, Glycine max
caatgctgtccggtcagtgatgcggagcttgagtgcctcacttgaagtgacaagagtgatgatgaatctgctttgtcattgtggggcgccacaatttgaaggtgctccttgtcactcttggggaacatggtgccagatactacaccaagagtttcaaaggatcgggagatgctttccatgtcaatacagg

SEQ ID NO: 51239 - DNA, 382 bp, Glycine max
  unsure (1)..(382): unsure at all n locations
caaccaaaccctctctactcttgtgggtnttttagagtaggggtgtggggttcttacactncacttcgttcttctgggctctacaatgagcaacgacaaggacaccttcaacgtcgctgatctcacttccgctctcaacgaggacaatagagcagaccttggcaatgctctcaagagcaagatacagagtttgggtggacagcattctgatattctagagtctctgtcgcccaatgtcaggaagcgtgtggagggtcttagagagatccaggggcaacatgatgaattagaggcaaaattttttgaggagagagcagctcttgaggccaaataccaaaaattgtatcaaccactttacacaaagcggtatgaaatagtaaat

SEQ ID NO: 51240 - DNA, 218 bp, Glycine max
accgagtatgagggtattgcaaaggaaaaattgccaaagatggtttatgactactatgcatcaggggcagaggatcagtggactttgaacgagaaccgaaatgcgtcctcaaggattctgtaatatacttttctgaggaactaggacctccatttatctggtctacccctttagaaacttttcattcaaatctaagcttacctttcctttgatttact

SEQ ID NO: 51241 - DNA, 451 bp, Glycine max
cgcttattgttttcttttgctgtcactgttgccgaatccctcactttctcactcctcagcaccattcaatctctttcctctactggcaataagcataacaacagaaagctattacccttacacagcacaagatggaacatgtgatgcatccaaggcaaatgacctagctgtatcaattgatggccatgagaatgtacctggtaacgatgaaaatgcattgctcaaagctgttgccaaccaacctgtttctgtagccattgatgccgggggatctgatttccagttctactccgagggagtatttactggtgattgtagcacggagctaaatcatggtgtggcgattgtggggtatggagcaactgttgatgggactagttactggatagtgaggaactcttggggaccagaatggggagaactgggttacatcagaatgcaaaggaacata

SEQ ID NO: 51242 - DNA, 420 bp, Glycine max
atcccccttacttcaagagcatgaccatggagcgctgctgtacctcatggtgtaaaagatgcttattgcctactgaattttggtgacagtataaccactgatcatatttctccagctggaagcattcacaaggacagtcctgctgtcaaataccttgttgagcatggggtggaacgcaaggacttcaattcttatggaagtcgttgaggcaatgatgaggtgatggcaagggggacttttgccaacattcgtctttgttaacaagcttttgaatggggaagttggcccgaagacaattcacattccaacaggggaaaaactttatgtgttagatgcaactacggtgagttatgtcctactcaaatatggcaatcttttgtttactgctttatagcctttcaaatggcaaaacatactgta

SEQ ID NO: 51243 - DNA, 423 bp, Glycine max
cacttactaacgctcctctctcttctgcctatattgggggttattactctcaacccactttgcttttctcttctcttcaaaggtatgagcaagattttcatttgaaagaattgggttgctcttcttcgaggcacacacaatggataaagtaaatagagtttgtgccaaagatgaagagcgtccactccgaatcaccagagcaagagctagagccttgagagggattactccatactcaagaccctccttaaaaaatgagcagaaaaatgtgcttcgagcacatccgaaaagagcagcatcttctgaaaacaaaacttctgtggttgttcctgctgttgtccaacagaagggaagggcagtgctttcagatgtatcaaacatgtgtgcataaccacatgataagtgtactaagtcatcaaagtt

SEQ ID NO: 51244 - DNA, 248 bp, Glycine max
gtaaactacctgaatcaacatgttcactctacaacttgctaatactgaagctaaatggttgtaaacattcgaaggagctgccctcaaatttgcataaactcactgatttgcatcgccttgaattaatgtatactggagtgagaaagctaccagcacatttgggaaaactggagtatcttcaagtattaatgagttcgtttaatgttggcaaaagtagggagttcagtatccagcagctaggagaactc

SEQ ID NO: 51245 - DNA, 423 bp, Glycine max
  unsure (1)..(423): unsure at all n locations
ccctcgtgntcgcaaatccacattctctctctgttgggggtgcttctctgtctctctttcaagttcttagttgttctatggcacccagaaaagtcaaagccatgggcattgacttgggcaccacctacagctgcgtggctgtgtggaaccataaccgcgtcgaggtcattcccaacgaccaaggcaaccgcaccacccctttctacgttgccttcaccgacactcaaaggttgttgggcgacgctgccatcaaccagcgatccatgaatcctcaaaacaccgtcttcgacgccaaacgtttggtcggtcgcagattctccgaccagtccgtacagcaagacataaagttgtggccttttaaggttgtccctggagccagagacaagcccatgattgctgtaacatacaaagacgaagagaaac

SEQ ID NO: 51246 - DNA, 433 bp, Glycine max
catttatttgaggaaggaaatgtgcagttagatgcagaacatgaatgcaaagatgcaactctttttcaggcccctgaagattgtgcacttgccataacaagcattattcgtcaccatgaaacagagtaccttgcttctcttgaggttctgaatttgtctttgtgtagctagggtctttcgttctttctattgtaatgatgtgcacatgatttactaatgatcacaacttgacaggcatcatatctaaaccttcctgattctactttcaaggtaaccattgttatatcatcctgcatttttttatattctaagcttcagatgtggcatttctaagaaatccatggctcttctcgatttccattcaagcaattccttgtacctaaccttttctcattaagcatccatgtgatgactgagaccaaactcatctaga

SEQ ID NO: 51247 - DNA, 416 bp, Glycine max
tgttctcgtgggcggacgcgtgggcggacgcgtgggcggtctcgtggggaaaaactgtatcaactttgtttggaaaatgggatgaaagcatgcattatgttaatggagactacactgggaaagggaaaggtcatgaatctttgtcagatgcccgtttgctctggaagcgaagcagggctcccaagtttcccactagatataacttcacccgctttgccatcacattaaatgaacttacccctggattgaaggagaagttgccacctacagattcgaggttaagacccgaccaaaggtatttggaaaatggagagtatgacatggccaatgcagaaaagttacggttagagcagcggcagcgccaggctcggaagatgcaggagagtggttggaaaccacggtggtttgcaaaggat

SEQ ID NO: 51248 - DNA, 346 bp, Glycine max
  unsure (1)..(346): unsure at all n locations
gcttggccattctatcaatgggctgtcctcatttgactccatggaccaggagaaagatgatctgaaatctaaaatggatcgtatagaaatgtgtcatccaaatgttatattagtggagaaaactgtttctcgtgatatacaagagtcaattttggcaaagggaatgacacttgtgcttgatatgaagcttcatcgtctagaaagagttgcatgttgtactggttcaccaattttatcatgcgataatttgaacggtcaaaagctaagacactgtgactntatctattttgagaagtttgtggaggaacatgatgctgttggtgaaggaagaaagaagcccatcaag

SEQ ID NO: 51249 - DNA, 417 bp, Glycine max
tctactcgtccgagcagacttaacaacagcacagggggggtttctgtctgttcaagctaccatctctctctctctttcttagtgcctccttgccagaagttaaaatggcccaagaaactttcctattcacatctgaatcagtgaacgaggggcaccctgacaagctctgtgaccagatctccgatgctgtgctcgatgcatgcttggagcaggaccctgacagcaaggttgcctgtgaaacctgcaccaagaccaacatggtgatggttttcggagagatcacaaccaaggccaacgtggactatgagaagattgtgcgtgacacatgcaggaacattggttttgtctctgatgatgttggtcttgatgctgacaactgcaaggtcctcgtcaacattgagcaacagagtcctgata

SEQ ID NO: 51250 - DNA, 415 bp, Glycine max
aatgcctatgccttaagaattgtctttactcctcaagcagaggaaaacaaagaggttatacttcatacaaaatcctttgaaccaatggttaatctgagacaacttcagattaataatcggagattagaaggcaagtttcttccagctgaactgaagtggctacaatggcaagggtgccctttaaaacacatgcctttgaaatcttggccacgagagttggctgttcttgatctcaaaaacagcaagaaaatagaaaccttgtggggatggaatgattacaaggtgccgcgaaacttaatggtcttgaatctctcctactgcatcgaactcactgctatccctgatttatctgggtgtcgacgtctagaaaagattgatctagagaactgcattaatctaactaatattcatgact

SEQ ID NO: 51251 - DNA, 373 bp, Glycine max
tggtgtgagcacttcacggcatggccgagctactttttctgtgttactttttcaggatctggctgttgtggtcttgctaatactcatacctcttatttctcctaattcttccaaaggaggggttggttttcaagctattgctgaagcacttggactggctgctgttaaggcagcagttgccatcactgccataattgctgggggacgattgctccttcgaccaatatacaagcaggttgcagaaaatcaaaatgcagaaattttctcagctaatacactccttgttattcttggcacaagtctttttacagccagggcaggactttccatggcattgggagcatttctggctggtttactactggcagaaact

SEQ ID NO: 51252 - DNA, 352 bp, Glycine max
gcacggttcttgtgtacgtacaagacaacatttgacgaggttggggttatggtatctgcgcgggtgcgatcgtggtggcacttctcgtgttcttgtcgggtacgaggaagtaccgtttcaagaaacttgtgggaagtccattaactcagtttgcggaagtgttcgtggctgctctgagaaagaggaacatggaattgccctctgattcatcattgctctttaatgactacgaccccaagaagcagactcttcctcatagcaagcagttccgtttcttggacaaagctgcaatcatggattcatcagaatgcggaggtggaatgaagaggaaatggtatctttgcaccctaac

SEQ ID NO: 51253 - DNA, 349 bp, Glycine max
aatctacatttgtggtggagactcttatccttccttcttctacttcttcaacctgttacatctcaatttgttacacctcttaactctgatgggattcacctgcttaaattcaaatactccatcctcagcgacccattatcagtcttaaagaactggaattacgacgatgtaacaccatgttcatggcatggtgttgcatgcagtgaaattggagcccctggtacccctgactttttcagagtaactagcttggcccttcccaatagccagcttttgggttccatttctgaagacttaggcttgatccaataccttcgccacatcgatcttttcaacaactttcttaacg

SEQ ID NO: 51254 - DNA, 307 bp, Glycine max
gctcactggagaatgcaacaactgatgatgttactccaatgtctttactgtaacactgaagattgcccctatgaattacttcatccccctgaagattgcaatgtgaactcatccttgtcattcacacttcagatctgcagagtcgaggacatccttgttgaaggccttataaaaggttctgtcgttcatttccacagggcgaggaccataagtgttgaatcttctggaacaatatctgcctctggaatgggctgtactggtggtttgggccgtggaaatactctaactaatggtattggcagtggtg

SEQ ID NO: 51255 - DNA, 325 bp, Glycine max
aaactccaaagcactgaacgatctcaatggaaaccctagcacatacccgtagatagtagagaggataacagtgtgcgatgtggcgatcctaatcggaagcatgatgaacaactcgaacggcatgatttcgaagacgtcgccttcgacgaatacggcacaatcgcaacaatcacaatccactggccttaagatgcatctcaagactcccgagggccgatacaagcttcactgcgataagacatatccttccactctttttcactacgctcatggcaaaaccgtgtctcaggtaactctggcacatctcaaggacaagccaatgcct

SEQ ID NO: 51256 - DNA, 203 bp, Glycine max
cgaaaacgtggaagagaacggggtgcgtttaagaagcagtgcaactgatcaactcagacttcagggacctaagcctagctgctaatagactcgcccatcatgccatcaaacttggtggcattggctttggagcctctttcttcggattgtctgctgccattgctgctattcatctgttgatgatggatcgtacaaactggaaa

SEQ ID NO: 51257 - DNA, 453 bp, Glycine max
cgagtaagtgatagcgcgaattgaaactctctaatgtgagcatttcaaccttccagaccaccagtctcgtcgttcgctccaaaatgggttcttcccctgagcccatcaattgcaggtaacattgtccaaccaaaatggggtcacctcaatgaacttcacagtgctttgaaggcaatggaggaagctcttacaagtaggaacgtaaccgagactgatgtaggcaactctgttaagacttgatgtcaagcacgatgatccagtttggggtgaaaatgttactcttaggattaacaatggcaaccatgtaattcatgcattcgtgaatggagaacatattgattcccattgggccacatatggtattcacaacgataaatttgactcgaagattaagttgaagcatggaacgaatactataagcttgcttagtgtcactgttggacttcagacacc

SEQ ID NO: 51258 - DNA, 392 bp, Glycine max
ccctctcgtccgcgaagaagatcgcttaattcgtccaagccaaggatagctataatgtcttgaagttctttgtaacgttgtagctatccttggcttggacgaattatccgaagaagatcgcttaaccgtagcaagagcacgaaaaattgagcgtttcttatcacaaccttttttcgtagcagaagtttttaccggttcgccggggaaatatgttagtctagcagaaacaattagagggtttaaattgattctttctggagaattagatggtcttcctgaacaagccttttatttggtaggtaatatcgatgaagctactgcgaaagctacgaacttagaaatggagagcaatttgaagaaatgactttaaatctttgtgtactgacccccaa

SEQ ID NO: 51259 - DNA, 380 bp, Glycine max
tcctacgcgtccgcccacgcgtccggccatgagtgagagatagagacagaggagataataagaatttggacattccattttgaccattgttcacaacaaatcaagcatccaccgtgacccaactcttttctctttccttaacggttttctttctccgatcgccgctccacagagatgtcgcgccagacgacgtcgtctgctttcactaaatcgaagaccctcgacaataaatatatgctgggagatgagattggaaaaggagcttatggtcgagtttacaaaggtttggacctgaagaatggagattttgttgccattaaacaagtttcttgggagaatattgctcaagaggatcttaacattatcatgcaagagattga

SEQ ID NO: 51260 - DNA, 437 bp, Glycine max
cgtaagtcaaagtattgttaaccgtggtttaaagtctcagtcaggttcagaatcagcgtcagctgatactgctggcagaattttgaggcctaggaaacaatataaaaacaagggtgattccaggaagaggcgccatttttataaaatccttttaggtgatgtaaatgcatattgggtactgaaccgaagaattaaaatcttttggcctttggaccagagttggtattacggcttcgtggataactacgatgaaggaagcaagctttaccatatcaaatatgatgatcgagatgtagaatgggttaatctacatactgagagatttaaactcttgttacttcgtagtgaagttcctggaaatgcaaagggtgaaagagccttaacaaaacgtaggagttctgatcaccaaaagggaagcaaatccagtaaagaaaggc

SEQ ID NO: 51261 - DNA, 418 bp, Glycine max
cggttgcgtgggcggacgcgtgggcggacgcgtgggcggactcgtgggttagggggggccgattgagagagaaagagaaatgggagaacgaaaaggaatcccaatggctttggggctcttggcgatgatcctcttcttcattgcttcctcttcctctcacctcgttcgcgcttccggtgacgccgacgacgcgatcttctacgagtcgttcgacgaggattttgatggacggtggattgtatccgacaaggaggattacaatggtgtctggaagcatgccaagagtgatgggcatgatgattatggacttcttgttagtgaacaagccaggaaatatgctatagtcaaagaacttgccgagtctgtcagtcttaaggatggaacagttgttcttcagtttgagactcgccttcagaat

SEQ ID NO: 51262 - DNA, 433 bp, Glycine max
caatatattaagatgatcaacattggaccactgggcgtactctaagcattcctgggcctcaataaaacctatgcacaagacacaacatcccttgtgcctgcaatcataacttacggtgactcagccgtggatgtacaggaataatgactatcttcccacccttatcaaggctgattaccctgcttatgggagggactttgctaaccaccaacctactgggaggttttgcaatggcaaattagctactgattttactgctgacactttgggttttaagacctatgctccagcatatcttagcccacaggcatcagggaaaaacctccttattggagcaaactttgcttctgctgcatctggttatgatgaaaatgctgctactttgaatcatgcgattccgttgtcccaacagttaagttatttcaaggaatac

SEQ ID NO: 51263 - DNA, 156 bp, Glycine max
ttgttctcgtgggctattccatgccttgaggggggcattgctgagtttgacgagggggtgaaagcacaagctgatgaggcccatgagatcgctcttcgctcctacgaacctgaccctataaacgttacagccgagttcaatatccatgttcatagg

SEQ ID NO: 51264 - DNA, 315 bp, Glycine max
ctgatgcttggggttcttgtggctcgtgaaactgggggtgaacctgaacttgaatggggagctcttaaaaaaccaattaactactctttgatatggagtgctgattcaccacatgatggatgtggttatttttggttaccaaatcctccattaggatacaaagcaatgggcatagtagttaccaacaaaccagacgaacctgaagttgaagaagtcagatgtgtacgagccgatttgacggaaacatgcgagacttgtgatctattactatccatgagctcaaaattttcaagaatttcattcaaggtttggaac

SEQ ID NO: 51265 - DNA, 458 bp, Glycine max
ttcttagctgatgaggcagctgttctattgctgtactcattgttgcaagggaattctgcctttctggagtatgtattagtgcggacagatctggatgcattgttaatgccaattctggaagctctatacaatgctccaagtaggactgctaatcaaatttacatgttgctaattatacttctcatactcagtcaagattcttcttttaatgcaagcattcataagctgatattaactggtgttccttggtacaaagaacgcctgttccatcagacttctcttggttcgctcatggtcataattcttagcagaactgtacagtataatttgtcaaaactacgggatgtctatctccaaacaacatgcctggcaaccttggcaaacatggcacctcatgttcatcgtttgagtgcatatgcatctcagagattagtcagcctttttgatatgctttcacg

SEQ ID NO: 51266 - DNA, 349 bp, Glycine max
ccttctcgtccgcccacgcgtccggttttttttggtgtttttcggttggtttacggggaagatgggtgacaagagcaacgttggcggcgacgcgattaacacgactctgcttcacgggaagtacgagctgggccggctgttaggccacggaaccttcgcgaaggtgtaccacgcgcgccacctgaagacgggaaagagcgtggcgatgaaggtggtgggcaaagagaaggtggtgaaggtaggcatgatggagcagatcaagagagagatctcagccatgaacatggtgaagcacccaaacatcgtgcagcttcacgaggtcatggcgagcaagtccaagatctacatc

SEQ ID NO: 51267 - DNA, 329 bp, Glycine max
ccttgtttgtggtgcttcagagactgcagacctggcggctaactttgtaaaactgggtaaagatgcatatacgccggacattattgcggcatctgactggatgcttggaaaaattggatatggcactgttagcgagggcttggcatacaagtgtccttttgtctttgtacgtagagactatttcaatgaagaaccttttttgagaaatatgcttgagttttatcaagggggtgttgaaatgattagaagggatttactgactggtcactggagaccttatcttgaacgtgcaataaggttgaaaccctgctatgaagcaggcattaatg

SEQ ID NO: 51268 - DNA, 452 bp, Glycine max
gttttgagtaccatggacagaagaagagcaccgaacgttccttgttggacttgagaagctgggaaaaggtgattggaggggtatctctagaaactatgtgacttcaagaaccccaacccaagtcgctagccatgctcagaagtactttattcgccttgcaaccatgaataagaaaaagagacgttcaagtctttttgacatggtatatatatacatagatccatcatgatcaacttcctaattatctcatcttatatcaatcacatatccatatatatgcacttaaattagttttttttataatacattttatacttttactatattctaattacttaattgataattaatttaattgataacaataaatttatcttaaatttataattttttaaaattatccctattattaatacttttctcttaattatttactaatatattattttttt

SEQ ID NO: 51269 - DNA, 469 bp, Glycine max
gcatgttaaaattagcattgtggaagctggtgcattagagccaataattagtttcctcaagtcacaaaatccaaatatgcaggagtatgcaactgcatctttgctcactctatctgcctctccaaccaacaagccaatcattagtgcttgtggcaccattcctcttcttgtgaatattctaagagatggaagccctcaagctaaagttgatgctgtgacggctctgtccaatttatcaacaacacaacctgaaaacctcagcatcattctccaaacaaatgcaatgcctttaattgttagccttctcaaaacctgtagaaaatcctcaaaaatagctgaaaaatgttctgctttgatagaatccttggtaggttatgaggaggggagaacttccttaacatctgaagaaggtggagttcttgcagttgtggaagttcttgaaaatggtactccccaaagtagggaacat

SEQ ID NO: 51270 - DNA, 357 bp, Glycine max
gcgactttctccaaaatccgttgactaatgtcatctgggtcattctcaacaaaaccccagtggatctacgatgtgttcatcaacttcaggggaggagacactcgcaggaacttcgtctcccacctgtactacgccctctccaacgccggcgtcaacaccttcttcgacgaggagaatctgctcaagggcatgcagctggaggagctatcgcgcgccatcgagggctcgcagatcgccatcgttgtcttctccgagacctacaccgagtcttcgtggtgcctctccgagctcgagaagatcgtcgagtgccatgaaacctacggccagacgatcgtgcccatattctacgacgtcgac

SEQ ID NO: 51271 - DNA, 296 bp, Glycine max
aaattatggagggactctgaaaatttcactattcattaccttactgaaaaaggatcattgctgaagattgatatggaaaagcttgtgggatctcttcctttgcaccttactacactgctgatgtcagctgttagagatgaagccctgttcagatacttattatgtggcattcgattattgcactccttgtgtgaattagccttccgaaattctaagttcgagcagattgtgctagatgatgtgaaaatgatggaacagctgactgacttggttttctacatgcaaattgttcttgg

SEQ ID NO: 51272 - DNA, 342 bp, Glycine max
atttttgttcattctctttgcgcagttccctacctgtccttttaagatgcagatcttcgtcaagaccctcaccggaaagaccatcacccttgaggtggaaagctttgacaccatcgacaacgtcaaggccaagatccaggacaagggaggaatttcccccgatcagcaacgttttatctttgcccggaaagcagctggaggacggccgtaccctcgccgactacaacatgcagaaggagtcaacccttcaccttgtccttcgtctccgtggtggcatgcagatcttcgtcaagactctcactggcaaaaccataaccctagaggtcgaaagctctgacacca

SEQ ID NO: 51273 - DNA, 269 bp, Glycine max
gacctatcaacctcttcctccgaccaccgttctggggattgacctgagaccatgggggtctgtaccccgtggcattgggcgaccacaccaccctctccagaatcatatcctcactgcctcggcttcccgatccctctcttattcaaacagaatccgattccctcgctcaagaaaaaatcgccgatcagatctccctcgtcctcgaccgccgcgacgttccttatggagaaacccctctccacctcgccgtccgactcaacgaccttttt

SEQ ID NO: 51274 - DNA, 454 bp, Glycine max
atattatggattgacaaagctctagacctgtgattggtagatcaataagagtgttacacgtatgtgtcaataacataatcattccctgaataattgttttggtctgctattgcagtataagttgacttttggacatgtttcatatgtatattgagatttataagcatcctaaagaagaaagaatagcccgaacttggggaaccattgcccctggcctaccttatgttgaacaaactataaccaatgctggaaattggttgattgggggtgacctagaggtcattgaaccaattcagtacaatgatggacttgatcattttcgtctatctccggcacaactccgtgcagagttcacaaggcgcaatgcggatgctgtgtttgccttccagctccggaatcctgttcacaatggccatgctttgctaatgactgacacccgaaagcgccttcttga

SEQ ID NO: 51275 - DNA, 487 bp, Glycine max
ttactaaggtgatgttccttttgtttctttccctatagctttggctaatcttatttgatgtatcctgtgctaacagcccaagaaagatctgcaagctgaagatattttgaagaagaaaatgtaccctaagagggaagagtttcaatggcgcccttcacctcttctgtgcaaacgctttgatcttattgatccttatatggggaagccaccacctgctccacggattaggagtaagatggataccttgatttttacatcagattcggtcaaaggtgccaaagtggacgagcctgttacttcaaagaaagacatctcacctttgcagctatctactaataaagacataaccataagtattactgaaaatgaaatggaaggggacgtggaagtggaaaatattgaaaggccagttgacctatacaaggtaacacccaatttctaaccctttctgaacattctacttatgattattgattaatactttcat

SEQ ID NO: 51276 - DNA, 465 bp, Glycine max
ttctcgcgtccggttttagtcaataactaggtagggaaaaatgtatatttggatttttattactttcaactgataaatgacgaggggaagatatgatggatcgccaaagaagcatttagttgcttccgtttgtggtgtggcagtctttcttggtttgctatatgtgttccagcgatccatctttggttctcagaatagtggttcatctgcgcttgaatatggcagcaagtcattgaaaagacttggggcatcatatttgggttcagatgatgatgctgatagcaagcaagatgaatcttcatccagtattgcgcagggagatggtgaggctgatattgtaccaaagagtttccctgtttgtgatgatcgtcattcagaattgattccctgcttagacagacatcttatctatcaaatgagactgaagttggatctttctctgatggaacactatgagagacattg

SEQ ID NO: 51277 - DNA, 300 bp, Glycine max
tgggtttctctataggtggagttgaggacttcttctatattaaactgtgttttcttgtttctgagtgctgattttggaggagaaatgagtagctatttgggtgtaggtgttagtcctgggaatgtcccagtttaccacagcacaaatgtgaacgtgttagataggaggatcaagataacagagttggtgttgaggtgtgtgatccttggtttaggggttcttgcagctgttcttgtggggactgattcccaagtcaaggagttcttctcatttcagaaggaagctaaatttacagacatg

SEQ ID NO: 51278 - DNA, 282 bp, Glycine max
ttcctttcgtccggccacacctgcgcttaagggtgggttatttgtgcttcagggggtgcataataagatatagtcgtgtcatcctccctggatcaaactgttcgtgtttgggatattggttctctcaaaaggaaggccgggcctcctgcacatgacgtcctacgattgagtcagatgaacacagatctttttggaggtgttgatgcagtcgttaagtatgtatcggaaggtcatgaccggggtgtcaactgggctgcttttcatcctacactgcctttgatt

SEQ ID NO: 51279 - DNA, 373 bp, Glycine max
tttcttaattctctaaaagagatctttttcgggggggtttttatagaagggtggggggttgattttggagatgtctctgctctcagatctcatcaaccttaacctctccgataccaccgagaaggtgatcgcagagtacatatggatcggtggatcaggaatggacctgaggagcaaagcaaggactctcccaggaccagttagcgacccttcagagcttcccaagtggaactatgatggttccagcacaggtcaagctcctggtgaagacagtgaagtgattttatacccacaagccattttcagggatccattcagaaggggtaacaatatcttggttatctgggatgcctacactcctgctggagaacct

SEQ ID NO: 51280 - DNA, 514 bp, Glycine max
gatttagttcaggctccacgacttagagttacaggggctgcagagaaagtttcactacttgaagaaaatataaaacctagaacagatcttcctcatttgctagtacatctgcgtgaaaggcagccagagaagctccattacattggtgtctcctttgggctaactttggaccttttacgcttttggaggaaacataaatttgctcctttctacattggccagattccaaatactgtgactggtgagcatacatgcatgatcctgaaacccctaaacaatgatgaaattgaagctgatggatcaaatcagctgggcttttttagtccattttaccaagattttagacaacgatttgctaaacttcttgcttccacttttcgtggcatggaatacaagcttgctttgagcataatagatcccaaaatcaatttcaagtgccaagaccctacggagacctcgtctgataaatgtctgcagtcggtcagaggttatttatccccacatgatatgaagc

SEQ ID NO: 51281 - DNA, 406 bp, Glycine max
tcctctcgtccgctaatttgatcattcgggggggggtgtcttgtttcttcaccctctttctctttccaaccttaactttctctttcacacctgggatcagcattttcatttttctgtggcatgttggagcctagattcagtggtggggtccttctcctgtggcttctgtgtgggactttggttccaacaatggtggaatcagccataggggtcaactggggcaccatatcctcccacaggctgaagccaaccacagtggttgatctgctgagacaaaacaagatctctaaagtgaagctctttgaggcagactctgatgtgctcagggctctcatggggagtggcattcaggttatggttgggatccccaatgagatgcttcccttcttgagttcttcacctgctg

SEQ ID NO: 51282 - DNA, 293 bp, Glycine max
ttaattgtgtagtgtcccagtgttcattatggggggggtttattaaatggtcgggggtgctcaatgccatggatatgaggtctatctatggaggacttgctgcagctttgacagatttgaatgtttgggccatgaatgtggttacaatagactcccctgatactcttcccattatttctgaacgaggcctgttcggtatatatcatgattggtgcgaattatttagcacctatcctaggacctatgatctcctccatgctgatcatctgttttcaaagcctaagaaaaggtgc

SEQ ID NO: 51283 - DNA, 239 bp, Glycine max
cgcccacgcgtccgcccactcgggcggtcttttagctcgaccaggggcaatccaaaattctcgagttccttctcatgtgagctgagcaattgcctgacaagattcctctgtatggctccctgattggcttaattaacttggaaaatgaagactttgtgaaacacctagtggagaaaactcacagtaaatttcaggatgccttacattctggaaactgcaacggggttcgtattctaatg

SEQ ID NO: 51284 - DNA, 179 bp, Glycine max
aacatttctttatcattattaatatggatggtgatggggctggattttctgatgcactcaatggaggacatgagtcttggggaccactttttggaaaggtttcctttgcctcctgggtcattttccatttctattcattcctcaagggtctcatgggtcggcaaaaccgcaccccaacc

SEQ ID NO: 51285 - DNA, 518 bp, Glycine max
ttttcgcgtgggttcgactatgttaaaagtctaagttgataggtgggaggcttgtaattttatatctctaaaaataacagagatgtacagtcctaaacattgacatatgtttctatgcaattggtctagtctgaaaatgttacagaactgacaaggttattcatgaaatttttaagcaagtactcactttggcctttttcttctctttcctttcactcttctttagatgccaattaaagaagcctgtcatgttgctttacaaagaaaccatccaagtaaacataggctgtggaaacatgctgaggctcgacagaatgacaaagggggaaatccaactgctgtcctgcaaatcgtatgttggagaacacgtgaatttctatattctatcagttaacattgacaagtatggcttggagtttgtgtaacaatgaagcatgagacgtgaataatgttgatgataaaaatttaacattatttggatatctctgtatccttcagttttagcgataataagactt

SEQ ID NO: 51286 - DNA, 496 bp, Glycine max
ttcttgcgtccgcttaaatccaccacttcctgcgtcactttctctcttccccctggcctctctgccatttttgatccttcataaacacaccattcttcatttccttcatcaatgggcgccgacatgtccaacaataataatcctcctcccacttctcacgccaaagacttgtttgcttctccagctctctctctcagcctcgctggcatttttcgccatgctggggtggccgcggctgatgaggctgccacttctgtggaggagggcgaagaagggagtggaggagctgctgagaggttagaggagattagcagcgagaactccggccccacgagatccagatcagaggatgacttcgaaggaggagaagctgaacctgaagatgatgacgatgcccatggagacaacaagaacatgaagacgaagaagatgaggaagaaatatcacaggcacactgctgaccagatcagagaaatggaagcgcttttcaagagtc

SEQ ID NO: 51287 - DNA, 475 bp, Glycine max
ttctttgcgtccgctccctctgtgttccctggtgggaccgagagcggagattgttgtgccccttctgtcaccttccccactccgaaccaattacaaaaccctcaccgtctgaagtccttgctcatttccgtgccctcagttacagcgagaatgaaaggggggcgatcgcaccgccctcggagctcggacccgccggacgagtgggtggacgggtcctggacggtggactgcatctgcggcgtcaccttcgacgacggcgaggagatggtgaaatgcgactagtgcggcgtgtgggtccacacgcgctgctcgcgctacgtgaagggcgacgacaccttctcctgcgacaagtgcaaggccaggcacaacaaaaacaacaccaccaccaacaacagcaacaacaacagcaacagcactaccaaccccatggagaccgaggtcgcgcagttcctcgtcgaactccccacaaaaacca

SEQ ID NO: 51288 - DNA, 449 bp, Glycine max
aaaatcttttccctcccctcacctctggttgcaggggcggcgagaagagaacagggaaaacaaagaagcagtgttgtcttcagcgtcgactacaaccgcttcattggcgtcctcctccgccactcccgcctccacctcgcccaccacttctaccgccgccacgtcatcccccgcggcttctccctcctccccttcacctactcccgcttcatctccgccctctgctccgcccccaacaacattaacctccccctcatccacaggctcctgctcgacatggacgccctcggcttcgtccccgacatttgggccttcaacacttacctcaacctcttatgccgccaaaatcgcttagaaaccgccctcgaactcttccactccatgccctccaagggaagagaccccgacgtcgtttcctacacaattattatcgacgcgctgtgcagagc

SEQ ID NO: 51289 - DNA, 441 bp, Glycine max
tttattatctcaccactctcagcccccaaactgggggcttttctctttttcccggggatctcatttctcccaaattcgagtcttccttcgtttccaagtcagcgttaaggtacgattgcttttcgattcccttcaattttgatgtttctaaccgaaccaaattgggatctgtgttgcggttttagggtttagtttggcgcgtgcgatgaagatcgaggaattggactatggagagtgtagtagggaccatgaagagaagtttgagaggcatattgtgagcgttgatgccaagagagcgttggttggagcaggtgctcggatcctgttctatcccacactcttgtataatgtgcttcgtaacaagattgaagctgagttcaggtggtgggatcaaattgacgagtttttgttactgggcgctgttccgttccccaaagacgt

SEQ ID NO: 51290 - DNA, 492 bp, Glycine max
tgattgcattctctgcgaaggcaaattcaaggccgcgaagcctcttaacatggcgcgctcccaccgcgatacactctccatgtctcagctttttcttaagaacttcaccttcggctgcgcccacactgcgctcgccgaacccaccggcgtcgcaggtttcggtcggggattactgtccctccctgcgcaacttgcgaccttatctccgaacctcggtaaccgtttctcttattgcttggtctctcactctttcgacaaagaacgagttcgcaaaccgagtccactcattctcggccactacgatgattattccagcgagcgtgttgagtttgtttacacctccatgcttcggaatccgaagcattcttatttctactgcgtcggactcaccggaatctctgtagggaagaggactattctggccccggaaatgctacggagggtggaccgcagaggggacggtgcagcttccgccgcaagggatactctacg

SEQ ID NO: 51291 - DNA, 348 bp, Glycine max
gcctctcttacggttctagatcgtgagcggacgggggggatctagcaagagtcagggggagcgtcttccacaattgatacctgatcagatcctcaagcttaagcaactgacagttcttacactggctgggacatataagggactaccctatgaccaactgatgcaagagttagatgggacaaatgttcttgagctaggatattttttaattaatgaatgcatgtatgcaggaatagttcgaggaaagttgtatcatttgcggaggtgctatgaggttcactttgcaggtggtagggacttgaggcctgaccaactagggaatatgatacagactctctctaactggtt

SEQ ID NO: 51292 - DNA, 153 bp, Glycine max
atctaatcttgttacagggcttaaaagtgtgtgatgcaagcaatggagaacattcatcagagggaaatattggaagagcaaaggtttgaattgccaccaggattcaggtttcatccaacagatgaagaactcatcactcactacctctcacag

SEQ ID NO: 51293 - DNA, 346 bp, Glycine max
tcctcgcgtacggcattacaggtatgaatgattgtggtatattagttggtttcataaacatagaagaattaagatggctttgaattatattcataacccattgagtaattcaaatgcaggctattggacaatactgcaatcagctacaatctttgaaccttggatggtgtgataatgctggcgatgttggagtgactactttagcatatgggtgtcactgatcttacgatagttgactcgtgtggctgagaacgtataacaggtattttgctcaaaatttcactagttgcatttttcagtgaccttttacaatatctgattttcatgatattaccaaacgacatac

SEQ ID NO: 51294 - DNA, 368 bp, Glycine max
tctgtgaaggatgagaaagccaggcgcgagatgaaagggttagtgtcgaagatgctgcgtgagaatgcttcgcagaatgatcttcggaaggagtcgttgtacttggcgtgtgacgattgtctgcagttacttcgtcaccattttttgcaggctgcggctttggacatgcaggatgtgagtcaaattgcaagacaagcagataatttgcattggattttggatattttagttgacagacagattgccgaggatttcctcaagacatgggcatctcagtcagatttagctgaagttcattctaaagtgccggcagttcacaggtttgaggttagcagagttacggcaaggttgtttgttgggattgggaa

SEQ ID NO: 51295 - DNA, 483 bp, Glycine max
ttgtcgcgtgggcggacgcgtgggcgaacaacttgtttcaatggctaaggatcagaatatttctgctttacaacaatatggagggattagaggcttatcaaatttaataaaatctaatccggataaaggtgttagtggagatgatgctgatctgttaaaaaggaaaaatgcatttggaactaatacatatcctcggaaaaaaggaagaagtttctggaggtttttatgggaagcttggcaagatctgactctcataatactgataatagctgctgcggtgtcattggcacttggaataaaaacagagggtttggctgaaggatggtatgatgggggaagcattgcttttgcagttcttcttgtcattgtagttacagctgtcagtgattatcggcaatctctgcagtttcagaatttgaatgcagaaaaacaaaatatacaattggaggttattagaggtgggagaacaattaaaatttcaat

SEQ ID NO: 51296 - DNA, 455 bp, Glycine max
tgtttctaaactattcatctttgtggaattgattaatcggcaacaaaacctagtgatggttttgattcgtttgtggtttgttttgttaggattctttggaggcttcggttcagctgcggagcaaagaaggtggacactaaatgatttcgatatcgaaaagcctcttggaaggggaaaatttggtcatgtctatttggccagagagaagactatgagtttgcgattattttcagattttctctctcaaataacaattacaatactaattcctgttgattgtggatagttcgtaattgcgctaatttctacggattatttcattcccttcttgatttattttccttgtgtttacatttgtttggggaaaagtttgtttgtgctattcttggttgctttggtaagctttgtatgtgatttttgcatatttttttatatttctcattgaggatttgaat

SEQ ID NO: 51297 - DNA, 489 bp, Glycine max
aacaatgggtttaccgggcaggttctttgctctattggaactcttcagtcgctgaagatgttaaatttttctggaaatggtctcactggtagtctgccggagtctattgtgaattgcacaaaactttcggtgttggatgtcagccggaattcgatgtccgggtggcttccgttgtgggttttcaagtcagatttggacaagggtttgatgtcagaaaatgtacagagtgggagcaagaaaagccctttgtttgccttggctgaagtcgcgtttcaaagtcttcaggttttggatttgtctcacaatgcgttttctggcgaaatcacatctgcagttggaggtttaagcagcttgcaggttttgaatttagcaaacaactctctcggaggtcctattccagctgccattggtgaattgaaaacatgttcaagtcttgatttgagctataataagctgaatggaagcataccttgtgaaataggaagagct

SEQ ID NO: 51298 - DNA, 340 bp, Glycine max
gaatactaggaaaatggtccatgttggtcttagttggtgacatgcatagagacatgcgggttatatcactcaactttctaagccacgccaggctcagaacacacctcttgaaagaggtggagaagcaacccctcttggttctgaactcttggagccaaaattccatattctcagcccacgatgaagctaagaagttcaccttgaatttaatggctaagcatatcatgagcatggatcctggggatatcgagacagagcaactaaagaaagagtacgtcactttcatgaaaggggtggtttccgcgccattgaatttacctggaactgcataccgaaaggc

SEQ ID NO: 51299 - DNA, 386 bp, Glycine max
aacaaagtgaaactggctggtgtgttttttccacagaactactctgccaagtgtaaaatgaaggatccagaggagcacccagtgaagtctagaaggcctcttcagaaatctgcagaacgtagaagaaggtgcaggagaaggagccagtgcaagatagagaaaatgcaagaaacggaacttgattcacaccttggtttctcttctgccacttgcaagagtcttgtgtttcatcaaaggcctggctttggccaacttggtactaagtgtgtcatcaaagctaaccactttcttgcagatatatcagtttctgacttgagccattacaatgttataataacacctgaagtcacttctcgtaaaacaagcaaggctatcatagcagagtt

SEQ ID NO: 51300 - DNA, 364 bp, Glycine max
tgtagttcccaatttgagtggtgttttttaccatggtggccaggttctcccaaccgatgaatttgagtcaaaatccaaggtttttgaaccttgtgatgctcgttacatcgattacactccctgccaagatcaacggcgtgctatgacttttcctagagaaaatatgaattatcgcgagaggcattgcccccctgaggaagaaaagttgcactgtatgatcccagcacccaaggggtatgtaactccttttccatggccaaagagccgtgattatgttccatatgcaaatgctccgtacaagagtcttacagttgagaaggctattcagaactggatccaatacgagggaaatgtgtttagattc

SEQ ID NO: 51301 - DNA, 357 bp, Glycine max
aaagaactgacgctgtattcgtattggaggagctcttgttcccaccgagtccgaatcgctctcaacctcaaagggcttaaatacgaatacaagcccgtcaatctgctcaagggagaacaatctcgccctgagtttctccagctcaatcctgttggttgtgtccccgttctagtggatgaccacgttgttctctatgactctttcgccattattatggtcactcctctctttcacttttccaaatcatgcgttccctgttacttagtttctcttcaaatacgtatcacattgttttctcttcacatgcatgcagtatttggaagataagtatcctcacaatcctttgctccctcatga

SEQ ID NO: 51302 - DNA, 376 bp, Glycine max
cacacatgctcttagaaagacctacattgtatacttgggagagcattctcatggtccaagtccttcacttcgcgatcttgagtcagccacaaattcccattatgatttattggcctcagtcttaggaagccacgagaaagcaaaggaagcagtcatttactcgtacaataagcacatcaatggctttgctgcactactagaagaggaagaggcgtcagagattgaaaaaaaggcaagtgtaatttctgttttcatgagcaaagagtataaattgcacactaccagatcatgggactttcttgggctggaaaaatatggaggaattcctgcagaatccgcttggtggaacggaaactttggcgaaaatacaatcatt

SEQ ID NO: 51303 - DNA, 323 bp, Glycine max
accattcaacgacccgaatttgatggtaatgtataggaaaatctacaaaggcgagttcccgtgtccgcggtggatgtcgccggagctccggcgattcatatcgaagttgctcgacacgaacccagaaacgaggatcacggtggatggcatgacgcgggacccgtggttcaaaaaagggtataaagaattgaaatttcacgaagaggattaccatgcatccgggtcgggttcgtttttcgggccgaaggatgagagggtggtgaatttgaacgcttttgatttgatatctttttcttcggggttggatttgtccgggatgtttg

SEQ ID NO: 51304 - DNA, 458 bp, Glycine max
ccttctccttgaccagcagaggggcatcttaagatcgccgctctcttcctcggccgcgccttcaccgtccctctcaagagctacactcacgagatcgttactctctggtaccgtgcccccgaggttctccttggctctacccattactccactggggttgatatctggtctgttggctgcatctttgccgaaatggtgaggaggcaagctttgtttccgggggattctgagttccagcagctcattcacatattcaagatgttgggaactccaacagaggagaattggccaggagttacttctctgcgtgattggcatgtgtacccacgctgggaacctcagagcttggcaaagaatgtgccttccttaggacctgatggagtcgaccttctttcgaaaatgctcaagtataatccttctgagagaatatctgctaaggcagcacttgatcatccata

SEQ ID NO: 51305 - DNA, 461 bp, Glycine max
cgcgtgggcttttgtaagggggttttattgatatgtcttccttttctggcgggagatttgaatgtttttccttgtctcttcatctgatgagatatcacttaaagtagcctgagaatctctatcattttaatttcttcaatcaatcagggctttgccaaatatgttgaatggagtgcaaatatgatggaagaagaggcaaagcggaagctgaagacttcagagcttcaggcaaagaaaaacaggttaaagatttggacaaactatgtaccaccagcaacaaattcaaaggcaatacatgaccagaattttacaggaaaggtggttgaggttgttagtggagattgcatcattgttgctgatgattcgattccatatggcagtccactagcagagcggcgagtcaacctttcaagtattaggtgtccaaaagtgggcaatcctcgtggagatgaaaaaccagc

SEQ ID NO: 51306 - DNA, 454 bp, Glycine max
caactcaggcctgctacatgggacttttctgcatcttcattcatttaatcatcaaaggataatagaagtcccaaactcaccgaccgcagatcacccagaagccccgcaccagagaggaagcgtccaagcagaatatctgaattggaatctcagatttctcaactcaaagaggatttgaaggtggtgaggaaccagctcggtgtgtctgaatcatgcaagaagcaagctcagcaagatgctgaagagtccaagaagcaagtagcttccctatccttgaaacttgaagattctcaacagcaacttgtgaagttctcagctactgaacaagctcgtgttgttgagctccagaaaaccatagaagagcatgataaggcgtggcaatccgagctcagggctgcccaacagaagctctcagacaacacccttgcgcttacctctgccatcgacgaaattc

SEQ ID NO: 51307 - DNA, 343 bp, Glycine max
  unsure (1)..(343): unsure at all n locations
ggaatggnnctcccatttcaaccgggccatttttttcagcaatatcaattactatgtggatgtccctttggaattgaaacaacaagggatagtagaggacaagctacagcttcttgttaatgttacgggagcctttaggcctggtgtgttgacagcattggttggagtaagtggtgccggaaaaacaacgctgatggatgtgttagctggaagaaaaactggtggagtcatagaagggagtgtatatatatctggttatcccaaaaggcaagactcttttgcaagaatttctggttactgtgagcaaactgacgttcattcaccttgtttgactgtctgggaa

SEQ ID NO: 51308 - DNA, 434 bp, Glycine max
atgtatggcctttgcaagtgggggagagtgagtgatgctaggaagttgcttgatgttatggtgaataagaatctgatgccggatttggtttcgtataacactctgatttatggttacaccagattgggaaacataggggaggcttttctcttgtttgccgagttaagatacagaagtcttgctcccagtgttgtgacctataatacacttatcgacggtctttgcagattgggggacttggatgttgccatgcggctaaaagatgaaatgatcaaacatgggcctgatcctgatgtatttacttttacgacttttgttagaggattttgcaagatggggaacttgccaatggctaaggaattatttgatgagatgcttaatagaggattgcagccagatcgttttgcgtacataacccgaatagtacgtgagct

SEQ ID NO: 51309 - DNA, 482 bp, Glycine max
aaataatgcggccgataaaaacggattgtgttgttgcgacaatctcaatcgtgcctgtaaggtaaataatgcgctaagtgatggtgaagaccggagatacagcgttcatggcagacgtcaaagaggagcagggaaacatggctctgtcaaatcctctggaagagagaatcttcgtttccatcagagtaagacctttgaacgatagagaaaaagccaggcacgatgttcccgattgggaatgcatttctggcaacaccatcagatacaagaacaacggccatgcggaaccgcgaccactctcaatggatacctacgcctttgatagggtgtttggggaaaggtgcaatacaaagcaggtttatgaacaagggattaaggaagttgccctttcagtagttaggggtattaactctagcatttttgcttacgggcaaacaagcagtggaaagacacacaccatgtctggcattactgaatatgct

SEQ ID NO: 51310 - DNA, 417 bp, Glycine max
tgcaaatctcgcgttacgcatgcgtttcttcactcaatcggagcccagcactgatctatttggaactcttcgaggtctgtggttttactgtactcaatttgataaattaaggcaaagacgatgaccaagaagaagaatcccctggtgtttatggatgtgtccatcgatggggatcctgttgaaaggatggtttttgagcttttctatgatgttgctcccaagactgcagaaaactttcgtgcattatgtacaggagaaaaaggtatcagtccaaatactggaaaatcactgcactacaagggttctttcttccatcagatcataaaaggttccattgtgcaggatacactgggctgatggtctcgactgcttttcttgtgatatagttttaagggtggagattttgtcaatcgaaat

SEQ ID NO: 51311 - DNA, 421 bp, Glycine max
aacacaaacggctccgttcttctcccacaaacacacaacaaatgcatcgatccctcatcactatacaaacttcatagtttgtgtgtgtgatgcaataatagcaacatcaatgggaggagtgacatcatccatggctgcgaagttggcgttcttcccgcctcacccagcatcgtacaaggtggtgaaggacgagttgacggggcttctgctcctgagtccttttcctcatcgcgagaacgtggaaattctgaagcttccgacgcgccgcggcaccgagatagtgagcatgtacgttcgccaccccatggcagcttccactgttctctactctcacggcaacgccaccgatcttggccagatgtacgagctcttcatccagctcagcatccacttgcgtgttaatctcatcgggtatgactac

SEQ ID NO: 51312 - DNA, 396 bp, Glycine max
cattccccaagcgtacctctctgtcatactgaggtcatgaagggcctccaagtagacaacatgcacattggttgcactcttgttagcaaacagagtgcaacccagaagatgaagaagatatgcgcgagccgcagctgtccaatgacctgcctggcatcgacactcatatatatcacgtacccattgcaggtgtacgtacggtccacgacactgggctgtctcagccctggcagactctgtaaagaccatcaataagtccatcagcatctcaaccgcatcatccacatgcaagggctcaaaggcatgtaagtcgccaaccattggcagatggagaagcgaggagacatcgtccagcgtgatggtgagctctcccacagggagatggaaactagacgt

SEQ ID NO: 51313 - DNA, 509 bp, Glycine max
cgtccggactccctctgctgggttggttttttctcctccacaaccaaccgcccaagaaccatgcacatctttttctttgcataacttctctccccccaccccccacctttcgaacttgacatgcatgcatgtgtgttttaattcttcttcacttctaaatgggcttataaagtcatatatggttaatattaatatttgttctcaaggtaaagccaggatttagttgattccattgaagattgaatgcaccaccaccagcaccttttaattagtggaaggttaattaatttctggtgtaaatatatcaacgagctttatctacataaattaatgccgaccaacgtgaaaggcctccttaaatacatatcccaaatattcgaagagaaagaagacgaatttcaaattgggttgccaactgatgtaaggcatgtggcacatattggatcagatgatccatctgcaaatgcaccaagctggatgaacgatatcaaacgaggaaaagaaccccc

SEQ ID NO: 51314 - DNA, 209 bp, Glycine max
agaggcggaagtggtgctcttggtgcagggctcagtaaattcagcactgctgctgccattgaagaaccaattaaaccaccagttaaagtagaacacacccagctcttaattgatggaaaatttgttgatgctgctactggacaggagatgtgatttctcattttgctgagggtgaccatgaagatgttgatcgagcagttgcagctgct

SEQ ID NO: 51315 - DNA, 320 bp, Glycine max
gtctgattgggttattaggagtgcttagatctgcattgcgaggaacttccttccgaggaagagggtcttgtattttgtatatggtgtgaagaaggctgttcagaattgtgtttggttggggcttgtgttgattgcttggcatttgttgtttgacaagagggtgcagagggagacccgcagcaatttcctcgagtatgtgactaaggtgttggtgtgtttccttgtggggactttggtgtggttgttgaagacccttatggttaaggtgttggcttcctcttttcatgtgagtacctactttgacaggattcaggaatcgc

SEQ ID NO: 51316 - DNA, 408 bp, Glycine max
  unsure (1)..(408): unsure at all n locations
tccgtgttcttgtgcaagcaagattgttcttaaccaaactctctgtttcagctctctctgntttttcggcacaaacagatttcggctgtttttaagtatggccataaagacaatggaactattgaaagggtgcggatcacaggaagagataatggaagtgctttctgcagtggcttcggatttgggggatgtgatcgatgatgtgaacaccttgcagggaagaagaaattcgaacctttgagtgcatttcaaagcatggtcagggtccacgccttcttggccgattcacctctggcagagttgaggagtttattcatgccagaactctatcagctgctgacctccgtgaccctgaagtatctgctttgatagcatctaagatgagagagttccataatcttcatatgc

SEQ ID NO: 51317 - DNA, 434 bp, Glycine max
tctgttggacttgatgttcaattgtctgctcttaagaaatatgtgcctacaatctggaagcagtctcttgtggggtcaagtatatgggcagtctcaactgcaaatgcaggcacttggagagaagccgagctcaagtcctgggacgaaaaggctggagttggacaagttgttttccgagacgacggaagttctgtgaaacttggggcagaagaaatggcactgtctgagcatgcagaaatgagtgacatagagagtgattccagcttagatcaatccgattccagtgactatgaggaggaggaggaatcgcaaggcataggatttctggagagtaccaatctacagagaggtattcaaactgaaactgcgacatttgccacgtgggagaaccacactagaggcatagcttccaaaatgatggctaatatggggta

SEQ ID NO: 51318 - DNA, 430 bp, Glycine max
tcttaaaaagcagctaaggaagttgctctttcagctgtcggtggcatcaactgtgagtttcttctctttgtctgcttttcctccttcatcagcatcatcaaaatccacgtaatttccttgttaacatcttcttttgatctctccccatggtgtctaattgatcagcaagcatttttgcatatggacaaacaagcacagggaagacatacaccatgagtggcataactgaatacacagtggcagacatttttaactacatagaaaagcacaaggaaagagaattcatgttgaagttttcggcaattgacatttataatgaatctgtcagggacctccttagtccagactgtactcctctcagacttcttgatgatccagagagagggacaagttgttgagagactgactgaggaaactttaagagattgga

SEQ ID NO: 51319 - DNA, 281 bp, Glycine max
tttctacgcgtccgcccacgcgtccgcccacgcgtccggccttaaatgagtaaaaaagagtgaagaaaggaaagaaaggagcaccatttttggtttgagaaacataattagcaagagagttcaaaatggggaagagagagtttaatggggtggtgttgatgatgctgtgtttgtgggtttgtggtgtcacagtctgtgtgacttatgaccacaaagccattgtggttgatggcatgagaagatttttgatctctggctccatgcattatcctagaagcaca

SEQ ID NO: 51320 - DNA, 475 bp, Glycine max
tcctcttctccttctccttcttggatttcaattcatttctgttgatggttcagctgatgaagaattctcggaagcccgaaacgtcttcgtgcggcgaccccgtgaagttggagatcgttgaggacccactggaagaagagcatgggcctcacaacaagcgctgcaaaccctctccctctccctcgcctcagcctcagcaatggagtgcttccgatgatggttctgtcagttctccatcccatctgaacatacttgacgagccgagcccgttgggtttgcgcctcaggaagagcccttcactgttggatttgattcagatgaagctttctcaaggaagtgcgcagccgagcgaagatttaagctctggagccaaaagggagagcagggctgctgctgtgtccggtgccggtggtgctgacaagctcaaagcttctaacttcccagcttcgctgctgaggattggttcgtgggagta

SEQ ID NO: 51321 - DNA, 444 bp, Glycine max
tgtataattgtccagattttttccaacaaagcaaaggcggtgagacatgtatgtggaagaaagtagcacctcttctgcttagctaaacccccgaacgcagctgcgccactcgtttcatgcctcagcctctcgcctcggcgtgattgctaccaccttgttcgattcattcgtgtgatgttgtatgggttgaacaagggacagagattgcttcgggaatggagtgggacagcaattccgatctgagcggggacgaagaggaggaagggttcgtcttcaacgacggcgacgacgctggccctctcccgttccccttccccgtcgtcgaaaacctcctccaaacggctccctgcggcttcgtcgtcaccgacgcgcacgagcctgacaaccctatcatttacgtcaacaccgtcttcgagatcgtcaccggataccgcgccgaggacg

SEQ ID NO: 51322 - DNA, 451 bp, Glycine max
ttctttcgcgtgggcggacgcgtgggcggacgcgtgggctcagctccttccaaaatgaagttccaagttatagagcttctctttggtaaaagcaccccaaaacaaatgatcccaaaagtgactttgcttgcagtgtttgccgtactgttattcactgtcacaccactttcctaccctttgtttagatactcttcttcatcatcatctttgaagagcaataagcaattatccaagaaaccatcatcagcatttgatgatctgaatgagtcagcaagcttgccttcaacttccataaagaagtgtgacattttcactggggaatgggtcccaaacccaaaggctccgtactacacaaacaaaacatgctgggctattcatgagcaccaaaactgcatgaagtatggtagaacagactctgagttcatgaagtggaagtggaagccaaatggat

SEQ ID NO: 51323 - DNA, 461 bp, Glycine max
tctcccacgcgtccgcccacgcgtccgcccacgcgtccgcccacgcgtccgcggacgcgtgggttgatctgaaagttcctatcagactcagacatagattgtaacatccccttttcccacagcggagaaacctctcctctctctctggtcgcatgagatgatactacataagcgtagaatcctacgcaatcgaattcccagctagattgtctctctgtctcaattagaatttgaattggtgatcggatccaacacaacacaacaccatgtccaagtctttgccctactccaccaaagatgttcactacgacaacgccaagtttcgcccccgctctttcttcaaggttgttactcagaacttactcaccagtaacctaaggcgtgattgtggtagctgtagtcaggaaagtttctatttttgtattgactttggtgtggcttatcttatgcatggcacatgc

SEQ ID NO: 51324 - DNA, 256 bp, Glycine max
tttgatggtgttcgggttcgtgacggacatgattgggatccactcggttttcggcgcgttcgtgttcggaataacggttccgaagggcgcgtttgcggagaggctgatagagagggttgaggatttcgttgtagggttgttgttgccgttgtattttgcttcgagtgggttgaagactaacgtggctacgataagtggcgcgaaggggtggggaatactggcgctggtgattgcgacggcgtgcgccgggaagatt

SEQ ID NO: 51325 - DNA, 428 bp, Glycine max
tctgctgtttggacggtcacacgcagttgtattgtagaactgaacaagggtttctctttctctttctctgtctgcttcttcactttctctcgtttcaatcgaaaaaaatcatgggcagaaaattcttcgtcggtggcaactggaaatgcaatgggaccactgaggaggtgaagaagattgttactactttaaatgaagctaaagtccctggagaagatgttgtagaagttgttgtgagccctccttttgtgttccttccttttgtaaaaagattgctgcgccctgatttccatgtctcggcccaaaattgttgggttcgaaagggtggtgcttatactgtacaggttagtgctgaaatgcttgttaatttgggaatgcgttgggttatgattggtcactctcaacggaggcagcttttgaatgaatca

SEQ ID NO: 51326 - DNA, 268 bp, Glycine max
tttcaaactcaattcctgtatggagtgataaatataatttaaaatctactccaataattttcttttgttaatcatccttatgtttgagtggcggtattgttgtcgaaatctgaaaacaggggttattcgaaggcacgaaagcttacagaaaagaaaatgggggcttgctactcttccgtccagaagaaaatgccattcgcatgaagactggtgcccaaagaatgtgcatggcatcgccttccattgatcattttgttgatgctttgaa

SEQ ID NO: 51327 - DNA, 299 bp, Glycine max
tcccacgcgtccgcccacgcgtccgcggacgcgtgggtggacgcgtggggcgatggatctcggaacctatgacgtgccagaaggagtggacattctgggaagatacgatgcacagtttgcaaaaatcctcgcaaaagatgctttgaaattcgacgctgaactgtaacgtgagttccggaacgatatcaagcatgcattaaagcgcataagagaggtaaagaagaagtacaatgaagggtttcttccggggtttgatcctgacaccattgacatcaaaaagcacgagtgggtgtgtgcac

SEQ ID NO: 51328 - DNA, 396 bp, Glycine max
tcggacgcgtgggcggacgcgtgggcggacgcgtgggctggtggggtggtgttggcttctcgtgatggaaagattgtgtgtgaaaatactcttgatgcacgacttgatgtagtgttccgtaaaaagcttccagagatccgaaatcagctctttggacaagttgttgcttgaagattttgattgtattgtttggttacccctgtaatatttatattccgaagcataagcttgtctttggacctaaatagctatcttgccattgattctgtcaacttataatggtcttttagataacaccatatttcggtagttcagttgttcccatattgggtacgatgggggcaatgcgttattcaacattttctttagcgatggttgttatttgcagctttgagc

SEQ ID NO: 51329 - DNA, 340 bp, Glycine max
gcccacgcgtccgcccacgcgtccgcggacgcgtgggatttttcattatgaaatttcaaagcattgaaataatcccctgcagatgagcacacaagcaatatacaaaactcagctcctttcaaagaagagagcttggcccgagcattgtgtgatcttaacctgtacatagtaaaccactaaccactgatgtcccctttcccaattatatgaagatggactgcatctgggacatggagggagccagtctttttagataccctagtgattggttttagatgaaggaaaaatctgtcatgaaccaactattttgaaaacttaagctgttaggtgaagacacatg

SEQ ID NO: 51330 - DNA, 436 bp, Glycine max
tttccgttcacgcgtccggcatcacggacccagtttgacttgtgtcaggggtttttcattctcacagtcaccaacccttgttcttcctctccactctcaccgtcccgccaaaaccctcctacaaatcgccacgacgccgtcgtttcggagttgtggctgcgcaccaatgtccacgttccaggttcgcgacaaaatcgacctctccgacgtcgagagaagaatcttcgacaggcttctcgccactcttcgccacttcgacctccaaactcagctccgagtcgccggtggctgggtccgcgacaagcttctgggaaaagagtgctatgacattgatatcgcgcttgacaatatgatgggaaccgagtttgtggataaggtgagggagtacttgttgtccattggcgaagatgcacagggagtttgcgttatcgagagc

SEQ ID NO: 51331 - DNA, 223 bp, Glycine max
tctcacgtgtccgggcggggctacccgctgagtttaagcatatcatcaacatcaccaccaccacacaacaaagcagctagacttcatggacttgtcacttggtagcagcaaggatgaagggaatttgcaaggatcatcttcttctgtctatgctcatcatcatcatgcagcaagtgctagttcttctgccaatggtaacaacaacaacagcagcagcagcaac

SEQ ID NO: 51332 - DNA, 305 bp, Glycine max
ttagaatggaatttcgatgctcagtcatctcttttaccattctcttctctcttgctcttgcaggagagagccatgtccatgcatcgctacctgaggaagattattgggaagctgtttggccaaacactcccattcccactgcactgcgagagcttctaaagcctctccctgcaggtgttgaaatcgatgaactccctaagcaaattgatgatacacagtacccaaaaacattcttctataaagaagaccttcatccaggcaaaacaatgaaagtacaattcaccaagcgtccctatgcacaacct

SEQ ID NO: 51333 - DNA, 357 bp, Glycine max
  unsure (1)..(357): unsure at all n locations
atcttgcataanttttcattcttgcccagggatctaaatttcattgagcatacaagtaatattggttggaaagagcatcaaagagctaggcctatcattatagatccaggcttatatcattcaaagaaatctggtgtttactgggctaaagagaagagatctgttccatcttcgttcaagttattcacagggtctgcatgggttgtcctgacaaaatcatttcttgagttttgtgtttggggttgggataatcttcctcgaactctccttatgtattacacaaattttctttcatcccctgagggttacttccatacggtcatttgcaatcataaggactatcaaaacacaaccatt

SEQ ID NO: 51334 - DNA, 361 bp, Glycine max
cggactcgagggcaaacttgatccctttagagatgcagagattttgagaaccaaccttccttcgctgagggagtcctcgattcgcgttcttatcgcttgcaccattttcttgaagcaagctgctgctgcaggcctttgtcttgctcaaataggccaaatgatgactagggaattttgtgatggtgaagagtcaccaagtgaattagaaaatatttgcttgaaggtcaagactactagcgtccctcggggttccgacgataacgtgaataaccgcaaagatgaaactgaagaatgtgatgaagttggtggcattatttccttggccgaccttaaccaaggtgaatgggaagcgtttttggag

SEQ ID NO: 51335 - DNA, 400 bp, Glycine max
  unsure (1)..(400): unsure at all n locations
ccctcgtgnccgcaccggatggggaagaagccgccgcacctgtctgacgttgaggcggcccgcaaccccccgtcaccgccgcctactttccatgtgccactgccttccatgtggttcccgtggttggtaccactcatttttttggccaccattgcaatgtttcgtgtataccatgtatgaaaatgattgccctgcctacttagatgaagaggtttgccttttctctcaatatctcggcaggttctccttccaacctttcagggaaaaccctctccttggccctgccatccgcacgctgcggctgttaggagcccttgaaaaggaactagtggtggaccaaaatgaagtatggcgctttttttcctgtatgtttcttcacgctggagtcgtgcatttacta

SEQ ID NO: 51336 - DNA, 382 bp, Glycine max
aggattggaccactttgttctggacattaagtaaaaaggattggcactattgacaacaatgattgtcatgatactcattgccatggtcagttttctatacataaatgttagatcattaaggcgagaaatgcatttgtgttggtcactcatcaaacaaaatgaagccacacaacaagctgagcgaaaatgtatgaacaagagccttgcttttgctagtgccagccatgatgttcgcgcttcgctggcgggccttactggtttgatagaaatgtcctttcatgaagtttctcctgattctgaattaggaaccaacttaagacaaatggattcttgtaccaaagatttactaggactattgaattctatacttgatgcaagtaaa

SEQ ID NO: 51337 - DNA, 238 bp, Glycine max
ctacgcgtacgattccccttatttttctctcttctatatccccgcccaaaccctaactctctaccctattccgctttatgtcatgcataatgaaaggaggaaagtccaagaccgaatctaagagagccgatgccaaacttgctgggaataagaagggcgccggcaccaagactaggaaacccgacggaaaggggaaggcagccaaagatcctaacacgccaaagaggccttcaagtgc

SEQ ID NO: 51338 - DNA, 315 bp, Glycine max
ctgacgcgtgggtgcctattgaaccttggttggatcccctttgaattcttctcaaaagttttatttcctggatttgcttgatcatttcaaaggggtccaactcttggggcaggcaagatatttatataagagtcattgcctttaaatttgtgaatatttttaccaagaatacttttggttttttgggatgtggagagatcctggggctcccgctgattctttctatgaaactcgccctgagtgcaccgatgttcccaagtctcgatttaggatcaaggctggcaaaacattaagtgcaagaaaatggaatgctgc

SEQ ID NO: 51339 - DNA, 275 bp, Glycine max
attagcagcatggcttttgtgcatcagtggtattggtgtatacaacatattctactggaaccgacaaatataccgcgcaccttctccactctacatgttgaagttcctcagagccactggcattgaaggatggatgtcattaggtggagttgtgctttcaatcacaggagtggaggcaatgtatgctgccttgggtcatttttctgcactctcaataaaggtggctttcacatgcctagtgtatccctgcctgattttggcatatatgggtgagg

SEQ ID NO: 51340 - DNA, 344 bp, Glycine max
  unsure (1)..(344): unsure at all n locations
tcgtttagtctgcgtcngaggattccgaacgagcgaccttcttcgtttctcgcaaaggttaagtcatcatgggtaaggaaaagactcacatcaacattgtcgtcattggacatgtcgactctgggaagtcaactaccactggtcatttgatctacaagcttggaggtattgacaagcgtgtgattgagaggttcgagaaggaggctgctgagatgaacaagaggtcattcaagtatgcctgggtgcttgacaagctcaaggctgagcgcgaaagaggaattaccattgatattgctttgtggaaggttgaaaccaccaagtactactgcacagtcatcgatgcc

SEQ ID NO: 51341 - DNA, 339 bp, Glycine max
tttcgtccgcttacgcgtccggttgtctatcattggaagcctgaggcattggaatcttgttcggcttcatgggtggcgccatgagaaaggagagattttgctggtgtatgacttgatgcctaatggaagtttggataaggcgttgttcgaggctaggacgccgcttccctgggctcataggcgcaagattttgttgggcgtggcttcggcattggcctacttgcatcaagagtgtgagaatcaggtgattcatagggacattaagactagtaacataatgttggatgaagggttcaatgccaggttgggagatttcggtctggccaggcaaactgagca

SEQ ID NO: 51342 - DNA, 184 bp, Glycine max
atgacacagcacatgcagttgttcgtgcgtatgatagagcagctattaaattccggggagtggaggcagacatcaactttaacatagaagactatgaggaagacttgaagcagatgaccaatttaaccaaggaagagtttgtccacgtactttggcgacaaagcactggatttcccagaggaag

SEQ ID NO: 51343 - DNA, 185 bp, Glycine max
ttcgtccgatgctctgaagttgttgaaaagactggaaatgatttgcattgcaagtgcatagatgctggtcttttcctgcctggagccaaacttagtttctggagagatggaaagcttgtgagagggaataacaagctccccactctatcaacaaaggatagggctgacattgactttggtatagc

SEQ ID NO: 51344 - DNA, 289 bp, Glycine max
cctgagaagttggggtcgaaatagagatttgtttcattggagttcatggacctgtcctctttgccggatttgtgaggcttgcacaaggactggtgatccaagtaagctcatgttttgcaaaaggtgcgatggtgcttaccactgttattgtcttcaacctccacacaagagtgtttgtaatgggccttatttgtgcacaaaacacgcaagatgtcacagttgtggatccaatgtccctggaaatggactaagtgtgaggtggtttatgtcatataccaactgcgatgca

SEQ ID NO: 51345 - DNA, 251 bp, Glycine max
ttgttcacgcgtccgcccacgcgttcgcccacgcgtccgcccacgcgtccgcttgttttattgactggttgcaaaagcaaaacaaaaaacaaacctggtgtaagatttgtagagtattcctgaagcggtgcggtgccttgtttctgcgaacatttggctgaggtatctatctggaatcatctctttctcttccttctgagttgccaccgagcgctgtgccacttcgtttttttactctgctgtaatatcca

SEQ ID NO: 51346 - DNA, 312 bp, Glycine max
gctaggcccactcaaccaccacacctctgcacggtcactcttcccctttctgctcttcttctaccatggaagttctaaaagtagaaaaatggcagagaccatcgtagtaacctcagagccggggaacgagggacaccctgacaagctctgggaccaaatccccgatgctggcctcgacgcttgccttgagcaggacccagacagcaaagttgcctgcgaaacatgcaccaaaaccaacttggtcatgggcttcggagaaatcacgaccaaggccaacgttgactacgagaagatagggcgcgacacctgcag

SEQ ID NO: 51347 - DNA, 348 bp, Glycine max
actgctcacgcgtccgcaaggcattggccaaaaattatggattgggtacaaatggaccgttgccgtgcagcagcatcgttaccttcgatcaaagagaaacaaccagaaagtcatagtaatcgtgtcagactcggtcaagaaatcaaaggtcttgatgaagggaatatggctgaaattgatagctatcaaaacttgtttggtttgatgaaacagaggtttctgagtttcaagagccaaaaatatataaaagagttggagcattttgaagctcttgctgaagctcaatttcctaagtttatggtgattgcttgtgcagactctagggtatgcccctctaacatattagga

SEQ ID NO: 51348 - DNA, 360 bp, Glycine max
taatgaacaagcgtgagctcaaacacacaacaacacctgcttgtggttcagacaaccttaactttggtcgctcttgggttctttccaagttccaaccacggtgtttgcgttttccgcacgagtgacgggaacagagaaaaagctcaaattgcacgtgcctctctcccttctctaattaagaagaagaagaagaagaagaatgtggggatttggtggcagatattattgggaaagaaaagtggcttgtgaaaaagtcgatgggatagttgtggtgttcgcgtggatgtcaagcgaggagaagcacttgatgaaatacgtggacctttattcctctattggatggaaatcactcgtttgcca

SEQ ID NO: 51349 - DNA, 262 bp, Glycine max
ttctgatggctcaagaaatgaaagagcctgcagtgaacatcatagagcaatctcaagttgctcccccacaagattcccttcattcaaccattctccccctcacttttctggacattccatggttcctaacccgccacgccagacgcatcttcttctatgagtttccctttcctaccacccacttcctcgaaacagcacttcccaccctgaaacactctctttccctcactctccaacatttcttcccctttgcctctaatct

SEQ ID NO: 51350 - DNA, 428 bp, Glycine max
tttttctcgtgggcggacgcgtgggcggacgcgtgggccggcgtcggtttcgaggtctccgacgatccgtcggagctcgtcgagaggattccggcagttctcgcaggagctgaaagccgaggcggttgcgaaggccaggcagttctcgcaggagctgcggcggttctcttggagccacggccacgcttcgcgcgcgctttcgtcttcctctgctccgaacggcgccggtgccggattcgaaacggcgttggcggctcgtgctctcaggaaacaacgagctcaacttgatcgcacacgctccggcgcgcacaaagcgcttcgcggtctaaaatttatcagcaacagatccaatggcgttgatgcgtggaacgaggtgcagagcaacttcgataagctagctacggacggttttctcaagcgcaccgatt

SEQ ID NO: 51351 - DNA, 355 bp, Glycine max
ttttattattattttcatccggataccagaaccttcaaaatgaaaccccctgccagtggaggggaacgatcttttgtggagtttgtgctggagccactttacaagatatatagccaggtgatcggggaacataaaaagagtgtagagacaacacttgctgaacttggagtcactctaagtaatgcagcctacagattaaatgttaggcctttgctaaggttggcttgtagctcagtttttggtccagcttcgggtttcaccgatatgcttgttcagcatataccttctccgaggaatgctgcaattaagaaagttgatcatatatatactggtcctaaagactcttctatttaca

SEQ ID NO: 51352 - DNA, 265 bp, Glycine max
ttatgccacgctccagatcgccctccgcacgctcgacacgcgccgcaccgatgccctctccgccctcctcaccgacgccgacgacatcatcaacagttgccccgacggagaggtcgacgacaccaccgggctcatcctcaaactcaagtccttctgcctccgcatggacgcattggggttcttcgccttcgtcagcgccaagaagaaggagctcgacggcctacgcgccgagatgcctgaggctctggcggagtgcgttgatccg

SEQ ID NO: 51353 - DNA, 334 bp, Glycine max
gatctagaactatgtggtttcaaaaaggcccatgaaaggacatggaagggaaatgattcagttgggtgttcccattgctgatgcaccaccagatgtggacaatgtaacaggaatctccaaagataagaaagtagaatctatcccttctttgttccaagatatcattgagcgcctggctgcctcacaagtgatgactgtgaagcctgatgcttgcattgtggatttctttaatgagggtgagcactcacatcccaacaattggcctccttggtttggaaggcctgtttatacacttttcctgactgaatgtgacatgacttttgggagaataatt

SEQ ID NO: 51354 - DNA, 288 bp, Glycine max
catgttgaaattggcacattgcatgactagtaacttctgttccggggtttgtgcttcgtccgctcggaagtgggacagccttcacatagggactcttggtgatgacatgaaagtgatgactaggaaaaacgtggatgaccctggtgagccttctgggattgtactcagtgctgccacttgtgtttgggtgccagtgtcacggtaaaggctgttcgactttctacgtgatgaacgcttgagaagtgagtgggacatcttgttcaatggtggaccaatgcaggagatggt

SEQ ID NO: 51355 - DNA, 244 bp, Glycine max
gcgtcatcctctcacttgtttccaaagaggtctctctccacagaaaggaagaggccctcaactacgacttccccagcgccacaaagacctggtacgcctgtatctgatgatgggaaattgtcatccagaagactatcgggtacccgtttgccggacagtctatggccttgcactatgcgaagtctgagtgtttgtgtccagtcagataccatttccatacctgttagcaagaaagagaagcccg

SEQ ID NO: 51356 - DNA, 147 bp, Glycine max
ccggccagatcccttctgcgtacggcacctggcaacacctacgttacctaggcctcttcggcaacgagctcgacggctacatgggcccggagctcggtaacctctgcgccctgcgagagctctacattggctactacaacacctact

SEQ ID NO: 51357 - DNA, 387 bp, Glycine max
tggcctcttcagtgatggcatgtgtggccctcaaacctgcccctttcactgttgagaagtgctcagttagaggccttacctctctatcaaggaactccttttcattcatagttgaggccagtggtggcaagaagatcaagactgacaagccttatggaattaatggtggcatggctttgagggaaggagttgatgcatctggcacgaaaggaaagggaaagggcgtttaccagtttgtagacaaatacggtgctaatgtcgatggttacaggtaattataagatctatattatttaaaatttataaattattttcattcgattgtgtataaattaacctactcaatcaaattgaatttgcctgatttattatgcagtcctatctacg

SEQ ID NO: 51358 - DNA, 252 bp, Glycine max
taaatcatacgcgggtaacgcaggggaaccgtttatgccacgacagagtgtaaggaattagaagaattaccttttatgaaactagttgaaatggtgcgtgagggagcaactaggatgacaaatgagtatgcaaggtctatcatagattggggagagacaaacaaagggtgtcccaatagggaggttttggtttcttcatggtggagattggggtttgaggaagtgagagtatccgtgggggaagccaaagta

SEQ ID NO: 51359 - DNA, 336 bp, Glycine max
gtttaatgggcaccttttgtcaaggagctagcgggtattgtggagagaggaagagacaattcaatttcatgctatcctgttgttgaaactatacacagggacaacatatgtcacatagttaaggctccggctaatgtgaaatggaagactagggagcttgccactgaagttgctttcaatgctgttaactctctagaaggtgctggtgtgtttgcagttgaattgttcttgactaaggatgggcagattttattaaatgaagtggcgcctagacctcacaatagtgggcatcacacaattgaatcttgctatacctcacaatatgagcaacatttg

SEQ ID NO: 51360 - DNA, 378 bp, Glycine max
aatatgaagacttgcaaagaggggggttcttataaagccgggggggggatgggctcacaattgttaaagatgtcatgacctcttttgtacgggatacaggcaagcagctaattatggatcctgaaaggttgagagatcctgtggattttgttcaacgtctctcggatttgaaggataaatatgacagggttattactatgtcatttaacaacgacaagacatttcagaatgccttgaattcctcttttgaatatttcatcaatttgaatgcccggtctccagagttcatttctttgtttgtggatgacaaactatccagagggttgaaaggggttggtgaggaggatgtggagattgtactagacaaagtcatgatgc

SEQ ID NO: 51361 - DNA, 356 bp, Glycine max
ttcttcgcgtccgcccacgcgtccgcccacgcgtgcgcccacgcgtccgcggacgcgtgggttttcaccgagcatttgcattccgcattgaatatggctgaggctacacaatctaatgctgagttgttggagtggcctaagaaagataagcgccgcttcctgcatgttgtgtatcgtgttggtgatcttgatcgcaccattaagttttatactgaatgttttgggatgaagcttttgaggaaaagagatattccagaagagaaatatgccaatgcttttcttggatttggccctgaacaatcccattttgttgtggaattaacatataattatgggggtgacctcatatgatattg

SEQ ID NO: 51362 - DNA, 364 bp, Glycine max
cggttctcgtgggcggacgcgtgggttagaaacagcgggtatgtctctcatgcagcttactagctcccctgttggctcactggtccgtttcattgtaatatttgctttatggtacagaaccatggctttggccaagttgccaccaaacgcttcatcagttccagcagttttagcgtttggagattccatcgtggacccaggcaacaacaacaacataaaaacattgatcaagtgcaacttcccaccttatggaaaggattttcagggaggaaacccaacgggtcgattttgcaatggaaaaattccttctgacttaatagctgaacaattgggtattaaggagtatttgcctgcatatttggat

SEQ ID NO: 51363 - DNA, 373 bp, Glycine max
agcctcctcctgtggtaacggttgtcttaaaagttcgaatgcattgtgaagcatgtgctcaagttatacagaagcgaatccgcaagattaaaggagtagaatcagtggaaacagacttggcaaatgatcaagttatagtaaaaggtgtggtcgaccctgccaagcttgttgatcatgtatataagaggaccaaaaagcaagcctctattgtgaaggacggagaaaagaaggaagaagaaaagaaagaagaggagaaaaaggaagagaaagaagaagagaaaagaggtgaagaagaaaacaagggaggagaagataacaaaactgaaatcaaacgaagtgaatactggccatccaaaaactacatcgactatgc

SEQ ID NO: 51364 - DNA, 396 bp, Glycine max
gatgcaaagacgacaaaagatgcagaatattctaaagttttgagttctacattgacttcaatattggggtgggctgagaaaaggctccttgcttatcatgaaacttttgaccggggaaatgttgaaaccatgcagggcattgtctctttaggggtagcagcagctaagattttggttgaggatatctccaatgagtatcgccggaggagaagaaatgaagtcaatgtggcacgtgagagaattgaaacttacatcaggtcgtcactacgtactgcttttgcccagataatggagaaagccgactccagcaggagggcatccaaaaaccagccaaatgctcttcctggccttgtcatccttgcaaaggatgtaggtagcctggcagtcaatgaaaag

SEQ ID NO: 51365 - DNA, 250 bp, Glycine max
gttaatcagggtagggaagctaaaaactccatcttgcctccctcttctgcccccccccccccccctcctctttttttctaaaaaacatgatttttaataaaggggcaacgcattctaaccttgactgtttcgtacggtgtaccacacctgtggttcaatcccagtttcttccaaagtcggagattacaagccttaaccgtttgtggcatccgtgggagagagaaagcgtggaatattctacgttggggga

SEQ ID NO: 51366 - DNA, 369 bp, Glycine max
cacaaatcaacaacgcctctctgtgttacttttaaagcaggtgaccatggagcatcatcttcatatgtgtgccatgatcattttgatggattgacttcaagttagtataactggctgccaagttgtaatggcattggcctctggaagaagttctgcactgaacccaaatgcacctctattcatacctgctgctcttcggcaggtggaggatttttcacctcaatggcgggatcttgtgaaatcttcaacatggtttcgtgattattggttgagccaacataaggaggaagaatttgaagttgccaatgactctagcaatgatgatattgagaatatgctctcagaaacttctgatctaggcatggaaga

SEQ ID NO: 51367 - DNA, 358 bp, Glycine max
atatgcttcactgtccatggggggcatgggcaccttcgtaaccaaagaaggacaccttcacaggagtaagttatgtgaaaaaggaaaaatcgcctgaggtggttcaaacactatggaatcctgcaattgtattgacccacaagtgccagctgatgacttattgatgaaataccaatatatctctgatttcttcattgcccttgcttatttctcaatccctttggagcttatctactttgttaagaaatcagcagtatttccatatagatgggtccttgttcagtttggtgctttcattgttttatgtggagcaacacatctaattaatttatggacatttagaattcattcaagaact

SEQ ID NO: 51368 - DNA, 412 bp, Glycine max
tccacacccagatcctgttgtggagacgtcttctttgtgtgcagtgcaggctcctgagccaacttatgatccaaaaattaaagatgatttggaaaattcaaaggctttgtcttgcttgcaaattgagacattggtctatgcttctcagagacacctccaacacctctcaaatggagctagggcagggttttttattggagatggagctggtgtaggtaaaggtcgaactattgcagggctgatttgggagaactggcatcactataggaggaaagcattgcggatttctgttggttcagacttgaagtttgatgctagaagagacttggatgatgttggtgcaacatgcattgaagtgcatgctttgaacaaactgccttattctaagcttgattcaaagtctgttggggtc

SEQ ID NO: 51369 - DNA, 327 bp, Glycine max
attctattcttaaacgatttatgtttactgacggtttttcttctcgctggatcaggaatatcaaaaactagtccttcatctgttccttccaacttatctattctgtcatatagtgaagcaagtgatttctcaaatcttccaacaccaaggtctgagggcgaaatcttgtcttccccaaatcttaaggcctttaccttcaatgagctaaagaatgccaccaggaactttcgcccggacagtcttcttggtgaagggggatttggttatgtttacaaggggtggattgatgaacacacatttacagcttcaaaacctggatcaggaatg

SEQ ID NO: 51370 - DNA, 464 bp, Glycine max
tttcctttcgtccgcccacgcgtccgcccacgcgtccggtgattttaggtcaaaaggtgttcgagtgggatcaaacccttgacgaggtcaatatttacataactcttcctcctaacgttcattccaagcaattctactgtaagattcagtccaagcacctcgaacttggcatcaaaggcaatcctccgtatctcaacgtaaccctaatttccctccactccatttcctttcccatcttctcttattttattgtaatttgccccttatttatttgtgtgtgatttttcagcatgatcttactagcccggtgaagacagattcttctttttggaccttaggtaaaggtttaagcgatttccctaattgttttttcttttttttttggctcaaatttataattatatactttttttaattaagcatctatgcccttatggtgtaaaagtttttagatgctttatatt

SEQ ID NO: 51371 - DNA, 223 bp, Glycine max
gcgggtaccccctgacagccccttggctcctctttggtacagactggaggacaagaagggccaaaaaattcataataacggggaaatcatgcttgcgggttggatgggaactcaagcggatgagtccttcccggaggcctggcactctgatgctcacaacgttagtcactccaacctattaaacacccgctcaaaggtctacttctcccccaagctttactat

SEQ ID NO: 51372 - DNA, 347 bp, Glycine max
tttccttccttcgctaagacactcaccggcaagaccatatccctataggttgaaagctccgacaccatcgataacggcaggggcaagagccaggacacggagggtatacgcccggaccaggaacggataatatcctccggaaagcaggtagaggacggccgcaccctgaccgactacaacatacagaaggaatcaaccgttcaccttgaactacgcatacgaggaggcatgcagatcttcgagaagaccctcaccggcaagactattaccctagaagttgaaagccgcgacaccatcgacaacggcaaggctaagatccaggacaaggagggaatgcccccagacca

SEQ ID NO: 51373 - DNA, 378 bp, Glycine max
tccctcgcgtccgattcaaccgcctccactctcacgcaaaccatttttcttttctttctctccctctgagcctttcatcgctgcctcggagagatggcagtgtcggaaggatcaccaacccccaagttcacagattttaccacgagtctagcatcctaagccgacctgaagaagatggtaccatgactatggtgactactactttggaaattaataaaaagatactctctctggattacacaagctttagggtggaaattctgagtgctgatgcacagccttcttacaaggatggggtaattgtcgtagcgactggctgcttaactggaagtgacaatctgaaaaggaagtttactcagtcctttttcctagctcccc

SEQ ID NO: 51374 - DNA, 241 bp, Glycine max
gaggaaacagttctatatgaagctggaagaaaaaatgcatgcataggaagcagtgatgaatcaaatgcaagcaatatcacaggagaagacagaagctgattttaagaaactccggaagagcctcaactttaaagcaacaccaatgccttcgttttaccgcacaccttcaccttcacaaacacatgggaataaggtacatactttccgagttttcagcttgtttctgtttgtgattagtgca

SEQ ID NO: 51375 - DNA, 465 bp, Glycine max
ccttctcgtccgcacaaccacaaccttaaccttgcaaggttgtggattgctttgcttgcggtctcaaccaccgtagttcattgcaaaactgcctcccaagatgtttcagcccttaatgtgatgtatacaagcttaaattccccttcaaagctgagtggctggaaatcaagtggaggtgatccgtgtggcgactcctgggaaggaatcaaatgctcaggatcttctgtcacagaaataaatttatctgacctgggcctttccggatcaatgggctaccagttgtccagcttaaaatcagttaccgactttgatttgagcaacaacaacttcaagggtgatataccatatcaacttcctccaaatgctcgttatatagatctttctaagaacgacttcactggaagtataccttattcattctctgagatggatgacctcaactacctaaatcttgcacataatcag

SEQ ID NO: 51376 - DNA, 337 bp, Glycine max
  unsure (1)..(337): unsure at all n locations
aatatantctgatatacgggcgtcacttaaaggaatcatcaacttacgagagaaatcaatcaaggccggtgaagtcttacaccatgatttattaggcatgcttttggaatcaaatcgtatggaaatacatgaacatggaaacaataagaccgttgcaatgacttgccaagaagtaattgaggaatgtaatgcattctacctagcagggcaagaaactacatcgactttgctggtttggacaatgatattgttgagtagatatcctgattggcaagcacatgctagggaggaagtattgcatgtttttggtaaccaaaagccagattatgatgggtta

SEQ ID NO: 51377 - DNA, 459 bp, Glycine max
ccctctcgtccgcggacgcgtgggttttaatcgaagccaaaccgaacattcattcaattaagcaaaaatcacttaatattgcatcaatttgttattaatttagcctttatcttctcttagtgcactcttaccaagaggagaaagaaaagagaaatggaagaaggaaaaaacttattagtttagcctttatcttctccttaatcatgtcctctgtattttttttatgtttaaaaattattgaacacaaaatttcagagattttgctcagtaagtggcttaagtaagaacaaagcactggtggagaggttgcagcgctatggagtgatcacatcaagtaaggtggctgaagtgatggagacagttgatagagccttgtttgtaccagatggagctgcaccttatgatgacagccccatggccatagggtacaatgccactatctctgcgccgcatatgcat

SEQ ID NO: 51378 - DNA, 441 bp, Glycine max
ggttatgctaaagctctcaggcgaaaattttcttagaacagattctcttttatcccaggcactttcaaacaatgcagagcttgagcagaaggtgaagtctttggaagatctccataatgaatctggagctgctgcagctactgctactcaaaggagtcttgaacttgagggacatattcagacatcaactgcagctgcagaagaggcaaaatcacaattgagggagctggaaacacgcttcatagcagcagagcagaggaacgtggagcttgagcaacaattaaacttagtacaattgaaaaccagtgatgctgagagagaagtggctgaattatctgagcaaatatctaatctcaacgctaaattagaagaggccaaggaagagaagagtcttcttaatagccagctacaggagtacaccgaaaaagtagctctacttga

SEQ ID NO: 51379 - DNA, 361 bp, Glycine max
ggcgaggccttggtgtcccctgagtgtcaaggtgacaccgcggagaaattgaagggggtgccgatggcggcggcgggtggtcggtcgaagaaacgcccttccaaattgagccccaaggttgcgtggggaaagcttctctctcagtgttctcagaatcctcatgtatccatgagtgatcttattttcactgttggccaaggtcgtaattgtaattcatggcttaaagatcccactgttggtaatgttttgtgcaagttgtgcctcatagagcgtggaggctcgactgttgcattacttgaaatcacagggggcaaaggttctattcaagttaatggcaagacatatcgaaagaatgcccgtc

SEQ ID NO: 51380 - DNA, 380 bp, Glycine max
ttaaaattttcaaggaacgaaacctgaaactgtatttgactttagtttgataaactcaaggatgaaagggcaagcttatgaacaatcgcctacacttttcctatctgatgttcaacaggtttggcgaaagcttcaaagtactggaaatcagattgttgctatggccagtagtctctccaacatgtcaaaagcttccttctgtgagcaggtggaaatttcagcgcagagttcctttgaagatgaaaaggaagtgctctgtaaccaggaatccatctctcacatgaaaccagagcagacagtagaatgtgttgcattcagacttggcacttgctggcattgtggagacaaagcagatgggacagactgtttggtttgtgatt

SEQ ID NO: 51381 - DNA, 263 bp, Glycine max
gtatgcaccctcaagaggggcataaggttttggatccccccgcatcctatgtgcccattaggactccagcgaggaagcttcttgccactactacgccttggggggctcctttgtatcaaattcctgaggagaatcgggggcaacaggtcaatggtcccaaggaagcacccggcgggatgccgctgatgaagccagaggattaccagcacttaggagcactggtgaatgaggagaatgaagaggagtagactccagatgagcaa

SEQ ID NO: 51382 - DNA, 363 bp, Glycine max
aagaaacgcaaaaccccaccctgctcttcctcacaaaaccctagcgacctccaacctccttccccacccataaccggtacacctcaagacggcgccgttaagcccgcagccgggacggtccgccacgtgtcaccttcttctttttcgcaggagaagaccgcggagcttaagaagcaagctccgcagctgaagaagaaaccctccgatttcgatcccgcttctataagtgcatgggagaacggccaacccgtgccgcgtctatttctctgcttggccttcgacatgatttctcaagaatccggaagaattgccatcactgatattgtttgcaatcttctgaggactgtgatgtactccacgccg

SEQ ID NO: 51383 - DNA, 383 bp, Glycine max
catacgcaatacgaataggaaactataaggatggcctgtatcctacagacagcagagaatttgctaaacgaatattctatactgtgtttatgggatctgaaaacagttccgaaatgacaaggtcacgagccaaggtgctggctgatgaaattggttcatggcaccttgatgttagcattgacgtagttgtgtctgcttttttgtcattgttccaaacacttacaggaaagcgaccacggtataaggtagatggtggatctaatgttgaaaatttaagcttgcagaacattcaagctcgaatcagaatggtgctagctttcatgttagcatcactcttaccttgggttcacagcaagcctgggttttatcttgtcttggggagc

SEQ ID NO: 51384 - DNA, 436 bp, Glycine max
ctgacgcgtgggcggacgcgtgggcggacgcgtggggcaagaaacaattgcctctcttaaacagcaacttgcggatgcattggagttgagaaatttcagccctgtagtcaatcattcacaaaacttctctggaaccaaagactattgtggtgaacttcaccttgacagggggaatgtgacggtaaacaattccaatgaagggattcatttgcaagcacagtatcgtgttatgacttatgagtggcaagaagagcacatcataactgttggatctaccacagaataatcaagattagaaattactttaaatcacaactttatgttcttttaggctacgtgcatgatctcatggtcaagatatgtagacatacaaaacctcaggctgtctacaataccatgcttatagtttgaaaaggttggaatctactcatgattc

SEQ ID NO: 51385 - DNA, 503 bp, Glycine max
tttcaagcttcgctccaacacaggggaaaatgagggagatcctttatgtgcagggagggcaatgcgggaaccagatcggttccaagttctgggaagtggtgtgcgacgagcacggcatagatccgacggggaagtacgtcggaaactcagatctgcaactcgagcgcgtgaacgtctactacaatgaagcctcgtgcgggcgcttcgtgccacgcgcggtgctgatggacctggagcccggaaccatggacagcgtgcggaccgggccgtacgggcagatcttccgccccgacaacttcgtgttcgggcagtccggcgccggcaacaactgggctaaggggcactacaccgagggcgccgagctcatcgactccgtcctcgacgtcgtgcgtaaggaggccgagaactgcgactgcctccaggggttccaggtctgccactcgctcggcggcggaacgggctccgggatggggacgcttcttatttccaagatcagagaggag

SEQ ID NO: 51386 - DNA, 427 bp, Glycine max
ttatgtcattcgatctgtcgcagaatggattaatgggtcccatacccaaggggatattccagctcaagaacctcaacaagctcttgcttctctccaacaatctctcggggaaaatcccttctgagattgggaattgttcctccctaattcgattccgagccaacgacaacaacatcaccgggagcattccctcgcagattgggaatctcaataatttgaatttcctagacctagggaacaatcgcatttccggagttatcccggtggagatctccggctgccggaatctcgcttttctcgacgtacattccaacttcctcgccggaaatttgccggagagtttgagccggcttaattcgcttcagtttctcgatgcgtccgataacatgatcgaaggtaccctaaatcctaccctctgcgaactcgc

SEQ ID NO: 51387 - DNA, 435 bp, Glycine max
tcatgcgtccgagatattgcagcctcccactggcactaagaatgatgtcaataaatgggaacaatctattctcatgaatgttggccatttcatgcagtatctacctcatggtggtcaaatactgctttttatggaccaaataacttcaagcaagatgagggataccaatgctggttcttcatttatctctcagttagctgctgatgaagggtctagaaccggaatcaagggcactgggattttgagttccataagcacaatcaatgcagtcactgagaaaacttcatctattcttggtggcatcagaccaaagcctgtgactaacatagacccagagtcttccacacctttgaagtaaattttattagtatagtttcccaattgccctttacgtttttacctggaaaatggattttatgcattttggtattgact

SEQ ID NO: 51388 - DNA, 359 bp, Glycine max
  unsure (1)..(359): unsure at all n locations
ngctcggatcctcagcctccgctccaacgccctcaccggcgagatcccttccgatttctccaacctcattttcctccgcagcctctacctccagaagaaccaattctccggcgagttccctccgagtctcactcgcctcactcgcttggctcgcttggatctttcctccaacaatttcaccggccaaatccctttctctgttaacaacttaacccacctcactggcctcttcttagaacgcaaccatttctccggtaaaatccctagcatcactctcaggcttgttaacttcaatgtttcatataacaatctcaacggttcaatccccgagacactctctgcgtttccggaaacttcct

SEQ ID NO: 51389 - DNA, 320 bp, Glycine max
ttcatacgaccgcggacgccgggcacggcaagaggggtgtttacagactcggctgggatgccaccgccgaaaccgtaaccttcgagttcgggaaacacggaaagatcgaggactgcaaggccgataccgacaaggtctccggcaaatcaaagggatacgcctttatcctctctaagcacagagacgaggctcgaaaggcgctgaaacaccctcagaagaagatcggaaaccgtaccacctcgtgccagctggcctccgttggccccgttccggatccaccgtcgagcgtgaccccggtgtctgagtacacccagaggaag

SEQ ID NO: 51390 - DNA, 431 bp, Glycine max
taggacgcgtgggcggacgcgtgggcgaggttgaaagagggttgccacataaatcgtagtttactaactctaggaactgtcatccgcaaactgagtaaggggagaaatggacatattcctttcagagattcaaagctaacccgcatactgcagtcctcattagcaggcaatgctaaaactgcaatcatctgcaccatgagccctgcaaggagccatgtcgaacaaacaagaaacacccttttatttgcaagttgtgctaaagaagtgacaactaatgcaaaagtcaatgtagtggtgtctgataagctgttggtcaagcaactgcaaaaagagttggctagactggaaagtgagttgaaaaattcagggccaacccgccttaaatttgattctgcagcattgctgaaggaaaaagacctccaaattgagag

SEQ ID NO: 51391 - DNA, 273 bp, Glycine max
tgtggtaactgccacaatacagtatctttattgtcacatcgttcacaccattctcccttcttttgaaagcgtagggggtaatcttgcccgaagaatcatgtgacaataaagatactgtatagagggatctgccacacggacctccactatgctaaaaatgaatggggcattactatgtatcctgtagtacccggacacgagatcattggggtggtaactaaggtggggagagacgtgatggggttcaaggaaggagacagagtgggtgctggg

SEQ ID NO: 51392 - DNA, 401 bp, Glycine max
tcgttgaattggcactagcacaccaacaggttcatatatctgaggcaagggtgtccactgctttagataaactagcttacatggaagaattagtaaacgataagttgttgcaagatagaaccacaaccgaagtttcccagacatcctcttctcccagtactttttttaaacctgtagatgtagaaaagagaagaccgccacgaaaaagcttggacatatcaggtccagttcagtcataccatacccacttgaagaatttctggtaccctgtagctttctctactgacttgaaggatgatacaatgatcccaatagaatgttttgaggaaccatgggtcatttttcgagggaatgatgggaagcctggatgtgttcaaaatacctgcgcacacagagcatgc

SEQ ID NO: 51393 - DNA, 420 bp, Glycine max
ttctagtaaggagcaagctttggcaacattactgcctgagccccagtcaatcttgaagctggcaatgcagtatttagcgaacttcacagtcttcacaacattcttaatggtatcatacgtgcttgtccatatttatctggcagctcctcgcacaattcaagggcttgagtttgttgggtttgacttaccagattctattggtgaatttgttgtgtgcattgtcttggttcttcaaggtgaaagggtgttgggtttaatctcacgcttcatgcaggccagagccagagcacgcaagggtagtgatcatggaattaaggcacacggagaaggatggatgctaactgtggccttaattgaaggaagcaatctagctactgttgattctggtgcattctgtgatccatatgtggtgtttacttg

SEQ ID NO: 51394 - DNA, 348 bp, Glycine max
ttgatgcgtgggcggacgcgtgggcggacgcgtgggccgagttgcgagttgcagagagagcaatgagtcaggaatcgtttatatatagcttcgtggctcgggggacgatggtgttagccgagtacaccgagttcactgggaacttccctgcaattgcagctcagtgcctccagaaactaccctcttccaataacaagttcacctacaattgcgaccaccacaccttcaattttctcgtcgaagacggttacggtattgccgatctcttttgctgcatcttccccagtttaagtgctggatctactctgtcacatctaattggcacacatatttctcttttcttttctt

SEQ ID NO: 51395 - DNA, 312 bp, Glycine max
ttcactcgtccgcccacgcgtccgcccacgcgtgcggccacgcgtccgaccacgcgttcgatcctccacacaaaggagaaaaggaagtccctgaaggtgctcctgactgtttagctggcttgacttttgtgatcagtggaacactggacagtttggaacgagaagaagcagaagatttgattaaacgccatggcggccgtgtcactggatcagtcagcaagaaaacgaattatctgctatgtgatgaagatattggggggcggaagtctgaaaaagccaaacagctaggaacttccttactcacagaggatg

SEQ ID NO: 51396 - DNA, 402 bp, Glycine max
gtctgactgggaatggctgttgggagggatctgaagggagacaagaataatgtagttgctgttatcggtgatggtgctatgacggctggtcaagcttatgaagccatgaacaacgctggatatcttgattccgacatgattgttattctaaatgacaacaagcaggtctccctaccaactgctaatctcgatggtcccataccacctgtaggtgctttgagtagtgctctcagtaagttacaatcaaacagacctcttagagaactcagagaggctgctaagggagtcactaaacaaattggtggcccaatgcatgagttagctgcaaaagttgatgaatatgcgcgtggcatgatcagcggttctggatcaacactatttgaagagcttggactttactac

SEQ ID NO: 51397 - DNA, 396 bp, Glycine max
ttctttacgcgtccgaaaaagtttgcaggttgagagcataggagggttcttatcagcagctttacaggcaccagagccacgggctgttcaaaatgctattgattttctcaagatgattggagcattagatgaacaagaaaatcttacgaatcttgggaagtttctctctatgcttcctgttgatcccaagcttggaaaaatgttaataatgggagctatatttcgatgctttgatcctgttcttacaatagttgctggccttagtgtcagggatccttttcttttgccccaagacaagatgggatttagcagggacagcgaagtctagggttctctgctaaagattaccagtgatcatatggcatcttgttcgagcatatgaaggatggaaagatg

SEQ ID NO: 51398 - DNA, 392 bp, Glycine max
tgtttcgtcacgcgtccgcgtgtgtttgcgaattgtgcaattttcaagatctgaatcagagaatagataataatggctacaccggaccacctgttcaaccttcgcaacaacttgtatctcggggcgtaccaagccgccatcaacagcggcgacgtcaccaacctctcccaagaagactccctcgagcgcgacaccctcgtccaccgctgctacatcgccctcggccagcttcagttcgtcatctccgagatccatgacgacgctcccacacctctccaagccgtcaaactcctcgctctctatttctcctcccccgacaccaaggattccgccatcgcgagtctcaaggagtggcttgccgatcccgccattgcaaacaacgccacgctgag

SEQ ID NO: 51399 - DNA, 372 bp, Glycine max
ttacttttatgtttaactttgcgaaaagtagaccagaattgggttcgaaactctttctagcatggactggatgggtatgcatgtggactgccatcttgttgttcctactggctatcttaggagcttgttccatcatcaacaggttcactcgcctagcgggggaactgtttggccttcttattgcaatgcttttcatgcaagaggctgttagaggactcatccatgagtttcacatacctgagagggcaaacctaacatcacccgagtttcaatcttcatggagatttggaaatggcatgttttctttggctctgtcctttggcctcctacatacagcattgagaagccgaaaagcaaggtcttggcgatatg

SEQ ID NO: 51400 - DNA, 334 bp, Glycine max
ttgctcttagagagaaaaaaaagaaaagaaaaagatgtgattcggggcgtccctccaaaattgaggcagaaagaggatagaagtgatatgaggtccttttttatccatccatccacacactaccactagataacacaacactaaacaatttacattactcactaccaccaccttcccgggccgtcccctcaccgttcgcgccgtccgcggcaagttcgagcgcaagaagccccacgtgaacatcggcaccatcggccacgtggaccacggcaagaccaccctgaccgccgccctcaccatggcccttgccgccctcggcaacagcgccccgaag

SEQ ID NO: 51401 - DNA, 327 bp, Glycine max
ttcgtccatgccatgcttcctctccaatatcatcaaccatgctcaacacctcctctctccttcggtggattagcaaaaagttgcgaccaaggaattcaattagcaatggagatagcagcagcgacacctttcacaacggtgccagtactgacaccgttgttgtggatgacaatccatttagcagcggggtggagtgttacgcctgcacgcaggtaggcgtgccggtgtttcactccaccagctgcgacagtgcctaccatcagctgcagtgggaggcttctgctggatcgtctctggttccaatccagagccggcccaaaaaggtcc

SEQ ID NO: 51402 - DNA, 349 bp, Glycine max
ttttcgttgtgatgcagcactatttgtggttcgacccaacagaggacttccacacgtattccatagattggaaccctgatcgcataataatcttggtggatgacattcccatcagagttatgctcaataggcaaaccattggtgttcctttccctacaagccaacccatgaggctttacactaccctttggaatggagactcttgggcaacaagatggggggcagtgaagcttgatttgtcaaatgctccattcattgcaggcttcaaacatttcaatgctaatgcttgcattgcaaaggaaggtggtgcaagttgcaaggggttcaatcgtggcatatttagagatct

SEQ ID NO: 51403 - DNA, 469 bp, Glycine max
tcgtcactttcagtgtgtgtttctttattggatcccaaaagatctgctatatcatctcccctttttcattcatttcgaagtcaacacatgtatgagccacccattcctgtaaacccagacactattggtgctatgctacctaaattaagcgaattgcttatgcttttgaatgtatcatctgatgaaaaagtattgcctacaacatatggagaattgagacctccactcgggaagcatcgattaaagattgttgagttcattgctgtccttctaaaaactggaaatgaagtggcagaaaaagaaatggtcaattcaggaaccattcaacgagtcattgacctcttctttgagtatccatataataactccttacaccatcatgtagaaagtatcatattatcttgtttggagagcaaaactaatgccattgttgaacatcttcttaagagtgtaatttaattggaagatt

SEQ ID NO: 51404 - DNA, 282 bp, Glycine max
tcgtctacgcgtccgctcgtggttcccaacagtgcactttttttactgtacccgaattgacccaacaaatgtgggatgctaagaacatgatgtgtgcaggtgatactcgccatggtcgatacttgacagctactgcgatgttgcgtggtaagatgagcacaaaggaggttgacgaacagatgatcaatgttcagaacaagaactcatcatactttgtggaatggatccccaacaatgtgatatccactgactgtgatatacctacaactggtttgaaaatgg

SEQ ID NO: 51405 - DNA, 461 bp, Glycine max
tcatgtttccgtgaggatgaagaaggttacatgattgttataagtcttccgtgtgtggatctttcaagtgtgaaagtttcttggaggaatactcttattcatggtatcattaaggtttcttgtgtgagcacatctgggaagccatatatcaagagacatgacaggacattcaaacttacagatccgtcatccgaacactgcccacctggtgagtttgttcgtgaaatccctctttcaactcgaattcctgaagatgccaatatagaagcatactatgatgggccaggatcagtgcttgagatcatggtgccaaaacttcgtgtgggatcagaagagcatgaagttcgtgtttgccttcgccctcatcttggagggaatgatcttatgttgacttgagttttaggctcttattaaaattgttggggttgcaagcatggtccgaaaatcattgttttactaac

SEQ ID NO: 51406 - DNA, 356 bp, Glycine max
ttttctcgtgggatttaatcatactacagaaaagtgaacgaagttgacggaaattgatgtttttcataacaaaggagaatgaaggctttttcagttaaggttgaggaaggaagggaaggtaaaaatggcaacctttctgttggtcctgtgtaccgtaacctcctctcagaaaatgaatttcctccaatggatcctgatttcagtaccacttgggatattttctgtgtgtctgtcaaaaatcatcctaataatcgtatgctgggaaagcgtaaaattgttgatgaaaagattggaccctatgtttggaagacatataaggaagtttatgatgaagttctgcatatgagttctgcttt

SEQ ID NO: 51407 - DNA, 446 bp, Glycine max
  unsure (1)..(446): unsure at all n locations
actgngggaaaattatttggtctaagcataatgaaattcagactgtcaatataaaaagtgtaggagcagatgtagaggttgctgacggagaaaggttacctttagctgttaaggagttgggcacctgtgatctctacccccaaaatttaaagcacaatccaaatgggaggtttgttgttgtatgtggagatggtgagtacattatatacactgcattggcatggagaaataggtcatttggttcagcactggaatttgtttggtcttctgagggagaatatgctgtcagagaaagtacatcaaagattaaaattttcagcaaaaatttccaggtttgtacttttttaaaaactttgtttcctctctaatctcgtgcaatcttgttctgtgtgtaatgaaccaacaagtttcttgctatttcttaaaaggaaaagtttaacaagatg

SEQ ID NO: 51408 - DNA, 369 bp, Glycine max
tcgtgaaatacatgatcatccatagtgacgtgaaaaccaccaacatcttgttggatgatgactgggtggccaaggtttcggactttgggctttccagattttgggcccatggactcatcccaagcctatggcagcaccaccgctgtaagaggcagctttgggtatatagacccagtgtattataagcggcatcatttgacggacaagtctgacgtgtacgctttcggggtagtgttgtttgaggtactgtgcgctcgtccgcctcttatacgcaatgaagatcccaaacaggagtcgcttgctaagtgggttaggtactgttaccaaagtgggaccatggaccagattgtggaccccacgttgaagggg

SEQ ID NO: 51409 - DNA, 406 bp, Glycine max
cctactcgtccgtaccttagaaaattttctaacttctcaatcatactaagggggaaacttgtggatcaatttaacattgcggacgatttaatatattcaaaagtaattccatataagcctcagctagccatggcaacaaatgaggctatagcggagacaaagacaaccattggatttataaaggaggctgcagaaattaaggttactggatttaatgtgtaccacaaaaatcgcctaatcaagcccttttggaaagtagtagctgatggttcttcaaaagggcgttgtgttgttggggttcttgaagccaatttcatagaaccagcgcatgacaagcaggattttgagagatcggtgctgttcattcggttggaaaacaagctgaaacaaatgacaatggattact

SEQ ID NO: 51410 - DNA, 349 bp, Glycine max
cctgcgatatgttttatgggaagatcatacctgcacttaatgagaaaggaatcaagagagtgatttcccgaagggattggcctcatgaagtcaaatgtaaagttcttcttgatctcatgaaggaggtgcctaggcatcttctttaccaggagctatggtgtgctagtgaaggatataaagctttcagctcaaaaatgaagaggtattctggaagagttgctgcaatgagtatggttggtcatgttttggggctgggcgacagacatctggacaacattcttatagatttttgtaatgggcatattgttcacattgattacaatgtgtgttttgataagggacaaagact

SEQ ID NO: 51411 - DNA, 319 bp, Glycine max
  unsure (1)..(319): unsure at all n locations
gaatattacaannaacaacacagccttttatcataaggtggggttggcaacatgaatcaaacaatgcgattgtattctgctgtaaaatcatatcaagatttgaaaattctatccccttttcatttatcttttcatggatctgtcatgaactatgccaaatgcaggtgagagtttacacagcatcccaggttgagaatgaactggaagtggccaaaagagagtacttacaggcagcaattggattttcaacttcaaagtttgctatcccaaagctactggattggtatttgctgaactttgcaaaagacttggagtcatt

SEQ ID NO: 51412 - DNA, 379 bp, Glycine max
ggcagatgcaaaggatgtactggcagcaattcaaaatgttgaaggtgctaggtttcctgtcttgactccaaaccttaaaggctttgaggcagctgttgctgctggagctaaagaagtggctgtttttcctgcagcttctgaatcattctcaaaagcaaatctgaattctagcattgaggataatcttgctcgttgccacgatattgcttcagctgctagaagcctctcgatcccagttcgtggatatatatcatgtgttgtcggatgtcctctggaaggaaatattgctccagcaaaagttgcatatgtggcaaaatcgctttatgagatgggttgctcagagatttcactgggggatacaatcggtgttggcacacct

SEQ ID NO: 51413 - DNA, 249 bp, Glycine max
ggaggttgatgttgttgcaccctgaggcggcgtggattcggcggatggatagtgatgcttttattactgatatggcgtttgagcttcctatgtctaagcatgatgagtataatctggtgcttcatggttaccctgattagatgcttgagcagaaatcttggatagccgtgaatactgggagtaaactgttcaggaactgacagtggtctttggatttgcttgatgctagggctcccatgggccccaagg

SEQ ID NO: 51414 - DNA, 384 bp, Glycine max
actgccatgcagggatcaattctcgagaatgttcgttggaaagcacttggagttcttttcactgtctgggtccttatacttgcctccgagattgcaaaagttggtagatatgaaatcagcaattccaatccggaatttccattttgtttttcttcctacgtggagtagtgatataattatgcctttgttttcaaacagagtcacacaacaacttgttcagtggaatattgggtacttaatctattacaggtccctgtggcattaggagcgacttcatatcaagctgtgcttctgtacacagggaagagagtgatagcatccaaaggagatcaacgaactcaatggagagcgcaccagctaattatgtattgttcctgtggcata

SEQ ID NO: 51415 - DNA, 304 bp, Glycine max
tcattatgatggttttgtggatggatggaagagtttagcctggagcagttgtgccatacatgtatctgctatcaatcaaacaaaatggtggtttgcaaagcggtttttgcatccagacatagttgctgaatacaattatatatttctttgggatgaggatcttcttgttgataattttgacccaaaaaggtatttatctattgttaaagaagaaggacttgagatatcacagccagctctggatcctaccaaatctgaagtacatcatccactgacagtccataaagcagtatcaaaagtgcac

SEQ ID NO: 51416 - DNA, 282 bp, Glycine max
ttgggtgatccttctcccattttgttttatcccatcagtagcactgagattcggtgtttggttgatgtgcctggccataaattaccttcccttggcaatggtgacatggcccgttatttgaaaacagtagtagctccccaggtacaaatatcctagtctttggcttggcttaatattcaaaacatggaacatattcttcaattccactaatggaggaaattgtgttttaggttcctccagagctgcgtgactcttttatagcagcagttgagaaaggaaaca

SEQ ID NO: 51417 - DNA, 466 bp, Glycine max
  unsure (1)..(466): unsure at all n locations
tttgtcgcgtgggttgaaattgtggataggtatgacattgattgtgtacctgaagactttagaagtaacaaggtcgcgtatattaaagatgactcaattgccaaaaactgttcacgattgttaaaggtacttaagccaatgaaagcaccaatttacatatattatcagcttgataactattaccagaaccaccgacggtatgtcaaaagtagaagtgacctgcaactcttacatggacttggatacaatgacaccagttcttgtaaacctttagagtcctcacacaatcttccaattgtaccttgtgggttgctggcgtcggagtctgttcaatgatacatatnacattcagtcgtgggccatcagaattgaaggtcaataggaagaattttgcgtggaagagtgatccgtgatcacaaatttggaaaccatgtttacccatttaattttcagaatgggactttaa

SEQ ID NO: 51418 - DNA, 335 bp, Glycine max
ttctctgcttaaggtctgatttgaaatcacttgcctttgcatcaatgacttgcaagcattggagagctactgtaaggttcatacaaaaaggcctcaaggcacgttaatttgtcatccttgggtcattcttgcactgattccataatgtggaacattttgaatgcctatgaaaaagacaagatagaatctattgttctaattggttgcaccaatattactgctggcatgctcgagaaaattgttcttttgtttcctggcttatctacagtagacattagagggcgcacccagtttggagagctgactctgaaatttaccaatgtgaaatggatcaa

SEQ ID NO: 51419 - DNA, 325 bp, Glycine max
tggatgacattcaccatggaaggaacacagcagaatagaggagtaaattacaggactcttgagcacttgtttaaagttagtaaggaaaggagtgaaacattttcatatgacatatctgttagtgtgatagaggtttacaatgaacaaatcagagatttattggctacaggacaaacatcaaagaggttggagataaaacaagcttctgaaggatttcatcatgttcctggtgttgtagaagccaggattgataacataaatgaagtgtggaatgtactacaggttggaaataatgctagagcagttggaagtaataacgttaatg

SEQ ID NO: 51420 - DNA, 361 bp, Glycine max
tttacgcgtgggcggacgcgtgggcggacgcgtgggcggacgcgtgggttgtgctatttggctcctccataattcaaatgagcttcgacaatggtggttggggtgctattctagctaacttgtacgctaggaaggcggacatcatcttaagaggatactctggttggaattcaaggcgggctttggaggttttggatgaaattttccccaaggatgcttatgtgcaaccatcattggtaattgtgtattttggtggcaatgattctattgatcctcacccatctggccttggtcctcatgtaccccttgaagaatatgttgaaaacatgaggaaaattgctaatcatcttaagagcctctc

SEQ ID NO: 51421 - DNA, 290 bp, Glycine max
cactaggaggtctagttgctgctggcaagacttacacaaattgtgttactattcgtaaagctgtgaaatttctactcaaaatacaaaataaggacggtgggtggggagagagttatctttcttgcccaaggaaggtttgtaattaaataatcatttatggcatagttttccttcaactttaatgttaattatgagcaatattattaacaatgtcttaatgaatgaatgtgtataacgaagatgtacttacctcttgaaggaagtcgatcaaatgttgtacaaacatcatg

SEQ ID NO: 51422 - DNA, 440 bp, Glycine max
tctcttctcagtaagggggtggaggacaatgccaatcagcttggaatatctgataaatcaattaattatacaaatgatttgaaacaaaatcgtgttcgtcttttggaaatggaagaggaagccagaaaggagatccctcttgatatgtacctcattttgggagttgaaccatctgtttcgatatctgaaatcaagaaggcctatcggaaagctgcacttagacaccacccagacaaggctggccagtctttgaccaaaaatgacaatggagatgatcagatatggaaggttattgctgaagaagtacacggggatgttgatcagcttttcaaaataattggggaggcatatgccgtgctgtcagaccctgccaagcgggcacgttatgatgcagaagaagaaatgaggaattcccaaaagagacgccatggacctatagg

SEQ ID NO: 51423 - DNA, 350 bp, Glycine max
gtctcgagactgagagacagagggtcacccctacttgccacgtgactcgcaccttcctggctaccttgcttgcttccttaccgcctctaacattctatctgtctatgtcttctcttctctcctgcttatatctttcgtgtggagctcgtaacgacgccctatgaaaaccacaggccctagactgctgatgtgctggctggccttcacaggcctcacacacacgattattgagggttattttgttttctcacctgagtttttcaaggataggaatggcttctacctggctgaagtttgtgagcttcttttacattgaacacaaatgtaccattgatagaatttggagacct

SEQ ID NO: 51424 - DNA, 250 bp, Glycine max
aagaatctttgttgtcaggcaattgttgctcagatgcagcgccgggccttggctgggacgccactgccgatactctaaccgccgtgttcgggaaatacggcgagatcgaggattgcaaggccgtcaccgacaaggtctccgggaaatctaagggttacgcctttatcctcttcaagcacagggacgatgctcgcaaggcgctgaaacaccctcaaaagaagatcggaaaccgcaccacctcgtgccagct

SEQ ID NO: 51425 - DNA, 338 bp, Glycine max
cctaacactacactctgttttcgattatttctccaaaccgtttattcttcttctgggccctagcgccttttcctccgccgtcaaccaccgtatccctcccgcttccggcaccgatcgaacagtctccggccaagttcagttcttgcttgcgaaaattctcggaatattttgaatccaggaaatcatgcacgcgccagttctagttctcaaggactctttgaaacgggagtctggatctaaggtccgctatgctattattcaggcggcgaaggctgttgctgatgtagtccgaacaacgttgggacctaggtccatgctaaaaatgcttcttgatgctc

SEQ ID NO: 51426 - DNA, 376 bp, Glycine max
  unsure (1)..(376): unsure at all n locations
cttgcggctagggnnntagtgcattttcttctagattcaatgaagatgggtaaggaaaaggttcacatcagtattgtggtcattggccatgtcgactctgggaaatccactaccactggtcacctgatttacaagcttggaggcattgacaagcgtgttattgagaggtttgagaaggaagctgctgagatgaacaagaggtctttcaagtatgcctgggtgctggacaaacttaaggctgagcgtgaaagaggaatcaccattgatattgctttggggaagtttgaaacaacaaagtattattgcacagttattgatgcgcctggacatagggatttcattaagaatatgattactgggacatcccaagctgact

SEQ ID NO: 51427 - DNA, 154 bp, Glycine max
tttctgttcgttcattactgccagtggagccccttgtggagggaatgtgagaagagggaatcgacttcgtatgctcacacagttctttggaacaccttgtaagtgaggggaagccgggatgtacatgttcacaatgcactgggtaaaattatca

SEQ ID NO: 51428 - DNA, 255 bp, Glycine max
cgctggcattccaaagccaaaacaacgtggaaggaaaagtaagaatgaagtgcttaagagaaagatagagcttgcgaagagggaacaggttaaccggtttaccaagattgctgctccaagtggactgttgaatgacttgaaccccggaattataaatcatgtgaggaatagaaaacaagtgctttcaattattgagaatcttgtaaggtctgaaaaacatgaaagcactagcgcggggagtaagcaagcagcaca

SEQ ID NO: 51429 - DNA, 380 bp, Glycine max
agtatatggatattagtcttgatgttttccatagtaactcgcttaaagactccatgcaaaagttctttcagcctgaggttttagatggcaacaataagtacaagtgtgatagttgtaagaaattggtggcagctaagaagcagatgtccatacttcaagcacctaacatccttgtgatacaactaaagtgatttgagggtatattgggtggcaagattgacaaggctgttgcatttgaagaggttttggtgctttctagcttcatgtgtaaagcaagccaggatccccaaccggaatataagctctttggcactattgtgcattccggctactcccccgaatctggtcactactacgcttatataaaggatgcaatgggt

SEQ ID NO: 51430 - DNA, 411 bp, Glycine max
tcattattgagatgggctatcaggtgaggttgggtatccttgaggctggagcatatggggtttcccagtcaagaaaaagggcattcatatgggcagcctctcctgaggatgtgcttcctgaatggcctgaaccaatgcatgtcttttcggcccctgagttgaagattacattatcagaaaatgtccagtatgctgctgtccgcagtactgcaaatggtgctccattacgttcaataactgttcaagatactattggtgatctcccagctgttggcaatggagcctcaaaaggaaacatggagtatcaaaatgatccagtctcatggtttcaaaagaagattcgaggtgatatgggttgtcttgactgatcatatatcaaaggagatgaatgaattgaacttgattcgatgc

SEQ ID NO: 51431 - DNA, 171 bp, Glycine max
atgcagcaactcgaggtggtcatcatagaggcaaagtaatttcttctgaagtcgttccaaatgttcagccaccaatggatgctgtggagtatgctgaatgtgaagctgctgtgaaagatttccctccatttcgtgaagcaatgaagagaagagggatagaggacatggatc

SEQ ID NO: 51432 - DNA, 323 bp, Glycine max
agcaaagtgatgacctaaaagggttaagagacagaagggttaggctctctgtgaccacagctattcagttctatgaccttcaagatcgcttgggttacgaccaacctagcaaagctgttgagtggttaatcaaagctgcttcagaagctatctctgagcttccttctctcaacaaccctgtccctgatacccctaagcaactaagtgataagaaaaggcctactagtggtggtggtcaacaacaacaacaaatacaacaaggccactttgatgatgctgatggagacacaagttacccccaaaaccaaagccagaacctttct

SEQ ID NO: 51433 - DNA, 330 bp, Glycine max
tccatcctcttgcaatgcacccctctctcccccttcttccctaaccccctcaccaaactcggcggaggcggtaacaccggtggcggcggcggagatgatgggtggttcggcggccatggaggaggcggcggcggcggaaatggagggttctggtccagaatgttcgccgcggtcgccgacgaaaaccagcctcaggagtgggattcacacggtctacccgccaacatcgttgtccagttgaacaaaatgagtggcttcaagaagtacaaggtttcggacatctccttcttcgatcggaacaggaagacaaaagttggcaccgaggattcg

SEQ ID NO: 51434 - DNA, 169 bp, Glycine max
tggagctggagatgaaacacttaggttctggaacgtattcccttcccctaaatcacagaatactgatagtgaaatcggagcatcatctcttggaagaacaattattaggtgattgctcctggcattttgattcaatcatgtggcattattcaaagttttgacagaaaga

SEQ ID NO: 51435 - DNA, 279 bp, Glycine max
gtggtatggcgaaggacgttgtggttgctgagcgtggctccttctctgggaaggactaccaggaccctccaccagcaccactcattgatgctgaggagctcacaaagtggtccttttacagggctctcattgctgaattcattgccactttgctcttcctctacattactgtgctcacagtcatagggtacaatcaccagactgacctcaaggaaaatggtgaaatctgtggtggggttggcattcttggcattgcatgggcctttggtggcatgatct

SEQ ID NO: 51436 - DNA, 264 bp, Glycine max
tcatatacagactgccgcaagctatcacgccatagctatagctctttcattgatagatgcattttctctgagtgtgcaacatgagcaaactacactaaagatacttcaagcaaagcttggatcagaagatcttcgtacacaggatgctgctgcatggcttgagtattttgaatcaaaagccctagagcagcaagaagcagctaaaaatggaactccaaagcctgatgcatccattgcaagtaaaggtcacctgagcgtgtcaga

SEQ ID NO: 51437 - DNA, 275 bp, Glycine max
tgagagaagatggggttgtcgttcacgaagctgttcagcaggttgtttgcgaagaaggaaatgaggattctgatggtaggtctcgatgctgctggtaagacaaccatcttgtacaagctcaagcttggagaaatcgtcaccaccatccccaccatcggatttaatgttgagactgtggagtacaagaacatcagcttcactgtgtgggatgttggtggtcaggacaagatccgtcctctgtggaggcattatttccagaacactcagggtctcat

SEQ ID NO: 51438 - DNA, 280 bp, Glycine max
tgtctgaataatcagactattggtgttcaggattttgaagtgttgaaggttgttggccaaggtgcttttggtaaggtgtatcaagtgaggaggactggtacttctgaaatatatgctatgaaggtcatgcgaaaggataagatcatgcagagaaaccatgctgaatatgtcaaatctgaaagggatatattgacaaagctggacaacccatttgttgtgcggatcagatatgcattccaaaccaaatacaggttgtaccttgtgcttgattttgtcaatg

SEQ ID NO: 51439 - DNA, 356 bp, Glycine max
  unsure (1)..(356): unsure at all n locations
ctcgacgcttccgaaatctcgccgagcacttcgtccgcaagtctcggcgagacgccggaaattgccgccataccactcggaatcgatctcgtgtcggcggccaggcgaaatatctgcttcttgaggaccgtggcggattctttgtggcttcaccacacgcccattatggtcgaagccgtaagaaggtaccatgatnttctggatgccgtgattgctgatctcacgctgcaaaactcttcccctcccatgattcttcctccccttgacatccactgggtttggttctgtcacactttaaaccccgtgagttacagggaatactgtgaaacgagattctcgaagctgattgggaaagc

SEQ ID NO: 51440 - DNA, 230 bp, Glycine max
tcttacgcgtgggcggacgcgtgggctctggcggtctctttctctctagggagatcttgcaaaaaaaaaaaaaacacaatggcagcgagcgctcccactccacgcgaagagttcgtgtacatggcgaagctggcggagcaggccgagcgctaccaggagatggtggagttcatggagaagggctccgcctccgccgagagcgaggagctgaccgtggaggagcgcaacct

SEQ ID NO: 51441 - DNA, 362 bp, Glycine max
acgcgtccgcagaacttcatcgacggagcattgcaacaagtgaggattaacatccgggcaattcaagacatgcatatattcggtgatccttcaagcataccaattgtcattgctgaacgtgtgatgaatgcaccacgtcggactatcagtgacaattcatacttgagacaggggcatcatctggatctacggcttattcgaaatcaatggcttttgatagatcccaaggtagaatttctaatgtcggagactaatgaagataaaacttcaggagacttcagagaaatgggtcatcggctggctcaggaagtaatttcttttgttagaaagaaaatggacaaggcctcaagatatgggaattt

SEQ ID NO: 51442 - DNA, 270 bp, Glycine max
tagtacttttcgtggctctgcaccaaagagaggttatgtagatgatggccattgccaaagatttgagagggctcctcctcctcctcctcctcccccccatctaagttaccgtgaaggacggccacgcgattatgacactctatctggctcaaaacgtccttatactgatatagatgatgttcctcctcggtatgataccagtgctcgccaatcaagatctcgtttaaattatgactatggaggcagcgcttcacagtatggagatgctta

SEQ ID NO: 51443 - DNA, 252 bp, Glycine max
gtccgattaatacaatgatagaagataacgatgcacgagctttgatggctgcaacagctttaaattcttgcaaagagacccttgctaagttgcaagagacacaggcacaatcatctgaagaggctaaagaatcctaccaaagggttaaggaagctcgtgacatgtttgaaaccattagaggccaattcatttctaaacttaatagtcaagaagaccaaggaactgaaccaaaaagcatagaggaagaagaca

SEQ ID NO: 51444 - DNA, 259 bp, Glycine max
caagccattggcattgaaaacgaggcattttttgggggatgcggcgcttactcaccgggaagaggacactgcaagaatctggcgcacagaatataccccaccatagatgcaacactggaccctgcacatgctgaggacctaagacgtcggggcccaacacccaatcccgatccaaaagctgatgtgtattcaaggaatgaccttaaaacgccaatgatcattgacaacaactactacaagaacatcttgcaacacaagg

SEQ ID NO: 51445 - DNA, 157 bp, Glycine max
aatggaacctttgaagcaggatgcttcagcccagaaaacttggacagccgttacctcggaatttggtacacaaatatatgtccaagaacagttgtctgggtagccaacaaagaaaaaccacttaaagaccactctggagtcttagaagtagacactg

SEQ ID NO: 51446 - DNA, 332 bp, Glycine max
attagtactcagaccttatggataagtaagaataagaccgccattgcttccatgaaggatggagcccaagttgtgctgaatgataatggtaactacggcaaattctcacacctacttgcttcccaagatcgtgattatcttctctctccaactggggctcaggtgaaagtttctgatcttgaagggagagtagtgggtctattattcgctgcgaattggtacccaccatgccgtggattcacccaaatcctagttggaatctacgaggagctgaaaagcagagtccctcaattggagattgtgtatgtgtcctctgatgaaaacttggatgc

SEQ ID NO: 51447 - DNA, 386 bp, Glycine max
  unsure (1)..(386): unsure at all n locations
gaaaaaatctcactgctcaacggagttattggaaattagctcaccttacccatcaatnncttaggaaggaaatgaaaaaggtctccaaccacggataaatctccagggatatctgctagggaaccccataacaacaagaaatgaaggaaatgatcaaatcccatttgctcatggaatgggacttatttctgatgaactatatgcgtcacttcagagaaattgtaaaggagagtatgaaaatagagattccagaaatgtgttgtgtttaagagatctcaaacactatgatgagtgcctttcaggaatcaatactttctatattttggatcgctattgtaaatctgattcgcctaaaaaacatgaagctcagtggaggagatctctga

SEQ ID NO: 51448 - DNA, 296 bp, Glycine max
tgataaacgcttttggtgcactctcaggagcaggatcgacgcgctcctcgatgctcgtcaatccgaaacctcaactcactcttctacgaatgaacaaggcaacaaccggttgaaggaagattctatgttgctgatgagagggtttgactcagttgcccacacactctctctgttgtccaataatttggacaatgcccttcatggtgctagggaattggcgaatccacccacattaactgacatattccacagcaaatatgataaggtggaaaacaaagaggattcgggggagaaac

SEQ ID NO: 51449 - DNA, 244 bp, Glycine max
  unsure (1)..(244): unsure at all n locations
caggaagctcagagggatatttttaggagtttcaacgattatatcatgaaagnattagaggaggattggcaaaaagaaaaacgtgatttccttcagagtttaagtcgaatttcaacattacctaggacaaacattgctgctaacagcaacgtgggtaccctcccgggtcagcttgcatttgtgtcttctacttcacaagtctcttctggtatgcctagcatggagattgttcctctgactggca

SEQ ID NO: 51450 - DNA, 296 bp, Glycine max
  unsure (1)..(296): unsure at all n locations
acaaatggtgtcaaggtataaacaaggggttatttatatgggacaccagttatgctcagcgnggtgtgatgctgcaaactaagtttgagaaattctttgagaagattgatttaacaatgcttaacaggcttctgcgactggttctagaccataatattgctgattatgtcactgcaaagaacaatgtggtgttgtcatacaaggatatgagccatacaaattcctatggtcttatacgtggcctgcagtttgcttgctttgttgttcagtattatgggctggtattagatctttta

SEQ ID NO: 51451 - DNA, 212 bp, Glycine max
tggtaccactctcggaagattgacaaacatcaacgcactcctcttaatcagcatcacaagtgagtagtacccactcacagtcatcatgcaagtatttgacatcaaatttgctcatgtcactcacattaaatctccttgcaatttcctgcagaagatcttcatagccccaactcttcggcatccgaaaccgggttttctcatctccatatgcg

SEQ ID NO: 51452 - DNA, 286 bp, Glycine max
atgagttagaccaaaatcacgggggccaattattattcagccgctcttccttcctcccccgaacactataatcatataatgcaaagctttagacgctgggttgagccaaaagccttcagatacgacgtgttcctgagcttcaggggctgggatacccgcttcagcttcaccggcttcctctacaagggcctcttcgaccacggattccgcaccttcatggacgaccgtgagatcgacaaaggctcccaaatcccccaaaccctccgcgaggcgatcgaggactcta

SEQ ID NO: 51453 - DNA, 219 bp, Glycine max
tggagtgtacaagaaccttctacaggaaattgcgcaaagggtaggagctccattgcctcattacacaacgtacaggtcaggcttaggacatttacctgtttttaccgggatagtagaactggctggaatcacgttcactggtgaacctgccaagaataagaaacaagctgagaaaaatgcagctatggcagcttggtccgctttaaaacaattggcaaa

SEQ ID NO: 51454 - DNA, 279 bp, Glycine max
  unsure (1)..(279): unsure at all n locations
ccagcccatcgngggataccacagcgactgttgcacctaccgctccggtcgtcgccgccccttcatcgccgccggctccctcgccgtcgccatcgccgtcttccttatcggctacgccgccgacctcggccacatgttcggcgactccctagccaaaaaaacccgcccccgcgccatcgccatcttcgatgtcggcttctggatcctcgacgtcgcaaacaacatgctacaaggcccctgccgcgccctcctggccgacctctgcgccggagaccaccg

SEQ ID NO: 51455 - DNA, 181 bp, Glycine max
tcgggagaagctgagaaaagggggatctttacagatggtgtgggtttatatgctcaaatgattgatgatgctgaggggctggagaaaattgaatacctccagagtcatgataacactgagatttactaaaaggcagtgaagattctcgagacatactggatggaggaagactaccagacta

SEQ ID NO: 51456 - DNA, 308 bp, Glycine max
cgtgggcggacgcgtgggttcatgggttagttttggtaatctgaatttttcttgggtttttagtattaaacaattatattttcctgttgtgtgttgtattttatgaataacgtgtgaattgtaaatgtggtgtggttggtttttctgtgtgcagtggaagagactgagatgggttcaaaaaccaagacttttacctttgaagaggtggctaaacacaatcacaggaaggattgttggattatagtcaaagggaaggtgtatgatgtcaccccatttttggatgatcatccaggaggtgatgaagtttt

SEQ ID NO: 51457 - DNA, 414 bp, Glycine max
cagggaaaacctatatgttcagaatctcaaatgtaggcttttcaacctcaattaacttcagaattcagggtcacaccctaaaattagttgaggttgaaggatcacacactgttcagaacctttacgattcacttgatgtccatgttggccaatcggttgctgtgttagtaaccttaaaccagcctccaaaggactactatattgttgcctcaacaagatttacagagacacctctcactacaactgctgtactacactatgcaaactctttttcctctgcattgggacccgtgcctgctccccctgttgataaatatgactttgactggtccatgaagcaagctagaacctacaggtaaggtcactaaaaaaacaaagtaaaaaaaaagactttctgagttggtttaatttatt

SEQ ID NO: 51458 - DNA, 272 bp, Glycine max
ccacgcgaccgcccacgcgaacgcggacgcgtgggcgagagagcaactgcacgcactggaactctctcaccgattcttccgctttgatggaacagaacgagaaggttgagaagataggcgagggaacatacggcgtcgaaaacaagggtcgcgaccgctccaccaacgagaccatcgcctggaagaagatccgcttggagcaagaggatgagggggttcccagcaccgccattcgcgagacttctctcttgaaagaaatgcagcacaggaac

SEQ ID NO: 51459 - DNA, 405 bp, Glycine max
ccctcttgttcgctgaaccgaagcaatggctacgcggcttttcgaccgcctcgagccggggcacaccctcgccggaaaagtcgtaatggtcaccggcgcctcctccggcctcggccgcgacttctgcctcgacctcggtcgggctggctgtcgggtcgtcgtggcggcccgcagagtcgaccgcctcgagtccctgtgcgacgaaattaacagcatggccgccggagacggtgggcgaagccgccgcgccgtcgccgctgaactcgatgtcgctgccgatgaccccgccgtcgacaaatacgtgcagaaggcgtgggaggcgtttggtcacattgatgctcttatcaacaacgctggtgtcagagggaatgtcaaatcacctttggaattgtttgaggaggaatg

SEQ ID NO: 51460 - DNA, 427 bp, Glycine max
aggaattttaaaagagataaaagaagagagggagagagatattatagctagctagagggagattagaagctatataatatacataaaattgcattatagtgaactaaaagaaaagggtacaagggaagatgggaaggccaccatgttgtgataaagaaggtgtaaagaaaggaccttggactcctgaagaagacatcattttggtgtcttatattcaggaacatggtcctagcaatgggaaagctgttcctgccaatactgggttgtcaaggtgcagtaagagttgtagacttagatggactaattacctgagaccaggaatcaaaagggggaacttcacagaccaagaggagaagatgataatccatcttcaagcacttttagggaacagaagggctgcaaaagctgcttacctaccacaaagaac

SEQ ID NO: 51461 - DNA, 380 bp, Glycine max
ccctttcttccgctgcgagcagctagctattattgacgtccacgtcacaacattcaactccattttttggtccttaaacttgttaaacacctccaacgcggtgtcaaccataccattccgtgacaacccagtaagaaaagcattcaaagacccaatttccatttcctccacttcatcaaacacccggctcatcttcttcacacagccacatttcccatacatatcaagcatggcactaaccacaaacttgtcagaccccagcccttgcttgatgacataaccatgaacctgagcccccacgaccacattcttcaagcaccccacagcaggaagcacacacgaaacagtactcccgtcaggccaaaacccttgcaccaaca

SEQ ID NO: 51462 - DNA, 363 bp, Glycine max
cccattcgtccgcccacgcgtccggtaaccacacaatgggagaaaaaaaatatcagctttcggtgattttgagttattttcaatgcgtgtattgtgtgtccctgtgtctagtctagtgtctaacgtttttaaccattcccctctaatgtatttttttttgttgttgttaatttttgacagattaggaggtcctcataccatgatgtgatcagagtctctgagattcagaaggtgttggacatcactggtgtccaaacctacattatcaacagcgcaagggtggtgtttttgaacgagaggcctcaaccaaggccaggaaaaggggtcacaaacacttgtgaagtctgcgaacgtagccttctt

SEQ ID NO: 51463 - DNA, 400 bp, Glycine max
ttcgtttttgaatgctatccgtatctgtggtatgacaaaaattgaatttgagacatttttcaagaagtagtaaagctccttctacaatattttttgacttggtgctttccttttggatcttacaatgggaaacagtgaggaagagaaatctactaagactgaaaagccttcttcacctgtaacaatggatcaggcgaatcagaccaaccagaccaatattcatgtctatcctgattgggcagccatgcaggcatattatgggccaagagtcaccatgccaccatactacaactcagctgttgcttctggtcacgctcctcacccgtacatgtgggggccaccacagcctatgatgccaccttatgggccttcttatgcagcaatttattcacatggaggg

SEQ ID NO: 51464 - DNA, 332 bp, Glycine max
cggttttcgtgggaaaaattgtagaggttagggaagtaagaagagtgaagaacactcgtcattttcctttacatgattcgcatctgcactccgtttccattggtgtgattgtgaatgggggactccaaacgatggacggtgacctacacaaaacacatcaagcagaaacgcaaggtgtatcaggatggattcctagagctccacgtttccaccagcaaggttaagctgtatgatgagtgcgagaaattgttggagtgtcggctcttgaagaacgacgaaattgttacctctggtgaaacgttgattttcaatggttaccttgttgacattgg

SEQ ID NO: 51465 - DNA, 337 bp, Glycine max
ttgtgcgtgggattccattctctctgtgtattggcctacctctcccttcaagaggcagatcttcgtcaagaccctcaccggcaagaccatcacccttgaggtggaaagctctgacaccatcgacaacgtcaaggccaagatccaggacaaggaaggaatccccccggaccagcaacgtctcattctcgccggaaagcaactggaggacgggcgtacccttgctgactacaacatgcagaaggagagtactcttcacctggtcctccgtctacggggtggcatgcagacctttgatacgacactcaccggctagaccataaccctagaggttgaaagc

SEQ ID NO: 51466 - DNA, 430 bp, Glycine max
attccttcttctggtggtggcaatgttgtggtgaaaggaggaacgttgagagcatctgatacatttcctggtgatcgacatctaattgagttatggtcatcaaactccgggaaacttgagtcaaaagaacctctgaatgctgatgtcttcaaaagcatcaaagctcaaaacaatgcaatttactatgaagacataacgttccgggacatcctcttcgattcatcctacagaggaggaggaattttcattgttgattccgccagaacccgaatcagcaattgcttcttccttcatttcaccacagaaggaattctagtccaacaaggacacgagacctttatatcaagttgctgtgttgggcaacactcaaccgtcggtggagacaaagctgagaaggacttctcaggggtggccattgatcttgctagta

SEQ ID NO: 51467 - DNA, 187 bp, Glycine max
tacaagaatatgtggctatgaaaacggatgctgttgttgctagtttaatcgattccgatatacaagagctcaaggttgcagccaagaagctcctccacgatgccaccatgctaggagacaaaggctttggcacttctttttttaaatggattgcttcctttgctgccatttatttactgatactgga

SEQ ID NO: 51468 - DNA, 228 bp, Glycine max
ttggagcaattcaggtccattaccgctcctcttcttgacttggaaaaggaagctgagatttcaagctcgatcgccactggtgcgtccaggaatttggatactgctcaaaagaggggttctacaatcctcaacttgaaacagggcttatggggaagtctctgatcgagttccagtcaacaaaaggagatgttcttcctgcacacaagtttggtactcatgatgttgttg

SEQ ID NO: 51469 - DNA, 238 bp, Glycine max
ggtcctttaagcagcaaagagctcgagtctcttgaaaggcagctagattcgtccttgaagcaaataagatcaaccagggtactcaagtttccaacttttcttttccaatttccatatgaaattgtagatctaggaacatattaagagcccaatcttgaaatatccctatgtctatatggtcaagcccattttgagagagttatttaagtcatgctctgagtaatgtaagaaatggaaa

SEQ ID NO: 51470 - DNA, 297 bp, Glycine max
ctcgagttagggtgaagttggtatctgaagctggagttggtgtagttgccagtggagttgttaaaggccatgctgatcatgtcttgatctctggccacgacggaggtacaggggcttccagatggactggcataaagaatgctggtctcccttgggaacttggcttggctgagacccatcagactttggttgctaatgacctccggggtcgcacagttctccaaactgacgggcaaattaaaacaggaagagatgtggccatagccactcttcttggtgcagaagagttcggtttca

SEQ ID NO: 51471 - DNA, 278 bp, Glycine max
ccctcgccctcgggagcaagtgcaagcgccgcagcatcctccgccgtgtcgtctccatcgtcggcgccgccgatttcctgaaggtcctcacccacctggacgcctccggcggcgacatgaagtggctcctcagcatcctggacggcggcggcggcattgtcgtctccctccctccgatcgccagtaacgaccctattctctcttgggtatggtctttcatcgcttccattcaaatgggtcaattaaacgatagaattgaggctgcgaatgaacttgct

SEQ ID NO: 51472 - DNA, 365 bp, Glycine max
cgaccgcatgagcttccgaatcgagggcgtcgagggcgagttcgatcgaatttgccgcagtttgggcctctccggcccagaggactttgctattcccgctgcggcgtgggaggccatgaagtttcgctcctcttcggatattctcccgagactgaagctcgataacctcgatattcccgaggaagacgtagaagaagaatcgaaggttaacgaggtgagaatgttcaaatcagcagaggaaggcgaattgagtgaaaatcacggagttagtgatagtgttagggtcagggagatagatgaatcgagcaatggcattaaggggattcggccaccgatgctgaagcctccgccgggaacgagggttc

SEQ ID NO: 51473 - DNA, 253 bp, Glycine max
aaaacaccctcattggccataggaatgcgctttttttaagggaataaaaaatttcattcttgttcacaaatgcaaaagggccctttttaaccaaatttttgggacttttacagttttaaaaaagtccccgaaacataggggtaggggggcttgaactcaaaaatttatttttaaccccaaaaaaaacaaccagtaaagtttctggaaaagggtcaacttttgaaagaaaaacaatttttttaccttttccaag

SEQ ID NO: 51474 - DNA, 297 bp, Glycine max
tcgcattagtatacttctctaatgttgatagctgattgtactttgtatgttaaaattcaaaccagagacaacctgtttgaagaaatgttgcaagaacctgatgagatagctgagaaaagaaagcgctgtcgagaacttcttcgagcttatcagcaggcttttaaggacttggaggaactgcctctggaagctgaaacagttgaaagaggatacagtttgcctgaaacatctggtttgcctaaaattcatggattaccaacatcatccatgtactctacaagcagttctggagactat

SEQ ID NO: 51475 - DNA, 382 bp, Glycine max
ttctacgctttcgctttctcgatcttactttgacggtttctagagagagaaagtgatggccggagttaatccaaacggcgtcgccgattttgcggcggttccgacgcatggcggacagttcattcagtacaacatatttggaaacctcttcgaggttacgacgaagtaccgtcctccgatcatgcctatcggacgcggcgcgtacggaatcgtttgctcactgttgaataccgagacgaacgagctggtggctgtgaagaagatagcgaacgctttcgacaatcacatggacgctaagcgtacgcttcgtgagattaagcttcttaggcatttggatcatgaaaatgtaattggtttgagagatgttattcctccacccttg

SEQ ID NO: 51476 - DNA, 496 bp, Glycine max
tttgaatttgatgttttctttcgtccacaaaacaactttcatattcatttaacagtgttcacatgtcagggcctcttgatcggtttgcacgtccctgctttgaagggttctctggtcatgatgaaaggagggagaggaaatcagattttgagaactcggaagacgataggcgaacaaggattggtagcttgaaaaagagagcaatcaatgcttcaagcaagttcaggcattctcttaggaagaagagcagcaggagaaagactgcaagccgaagcaattcggtttccattgaggatgttcgagatgttaaggagcttcaagcagtggatgaatttcgacaggcgcttatattggataacttgttgccaccgagacatgatgactatcacacgttactgagattcttgaaagcaaggaaatttgatattgagaaagcaaagcacatgtgggccaacatgatccactggaggaaagaatatggtactgatacaattat

SEQ ID NO: 51477 - DNA, 259 bp, Glycine max
ctgtgatttgttctccatcaccgaccgataatgacaaagcgcgttccttaaatacgtacagacgtaaattggccgaatataaagaaattgagaatcggcttaaggaattgcggactaaggaacgcgaaagtcacaaattgttcgacaagtcggaaaatgagattaaatcgcttcaatcggtcggtcaaattgttggcgaagtgcttaaacaattgacagaagagaaattcatagtcaaagcgaccaatgggccacgata

SEQ ID NO: 51478 - DNA, 436 bp, Glycine max
tcgctttcctagctactacactttcattctttgcttcagaaaattaactagctaggatggtcagtgttgaagagatccgtaatgcacaacgtgcagagggccctgccactgtcatggctattggcaccgcaactcctccaaactgtgtcgatcagagtacctatcctgactattatttccgcatcaccaacagcgagcacatgaccgagctcaaagaaaaattcaagcgcatgtgtgataagtcaatgattaagaagcgatacatgtacttaaatgaagaaatcctgaaagagaatccgagtgtttgtgcttacatggcaccttcgttggatgcaaggcaagacatggtggttgtggaggtaccaaagttgggaaaagaggctgcaactaaggcaatcaaggaatggggtcaacccaagtccaagattacccatct

SEQ ID NO: 51479 - DNA, 426 bp, Glycine max
ccctcgcgtccgctttctctctgcttagggttttgatcgcatcggatcttcactctcttctccgatctcaaaatgcccgccgtttatggagctcgcttgaccaccttcgaagactccgagaaggagagtgaatacggttacgttcgcaaggcttgtgtttcttctcctcttcaattccctttcatttccaccatcggatccaaatccattcccctccgcactcgtgcgagtttcacgtcttcgctctgttacttattcggatatgtgttcaatctcttaaattactacccgatctaactttttatttactctttcgttcgttttttgctgttactgtaattcgttgagggtgtgatctacttagttccatgttttaataactcttcattctcctcctcacatatattcccaattgaaacaggtatc

SEQ ID NO: 51480 - DNA, 428 bp, Glycine max
ccctttcgtccggattattcctctctgcaaggagcttggcattggaattgtaccatatagccctcttggtcgaggcttttttggtggcaaaggagttctggaaactgtgtcaacagttagctccctgattacacatccacgcttccgagctgagaacttggacaagaacaaaaaattgtatggcaaaatagaaagccttgctaccaaacaacagtgcactccttcccagttggcactagcatgggtgctccaccaaggcaatgatgttgtgcctattcccggaactactaaggtgaagaacctagatcaaaacatcggtgcagtatcattgaaattaacagaaagtgacctgagagaaatttctgaggcagttcccattgatgaagtagccggtactcgacactactatggatcggctaatttttcat

SEQ ID NO: 51481 - DNA, 365 bp, Glycine max
tcgccctcgcgtccgattgttcaactctcacacgttctattccacccaattaaccctactttcacattcccctttgttaactcgtaccaatggatttggaagctgcggcagaggctgttgaaaattctgctgaaataatatcagcagcatgtgaaggcagttccattgaggagccaaatgttgggatggagtttcagtctgaagaagctgccaagaacttctatgaagaatatgcgagacgggaagggttcgttgtgcgccttgatcgctgccatcgttctgaggttgacaagcaaatcatttcacgccgtttttcgtgcaataagcaaggttttcatgtgagggtacgaaataaaaccaagcct

SEQ ID NO: 51482 - DNA, 493 bp, Glycine max
ctcacgcgtccgcccacgcgtccgacaaagatggctaggtctagtgcttatcctttgttcttgatttcttccattctgtttatttcacacatttatgcctcccaagtagaagccaagcccccagtagtgaagggactatcatattctttctattccaaaacatgccccaagcttgagtccattgtgaggaaacatctcaagaaggtgttcaaggatgacaatggccaagctcctgccttactccgcattttcttccatgattgttttgttcaggtaattttttttttatcgaaaaatgttaattgttagaattataatttattaataaaagagatcaaattcactacttttcttacctttccttaatcatctatgttttgctagaataatataatgctattcgatcaggcaaaagtgattagttatataaattccatgataaaagaaaaaaatattaaaaatgagtacccatgaagtattttaactcatggat

SEQ ID NO: 51483 - DNA, 364 bp, Glycine max
ccctcgcgttcgtttgagatagagttgattgaattacatattagagcgttgaaaagaaggaaaatgaccagagttataagcaatttgttgttgctactcggcatcgttgtcgcccttttttgcattattcgggcttccgaagaaccgcccaaaattgaagaggaagaaaatgtgatcgttctgaccaaggacaactttgagcatgtcaccaaaacatacgaatttgttttggtcgaattctacgctccgtggtgcggtcactgcaaagcgttggcgcctgagtacgcaaaagcggcgactcagctcaaagaagaggaatcggacataaaacttggcaaagtggacgccaccattcactcggact

SEQ ID NO: 51484 - DNA, 370 bp, Glycine max
tcgtgtaatttttggttgagtgagaggcttgtctttgttccgctaccatgtctcatttagttctatggaattggaataattttgaagctagttgacttgctgagattttgaaacgtcttcatgaggtgcctttaattaaggaatgttctgatcctgtaccctgtggcctgtgtttttcttaggagacatgcccttctgtaaagaatgtccttcttttggattccgatgggaaacgtgttgcggtcaaatacttctctgaagactggccgacaaatagtgccaaggaaaattttgagaaagttgtattcaacaagactcagaaaaccaatgcccgcacggaagcagaaatagcaatgtttgagaataacat

SEQ ID NO: 51485 - DNA, 389 bp, Glycine max
tcgatttcattcaacaaaaccatttttttttctctcactcacttcacacaatgaagcacccaaaaccccaaacccaatcaaccccaacaccatcaccttcttcaagatcttcttctctctcgtcccacctcgctatggtggagctgaagcagaagatcttaacctctctttcgaagctctccgaccgcgacacgcaccagatcgcggtggaggacttggagaagactatctcggggctctcgccggacgccattccgatgattcttaactgtctttacgacgccgccaccgaccccaagcccgccgtcaagcgggacgcgcttcgtctcctcgccgccgtctgcgccgcgcactccgacgccgcggtggcccacctcacaaagatcatc

SEQ ID NO: 51486 - DNA, 394 bp, Glycine max
gtggtaatttggttgggatggaatcccgtgttgaagaattagaaaagtgtttagcattggagtcggtcactgacgttcaagttgtcggaattagtggaatggggggaataggaaaaacgactcttgcccttgctttatacgaaaagattgcttatcaatatgatgttcattgttttgttgatgatgtaaacaaaatttatcaacattatggttcattaggtgtacaaaaacaattacttgatcagtgtctaaatgatgaaaatctagagatttgtaatgtttctaggggaacatatttgatagggactaggctacgcaataaacgaggacttatagttcttgatgatgttaatcaggttgaactactacacatgtttacagggagtagagagac

SEQ ID NO: 51487 - DNA, 194 bp, Glycine max
gtttatattgacatctgaatatgccaactagggacaacctgacaagctgagctagcagatctttgatgcagtacttgatgcaagccttgaacaggaccctgacagcaaggttgcctgtgagacatgcgccaacagcaacatggccatggtcttctgagagatcacaaccaaagccaacggatactatgaaaaga

SEQ ID NO: 51488 - DNA, 532 bp, Glycine max
cccacgcttccgcccacgcgtccgcggacgcgtgggtgcaggtggtgggagaaaggtgacacgtgttgaggtaaccctggacggaggtgaaacgtggcaagtgtgcacactggactgtccggagaaacccaacaaatatggaaagtactggtgttggtgtttttggtctgtggaggttgaggttttggacctgctcggagccagggagattgcggtgcgtgcttgggacgaggccctcaacacccaacctgaaaagctcatttggaatgttatggtacgttcctgtctctgccacattcttttaattgaaattttaactttaattaggcctctgaaatttgataggattgttaactacaattacaatgcacgtagtgctggtcacattggtgattgctattgctgtataagtatcggatcaaattgtctccattactgattaactgtaccattttttttgtcagttagcaaaaataaactattatactattattaatctcaatagtaaagactaaacagttactatgaccca

SEQ ID NO: 51489 - DNA, 422 bp, Glycine max
ctattattaattaaaatttattaaaaataacaagtttaagtgaatcacacttttaaatctttcctaatcttgtaatttttaatcaactttattcaatagtatagttgttagaaagagtgtagagattgttttgctagcagttagcaccactttttatgctatatatataacccagttaagtctgtcctaattataatataaattaagcactaataaatactgtgatttatgaaataggtttttggtgctgcatggaaatccgttttcacagctgatgagaaagagcgtgagaagaatgttgaggaagcaattgaggctctgcagtttcttgagaatgagataaaggacaagaagttctttggaggagaggagattgggttggtagatattgctgctgtctacatagcattttgggtccctat

SEQ ID NO: 51490 - DNA, 483 bp, Glycine max
gttttagcttcttcctcttcacttcgttctttttcgcctctacaatgagcaacgacaaggacacattcaacgtcgccgatctcacttctgctctcaacgaggacaatagagcagaccttgtcaatgctcttaaggttagtattttctttattctttctctgtgaagttgatattgagatttgaatttctcaatttttacaagttcattttactgtttgcattgtgtgtatttttttttttcaatgtttaattgtgagcagagcaagatacagagtttggctggacaacactcggatattctagagtctctgtcgcccaatgtccgaaagcgtgttgaggttcttagagagatccagggccaacatgatgaattagaggctaaattttttgaagagagagcagctctcgaggccaaataccaaaaattgtatcaaccactttacacaaagcggtacgaaatagtaaatggtactacggaagttg

SEQ ID NO: 51491 - DNA, 435 bp, Glycine max
  unsure (1)..(435): unsure at all n locations
gttttaaccgcacagttacaaagatgcgtgaacacatccgagacttcctcgtccagatcagggaagaagccggcgacgacactgcggaccttttcttggaagagaaagaggctgagatccagcgcattcaatcgttaaaacaagcgattcccggggttagaaatccgaacgaattgttggaggaggacatggtctgacaatgcgtccgtcgggtgggctcgtccctgccttccccgtttttgttttttccatttgtccatcctgacattaaacgatcgttcgtattttttctctgcgcccatttgaattcctttcgtctgtttttgctctccttttcatgttntgtgtccgttctgctgagctttcccctgcttcttctaatggagtttgtttctttgcttctgattgtctctactcgtctgtttggtgagagat

SEQ ID NO: 51492 - DNA, 411 bp, Glycine max
cccacgcgtccgatatagttatatccgtcatccagggtactgtggtttcctcatttggtcggttggtactcaaataatgctctgcaatcccatatcaactattgcatttgcagctgttgtctggcgcttttttgccaagcggataccttatgaagaatactttttgagacagttttttggaacacggtatgaggaatatgcccgaagagttgggtcaggggtgccatttgtaaaatgaagatctatcaattaagtgagctgagccatatcctgtcacacctaattcaagtaataaaggaagtttgaaccatttttctcttgaacagttttgatccatgcttcacatttctggaggtataaactgcttgctttcagcttgtggctgtactaacacctcctttcattatatgc

SEQ ID NO: 51493 - DNA, 416 bp, Glycine max
tcggtgttatctcaatgctgagtgagcaaggtaaggtgcaggaggctttctttattattcaaagcttgggtagtaaacaaaacttccctatgcatgatttttacaagaatttgattgcaagcctgtgtaggaaagggaacacatatccagcctttcagatgttatatgaaatgacaaagtatggattcactccagattcttacacttattcatctcttataagaggaatgtgtagggagggaatgctagatgaggctcttaagatattcaggattttggaagaaaatgaccacaggcccgatattgataactacaatgcacttatacttggtttttgcaaagctcagagaacagacttgtcaatagagatatttctgatgatggttaacaaaggatgtgtgcctaatgagaatacc

SEQ ID NO: 51494 - DNA, 216 bp, Glycine max
aatattactgcgccaggcaaaagctccaagtatgtttttacagctctacaaaaagataggctctttgtgtgtgtatggtgatgataactgaattagggtacatgaatatgtcaggtcttactgtagtggctataaattgaaaagctgtgtggctgtggataatatcaccattactgagggtatggacaaaacaagtgctactttgcagtttataaa

SEQ ID NO: 51495 - DNA, 356 bp, Glycine max
gttttaactctggtgttatcaaggcgaatgataaaacccaaatcaacgttatgctgcagccggttgaatcgcctgagactctcgagagtgagcggagccggcacaaatttatgattcagactgcatttgcgcctgatgacgagcagcttcctgtggaccaattctggaaaactgttgacccaacattagtcatggattcaaagctccgagtggtgttccagcgaccttttggatttggcgatgaaaacaatcgggacgaaaccaatgcgactggtccgtttttcaatttcaacaaaacgggcgaaccgaaaaacgaacagccaacgcaaactccaaaatcgaccgaagcaaattct

SEQ ID NO: 51496 - DNA, 341 bp, Glycine max
catggctttaaaaggtttcagaccatgttcaatggaatctagcagctctaagcgattcagaaacctattagtctgtttcattgctgttgtaatggttctgcttggagcatgtttcctcttcacaaaactaaggcagaacaagtttgagaagcaactgaagactacttcatggaatgtcaagcagtaccatgtgctaagattcaatgagaatgaaatagttgatgggatcaaggctgagaatttgattggaaaaggaggatccgggaatgtttatagggttgtgcttaaaagtggggcagaatttgcagtgaaacatatatggacttcaaatctaagtgaga

SEQ ID NO: 51497 - DNA, 351 bp, Glycine max
tcggaaaatggtcaaagacaaaaaatattacgacatcctcgaagtaaacaccagtgcaacagaccatgacttgaaaaaggcctatcgaaaattagcgcttaaatatcatcctgacaaaaatccgaatgaaggcgaacgttttaaactcatttctcaggcttacgaagtgttgagcaaccccgaaaagcgtaaagtatacgacgaatatggagaagaagggcttaagggtggcggagaaggcggcggaatgcacaatccaatggacatattcgaaatgtttttcggcggtggtggttttcgtggcggtggtgaaaaaccgaccaaggtcagagatactgttcatcagcttac

SEQ ID NO: 51498 - DNA, 446 bp, Glycine max
tttcgcggacgcgtgggcggacgcgtggggtggatttgatgtctctgtgataaatgggttgagatgcaactgagtgcaagtaaaacagtgctcctgcaattcctgttgcaattctcaaacgaatatcccatgtcattggtaagtcctcgttttgatcatgtaaatattgaaaaaggttaccattaggaatgaattcataacaagcaagggtatttctgtccccaaacaacatcctaacagcttgaccacatttctattgttaatttgtgaaaggatgataaactcatcctaacatcctaacagtaccttggcctccctttcctataattatgttcaagttaaagtggtcagtggctttctctaaatcctttaagctgaacaaagtagctttgtccacattaacttcaccagatgacattcttttttttagcaacaaaccaccattc

SEQ ID NO: 51499 - DNA, 149 bp, Glycine max
cccacgtctccgcccacgcgtccgcccacgcgtccggttgcgagcttgcagtgaagcagctaagacatggatgactataccggcaccgaagagaggtgagattgtgagacagattggtgaagcattgagggccaaattggatcctttgg

SEQ ID NO: 51500 - DNA, 340 bp, Glycine max
atttaattttccgcaagcctttgtttgactgccacaacagtgtgaagatgtacatgaataccttgacttacttatccagtgacgcattctcatctatcccatcagaactggttcctgacttgcaaaggatgctttctccaaatgagtcttcaaggccaacagcaatggattttacaggctcaccattttttaggcatgacactaggctgcgtgctctacgcttccttgatcacatgcttgaaagagataacatgcataacacagagttcttaaaagcattgtcagatatgtggaaagattttgattcgcgcgtattgcgatataaggtccttccaccact

SEQ ID NO: 51501 - DNA, 391 bp, Glycine max
gtttaccgttatagataatcttggtcagataggaacctcgcttagatacccaaagaaaactagaagcactttcgtgtccctagtaagcatttggaattatctgggaagggttttttctgggtttgtgtctgaacattttctacaaaagtacaagttccctcgtcctcttatgcttactttgactctgctcttatcatgtgttggtcaccttctgattgcctttgatgtgccaaatggcctttacgtggcttcggagattattgggttttgttttggtgctcagtggcctttactttttgccatcatatccgagctttttggacttaaatattatgcaactttgtacacttttggaagcgtagcaagtccactaggactatatgtgcttaat

SEQ ID NO: 51502 - DNA, 424 bp, Glycine max
ctcacgcgtctttccacgcgtccgcagtacaggagctcaaatatggataaagcaattcaaagacagagagtcctgcttgatcatcttcaacccatttttttcaagttcaaatttttcttctcaaacccatcaatctacggatctctcagtcttttcccacttcttgttaggcttcattatgttttgccaagaattcttcgcacggtcaaataggtggatcagatgacgacgtggtgattgtagctgcatatcgtactgccatctgcaaagcaaagcgtgggggctttaaggatacccttccagatgacctgcttgccacagttctgaaggctgtaatagagaaaacaaatgtgaacccagcagaagttggagacattgttgtgggcactgtactggcacctggatcagatagaggaattgagtg

SEQ ID NO: 51503 - DNA, 423 bp, Glycine max
cccacgcgtccggctgcctcggagagatggcagtgtcggaaggatcaccaacccctcagacggttggcaatgcttttgttgagcagtattactccatactgcatcaaaagccagaccaagttcacagattttaccacgagtctagcatcctaagccgacctgaagaagatggtaccatgactatggtgactactactttggtaagtacagcgacgatggagtattgattatcacaatggcatttggagttacatgattgcagatttaggaaattaataaaaagatactctctctggattacacaagctttagggtggaaattctgagtgctgatgcacagccttcttacaaggatggggtaattgttgtagtgactggctgcttaactggaagtgacaatctgaaaaggaagtttactcagtc

SEQ ID NO: 51504 - DNA, 396 bp, Glycine max
gtctcaaagggtgatgctgatgggtatgacctagttgttgttgatgccatgcacatggctaattatgccagtcgaatatgtcattcttgccgacctaattgtgaagccaaggttaccgctgttgatggtcaatatcaaattggtatttatagtcttcgtgaaattcaacatggtgaggagatcactttcgactataattctgtaacagagagcaaggaggagtatgaagcgtcagtttgtttgtgtggaagccaagtatgccgagggagctatctgaatctgactggtgaaggagctttccaaaaggttctgaaggactctcatggaattctcgatcggcattgtttgatgctagaagcttgtgaataaattctgtgtctgaagaggactataatg

SEQ ID NO: 51505 - DNA, 425 bp, Glycine max
ttctcctccctcggcttgccctcgcctcctcctttcttgtcctcttcgccccattgtccgattctgccaatgttttgttctcttccacatcgctttatcctgtccaccgctttatccaacgtgaattggcttctgaactactgcgtcgtaatcactcagttacttggtttgaatatggcttaagcccgaatcaaatatcactgcctaaagggattgacgaaatatttcttcaagttgaaaattccccgaaaacagctgcactcaaaaataaggccggcaatgtgcagctcatttcgaatgaccaattatggagggagggcttttggcaacccgtggaaaagcccggcggttggttggccagtctggagctgtgtgagagagttctcgaacaacctgaacaccgtaaagcatttcaaactctgctc

SEQ ID NO: 51506 - DNA, 452 bp, Glycine max
ctttcgcgtgttctgcagtctgcaaggaactattcctgatttcagttcaatagccaacctcacctatctagaccttagctggaatcagtttactggacatataccatcagaacttgcagacaatatgacaactattgatctatccaataataatcatctcgatggatcaattcctcgaagcttcatataccctcatcttcaaaaattgtcacttgagaacaatttactgtctggatccatccctgctagcatatgggagaacgtggccttaaatactaaagataaacttacaattaatctccaaaacaactcgctattggaagttctgggaaatctgaaccccccagcaaatgttaccttaaggctttctggcaatccaatctgtaacaattctaacatacgaagtattggtcaatattgtggacatgttggaggtgaagatgaagatgaag

SEQ ID NO: 51507 - DNA, 404 bp, Glycine max
cccacgcgtccgggaaaaggaaaaaaaggcaaaatgggtaaggatctgagcgatgagcaagtgtcttcaatgaaggaagctttctctttattcgacttcccccgattcctcgatcttatggccaaacacatgaaacccgaacccttcgatcgccaactccgcgacgccttcaaggtcctcgacaaggactccaccggcttcgtcgccgtctccgagctccgccacatcctcaccaacatcggcgagaagctcgagccctccgagttcgacgagtggatccgtgaagtcgacgtcggttccgacggcaagatccgctacgaggatttcatctccagaatggtcgccaagtaacgccgattcgattctctctttccagtgttcttttctctttctccgctattatt

SEQ ID NO: 51508 - DNA, 488 bp, Glycine max
cttgacgcgtgggcgcgggtggacaacgaaatttctcagccaaagaacaaggatcagaatcgtttaatcaagttgaggaagatggcactagtctccggaggaagatcaacactgaaccctaacgcccctctttacattcccgccgcgttccgccaagtggaggatttttctccagaatggtggcagctggtgacgacactgacatggtaccatgactactggctaagccagcagcacgatgatggagccttctatggcgaggatgggtttgatggcaatgatgtggttgatttgcttcctgattcgtttgattttgatgctggtgaagatctttttgaagagtttattcgatcttctgaatcccaaggtaaaaagggttgaataaatacttgaattcattaggttcaattcaaaattcaaattgagtagtgctgtgtgttgtgttgcttcaatgatgcaataatgattgagtttggggtttttttttt

SEQ ID NO: 51509 - DNA, 509 bp, Glycine max
tttcgtccgcctcacgcgtccgcggacgcgtgggtcgcccacgcgtccgaccatgtgcatcagatgcgcctattgacagagcttcttggcaccccaactgaggctgaccttgggttagtgaaaaatgaagatgcaagaagatatatcagacaacttcctcaatatcctcgccaacctttagctcaagtcttcccccatgttcatcccgcagccattgatcttgttgataaaatgctgacagttgatcccaccaaaagaattacagttgaagaagcactagcccatccataccttgaaaaactgcatgatgtagctgatgaaccaatctgcatggagccattctcatttgattttgagcaacagcaattggatgaagagcaaataaaagagatgatctacagggaagcattagcactgaatcctgagtatgcttaaagcagaagactcaaggacttgaagcaagcatataaggaaaaataataattcgtttttaatttttttatcactta

SEQ ID NO: 51510 - DNA, 454 bp, Glycine max
gattgtttggtgatgccagtttcattgatccgtcgtcgttccacgggttcacggatgggttacatggcacttcctaaggaggagcccgtaaaggtggtggtgggaaaagagaagagggtgtttctggtggagcctttcatattgcaagagaacccgtttcagattttgatggatatctctatgaagaaggacccagccgggcacttcacgtcgaatcatagtcagagtgagaggagagtgatctttgtggatgtggatgacattttgttcgaacacatgctgtggctcatgcacaacgatgcttcttctttgttccagctcaatttgaaggagattattgacttctacactcacgatatctaaattgattctttaccatcttgagaacaaaagggttcaaacaataggagaccccccttcaatctctagcgggcaatgattgaccccaattttg

SEQ ID NO: 51511 - DNA, 403 bp, Glycine max
ttgatgcattcattttgttcacacatgtatatatgtatagttcataggtacaatgcttgctggaaccattaacattggggtagcatggtggttgctgaactctatcaagaacatatgtcatgacgatctccttccagaaggcagtccctggacatgcccgggtgaccgtgtattctttgatgcatcagttatttggggtctggtgggaccaaagcgtatctttggttctcaaggaaactacagtgcaatgaattggtttttccttggaggtgcagtaggacccataattgtttggctattgcacaaagcatttcccaaacagtcatggattccactaatcaacctcccagttctattgggagcaactggaatgatgccaccagcaacaccattgaactacaat

SEQ ID NO: 51512 - DNA, 387 bp, Glycine max
cggacgcgtgggcggacgcgtgggcggacgcgtgggctttgcctctagcgggttgaagactgatgtaactacgattcgtggcggtgcggcgtgggggcttctttgtctggtgatattcacggcgtgtgctgggaagattctagggactttcgtggtggccatgttttgcatgatccccgccagagaatcgctcacgcttgccgtgctcatgaacaccaaaggactcgtagagcttatcgtactcaacattggcaaagagaaaaaggttttgaacgatgaaatgttcgcaatcttagtactcatggctctattcaccactttcatgacaactccaatagtgatgagcatctacaaagcagcgaagacccaacggaagctaggagacat

SEQ ID NO: 51513 - DNA, 364 bp, Glycine max
catgtttgatgttttggtctctaccgcaaccctggcgtggggtgtgaacctcccagctcagactgcgatcattaaagggactcaaatttacaaccctcaaaagggtgcttggactgaaatcggtccattggatattatgcagatgatgggaagggcagggcgtcctcaacataacgcactcggaaaaggcattttgatgacccacaacaccgaactgcaatattatctgtcgttgatgaaccaacagctgccgatcgaaagtcaattggttgcaaaattgccagacactcttaacgcggaaattgtactcggaactgtcacaaacgttgtggaagcgatggaatggctcacttacacatattta

SEQ ID NO: 51514 - DNA, 361 bp, Glycine max
gaacgtgaagctgccggagacaacctatgtgtttgcgaacgggagcatgaacctaagggagtgtcaggatttgtgcctcagggattgttcttgcactgcttatgccaacattcagatcacaaacggaggaagcggatgcgtgacgtggagtggtgaactcgaagatatgaggctgtatcctgcgggtggacaacatctctatgttagattagcagcttctgacgtagatgacatagtaggtggctctcacaagaaaaaccatacaggtgaggttgtaggaattacaatttctgcagctgtaataattttgggattggttgtcattttctggaagaagaggaaactgttcagtatatcaaat

SEQ ID NO: 51515 - DNA, 199 bp, Glycine max
ttccacgcgtccggtccaatcgttggtccgtcgtgccaaccgttggccaatgtccgccctcccgggacggccattcggcggtggtcaacggcgactttatgttcattttcggcggatttgaggagagggaacaccgcttcagccaggagacgtacgccttccatttcccgacaaaagtgtggaagaaattgaaaacgga

SEQ ID NO: 51516 - DNA, 429 bp, Glycine max
ccctctcgttcgcccacgcgtccgctttctttatatgcaaagcaggaagatgatagttcacttctacgtttcctacaaagcaaatttgggaaaggaccagaaaatggtcctgagttcttctatgatcctaaatatgccttgcgtctttgcctcaaggaaaaacgaatgcgtgcatgtgttcatatatacagtatgatgtcaatgcatgaagaagcagttgctcttgccttacagattgattcagagcttgctatggccgaagctgataaggttgaagatgatgaggatttgagaaagaagctctggctcatgattgctaagcatgttgttgaacaagaaaaaggaactaagagggaaaacataaggaaggcaattgcatttcttaaagaaactgatggcctgctaaagattgaggatatattaccattc

SEQ ID NO: 51517 - DNA, 441 bp, Glycine max
gctattcctgatttcagttcaatatccaagcttacctatttagatcttagctggaatcagatcactggacccataccatcaaataaagtggcagacaatatgacaacttttgatctgtctaataatcgtctcaatggatccattcctcacttcttttatcctcatcttcaaaaattgtcacttgcaaacaatttactgtctgggtctatccctggtagcatatggcagaacatgtccttcagtgcgaaagataaacttacaattgatctccagaacaactcattttcagatgttttgggaaacctgacccccccggaaaatgttaccttgaggctttctggtaatcctatctgcaagaattctaacatacaaagtattggtcaatattgtggacctgaagcagataataaggcagcccaagattcaacaaactcaactttc

SEQ ID NO: 51518 - DNA, 394 bp, Glycine max
cggtctcgtgggcttgatgagacgcaaatcaaagccatccactcaacagggccattcatggctgcctttacccctttatggaaactctgttaccatgacaaagaattcaacaatttcacagaagagtggaactgcaagctgcatttctttagcttcatcaaatgttggacgattcttcagtttccaagaaatcctagatgctagcaacaaatttgatgagaagctacttcttggtgtcggcggctatggaagggtttataagggaacgcttgaagatgggaccaatgtagctcgaaaaaggggtaatccgcgatccgagcaaggccttgctgcattccggacagaaattgaaatgttgaccaagcttcgccattgacatattgcgtccctcatt

SEQ ID NO: 51519 - DNA, 403 bp, Glycine max
aaaggttgagcttgttttgggggatcctgatgcacctcggtttgtgttgtggaacaggaagttgaggccggtgcccgggaagctgactgatttgcctttctttgacttgatgagcattggtggcaaaatcagggctggctttggtgcgcttggaattcggcctcctcctccagtgacagggtcatgaggaatcggttgaagagtttgttcgtcggaaccttggtgatgaggtttttgaacggttgatagagcctttttgttcaggggtctatgcaggcgatccttcaaaattaagtatgaaagcagcattcgggaaagtttggaagctggaaaaaaatggtggtagcattattggtggaactttcaaagcaatacaagagagaaatggagcttcaaaaccacc

SEQ ID NO: 51520 - DNA, 418 bp, Glycine max
taatctctctgtttttgatcaatcttctctgatttccaatcatggcggtcgacccagcatttgttggcgcaggtagagcgcctggaatggagctttggagaattgagaacaagagaccagtcaagcagcctcagattgatggcaagctgcacactggtgactcctacatcctacttgttaccaagcaacccagcggggctctggaatggaacatccatttctggattggatcagagtcttctcaagacgagtatggtattgctgcgtacaaaaccgtggagctcgatgagtcgctgggaggaggtccagtgcagtatcgtgaagttcaaggcagcgaatctcagctgttcttgtcgtacttcaagagtattggcctggaatacgtcccgggtggtgttgcttctggtttcgcgcatgt

SEQ ID NO: 51521 - DNA, 352 bp, Glycine max
tccactcgtccgggaaaaggaagcgtgatcctcttcgacgaagcgagcgaaaccaaaatcagccaaacagggttcatatctgtctcccaacaaaatgttctgcgccttaacatcccggtgcaagatagcaggcacgcaatcgtggtgtaagtaagccacaccttcagccacgcccaatgctatcctgagccgcgtctcccaatcaattaatcctgtgcacccctcgtgtaagagagtatccaagttaccgttcggtaagtaatcgtaaaacagtaacttggttcttctgttggccccccagcccaggaggcgcacgatgttccggtggcggattcgcgccagcgtggcaatc

SEQ ID NO: 51522 - DNA, 420 bp, Glycine max
ctgacgcgtgggcggacgcgtgggcggacgcgtgggtttggatgaaccctttgctgaataaagggtaccaaacacccctcaagcttgaagatgtgccttcacttcctattgatttcagagcagagaaaatgtcagagcttttccatagaaattggccaaagccagaggaaaacagcaagcacccggttggactaaccttgttcagatgcttctggaagcacatagccttcactggcttccttgcaattataaggcttggagttatgtacattggtccaatgcttattcagagtttcgttgatttcacttcaagaaaagacagcaccccctatgaaggccttgttctgatactggtcctgtatttggcaaaatcaaccgaagtcctctctgtgcaccaattcaattttcactctcagaagc

SEQ ID NO: 51523 - DNA, 437 bp, Glycine max
tcgttttctctgtctatctctcgttgtagcgtagcgcagcagttgaatttggaaaacaagatgtctcaccgcatgttcgagcacccgagacacggttcccttggctttctcccaaggaagcgagcttctcgtcatcgcggaaagggtgatcctctttttttttgttttgttttgttcgtttctgttgtttactttcagatttaaatgatgttgttaagggttttcttttcagatctaaaaacatttaaactgatttgttcgttcgaaagttttttttttattcgtgttatcgtcacttccttgtgttgagtgaatgaaattgcttgcgtaaaaaaagtgactaatcaaggctggaatctcagaaacggctcgtcttgccaaaatcctataaaggtttttggaatggaaaacatatgagctcgagaattggcatacat

SEQ ID NO: 51524 - DNA, 380 bp, Glycine max
aaaacttgaaagtagggtgtttttttttttaaagtaaggaagaaagaagatgagcagcaactcaggaaaagtggtgtgtgtgactggtgcttctggtttcattgcttcatggatcatcaaactgcttctccaacgtggttacactgtcagggccactgttcgcgacccatctaaacccgaaaaggttgatcacttgctcaaacttgatggtgcaaaggagaggctacatctctttaaggcagatctgctggaagaaggttcctttgactctgcttttgagggttgtgatggtgtctttcatactgcttcacccgttcatttcattgttactgatccacagaatcagttaattgatccagcgattaaaggaacccttaacg

SEQ ID NO: 51525 - DNA, 473 bp, Glycine max
cggaacttggctcaccggcagtttcaatctcacaagcaatttcacgctttttcttcaccacggtgccgttattctcgcctctcaggacccaaaagaatggccaataattgagccattgccatcgtatggaagaggcagagagaggctaggaggaagacatattagccttatacatggaaatggcattagcaatgttgtcattacaggacaaaatgggacagtggatggtcaaggaaggatgtggtgggaactttggtggaacagaacattggagcacacgagagggcacctccttgagctaatcagctcggataatgttcttatatcgaacctcacctttcgaaattcccctttttggaccatccatcctgtttactgcagcaatgttgtggtcaaagggatgacaatcttggctcctcttaatgccccaaatactgatggcatagacccagactcaagtaccaatgtatgta

SEQ ID NO: 51526 - DNA, 399 bp, Glycine max
gaacaagcagctgttgaagcctatgaccggacgttgatgttgtgtttggtaaataaagagcgtgttcagcgtggtctcaagccactcggtccagatagtcggcttgacaatgcagcacaacgtcaaagtaacggacaagctaatatgggtcaaatgactcatacgggtgatgatggcagtagccccagccaacgtattgaacaagctggttatgaatggcaatccgtggcagagaatgttgcatttggctacgagaatgaggagatttgtatggagaaatggatgaattctccaggtcatcgtgccaatattctcaataacaaagtcacgcactttggttcagctgtcgcctacaaaggtagtacaccttattatacacaagactttggtggtgatggc

SEQ ID NO: 51527 - DNA, 380 bp, Glycine max
gtcaacgacccgttcatcgaactcgactacatggtgtacatgttcaactacgactccacccatggccgtttcaagggcaaaatttccacaaacgccggcaatttggtggtggagaaggaggggaagagcgcgcacaccatcaaagtgttcaacctcaaagacccggccgaaatcaaatggggcgaagcgggcgcggaatatgtgatcgaatccaccggagtgtttaccaccattgagaaggcctctgctcatcttaaaggcggtgccaagaaggtggtcatctccgctccgtctgcggatgcgccgatgtacgtgatgggcgtcaacgaggacaagtacgacccggctaggacgacgtgatcagaatgcgtcgtgcacca

SEQ ID NO: 51528 - DNA, 378 bp, Glycine max
gtttgagatcactcgatttctctgctttttgtccattagactttatttaatttcttccattctaaacagcgaattgcttttacgccaccataaaatatgggtttggccatttccggtctgttcagtcgacttttcggcaaaaaggaagtgcgcattttgatggttgggctggacgcggcgggaaagaccaccattctgtacaaactgaagttgggcgaaattgtcaccaccattccaacaattggcttcaacgtggaaactgtcgaatacaaaaacatttcattcaccgtctgggacgttggtggacaagacaaaattcgaccgttatggcgatactatttccaaaatacgcaaggactgatttttgtcgtggacagc

SEQ ID NO: 51529 - DNA, 400 bp, Glycine max
cttctttctttttctgtgagcctttctttcaggttcttaacttgatcagtgtgcagtgtccaaatcataagggtagttgcaaattgcaatggctaagcatgatgttgagggtggttccttctctgcaaaggactaccatgatcctcctccagcaccgttgattgatgctgaggaactcacacagtggtccttctacagggctttgattgctgagttcattgccacaatgctcttcctttacatcacagtgctcactgtgattggttacaagagccagagtgatgtaaaggctgggggtgatgtgtgtggtaggagttggcattcttggcattgcttgggcctttggtggcatgatcttcattctggtgtactgcactgctggaatctcagggggtcacat

SEQ ID NO: 51530 - DNA, 356 bp, Glycine max
ccgtttcgccactacacttttctcactactatccattaatttccaggaacaatgggggagcacgtggttttatctgtccttgaccctcttatagcacctggaactttgctaccacaacatggtggtgatggtaatgctttaggttcactcattgagggtgctactcatgttaatgatgttaaggaatgcgatacacttgaagaagaaaaagaagaccttatccaaatggtggaatgtcgcatttgccaggaggatgataccctccaaaatttggacataccttgtgcttgcagtggaaccttgaagtttgctcataccaaatgtattcaactatggtgctacgagaagggtgatac

SEQ ID NO: 51531 - DNA, 287 bp, Glycine max
aaactgtgagtggtgctggtagcagcagcagctgaagctcgcaggaaatggagatggagaaggagaaggagtcgctaacactgggaaagcgaagagaacccgatctcccagtaacagtaacagagaccacttcaatgccgaagaaagctcgcagttcggaacgcacgtgcgtgcacgaggtggccgttccgagcggctacgtctcgagcaaggacgaagatctccacggaactctctcgaatcctctccacaacggtcccatggcgaagtcctatcccttcactctc

SEQ ID NO: 51532 - DNA, 112 bp, Glycine max
gtggcttccttaagctccttagtgctgatccttgcagctgtaattctatcccctcaagtgcttgcgaactatgagaatcccgcagtgtacaagccttccactgagaaaccac

SEQ ID NO: 51533 - DNA, 436 bp, Glycine max
ataccattagcgaagtatgttaaagctgtgtatcatactcgagtttcagttggtatgcggttcaggatgctgtttgaaacagaggagtcaagtgtgcggagatacatgggtacaataactggcattagtgacctggatcctgtccggtggcaaaactcacattggcgctccgtcaaggttggctgggatgaatccactgctggagacaggcaacctagagtgtctctttgggaaattgagccattaactacatttcctatgtatccatctccattcccccttaggcttaaacggccatggcctccaggactgccttcattccatggcatgaaggatgacgattttggcccgaattcacctctgttgtggctccgagatcctgatagagggcttccgtctcttaattttcaggggattgggattaatccttggatgc

SEQ ID NO: 51534 - DNA, 491 bp, Glycine max
cccactcgtccgtcttgtccaatctcaacactcttgacttgtccactaataaactctctggtagcattcccaacaccattggtaatttgtccaaactacaatatcttaatcttagtgccaatggtctatctgggtctattcctaatgaagtgggaaatctcaattctcttctcacattcgatatattttccaacaatctctctggaccaattccaccttcattaggtaacttaccccatttgcaatccattcatatttttgaaaatcaactctctgggtccattccttccactctaggaaatttgtccaagctcactatgttatctttatcatcaaacaaactcactgggtccattcctccctctattggaaatttaacaaatgctaaagtgatatgttctattggaaatgatcttagtggcgagattccaatagaattggagaagcttactggtttggaatgtttgcagctagctgataataattttata

SEQ ID NO: 51535 - DNA, 179 bp, Glycine max
ggaaaacttgctaagaaacgtgctgagtgctgtaccgcaagatattagcagggatgcttggctggatgctcttcctcatgctctggctgttggtttggtgaagactgacataaagactgagcaaaagggggaaacttctggaacaacagctacatcagcagcggcagatggatggacta

SEQ ID NO: 51536 - DNA, 438 bp, Glycine max
cccactcgtccgctcgacttgactttcaaatggatcgccgaggttcccgtcaacctgtcatcaaaaactttaagacaattttgccggctgcatccaatgacatttattatcgagatgagatcggcaacatctccacctcaaatgtttatccccgtgccgatcgtgttgaggttgagctccgcccgcgtttcccattgtatggcgggtggcgtacaaattacattttgggttacaacgttccaagtacgtcctttctccgtcattccggctcgaattttgcgatcaaaatgaaactgatggatcgtctctacgataatgctgttgtggaaaaactgtgtgtcaaaatcatattgcctgaaacgagcaagaacattaagctggtcaccccttactctgtgaagcgtcttcccgacgaggtgcacataacgtacttggaca

SEQ ID NO: 51537 - DNA, 457 bp, Glycine max
gttttatgctctcctattagctccctcagaaaatctctcaagcaatttaattcttagttctatttatcttatctgagcaaaaccattttctcgcttcataagatcagaagagataactatggcaaagtcatctgagctggccattgaagagctgaagaagcttctcagagacaaggaggaatttgatgccgtggcggctgcaaaagttgaggagcttatagctgagttgcagggatgtggcccgcgtccatatgagcctgctgtgcaaagaatcgtagacggatttactcacttcaagatcaacaatttcgagtatactttaacttacatattaactcttcattattatgcttctctattaataatttctctctgtgattctgacattttttattacgatatactttgcaatttaattagattcatgcatgcttctttttcttatatctggcagcaa

SEQ ID NO: 51538 - DNA, 407 bp, Glycine max
ctgtacccatcactgaaacgcccggaccgcctggacccagcactgaaacgcccggaccgtctggacccagcactgaaacgcccggaccgcctggacccaccactgaaacgcccggacccagtactgacacacctggaccgcctggacccagcactgagacacctggaccgcctggacccagtactgcaacacccggaccgcctggacccagcactgaaacacctggaccgcctggacccagtactgaaacgcccggaccgcctggacccagcactgcaacacctggaccgcctggacccagcactgaaacacctggaccgcctggacccagcactgaaacacctggaccgcctgaacccagcactgaaacacccggaccgcctggacccagcactgaaacacctgga

SEQ ID NO: 51539 - DNA, 439 bp, Glycine max
cccacgtgtccgcccacgcgtccgcggaaccaaaactcggcgctacgcccgtgtttattttcgcaactgctgggatgcgtctgttgccatttgaaaaacaacagattttaatggaacatctccgcaatgaacttcctcagatgacaaaattgcaaattttggaccaacacattcgggtgataagcggccgatgggaaggaatttacagttggatagccataaattatatgctgggacgcttcaatctttcgaaatcggtgaacaaatccaaatcggagtcactcgaagagcgatcacaaccagcactttctgttgagaaaaaggagcgaccgaaaacagcaggaatgattgacatgggtggcgcttctgctcaaattgcctatgaacttccattgggccattccgatgctgcaacgggtgggcaagagaatgttcagct

SEQ ID NO: 51540 - DNA, 451 bp, Glycine max
tcggttatgctcgtgaaatgcaagctttttataggcaggactatgaaaagtatattcaagcgttagataaggctgctgataaggaccgtgcacagctcacaaaagcatatcaaactgctgctgttttatttgaggtattgaaggcagttaatcgaatagaagatattccagtatctgatgagattatggaagctcatattaaggttgaggaacagaagcaattatatgccccttataatattttgccactcgatcccaatagtggaaaagaggctataatgagatatcatgagattcaagcttctgtttctgcactccgaaataccaggggtttgccttggtcaaaggaacatggcaacaaagtaaatgaagacattctggactggcttcagctgatgtttggtttccagatagacaatgtggaaaatcaaagagagcacttgattctttt

SEQ ID NO: 51541 - DNA, 400 bp, Glycine max
cggacgcgtgggcggacgcgtgggcgctcgcgcagggcacggtcacgaaatcacactttggccaattcgatgccggccgttcacattcgaacccacgacatgctgaacccgttggagcgtcaattcctggatgcagccgaaaaaggcaatcggacggcgctggaagcgtgtttggccaagcaattgagaaaagcgccgctgaatatcaatgcggtggacacaatgggacggacggcgatcgaaatagcggtggacaacgaaaatttggaaattgtgcaacttttgctgcgacagcccgacgttcgcatcggaaacgcccttttgtgtgccattcgcgagggtgtctatgaattggtcgaagtactcgtcaaccacccgtgcatcacaagggatatgctcg

SEQ ID NO: 51542 - DNA, 362 bp, Glycine max
aatcgttagtcggaaaaccgcaaggtcgctccgctcgcgtcgctgctcaacatgaagctgctcattgctctgcttctggtgttgtgcgcgccgttttcatcttcttccaaacccaaagacccgttgctcggaatctgcctcgaagatgacaagtattacaaggcttccgatgttataaggtgtaaagatggatccggacaattcaccaaggcgcagctcaacgaccatttctgtgatcgcgctgatggcaccgatgaacctggcacatcggcatgtccgggtggaaaattttattgacggaatgcaggacattctcctgtttacttgttttcatctagagagaacgatggaatctgtgattg

SEQ ID NO: 51543 - DNA, 393 bp, Glycine max
gaggttggcattggttatggtgatgaaggagagagtgagtcggatgagtgttttttggcgtttgctaggatttttagtggggttttgcatgctgggcagagaatttttgtgctttctgcattgtatgatccggtgaaaggggagtcgatgcagaagcatattcaggaggctgagttgaaatccctgtatttgatgatggggcaagggttgaaagtagtgacatctgccagggctgggaatattgttgccattgcaggccttgggcagcatatattgaagagtgctactctttcttctactaagaactgttggcctttttcgagtatggcattccaagttgctccaactttgagagttgcaattgagccgtctgatcctgctgatgtgggtgca

SEQ ID NO: 51544 - DNA, 416 bp, Glycine max
cccacgcgccgcccacgcgtccgggaaagttggcgaattggtggacgaaacgtgcaaaggcgcagccgcgcatagcggcggagtgttcgcgttgaattggcattcgggtggcataaaattggccaccgcttccggcgacaaaaccatcaaaatttgggatgtgcctggacgaaaactaattgggacggtgtccttcggctcggccatagaagaccaacaattggccgtggtttggcttaggaattggatcgtcagtgtctcattgagcggcttcatcaattacatttgccccgagacactgaaagtctgccgagtgctcagaggacataacaaatccatcaccgcgttgacgctgtccgaagatcgacgaatggcattcactgctgactttgagggacatataacccgttggaatg

SEQ ID NO: 51545 - DNA, 475 bp, Glycine max
ttcttcttctttttcatcaatcatcaccagtggttcttttccttctgagaagatcgaattgtgttttgcaaaaatgggagttccagagaaagaccctctttcccaattgagtttgcctcctggttttcggttttaccccaccgacgaggagcttctcgttcagtatctgtgccgcaaggtcgctggccaccatttctctcttccaatcattgccgaaattgacttgtacaagttcgacccatgggttcttccaagtaattatcaaatcgctcacccatctccatttttttttaagttaattactttgttctaaattgaatagatttgattgattaattttgcaggtaaagcgattttcggtgaaaaagagtggtactttttcagccccagagacaggaaatacccgaacgggtctcgacccaacagagtagctgggtcgggttattggaaagccaccggaaccgacaagatcatc

SEQ ID NO: 51546 - DNA, 465 bp, Glycine max
caacaactacgctagaggacattacacagtcggcaaagaaatcatcgaccccgtcttggatcggattcgtcgcatcgcggataactgcaccggacttcaaggctttctcatcttccattcgttcggtggtggcactggctctgggttcacatcgctgcttatggaacgtctctctgttgactatgggaagaagtctaagctcgagttctccatctaccctgctcctcaagtgtccaccgctgtcgttgagccgtacaattcggtgcttactacgcacacgactctcgaacactctgactgtgcatttatggttgacaatgaggccatctacgatatttgtcgtcgaaatttggacgtggaacgaccttcttacaccaatttgaaccgtttgatttctcaagttgtctcttcgataaccgcttcacttcgatttgatggtgctttgaatgtcgatctcactgaatt

SEQ ID NO: 51547 - DNA, 260 bp, Glycine max
cgttaacaaagaatgggaatattctcataagatagggtttaagtgtacatttgaacgcggaattctgcacgtgtacttaaatttgaaacgccatcgctaccgatgattgttttacacaagacagtggttcactttgtgtaaaattccttctaatagaaaggctatgaggctctgccattttaagagtcaattttattcgatggtgttgacactacagatagatggccaggaaatttacaggttggagtatcactctgata

SEQ ID NO: 51548 - DNA, 485 bp, Glycine max
  unsure (1)..(485): unsure at all n locations
attcaaatgatatggttgcttgctgggattctggtatatgaagccattgatagaatcattgctggtcctaaaaatgtggatggttttttaatgtttttagtttctgcatttggtcttgtggttaatatcatcatggcattgttattgggtcatgatcatggccacagacatgctggtcacagtcacggacacggacatgatggtcatggccacagtcatggatttacaatgtctacccattgtgatgcaaagcataccaaagatcagcaccatcacacacaccatcatgatgaaaaccatccaaaagatgctcaccatcatactgatgaagatcacttgcaccatcatgctcacaaagaggttactgaactgcttcttggtgagtcaaaaggtggaactaagaagaagaagcaatggaacataaatgtacagggggcttatctccatgttcttggngactctatccaaagtattgnggtaatgat

SEQ ID NO: 51549 - DNA, 414 bp, Glycine max
cctacgcgtccgactctgataatagatgatgattcattgtttttgacatgtctaattatggaagaaataactgtttcattctaaggagcttaaatatcattgtcataaaaagtggtgggaactgttccaagaaagttgcatcagtgatgtaggtagctgaatctatttatttagaaagatcatatttttttgcatcactatttactatggttttctgttgagctaacagctatcttgctaatattgttggaattgcaacttctatttattagtagttttgttggattaaatttacgagaaagaacatgaatcatgctggcagggggcttgttaatgacacatacaagatggacctaattcttgtacatcctccgcatttgattgctttagcttgcatatacattgctagtgtgc

SEQ ID NO: 51550 - DNA, 334 bp, Glycine max
gtgaagagaaagaaggaaggagacatttataaaaagctctttcccttcccctaaatccctcacactcattccatttttacctttctctctcgctcgcaaacgcaaataataaaaaacaaggttttagccatggcatcgaagcggatcttgaaggaactcaaggatctccaaaaggatcctcctacctcatgcagcgccggtattttgttttgtgattttggttttgatgcaagtactttatacgatccatgattttctatcgcggaatgatcgcgtattatgtttcgggaattcggacaattttttagccgttcgtagattatacttccgctta

SEQ ID NO: 51551 - DNA, 454 bp, Glycine max
tttctgttgcgtgggtttgagccttaaaatgctgcttgtacgtcaactttgccttctgttgttcgctgtgttttatttgattgatgcgcgaactcaatccgtcgcgtgaaaggacgtctgctgtgtggtacggcaccggcacgaaatgttcgggttaaactgtacgatgaagacgctggtgtcgacccggatgaccaacttgatgccggatattctgacccaaatggcaactttcaactttctggccatacctcagagctgacgaacatcgacgttgtttttaaggtctaccacgactgtgacgatgggattaagcccggctcgcgcaagttgaagttcaaaattccgaattcatatgtcacggacagtgcgacgccaaagaaaacgtttgacatcggtgtgctcaacttggagactgtgttcaaggacgaggaacgcgagctgatcgtgacca

SEQ ID NO: 51552 - DNA, 314 bp, Glycine max
ttttccgtttcggcgacctctcttccggccgccgacgcatatgctagccgtgcacgatatcttcaatttgattacttgggtcaacgatttctggcattctcaatcatgggaactagacttaatcttgaaaataatcgcgaagttggagtcttatctaaacttaccaatgcctactgtttggttgccattggtggatttgaaatgctgactcagtgtattagaagccgagttagcgggtgttatccctgtggtcaagacatccattggcggtactcgtattattgggcgtctttgtgctggtaacaagaatgggc

SEQ ID NO: 51553 - DNA, 405 bp, Glycine max
tttccgtttacgcgtgggcggacgcgtgggcggacgcgtgggcacggacaagcgctttcagcccgtccatgacttgaccatcggtgttgaatttggtgccaggatgatcacaattgataacaagccaatcaagttgcaaatatgggatacggctggtcaagaatcattcagatctattacaaggtcttattacagaggggctgcaggtgcattgcttgtttatgatataaccaggagggagacatttaatcatttggctagctggttggaagatgcaagacagcatgcaaatgcaaatatgactattatgctgattggcaacaagtgtgatcttgctcatagaagggctgtaagcacagaggaaggcgagcaatttgcaaaggagcatggattgatcttcatgga

SEQ ID NO: 51554 - DNA, 471 bp, Glycine max
tttcaataaagcgtgtgctttttcaatttaaattttgctttattcaactttctttctcgtgctcaattcgtggacaaaaatgtgcgacgaagaagttgcagctctcgtggtggacaacggctccggcatgtgcaaggctggtttcgcgggcgatgacgcgccccgtgcggtgttcccgtcaattgtgggtcgtccccgtcaccagggcgtcatggtcggcatgggacagaaggactcgtacgtgggagacgaggcgcagtccaaacgtggtattctgacgctgaagtacccgattgagcacggcatcgtcaccaactgggacgacatggagaagatctggcaccacaccttctacaacgagctgcgtgtcgcgcccgaggagcatccggtgttgctcacagaggctccgctgaacccgaaggcttacagagagaagatgacccaaattatgttcgagacgttcaacacgcc

SEQ ID NO: 51555 - DNA, 438 bp, Glycine max
atttgttgttcgcgttttgaagttctctttcgcgacacaggaaagaaagatcgaggtttctcttcactcatccttcgccctagctgcgtatccctaccaccgttctagacaggacctacactttctttttgttgcagaacatagaaaatagatgggattgtcgaatgcttctgaggatttgtcatcagagatggaggttgatgcctttagacgcctttttccacttcgatattttgagcgtcatcttgctgaatctataaggccagatggtagaccacttggaaaagctagagaaacaagtatttttcttggcgctgttgcgtctgctaatgggtcggctcttgtgaagattggatcaactactatgttgactgctattaaaatggaagtcatgactccctccttggagtctccagatgagggctgtctagctattga

SEQ ID NO: 51556 - DNA, 328 bp, Glycine max
gtttgttgttgtaactcgttcttcttcttttgttgttctgtgtttgtgtttgttttttctctcacctgaaaatgtcttgctgcggtggtaactgtggttgcggaagctcctgcagccgcagcacgggcaagcagcgctggagcaggtgcagtgcttcggtcgcaagaagaccgccgtggccgtgacctactgcaagcgcgggcgcggtctcatcaagatcaacggctgccccattgagctcgtggagccggagatcctccgcttcaaggccttcgagcctatcctcctgttgggtaagagccgcttcgccggcgtcgacatgcgcatc

SEQ ID NO: 51557 - DNA, 276 bp, Glycine max
gtgattgggagcacggagcgactgaactaatcatcaatttgcactcgctgctgcagcttcattaccctttttttgcgtcattcatatctcttgagaaacgccacatgatacctttatattcacatatgaatctgtgaacgagggtcaccccgacatgctgtgcgaccagatctctggtgcagtacttgatgcatgccttgaacaggaccctgacagcaaggttgtctgtgagacatgcaccaagaccaacatggtgatggtcttatgagagatcac

SEQ ID NO: 51558 - DNA, 384 bp, Glycine max
cctacgcgtccgaaccaaacatggaaaatccgagtgattttattgctggctttgaattgcccacatcaagcacagacgattatttgaagctaaaacgtttggagaataaactagcaaatttggacgttatggaggagtatctgaagatggacatgcgaaatttggagaaggaattggtgcacgcacaggaagaagtgaagcgcattcaatccgttccgctaatcatcggccaattcctcgaagccgtcgattacgaccacgccatcgttggttccactactggctcgaattactacgtgcgtgtgctgtccattttggaccgtgaactgctgaaggccggctgcagcgtgtccttgcacaagtacagcaacgcgctggtcgacg

SEQ ID NO: 51559 - DNA, 397 bp, Glycine max
gaatgtgctcttcggaactgtccgttgagcttcgcgaactttgccgttcgatgtgttgttgttgttttgggttgttattccaaagtttgtttgcttttctgtgtctttgcaccatttcctaattacattgaacacttttaagggttcttgcaaaacctttctcacccttttccaattcagtcaatgccgcaaaatgttgtagcatctgttcacaatcagtctctcactcacatagtgttagcgtgaatgagacaaaaatgcttttgaagctttgcgattttggctctgcttgtcacgtgggcgacgcggagccggccccctatttggtgtcccgtttctaccgcgcccctgaaataatgctcgggttgccctacgattttggaatcgacctttggtc

SEQ ID NO: 51560 - DNA, 421 bp, Glycine max
ccctcgcgtccgcccacgcgtccgctcagctaatgagacagaatatggaagagtgaaactgagaactgcaacaggcttaaaagaacgcaacgatggccagccaagcaacgaagtcgtttgagaatgtcatgagccatggaatgtggagggctatgcattgtattctggggatgctgtcattgtttcaagaggataatttgtggtctgagcagaagattattggtgatataatgttgaaagttggccatgtgttctcctctccagtttgattaataatgtaatggaaattgcagaaaacgaaaagggaggcttccggttagagatgaaacctttcattcgatgatgagggaagctgcttccactgccaagtgcttgtgtgtttatgaaggctttggttttgaaattgatgtccagaagtctt

SEQ ID NO: 51561 - DNA, 466 bp, Glycine max
ctttctcctactttcgttcctcattttttcccaagcgcgccgtgaggctcttcgacccgaaatctgaacccgaattcggtttcaatctcagagagagagagagagagagagagggagagagagaaacactgacctagctcgcagaatcgacaaccacttcgcactcttcaatcggtataataagattcgattcgtttcgtttcgttatttattttcttcttcctattttttaggttaatgtcgtgctttacgtgcagcattccgtaatcgaccagatctgagtgtgaaatctaaggaattgtattgctggtttccttgctaatggctgccacagcaactgtgtctttgatgggtccgaggtatgcaccaccagacccaacactccctaaaccatggcggggtcttgtggatggcaagactgggtatctttacttttggaatcctgagactaatgtcacccagtatg

SEQ ID NO: 51562 - DNA, 362 bp, Glycine max
  unsure (1)..(362): unsure at all n locations
aaggaaagcaaccaagtcagaaatgggaatcacacacctccaaaggattggttttggattggtactctccatagttgccatggcagtggctgctattgttgaaatcaaaaggaaaagagtggcaactcagtcagggctacttgatgatccaaccaaaccacttcctatcacattcttgtggattgcttttcagtacttgttccttggatctgctgatcttttccccctttgcttcattaattangtagtgacctgtccctctatatttgtacttagaggcccaatacaagtagtgtaggaagttcaacccacttagcacacacatgagccaatagaacttttgtaggtgatagcggctaaag

SEQ ID NO: 51563 - DNA, 397 bp, Glycine max
tcgttttgtacaatgtcggggacggttttcacgtgatagcggcgcacaccgacagcccctgcctcaaactgaagcccaaaacggcgtcgtgcaagtgtaactattccatggtgaatgtgcagacttatggagctggcttgtggtacacttggtttgatagggatttgagtgttgctggaagggtcattctcagaactggccataattcttttgtgcataagcttgtcaaagtcgatagacccattttgcgcattcccacactcgccattcatctcgaccgcacagtgaacctggatggttttaaaccaaatctagagactcatcttcttcctttactctcaatgaaacctgaggacacttctttggaatccaactccaaggagaagaatagtgcctt

SEQ ID NO: 51564 - DNA, 443 bp, Glycine max
gtcttatagtgcctcctcctctttgacttcatccctatcttccgaattttcctagttttgaaaaatcctacacacgcttttgcttccacctcctttcctcaccttaaattaaattattgttcaacaatcaatatcaatataattcaattccttcaaattccagataccaaaaacatatattctttctctttgttttcttgtctgtggtattgtctctgagttgttaattttgttttctttcctttctcatggggcagcaatcgttgatttacagcttcgtggcgcgcggcacgatgatcctggcggagcacactgatttcagtggaaactttgcggaggtggctttgcagtgcctgcagaggctcccagcctccgacaacaaattcacctacaacgccgatggccacaccttcaactacctcacctataatggattcacttac

SEQ ID NO: 51565 - DNA, 238 bp, Glycine max
tttaaacaatcgggcccttattactaactttattcctttgagtttatcaggcaatagtggaaaataagctgtttatgataaattaccacgatgtctatgttccatttcttgacgagatcaatgcccttgatggtaaaaaatcctatgctacccgcaccatattgttcttgacaccacttggcactctcaagcctattgctatagaacttagcctctgaccaagatccggatggaaact

SEQ ID NO: 51566 - DNA, 332 bp, Glycine max
ctcaattcatactattctcacccttgcactctcacatggttgggagctgtttcagctggatataaacaatgcctttttaaatggagttcttaaagaatcaatgtttatgacacagcctcctgactttgaagttggggataggtttcttgtttgcaaacttaacaaggctctctatggcttaaaacaagccccaaggcagtggtttgataggttaaagtctactcttcttcagttaggttttgtgggcagcaaatgtgattcttccctgtttatatacaagcatcagactcacactgtctatcttctagtttatgtggatgatattatcatca

SEQ ID NO: 51567 - DNA, 432 bp, Glycine max
attgaattccatggcggccgtaagaaaaataattgaggtcaatagaaataaaatcttgtcgccatctcttctctcttttcgccggggaattgcttacaagctttttgttggaggattgtccttctacaccacagagaatgcattatcagaggcattctccaattacgggcaagttattgaagccaaaattgtaacagatagggtgtcagacagatctaagggatttgggtttgtcacctttgcttctcaagacgaggctgagaatgccatagaagatatgaaaggaaagacattaaatggacgtgttatctttgttgattatgcaaagcccaatatcaacactcgtggtgaaattccaattgccagaggatccagtgtcgttgaaggttccatctggtgtactagttaaatcttttaatgaatgatatcatc

SEQ ID NO: 51568 - DNA, 467 bp, Glycine max
cccacgcgtccgcttttgggttggaaaaaaaagttgatccaagttaccatgatattttgaatcgagcggtaacttatgcttcaggccttccattggctttaaaagtaataggttccaacttatttggaaaaagtatagaagaatgggaatctgctctaaatggatatgaaagaagtcctgataaaagtatctatatgacacttaaagtaagttatgatgctttgaatgaagatgagaaaagtatttttcttgatattgcttgttgcttcaaagattatgaattggcaaaggttcaagatatactttatgctcattatggtcgttccatgaaatatgatattggggtgttggttgaaaaatctctgataaacattcataggtcatgggatgataaggaggtcatgagattgcatgacttgatagaagacgtgggtaaagaaattgtccgaagagaatcaccaaaagag

SEQ ID NO: 51569 - DNA, 273 bp, Glycine max
tcggttttaatttgggtgactgggggacctgggtgtgggagtgaattggctttgttttatgaaaatggccctttcaaaattgctgacaacttgtctcttgtgtggaatgtagtttggctgggacaaggccttttttgttgagcatccccaatacgccaagaatgacttttttattacaggagaatcatatgctggacactatattcctgtctttgcaactcgtttccatcgtggaaacaaagctaaagaaggaattcattataacctgaaggg

SEQ ID NO: 51570 - DNA, 438 bp, Glycine max
gttacttggttttaaaacctaaattttcaaaaacaaatttttaaaaggggtagaagagagtaaacaagggaagaaaatgggatgaagagagtaatcaggcaagtagatgggatatcataagaaagaacatgagtaatggataattgaaattaaaaatcataacagtctagagatattttaattttaaactatttttagaaactgttcttatcaaacatttttgtttcaaaaatagaaaatagttaatgacaaaaaaagtggttttagtgatgttatttttttccatggttatcaggttaagattggtgacttgggtttggcagcaattgtgggcaagaaccattgtgcacacacgattcttggcacaccagaatttatggctccagagttatacgatgaagactacacagaattggtggacatatactcatttgggat

SEQ ID NO: 51571 - DNA, 366 bp, Glycine max
atttggtggcgtttctgttgcagatctgtacgcggaggagagtgaagggaacgatgatttcagggcggagtttctatgccctttctgcgccgaggattacgacgtcgtttccctctgttgccacattgacgaccaccaccctatccaagccaaaaacggggtgtgtcccatttgtgggaagaaggtgggagtggatctcgttggacattttactacacaacatgggaacttcttgaggatatcctttttgcaagttggtctgtttctcatgcttttgctcttggtgtttctattcctgtctacttcagttatttgttaattctaaattggagtttcagttggttaatgctcatgaagtttgaactt

SEQ ID NO: 51572 - DNA, 396 bp, Glycine max
cccacgcgtccgggaaaatctacactgcttacagccatcggttgtcgggaacttccaattcccgaccacatggacatatatcatctaaccagggagattgatgcctctgatatgtctgcattggaagctgtcataagctgtgacgaagaaagattgaaattggagaaagaagcagaagctttagctgcacaagtttgtttaagtttatgcatctagattttgcccctttgttttacaattttgtatggcttgctaactttgaatgagtgattatggttccaggatgatggaggtggtgaatcccttgaacgcatttatgaacgattggatgccctagatgcagccactgcagaaaagcgtgctgctgaaatcttacatggtcttggctttgacaag

SEQ ID NO: 51573 - DNA, 429 bp, Glycine max
gtgcgcaaggggcgcaagaagaccgggctgccaaccgcagcggtggagaccgcggcgaccgatggtacggcgacaacaccggcgacggcacaacaacagcagcagcgcaactgcaactcggaacgccttcggcaactgatcatcgagaacatccattcaaagccatccgtggccaagcgccaaattcaatccaaagtggccgaggagatcaacggaaagattgacgtaatatgcgcacgacatgcgttcagttacattgtcaattcagaattgttttgtgaggccgaacataacggagtgatctggttgtgcttcaaacaacagtgatcaatgatcaatgatcagccgatgaaaaaacaaacgatcaaagaaatttgataaaattgaatgacactaaatttaatttatgatgaaatcacattggatacc

SEQ ID NO: 51574 - DNA, 371 bp, Glycine max
gtttgaggtaattttaattgctaattgtgccggtccaacaatgggcgactccaaagccaacagcaaatccgtcgctgcggcacaaacgattccgaactcagtcaaatttatgttcggcggaattgcgggaatgggtgccactctgttcgtgcagccgttggacctggtcaagaatcggatgcaactgtcgggaatgcagggcacccgcgagttttcctcctccttccacgccctgcgcacaatcgtcgcccgcgagggaccgctggcgctttacaacggcctctccgctgggttggctcgtcaggccacgtacaccaccactcggctgggcatttacacgtggttgctcgagcagttcagcaacaacaaca

SEQ ID NO: 51575 - DNA, 299 bp, Glycine max
tttgaattgggtgaaagttacaggcgagtaccttacctttccaggtggtggaacccaattcaaacacggtgcacttcattacattgacaccatacaacagtctgtaccagatattgcttggggcaatcgctcacgtgtgattttagatgttgggtgtggtgttgccagctttggaggctttctctttgaaagagatgtacttacaatgtcattggcaccaaaagatgaacatgaagctcaggttcagtttgcacttgaaagagggattcctgctatatctgctgtgatgggcacaaaga

SEQ ID NO: 51576 - DNA, 388 bp, Glycine max
tcgcccacgcgtccgcccacgcgtccgcccacgcgtgcggtgaacaattggggctgctaaaagtcattgttgtgcaagggaaaaggttggtgatccgggatttcaagaccagtgatccttatgttgtgctcaagctagggaatcagactgcaaagaccaaggtaattaatagctgcttgaatcctgtttggaatgaggagctgaatttcactctgacagaacccttgggagttctgaatttggaagtgtttgataaagatcttctgaaggctgatgacaagatggggaatgctttcctgaaccttcaaccaatagtctctgcagccagattaagagacatcttaagagtgtcctctggtgagacgacattaaggaaggtcatacctga

SEQ ID NO: 51577 - DNA, 422 bp, Glycine max
gagttactgtaaatttttgtattgaatttctgctaaccaaaaaacgacgcgctgaactgtgccatggcaccgcacgatctccaccgtccgttcaagcgaccggcgatctccgatcaagagcggcgcagggaacagtctctgctccgccaggcacagaatcgccaagacgcccagcgccacgcgcgcttcttggcctcagccgcactctctctcccaccccaatcctccgaaccagaatccgaaccaaaacccgaacccgaattcgaactcgcggaattcgaagccggttcggattccggctacgagagcctcgactcatcggagcgtcgaagctgaaagccgtggaagctcgcaagtggttcgcgaagcagctcatgctccccgagtggatgatcgatattcccaacaacctcgctcaagac

SEQ ID NO: 51578 - DNA, 437 bp, Glycine max
gcgattcaaaagaaggcaaaatttgacataacggacctcaatacaattaaggtggcaaaatcttgttttgttccagctctactaggccatgccattgatgatgattttatacagccccatcactctgatcgaatatttgaggcttacatgggagacaaaaacataattaaatttgacggagatcacaattctcctcgtcctcagttttactttgattccataaacatcttttttcacaatgttttgcaacctccggaagatgaggttggggaatcattttttgaccccatgaatgattactttggtaaggatgtttggagatctgtgcacgaattaggctacagcaatgaatcatcatctaaaaacaaagatgcagaaccatcaacaagcagcacgataaatgccattgagcaggtccgttcaagacgaccaatgag

SEQ ID NO: 51579 - DNA, 448 bp, Glycine max
gttttggtgtacttatttcacgtagaaattaagagggtatgctattatgcctattacgtagttagagcatcaggaagggtagaccgggagccaagcaccttgccaccgacatctgggaaagactcaaatccaggtaaggactttaccttcccattggcatttacagacacaggatacttcattaggtgcccttgcaatggactataatcatcagctgtgtacttcttccagttgtcttcagcaatcttgttcacacttttcacacactccaaacattcaggctccttgaagcaagcttctatggtccccgtgtgttctgcccacaaagacattctatacccatatacctgcaaataccttgatttaagtcctccggatccggaacgagaaatttctgggaaatctaactaagaacggttcttaactttaagtacccatttaaaaacta

SEQ ID NO: 51580 - DNA, 467 bp, Glycine max
  unsure (1)..(467): unsure at all n locations
cgtacgcgtgggtagcgccacattcctgctatttatatctttatctttcatctcaaacttcagattggtagacctgtggtgttctcattggctgctgatggtgaggctggtgtaagaaaggtacttcaaatgcttcgtgatgagcttgaattaactatggcactaagtggttgtcgttcactcaaggagataactcgtgaccatgttgtcacagagtgggatcgtccaaaattttctcccaagttataagatggcgggactcaaccttgttcttctataacctttgttcttattccatgcttcagtagaaaactttgttgttacagtgagtcaaacattagtcatccattagtaattgttacttctttattagctgtacagaataggnttctacctaaactcatttcattgcacttggtgctaagattttggtaactctagaaacatgattgtcaacaaaatgtaca

SEQ ID NO: 51581 - DNA, 411 bp, Glycine max
tctacgctttcgctcatgtagaagggtgagttcttggttaagaagttttataaataatatattactacttttgagtctatttaattcacaactgcattatattatctagagattctagactacaattccattaaaaattatgcactttatctgctgttctttcctagtgttgggtgttttcagtttgtatctgcagggccttaatagtgaacattggagaaatgatggagaggtgaacaaattgtttatacaggtcaacacttcacagggttatgccaacaggaaaagaacgttattctgtggcattcttcttcgacccggcctcagactgtgtggtggaatgctttgaaagttgctgcagtgaatcatctcctcccagattccctccaatacgtagtggggactacttga

SEQ ID NO: 51582 - DNA, 403 bp, Glycine max
  unsure (1)..(403): unsure at all n locations
tcgttttcgcgtgggcttttccagttggaagttcaacgacgtaaacatatgtgtatttgttggtgttgaatgctggcaacatggggagaataaagtgctaaatctcaacctcacaaacatgggtctgaagggtgagtttccacgaggccttaggggttgctcttcgttggtaggcttagacctttcacacaacgagctcacaggacccatcccatctgatatatccacattactcccttatgctacttccattgacctctcaaataacaagtttaatggggaaattccaccaagtttggctaactgcagttacctgaattctcttagacttgataacaacatgttaagcggtcatatcccacaagaacttgngcagcttcaaaggattagaaacatttctttt

SEQ ID NO: 51583 - DNA, 303 bp, Glycine max
ctttgatggtttcaatcaaacgagagcaggaggaaatactggaaatgaaaccagctgaggcccttgccgagctaatgtatcactgtgttgcacgaaaaccttgccccaatgataaattaattaagaatatatgtagattaacttgcatggatccctctgagacccctcaagccaaatcccttagttccatggagagtattgaagaccaaggttttctgtcttgtagaactcctgtgagcaaacagaagataaaggtccatgtgctggctggagaggatcggtcaaaggtggagggattattaa

SEQ ID NO: 51584 - DNA, 362 bp, Glycine max
cccacgcgttcgcccacgcgtccgcccacgcgtccgcccacgcgtacgctttgaactacgctccattgcttcagatcaagcatcatattgtagatttcgagtttttctctcgaggatccggtgaaacgacatggcgatggtggaccagcctctgtatccgattgccgttttgatcgacgagttgaagaacgaggacattcagctgcgcctgaactcgatccggaggctctccacgatcgcgcgcgcgctcggtgaggaccgcacgcggaaggagctgattccgttcctcagtgagaacaacgacgatgacgacgaagtgcttctcgcaatggccgaggaattaggcgtcttcattccctacg

SEQ ID NO: 51585 - DNA, 407 bp, Glycine max
aatggattagggaggcacaacaagtcaacataattactatatattccccaactgaaatccaaaataagaggtcattgtgggagcatgtaaggcagcagaaacactcattgtccggggacctttggtgtatttgtggtgacttcaacagcataagagaaccagctgaaaggttcggcataagtcaaagggacccagggaacagcaccatcaaagagttcaatgattggataaatgatctggaggtagttgaggcaccttggctgggaaggaaattcacctgggtcagactaaatggaacctccaggagtaagcttgacaggttcctgctctcccctgaatggctggacaaatggcctgcaagcactcaaatcaccttacccagaaacttttcagaacattgtccacta

SEQ ID NO: 51586 - DNA, 453 bp, Glycine max
ctttgggagcttttaactggagaagtgagtactttcatgccaggcagtgtgggctttggtgctttatcatttattccctaccaatcttatctcattgtatatactattttttgtaatcagctgccttactcttgcttgactccattacaagcagcagttggcgtggtgcagaaggtttctattcgttttctttttgcaaataatttcgttgtaaaacaatttcttgtctatgcatgatgattctatgtggcttaaattgctattagggcctacggcctacaattcccaaaaatacacacccaagactttctgaacttcttcagcggtgctggcaacaagatccaacgcagagaccaaatttctctgaagtaatagaaattcttcagcagatagcaaaagaggtcaatgatcacaaagataaagcatcccatggctttctctcagctcttagac

SEQ ID NO: 51587 - DNA, 467 bp, Glycine max
cccacgcgtccgcggacgcgtgggtttatatgtcaaaatctattttgttccagatcttgttaatgtgtttgaggtgtttctacctcaacttctgctgtatcccaatccatcagaccccttgaatggagaagctgccgctttaatgatgcgtgaccgaccaagttatgaacaaagggttaaagttgttttattttggtcttcctcatgtcagccacaatcaaaatctaagccaagagggactattgaactaacaacattttagacctctgggtagtagatgtagacctaccatcactactcagcaaattggatgtgcacatctgcttgaatgtgtcatgcacatatacactctcacaaacaattataagaactttgttttttataattcttaacctcatttgattatcttattaatatcattaacacaacttgctgctcttctactaactgcattataatctttaaca

SEQ ID NO: 51588 - DNA, 231 bp, Glycine max
gtgcagcggacaatcatgcaactaaaatacccctaatggcgcacgaagaaattctgccttgtagggcaagggatgtcccaactgtgatggagagtaaaaatagcaagcctcaaactactgtaatgcatgcgggagctatagaaatcataatggatagtatcgcatgtcccgactgcaacatataaggtgcaatgctttcggttgctacttatgataccaatcctgaaaatg

SEQ ID NO: 51589 - DNA, 487 bp, Glycine max
tccttctcatcattctcatattattgtcgccacttcgacctcaatcaccctcgcgccctcgctcttcccttcctggtggcgacaatgtcgactcctgctaggaagaggctgatgagagacttcaagaggctgcaacaagacccgcctgcagggatcagcggtgccccccaggataacaacataatgctgtggaatgctgtcatatttggtcctgatgatactccatgggatggaggcacgttcaagttgactctccagtttactgaggattatccaaataaaccaccaactgtgcgatttgtgtctcgcatgtttcatccaaatatttatgctgatggaagtatttgtttggatatactacaaaatcagtggagtcctatatatgatgtggctgctatactcacatctatccagcatgacttgggtctgcagtaattcgttgtttggagtggctgggcttggctctaacacaagtgatggacatgga

SEQ ID NO: 51590 - DNA, 383 bp, Glycine max
actgaagaaggtattaaggagcctcaggcaactttttcagcttgttttggtgcagcattcattatgctacaccctacaaagtatgcagcaatgcttgctgaaaagatgcagaagcatggtgctactggatggcttgttaacactggttggtctgctggaaggtatataaatctgtcattgaaaattgagatagaatttctctctaaatagtattgtaatttgtaccctacaaaatctagaactcaccaagttcttgcacatgtcaaactgcagctatggtaatggaagccgtattaaactacaatacacaaggaaaatcattgatgctattcactccggaagtctcctgaatgcagagtacaagaagactgaaatttttgggc

SEQ ID NO: 51591 - DNA, 282 bp, Glycine max
ctttcgcgtccgatctccttgcaatgcttacaccttgcgttttttcgtttcactaataataatactaatactaatacatcataacaccaaaccagaacaatcaaaacaaactttctctgtgtctcttcaacgcaacagcacaatggagcggaagatcattgattttgaccaaggctgggattatatgcagaaggggattaccaagctgaagagaattcttgaaggagcaccggaaactcctttcagttctgaggaatacatgatgctatacacaaccattta

SEQ ID NO: 51592 - DNA, 350 bp, Glycine max
cccacgcgttcgcccacgcgtccgccagcatctggtgatgatgtggatatggaaaatatgggaattcatggtttactggctccattgaaagcttttggatataccgtcgaatccttggaaatgttgttacttcccatggcaaaagatggtacggaagcccttgggtcaatgggaaatgatactccattagccatcatgtctaatagagaaaaactcacttttgagtactttaagcaaatgtttgcccaagtgacaaacccaccgattgatcctattcgagagaaaatagtcacgtccacagaatgtatggctggtccagaaggtgacttaacagaaatcactgaggaaca

SEQ ID NO: 51593 - DNA, 387 bp, Glycine max
cctacgcgttcggatttattgtaattttgtcacgcatttaaggtaggctgaaccaccgaatcatcccatccctcctaaaaaaatttggacgcaaaatttttaaatggccgaatccggtgaacatgaccatgactttacatctggcgagtcgggtgcagctgccacttacccaaagcaatgctctgccttgcgcaagaatgagttcgtcatgatcaaaggccgtccttgcaaagttgtcgagatgagcacctcgaagaccgggaagcacggccatgccaaggtgcacctggttgcgttggacattttcaccaacaaaaagttggaagacatttgcccgtccacccacaacatggaagtgccagtggtcaagcgcaaggagtaccagct

SEQ ID NO: 51594 - DNA, 371 bp, Glycine max
ggtaaacaacgacattatgtccgatattatctggaacgaatacatttggctgccgcccaatatgacctgggccgacttggagtcccgggaaggcctcaactacccccaatttcgtgagctcagttacgcttttctggctgcttgcatcatcaccgtcgtgcgcatatgcaccgaagcatttgtattcgtcccaattggtttttatggcggatggatggatgaaaaaaagggcagcatttattatcgcatttgggaccatttgttctttggatttgccggcagaagcaaattcaaaagggttgctgagacgggttggcgcttcacttattattccatcatttggttcgtcggagtgtccgtgctctacaaag

SEQ ID NO: 51595 - DNA, 390 bp, Glycine max
tttccggatgatgggcgcgtgtggcggtttttaaagtcggcggtgaattcgggcggaaaatgcggcggcgggccgccgagtatcggcgcccggttcggcggcggttctctcattggatctggttgcttctcggcgcgttctcccttgctggtttggttttgttcttcgtgcagcacaatcaccgcgaggatcggatccaacagccccttctggagaaaaatgctatagttgaacatattgccaagagatataattttactgaggaaattttaagtgcaacatccttttcacggcagttagcggagcaaatggttctggccaaggcttatgtgattattgccaaagagcacaataatcttcaccttgcctgggagcttagctcaaagatta

SEQ ID NO: 51596 - DNA, 284 bp, Glycine max
ttgggatgcttgggcggacgcgtgggcggacgcgtgggcggacgcgtgggtttcgaagacaatcttacaccttggatggagggctttttgcaattgttggagttaaaactgcccgagcttgaggcgaagtcggtcgacttggaacctaatgagcatgacaaacttcgctgtgaaatttgcgagatcgccactcttttctcgcagcggtttgaagagtgctttattccctataccgagcgattcattgcctcggtttggaatctccttgtcatgacggacagccg

SEQ ID NO: 51597 - DNA, 419 bp, Glycine max
ttttaatagtggcaagggagaaaggagttatgcaaacaactccatgctacaaagaaaattaatgattaaaggcaaacatatactagaagaaactataacgagattttatagcaattattctccaagctgcatgaaagtggcagatttaggttgttctgtaggaccaaatacacttcttgtgatatcaaatatcattgacattgttgataccacatgcacccgcttgaatcaagaaccacccacgttccaattttatctcaatgatttgtttggaaatgatttcaataccaccttcaagtctcttcctgatttctataaaagattggatgaagataagggacacaagtttggttcatgctttattaatgctaccccgggatccttccatgggaggctctttcccaataattccataaacc

SEQ ID NO: 51598 - DNA, 365 bp, Glycine max
tctacgcgtccgcagatttggacgacaccttgtacccgtcaagcaccggtattgacaagtgcgtcaagaaaaacatccaactctttctcatccagaaatgcggattctcagaatacgaagccttcaccctccgagttgatctcttcaaaacctacggaagcacccttgccggtttaagagtcagtaataataacacatcaatcaatgtcttattacaagctctaacacaccaatatccccatctcaactctgtttccttcttcgttactttgcaggcactaggccatgatatcaccgcagaggagtaccatggtttcgtgcacggaaggctaccttacgactccatcaaccctgatcattactta

SEQ ID NO: 51599 - DNA, 251 bp, Glycine max
ctttgtttgaaacggcaaagcaagctttaatggagatggtcattttgccaactaaaagaagagacttgcttacgggacttccaaggccagccagaggtttgcttctctttggtccgcctggtaatggaaaaaccatgcttgccaaagcagtggcttcagaatcacaagcaacattttttaatgtcacagcagcttccttgacatcaaaatgggtgggtgaagctgaaaagcttgtccggacactattcatg

SEQ ID NO: 51600 - DNA, 309 bp, Glycine max
tggacgcgtgggcttaaagggataggttgcggaccgtttctggagagattcaatcaccaatgggtgtagcctcagaggaattcattgagccaagggagcctgtggctgaaattccaatcctaagagcaggccttgctcttgctgaacatgcatcatcgatcttgcctgcaacaaaaacatatcatttagagatggggaaactatacagcccactatatatttaaacaagttacccgggaaatttccagaaggatctaaagtttttgtgggtgatactatgctggcaacaggcggcactatagtggcagc

SEQ ID NO: 51601 - DNA, 455 bp, Glycine max
cctacgcgttctacgcccttgagctgaagcttcaatctccaatttggcaggttcgcatgaaagctgtttgtgtccttgaggccatccttagaaagaaggacgatgatcacttttcaccagtggaatcctacttcactgaaaataaagatgtggtgctgagatgttctgaatctccccaagcctctttaagggaaagggctatgaagtaatgaaaaaactagggaaccaggaagaagaaaaattggtcatttagagtcaactaaggttcttggccttttaggtggaggccagccaaacagctctacagttaattcagagaagactgtgaaaacagagaatgctactgttgctgagttgcctgacttgatagacactggtgattcaaatgattaccatggaactgatgacactctaaagggtacaagtgatcaaaatatagcaaatttgacatcatc

SEQ ID NO: 51602 - DNA, 328 bp, Glycine max
gttcgcgttcttctcccggaagctccatagtgctgctccttgcagctctaatcctatcccctcaagttctcgcaaactatgagaatcccccagcgtacaagcctcccactgagaaaccaccagtttataagcccccagttgagaagcctcctgtttacaaacctccagatgaaaaccccccaatttataagcctccagtagagaagccaccaggggacaagcccccagttgagaaacccccagtgtacaagcccccagatgaaaaaccaccagcgtacaagcccccagttgagaaaccaccagggtgcaagcccccagttgaaaaacc

SEQ ID NO: 51603 - DNA, 306 bp, Glycine max
gttttcctgaaggccgtcatatccttcatatattcacaacttcttccatggaggactgggagggtctctcaagagtagaatatgaggcaaagaagcagcttgtagcagatgaaatcacaagcagattagagaataaattgtttcctggtcttagatcatccattgattttatggaggtagggacacctaagacacaccggcgatacctggctcgtgatgagggaacttatggtccaatgccacgcagaatcccaaaggggttattgggaatgccattcaataccacaggcatagatggtctttact

SEQ ID NO: 51604 - DNA, 315 bp, Glycine max
ctttatgacagaaaccacggattagcaggcttttaagaccctctctgacttgccgaaaagacaacgctagagttaggaggatcctgatgcacccggggacggatctaaaaactgtctcaagaaaagcaaagggcatcatattactatgaaggcactaattcttgttggagggtttggaacaaggttgaggccattgacactcagagttcccaagcctattgataataatgctaacaagcccatgattctgcatcagatagaagctctcaaagccattggcgtcaatgaagtggtactagctatcaattaccaacc

SEQ ID NO: 51605 - DNA, 403 bp, Glycine max
attatatggaagccattaaaaaaatgaattataggggatggcgcagcaaagttatagacataacttattcaaaggaatgtggtaagagagggttggacgaagccttggacaggatgtgtgcagaggcacatgatgcaattaatgaaggctacaccactcttgtgctgtctgatagagccttctcaaagaaacgcatctctgtgagctccctcctggctgttggtgctgttcatcagcatctagttaaaactcttgagcgcactagggttgccttgatagttgaatctgctgagccacgcaaagtgcatcatttctgcacccttgttggttttggtgctgatgctatatgcccatatttggcaatagatgcaatttggcgcctgcaggttgatggaaagatacc

SEQ ID NO: 51606 - DNA, 378 bp, Glycine max
cctacgcgtccgacatggtcatgcacacggccatcttccctctcatgatcatcaatcatcggcacttcttcgtcatagggtcatatcacaggtgttggagctaggaattattgttcattctatcatcattggaatttctatgggagcttcagaaagtcctaaaacaataaggccactggtagctgcattgacttttcatcaattttttgaaggcatgggacttggaagttgtataattcaggtactatatgttatatatcattgtcctatattagttagttcacgtgcatcagatatattcgattcatgaaatttcttgattgatttacaatgatcaatgaaccaactggaaaacaaatatgaagaatcaaaatgatt

SEQ ID NO: 51607 - DNA, 185 bp, Glycine max
aacgcagcttcaagggacgaaggatgtgatcctggagattcatgtggatgacacaactggtgcaaatgacaaagattcactaatggaaataagtttccatataccaaattccaacacccaaattgatggtgatgaaaatggcacccctgctcaggtgttccgagacaaaattatgtacatggctg

SEQ ID NO: 51608 - DNA, 269 bp, Glycine max
  unsure (1)..(269): unsure at all n locations
ttttcggtatgaagaaaanctntaaganggcacaaggggagtacattgctcctgagaagattgaaaacgtatatgccaaatgcaaatttgtggcgcaatgctttgtatatggcgatagcctaaatgcttctttggtagctgttgtctctgtggatcatgataacttgaaagcatgggctgcttcagaaggaataatggtagtataaactttaagcttgctctaatctttattccgctttgtcatgcatgtactaaaaagttcgtctaga

SEQ ID NO: 51609 - DNA, 400 bp, Glycine max
tttccgctcactcgtccgcggacgcgtgggttttgggggtgctcggttcactgtattccgcggtggccgctcggccggggtgctttcgcacggcggaggggcgcgtggcgggcgcggcggacattgaaaagacgcacaatctcgcttctgcagcacatcaattggcggacaacgacgcaatgcgagcggagagcatgtaccatttggctcgttgttaccataagaagcaggactatcaccacgcatttcagttctattaccaggccacaactctttcgcatccgaaatttgtcctcccctattttggacttggccaaatttacatttatcgtgaagaatatgaaaatgcgattgtcgcctttgaaaaagtgctcaaaatggtgcccaatgacattgacac

SEQ ID NO: 51610 - DNA, 471 bp, Glycine max
  unsure (1)..(471): unsure at all n locations
tcggccataccattttttaaccaaaactatnacctctctctcttttttctctaacaaacactccataaacggaaaagaaaagccacacaacaattaattaagttgttaaatttttgtgagatggagaggagtttatcaggaagtagtgaagaggagatgtcaataacgaaaggtccatggacagaggaagaggattctgttctcttcaattacatcactgtccatggggaaggtcactggaactctgtcgctcgctacacaggtctaaaacgaacaggcaaaagctgcagattaagatggttaaactacttgcgtccaaatgttcgacgtgggaacataaccctcgaagaacagctcttgattcttgacctccattcccgttggggcaacaggtattatcatttatgtttattattcattaaattttttaggttaaaatattccttggttcatgaatttttcttattttta

SEQ ID NO: 51611 - DNA, 376 bp, Glycine max
cttccgcttcggatttccatcttcacccaccgaagaatctctttcttcttcttcttcttcttcttcttctgaatcgttgtggagtagtaacaggtggcagcaccagcagggggagccatctttggagtagacccaagttctgaattgattcttcagttaagaaaggaatttcatttcggcttctcaagctggtttctgaggtgcccaacaaaaaatggcaaagcgtggatacaaaatacaggaatttgtggctcattcagcaagcgtcaattgtttaaatattggaaagaaggcgtgccgtcttttcattacaggaggggatgatcacaaggtcaatctgtggacaattggcaaaccaacttttttaacgagccta

SEQ ID NO: 51612 - DNA, 379 bp, Glycine max
tcgccctcattggggttttactttttatcattgatccttctcttccctctgccgccgcaccctgcaaattcaatggcttcagagaagaaactatcgaacccaatgagggaaataaaggtgcagaaactcgtcctcaatatctccgttggtgagagtggagatcgtctcaccagagccgccaaggtgttggaacagcttagtggccaaaccccagtgttttccaaagcaaggtacactgttcggtcctttgggattagaagaaatgagaagattgcatgctatgtcactgttagaggtgataaggctatgcaacttttggagagtggtttaaaggtgaaggaatatgaacttctcagaaggaacttcagtgatactggct

SEQ ID NO: 51613 - DNA, 404 bp, Glycine max
cttgcaaatcatctcaaggagacttctgagttccaactccaaaaccttgcctcctcactttcatgcatcaaagacttccaatcaaagctctcttccctctctctccccaacaacctcgttgacacatgcttcgaccctcttcagtttgtgatctccccaaacatctgtgctggaattcaaaccatccctgattggacaaaaaaagttggtcagtccacaccactcaacactgcttgcagatcagatctcactgacatctctctctgtgatgtgtgtctacaagctggattgcaggtcaagcagaagcttatttccattgatggtaatgcctcacattccattgattgtttttactttgccattctctatgctgctgggattgtcaatgagtatggacctgaaag

SEQ ID NO: 51614 - DNA, 387 bp, Glycine max
cttctctgttggagccggaaaatggacaagaagctgcccctcttgttcattttttcagcagccttggtgatggaagcagtgttgttggttagtgttgtggctgaaccagtggaagataaacaagctttgcttgatttccttgacaacatgagtcactctcctcatgtcaactgggatgagaacacttctgtttgccaaagctggagaggagtgatttgcaactctgacgagtcccgagtcatagaacttcgattgcctggagctgggttgagtggtccaatctctcccaacaccctcagtcgcctctcggcgcttgaggttgttagtcttagatcaaatggtataagtggccctttccctgatggtttctctgagctgaaaaacttg

SEQ ID NO: 51615 - DNA, 391 bp, Glycine max
gtgaatgcgacccctgaaattcctcaaagcaacaccatctacatcaacaacctcaacgagaaaattaagattgatggtacgctatttgtttcgtgtttccgcgacttcaatttccgatggattatacgttttctgagttgtcgtatgttgttggatgcagagttgaagaagtctctgaacgctgttttcactcagttcgggaagatacttgaggtgttagctttcaaaaccctaaagcacaaaggtcaagcttgggtggtctttgaagatgcctcttctgcttccaacgccctaaggcaaatgcaaggtttccccttctatgataagcccatgagaatacagtatgcaaagaccaaatctgatataatagcaaaagcagatggtactttcg

SEQ ID NO: 51616 - DNA, 141 bp, Glycine max
tcgcttttttttaaccaaaaccaacatcaactgtggtacgttatcagttgcactacgatgatcagggtcgcaaggtctactagtatggttacttttagaggcaaactgactaatgtggcaacccggttcatgccactagtg

SEQ ID NO: 51617 - DNA, 482 bp, Glycine max
atgtgagaaaaaataattatcaaagagcataatgtcagggatcattcacaagattggggagacccttcatgtgggagggcacaagaaggaggaggagcataagggtgagcaccatgctggagaatacaaaggggagcaccatggtgaacacagtagtgagtacaaaggagagcatcatggtgaacacaaagctggagagtaccatggtgagcacaagccagagcacaaagaggggttcctagacaaagtcaaggacaagatccatggtgagggcggcgccgccgagggcgagaagaagaagaaggagaagaagaagaaggagcatggccatgagcatggccatgacagcagcagcagcagtgacagtgattaaactgctgcatcacctatatatttaaaaggtttatgggaccatagtagcgagggctgtgccttaaattctctctctctctctctctctctctctctctctctctcttttt

SEQ ID NO: 51618 - DNA, 430 bp, Glycine max
cccacgcgtccggtttgcaatgtctatggatgaactgaagaaacgcgccaaagccattggtacatttgaggaactaagaaaaatcatagatatccgtggtgtgaatcggtacaacccaaacaatgcgccggttttggaacgggcggtggatttgatgatcaaagagacgaaatacgacaaggacattctgatgacactgttgaagctgtaccagttgaacccatttctttacaacgaaaagtacgtgtgccttgtgctattgaaaacgatgaccaattttccacgcaacgattttgctttggcaaaatatttggtggacgctgccaaagtgaacgctccggagttgcgacgcgtctgtcagattggctctcttcttgagtcttgcaatttcgcgctcttttggcgtctcgtcgacggacggtacaaaccc

SEQ ID NO: 51619 - DNA, 426 bp, Glycine max
ctttacgcgtgggcggacgcgtgggcggacgcgtgggcgattaattactaccaaccgtctatcttatccaaagagatactggaatcgtgtggcaccctataccccccggtagaattaattcgtccacccaactttacaacgtatcttgggctattacaacaaactatgacgtctacagcaactcttgaggcgcgcataaagtcgtataagggtaggaaaaacaagtggccttacaaacgtaaagacactgttcccctagacaagctggcaattgcggggttcatacacaaacccttgtctaatcacacagataacgttgagtgttttttatgtgaaaccgccgtcaatggctgggattcgcacgacaacgatccgtttcgaaggcacatccaacatgcgcccgcatgtgcctgggcaatgcttatt

SEQ ID NO: 51620 - DNA, 465 bp, Glycine max
  unsure (1)..(465): unsure at all n locations
ctttatataggcaacatttgctgaaaataaaacagacacttgaaaatctagatatgcctgaaatcaaagtgggcagtgtcgaacaatttcaaggacaagagaaggaggttattatcatatctacagttcgatcaactatcaaacacaatgagtttgacagagtccactgtcttggctttttgagcaattatagaaggtttaatgtggctataacccgtgctatatcattgctggttataattgggaacccgcatattatctgcaaggacgaccattggagccaaatgttgtggcactgtgtggacaattcatcttatcagggttgttctcttcctgaaagggtggaactttatgaagatgaggacactggagagaacactngctttactgaagataatgcatcgccctcaaacaatgtagaatggggtcaagattcatcaaataatggagaatggggtcaagatt

SEQ ID NO: 51621 - DNA, 421 bp, Glycine max
  unsure (1)..(421): unsure at all n locations
cgttcgatcagcgaattcgtcaatcaaaatcgcgaccacagatcttgcgccatcattcaagacgataccaccccaccatcgccgaattcaaaatcaatcgtctgacgaataccggctataaacttagaaccaacaaacaccgacaacatgattattcctatccgctgcttctcgtgtggcaaggtgacgggcgatctctgggagaagttcgtcaagcttattgaggaggatggccttagcgatggcgacgccctggatcaactcgggtgcaagaggtactgctgccgacgcatggtcatgacacatgtcgacctcatcgagaaacttctcaagtacacgcccgatggtcgtaactacaagaagatcgagatgcaacanacacaccaggacgcttaaattcgggttttgacctacatatatg

SEQ ID NO: 51622 - DNA, 375 bp, Glycine max
cctcacgcgtccgtttgtattatattttataattaatggccgctgataattttgacgctcaacgtattttgaacattttggccgagagggacaatttccaaagtaatgaactcgccgatcagttgtccattgaccaccagcgactgatcggtgccatcaagagtctgcaggtcaaagaagggttggtttgcacttcggaagtcaaaatcaaacgcatcgaattgaccgcggaaggcgaggaaattatccaaaagggttcccacgagttcaatgtgtacaaaatcgtcggagaaaagggcatttccgttgccaaagggctgaacttcacgacgactgtgcagaagcaggaattggatttgacttcggagatgattg

SEQ ID NO: 51623 - DNA, 436 bp, Glycine max
  unsure (1)..(436): unsure at all n locations
ctggacgagaggtcggtgttagagtacgtaaagggcgttccaggcctgtggtcgaagctggaattggatgatgataacataataaccgtgaaagagatcggagatggtaacctcaactttgtgtttgtggtggccaactccgttatcatcaagcaggctctgccttacattcgttgcataggggaatcatggccactcacaaaggacagagcatactttgaggccatggcactccaagagcagggacgcttaactcctcaccatgtcccccaagtctatcattttgacccaaccatgtccttgatcgccatgcgttatctggagcctcctcacatagtactcagaaaaggcttgattgctggaattcagtatccactcctagcacgccacatggcacatttcatggcaaacactntcttctttacttctctccttt

SEQ ID NO: 51624 - DNA, 320 bp, Glycine max
ccctcgcgtccgcttatttttgatcctttattctcctacaatacttcattatgttgttgcggataatttgttctgctgtttttctgctcccattcttcgtttccgactctttggctaaagttgtgagctgcgagggctttgtcaaaaccaaaattcccggcattgacctctccaaagttcaggctaaactcttcacgaaccacggcaatttgaagtatgagacggaatgcaatgcgcagaatggtcactttctgatcccaatttacaacaaagggcattatgtgatcaaagtgtcagggccaaccggatggatattttca

SEQ ID NO: 51625 - DNA, 426 bp, Glycine max
aaactaaacctttgccgtcccctgctccattttcttttcctcctcctccatcacattttcgcctcctcatgtcccctccctgctccttttccccttcctccgcctcctcttcctctgacagtccctcagcagaaggccaagcccagcaaaatggccaagttttggccccccgtccattgcccacgtgggaggaaatccgtgccgcggtgcccaaagagtgttttgaaaagtctctccttcgttctctgtactatttggccatcgatttgctcgtcattggcttcctttacgccgttgtgccttttgtagagacaaatttcggactgatcggactggttttctggtactgcttgctcggcatgtttttgtcctctctgttttgcgttggccatgactgcggccacggcactttttccgattggacat

SEQ ID NO: 51626 - DNA, 402 bp, Glycine max
ttaatagtgctcttctaagcacaaatccaagttttcctgacactaaccattctagaggccaatctctagatcttgggacagaaaatactgctacaagttctgccagaaactcggacattgatcatgccttaagtcgagtctctagttgcaaaagctttatttcagatactgaatcttggatgtatgatcaaaattctagcaaggaagtgcaactagaaactacacttccatcacctaataggcaggcaaaatttaaccttgagctggaaaagttgagaattgaactaagacatgcccaaggactgcatgcagtagctcaaagtgagaaaattgaagcatcccgaaagctaaatgagctaagcaagagacgatcagaagaaaccatgaaaactaaagagatta

SEQ ID NO: 51627 - DNA, 326 bp, Glycine max
ccctcgcgtccgcggacgcgtggggtaatattgcttggagatttaaattacagaatttctctaccggaagaaacaacacgcttacttgttgaaaatgaagactgggattacctactagaatatgatcagctaacaatggagctaatgaggggaaacatgttaaaagaatggcatgaaggagcaatcacatttgctccaacctacaagtattgtccaaattcagacatgtactatggatgttgttatcaaggcaaaaaggcagggaagaagcgagcaccagcatggtgtgacagaattatatggtttggcgatggtctaaagcaaat

SEQ ID NO: 51628 - DNA, 324 bp, Glycine max
ccctttcattgttttctgtgtgttttctatggcggttttaccaagtagctcctcaagcttggaattgaccatatctgtacctggttttgcttcttcaccaacccttcttccctcatcatctgtgaaagaattggacataaatcaagtacctcttgaagaagattggatggcatcaaacatggaagatgaagaagaaagcagcaatggagaacctcctcgaaagaaactccgtctcacaaaggaacaatctcttctccttgaagaaagctttagacaaaaccacacgttgaacccaaagcagaaagagtctttggcaatgcaact

SEQ ID NO: 51629 - DNA, 334 bp, Glycine max
ccctcgcgtccgaatcaccgttccattttcatttcgctcagttccatagttcgctttttttttttttaatttgatttaatcagaccgagtgctgttggtgtcagcatgcgctagcttcgtcgtcgtcgtcatcgattttccggtttgtgattctcgtgattcttctcgggccgaattattgggtttgacggcatggatttggtaccgagcgtcaaggaagttgaactattttcgtataaaagagctcaaagatgtgctcactcagttacacctttcaaagcagggaaagaagcaggatcttgttgatcgcatattatccgttctctcagatgaa

SEQ ID NO: 51630 - DNA, 474 bp, Glycine max
  unsure (1)..(474): unsure at all n locations
ttgcgctcttatgccttatttttggaggagaggctggaatgtttccgtgtgttgaagtatgacattgaggcagaccgtcctaggaccaaagatttggatactgcagaactgttagagcagttgccagctttacagcaacttctcaatcgggttattggttgccagccacacagggcagctgtaaataactttgtcattcagttagcactctcaatggttgcttcagaaagcattaaaatttatcaagctattagtgatggaacagtcaatatggttgataagttttttgagatgcaacgccatgatgctctgaaagctcttgatatatacaggagggttgggcaccaggctgagagactgtcagagttttatgaaatatgccgtaatcttgacattggacggngagagaagtttattaaagttgagcagcccccttcctcatttctgcaagccatggaagagtatgtcaaagat

SEQ ID NO: 51631 - DNA, 229 bp, Glycine max
tcggtgaattcagggccaaatacagactcattagctgatgctttagcaattgcgcaacaccatgatgcagtcactggcacagaaaagcagcatgtggccaatgattattctaagcgattgtcaataggctttaaggaggcagaggaattggtttcatcatcgctggcttgcttggttgagtcaccgttgcttactagatgtcaaaatccagttacaaagtttcaacaat

SEQ ID NO: 51632 - DNA, 437 bp, Glycine max
cggattcgtgggtttgaggcgcagcactttccaagctccactaaatttgtttttttgtgaataacagtcagcaaaaacaaagcaaaaatggacgccatcaagaagaagatgcaggcgatgaagatcgagaaggacaatgccatcgaccgggcggacgccgcggaggaaaagtgccgtcaaacgcaggaacggttggagcgtgttgaggaggaattgcgggacacgcagaagaaaatgatggcgacggagaacgaattggacaaggcgcaggaggacctgacggctgccaacaatttgttggaggagaaggagaagaaagtgcaggaggctgaagccgaagtggcgtcactgaaccgtcgcatggttctgttggaagaggagttggacaagcttgaggagcgccttaaacttgccaccgaaaaaaatggaagaagcga

SEQ ID NO: 51633 - DNA, 421 bp, Glycine max
gaattgtgtacaacttaacagttggataaagcaatgaagatttggacaacatttttagaacctatgcttggtgttccttctcgaccccaaggtccagtagatacagaagatgttgtcaaggctaataagaataattctgccaaaactggcactggaattgatgatggggatagtagtcctgcaacaaatcctaagaatttaaacactaatagaaatggggatgagaactttccatcagaacaatcaaattcctgcaaacaatggcaaacaagtggggataataaggctaaagaagataatcatcttgatttggaacgctcggcacataagaatgaaaccttgggaagtagtacacagcatggtaaagtgcatataaatgcatccacgactgatgaagtatcaagagccaataagcaagatc

SEQ ID NO: 51634 - DNA, 507 bp, Glycine max
gtttttgtttgcccttcgtctttcctgcctccgacctctcacgcgcgtttctctctctagggccctctctctcgcgtttctctctctagagccctctctctcgcgcctctccttctctctctgttggcaatctcagtgacaatggggagtgacgacaatctaaagacatgggtatcagataagttgatgtctctactgggatattctcagcccacagttgtccagtacatgattggactatccaagcaagctacttctccagctgatttggtgggcaaactagtggagtttgggatctcgtcaatggacactcatgcatttgcggaagaaatttactcaagagttcctcgtagatcatctggtataaatcaatatcagaaacaagagagagaagctgcaatgttggcgaggaagcagaagacttactcaattttgaaggctgatgacgatagtgacgatgactatgtagataaatcttcagtaactactgcatcatctagaagctct

SEQ ID NO: 51635 - DNA, 427 bp, Glycine max
gaaaattcgaccacctctctctctctctctctctctctgacagggatcgcgacgagcggcgccaccgtcactgatcgaagagaaacttcgacatcggaacctgccgcagccacctccaccaccaccgcgcacttcaactctctttcagcaaaaaaaattgtcactcaaatggatttggagacggaaaacagattagctgctatgcttatgagggaagcagcagaattacggcggcagtctgaaagggaaggagttctggcttatcttcgcaagcctaatatacggacccgaccaaattcacgtttcctcactgcaactgttcgtggagtacaacaagcaaatcgagctgtggaagtgaatgagatgtggcgattgaggcaaaaagagctcgagctggataaacgtgttaaagaaaaatccttgggta

SEQ ID NO: 51636 - DNA, 411 bp, Glycine max
gtttggatgttccatccaacttggatgctaggaggcgtatttctttcttctctaattcattgtttatggatatgccacctgctcccaaagttcggaatatgatgtccttctctgtcttgacaccttactttaaggaacctgttcttttctccctaagtcatctgggagagccaaatgaagatggagtctctatcctcttttacttgcaaaagatatttccaggtttccccatttcctcaagatatttgtcaaagaactgtttgacctaaaaacatgaatggaaaaactttgttcaacgttttgataataaaagtgaagagaaactcagagtagagaatgaagaagaacttcgtttatgggcatcatacagaggccagacattgaccaaaactgtccgaggaatgatgtata

SEQ ID NO: 51637 - DNA, 455 bp, Glycine max
ccctcgcgtccgcccacgcgtccgcggctatcttatgcttaaaattgacttcgagaaaacatatgataaagtggattgggaatttcttcgggtaactttatgtgaatttggcttcccttatactattattgccttggtcctgaattgtattacgtctacattgctggctttgaggtggaataatgagattatagaaggtttcaatctaagcagtgggctttgtcacagagatcccttatctccttatctttttgttctatgcatggagaagttggcccttcttatccaacaggaagttgagaataactcttggagtccagtgagaatgacccttcttacaaagaatggccctagcatattgcatttatttttgtcgatgactcgcagatttatttgtggtatatcttggagttccacaactatagtcattggagcccacatgcttatttatttga

SEQ ID NO: 51638 - DNA, 426 bp, Glycine max
gggtagtaagaatgatgtgaaactattgagttttttgttgagtccagttggtcacagagttgaatgggctctgaagctaaagggtgttgaattcgagtatgtagaagaagatatcttcaacaaaagcaatctccttctggaactgaacccggttcacaaaaaggttccggttcttgttcatcaccagaaaccaatcgctgagtcactcatcatcgttgaatacatcgaccaaacatggaagcagcatccactgttgcctcaacatccttatcaacgagctcttgctcggttttggggtaccgttgctgataagcttgtgaagacatcatatgttgcaatgtgtagcagtggcgatgaacaagaaaagagtgtgaaggaagccaaagacgtaatggataaaatagaagaagagattattaaggggaa

SEQ ID NO: 51639 - DNA, 245 bp, Glycine max
gtctttcttctgtggccggcgtgaatgcccgcaagcgtgacaagcccctgccccctatcgttatggacgaccctagcgacatcgtcgtcatgaagcgtgctcgtaacactcttgcagcacgaaagtctcgtgagcgaaaggctgctaagatggaagaacttgaggatatgattgctaagctggaagctgtgcgcgatcactggaagaggatcgctcttgcgcaaaccggcgtgcaatattggatt

SEQ ID NO: 51640 - DNA, 407 bp, Glycine max
ccttcgcgtccggcgatttgcaagttgaaatctttgctttctctttcgaaatgcaactctgcgttggtctcctcttcaatacgcgctttctcttcggcacaggtgattgatgtttacactggaccaaatggtttgcttcatggtggaaaactcctaaggccatggttgttgttagattcatccactattgatccacaaacatcaagaaacctttctgctacagtaactaattatattctaagagaaaagaaaggtgaatgggaaaaacctttcaagttggatgctcctgtatctggaagtgttactgcagctgaagctgggacacttacttttatggttggtggctctgaggaagcatttcttgctgcaaagcccttactcttttcaatgggtaaaagtgcaatata

SEQ ID NO: 51641 - DNA, 383 bp, Glycine max
cccacgcgttcgcttcaactgaactgcctacttgtcctgtttgccttgagcgattagatcaggacaccggtggaattcttacaactatatgcaaccattctttccattgttcctgtatttctaaatgggcagattcttcttgtcctgtatgccgctattgccagcagcaagctgaaaaatctatatgttttgtttgtcaaaccactgagaacctatggatatgtgttatatgtgggtatgttggctgtggaagatacaagggagggcatgctataatacactggaaagagacacagcattgctattccctagaagtggaaacaaaacgagtttgggattatgtgggagacaactatgttcatagacttattcagtccaaaact

SEQ ID NO: 51642 - DNA, 394 bp, Glycine max
ccctcgcgttcggcaaaacccagtcctcggccttgtttacgtgctgatcgcctgtttcttgtccggatttgctggaatttattttgaaaagattttgaagggtagcgaagtgtccattctggctgcgcaacattcagctgtcttcgctctcaattcccttcggcattctcttcatcgcagtcaaagaagggtctgatgtgctggaaaagggaattcttcacggattcgattccgttgtttggctttccgtccttttgcaagcaattggtggcctcgtcgtggcagtggtcatcaaatacgccgacaacattttgaaggcgtttgccacttccctgtccattgtcgtcgcaacaattgcgtccattttgctcctgggcaccgagcccaaactgat

SEQ ID NO: 51643 - DNA, 484 bp, Glycine max
gattccctctctcttcttagaaaccttaaaatcataaacttttccaataacaagttcagtggaagtatctttcctctgactggttcaaattctctcactgttttggacttgacaaacaacagcttctcaggttccatcccttctattctaggcaactccagagatctcacgcgtctcagacttggaaacaattatctcacaggaaccattccttctgaacttggccacctcactgagctaaacttccttgatttgtcattcaacaacttgacaggacatgtgctacctcaactctcaaactgcaagaaaattgaacaccttctactgaataataacagattgagcggggaaatgtcgccttggctgggaagcttacaagaacttggtgagctggatctctcattcaacaactttcatggaagggttcctcctgagcttggtggctgctcaaagttgcttaagctttttctccatcacaacaatc

SEQ ID NO: 51644 - DNA, 484 bp, Glycine max
tcgcgccaaatccactccttaaactcaaaacccttatccatcgccaattccacctgcatgattcggatctcgatccgatttccatttccggttcggctccgataagcttcgccaccattgccgccgtcaatggcgtcgaagccttcgccttcgccctcgccctcttcttccagatcagagcctctcgtcgatccctccaaatcaaagaatgaccgaggatcagtcagttgtaggccggagacgaatttattatgatcagaatggtggagaagcactgatttgcagtgacagtgaagaggaaactatggatgatgaagaggagaaaagagaattcatagaatcagaagattatatacttcgcatgactgtcaaagagtttggtttaactgacattgttctggagtcgttggctcagtgtttttctagaaacatcagtgaaattaaggcaaagtatgaaaccctcagtattcatgacaatgctggc

SEQ ID NO: 51645 - DNA, 428 bp, Glycine max
atattttccaaggttttacccttccagatgctccaagatttgtaaaggtgtttggggggcagatgattggacaggcactggctgcagcttcaaaatctgttgactgtcttaaggttgttcatagatagcatgcctattttattcttgcgggggatttaaacaatggcgaagactttttggtcttaagcactgaattttgcccaaaagataaggcaccaatattatatggacatcactaaagccagcagctccttcatgtaatttgatttcagcaaagaattatctaaaagagccttgttataataagctatgggtctgaactcctgcattgcaatagctcctatgcccaactcgaaagcatcacattcaacaatgaatggttttgagaaattaggtgtcactaaacagtgccaattacatattaaatt

SEQ ID NO: 51646 - DNA, 222 bp, Glycine max
cggattacgacttttctgtgcttgcgcagttggtccatccggttgccgaaagggaagtgggttaacattcccacgccaggctagggaaatgacggttcgcaagagctgttttgcgcggtaacgcaaatgaactcgcagacgtcatgtggagtccgagccagagttctcttttctggtttagggtgtgcgcgcctggaagtggctcatcctgagatagggatg

SEQ ID NO: 51647 - DNA, 259 bp, Glycine max
tcgtgggaattaggatatggagaggaaggaagcttctattttacaaatgctacacccaaggcagatttagattatgaagttgagctaattgtctttgatgaaaccaaacaaggataagctcgcagtgatatgactgtggaagaaaggattggtgccccacaccggggaaagatggttggagatgctttgtgtcacgaagaaaaactagaggaggctatgcaacagtatgaaatggccatagcatatatgggagatgact

SEQ ID NO: 51648 - DNA, 352 bp, Glycine max
tcgttccgtttcccgctccagatctgtaactaattgcaccgttttttcatgtacaggtttactgctaatgatggaaaaacgaaactgaaagctatgattccttcggatatgcgctctcaggtgctctccggggctattcaaaacctaggtcttattcgcgtccttgattacactgtcaacgatatccccaataaatcggacaaataccttcttgccattaaatgtgaagctgtatctcccgcgcttgaaatggagataaagagtgaggaatctggatctgggattcttttgaagcccaaagtagagggtggagtcaagactgaaggtgctgctgctgggattcttctcaagc

SEQ ID NO: 51649 - DNA, 308 bp, Glycine max
cttttggacatgttttgaggttgaaatattgccaacctcacagcagaggcagcagaatggatggagaaggcactcactttccattgaccatccatgagacctacacttttgggttcttgttcttgacaccaatttgtttacttatcaaggttttgcttttatctatatggaagacgagagagatgctgaggctgctattcgtgctcttgatcgagtagaatttggtcggaagggacgcagactccgtgtggaatggacaaagcatgaacgtggtgttagaaagcctgctagttcaagaagatcttcag

SEQ ID NO: 51650 - DNA, 371 bp, Glycine max
aatttactcattttcattcatccactcaactccctttcctaccatggcactagaattggttggtggtgctcttctttctgctttccttcaggttgcgtttgagaagcttgcttctcctcaagttctggacttctttcgtggaagaaagcttgatcaaaagctgctcaacaacttggaaatcaagctgaactccatacaggctctggctaatgatgcagaactaaagcagttcagagatccacttgtcagaaactggcttcttaaggtcaaagatgctgtgtttgacgcagaggatatcttggatgaaatacaacatgagatctccaaatgccaggtcgaagctgaagctgaagctgagtctcaaacctgca

SEQ ID NO: 51651 - DNA, 443 bp, Glycine max
gtttatatgatcacaagaaaaacagtttttcatcaggtctcaatttcaaatcagacgttaaaccttcaatccttcatgtcattatctgctttgtcttctacctctatcactgctgcaaaataaggttgtacttttaaattcaaagcttataaagaaagggtattgattttgacattatgcttatttgtgtattttgcagggagtagcttcttctttctaagttgacatatgcacatggcttctcttggggatataggacttgcagcagcaataaacatccttagtgcatttgccttcttactggcttttgccatacttcgaattcaacctataaacgatagggtgtattttccaaaatggtatttgaagggtttaaggagcagtccattgcaagcagggatatttgtgagcaagtttgtcaatttggacttcaagtcatatat

SEQ ID NO: 51652 - DNA, 460 bp, Glycine max
cggtcgcgtgggttgagaaagactatgaaaaaatcattcgtttcttttctgttttttacggcattgctcgtcattgtttgctcaaaagaggaggaagggggcgcaaaggaaaagaagtacggcacaatcattggtattgaccttggcaccacctactcctgtgttggcgtctacaaaaacggcagagtggagataatcgccaatgaccagggaaaccgaataacgccttcctacgtggctttcacaccagactcgggcgagcgtctgatcggagatgctgcaaaaaaccagttgactctaaacccggaaaacaccattttcgatgccaaacgactcattggacgggaattcaccgacaaaaccgtccaggacgatatgaaactttggccttttaagatctacaacaaggcaaacaagccccatgttcaagtgaaagtcggtaacgaggataagcaatttg

SEQ ID NO: 51653 - DNA, 475 bp, Glycine max
ccctcgcgtccgtgcaaatgcaagttccggtgggagggcgagtccccacatggttctctcggcgaagactcctcgaagagaagctctgcgacctccacaagtgcaccaatttggactctgtgaaccaaatccacgcccaagtcctcaaagccaatctccaccaagacctcttcgtcgctcccaaactcatcgccgccttctccctctgccgccacctcgcctccgctgtcaacgtcttcaaccacgtgccccaccccaacgtgcacctctacaactccatcatgagagcccacgcccacaacagttcccaccgttctctccccttcaacgctttcttccaaatgcagaaaaacggactctttcctgataatttcacgtacccttttctccttaaggcttgttctggcccctcctcgcttgctttggtccgaatgatccatgcccatgttgaaaaaattggtttttatggggatat

SEQ ID NO: 51654 - DNA, 414 bp, Glycine max
gcgcccacgcgtccgcggacgcgtggggcgaatccgcggagtacaaagaacggatttggcaatgccatcaacggggggcagaccgactgctcagtttggcacgaaggaatggcggagtgttcatcaaagttggtcaacacatcgcctcgctgcaataccttttgccggagccgtacacttccacactttccattctccactcgaaagcgccggagagcagtttggacgacatgaagacggtcttctacaggagtttgcacaaaaattttgacgatgttttcgacgagttcgacccccgtccatgtggcgctgcttctttcgcgcaagtgcacagggccaagctgaagtcaagcgacgaatacgtggcagtcaaaatacaacatttgcatgtgaaagaccgcagttttgttgaca

SEQ ID NO: 51655 - DNA, 371 bp, Glycine max
ttgccttcgcgtccgttaagaagtttcattcggatcgtgagagaggttaagaagttttctagagttgttgtttgatagagaaagagagaaaatgggaagagctccttgttgtgacaaggcaaatgtgaagagaggaccatggtcaccagaagaagactcaaagctgaaggattacatagagaagcatggcactggagggaattggattgctcttcctcagaaagctggtctaaagagatgtggaaaaagttgcagattgagatggctgaactatctaaggcctaacattaagcacggggaattctccgatgaggaagacagaatcatttgcagcctttatgctaatattggaagcaggtggtcaattatag

SEQ ID NO: 51656 - DNA, 410 bp, Glycine max
  unsure (1)..(410): unsure at all n locations
tcgggatatgttatgcctattggagaacttccggaaggtacgaccgtctgcaatttggaggagaaggccggtgaccgtggacgtttggcaaggacttcaggtaattatgccattatcgtcgcacataaccccgacacgaagcgcacgcgaattcgtcttccatctggtgccaagaaaggtgcgttccatttccgccaaccgtgcaatgatatggcatttgttgctggncggtggtcgcaacggacaataccgcttttgaaggcaggccgagcctaccacaaatataaggtcaaacgcaactgttggcccaaagttcgtggtgtggcaatgaacccggtcgaacattctcacggaggaggaaaccaccagcacatcggccatccgtcaacggtcaaacgaggaacgagtgc

SEQ ID NO: 51657 - DNA, 345 bp, Glycine max
ctttctctttgagccagctgcgtttgttccttcttcagttgggtttgattgcgagtgagtgacgatgggcgcgagcagcgaccctacccaagacggttccgacgagcagcagaagcgttcggagatctacacctacgaggccccctggcacatctacgccatgaactggagcgtccgccgcgacaagaagtaccgcctggccatcgcttccctcctggagcagtatccgaaccgcgtggagatcgtccagctcgacgactccaacggcgagatccgatccgatccctccctctccttcgagcatccctaccctcccaccaaatccatcttcatccccgacaagga

SEQ ID NO: 51658 - DNA, 425 bp, Glycine max
agtgttcaacagcaccttggactgctggaggaagatctataggacagaggggttggcttcattttaccgaggtgcagtttctaatgtgtttaggagcacatgagcagcagctatctttgcctcgttcgatgaggttaagaaatgtatgaactgggggagaatttatcagctccatcgttcattgatttcattatgacaccggagactcaacttcaatacgtcaacatgttgcatatcttgaggcttaagacaattttgtaaaatgcacacatgagctccattacagttgattagtaaatgagtctttattggcattccaacgctaaggccattgattgtgtggctttgctattactaattttcctttgtatcttttaagacgatggaagatcagaaagcacatatgacgaatggggacttttatt

SEQ ID NO: 51659 - DNA, 444 bp, Glycine max
tcgcccacgcgtccgcccacgcgtccgattcaacaaaaccaaagctgcctctgtttttgccttttcttgtttacccaattttttcttcctcagatacacacagcatcaccatgctcgatcatcattaacaacacaccctcatagattctcacccaaaaacctaagtgtagagatagatatagtaattcgttatggcgacggcggaggcagcttctactgggcttggtcccagatatgcacctgatgaccctacccttcctcaaccgtggaaggggttgattgatggcagcactggtcttttatactattggaatcctgaaaccaatgttacacaatacgaaaaaccgacgccacctgtgcctgcgcctgtggcttctgcgccgagcttggcgcctataccagcggctcatacaatgcagcctggcgggatgatgcagcagcacg

SEQ ID NO: 51660 - DNA, 295 bp, Glycine max
gccataattaattattaattggagaacaatgtccgtttccgtcactcaaacgatcactcgaaatcggaaaagtgcggaaaagatttccgagggccaattcctttcaatggaagtggacgaattgcaagagttggaagaaaaggcgaaaaagacgcagttcaaaacccaaattgtgtggcgcaacgtgatcctgtacctcattttgcagaccggggcactgatcggagtttaccaattgttcacaagttcaaaatggcttaccgttttttggtgccttttcctttggatggtcagc

SEQ ID NO: 51661 - DNA, 199 bp, Glycine max
caggtcatatattaacccttttgtgtttttaatggacgcccgtcattggaaatgcaatttgtgctatcgcgcaaatgaaatgcctgaggatttcgcatgggaccctcaaacgaaaacttttggcgacccatctagaagacccgaactccatgaaaccactattgaatacattgcaccatctgaatacatgcttcgtcct

SEQ ID NO: 51662 - DNA, 126 bp, Glycine max
cgctgattttcccggtcggaaagccgctgaatatgattttggacgacggaggcgacctgaccaaccttgtgcaccaccaacacgccgaacttctgcccggcattatcggactgtccgaggagacca

SEQ ID NO: 51663 - DNA, 316 bp, Glycine max
cccacgcgtccgggcagggtttgaaagctgctaccaaaaaggaaaaatatgacaatatttgtgagaagaaattatcaactaccattgagatgctttgcaagtcgtatcctgcggagtttgctacttactttcactattgccaatctttgacatttgatcaacacccagattatggatacctgaagcgcttgttccgtgatttgttcaaaagagaaggtattggctgtctgttttatcatattcttgatttcaaatactttttctgctagtggggaatatagcccattgtttcttaaagatgacacctcttttattg

SEQ ID NO: 51664 - DNA, 388 bp, Glycine max
ctgcggatcgcacgcttcgcatattttccactccttggggattcacattgctcacggaccgcttatggagattcttcatagttcatacttgaaaggtggtttagctttggggtctctattgggaccaggacgagagttactctttgatggcctaaacgcatttaagaaggggtcgcctaatatgaactctctcgtgggatttggttctgtagctgctttcatcattagttcgatctcgctacttaaccccggcctggcatgggatgcatcattctttgatgaaccggtcatgcttcttggtttcgtgcttctgggacgctctctggaggaaaaggcaaggattcaggcatctagcgatatgaatgaactgctttcactgatatccact

SEQ ID NO: 51665 - DNA, 455 bp, Glycine max
cccacgcgttcgcccacgcgtccgcggacgcgtgggtgctgagcgtgctgcgcgtgcaccttccttctgatattcccattgtaggctgtgagctcacgccttacgtgctcctacgccgacctgataagatcgttaccaccgacgatgtccccgaaaccgccccgttagacggccatttcttgcgttacaagtggttagtgtatcgtgtacagagtgataaaaaggttgctgtttgtagtgtacatccttctgagccggccacactgcagtgcctaggttgtgtaaagtctaaaatacctgttgccaaaagttaccactgcactccaaagtgtttttcagatgcatggcagcatcatcgtgtcttacatgaccgtgctgcaagtgcagccaatgaaaatggaaatgaggaagaagagttatatgggcgatttaataattctggatctggatcaatc

SEQ ID NO: 51666 - DNA, 120 bp, Glycine max
atctcttctcttgtttcccaagaatgaatcatcaatggcgattgaacacgaagacgatcttatagacgagatgaaccctcgacctttcgacgagggtgacattgcccttctcaagaccta

SEQ ID NO: 51667 - DNA, 414 bp, Glycine max
gcttaagatagctatgaaggatcaagcacttttagagaagcatgctgtgatagagaggctgcagactctagtgcatgaagagcattctcactttcttgagattgaatctactctacagactctgcagaagttgtactctaagtcacaacaggagcaaggaagtcttgttatggagcttaaatatgggcttcagttgttgaaggatttgcagtttccaaaacagggttttaaggaagaaatgcacgagaatgtggaagaaaacaggatcctgaatgaacttactttctcttccactaggtcgttattaagaaggcagcaaacagaaatctctaaattaaaggagatcaaagagaaactggaacgagagcttgttgtaaactctgaagaaaacaatgccctccagcaggaagctca

SEQ ID NO: 51668 - DNA, 143 bp, Glycine max
tcggttctaccaacgcaagtcatgcctaatccagtggtagaacctgtaggaaaccccagcgagtgtttacttttaaagaatatgtttgatccgagcactgagacggaaccagattttgatatagacattaaagaggtggattc

SEQ ID NO: 51669 - DNA, 430 bp, Glycine max
cttttgcatctgaaaaatctttgcatgaagttaaatgctggtgatgatgaacaaaggactaatggaaagggggaatctaaaacttctggatttggtccggaagagtatttaattgggatcatagctaacatgctaaaggaacttggcaaaggagatggtgtatctacttttgaattcattggtagtggtgttgttgcagctctgttgaattatttttcttgtgggtatttctctaaagatcgaccattagaaacccaccttcccaagcttcgccaacaagcacttacaaggtttaagttatttatagcagttgcactaccttctactattgaagttgggactgtggctcctatgactgtcttggtccagaagcttcaaaatgccttgtcctccttggagcgtttccctgttgtgctgagtcattcatcta

SEQ ID NO: 51670 - DNA, 390 bp, Glycine max
cccacgcgtccgcccacgcgtccgcccacgcgtccgcaagtttgagcttttagcccaattaaaatgcgatatgaattttctgagttctgagattaaaaccgactccccctgcaatgttaatccaggaaaattttcgacttcaattttatgagccgatcagaagagaacattcgctgattgtcaccaacactgacgtggactcactttgtgcaacaaatattctcactcacattttctcttgtgacgatgcctcatacactctcagtccggtggactccttcccgacgttggagaaggcaatcaatgaccatgtcagacaggccaagaacattgtgctggtcaattgcatcggctcgcggtctgtcagcgaattgagcattgcccgactga

SEQ ID NO: 51671 - DNA, 361 bp, Glycine max
cggacgcgttggtcggacgcgtgggcccggtcattgtaaaggcggcatacggtggcggggggcgaggaatgctcaaaatcgaaatagaggaagagattgtagatgcgttcaaccgcgccttttccgaagctttggccgcgttgggtgatggttaactgtttgtcgagaaattcgtggaaagacctctgcatatggaagtgcaaataattggggaccattacggaaatttggtgcatttgctcgagagggactgatctgtgcatcgacggcatcagaaggtcgttgaactggcaccggcacctgttttggatccggcaatacgtcagctaatgatggacgatgctttgaaattgacacgcca

SEQ ID NO: 51672 - DNA, 342 bp, Glycine max
tccacgcgtccgcaagtttgagaaatgctttgcaatttccgcaacttcaattgttcgtcctcgcggcatttttcgctcgcttctgttttacttcagcagcaaaaattctctgctgttgcatcatcgcccaataaaaatttgaatgctgtgcttatcgatgctgtacgtactccctttctccaatcgaatacaactttccgtgagctgttggctgttgatcttcaaagacacgctcttaaagcattggttgagcgaacaaaaataccttttgatgaaatcggacacattatctgtggacaagccgttcaggaatgcataacgagcaatatcgcccgtgaggct

SEQ ID NO: 51673 - DNA, 285 bp, Glycine max
ctttttgctctgtttcgaacacttttggaacaaattgatttggttcatggaatttgtcagctgagttaaggatgcggaaaagctgaagggcaaagtgcgcgggacgggccgaatgcccgtgcttttggccatcggcgtggccttcgcttggatgtttctttgtgcggccattttcctcaaattcgagaaggattgggactactttaagagcttttattttttcttttgctcattgaccaccatcggatacggcgatgtgacccccacaaattccgaagatgagca

SEQ ID NO: 51674 - DNA, 372 bp, Glycine max
tcgaaaacattcagcttttgaccagataaatgacagattattgtttgaaatagaaaatattgaaacatcaatatgaaaacgggtgcaggtaacacttttttcagttcattgtgctgggtgtctgtattacatgctagctgatcgttacccccaccaaggaaagacatggattggagctgtgaatccaaacttccgagagacaagccttcggatcaagatacatttcagccatgtactggtccatcactaccatgaccactgtaggttatggtgacctccacgctgtcaacaccatagaaatgatcttcattattttctacatgctctttaaccttggcctaactgcttacttgattggtaacatgacaaatc

SEQ ID NO: 51675 - DNA, 175 bp, Glycine max
ttttcgcgttaaagaacgtatgaatgcatcgagaatgatctattggcttctttcaatcttggcctacattgtattgctccatacatgtcaaagggcattgagagggcatcacaactttcagtctgttggaacaaaagtcaataatactgctgtgacagaagaacttgatcgacca

SEQ ID NO: 51676 - DNA, 383 bp, Glycine max
tttatcttcttggctctactgcttttatttgcagacacccaattaacgatggctgctctctccaacggccacggctcttccttcttcaagatgcccccaatcaagttcacaaagctcttcatcaatggggaatttgttgattccctttcagggagggagtttgaaacaagagaccctaggacaggggaggtgattacaagaatcgcagagggagcaaaagaagacgttgatgttgctgtcaaagcggcacgtgcggctttcgactatggaccatggccccgtatgcccggcgctgaaagagcaaaaattatgatgaaatgggcagacttagttgatcagaacattgaggaaatagcagcattggatgccattgatgctggaaa

SEQ ID NO: 51677 - DNA, 217 bp, Glycine max
aattaagagagctgatggtaatgaggccatcattgctgaagaggtttttgagaaaacaaaggaaaaattccaaatgtattagatctgtgattcttttaatatctgatggcaactggccattcaggattattgccttcatttaaattatagaaactgatgatagtggattgaactcatttgagtacaacaaattatatgctacaatttggtttacatc

SEQ ID NO: 51678 - DNA, 403 bp, Glycine max
cataagtgtacctactatttcaaaattgctgttgcccttgctgttgctgctatccctgaaggccttcctgctgttatcacaacttgtttagcactcggtacacggaaaatggctcaaaagaatgcaattgtgagaaagcttccaagtgtggaaactttgggatgtaccactgtgatatgttcagacaaaactggcactttgacaacaaatcagatggctgtgacagagttctttactttgggagggaaaaccactgcttctagactcattggtgttgaaggcacaacttatgatcctaaggatgggggcattgctgattggggttgctataacatggatgtcaattcgcaagtcatggctgaaatatgcgctgtttgtaatgatgccgggatttacttcgacg

SEQ ID NO: 51679 - DNA, 215 bp, Glycine max
cttgctggggttgctacatcacctaatcacttccccacttaccctgttaatcacgtttaattcgcacaaggtgtttaaagaaatggaatgatgcctgaggacagttcaacgctgttgctgttgataatggaactggaatggtcaaggcggcttttgcaggcgatgacgctcctagggccgggttccccagtattattgggcgaccacgccatacc

SEQ ID NO: 51680 - DNA, 456 bp, Glycine max
gccgtgacttttgtagcagctggtctttcttcaggaaaaattggttccatagcatatgcttgttccattcactgtattgggagccactttgatggataagtctggaagaagaccacttataacggcttcagcaagtgggacatttttaggctgctttatcactggagttgctttctttctcaaggatcagagctgattgcttgattgggtaccaatattagcagttgctggcgtgctgatctacgtaggggcgttttcaattggaatgggaccggttccttggataataatctctgagatctttcccatacacgtcaagggaactgcaggaagcttggtggttttggtgaattggctaggatcttgggtagtttcatatactttcaactttctaatgagttggagctctcctggtactttatttttgtatgctggatgttctcttttgactattct

SEQ ID NO: 51681 - DNA, 409 bp, Glycine max
gtttgagttggcctgtccccataaatagcgacataaccgacagaacaattattcctctctactttcggcttttggagctgcgtcaatgtcttctatatctacattacgtcgccaagtgaagaatgtggcctgcaattacactgatgcacaagtaaaagttagagaggcgaccagcaacgacccatggggaccaaccacagagctaatgtctgaaatcgcagatttaactcacaacccagtttcattcaccgaaattatgtctatggtttggaaaaggctaaatgaccacggaaagaattggcgtcatgtgtacaaaagtttggtgctccttgactatttgataaagcgcggaagcgagaaagtgtcagctcaatgccgcgagaatctgttttcaattgagacactcaaa

SEQ ID NO: 51682 - DNA, 376 bp, Glycine max
ttcgtccgtttttaatgaatattaaacgttacggaaattgtggcctatccgaaaaacatcaaccataaaaaacgaaacttggcttattgtcatagagagagaattctttgctttgcttttccgatgcttcttcgtccgtgcccttctctttcgctcctttcaaatgcgctttctttcggtgcccatttgccttttcatcagcaaaagacaatatccacttcggtctttgccctcacagagtttgaccctcgaattatgaccgagcccatcgtttctactgaggagttgaataaaccacttccgccaaatgacaagcgcaattatatgtatctgaaaccaatgttatttgaccaaactcctgttttctacagggatg

SEQ ID NO: 51683 - DNA, 207 bp, Glycine max
ggcactcgtgcgttgatggtgttttcggaacaacatgccccattccagcaaggacgaattggacttacatcctttaagcgaaagatcaaactgggaccttttactacttaccatccctagcattccacacagccgatggcggctttggaggcattagaatccttagcaggccaagaattccagagccattccctgatccaagtgggg

SEQ ID NO: 51684 - DNA, 427 bp, Glycine max
gattttggactggtgtgtggcagtgttgtttttggcattggagtgactttgatagagccaaagtactattcatcatttttcagccgtgagatgatatatggatacccagatgattttgaaaggttctcctatttttgccgggcatcattggactatattgtaaaatgtgggaagcagcctgatgtgttgcatctacataattgggggacagccattgttgggccccttttcagggatacgtttgtcaaacagggtggagttgtctattcgaatagagttgtaataatgacatctatctatccggagcacgtaattgttcataatttgagtcatgaactggagccactttaaatgttcataggggcaagatggttattgctccttatggattagacaaatcaacttgggatcctttaactgactattt

SEQ ID NO: 51685 - DNA, 393 bp, Glycine max
atatattcctccacaatcattgcaaattccaatttgtggtatcaacttttgtccattttattacattttgcttatgatatcctggcaatagtatcctgaatgtattgccaattgcaattatatttccctgactatgcagtaaaaatattaaactacagcatgaacagggctaaactagtgcttgtgttttgctaggctggataccttcttgggttatgtgatcgccatccgagcaatcttatgctacaccggtttagtgggaagattttacacatagattttggagactgttttgaagcatcaatgaaccgtgagaagttcccggagaaggcctttgtacatgatcctctcataaattggcgtctttttaacttctatgaagttccacaaatg

SEQ ID NO: 51686 - DNA, 481 bp, Glycine max
acttctctctcctctctctctctctacaaatccttctttcttctcttcgctgctcactgtagcgtagccatggctttcagagttggaggagcgggaggaggaaatgcctcttctggcatgggtgttgctgagcatagcgtaagcacgttcctggaattgcagaggaagaaagttcatcgctatgtgatttttaaaattgacgagaaaaagaaagaggttgttgttgaaaaaactggaggccctgctgagagctatgatgatttcactgcatccttgcctgaaaatgattgccgatatgctatctttgactttgattttgtgacatctgagaactgccaaaagagcaaaatcttttttattgcatggttagtcacttagtttcttgtacaacgatagaaattgcatattatattaactcattcatttctgtatacactgctttacatgtgtggatataatattttactattgcatttacata

SEQ ID NO: 51687 - DNA, 417 bp, Glycine max
ccctttcgtccgcccacgcgtccgcaactacggagcgacgtcgccgacaaagagtgtccaggaggtgaaacccgtggcattgtcttggcacggtctcaccgctgtccatgccaaatcgggacggaaaattcttgacgacgcgtccggcatggccgacgcgggccaactcgtggcactgacgggcgacggcggagtggacaaaacagcgcttttgaacacgttgctggaccacaacctgaagactttgagcgtggagggtcaagtgctgatcaacgcgcactccttgggccggttcatcacttacgtcatcgggtacgtgcaacaggacgacttgttcatgggcacgccaacggtgaaggagcatctgatggcgccggcacagctttggatggtcggacacacccaacggacgatgcg

SEQ ID NO: 51688 - DNA, 243 bp, Glycine max
aattattatacacgctatgatgtattcattgaggctgaggcagatgaagctgctggaaaggctgaaaatgcctctattgactctcatatagagttttacaagaatgagggattgacaccatacacagaggctaagcttcctgttataagtgatgttactgaaggatgtgctataggacgagagcatgttcctattaacaacctttttacttgcctttggatcaatgaagttgaccgagttact

SEQ ID NO: 51689 - DNA, 388 bp, Glycine max
cccacgcgttcgcccacgcgtccgcccacgcgtccggtgaggttctcgatatggtggaggagggtttgtgggtccaagacaagttctcactcagcaagctcatcagagacgtccatagtgactcactcctaaggatcaatcaataccctcccgtgagcctaaagggcaccaagaattgggacacgtccaaacttgaggcacatcaactccagagccaaaataataataacaacaacaacaatattggctttggagagcattctgaccctcagatcttgaccatcatgcggtccaacaacgttgatggccttcagatttccacccacgatggcttgtggatccctgtcccccctgaccccaatgaattcttcgttatggttggtgatgc

SEQ ID NO: 51690 - DNA, 321 bp, Glycine max
tcggttcttgaatcttttacactgtgcactctgatgcagctcttcaccaacatcccctttggcagcacactgtgtctttcactggccattatcatcatcaccctcgtgatcctcactaccttttcttcatctctcttccttcgctggccaaaaataatcactttcttctgtagctgtgaaacatgccaggcctatctcacttcaggttggtccaaaaccttcgacaacctctgcgattggtacgctcaccttcttcgaaactcgccgacaaaaaccatccacatacacgtcctccgaaacaccatcaccgacaaccccgac

SEQ ID NO: 51691 - DNA, 363 bp, Glycine max
cggactcgtggggctgaacttgaacttgttctcctcttgcatttggatcccaccaggtaactaactaactaattaactcttttcaaatcatttatatatacactatgcaccaactgtaaaattgtgtgttattttgatgatgaaggcacttgaatgattcggtgtgataatccaaattacaagcctgggaagaatatagccacatccgaagaattcacccagatcatgccattcctctctccttccatgtcggtcttcttggaatgccaggttttactgcttatgcaggattttatgaggtctgcaccccaagcaaaggagaatatgtttttgtatctgcagcatctgatgccgtaggtcagc

SEQ ID NO: 51692 - DNA, 389 bp, Glycine max
caattttacagccatgagtgagcaaaagagtgaggctcagtcgggcattgctgacatagaagtgacaatggttgagagccatgcaaatctcaaaataagatccaagaaacggccaaagcagctcttgaaaattgtctccagtttgcatggcatgcgtctcacaatcttgcacctaaatgttaccacaacaggggaaattgtcctctattctcttagcgttaaggtggaagaagattgcaagctaggatcagtggatgaaatagctgcagcggtgtaccaaattctggataggattcaacaagagacaatctcgaattaagatctgaagttgagctaatttggcccaatttttttaacctgatcaagaagaccttattatatttctttct

SEQ ID NO: 51693 - DNA, 370 bp, Glycine max
gtttttgtttgattaccactggctgtgacactcagtcttgcttttgcactgaaaaaactaatgaatgacaaggcacttgccaggcatctttctgcttgtgagactatgggttcagctagttgcatctgcacagataagacagggacattgaccactaacaaaatggtggttactaaagcatggatatgcgaaaaagccatgcatataaaaggtactgagagtgcaaacgaactgaaaacatgtacatctgaaggagttataaacattcttttgcaggctatatttcaaaacacttctgctgaagtagttaaggatgataaaaatggaaaggacacactattgggaaccccaacagaatcagcattattgg

SEQ ID NO: 51694 - DNA, 168 bp, Glycine max
ctggtttttttctgatccaatgatggctcttttatgttcctgagatgggaggcggtaaccagcctgccagggttagtttgattcaaatccccagcaatgaggaactcaggcaaaataaccttttcagcgtcagtgactgcaagagttactggcaaagcaatggagact

SEQ ID NO: 51695 - DNA, 432 bp, Glycine max
cggactcgtgggggagatttgaatcagaatgaagattatattttatctaatccatatcatctgcttggagttttctcatctcaggtactgcaagattcttcgcgagataagatgtggagaagaaagcattctttgattcatgacatggagaaacattgtaatattgaaattgctgctcagatttcacacttgccatcacaaaataacgaaggtgaacatgatcattttcatctagaagggttaatggagagtccctcagctgatgatgatggggactgcttctcaccattactgttaaatgcaacgtctgtcaaaattgaggtctactataacaaagcagtgaactataccttgatggtcacttttgtctctttcttgcaagtccttctattaattcgtcaaatggagcatagcagcactcaatctggcgct

SEQ ID NO: 51696 - DNA, 271 bp, Glycine max
tgtagttaggttctgcacgctctgcttccagcgagtgttctttcttcgtttcaacaccttaatttgcacacgctgcttcttcagcttgagaaatggcacaagaaacctttctattcacatctgaatctgtaaacgagggtcaccccgacaagctgtgcgaccagatctctgatgcagtgctcgatgcgtgccttgaacaggaccctgacagcaaggttgcctgtgagacatgcaccaagaccaacatggtcatggtctttggagagatcac

SEQ ID NO: 51697 - DNA, 368 bp, Glycine max
aacatttctgccattttctaaaatgcacaaaggcttggtcaaatgactgaatgaatctgcattaacacgagggatggtcatcaatttattccaagaacaacgttgaaccccatactccttcatgagccacaacaaaatgatctccttttgaggtttcacttttggttgcttccatggcggcgtttcgaagcgtcgctgaggcaagccttcgaatctctgcaaccatccctgagaccccctttctccttatccattctcacccccgaccaatacgccctcctcaaccgcgcaatcctccacggtgttttaacggagcctcatttggccaatacccacatcaaacacttgcatgcaatcgtcgtcgacgc

SEQ ID NO: 51698 - DNA, 305 bp, Glycine max
gcttttcagcgccgtgcgccggggccatttcttcggcgacggtgtcggctttgttgctgtagggctgtccggactcgtcggcggcgacggaggtgacgacggggatgtggttggtgtcgatgagggagcggaggacagtggggtcgacgcgtgcgacctcgccgactaagccgagggcggcagccttgggggcggtgcgggcagtgaggaggcggccgtccatgccggagaggccgacagcggtggctccagccttgttaattagagaaactagggttttgttgacttttccgacgaggaccatg

SEQ ID NO: 51699 - DNA, 442 bp, Glycine max
tcgttttagcagatctgattgtcactcagttattttatgatacggatatattcctcaaatttgtgaacgactgtcgccaaattggaataacgtgccctattgtacctggaattatgcccattaataattacaagggctttatccgcatgactgggttttgcaaaacaaagataccagctgacattatggctgctttagagcctatcaaggacaacgaagaagctgtcaaggcttatggaattcacctgggaactgaaatgtgcaaaaagattttagctcatggaattaatacattgcatctttatacactaaatatggagaaatcggcattagcgatactaatggttgtctcctattgcatgtgatgtgtatatttttaatgttatttttgaaagacttcacttaattggaaggtgatattaatgttatttctggcagaacc

SEQ ID NO: 51700 - DNA, 359 bp, Glycine max
ccctcttcgtccgtcctatcgtggcaaagaaagaaagaaagaaaaccctatcttaccttttcaactttcaagatgcaaatcttcgttaagacactcactggtaagacactcacccttgaggtggagagctcagataccatagataatgtgaagtccaagattcaagacaagggagggatcccaccagaccagcaacgtataatttttgctggcaagcatcttgcggatggacgcccacttgctgattacaacatccaaaaggaggccactcttcacttggtgctccggctccgaggaggaatgcaaatctttgttgagacattgaccggaaagacaatcacccttgaggtcgagagctc

SEQ ID NO: 51701 - DNA, 251 bp, Glycine max
ccgagcaaaagctgaacacactccttcgaactcactgaggtatttgatccatctctgagagcaacttctgatcagccaaagatgccggaaagcgaacacgacttggatgaggaggcgcccaacgccaccatggaaaccaaagtggcggtcggcggcgcggcgcccaagcgcgtatggcgctggacgtagtcacagctgcaccagacggacggtatcattccatcccaggccggttggaacaagggagactc

SEQ ID NO: 51702 - DNA, 401 bp, Glycine max
gttccattccgatcctgagaagcagcttcttttttctggcagtgatgatggtggtgatcatgcaactgtaagggtttgggatatttccaagaccaagaaaaagaactgcattgcaacactagataatcatagctcagcagtgacttctttggcattatctgaagacggatggacactgcttagtgctggaagagataaggttgtaacattgtgggatcttcatggttatagtggcaagaagactgtcattacaaatgaggcagttgaagctgtttgtgtaattggtgctgggagtccttttgcttcatctctcgatttatatcagcaaaatgcaaaaatacatgatggttccgaaatattctatttcattacagttggtgaaagaggcattgtacgcatat

SEQ ID NO: 51703 - DNA, 403 bp, Glycine max
tccacgcgtccgaaatggctgtcggttgttgctgcaattatgtcctttacttattctttcataggaatggggctttccattgctcaaatcatagaaaaaggacatgctgagggtagcattggaggaatcagtacctccagtggagctgaaaagctatggctggtttctcaagcacttggtgacatatcattctcatatccgttctccacaattcttatggaaatacaggatactttgaaatcacctccaccagaaaaccaaaccatgaagaaggcctcaggaatagcggtcaccgtcactacattcgtgtacctcagttgtggaggtgctggatatgctgcctttggtgataatacaccaggaaaccttttaacaggttttggatcctccaagttttattggc

SEQ ID NO: 51704 - DNA, 296 bp, Glycine max
ctgtttactaacatttcttcaattcttagctgtgttttttttttgctcaatcatttttttaagatggccaaaagaaatggcgctgctaattcttcttttgagaggagtaccttggcttctctggatcaaaagttggccatggccaagcgctgttcccatgagggtgtgatggcaggagccaaggctgcagatgatgctactattgcaactgccattccaactctggctagagaaaggatgctaccttgggcaaaagccaatctcaatcacactgcgcaagctctcataatttccac

SEQ ID NO: 51705 - DNA, 366 bp, Glycine max
gtcatgaattgcgtgtccttccaaaatgacatcatcgaatggtctcgggaccaccgatgccaccacaaatggacggacactgacgccgacccacacaacatcaaccggggcttcttcttcgcccacatgggctggctgctggtcaaaaagcatccgctggtcaaagagaagggcgcctccctggacatgtccgacctcacctcggatccgttgctgatgttccagagaaagtactacttgcccttggtgggcatcttctgctctttgctgcccactgctatccccgtgtacctttggtctgagtccgtttgggtgtccttttgcacttccgcactgttccgctactgcttgaacttgcacgccacg

SEQ ID NO: 51706 - DNA, 387 bp, Glycine max
tttgtgctcttcagattccacgttgggcccgggtggcctggacctctcccaggccttcttcaggcccataaacaacgccgtccctccctccccgaccaagcgccacaacaagatctccgacctgtgcatcgtcaccggcggcgcccgccagatctccggcgagtcacgcctcaacctcctacagaggaacctgtccctcttccgcgccattattccccctctggtccgttactaccccgacacaactctcctcatcgtttccaaccccgtcgacgtcctcacctacgtcgcgtggaagctctccggcttaccctccaaccgcgtcatcggctccggcaccaacttggactcttcccgcttccgtttcctcatcgccgatcaccttga

SEQ ID NO: 51707 - DNA, 336 bp, Glycine max
attgatcaagtgcaaatcagaaactatacagtgtgatatggcctggagaaacattatctaaacctcgtgggtgggtcttcccaaacaatggtagacaattgagaattggtgtgcctatccgagtcagttaccgtgaatttgtggcaccggtgcagggaacagagatgtttaaaggtttctgtgttgatgtattcacagcagctgtaaacttgttgccttatgctgttccttaccgttttgtcccatttggagatggccacaaaaatccaagctacacacagcttgtcaacttaatcacaactggttactttgatggtgccattggtgacattgcta

SEQ ID NO: 51708 - DNA, 369 bp, Glycine max
gtcttattatagacgcgctttggcgagagaaaaattagacaaaatcggctcagcttttaatgatgcaaaagaggccattcgtttacgaccaggggacactgtgttagtggaattatgctcgcgtcttctcaaaatcaacgcagagcgtttaaaacaggtcgaaagtgtggaaaatcgtgcggaagaaatgctaaaaattgcatttggagagcaacaaagtgacaaagaaaagcacataaaggccatgaacaatttgcttgttttatgccgagactcaaatagcggggcaatgcgagtttggcaaaatggacaaattgcggcgcaattgttgggagttatcaaaggaaatgcatcggacgaagaagcact

SEQ ID NO: 51709 - DNA, 462 bp, Glycine max
caccgcctcatgtgcttagagcatctcatatagaccatcaagtgggatccgcgccggttgttgcagcctcaccctgggatagacaacattctttcttgggagagtcacctgatgcatctggttttagattgggttctgttggaagtccaggctttcatggtagctggcagttgcatcctcctgcttctcacaatatattttctcatgttggtgggaatggtacagaattgacatcaaatggtgggcagggctctcctaagcagatgtcacatgtttttcctgggagacttcccatgactttggtttctaaaaacctctattctcgtagaagtgaaccaaacactaacaacaatgctgatgaaaaacaatatgtacttgacctaggccgcattttgcgtggggatgacaaccggacaacgctcatgataaaaaatattcccaataagtatacttcaaagatgc

SEQ ID NO: 51710 - DNA, 419 bp, Glycine max
cccaattatttgccgattctctcgctgccgctggtacgcgaaacgctctgaaaatgctgctcacgcgcattgagcagggcgaattcactgagctgaaggcggcacagatgctgaagacgttcagtcgcggcaatggacttgccgccccttccgatcgaattgcggacgcacttttggcactttgcaagtcgggacgagtgcaggactctgagctgctccgaccgatgagttggctcagtttcggtgccatcgctggcgaattaatgcaattgaagcgccttctgcgcatttcaccggttggcactccgttgggcgaaaagattgagcagtgtccggaccacaaaatggagctgtacacgaaggctctgttggaacagttcacttccattgctgacgataaccttgtggagaaaacaatt

SEQ ID NO: 51711 - DNA, 493 bp, Glycine max
gtgcaatcaaactcagtaataactggatgtaaattcagagggatgatccacaatatagcttccaaaagtattttgctccgggagttatgtggaatgcactgaaaagaaaagagaaaggattttgtaatgagccccaaagaagcagcgttttggaaggcccaacaaagtgttttgacccttttcaagcagtgttcgagcatgaagcatttgaaggagatgcacgctcgtgtagtccagagtgggttcggcaagaccccgcttgtggtgggaaagatcattgagttttgcgcggtttcggggcagggagacatgaattacgctctgagggtttttgacagaatcgataaacccgatgcgtttatgtggaacaccatgatcaggggatttgggaagactcaccaaccatatatggccattcatttgtacaggagaatgcagggaaatggtgacgtgccagctgacactttcacgttctctttcgtgcttaaaatca

SEQ ID NO: 51712 - DNA, 485 bp, Glycine max
cttgcattagtccctttgcttttcatcaatgaatctgatggtgcctcttattacccttctggtttacatgctgatattgctgagattgcaccctttgcttctcagaaagttaacctttcagtgtactatgcaagcctaagccaaccttgtgcaactttcattgttaagaatcttgaggaaattttccacagcgatctcatcaacattgtcaacctccagctagttccttgggccaatgcttatgttgataagactaaccattccatagtatgtcagaatggccctgatgaatgcgagctaaattcattggaagcatgtgctctcaatgttttgaatgatgtgaacaaacattatgctttgatttactgctttgagtttctggcaattgagggaagacacaagaattggcaggactgtttcagccaattggacttgcccgaggaacctattctgagctgctataacagaggaaatggaacagagct

SEQ ID NO: 51713 - DNA, 408 bp, Glycine max
ccggcttctgcacctccgatctcgaagaaacaaggattccgatccctcaagctcgtcaacgccgacatggaccaactcctctccgaccaacccgtcggcgtcgactacggtacactcgacaatggccttcgctactacgttcgctgcaattccaaacctcgcatgcgagccgctctcgctcttgccgtttgggccggatcagttctcgaagaagaggatgaacgcggagttgctcacattgttgagcacctcgctttcagtgccaccaagaaatacaccaatcacgacatcatcaagttcctcgagagtatcggagccgaattcggcgcttgtcagaacgccgtcacctccgccgacgacaccgtttacgagctcctcgttccagtcgacaagccggagctgttgtct

SEQ ID NO: 51714 - DNA, 211 bp, Glycine max
tggtggttctgggacgtggagcgttcgattacttggtggcgaattcggtttcgaacgagaatctgttaatggcgttcgggtgtggcgagaatatgcagaacaagctctcggatctcgtggagcgacccaactcgtcgaacttcaggtggaactacgcgatcttctggcaaatttcgcagtccaagtatggggattgggttttggggtggga

SEQ ID NO: 51715 - DNA, 368 bp, Glycine max
cgtacgcgtgggcggacgcgtgggcggacgcgtgggcggacgcgtgggcgctcgtttgaagtcgaagccgccgccgcaatcctcagccaagaagcgttcctcttcccgccgagagaggaggctcgacgacgccgcgattcgcgagcaggccatcgccgccgcgattctcttcaagcagcaccagcaacagcagcaattcgatcgctccacttcgcttcggtatccgaatggagtctccaagaagaataacagcaacaccttgccaaggagttcgagttccagggcaaggtccctcaccgaccctctccttcaacctcaccagcttctcaatcagggtgtgaatgtcgatgatcttgagacaaatcata

SEQ ID NO: 51716 - DNA, 377 bp, Glycine max
tttgttcattttacttggggggaaaagcgggttgagcaaggtcagcagctagcacctgatcagaagagtgaaggaaattcttcaagccagggaccagctgctggaaacttaatgcctggaaatattataagacctgtgcaagctctggcaactcagaagagcatcccgaacactatgaacaaccagattgcaatggttgctcagttgcaggctatgcaagcatgggcacatgaacgaaatattgatctgtcacatactgcaaatgctaacttaatggctcagctcattccactgatgcaatcaaggatagttcaacaaccaaaggcaaacgatactaacttaggtgcaatgtcatcacctgtccctgtttcaaacca

SEQ ID NO: 51717 - DNA, 440 bp, Glycine max
tcggtcccgcgtcgggaacagatgttttggattgatgcctaccaaaagaaggtgttccgttcggcattgccaaagggcaatcagtcgcacgaaggccaggaactgcaaattcattttgatgacaatgtgacgccgctgagtatggcggtggattatttgactggcaacatttacgtcaccggtgttgtgggcgcggaaaacattgcgaacgcggaggcggctggccgacgcaaaaggcgttggagccaaccgcttgacgaaacaggcgtagtttttgttgcaacatctgacggtcgctatcggaaaaaaatcgtgtttggacaacttcaaattccgactgcaattgtcacattgccaaaacttggccgaatttgttacagcgatgccgggctggaagcaaaaattgagtgtgccgacatggacggaaatcggcgacagac

SEQ ID NO: 51718 - DNA, 350 bp, Glycine max
tccacgcgtccggtcccaggacgaggagcaggtccgtgaccactacgaccgcggcgacgacttctacggctggttcctcggcccgcgcatgatctacacgtctggcatcatctcggacatcaacagcgaggagtcgctcgagcagctccaggacaacaagctgggcgtcgtctgcgagaagattggtctgcaaaagggcgagaggatgctcgacattggctgcggatggggcaccctcgcccgctttgcttccaagcactacggcgccaacgtcaccggcgtcactctcggccgcaaccagactgcctggggcaacaacgggctccgcaaggagggcatcaccgaggacc

SEQ ID NO: 51719 - DNA, 352 bp, Glycine max
ttggtgctcttcaaattaaccctctctcattttgtcggtccgaaaatgtccatcaacaaagccaccgtcggtgtgatcggcttgtccggcgccaccctgctgctgtgcctgttcggcattgcgtcagtgtacaacgaaatccagtccatctggaccgagctggacttggagatggaccgcttcatgctggagacggacgacatgtggcgtgacatgttggctatgggcgcaggcacgccgtctaaccgggcgcgccgtcaagccgttggcggaggatataacgcaccgcaaccggcagttgcgccggtgcccgtttgcaagtgcaaaagcaaaaatgcatgccccgctgggc

SEQ ID NO: 51720 - DNA, 414 bp, Glycine max
ttgtcagtgaccatagcagaagaagctgtgatgtcaaacgcagcagagcaagctcgtagtttatttggaatttgtctctcacacagacccaaatggcaacaattcctcatttgttcttctggtttcttctttggatatctagttaatggcatatgtgaggaatatgtttataacaggcttcagtttagctatggttggtacttcacatttgttcaaggatttgtttacttgtttctgatttatcttcaaggcttcacaagcaagcaaatgatgaacccatggaaaacttatgtgaagctttctgctgtacttatgggttcccatggcctcacaaagggatctttggcttttcttaactaccctgcacaaatcatgttcaaatccacaaaagttcttccagttatggtaatgggt

SEQ ID NO: 51721 - DNA, 463 bp, Glycine max
tcgatcaatgtcaaaacattagacaaattgatcatatattactttgaaatctggggcctctaacgcactagcctcacataaattatatgttgatcatacacagcggtgattgcagcaaaagaagaatggtttatcaatggttttttattatcaaattcatgtgccttctttgcttcgttgctggtcagaacagtagcaatacacaaccacttgattatagatatgcttgtttggaccaaacttctgttcctccttctactacataccaaaccaatctcgacgatttgatctcttccctctcatctgattctgctaccagcaatggttttgggaatggaacttcaggtattgatgaaaacatggtttatggactctatctttgtcgtggcgatgtgaacaccagcctttgccactcatgtgttcaaaactctagcatattgctcaagcagcactgccccaacac

SEQ ID NO: 51722 - DNA, 365 bp, Glycine max
ctgtcgcgtttgcggacgcgtgggcagaaagaggaggatgttaatggaaatgggctatcccaatcccatgcaaatggtgatgctaccactgtgcctgacattttcaacagcccgaatgtagttaacttgagcaggactggaattgagaatttggcaaaattggaggaccgaaaggaaccatggcttgttgtgctttatgcaccatggtgcccctactgccaggctatggaggaatcttatgttgacttagcagacaagttagcagggtcaacagggatgaaggttggaaaatttagagcagatggagaacagaaagaatctgcaaagagtgaactgcaattgggaagcttccctacgatattatt

SEQ ID NO: 51723 - DNA, 360 bp, Glycine max
tcgcctacgcgtccgcccacgcgtccgcccacgcgtccgcccacgcgtccgattctctgtctctctctctctctctcgatcaatcatggctttgcccaatcagcaaaccgtcgattaccctagtttcaaactcgtcatcgtcgttgacggtggtacaggaaagacaacgttcgtgaaaaggcatcttaccggtgaatttgagaagaaatacgaaccgaccattggagtggaggttcacccattggatttcttcacaaactgtggaaagattcgcttctactgttgggatactgccggacaagaagagtttggtggcctcagggatggatattatatccatgggcaatgcgccattatcat

SEQ ID NO: 51724 - DNA, 357 bp, Glycine max
ctcacgctttcgggttcttttcaaaaaaacaggcaattcatattcgatatccatgatacaggagacacgaacttccttccatcccaaccacaaggtggctgagaagacataaaaaatggcgacgagtcgctgcattggagctggctatgttggaggcccaaccatggctgtaattgccttgaagtgtcctgagatcgaggtggtcgaggtggacattgctgaaccgagaatcaacgcgtgtaacagcgaccacctgccgatatatgagcctggccttgatgatgtggcgaagcattgcatggggaagaatatattctgtaggactgatgtagagaagcatgttgacgaggctgacat

SEQ ID NO: 51725 - DNA, 322 bp, Glycine max
cccacgcgtccgcccacgcgtccggaaaaaccctaaccctaaccctagacatgtcaatcttctctcgcctccgccactactccaccacctccatcctctccccgaactcatccacccccctaacctcaaagcaaaaaacccgcagcgccatccacctcctcaaatcggagaccaacccggagcgcatcctcgacatctgccgtgccgccgccctcacccctgactctcacatcgaccgccgtgccttctcccttgccgtctccaagctcgccgccgcccaccacttcgccggcatccgcaccttcctcgacgatctcaaaac

SEQ ID NO: 51726 - DNA, 400 bp, Glycine max
ttaatgagtggcggaggaggaggagaagaggaagcaactctggagttcactccgacgtgggttgaggccgccgtttgcacagacatcgtcgccatatctctcgctgctgagcgcctccttcattatggcggaaagtttctcaaagccaaggaccagaagtcgctctacgaagctctccagaagatcaaagaagagctgatgcttctgggcttcatttccctgcttctcacggttacacaaaacggcattaccaaaatctgcgttcgtcccagtttgacgcgccacatgctcccttgtaatctcgacgccggtgaacactccacgcctgagtccgagtccgccactaaaattgggtactgcgtccgcaagaacaaggtacctttattatctttggaagcac

SEQ ID NO: 51727 - DNA, 358 bp, Glycine max
gcttgctcagcttgttgagttaaacaggccacccatccctccaatctacatgcagatatttgagcttctattgtcacctgaaacatggaaaagagcctcaaatgttcctgcacttgtgcgtctgctccaggccttccttcaaaaggcaccgaatgagatcacccaaggggataggctgaccaaagtgcttggcatatttgacacactaatccaagcttcaagcacatctgaacaaggattttatgtgcttaacactgtcattgaaagtcttgagtataatgctattaaaccatatatttctcacatttgggccgcacttttcagagagctccagaaaaggcggacagtaaagctcatc

SEQ ID NO: 51728 - DNA, 405 bp, Glycine max
tccacgcgtccgcccacgcgtccggcttctcaggtcgcctgcagtgccaatccgtcaagatggctcccaacaacctccccccgatcttcaaccctacgtctcaggacattgagatgcttcttgctgctcaggcccaccttggtagcaagaacctccaggtgcacatggagccatacctgtggaagaccaggcctgacggcattaatgtcatcaacattggcaagacctgggagaagattgtccttgctgcccgtatcattgttgccattgacaaccccgccgacatctgtgtcatctctgctcgtccttacggccagcgtgctgtcctcaagtttgccgctcacactggtgccgtcgctatcgctggtcgtttcacccccggtaacttcaccaactacatcaccc

SEQ ID NO: 51729 - DNA, 451 bp, Glycine max
cccacgcgtccgatcggtgaaattcaaaagccctgaaagcgtgactcgcccactctcttcacaccccgtttggcccttcttattactactcctcaacgacagcttcgcgccctgacttttcttaaccttcaccgttctatccgccgttatgtcaacggaacagtcaatgtcttcaattactattatagaacggttcgtcgtttgtattagtaacgaccgcaactcggagttatcagagacttttgttaattccaagtcgtaaacgtcgtaacagagaaaattcgccattgccgcgattaagcttgatttacccgagcccggtgggccgtggagtaaatacccacgcttccaggcccggcccactcgcttataaaactctttaccgtcagcaaacgccgttaagtcgttttttatctgtttcttgagttctggctcgagggctagggtttcg

SEQ ID NO: 51730 - DNA, 421 bp, Glycine max
tacttgttccttttgaaggttagaagtgctacaatacaaacaatggcagctactcaggaagatgtgaagcttttgggtattgtgggaagcccatttgtgtgcagggtccagattgcccttaagttgaagggagttgaatacaaatttttggaagaaaatttgggcaacaagagtgatttgcttctcaaatacaaccctgttcacaagaaggttccagtgtttgttcacaatgagaagcccatagcagagtctcttgtgattgttgaatacattgatgagacatggaagaacaaccccatcttaccttctgatccttaccaaagagccttggctcgtttctggtccaaattcattgatgataagattgtgggtgctgtatggaaatctgttttcacggttgatgagaaagagcgtgagaaga

SEQ ID NO: 51731 - DNA, 425 bp, Glycine max
gtaatttaggaacgaattttattttattttcaaaatatttgattgaaatttaaattgaaaagacgggagaataaaatctatcaagatgaggttttgagttgattaattcttgttgataattatcttctcatgttactatgttagcctctagtgctggagaagctgataactcttttctatgtaatttaggggatgttccttctatgggaacaagttgtgggatggccaccaatccgttctttcagaaagaactcaatggccactcagccacaaaagaatgatgataatgcagaagccaagtcggtatgcctttatgtgaaggtcagcatggatggtgctccatacttgaggaaagttgacctcaaaaactttggcacttacatggaactgtcttcagcactggaaaagatgtttagttgttttac

SEQ ID NO: 51732 - DNA, 446 bp, Glycine max
cggacgcgtgggattttctgttggaggctgcgtagttgatggaaatggcatgggagtggagggggtcaaaatcatagttgatggtcatgaaaggtctattactgacaatcaaggatattacaagcttgatcaggttacatccacgcactataccatagaggcccaaaaggagcattacaaattcaagaaactggagaattatatggtattgccaaatatggcttcgatagaagatatcaatgccatttcatacaatctttgtggtttggttaggatggctagtggtgatctgaaagtgaaggtggctttgactcatggacctgataacgtgaaaccacaaaagaagcaaacagatgaaaatggaaacttctgctttgaggttcttcctggtgaatatcgcttgtcagccattgctgctactcctgagaatgctgctggactcatgt

SEQ ID NO: 51733 - DNA, 277 bp, Glycine max
cccacgcgtccgcattgttcttgtcccaggttatttagaaaagcaaaatggtgacgatttgctgcattggtgctggatatgtggggggtcctactatggcagtcattgcacttaagtgcccatccattgaagttgctgatgatgatatctctaaatcccgcattgcagcctggaacagtgaccagcttcctatctattaacctggccttgatggtgttgagaagcaatgccgtggcaagaacctcttgttcagcactgatgttgaaaagcatgtctt

SEQ ID NO: 51734 - DNA, 378 bp, Glycine max
gttgcgtcaacgccttctcggccttttcggcatgttcttctacttcgtttgcatgttgctctgttcgaatagtccttctgaaattgtgtggcgtcccgtcctgtggggcttcttcctccaattttccatgggattggccgttttgcgttgggattggggttccaatcagttcgactccctctccgagttggtgctcacctttttggagtttactcacaatggcactgattttgtgtacggttttctctccacgccaccgaaaatttgtggaatggaccccgttttcgcctttcataccgcacaaattgtcatttattttggcgccgctgtggcattgctctaccattttggcataatgcaatttgtgatcaaaaagat

SEQ ID NO: 51735 - DNA, 358 bp, Glycine max
attatttgggtatacttctgaagggccataggttccaaggtggtggaaaggatgcggaacccaatcgcagtggcagtgcacctcccagcattgaaggctcatttttggccatagaaaaccttttaccccagcataacaccgcccagaatgcaagctttgcaaatctaagcagcactacgcaaaattgcgagtctgaagaacaattgcgagctgatccagcttatttggcatattacaattccaatgtcaacctaaaccctagactttctcccccgcttacgtcctgggaaaatcgccatctaggacgacatattggcagttctagaaataattggagaatgtcttctgcagatgatag

SEQ ID NO: 51736 - DNA, 194 bp, Glycine max
gggcttaacaatgataccgagttactggataggagacagccgatatatggaatcaacagattcactgaaagtgcagctacaagttactgggtttttgttcgggaagcctttcaagacatgactctgatgatacttggagtgggcgctattgagtcactgttagttggcattgcaactgaaggatggccaaaggg

SEQ ID NO: 51737 - DNA, 154 bp, Glycine max
attgatactgctggtggtgtcatgactgtgctgattccgcggaacacaactattcccacgaagaaggagctgattttgtcaacctattgtgataaccagcccggggtgtttagccaagtgtttgcaggagaactgtctggaacaaaggacaaca

SEQ ID NO: 51738 - DNA, 460 bp, Glycine max
aaagagggtggcatcacactccttcagaggatgggcattggcatatttttctctatactcagcatgctagtgtctgctagggttgaacagcaccgtagaactctggctctgattaatcctctaggagtggaaacaagaaaaggtgcaatctcatcaatgtcaggtctgtggctgattcctcagctgtcattagctggacttgctgaagcattcatgtctgttgcccaagttgagttttactacaaacaatttcctgagaacatgagaagcattgcaggttctctttactactgtggccatgcagggtcaagttatttgagtagtgtgcttattgcagttatccaccaaatcactgccaaatctgaaactgggaattggttaccggaggatctgaacaaggggagattggataacttctactcgctcattgctgctctagaaattattaatttaggctact

SEQ ID NO: 51739 - DNA, 348 bp, Glycine max
gcttccattcgttcgactttttcaagttttcagaagcaggggttaacagtcaggcaaagtttaccaaagatacttcgatcaataatgcttttgttgaagccattggttcaattttgcatgcttttttggttcctttgcgtaaaaataccatctcctgatatttttattgtgcagaatcctccttcaggtccaaccctggtggccggaaaatgggccagctggttgagaaattcatattttgttatagattggcataattttgggtgtactctacttgcactgtcattgggaagaaataggcattttgtctgcttatataaatggtgtgggaagcattatggaaaaatg

SEQ ID NO: 51740 - DNA, 393 bp, Glycine max
agagcgcctcctctcgattttcaagtctcagttaagccgtgccgtgtatttggagaattatgaagatgctgccaggcttaaggttgcatttgcagctacagctaacaacgacagtgttggaagagtgatgtcttatctcaatagagccataaaagaggagcggtatggtgatgcagctttcttaagagataaagctggcgctggacttgtgagttctgatagaatttgtttaatgcaacttgcgtgaatatctttgcattgtggtggaatagaatgccagatgcaatgtcaaagggtgggttggtggtctggtatttcagaaggtgtaaatgatccacatggtctaattattcgcataactcctgagcatggaagatatgtggcgaggagtta

SEQ ID NO: 51741 - DNA, 359 bp, Glycine max
tctctttctctctctataactctttctcacccgctagggtttccttttcatcgcatcttgagtttgcaacctcgtcttgtgatttccatggagggtgctgggatggaagagaataatattattaatgatgatgataataataacaagtctgaggcgcatttgacttctgccgctgcttttgtggagggtggaattcaggacgcttgtgatgatgcttgcagtatatgccttgaagctttctgtgatagtgatccttccacggtgacgagctgcaagcatgagtttcatcttcagtgcattctcgaatggtattactatttggcttttcattaattgattcttttgggctaatcatgggg

SEQ ID NO: 51742 - DNA, 274 bp, Glycine max
tcgagtatatgtaaggaacactccccgcaaccaaatagaggatgaagtaatccaagagaccctacctgcaaagggatctggaggccagtataaatattatttcaatattggaagtgttgagtcttttgaggggaagctagaggaagcgcatgaagctctgggcattgactctcatgattttgggcctgtaacatattctgagaggtctacattccaggaaatgacgaaggttgctctaacactgatggttttggtatctatcgggcttatgggg

SEQ ID NO: 51743 - DNA, 361 bp, Glycine max
acaatttggaccaagcgatcgttttctgtcgaaccaaattggactgtgacaacatggagaagtttttggcgccacgcgggtacaaatgcgtttgtttgcacggagaccgaagcgcggacaaacggacgcggaatttgctttcgtttaaggaaaagatagtgcgctttctcatatgcacggacgtggcggcacgaggcctcgacatcaaaggggtgccctatgtggtcaatgtgacattgcctccggcggaagaaaaggcgaattacgtccaccgaattggacgagtcggccgagcagaacgaatggggctggccatttcgctggtgtcgacagtgcccgaaaaggtgtggtaccaccaatg

SEQ ID NO: 51744 - DNA, 451 bp, Glycine max
gtggtttcggtaccattaagatcgccgattttggcctctccaaggttatctgggacagccaaactatgacgccatgcggtaccgtgggttacacagctcctgaaattgttaaggacgaaaggtactctaagagtgttgacatgtgggcccttggctgtgtgctttacactctgctttgcggcttccccccgttctacgatgagagcattcagaccctgactgagaaggtggcccgaggccaatacacattcctgtcaccctggtgggatgacatctccaagtcggcacaggacctcgtgtcccatctgttgacggtagatccagagaagcgctacgatatcaagcaattcttgaatcatccgtggatccgcgaatccgaggaggagacacaagcagctgcggatgctcctccgctcgccacacctttaaccaagaagcagccgacagaacc

SEQ ID NO: 51745 - DNA, 391 bp, Glycine max
tctttctttaccttcatcaaacatatctctcttcctatagaaacatagatacttgtgcagcataggacttaatagattaaagataattcacatgggatcgagcttctctagttgttatgagggtgagtctgtgtcaccttcttcgaagccaaccaaagtggtggctacaaagggtggttcttcttccaacagggtctctataacggacttgagtttccctggctcaacgctttcggaggatctctccgtttctctagtggggtctaacctgcatgtgttttcgctctcggagctcaagatcatcacgcagagtttctcttcgagtaattttctcggcgaaggaggtttcggacccgtgcacaagggcttcattgatgacaagcttaggcct

SEQ ID NO: 51746 - DNA, 422 bp, Glycine max
ttttggtctagccggggaccaacagctgatggagaccttggtgtttgtgtgagtgctcctggtggtgctgttgctcctgtccccacatggactcttcaacggcgtatgctcatgaatgggacatcaatggcatcaccatcagcttgtggaggaactgcgttgctcataagtgcaatgaaggttcttgcatgtggttcttttgtagcttatctcatttagtggtatttacttgcacacatctctgatttttgtgatgtgtgacgtctgtatgatctgcattcaggctgagggaatcactgtgagtccatacagtgtgaggaaggcgcttgaaaataccgcaattcccataggtgatttacctgaggataaattatccactggacaagggcttatgcaagttgacaaggcttttgaatatatac

SEQ ID NO: 51747 - DNA, 404 bp, Glycine max
atcaatttaagcacagcacttgggagggagatagaggcaggagtcgacatgcctattgggggagcaataactgaacatgtttctctcattacatttacttttggggttcatccaaaacgacttgattatgtgaaccaagtactgggatcatgtgccaagaagctttatggaaaaccaaagctggatgactatagagcctcacaccaagatgttgcactttcaagtgctccacttgataaatacaacgatattgggactggcctgacacttcccaattatcctagagtcatggaccatcttgatcatgaaacaaataaaggtatggccatggttattatccaaagcattatgaagaataacacttgcatctgtactgacgataagggtgaaggtttatttgaact

SEQ ID NO: 51748 - DNA, 414 bp, Glycine max
gtcaatggcgcttgcactgtgccgagacccaacccgaggaatgtggttgagctgggccacaacaatgtccacacttggatcggcggcgacatgagcggtttgcccacggcacctcaagaccccatctttttcatgcaccactgctacatggactacatttgggaacagtggcgcctgagatggcaaacgcgtgcccagcgcgagacgcaatttccatctgatcagcaagttgttgcgtgttccggttcaacaagctaccgtatcggcgaggtaatgcgtccattccaagacccggtggtgctaaatcgagccggccttagcaacgattacaccgactttctgtacacttacgcccctcggccgacttgtcgcgcagcggggggatgcggatcgccctatttgttctgcgacaca

SEQ ID NO: 51749 - DNA, 417 bp, Glycine max
ggcattttggatgggaataatttcagcagaagcataagcaggagcatacgcaggtcaagttggaaaatggaggaagtgtttgcgagtggaaggtattctcgcaggacttcacatgtggatgaggatgaggaggctctcaaatgggctgccatagagaaacttcccacctatgataggctaagaacaagtatcatccaaacctttgccgagggcgatcaatccggtgtgcacaaggaaatcgatgttcggaagttagatgtgaatgataggcaacaaatcattgacaagattttcaaggttgctgaagaagataatgaaaagttcctcaagaagttcagaaacagaattgacaaggttggaattcgacttccaacagtagaagtgaggctccaaaatttgactgttgaggcagattcc

SEQ ID NO: 51750 - DNA, 515 bp, Glycine max
cccacttcgtccgcgaaaggagacttagaaaaaaaacagaacaaacaaagtcgtcgtcttcgtctccccttagtcttttccgttaccgcgaaatatcaatcttcgttagcacccttcccatttcctatttcgagcgcagggaacagaacaaagcaatcaccaccttccaacgtcaccaagcctaaagaagaacacattagggttttgcgtgccagagagcgaaggagaagatggcagtggggaaggaagacgtggagatcgtgaaggcgcgcatcgacaagagggattacagaagagtcgtgctccgcaactcgctccaagtgctcctcattagcgatcccgacaccgataagtgtgctgcttccatggacgttggcgtcggttacttcagtgaccctgctggcctcgaaggcctggcccatttcctcgagcacatgctgttttatgcgagtgaaaaatacccagttgaagatagctactccaagtatattactgagcatggaggaagcaccaat

SEQ ID NO: 51751 - DNA, 458 bp, Glycine max
atgaaattaggctgctatttttcactttacaatttaattattttattttgctgcaatttttgctcaatccgtgccgaagaaataattgtggaaacaatttatggaaaattgaaaggacaaattcacactttagcaaacgaattgggacaaattgacactttctttggcattccttttgcacaagcaaaacgatttgagaagccaatcgcaccaccaaaatgggaaggggtccgatcggcggtcgaccaaccgcccgcctgtgtgccacacgcaaggccaacggaggaaggcatggctgatcagcagccgatcagcgaggactgtctctttttgaatgtcttcgcgccacaccgatcgccttctgctgagcagaacaaaacgttccctgtgcttgtggtgatccatggcggtgcttatgaaattggctcttcggcacgttacacaaagtacgaagtgat

SEQ ID NO: 51752 - DNA, 421 bp, Glycine max
ttttgattggtcagaaaattctagaggttcttataacaagtgggatgcaatatctcgcagcacaactcaggtttttcctggaggatggacagcaatccttatatcgctcgacaatgttggatcatggaacctgagagcagaaaacctggacaggtggtacctaggtcaagaaacttatctgaagatcgtcaatccggaagaaaatggtgacaccgagatggctgcaccagataatgttctatattgtggtcccctcaagagcttgcagaagtcgaattctactttttctgcagcttctactttgggacatagcttgaaccttttctcattgctcctgggactttttgctattattctcttcctagctagataagcctctattttgctgctccattggcatttttatagttctcaaaaatgt

SEQ ID NO: 51753 - DNA, 417 bp, Glycine max
cggacgcgtgggcggacgcgtgggcggacgcgtgggttccgctccaccaagtgggtatccttataatgcgccaccgcagccttataatgcgccgcctcagagtggctacggctataatgcgctgccgcaaacggcgtcgtatgggcaggggagcggttacgggtacgcgccacaagaggagaagaagaagagtaagtttggtgggatggggacgggattggctgtgggtgcggttgctggggctctaggtggaatcgcactcgtggagggtgctgagtatgttgaggacaagattgaagatgacgtggcggaaagagtggaggatgatcttggttacgatggtgatgacttctagagagtggtgtgatgtttcaggaggaggaggaggaaaaaaaaaacaaggaataataatatttt

SEQ ID NO: 51754 - DNA, 449 bp, Glycine max
agatagataaagagagttgtgaagcacaggatctaaaaacgtgttatctgacaagactttggaacatcacgggtgtgggaaacttcgagacccacgtgttttaaggcttctcacttttgaaaggtttcagttgtgacatcctccaagtgacaagagtggaacattcattcctttagtggcactttggttatatattaaattctgggctgtgagtatattagaacaaatgtccttccgcagtatagttcgtgaagtaagggatggatttggaagcctatcaaggaggagttttgaggtaaggctttctggccataacaggggcaagtcacgtagtttggtccacgagttgcaggatcagccaccagttatacagaacagccggtgggctagccttgctcctgagcttcttcgcgatgttattaatagattggaagcaagcgagagtacat

SEQ ID NO: 51755 - DNA, 295 bp, Glycine max
gttagacgtaaggagagtgagtattttgaaactagtcctgactatgggcacttagccaataaaatgggttccgtataccttgcaaaacttctctcacagcatttggagtcagtaattagggcacggatacctaatataacatctttgataaacaaaacaattgaagagcttgaatcagagatgaaccaaattgggagaccaattgctgctgatgctggggctcaactatacaccatcctagaactatgccgcgcatttgatcggatattcaaggagcatctagatggagggcgac

SEQ ID NO: 51756 - DNA, 300 bp, Glycine max
gtaagtgcaggcgtactgctacagaacgatgaagaccatggccaactcgcagaagccggacgagacgcaaattgccaaacacgtcaaatcgtcactgaaacagttggcaaatgccgtggtcgagcagcagttgcgtaccagcggaaagtggcagttcgagcagttgtacaacaatgcgcagcgccggccgtggacggagctcatcgaccggagctccatgtcccgacccgacaccctcgccgaagcatactcttggatccgtaagaacttcgcctactttcgcgtcaattacctaaccct

SEQ ID NO: 51757 - DNA, 228 bp, Glycine max
  unsure (1)..(228): unsure at all n locations
attgagaagaaaggtatattagaaaagataaaagagaagcttcctggttatcactccaagacagaggaggaaaaggaaaaggaaaaggagagtggtgctcattgatttaagatgnacanggtttttgttgttggagatgcatgattgtggtgtggctttgttttcatttcatcatatgacagccttgtgggtttctttgggttcttgtgatactaattacttattatt

SEQ ID NO: 51758 - DNA, 161 bp, Glycine max
tttttagtcgtaacgccactaaccctatgctggggcgacttcttgagaactggacgagtattaaatatatggttgatgaggggccttttgcatctgtgaactaggatgtaatattttattcacttaaataaagcgcattactatgtgcaccgagtgaggtt

SEQ ID NO: 51759 - DNA, 199 bp, Glycine max
tggagaaagctaacatatatccaaaaacatggactatgcagggagaggtgactgctgcaaagagaccaaagaatagggcattggaagtggatctggactttgagcataatgtgaggcctgctcctgtaatgactgaagaagttacagcttcaatcgaggatataatcaagaaaaggattatggaggggcactttaatga

SEQ ID NO: 51760 - DNA, 457 bp, Glycine max
ttagatttgcatcctgtgaattcaagggagatgatctttgacgtcttttatatgctctttaatctgggtttaacagcatatttgattggtaatatgaccaacttggttgtccatggcacaagtcgaaccagaaaatttagggataccatacaagctgcctcaaattttgcccaaaggaaccaattgccacatcggttgcaagaccaaatgcttgcacacttgtgtttgaagtatagaacagactcagaagggttgcaacagcaagagacacttgattctcttcctaaagccatcagatcgagcatttcacattatcttttttattctctgattgacaaggtctacttgtttcatggggtttcaaatgacttgctctttcaattggtgtcagagatgaaagcagaatattttccacccaaagaagatgttatcttgcaaaacgaagcccccactgact

SEQ ID NO: 51761 - DNA, 421 bp, Glycine max
ctttattttatccacatgattttccaatttcgtactggattcattgctccctcttctcgtgtatttggaagaggtgttttggttgaagattctcgggcaatagctaggcggtatgtatcatcatatttcataattgacattcttgctgttcttcccctcccacaggtggtgattctagttatcattccagagatgagtggttttaaatcacttaatacatatgactgcgctggaacatgatggtttcctccaatacagtgcctcgtctattgcgaataattccattatataatgaagttacaaggtcctgctgcctctttactataactgcttggactggagctgcattcaatctctttctttacatgcttgcaagtcatgtaattacaagatttctaacctctcccgctccagtggcaat

SEQ ID NO: 51762 - DNA, 439 bp, Glycine max
gatttattttgaaattggaaagaaattgaaagctctgaatgacttggaggttgaagttgtggagcttaagagagaaaacaaagaacttcaacacgaaaagcaagaattaacagttaaactcaatgctgctgaatctagaattacagaactctccaatgtgacagagaatgaaatggttgccaagaccaaagaggaggtcagtagcctaaggcatgtgaatgaagacttgcttaagcaagtggaaggactccagatgaataggttcagtgaagttgaagagcttgtatatcttcgttgggtcaatgcatgcttaaggtatgagctcaagaattacctggcacctccaggaaaattatcaacccatgatctaaataccagtctcagcccaaaatcacaagagaaggctaagcagttaatgttagaatatgctggatcagag

SEQ ID NO: 51763 - DNA, 402 bp, Glycine max
ttttctcgtccggcccgtcgctatgatactcgtgcgacaatcttctctccagaaggccgtctctaccaagttgaatatgcaatggaagcaattggtcaggctgggacttgtcttggaattcgagctcccgatggcattttcattgctgcacaaaaactaacggcaaacaaattgcttgatgatcgaatcatgagcgagaaaatctacaaggtgtcggcgaacatcttctgcacggcggcggggatcaccagcgacgcgaatgtgctggtcgacaaattgcgcgaaatggcggtgatgaacactttggatttcggagagaacattccggtggaacagctcgtgatcagactgtgcaacaccaaacagcactacacacaagttggaggtaaacgaccctatgga

SEQ ID NO: 51764 - DNA, 454 bp, Glycine max
attagcttgttgaagagtttaggagttttctttgccctttaattcaactcaatggaagcaacgaaagaacttgtatctccaattccatgcgatgatggacaccttgttaccgttcttagtattgatgggggtggcattcggggaatcattccaggaattatacttggcttcctcgaatcagaacttcagaagctagatggagaccatgtaagattggcagattactttgatgtgattgcgggaacaagtactggaggattagtgactgcaatgctcactgctccaaatgaaaataaccgacccttgtatgcagccaaggatattaagaatttctaccttgagcataccccaaaaatcttcccacaaaataagtaaacaccatttactttaccatgcataattaaacttcattccaaatcaaccatgctatatatattttatctatcaatatata

SEQ ID NO: 51765 - DNA, 428 bp, Glycine max
gcctagcgagtcgagttgttcttcgatcccatccataattgaaatgtttcccccaattttccaaaccctagctttcccactcgcgcttttccccactcgcgcctcgtgatctcccgcccttgaaggttgctcatgaagtgcaatttatattgtagcaggtattcagaaagcagtgcatagtggtgcagtgagtggaaatatgggtgatgcactaaatgaagtgcagcacatgggtggtgcacctgctgcttctcccaagagggacattacattgcttgagggagacaaagattttgagctgcacaatggcattgaatttgaatcccatgaagcagcatattcattttatcaggaatatgccaaatctatgggattcaccacttcaataaaaaacagcagacgctcaaagaaaacaaaagaatttattg

SEQ ID NO: 51766 - DNA, 494 bp, Glycine max
ttatttttttcttaagctccttagtgctgctccttgcagttataattctatcccctcaagttcttgcttgctatgataattccccagggtacaagcctcccactgagaaaccaccagtttataagcccccagttgagaagcctgctgttcacaaacctccagaagaaaaccccccaacttataagcctccagtggagaaccctccactgtacaagccccgacttgagaaacccccagactcaagccgccagttgaaaaaccatcagtgtacaagcccccagttgagaaaccaccagtgtacaagcccccagttgaaaaacccccagtttacaagcccccagttgaaaaacccccagtgtacaagcccccagttgaaaaaccaccagtgtacaagcccccagttgagaagcccccagtttacaagcccccagttgagaagccaccagtttacaagcccccagttgagaagccaccagtatacaagccaccagttg

SEQ ID NO: 51767 - DNA, 273 bp, Glycine max
aataaatattgactatgtgcttgatgaaccatgcgggggccctacactaggcaaaagggccaaggctgaagacattgctgcaaccaaggctgcagaaaggagatggctgaacgatgatttgacatgtcaacgcaatatcttgagccatttatctgatcctctgtacaacctctatgcaaacagaaaaatgagtgctaaggatttatgggaagagttaaaactggtttatctgtatgaggaattcggaaccaaaagatctcaagtgaaaaagta

SEQ ID NO: 51768 - DNA, 278 bp, Glycine max
ttttcacaaagctggatacagacctgacaccgggggagttttctatgatgttgagggagaaataaagggaatgatgctttgggaacatagcgagaggttggcacttggcttttgctcttagcaatactggcccggggaccactatcagactatccaagaatcttcgcgcgtgtggagattgccacacagtaataaaaatgatttctcggttgacacatcggcagataatactgcgagatatttgtaggttataccattttagagatggcttatgctca

SEQ ID NO: 51769 - DNA, 405 bp, Glycine max
ctttatttgagccacctccttggttcatcatgttggtgggcaacccccaagcccaaaccctaattcaaatccagctaagagaaggagaagtctacccggaacaccagatccagatgcagaagtggtggctctttcacctaagtccctaatggccaccaaccgtttcttatgtgaagtttgcaacaagggttttcagagagaccagaatttgcagctgcatagacgtggacacaaccttccatggaaactgaagaagagaacgaacaatgatcaagtaaggaagaaggtgtacgtgtgccctgagaagagttgtgtgcaccatgacccctcaagagccttgggggacttgacagggataaagaagcactatagccgaaagcatggcgagaagaagtggaagtgtga

SEQ ID NO: 51770 - DNA, 233 bp, Glycine max
aaaaccctatgcgtgttcatctcaacttctcttgctccgaacaatgactatcaagggttttgttaaaggtctactattttctacgacagaggaggaattagccaaagctttctctcaatacggcagtgtcctgaaggctaatataatactgaataaagccaagaatagatccaaaggttgtggatatgtgacttttgctaaagaggaagaagcatgcgaggcacatattgaca

SEQ ID NO: 51771 - DNA, 441 bp, Glycine max
ttggttagaaggaaacaatggcagcgttcgtgaagggagcaccttttcgagtcgtagttgaccttcttcattgattactatttctccctcagatttcgcttcaatcttccatccccgttccgttcaattctactttcaaggttggatgacttggattctagactatcatcatcttctgaagctgcagttaaaacatgtggatttagtattgataaattaagccatggtggccatggaagcagtactacttctcggtcttttaaaagaagaattagaaagggatccgaaggactgaagtcaattggccgatcacttggattaggggtatctagggcagtgttccctgaagatcttaaagtttcagaaaagaagatatttgaccctcaagacaagtttttgctcacctggaataagctctttgttatatcatgcattttagct

SEQ ID NO: 51772 - DNA, 460 bp, Glycine max
ttgtttcagcaacaagatgggacatttcgaagcacgccttggtatgttcggtttggtaaatttcagggtgtactcaaaggtgccgagaagtttgttaggataaatgttaatggtgttgaggccaattttcacatgtatcttgacaattcgggggaggcttattttttgaaggaggtggatgatgataaagtagttgattcaattgaggctgttcaagattctattgacaaaaagaatggctatttgagtaatgttcatagacttgatcatagcatctcggattctggggtgcttcagttgaaagatgagagtgattccttggttttgcctcaacttcaaagggcagaatctgatgttgataggaggttttatgaattcccggatgatcgatcttctttagaagattcagttgagttgtcggaatatgagtctaattcgtatgagagcctagagggagaca

SEQ ID NO: 51773 - DNA, 426 bp, Glycine max
ttcttttctggaggttcttctgaggttttgattgaatccttggaagagtctcaggatgacgtgtctgactttgttgtttatcagtcggaacctgaggaggaagagttgagtgaatacgagttcgataagaaacttggacttcctcatccgtttattgatccaaaggttaataagccgatagaggggacactttcgaatgacgagctgtggtggaattggagacagccggagaaagaacaatggtccaggtggcagaggaggaaaccggatgttgaaacggttttcctgaatgctatggcagaaaccgggcaaataaagcttcacggtgaacacccaacattaacagaaactgccctttaccgagcaaggcgtgaaatttataaagaagaaagacttcaggccgagcaagagagactggaaagagat

SEQ ID NO: 51774 - DNA, 325 bp, Glycine max
gttttaaagcttatgcttttaagacaatgaagcaattgagactattgcaacttgagcatgtacaactcactggagattatgggtatcttcctaagcatctgagatggatctattggaaaggatttcctttaaaatacatgcctaaaaacttttatctgggaggcgtaattgcgattgatttaaaagacagcaatcttagactagtctggaaagaccctcaggttttgccgtggctgaaaatcctcaatcttagtcattctaagtacttgacagaaacccctgacttttcaaaactaccaagtcttgaaaagcttattctaaagat

SEQ ID NO: 51775 - DNA, 287 bp, Glycine max
tctacgcgtccgcccacgcgtacgccaaaatggggaaattgaagtggcggaggggctgatggagtggaacaccgcgacgaaagagatcgaggagtcgaagacgttcagaggggccatgggaatgctgctgagcataggaaacgcactgaacggcactgacataaaagccttccaattggactatctgagccgtgcgtcagaggcgaaagaccccgcgcacaaatatccgttgacgcaccacttgtccgagtacatgatcgaccattactcggactggacagatttgt

SEQ ID NO: 51776 - DNA, 334 bp, Glycine max
tcgtttcacgcgtccgagaagctactttgcttcaggttcggggttttcacattttgattccagtgcttaatggccttaacattagcccttagtggaaccaacttcaccacagataagcttgcacttcttgctctcaaatcttcaatcactagagaccctcacaatttcctcactcataattggtctgccaccacttctgtatgcaattgggttggtgtcacttgtgatgcttaccatggaagggtaaggacattgaatcttggcgacatgtctcttagtggcaccatgccctctcacttgggaaaccttaccttccttaataaacttgaccttg

SEQ ID NO: 51777 - DNA, 434 bp, Glycine max
gtgttaaggaagccatatgttgttgtgtttgttggagttaatggagttggaaaatctactaatctagctaaggttgcttactggcttctgcaacacaacgtcagtgtcatgatggctgcttgtgatacatttcgatctggagctgttgagcagctgcggacccatgcacgcagacttcagcatgttgtattataatttccctttccagattcctatatttgagaagggttatgaaaaagatcctgccattgtagcaaaagaagcaattcaggaagctgcgcgcaatggttcagatgtggttctagttgatacagctggccgtatgcaggataatgaaccattgatgagagcactgtcaaagctcgtctacctcaacaatcctgaccttatcttatttgttggagaagcactggttggtaatgatgcagttgatc

SEQ ID NO: 51778 - DNA, 434 bp, Glycine max
tcattggaaagctgcaacttgactgggctggtgtgaaaaggctcaaaatggccggacccagcatggaagcatcgatgctggaaaaatctgatactttgaaagaactgtttattcattgttgcccgaaatatgaaatgttttgcgattgtgaaatgagtgatgatggttgtgactctctaaagacttttccgctagatttcttcccagcactctggatccttgatctcgtaggctttcgtaatctacagatgattacacaggatcacatccataatcatcttgaatatctgataatcagagagtgccctcaattagaatcattgcctggaagcacatctctgaaggagctaaggatatatgattgtccaagagttgagtcgttccctgaaggaggtttgccatcaaatctaaaagagatgcatctttataactgc

SEQ ID NO: 51779 - DNA, 486 bp, Glycine max
tgctgtcgcgtggggccgttctcatcaatgggggggcaagtggcacaacattcacagttgagcaagggaaaacatataggcttagaatatcaaatgttggacttcaaaatacactaaactttaggattcaaggtcatgacatgaagttggtggaagttgagggaactcacaccatacaaaccacatattcttcattagacgttcacgtgggacaatcttattctgtgcttatcacggttgatcaagcacccaaggactactacattgtagtgtctacacgtttcactaacaaaattctcacaagcactgctatccttcactacagtaactcccaacaatctgtttttggcccaattcctagtggcccaaccactcaaatcgattggtcaatcaaacaagctcgttcaataaggacaaacttgacagcgagtggaccaaggccaaatccacaaggctcctaccactatggattaataaacattagta

SEQ ID NO: 51780 - DNA, 316 bp, Glycine max
cggtttcgttttcaaggaaggataaaatgcccatcaatcttaaatatatagatccaacttacatgattcgggcaattccaagcaatgcatcagacaatgtctactgtacacttcttgctcagagtgcagtccatggtgcaatggcagggtatactggatttacagttggactggtcaatggcagacagacttatattccattcattgttagtttctacatatcattacccaaattctgaactgtttaataaatataatgtgttgctctttttttatttgggtacaataattttctattcttgttttatatcaaggg

SEQ ID NO: 51781 - DNA, 402 bp, Glycine max
tcgctttttcgtgggttgcagtcctgcttatcgagcatcagtgtgccaacgaccccatggactcacgtacagacatagaggaagaaggggcggaacatctcttccgacgcttgcaggattcctcagatgacgcctcgatacattttgatattggcgtgttcttgtgggaaaaaggaggagaagcgaaggaaaaagctgctcaacattttattctatcggccaaattaaaccctaagaatggagactgcttcaaatatctgggccattattatggcggcgtttcccttgatactcagagagctattaagtgttaccaacgagctgttgttctcaatcccgatgattccgagtctggggaagcgctgtgcaatttacttgaccaaggcggaaaggagagtttgg

SEQ ID NO: 51782 - DNA, 379 bp, Glycine max
ctgacttttgggggaaatggcatgtcgcttccaaaaggattgttgggggtcttaagcatggcaggcaaaagggtttgatgagatttatgtctcttcgctggcctttgcaatggataagaccaaaggctgatgcaaataataatagccccaagcaggggagctctttgcctgttgactcagtcatgaactggtatcttgctcttgagtctggcaatttttggttccttgctcaggtctataaccgtgagaatggtcatattggattcttgttatcttgctatgatgctgaacttagctatgatccacagactgatacctttcaagccagatatcctccctttcctttacatcctcttttcagttttttttaaagtcccca

SEQ ID NO: 51783 - DNA, 410 bp, Glycine max
ttctctctcattcaaaccattcgatctcatcatctccccaacctcttgaatgtcaagccattgataattgaaagaattgagactgatcaaagtaaattggaggaagtcgctgaagaaagatgtgacgagtcaaatgtaaatatagataatttgaaggatttaagtgagaataaggttcagagggaggtatctgagattgaaaaggaagcttggaagttgcttcaggatgctgtcgtcacttactgtgggaatccggttgggacagttgcagctaatgatcctgcggacaagcaaccgctgaattatgatcaagtctttatccgtgattttgttccatcagcacttgccttcttgctcaatggtgaaggggaaattgtcaagaattttctacttcacacattgcaattaca

SEQ ID NO: 51784 - DNA, 286 bp, Glycine max
tttcggtctgagtggatggcgccagaagtcttgagaaatgaaccagccaatgagaagtgtgatgtgtatagttttggtgtgatcttgtgggagttgactaccacaagaattccctggcaaggtttgaacccaatgcatgttgttggagctgttggatttcaaaataaacggcttgaaatttcagaagatgtcaatccagtagtagcacagataatacatgattgctggcaaacgtaagttctatttctgtacttacgatttctgattgttactttagtttctagca

SEQ ID NO: 51785 - DNA, 343 bp, Glycine max
tcgtttttttccacaatggctaatgacctctaacctcccagcacatgcccatgaaacaaattcttatgaccagaggcataggcccgaggtgatgaaatatttttgggagagaccgatcttgactaggcgacattaccggccagtatcaggtggagcaccgtttgtcacttgtcataaatgcttgaagctgctgcaactgcctgctgatttcctcctcttcaaaagggtataccaccagctcaaatgtggtgcatgtcaagaggtactcaagttttctctgcagaacagaagtcatatagtctcgtatgcaccaaatgctctcgagcccccatcatcatctggt

SEQ ID NO: 51786 - DNA, 441 bp, Glycine max
cgtgcttgtttgtttatcttagagcaactctgcaatgtgatctgcccctcaaaaccagagcctgtatatttgttggtcctgaacaaagcacatacgcaggaagagtttatcaggggatcaatgactaagaatccatattcgagcgttgaaattggcccattaatgcgtgatgttaagaacaagatctgccatcagttggatttgttaggtcttcttgaggatgactatggaatggaattgttagttgctggcaatattatctctcttgatttgagcattgcacaagtttatgaacaagtctggaaaaaatcaaatcaatcatcaaatgtgactaattccaacttgttgtctccaaatgctgtcaactcatccagagattgcccaccaatgaccgtgacttatcggctccagggattggatggtgaagcaactgaacctatg

SEQ ID NO: 51787 - DNA, 354 bp, Glycine max
gtcgctccgcaccagtttcaccgcacgaatatcttgttgtttggagcgatccgagaaaaactctgtaaacatgttggtttaccaggacctccttacaggtgatgagcttctctctgactccttccgttacaaggaaattgagaatggaatgctgtgggaagttgaggggaagtgggttgttaaaggagcagttgatgtagacattggtgcaaacccttctgctgagggtggaggagaagatgagggagttgatgatgcagctgttaaggttgttgacattgttgacacattcagacttcaggagcaacccgcattcgataagaagcagtttgttaccttcattgaagaggttta

SEQ ID NO: 51788 - DNA, 366 bp, Glycine max
acttcctatcgacagacactttgacataaacaatgtcaagaggattgtccttgaagcagatggatatcaaccttatcttatctctccagagaaaggtttgagatccttaattaaaggcgttcttgaactggcaaaggagccatcacgactgtgtgttgatgaggtgcatcgtgtgcttgtggatcttgtttcttcttctgcaaatgcaacgcctggtcttggaaggtatcctccattcaagagagagattgtggcaattgcaagttcagccctagaggcatttaaaaatgaatccaaaaaaatggtggttgcactagttgatatggagcgtgcatttgttcctccccaacactttattcgtttagt

SEQ ID NO: 51789 - DNA, 456 bp, Glycine max
ctcactcgtccgggccaatcaaccaaaattatggaagccttctgatggattttctttacttttttgggaatgtgtttgatcctcgccaaatgagaatatcagttcagggaactggactttatataaaaagagaaagaggttgtagcattgatccaattcacatagatgatcctctttttccaacaaataatgtgggaaggaattgcttccgaatacatcaatgtattaaggcattttcagaagcttactctgttcttgaaaatgaactcaaattcctaaatagtgatggtgagtcatgttcaaggccacctgacagactgcttccaaaaatcattccaagtcttgatatatcataagatctcactacatgaagactgaaatgttattttgtctaaagtcaaatttttctgttaagcaggttcctggcttgtgcaaagttatgcatgtcaaaatatg

SEQ ID NO: 51790 - DNA, 422 bp, Glycine max
  unsure (1)..(422): unsure at all n locations
tcgctcacgcgtccgctttctcgagcacttccaaggcgaaagtcagcatcatatataccttacttctccatccgaaaactcagacatggcaagtgtctcactggtctcagctactggaagaaggcttgaggggaaagtggctattatcactggtggtgcaagcggcataggtgaggccactgcaagactcttctctaagcacggagcacacgttgtcatagctgatattcaagacgatttgggtctctctatttgcaaacacttggaatccgcttcctatgttcactgcgacgtgacaaacgaaaccgacgttgaaaactgcgtgaacaccaccgtttccaaacacggcaaactagatatcatgttcaacaacgctggcataaccggtgtgaacaaaaccagcatnctcgacaacacaaagt

SEQ ID NO: 51791 - DNA, 425 bp, Glycine max
ttttcttttgctatttttctccccaactaggtatcaaactcctccaccaaggttttagaaaagaagagaactacatggacacaacacacacaaacagtgaatatgaagattggaagagcattgatatagcagattctatcttaagttatggaagtgaattgggagacatggaagaaaatgaatggcagatggtgcaaacgaaaggaaaccaatttgtggtgaacgaccaacctttctatgttaatggattcaacacatactggttgatggtatttgctgcggatgagtccacaagagggaaggtcactgaggtgttcaaacatgcatcctctgtgggtatgtcagtttgtaggacttgggccttcaatgatggccaatggcgtgctcttcagaaatctccatcagtttatgatgaagacgtattc

SEQ ID NO: 51792 - DNA, 434 bp, Glycine max
ctcactcgtccgaaaattccgaacccgaattcgaacaaaaatataaactcgcagcgattgtgcggatcccttggttactatttccttttttctattaaatgaaaaactttacaacctatttcaagaataagaacatattttatataatcgaaatctctgttaagaaaaatatctattttttttagtttacttgactgtcatgatgggtttattcgggagaacgaaagttgacccaaaagaacaggtccgagagcttcaacgtaagctaaggcttgaaaattcaagactcaaccgacaaattggggccatccaacgcgaggaagaaaaagtgaaacgggaaatcaaaacagcagcgaaaaagggggacagagaagtgtgcattctgttggcgaagtcaatagtcaactcgagaaagtgagcaaactccacggaac

SEQ ID NO: 51793 - DNA, 389 bp, Glycine max
tcgttcacgcgtccgcccacgcgtccgaatttatacaccccaatacaaatcccgaaggaacccaacttattagactagagtctagagaggttgctgcatggtgacaaccaagggacttgtgacagtgtgcttggtatcagaccagacaatggaaccagtcttgacagtggaactaccaggggaaagcttaactgccctggtttgcaccctaacaaggaagttcaatttctgacccaacctcctgaaagccagcgtgtccggttcaaccgtgacctcggtgcctggagggggtgcaatagtgagtgtgtagagcgagttggggtctccaacattggtgacagttctaataaagtgtgtggacatgtgctgctttccatactgttgaaaga

SEQ ID NO: 51794 - DNA, 456 bp, Glycine max
  unsure (1)..(456): unsure at all n locations
tcgttggtttccctttccaccaccccttttcttcccttcactgcaaaaaatgcttctactagaatccctcctcccacatcattctcttacagcaagcaacgtagtaacagggatcccaggaaggttgtctgcgcctgcatcgctcctcctcaaaacttcaagagccaggactcttccgccattcatttcaatggttcgtccaaatcagagcaattgagcactgcgcgggatcatgaggatgattctgatgttcttattgagtgtagagacgtgtacaagtcttttggggaaaagaaaatcttaaatggtgtcagcttcaaggtaaggattatgtacttgactatgactctcttttggataaacctctcaataagaattgagcttctctcataacttaaaaccaatttatacacttaactcttatagaagctctntcatctaacttatacaaaagct

SEQ ID NO: 51795 - DNA, 444 bp, Glycine max
tttcttacgcgtgggttgtgaagtaatgagaatcgctcctccacttcaaggaggttttagggaagctatcaatgactttattttcgatggcttttcaataccaaagggatggaagttgtattggagtgcaaattcaacacataaaagtccagaatattttccagagccagagaaattcgatccaactagattcgaaggacaagggccagctccttatacttttgtaccatttggtggaggaccaaggatgtgccccggaaaagagtatgctcgattggaaatattggttttcatgcacaacctagtgaagaggtttaagtggcaaaaattgattccagatgagaaaattatcgttgatcccttgcccatacctgcaaagaaccttccaattcgtcttcatcctcacaaaccctgaaaagatatttgatttgaatcaacacaatt

SEQ ID NO: 51796 - DNA, 391 bp, Glycine max
ttgtaattaaaatgtgcagcaatccaaacgccaaagttttgtcttcgatttgcggcttcagtcggatggggccgaaccgcgagttgaaaacgcgcgttgaaacgttttggaaagagcaggcgaagctgcacatggacggtgcaaccgaaggcgaattgaccgtttcaatcgatcaatttgagagggacattgaacagttgcaaatccaacgttggcagcaattgcaggcaacgggcatcgatctgatcccatccggcgacttctctctctatgaccacgtgttggactgcgcgtgtcttttcaatgccattccgacgagatacaaatcggctgctcagctcagcggtgttccgtcccatctgcgcctttactttgcgatggcacgcggtct

SEQ ID NO: 51797 - DNA, 256 bp, Glycine max
tctcatcgaggttttcgtggacggctaccccgggaaaatccccaagggaatgaccgttcttcaggcctgcgaggtcgccggcgtcgacatcccgaggttctgctatcacagcagactctccatcgccggcaattgccgcatgtgcctcgtcgaggtcgagaaatcgcccaaacccgtcgcctcttgcgccatgcccgctcttcctgggatgaaaattaagactgacacacctgtggcaaagaaggctagagaagga

SEQ ID NO: 51798 - DNA, 299 bp, Glycine max
tgaaaacagtaacattaacatgtgtgtttgagtggccgtaattaaaacacaagactgcagaaacaaagaaaagcatagagtatgtgttcaatgttgaaggtttttgcagttatagaattagtattgctgatagtgtaccctggtgctcatggtttgagcagagatgattttcctcctggttttgggtttggggcatcaacttcagcttaccaggttgaaggtgcagcaaatgaagatggaaggaagccaagcatatgggacaccttctaccaagctggaaatgggaatatgtatgctgg

SEQ ID NO: 51799 - DNA, 461 bp, Glycine max
tgttgttggtggttgatcctagcttatgagtgagtgaggctaatggaatgtgaagagtgatgatagtattattatgtgtctatggaattcgatgccgcgattcccgtgtcccgagagcacctccctcaagatggacttgttcatatgatgttggtttcagatgcaatgtggcaaattaacttgaggtcaagtgaaacaatggaatcaggaccttatcctgagcatccaggagaaccagattgttcatactacattaggactggcctttgtagatttggagcaacatgtcgatttaatcatcctcctaacaggaagctgttacctgatagttttttctttgaaaactatcaggctattgccgctgcacggatgaaaggtgaattcccagaaaggataggacagccagaatgccagtactatttgaagacaggaacttgcaaatttggagccacatgcaggtt

SEQ ID NO: 51800 - DNA, 406 bp, Glycine max
cttgcttttgttcttctctgccagaacaacttcaattgctcttcggaccatcctctgagtcttaacacctcaacataagctcttgtaacgaaatttcaactcaatccatatcctcctaatcatgtctacccgtcctgagaatattggcatcaaggccattgaaatctatttccctaatcagtgtgttgagcagagcgagctggagaaattcgatggagtgtctactggaaagtacacgattggtcttgcccagaccaagatggcgctctgtgatgaccgggaagacatctactccctggctctgactgtgacccactccctactggagaagtacagcattgacccgaactcgatcggtcgtattgaggtcggcaccgagaccattctggacaaatccaagtcggtg

SEQ ID NO: 51801 - DNA, 481 bp, Glycine max
tcgcttacgcgtccgcccacgcgtccgcccacgcgtccgcgatgacgccgattacgccgcgtcgcagcaacaaggatctgctagcgtgatgttgcggagtgacagtgccaaacagagttcccctcggaacggtgctgaaattgtattttcgaaggacaatgttgcaattcatccgactcaatttgcgtctgaaagaatcagtggaagactgaaattgattaagcaaagctcgtccttgtttatgacttggataccttacaaagcgcatagctcagaggccaggctgtctgataaagacagaaacctttataccataagggcggtgcccttcactgacatcaggtccatccggaggcataatcctgctcttgggtggcaatatgtcattgttgctctatcatcagatctgaagaagatgccaacgtattccttgtgaatgattttcagaatacactgcagaggactttgtcttccttggaga

SEQ ID NO: 51802 - DNA, 333 bp, Glycine max
cataaacccaaccctttctcaacttctttttactccttgccccttctcagatcgcctatactgataagtcccaaaacacaaaccctaaccctaaccctaaccttagctattcgaaggccactcctcttcgcgaaatcatggcgacgactttggtgagctccgcgggtgggatgcttgcgatgctgaacgagccacatctctcgctgaagcttcacgctgtgtccaacctcaacaacttggtcgacaccttctggcccgagatcttcaccagtctcccgaagatagagagtttgcatgaagatgacgagtttgatcaacatcaaaggcaacttg

SEQ ID NO: 51803 - DNA, 428 bp, Glycine max
tttttccgggatgtttctttgccctcatctttgtgtcttgcaatgccatcccggcccctgtcctccttgcaaagcatttgcccctccacgtctgtgtccttgtgggaagaaaaatattaccactcgttgctctgaccgccagtctgttcttacctgtggccagcgctgccaaaagcttcttcaatgtggccgtcatcgctgtcagcaaatctgtcatctgggtccttgtcatccttgtcaagttccaatcaatgcctcttgcttttgtgcccaaaagatggaggtaattctttgtggggagatggctgtcaagggtgaaatcagagcagatggtggagtattctcttgtggctccacttgtcaaaagaaacttaattgtggtaatcatatctgcatcgagacttgtcatccaggcagctgtggggact

SEQ ID NO: 51804 - DNA, 423 bp, Glycine max
tgtgtccgataactagttagggcaaggaggatttggaacagtttataaaggagttctagctgatggaagagagattgctgtgaagagattatttttcaacaacagacatagagcagcagatttctacaatgaagtcaacataattagtagcgtggagcacaagaatctagtcagactgttaggatgcagttgttcaggacctgaaagcctgcttgtatatgaatttttacccaaccgaagtcttgaccgctacatttttggtaattactgaactgctgcagaacgctagactacccttttcacctataacacctcatttgggtcactaaaagcgattatcaattcatcataatgtgaactaaatataatatttctcaatttatacatggaagataaaaacatgggcaaagaattgaactggga

SEQ ID NO: 51805 - DNA, 399 bp, Glycine max
ggtgagttattattttccgctcaaaacgatgtggcgctcgtttttctgcgctttggtcgccggtgttatccttcgttttgtcaacccgttcggaagtgatcagacttcgctgtttcacgtggactattccatgcgttggacattcatggaactgattccgttcgcaatgttgggcattttcggcggtgttcttggcagtttgttcatttgggccaacatcaaatggtgcgcttaccgaaaaaacagccgatggttgggcgcaaatccaatcaacgaagtgctcatcgtcagtgccatcaccggtgccatttccttcttcaacccttacactcggaagagtgcaagttcattgatcaaacagttgtttgaccgatgtggtcccgaggactacaccatgga

SEQ ID NO: 51806 - DNA, 361 bp, Glycine max
tgcttatcgctgtttccgcatctcgcttccttcccaaactgttaatgagtggtttttgagcaacagcagttaaaagagaaaagggattcagcgaagatgacatcggttggtgtggcaccaacttcgggtttgagagaagccagtgggcatggagcagcagctgcggatagattgccagaggagatgaacgatatgaaaattagggatgatagagaaatggaagccacagttgttgatggcaacggaacggagacaggacatatcattgtgactaccattgggggtagaaatggtcagcccaagcagactataagctacatggcagagcgtgttgtagggcatggatcatttggagttgtct

SEQ ID NO: 51807 - DNA, 351 bp, Glycine max
aactggagaatctcgggtttcggtattgctgggttggagttgaatccgcgaaagcttgttggatggcaggttcagaacgcagtagtagtagggtttggcactacgaattcgacgttttcctcagctttagaggagaagacaccaggctcggtttcgttggaaatctctacaaagctctgacggaaaagggatttcataccttctttcgcgagaagcatgtgagaggagaagaaatcgcagcatcaccatatgtggtggagaaagcaattcaacattcaagagtttatgttgtagtgttctctcagaactacgcttcttctacacggtgcttggaggagcttctcagtatcc

SEQ ID NO: 51808 - DNA, 187 bp, Glycine max
  unsure (1)..(187): unsure at all n locations
actctgccactgncgcggntcttggcgatggattcatggcaaaggaactgacggtcgaaaacacagcaggtcctgatgctcaccaagcagtggcattcagattagacagtgatctttctgtgattgagaattgcgaattcttgggcaatcaagacactctctatgctcactcactgcgccagtttta

SEQ ID NO: 51809 - DNA, 436 bp, Glycine max
  unsure (1)..(436): unsure at all n locations
atcgccttcgcgtccgcccacgcgtccgcatngggctgcattccccaaagnnncaatctttgtattcaattcaccctttctctctctccatggccacttgtgttgatctttggctgaagattcaagaggaagcaaggttagatgttgatcaagaaccaatcttatccagctactatttcagttccattttgtctcacaaatccttggagagtgccttggccaaccacctctccacaaatttgagcagcttgagccttccaagcagcaccctttatgaccttttcatgggtgtttttgccgatgataatgacatcataggtgctgtcaaagatgatttgatagctgttaaggagagggaccctgcttgcataagttatgtgcattgcttgatgaatatcaagggtttcttggcatgccaggctcataggattgctca

SEQ ID NO: 51810 - DNA, 361 bp, Glycine max
agctgctttcccccacgcgctctgtggccgcgacatcctcggcgccgccaaaactggctccggtaaaaccctcgctttcattatccctgtgttggagaagttgcatagagagagatggggacctgaagatggggttggcagcatcatcatatctcctacgagagaattggctgctcagctgtttgatgtgttgaaggttgttggcaaacaccataattttagtgctggccttctcattggtggtcgaaaagacgttgacatggagaaagaacgtgtaaatgagctcaacatattgatttgcacgccaggtagactgctgcaacacatggatgaaactcccaactttgattgttcacagatg

SEQ ID NO: 51811 - DNA, 463 bp, Glycine max
ttttcttgttctctctgtttcttcagattttctccctcctcagcgcctgtgaaggcaactaatgaaaatcttccaccaaatgtaataaagcaactagccaaggaattaaaaaatattgatgaatcacctcctgaggggattaaagttgtggtaaatgatgatgatttttcaataatatatgctgacattgaaggcccagctggaactccttatgataatggagttttccgcatgaagttgttattgtctcgtgatttccctcactctcctcctaaagggtttttccttacaaagattttccatccaaatattgcaaccaatggagagatttgtgtcaacacacttaaaaaggattggaaccctaaccttgggttgcgtcatgttctcattgttgttaggtgtctactaattgagccatttccagaatcagctctaaatgaacaggctgggaaactgctgcttg

SEQ ID NO: 51812 - DNA, 317 bp, Glycine max
gttcgtctgcagctggagcaattgctgaagagcaaccaaaatggcgaggatgctgcaagtgatgcggcgggagaggaagatgaagatgaagatgaagatgatttaagggttgatgaggcgaaggttgatgcgagcgaacatatgggctttgcaatggtcgagaagcgtgtgcgtacaacaggtggtgcaagtacaggaactggtacgaatccacgtattcatgaggatactgcaaaagatcctgttaatcttgatgtcaattctgcacactatgatccccagtccagatccatgcgcaaggatccacttgcagatgc

SEQ ID NO: 51813 - DNA, 341 bp, Glycine max
tgcctcgattgacaggattaagcttacatctacttcagaagtatatggggaccctcttgagcatccacaaccagaaagctattggggcaatgttaatcctattggagttcggagttgttatgatgagggcaagcgtgttgcagaaactttgatgtttgattatcataggcagcacggaatcgaaatacgcattgcgagaatctttaacacatatggaccacgcatgaatattgatgatgggcgtgttgtcagtaacttcatcgctcaagcaattcggtaattcctttaactttataatgttataggcaagatggatatgctgataaataattttttaagac

SEQ ID NO: 51814 - DNA, 394 bp, Glycine max
aatggaaatgtccagggaaattggccaatgccaaggctcagcaacagaactgaagaatgagttgaagcagatcagaagcaatgcccaagcactagcttcagtggccgatttgttcggcaccagcggagggaatcgtaccaaacggcacgcatacgaatactatggctatggcagaggcagcacttgcaccgagtgctgttccggcggcgcaccgggtccggccggcagacccggcttgcccggaaaggcgggcaacccgggcactcctggcgcaccaggaaagccaggccgatcgcttaacacgccatgtgaactgatcatgcatgcaccgtgccgaccgtgcccaggcggtgcgcctggcgaaccgggcccgtccggtccacccggcgtacct

SEQ ID NO: 51815 - DNA, 350 bp, Glycine max
taactaaactcggaactcgacgtagccaccctctacattacgcaagggctcatcttcagctccggcacggtcctcaaccaccgtcgtaaactcaagcccacacatgtcgagcgcctgattttcggccagggtactcgccgacttcccttaacctccgtggtctctacgactctagggcggattgggcacctgaactgctgggagaatttgaacccgctgctgaaggcacacagcgcggcgcaaggggagcaggtgcacgtcgccgcgtggccattctatccccccgacagcggaagggtgaagccggatccgaacaccaacgtggcggatccgaatgcggatattgttac

SEQ ID NO: 51816 - DNA, 374 bp, Glycine max
atttgagtccagctagagtaaccaccatgaaaaactgacagcgttgcttgtaaaaagtttctgcatcagtagtaaagggcataagagtaaaatattctgcgatcaagcttaccaaggtatgccttggaaattttgaccgaggctggaatgcttgattgtcgcccgagcgacactcatatggatcctaatgttaagcttcttccgggtcagggggagcctatggaagaccagggaagatatcaacaacttgtaggcacacttaattatctcactgtcaccataccaaacatcacatttgttgtcagtgtggtgagccaacccattcttgaatgctctctgtgatagtcattatgatgttgtcacatgtatccttc

SEQ ID NO: 51817 - DNA, 326 bp, Glycine max
gctgcggggcttgttgactttgccgttggtactgatactacaggatgtgtgagaattccagcatcattctgtggtatttttggttttcgtccatcccatggggctgtatctaccattggagttcttccaaatgcacaaagcttagacactattggatggtttgctcgcgatccatctatcctgcatcgtgttggacatgttttacttcaattgaattcagtggagaccaaaaggtccagacatttcatatttgcagacgatctctttcagttatctaaaattcctacacagaatacaatatatgttattggtaaagctattgagaa

SEQ ID NO: 51818 - DNA, 353 bp, Glycine max
ctgtcgcgttggcggacgcgcgggctctgatcatggattctcacaacatcaaaatccacgaccacttaagggtttgccgtacattatcatcagagatatccgtctctgtgactgacttcgacctgttctggctcaggttccaccccgtggaacgcatcttgttctacacgctgcctacaccccattcaaattcaaccattttctattgcaaactggctccaaagctcaaaacatctatctctcgcactctccaacacttcccccctctagccggcaacgtcgtttggcctgatgacaccccaaaccccaccgtccaatacaccccaggggactccgtttcactagtggttgct

SEQ ID NO: 51819 - DNA, 436 bp, Glycine max
atttttcttcacatatgtaggataatttactggttgatgcatcagtggccgatggtttccatctccaactccacacgggacccgttggtctgaggtggacagcttgagttctgggcgggatctgcaaaatgcaaatccagtatataatcatagaacaagttttggctcaagtgtaagtgattctgatcgtcctagacatcgtggggttgaggctgcctattcttttgttggaatgcattgcatctttgatcagtgcaaagcctctgttacggtgttgaagtttgggcacatgagttctgatctacttgcttatggggcatcagatggaaccttgactgtgtgcagtgtatctgagaatccttcagtcatcaaacaattaaacgggcattccaaagatgtaacagattttgattttacatcaaacaatcaatacatt

SEQ ID NO: 51820 - DNA, 369 bp, Glycine max
ctgtggggagtcctcgaagcaagagcatgtcgaccggggattttaggactctgaatggagccggcggagcgccggcgaggtccaggtccacggaggatatctacacgcggtcgcagctggaggcgtcagccgcgaacaaggagggattcttcgcgcggaaaatggcggagaacgagtcgcggccggaggggctgccgccctcgcagggagggaagtatgtagggtttggatccagcccgacgccgccgccacagcggcggaatgatgcccaaaacgattacttctctgtcgtttcgcaggggattgggaagttgtcttttgttgctgcctctgcggctaatgttgttcaggttggcacgaaggagttca

SEQ ID NO: 51821 - DNA, 291 bp, Glycine max
gcctagagcatatcatggaaaaatatccggcccgcaacaatctcgaacaccttgcgatgcttaagtgtaccgagaaaccgcacattgtgcgcaagacgggaatcatttgcacgatagggcccgtttgtcgttcggtggacatgttggtccaaatgatcgaaaatgggatgaacgtcgcccggatgaacttcagtcacggtgaccacgaatatcacggcggtaccatcaaaaatgtgcgtgaagcagctgccaaatgcaccaagaagtacaacgtggctattgcactggaca

SEQ ID NO: 51822 - DNA, 425 bp, Glycine max
ggtttatgcagtttggagatgacatcggtaaacttaaccctgttgacgtccgttaatccagatgatttccgttgccctatttctctcgagttgatgacggatccggtcactgtgtcaacaggtcaaacctacgaccgagcctctattcagaaatggctcaaagccgggaacacaaaatgtcccaaaacaggggaaaaactaacaaacacggacttagttcccaacacaacgctcaagagactcatccaacagttctgcgccgacaacggcatttccgtcgctaactcctgtaaccgtaaaaccaacaccgtctcagcaggtagtcccgcggcggcacacgcgattcagttcctcgcgtggttcctcacgcgcaggctagcattcggaacccaagaccagaagcacaaagccgcgcaggagattcg

SEQ ID NO: 51823 - DNA, 423 bp, Glycine max
cttggattttacaatacctaattgactccaaaatggaatggtattctggtgacgttactactgctctgaacatttaccaagagaagaaaggcattcttatcgtctatgttttttctgatgatgtaaattccacaaaatttgaccaaatttgggattcgtttgaccattcaattctggatcgcgtcccttatgttgctattcgacttgctaaggacactgaaggcgcaaatcaattcgctcaattctttcccactccggtttttcctgtctgttactttctcgggctcaatgctcaaccgctcgaagttctgactgccgttgaacagatgaccattgaacgtttgaacagttcgctcactaaggctatttcgctatacaatgaccaaatgaaggaacaaggcttcgccacagatgcagtttcat

SEQ ID NO: 51824 - DNA, 393 bp, Glycine max
attattttaagtttcttgttttgaactccaactgctttcatggatccattccctctagcattaccaatattactagtctagtaaatgtaagtttgtcttttaatgctttaactgggaaaattcctgagggtttttcaaggtcgcctaatcttactttcctgtctcttacatccaacaaaatgactggggaaatcccaaatgacctctataactgctcaaaccttagcactctaagtttggcaatgaacaacttcagtggattgattaaatcagatatccagaatctctctaaactcatacgcctgcagatgaatggaaattctttcataggaccaattccaccagagatcggaaacttgaatcaactcgtcactttatccctttctgaaaata

SEQ ID NO: 51825 - DNA, 241 bp, Glycine max
tctcacgcgtacggaatggagaagagatgacatcgattgcaggaaccagtgacgaaaaggtttacaacaagctaataaaaggacttgatacatgggttgctacattgagtggcatggaagggaccatggatgagaaactaacttgtgacaaaatttttgacaaacgtaagactagctgcttcactattcttcccatggaggttaatcttgaggttcgaaagaaggtgagaaacattgtgag

SEQ ID NO: 51826 - DNA, 449 bp, Glycine max
ctccaagaaaatgtcctgatgcaattaccacttctctttcaatgtcttccactggcttttcaagctcgtcttctcctgtaagggaagaaactacatcttgcagttctaaggaggagaaatcttgtatgcaacaaagatcatttgctggtcgaattgctcaaatttttaataaaggtcctgatgtgtcttcagtgtcacccagcagaagtattgacttggaccaatctgaaacaaacaaagctgtagttggtgagatcaagattgaggaagatcagtcctctaatgagactttcgaagaaactatgaaaaaaatacagtctgctgatcaaggaagtgaaattcctaacaatttatcgggaggagtgcttattgatcaattatatattgttgcaccagaagacttgaatgtattactattttcacctgattctaattttcccaagtcatta

SEQ ID NO: 51827 - DNA, 280 bp, Glycine max
attaattttaatcgatcatcacttcacttcactaatacatcatggcagacgagacccagaacaagtatgagagctctgaggttgaggtccaggatcgtggtgtttttgactttctcggtaagaaaaaggatgaagaagacaagcctcatcctcaggaggaggtcatcgccaccgagtttcaaaaagtcactgtctcataccaaggagagaacaagcacagtcttttagaaaagcttcaccgatctgacagcagctctagctcttcaagtgaggaggaagg

SEQ ID NO: 51828 - DNA, 296 bp, Glycine max
atacataataacatgcgtaatcatgttattctaatggttaaaatttaagtttcttgtatcttatttaatgtttagaatagtgattgaggactcggagggttattctgtttgcatgatgagagctttcacctatggtttctgcttgggttcttggtacagtggtcttcagtcagtgttcctttatgcatctgttttacatcctgttgacatggcgtcttgtgttgcagtatccatgggcaatgtgctattataatgtttgatgttactgcccgactaacatacaaaaatgtccctac

SEQ ID NO: 51829 - DNA, 434 bp, Glycine max
tcgtttacgcgtccgagacattgtgattggttattcagagaaagtaagggcattaggctttacaatctttgagctattctcagaggctcttggccttcattcttcttatcttaaagaattggactccgttgatggacaatttctattgtgtcactactatcctccatgccctgaacccgaattaactatgggtacttcaaagcacactgatattagcttcatgacaattcttctgcaagaccagatgggtggtcttcaagttcttcatcagaatcaatgggttgatgttcctccagtgcatggatctcttgttgtaaacattggggattttctgcagcttatatcaaatgatatgttcgttagtgtctatcatagggtcttatcaagacatacaggccccagaatttcagttgccagtttctttgcaaactcat

SEQ ID NO: 51830 - DNA, 425 bp, Glycine max
tttagtcacagcacagtgtatatttcgcaactacaccatcgccatgcttacaccttgccttttttcgtttcactaataaataaataacactaatatattgatattaatacatcggagaccaaatcagaacaatcaaacagcctttttctgtgtctcttcaacgcaacaactagggattcgttcttcgccatctgcacagtattatgactgaaaacgcgtgttacgtgtgaagcattgtcaggaattatatggattctttcaatgctctgttagggcgcaatggagcgaaagatcattgattttgaccaaggttgggactatatgcagaaggggattaccaagctgaagaaaattcttgaaggagcaccagaaactcctttcagttctgaggaatacatgatgctatacacaaccatatataatat

SEQ ID NO: 51831 - DNA, 316 bp, Glycine max
cgttcgcgtgggcggacgcgtgggtgatgttgcaattgttgacgatggaaaattagacactgagtcagactcaggtgaattttgggtcctctttggtggttttgctcccattgggaagaaggtaatcagtgaggatgatattattccagagacaattcctgctcagctttacagtattgttgatgttgagatcaagcctgtggaaggtgaactttctaaatcactgttggaaaacaacaaatgctatttactggactgtggtgctgaggtgtttgtctgggttggtcgtgtgacacaagttgaagaacgaaaatca

SEQ ID NO: 51832 - DNA, 378 bp, Glycine max
ttttgcttgggaaatgacactggtatagttgaggctgtttatactgtactgagagaagcagaagatcgaagtgttgctccaattccagtctgggagatcccaatatggaaagacgtatcaccacgtctaaggaaggttaatgcagctctcaaattaatcaatgatacgcttgatgatctgatagcaatatgcaagagaatggtggatgaagaagagttacagtttcatgaggagtacatgaatgagcaagatccaagtattctacacttcttgttggcgtcaggagatgatgtgtcaagtaagcaacttcgtgatgacttaatgaccatgctcattgctggacatgaaacatcagctgctgttttaacttggaccttt

SEQ ID NO: 51833 - DNA, 373 bp, Glycine max
tttctcttgggcaaataatgaccaatcataatcttccaggctgagagctatacagaggagagcacaattgattcttttcatgtttctgactttggagcatttgatcagtcatatggaataggggatgctgttgacctcagtggaaacccagtttacaattcactaaaagtaaacagccaaacaatttctccaggttctgttcacattagtagtcttggtcaggtgagtttttctagttcttttcatccaatgaactccctgctttggtgaataaggcgaagatctagctggtatacaggatgccatatttcctagttttctctatttcctctttaatataggggccaacttcacttgaaaaaagcccattgac

SEQ ID NO: 51834 - DNA, 375 bp, Glycine max
cttttccagagtttcatactcaggctgccatccagtgcattttttttaagcctgagtatgaatctctggatggcagcctatcttttccgtaccatacagaagttccaagaatcttactgtttggattcctcgggttcacttgtgctattctggcacccctaatgttgcccttcttgttgggctactttttcattgcttaccttgtttatcgaaaccagattatcaacgtatacattacaaaatacgatagtgggggacagttctggcccattgttcacaacacaacggttttttcgttgctattttctcaacttatcgcactaggggtgtttggactcaaacgctcatcagttgcatctggattcaccattcctc

SEQ ID NO: 51835 - DNA, 346 bp, Glycine max
ttgtttctccgcaccagtttcaccgcacgaatatcttgttgtttggagcgatccgagaaaaactctgtaaacatgttggtttaccaggacctccttacaggtgatgagcttctctctgactccttccgttacaaggaaattgagaatggaatgctgcgggaagttgaggggaagtgggttgttaaaggagcagttgatgtatacattggtgcaaacccttctgctgagggtggaggagaagatgagggagttgatgatgcagctgctaaggttgttgacattgttgacacattcagacttcaggagcaacccgtattcgataagaagcagtttgttaccttcatga

SEQ ID NO: 51836 - DNA, 474 bp, Glycine max
gtcgttttgctacgtcggaacgcagccatcttcccccgtcgccgatgcgcccctcaataatgacatcaagatattctacagaacttacggtggcggtccaacgaaagtgcttctcatcataggattggccgcgacacacgaagcgtggggcccacaaatcaaaggcttgacgggaaccaccgtctccaacgacgacgacgacgacgacgtccgcgtcgtttggagcggagaagaagtaaatggtggcatccatgtatgcgcgtttgacaatcgcggcgtgggtcgcagctccgtggccgtctcaaaatctgaatactcaaccaagatcatggcaaaggatgcaattgctttgttagatcatctaggttggaaaaaagcccatgtttttgggcactcgatgggagctatgatagcttgtaaagtagcagcaatggttcctgatagagtcctttccttggcattgctcaatgtgac

SEQ ID NO: 51837 - DNA, 450 bp, Glycine max
tgtcgtccggtttctggctcctgtggaaacttataaggaccgtattgcatctgcacttgaaacacttagaccaacaacttcatgggagagaaccacgacagcaggtcaagggctggatggtgttctgataggtgggcgtggttttgggatggcaatggaagctctctgcaattaccttggttctgaatatgggaacacttttgctttagctagagtctttgccttcttgtctggtccccctgattatggagctggacaattggacacgagacgatatggtgaacaatatgcaagcaaaggagaggatgcagatcgtgctttactcccagagcagacacccttttataaagatctggctgctgttgctgttcaagcaggtgtatgtgttgacatatttgccgtaacaaatgagtacactgatttggcatccctaaaatttctgagtattga

SEQ ID NO: 51838 - DNA, 213 bp, Glycine max
cattgagcttcgagatgcccctgaagaacaccctgtacttattaccgaggcacccttcactcccacggccgacagagagaaaatgacccaaaccatgtttgagactttcaatgagcctgccatgtatgatgcaattcaagctgacttgtctctgtatgccactggaagaactccatgtattgagcttgattctggtgatggagggagccacac

SEQ ID NO: 51839 - DNA, 294 bp, Glycine max
tccacgcgttcggtgatttggagtttggagcgactgaactaatcattaatttgcactcgctgtttcagcttcatcacccttcttttgcatcatttatatctattgagaaatggcacaagaaacctttctattcacatctgaatctgtaaacgagggtcaccccgacaagctgtgcgaccagatctctgatgcagtacttgatgcgtgccttgaacaggaccctgacagcaaggttgcctgtgagacatgcaccaagaccaacatggtcatggtcttcggagagatcacaaccaa

SEQ ID NO: 51840 - DNA, 365 bp, Glycine max
tctcacgcgtccgttacaatctcttttagcagaatcaggagataactcctgtcttcttttgtccattttggtcaagcacttggatcataagaatgttgctaagcagcctatccttcagattaatatcattaacactacaacaaaacttgcacaaaatttgaagcaacaggcttcagttgcaatactcggagcaatatctgatctcattaaacatttaaggaagtgtctgcaaaattcggctgaagcttccagcactggaaatgatgggcttaagctgaatactgaactccaatttgccttggaaatgtgtatattacatctttccaaaaaggttggggatgtcggacccattcttgatttgatgg

SEQ ID NO: 51841 - DNA, 339 bp, Glycine max
tgtactcagccacgacgtgttgcggctatgagtgttgctgctcgagtttctcaagaaatgggtgttaaattaggacatgaggttggttactccatccgttttgaagattgtacatcagagaagactattctgaaatacatgactgatggaatgttactgagggaatttcttggtgagccggatttggcaagttatagtgttgtgatggtggatgaggctcatgaaagaacactctcaactgatattctgtttggattagtgaaggatattgctcgtttccggcctgatctcaagctgctgatatcaagtgctacacttgatgcagagaaattcagtgat

SEQ ID NO: 51842 - DNA, 437 bp, Glycine max
ttctttttgatcaacagggctgttaaggtgtggaaagagttgcagactccggtggataaattatctgagaccggacatcaaacggggcaactttaccagagaagaagaggacaccataatcagtttgcatgaaatgttgggaaacaggtaatcaaacattttccctagctagctagcataacatttcacattatttcgttaaagatagatgatttagtccaacttaatggaaataaattaatccttaatgaaagaggttaattgaaaagccaagactgcacaagggatagtctcaataatacatataaccatatgtagtactcaggctcgaacagtgaagcaaattaattaagattcccagatatcttcatttctatatgttgggtcctcttctattctgttccatgaaactgatggaggagatgcatgtgacttca

SEQ ID NO: 51843 - DNA, 440 bp, Glycine max
ctctaagtcaatataattatagtatatccctatgagtaggagttcggcgatgcatggaattacaagcacaaacaacaagttgaagggagttcggcgtcgaaaatggggcaaatgggtgtcggagattcgtgttccgggcacgcaagagcgtttgtggttgggaacctacgccacgccggaggctgccgcggtggctcacgacgttgccgtctactgtctaagtaggccttcttcgttggacaaacttaacttccccgaaaccttgtcttcgtacagtgttcagctcagggacatgtctccgaggtctgtgcagaaggtggcttccgatgttggcatggatgttgatgcaagaaacattgttgcgggcaaaacttcaacggtgggggcagaaactaattgcgagagtgatgagaggactagtactgcgtctgtgtgtaatg

SEQ ID NO: 51844 - DNA, 434 bp, Glycine max
ctgacgcgtgggccgaacgaaaagtggacgcacagcgaacatcgagtcaaagtgccagaattgctagcaaattattgcgatttgttgctcagaaagtcggccctgacgaaaaagttttcttctgaagagatcgacaagagagactgaacaacgtgcttttggtgctgaaatatgtcacagctaaagatgttttcatgcgttatcataagacgcacttgagccgaagactgattctcgagttggtggccgactaagaaaaggaggaaatgctcaacttggccctaaggaaatcgctggaaaatggcagctgcagccaaatggccgattgtgtaagcgtcaaaattctgaatgccggagcatggtcgaggagtcgagaccgttcgcacctgactttgccacgggaattggaggatttgaccccggaagttgaggac

SEQ ID NO: 51845 - DNA, 435 bp, Glycine max
ttcgtccgctcacgcgtccgcccacgcgtccgcccacgcgtccgctcaatcatttttttctggggaaatcattataccattttattacttctatttttattttattttatctttattaaaattagttatataactagtgctgcacttgcccaaatatggttctgcatatggctttcctagatactttatgtgattgtttaaagagaatattaggaaacagttcagagatattgctgttggagctcaatgtatcttctatgagcgatccatgtttggggtttaaacaaattttacgctggctgtcgagggcttaacgtaactgttctcccttatttgggtttgagactagctatgagattgtaggtggagtgaagatggattgtgtgtccacaaaagaaaggacaagatacaaaatgatagtatcaaggagatatt

SEQ ID NO: 51846 - DNA, 415 bp, Glycine max
cggaaaaccctcgttcttcccaaaaatgtctctacgcgggttccgaatctaccagaaaattgatctcaatggtgtcggatacatcgtggaatccgttcacgcaaacgctcaccttcagttacattccggagctgcgctccaacttgacggagaggaagccgaggagctcaagaaatcgcataccaaacttgcggacggctatggagtgctcggtatcctacggatctctgatgaacaagaatacttgatcctggttacgtcgacattccctgtgggccagctacatggaagcgacatttacaagatcaccggcgtccagttcatccagctgcgacaagcgacggagttcatcgaccaccgcatcgcagagctgcaacgtctcatgtcttccggcatcttctacttcgcatacaca

SEQ ID NO: 51847 - DNA, 388 bp, Glycine max
cacaggttgatgtggcactttgatttgaagaagttcagaccaagtgaagtaccaagggtgaagataagtttggcttgtgtttttgcctttatagcaattggatggccattaattatttacaagactggaatcatgggatggataaaattctggttgatgccatggttgggctatcacttctgggtaatttcaactctatcttgtaaattcatactttgttcgtcagtgttggctccaatgtctttgtttctttctttttgtttcctaaggggcagatgatttatgagagagcactgtgttctacttaaataaagctatggcacttctaatttttaaacttcaaagctgtcatttaaatataatgttaacactcaagtctttataattc

SEQ ID NO: 51848 - DNA, 389 bp, Glycine max
cggacgcgtggggttctgtttgtttcataatgtaaagttgagatacttaaaactagcttgttttcacttatatgcatagctatctatacattgctccattaatcaggctcttctttatattgcagatttatctccttttgcagagttggtactggactctctgatgatgagcttgatgctgtagtgaccaaacttaaaccttacttcagaaagtatgaatatccaaagaagaggccaccaagtttttatcaagtgactaatcattcaaaagaaagacctgacgtgtgggttgatagccctgagaaatcaactattctgtctatagttcgaatatcactggctatagacagaataattgatttctcaggattgacagggtgagatatgac

SEQ ID NO: 51849 - DNA, 478 bp, Glycine max
gtaatccatgaatttgcaaatcagatgagattgaatgggaaagatctgcctgaagatggacaattgcttagctcacatgaactcatggaagcacttcaggttataagttcagataagcaattgtttcttagacttctacaagaccctaattcacacttattgaaatacattcaggagttggaaaatgctcaagggagaggtggcaaagaatgcagttcagttaccagctccaactgctctgaacatgaacttgttaaactgaaacaaactagggagactgccaaccgcaagcatcgtaactttttcaggaaaagggtgaagtctcaaccaaaagattcaacaaatgaaaatgagaaaactgaattttcaaatagaattgtcattttgaaacctgccctaacaggcatgcaaatttctgaaagtggaaacaaccttgcctcaacgctaaattctcatgacatcgcccagtacaaaaatc

SEQ ID NO: 51850 - DNA, 379 bp, Glycine max
ttttaatatgacatattgataactgctaattcatatcaatgctggttgatatgctttcttgtgtataaaagctggaagcctggtcagagatcaaaggactttatagaggagcaacaccatcttttgttgggatggcagttgaaggatcactcttttttggcatttattcccagacaaaagtgtaccttcaggggggagttcaaagtggggaaccacggcctcaagtgataataccatctgcagcttttagtggtgccatcatcagttttgtgttaggtccaacagatctgataaagtgtaggatgcagatacaaggcactgactctttggttcctaaatccagtagatacagtagtccccttgattgtgcccttaaaac

SEQ ID NO: 51851 - DNA, 444 bp, Glycine max
tggacgcgtgggcggacgcgtgggtccaagtttgagcttctccaattcaatgtcattcgacacggaccaaaaattgccggttaaatcgccggccgaccagcgccgcgaggcaaatgccattcgcacattggcattcgtcggcgtttgtctgtccaccgtgtccacaatgatttgtgtggtgtccgttccgttggcttaccagcatttccagcagatgggcaccaacatgttgagcgaaattgacttctgcaagtcacgctcgggcaacatttggaacgaggttactcgtacccaagttctgtcgcaagtgtacggcaaaggcggcgcttttcgcgcagttcgccaagccgatggttacggtggcggaggaggaggtgccagcggcggaggagctgcctcttcacaacctcctgcagctggaggttacggcgcgggaggaggagc

SEQ ID NO: 51852 - DNA, 417 bp, Glycine max
  unsure (1)..(417): unsure at all n locations
ccttacgcgttcgtgcagattgaggtggctgaattatctgcgtcctgatgttcgacgtggaaacatcacgcttgaagaacaacttttgattctggagctccattctcgctggggaaaccgatggtcgaaaattgctcaatatttgcctggtagaaccgacaatgagataaagaactattggagaacccgtgtccaaaagcatgccaagcaactcaaatgcgacgtgaatagcaagcaattcaaggacaccatgcgttacatttggatgccaaggctcgtggaacgcattcaagccaccgatgccgcctccgccaccacaaccgttaccgttaccaccgngaccaacaatgcatacacctacggaagcaaccttaataacaacaaattcgaggttcacgatcacaagggcaaaatggg

SEQ ID NO: 51853 - DNA, 431 bp, Glycine max
tttgttctttacacaattcaattccgaaagttctttaaccatttttgcacctcaattctgcgaaaacactttttgatgacgcagaatgcttcagctggaattgcttcggaatgggttttgaatagaaatgcttcaagatttatttcgtcactgctcaaaattccaaccgttaaaatccgcgacacataatcagtcgagcacaaagttgctgaaatttcaaggacaggttacgacaaactcattgtaatctcagattttgactacactttgagtcgctatcacagaaatggcgaacattgcaagacaacgcatggaatatttagtggagtttgcgttaacgaaaagaatttggagttttatgagaaggcgcatgctttggaaacaaagtataaacccattgagttctgtccaacaatgcccatgtgcgacaa

SEQ ID NO: 51854 - DNA, 444 bp, Glycine max
ctcacgcgtccggtttgagacattttcacatttacaaattaaacgacaatcaactaaactcctcaattagcaaatccttaattaacttcccaaatgactcatcgccaacaaaacgaaggagggggtggagcagtgacgccgaacgcaacaacgacgggccatttgcaggagcaaatggccaacgccatggaacgcgtgggggaggcggcgcacaacgtgggccaacgggtgaccgatttcttccagggggacccttttgggacgctaatcggacgcaaaatcgaattggccaccgatgctacgaaaatggccactgaaaattggggactgaacatggaaatatgcgacttcatcaacggcaccaacgacggaccacgagacgccgttagagcgatcaaaaagcgactgcaaacgcaaatgggaaaaaacaacgcaattgtcatg

SEQ ID NO: 51855 - DNA, 367 bp, Glycine max
cttccgcgtttttgaactcgtctcacgcgcagtcctccctaggttctatgctgctgatgtgaggaaggagagcttctaggcgtggaccggttcaagaggaaggtcgtggcgacacccaatccaacgctcatggtggagcccttcgtgaaggactttctcggcggagacaaggttctaggcgcggcgatcgtggtgaatccttagacgaagaacgccaccggtttcgtgaagaagcctggcgtgctcgaaggaaagtggaagcgtctcgcggttttgaaagagttcggcgatgaatcgccctatgttggacttggagatcgcaaaacagaccatgacttcatgtctattttcaaggagggttacatgg

SEQ ID NO: 51856 - DNA, 213 bp, Glycine max
atcacacttatacaaaattctgcaattaggaacttgctgagagttgctgtttggaagaaaggctgaacaatggttaagattgagatgtctgggaatgcatcaatcaaaccgagtgatagggcctcattgttacaggtatttttaacacacaccatcagatcaaagcattttgatgcacgtaagtgggcaaaatcggcaccacattcctgggaa

SEQ ID NO: 51857 - DNA, 404 bp, Glycine max
cttcaatccctcgccttccgccctcaagccgaacccgacccaattgacctcgccgtcaattaccctccgccgagtttcacccgtcgttcgacctccccgagttaatcgaagatggccccggccctgcaggcctcgacggccatgctcgcgcgccgccagctcacctccagctccctggtggccgcgagactctttgtcgcccagcagcgaggatacgcaacgccccaggggcccccccccgccaacttccggacgagcaggcaggtgcagtggacgtgggataaggagagcaccctggaccgcgtgggcaagtttttcctcatgacggagatggcgaggggcatgtatgtgctgctcgagcagttcttccgaccaccctacaccatctactaccccttcgagaa

SEQ ID NO: 51858 - DNA, 344 bp, Glycine max
gttaaatttctcgtttctcacattgtttgcagcaggaagatccccaaaaaggaatcgtctaccatgacaatggttatggcggcgaagatgcgtacgacgattacgatggtaaaaccaaggattttagcaaattagagctgaaaccggatcaccccaatcgccctctgtgggcctgtggcaatggccgcatattcctcgagactttctcccctttgtacaagcatgcttatgattttcttatcgccatcgccgagcctgtttgcaggtagaaattgttaatatgagagagatatcaagcgcaatggcatgttaaaatgttggaactgaacttatgtgtttgatgt

SEQ ID NO: 51859 - DNA, 429 bp, Glycine max
aacaattaattttaattaaaaaatggtccaacaatacaaattgtattattttgacctgcgtggtttgggtgaacccatccgccttttgcttcactatgttggccaaccatttgaggacatccggtttaaagacatggaagaatgggagaaaacgtacaaacccaaatttttctacggaaaggccccagttttggaggttgacggaaagccattggcacaaagttcggcaattttgcgctaccttgccgaaaaatttgacttggccggcaaagatgaatgggaaaaggcgaaggctaacgaaatcattgactttctgaaggatgctaccactgatttgctcccgtatttgatggtcaaaatgggacgccaagaaggcgatttggacaaattgcgtggcgaagtgttcgagccgggagtcaagcgcatttt

SEQ ID NO: 51860 - DNA, 460 bp, Glycine max
ttccacgcgtccggtttgctcttcgattgttggccatattttgtttgatgagattcgatttctcgagtgttttcacccattttaacccatagtttcactgtcatgaaaattggacatcggaccccgccgaggcagaaaagagccactgaccctcccccacagttcgattcttccgatttgggctctccgcaaaaggtttggtcactgttatgcgagaaggacgagaaattgcgccgagatccgcacgtattttcgcgccagaagaaaataaacgccaaaatgcgtgccatgctgctcgactggctgatggacgtctgtgccgacaaacagctccaccgcgaaactttccatctttgcatcgattacatcgaccgtttcatcgcattgagtgaccaccaaatgcagccccagcgattgcaactgttcggctccaccgccctggtaattgcgagcaaagtcg

SEQ ID NO: 51861 - DNA, 441 bp, Glycine max
tccacgcgtccgctcactcatcaatctcgtttgttctcactaactattacttcatcatgtcgtcgagcacagttggtcaagtcatcaaatgcaaaggtgactgactcatccacccttcttctcagtctcatcttattttcatctcttttcagttttgatgctacacatgccatagcatattagcatcccctgctgaagtttttttttctaggaaaagtatttgcttttttaagttcgtttctgttatgtatggtcactcgaattttaagagtgaaccaatcttagtcttgacactttttttgtggggtacataaacttgtatttatttttatttctgtaatttagaaaatataacgatccttttccttttctctgtatctaacttgggtcgttatttttcttattattaaaaaatgttaattgccctccattctaatcata

SEQ ID NO: 51862 - DNA, 290 bp, Glycine max
cttacgcgtccgcttcttgttgatcgtcgtggtcgttgaggtcttcaattttttttttattattattccgttttcgctgtttttagtttagtcctggatgcaatgcaggataaagacagggtcagtcagttattgttctctgcattttgttcccaaatgaaatgtctatgactttcgtcgtcaagttctagggtaacaaattttattgttgccttgcttgtttttattctaagtataataataacaagcaaggcaacaataaaaatgttctcgcatggacaagttctttt

SEQ ID NO: 51863 - DNA, 287 bp, Glycine max
cccacgcgtccgattttttcagtacaaaaggatcaagaattaagaccttcactttatcgtctctctactccctcctagacattctttcttcgaataattgcttttccaacctattctattgcttgagcctttctccaattttgtttctttagttcttttcccaccctttttgtcaaaaaaacttatttgcccaccctttacaccgaaaaacaaaaaatgaggctactgtctacaaaagccacatgcaactctcacggccaagattcttcatacttcctaggatggca

SEQ ID NO: 51864 - DNA, 382 bp, Glycine max
cggacgcgtgggcggacgcgtgggcggacgcgtgggcggtctcgtgttggactccggcgatggtgtcacccacaccgtgcccatctacgagggttacgccctgccccacgccatccttcgtttggacttggccggccgtgacctcactgactacctgatgaagatcctcactgagcgtggttactccttcgtgaccacggccgagcgtgagatcgtccgtgacatcaaagagaagttgtgctacgtggcactcgacttcgagcaggaaatggccactgccgcctcctcctcctcgctggagaagagctacgaactgcccgacggtcaagtgatcaccgtcggcaacgagcgctttcgttgccccgaggcgctgttccagccg

SEQ ID NO: 51865 - DNA, 359 bp, Glycine max
cggtcgcgtggggaattacaccgttcacgcatttatgtattcctactacgctttgcgtgccatgaaattgcgactgcccaaatggttcgctatgatgatcaccgtcatgcaaattgcccaaatggtggtcggcgtctccctcgccttcatcaccctttatctcaaattgggcggcatggaaagctgtcagtgcacttggaccaatttgtacgcttcttttattctctacgggtcgtactttttgctgttctgcaacttcttctaccaaacgtaccttcgacggggaaatcgctacgcaaacaaatcgaaggcgaaaggcggaaaggcagcggctgaaagtgtcgtccacgcgaatggca

SEQ ID NO: 51866 - DNA, 354 bp, Glycine max
tttccggttggacgcattgcaacgcgacgcgcgcaatttagccacggatctttttaaggcaaaaacggtgcaggacgaactggcggaggcgctggagggcacgctacgcgaaaacaaatcgttggcccaagagatcaaagacctgaccgatcagctcagcgagggaggccgatcagtgcacgagctgcagaagatcgtacgccgacttgaggtggagaaagaagagattcatcacgcgctggacgaggcggaggcggtgttggaagcggtggagagcaaagtgttgcgagcccaagtcgaggtgtcccaaatccgatcggagatcgaaaagcgcatccaagagaaggaggagga

SEQ ID NO: 51867 - DNA, 319 bp, Glycine max
ttttccccaattttattaattgcccactaattcatccctggagcactaaaaatggcaaagttcgagtattggccccgttacggcttcgagaatcatacgctcgtcctccccgccgagcgggcgttcaatatgaccgattcgactctttggatgcaggagaattggctgagctcttttgcctttcccgcgctttatgtcgtcgctatttttggtggccaaaagttgatgagctcacaaaagccttttgcacttgaccaggcgctgttctggtggaatttgggcttggccacctttttcataatgggcgctgttcgaatga

SEQ ID NO: 51868 - DNA, 385 bp, Glycine max
ccctcgcgtccgcccacgcgtccgcccggttttaacatgaggaaacaagagagtgaggtggagagtgaaaatccaagaggttcggctgagtggggtggtgatggactcattggtttgcctggcttaggtcttggcagcaaacaaaagagccttgcagaaatttttcaggatgatttgggacttaacgcttctgtcactggctttccatctcgtcctgccagccgtaatgcatttgatgaaaatggcgatatcatatcatctgttgaatcagaactggctcatttacgtcgtgattccttggccactgataccttaagatctgtatcaaatgtccctgtgtcatctgctgcccaaaatactggcccacaagcttcctattcttatg

SEQ ID NO: 51869 - DNA, 393 bp, Glycine max
cttaagagaaaaaaaaatgtcaagtatggggtattcaaggtctttcttggcttcttttcttcttgctgtgttgctcaatgtgactaatgggcagcctctagtccctgcaattttcacatttggggactcaattgtagatgttggcaataataaccaccaattgactattgttaaagcaaacttccctccttatggaagggactttgagaatcactttccaacaggaaggttctgcaatggaaagcttgcaacagacttcattgctgatatccttggatttacctcttatcaaccagcctacctcaacttaaagaccaaaggaaagaacctattgaatggtgccaactttgcctcagcttcttctggttactttgaattgacatccaaactata

SEQ ID NO: 51870 - DNA, 397 bp, Glycine max
  unsure (1)..(397): unsure at all n locations
gtttggatgatcacttgcctcttccaggcataactattggtgatattgggatgaaatttggaaatgcagcttataacaccatggacaatggagttctaagatttgaccatgtacgaattccaaggaatcaaatgttaatgaggtatttctattttacatattgtcccttctctagcctcaccataacggattttatggttctaataattcataatactcgaatgatctgtgggggtaaaatgacaaaaaattagagcacagggcagcacattaaaattgggtgaggtgaattcataggggtaaactcaatctaactctaataataataaaaactgaacaaaaaatctttagtatcattatcttcagtgaatntattagtgaatttttaaagttattt

SEQ ID NO: 51871 - DNA, 371 bp, Glycine max
ccttttcgtccgttcacgcgtccgcggacgcgtgggtgaaaatttcataaaatatgtgcctaaaaatggttaataataaaaaaaacaatttttcgaccgtttacaaatctgaaaattttaacgcggaatgaattcctcttctcccggtggttatattccggtgctctaccgagacaggccagaatggcgagacgtgaccccaatttacaacagtgctgaggagaatgccgttgtccgaattgccaccagcgaggaatttgacgatgcctttgcgtatttgcgtgccgtaatgaatgccaatgagctcagtgagcggacactcgaactcacacagacatgcattgcacaaaaccccgcaaattattcagttt

SEQ ID NO: 51872 - DNA, 438 bp, Glycine max
cagttaaaagatttttagagagcctgaaagtgatcctcacctattctcttgtcatttctcgaaaggaaatttaaaggtgacagaggtatacaacttctcccaggatgatttgatgacagaagatattttcatcttggattgccactcggaaatctttgtctgggttggccagcatgttgactccaagagtagaatgcaggctctaacaattggtgagaaatttcttgagcatgattttcttctagaaaagttatctcatgtagctccagtatatgttgtcatggaagggagtgagccacctttcttcacacgcttctttaaatgggattctgcaaaatcttcaatgctgggaaactcattttaaaggaagctgacaattgtgaaaagtgggggtgctccagttttggataaacccaaacggagaacaccattatctta

SEQ ID NO: 51873 - DNA, 425 bp, Glycine max
tcgctttcgcgtccgtgagaaaatccgccaaattaacaaattaatttataatgccaacagaaaatttgccgccggaaaatgacacaatgccatatgacccgagggcacgggaagagagttgttggcacgaggacagtgttgaggacagattcggccgatatcccttcagaaagtacccgaatgagaatccagcaaagattatggactctgttctcgatgcaattggacacacgccaatggtaaagcttcagcgaattccagcggaatttggcattgagtgcaatgtttacggaaaatgcgaatttttcaatgccggcggttcggtgaaggaccgaattgcgctgaggatgttggaaatagcggagcaaagcggcagactgcgtgccgggatgacagtgattgagcccacctcgggcaacacgggc

SEQ ID NO: 51874 - DNA, 323 bp, Glycine max
tcgtttttaactagcctaattcacaaacacatccctctctctacccatattagctttcttttttgtgatagcccaccatggcaattgctaattgtgatgataaaaacgcaaaaactttgcagttcattgaagatatgacacgaaacactgatagtgtccaagagagggaccttgctgagattctgagccaaaacgcccaaaccgaatacctgaaacggtttgagctgaatggagccacagaccgtgacactatcaagtccaaggtacctgtcgtttcatacgatgatttgaagcatgatattcaacgcattgctaacggtgac

SEQ ID NO: 51875 - DNA, 426 bp, Glycine max
attgtatgtcccatggatgagaaacttcctcgtcgcaaaatttttgacaaacctaagacgcgctgcttcactattctccctatggaggttaatcttgtgggccgtcagaagcttttaaattttgcgagggtcacttttattgaccaggacgctcagaccaaggccttcaaacccaaggaacttgtcctctttcagtaccaggcctgtccattctgcaacaaggttgcagcgtttctggactattatgatattccattcaaagtggttgaggtgaatcccataaacaagaaggagatcaaatggtccgactacaagaaggtgcctatcctcaccgttgatggtgaacaaattgttgactcttcagacataattgataagttgatcaaaaggatacatccagattatgacctaaatgctgaagaagag

SEQ ID NO: 51876 - DNA, 425 bp, Glycine max
gtttattactggactaaaacctgttgataaaactcaaaccttcatagatgacagcatggttgaatgggcgaggcctttactatcccaagctttggaaaatggcaacttaaatggacttgtcgatccaaggttgcagacaaattacaatcttgacgagatgatccgaatgactacttgtgctgcaacttgtgtgcgctattcagccaggctccggcctcgaatgagccaggttgttcgagctctggaaggaaatatttctctagaagatctaaatgatgggattgcacctggacacagcagagtttttggttcctttgagagttctagttatgacagtgtccaatacagagaagacctaatgaactttaagaagctggcactggaaagccaagagcaaggcattagtgagtacagtggtcccagca

SEQ ID NO: 51877 - DNA, 429 bp, Glycine max
ccttcgcgtccgcgacaaaatggcgcgccgtcccgctcgttgctaccgatactgcaagaacaagccgtatcctaagtctcggttcaaccgtggtgtccccgaccccaagatccgaatcttcgatcttggccgaaagcgcgccaacgtcgatgacttccctctctgcatccacctcgtttccaacgagtatgagcagctgagctccgaggctcttgaggccgcccgtatttgcgccaacaagtacctcgtcaagaacaccggtaaggagggtttccacctccgagtccgtgctcaccctttccacgtcgtccgtatcaacaagatgttgtcttgtgccggtgccgatagactgcagaccggtatgcgtggtgcctggggtaagcccaacggcactgtcgcccgtgtcaacattggccagattctcatgag

SEQ ID NO: 51878 - DNA, 414 bp, Glycine max
cttcacgcttccgcggacgcgtgggttttctagggttggatgataacaggctttgtaggtgggatatgagggatcgtaatgggatggttcagaacttggctgattcaaatgcccctgtgttgaattgggcacaagggcatcagttctcgagggggactaactttcagtgctttgccactactggtgatgggtccattgttgtggggtctttggatgggaagataaggctgtattcggtgaacacaatgaggcaggcgaagacggcatttcctggccttggatcgccggttactcatgttgatgtaacctttgatggaaagtggattgtgggtactactgattcctacttgattcttatctgtaccctctttactgacaaaaatggaacgacgaagactgggtttgctggacgga

SEQ ID NO: 51879 - DNA, 340 bp, Glycine max
tcggtttgaggaaaaggtacacttactttctacaaaatgacctcacaacccattcgcgtattggtcactggtgcggctggacaaattggctattctctggttctgcaaatcgccaaaggggatgtttttggcaaagatcagcccattgtcctcgtccttctcgacatccctccgcttactgaagtgctcaccggcgtccattacgaattggttgactgtgcgcttcccaacctcttcggcgtccaggcagtgaccacggaagaggcggccttcaaagacattgactacgcttttctggtcggagcgatgccccgcacagaagggatggagcgaaaggacc

SEQ ID NO: 51880 - DNA, 335 bp, Glycine max
ttcgttaaagtcaaagattggaaagttatattaaatgaaacacaggctgcaatatccttgggtgctgattcagctccactggtttgaggatgctgtaacagcatctgagcaagcagctaaactagatccaagtaattttgagatgaatgcagcggtgaggagggccagagcagtgacatcagccagaatgagtggtaacttactcttcaaggcatcaaaattcacggaagcatatgctgtatacaatgaaggactagagcatgatccacacaactcaactctgctatgcaatagagcagcgtgtcgttctaagctaggtcaattctagaaagcaa

SEQ ID NO: 51881 - DNA, 132 bp, Glycine max
ggtttaagtccacaaactccttttgggataaatagggggatggagaaactgtgttgacccgagggtacttacagatgggctaaaagaatgccttttactattgggggaggagctggagcaaaaaatgctatt

SEQ ID NO: 51882 - DNA, 334 bp, Glycine max
ctttcgtgtgggttttgaaccaactgcttacagagaggggtttattgatttctaggggggctgtgttcatcattggggccactaatcgaccagatatgattgacccaactcttctgcgtccaggtcgtctagaccagttgatttatatccctatcccagatgaggactcccgtcatcagatatttaaagcttgcttgaggaaatccccactctcgaaagatgttgatcttcaggcgcttgccaagtacactcagggtttcagtggtgctcatataacagagatttgccagcgcgcgtgcaagtatgccattagagagaacattgagaaggacat

SEQ ID NO: 51883 - DNA, 438 bp, Glycine max
ctttgttatacattccccgccttgatcctgggggggggaattctatatatattgggggggatgcattaggtgatcaatatcgggctactgacactgtaattaaaggagctggaaagctgaagctggtgtttgttccagaaggccaaggtgaggaaactgaattcgaggtttttaacttcactggtgaagggggtgtttcattggctatgtacaatactgatgagtctattcgttcttttgccgaggcttctatggcaactgctttagagaaaaagtggccactttatcttagcaccaaaaatacaattctcaagaaatatgatggaagattcaaggacatatttcaagaagtttatgaggcaagctggaaatcaaagtttgaggctgctggtatatggtatgagcatcggctcattgatgatatggtggcgtatgcac

SEQ ID NO: 51884 - DNA, 456 bp, Glycine max
tgttcttttgttcgggaacaagagagtactagagtggcatctatggtacaaaattgtgttgggcgtggtgaacgcgcttcattatcttcacgaagacgcagagcaatgcgtgcttcatagggatataaaatccgcgaacgtgttgctggacacggagttcaacacaaaggtgggggatttcggcatggcgaagttggtggatccgaggctgaggactcagaggacgggagtggtgggaacctatggttatttagcgcctgagtatgttaacgtggggagggcgagtagggaatcggatatctacagttttggagtggtatcgctggagatggcgagtgggaggaggacttaccaggatggagagtttcatgtttctttgatgaattgggtgtggcaactttatgttgaaggggagattatgagggctgctgatgagaaactgaacaatgagtttga

SEQ ID NO: 51885 - DNA, 475 bp, Glycine max
attacgtgtggttggtgcgatgaaacggggaatggtttctcatttttggcattcaaagatcttgggcctgttgtcaagctttccctttcatctggtgccatgttatgtcttgagctctggtacaacacggtattgattcttttgactggtaacatgaaaaatgctgaggttgaaatcaatgctctctctatatgtattaacatcaatggatgggaaatgatgatagcacttggtttcatggctgcagcaagtgttagagtggcaaatgaacttggaagaggaagctcacaagctgcaaagttttctatagttgtatcagtgcttacatcatttgtaattgggtttatcttatttgttctttttttatttttaagagaaaaaatagcttatctttttacttcaaacgaagatgtggttactgctgtgggggatctgtcacctttgttagcgctttctttgttactaaatagtattc

SEQ ID NO: 51886 - DNA, 437 bp, Glycine max
ctctattccttggtgatttttcaagaaactcattgggggtgttgtttagatattagggggggctaattaagaagcaacgatgagcagcgatttgtaccgattcgcagtatcatcccacttcagtagttttccaaaatcgttctccctccgtaagaaagttccatggtggtaccagatcctggacccgcggtcgaggttcgtggcgcgatggaaccgcacgttcctctacgtgtgcatcgtggctctcttcctggaccctctctacttctacttccccatcaccggggacaaggcctgcatgcagaccgacattgtcctcggcgtcttcgtcacgttctcccgcaccatcgctgacctcttcttcctcttccacatggtcctcaagttccggacagcttttgtctctcccctctccagcgtctacggccgcaaggacc

SEQ ID NO: 51887 - DNA, 434 bp, Glycine max
ctcttttttaatctgcagctatttggattactgaggtgggtgcatttaatttagaaagggggtactctatttggtgacattggaagctaactcatagacagaggcaaagatgttgggaattttcaagcagaagttagttaatgcacccaaggagctgaacagtccagcttctttgaattcatgcactaagcctaagctaagtcatgaagtcctgaaggatttcatgtcctgcaattcctccaatgctttctccatgtgctttgggagtgatgctttgctagcctattccccttcaaacaagccctccattcatcataggttgtttagtggtttggataacatatactgtgtcttcctgggtggcctgcacaaccttagcatgctcaacaagcagtatgggctatcaaaaggaacaaatgaggccaggtttatca

SEQ ID NO: 51888 - DNA, 375 bp, Glycine max
tttcttctgcaaagggctggcgatggatgtttggggggcttatctatattagcggggggatcggagtcttttccttccttgtccttcgtgagacgtacgcgcccgttatcctcgccaggaaagcaaaacgcctccgccagaggacaggaaatgtccacatccgcgctcgagggcagaagacgaaacccttgggtgttctcctctcccgcgcgtgcctccgtcccctccagatcctgattttcagtcccatcatcctggcgctctctctttacatgagtcttgtctatggcatcatctatatcctcttcactactctctcgaccgtcttccagggtgtttatggcttcgataccggtaattccggtctcacgtacc

SEQ ID NO: 51889 - DNA, 300 bp, Glycine max
tctttctcaagaaaatcgccgcctacaaagggggggggttcatcaaattcgggggggggctcatcctcggcaccggctccactgccaagcacgccgtcgaccgcatcggcgagctcctccgccaaggaaaactcaaagacatcgtcggaatccccacctccaccaaaacccacgaccaggccctctccctcggcatccccctctccgatctcgactcccaccccaccgacgatctcgccatcgacggcgccgacgaggtcgatcccttcctcaacctcgtcaagggccgcggcggctccc

SEQ ID NO: 51890 - DNA, 446 bp, Glycine max
ttccttttcgtccgcgcagagaagaacagagggggggccatccatcaattccaggggcgcgatcagctcaccgacgaacagatctccgagttcaaggaagccttcagcctcttcgacaaggacggggatggtctcttttctcagatcccttttctctctctctttctctcttatttcattagatctcattccagtctcgtttttctttattacccttttgattattttgttaaatttttaatcttttttcctttgggtgccttctcctttcactttttgctccttgatgtttgtgggtgtatgtatgaatgaattggatttgcattctcgctgaaatctcccctttttcccgttttgcccttgctttcaactgtgaatcgagatttgatttgtgggtgtttgatttctcgatcagaaatttggaatttgcttgtgtggatgtgaca

SEQ ID NO: 51891 - DNA, 434 bp, Glycine max
ttcatagagaaagagcacagcttcacagtttgggcggttctagaacttatagggggggctacagtttcaataggatgctcaagcttggagaagggggtttcgggagtgtgtataaaggatccattgcgcaacttgatggccaaggtgatccaattccagttgctatcaaaaggctcaacactcgtggcttccagggtcataaagaatggcttgctgaggttcaatttctcggcattgttaatcacccaaatttggttaaacttttgggatactgctctgtggatggagaaagaggaatccaacggctgttagtgtatgagttcatgcccaacaggagcttggaggatcaccttttcaacaaaaaattgccaaccctgccttggaaaacaagattggagatcatgcttggtgctgcacaaggattagcttatcta

SEQ ID NO: 51892 - DNA, 376 bp, Glycine max
tttgtatcgattgaattcaataccccttcaatgggggtatcatgcaaatcttcgggagggctctcaccgggaagaccatcactcttgaagtcgaggcgagtgacaccatcgagaacgtgaaagcgaagatccaggacaaggagggcatcccgccggaccagcagcgcctcatcttcgctgggaaacaactcgaggacggacgcaccttggccgactacaacatccagaaggagtccactcttcacctcgtcctgcgccttcgtggagggatgcagatcttcgtcaagacgctcaccgggaagaccatcactcttgaagtcgaggcgagtgacaccatcgagaacgtgaaagcgaagatccaggacaaggagggcat

SEQ ID NO: 51893 - DNA, 432 bp, Glycine max
ccttcgttaccgcccacgcgtccgagttaatcggggggactcttcatagccgttggggggcaccacaagcctttgacgctgcgaatgagaaggttcgcgtggttcacgccgtatcggcgccatttactttcgtctctgacttcagaatccctcgtggataaaggagaatcaaccttcaccaaattctcgtcgtctcgccaatcgtttttgctcgctcgagctttggtcaattgcgggttcgtcacgaaaacggaggagtcccggattccgagagtaccgttaagatatcgttattttcatgccacagcattttcttcgacagctgaccgagaccattatggaactcttggtgttcctgaaaatgccagtcaggatgagataaagaaggcatttcactcgcttgctaaaaagtaccatccagatgcaaataag

SEQ ID NO: 51894 - DNA, 492 bp, Glycine max
gtccgccccctcaattcgggcaaacggaaggttcaacgcgcaaatgacggcggaattgctgcgcaaagcgatgaaaggctttggctgtgacaaaagcaaagtgatccaagcgttggtcaactgcaacaatgcacaacgccaagaggtcatccgcacgttcaagcaaatgtatggcaaggaactgatcccggagttgaaaagcgaactaacaggcgacttcgaacacttaattattgcacttatggaactgccggcagtgtacgacgccgcacaattgcgccgttcgatggagggacttggcaccaaagagcatattctgatcgagattatgacgacgcgaccaaatgcgcaaatttatgccgtcaaaatggcttatcgccaaatgtacaactcggatttggagcgtgacatcatcggcgaaacttccggctatttccagcgtctgctcatttcgctgtgttccggcgcgcgtgatgagcaaatgcacaccga

SEQ ID NO: 51895 - DNA, 509 bp, Glycine max
tcctcgcgtccgcccacgcgtccgcaagccggagggaagccaaaaccatgggtgggcataacaatgttatcccaaacggacacttccgtaagcactggcagaactatgtgaagacttggttcaatcagccagcacggaagacaaggagacgattgggtaatttaacatattttcttgttattttgaaactttttagtaattaccgtgttagtcttttgtgttaaaaagatcaacagattgaattagtattgatggttgcttttaattctttgaaatgttgctgttgctgtattcttcagctcgtcagaagaaagccgtgaagatattccccagacctacggctggacctctcaggcccattgtacatggtcaaactttgaaatacaacatgaaagtgagaggtggaaggggattttctcttgaagaactcaaggcagcagggattcccaaaaagcttgcaccaaccataggtattgctgttgatcatcgtcgcaagaaccgttctttgg

SEQ ID NO: 51896 - DNA, 368 bp, Glycine max
gcgattctacctccaccttctgggtggagtcttataaaactttgggagggataaaaaaaaagaagaaaaaaacaaaaacaaacacaaaaggattgaagcaccatggttttctcttctattccagtctattcagatcctcccaattggcagcagcaacaacaaaatcaacaccaagcaaatggaattaacagtcctcagctgctttcgccgctacctcagccgccacaggctcctcacgtgggggttgaagccggccaaacccggtccggtcctatggcggatcgggccaagattcctgcccaggaaggagttctgaagtgtcctctgtgtgaatccaccaacacaaagttttgctacttcaacaatta

SEQ ID NO: 51897 - DNA, 205 bp, Glycine max
gctttatgtacctggctgatgccatggccagggggggggggttttacaactatttgggggggctaataaagccttacatggaatccatgcttccactcccccgaatctatgacccggatttcattgctgccaaccaataggagctggccaacaacgtcatcaagggcacaaagcaagagcaagttcaacaaatcatcaaagacat

SEQ ID NO: 51898 - DNA, 411 bp, Glycine max
  unsure (1)..(411): unsure at all n locations
cataaatgggacaattctccatgcgcaatggggggcctttggtagtacttcgngggctatcaatagcagcagccacggttttagcagctatgttgccattctttccagatataatggctttgtttggggcatttggatgcattcctcttgatttcattttgcctatggttttttataatatgactttcaagccctcaaaaaacaccataatgttttgggtgaacaatgtgattgcagcagcatcctcaattttagttgtgattggaggaatagcatctattagacaaatagttattgatgccaaaacatataatttgtttgcagatatgtaaaaattatagcaatacatacaaacatcagtctaagtttcattgcaattctattagtcatctcgaatcaagcaattttttc

SEQ ID NO: 51899 - DNA, 487 bp, Glycine max
cccacgcgtccggcattaccctttcttacttgcaattttcacaaccctttcttcttttgggttcaaccactttctttccaaccatgccagtactagaaacccttggtggtgctctttttggtgctgtccttcaggtgctgtttgacaagctggattctcatcaagttttggattactttcgtggaagaaagctcgatgggaggctgctgaaaacgttgaagtggaagctgatgtctgtcaatgctgtgcttgatgatgcagaacaaaagcagttcactgataaaaatgtgaaagaatggcttgatgaggtcagagacgtgttgcttaataccgaggatctgttggaggaaatagactacgaattcaccaaaactgagttgaaagctgaatcccagaccagtgctagcaaggtatgcaattttgaatcaatgatcaaagatgtccttgatgaactagattctcttttaaatgtaaaggatactctacg

SEQ ID NO: 51900 - DNA, 407 bp, Glycine max
ggcttggtagattttacttatttgtctgatgttgtttcttttgacacaacatattttacgagcaaatataaaataccattggtaatgttcattggagtaaaccatcatattcaaccaacattgcttggctgtgcattgattgctgatgagacaatatatacttttgcctggttactgcaaacatggctcatagcaatgggagaacgagctccacaagtgcttctcactgaccaaaacgaggctattaaagcagctgttgctgcttttctttcaggaacacgtcattgttgttgcttgtggcatattttggaaatgataccaaaacaactgtaattttttggtgcgaggcatgatagctttatggaaaaatttaacaactgtgtatacaaatcatggacagaggagca

SEQ ID NO: 51901 - DNA, 494 bp, Glycine max
cagatgccataaacaatggctatgattcatggggtcctttgtttgggaggctattttttgccctttgggtcattgtccacctttaccctttcctcaagggtgtcatgggaaaacaagaaggtgttcctaccatcattttggtttgggctattcttctggcttccatattgacactactttgggtgagaatcaacccattcttggccaaaaatgatgtggtgctggaaatttgtggattgaattgtgactaaaggtaacaaaaaatggaagaagggcatgctttgatgttttacacagataaggtctgcaacatgcataaatttttggtcagaggcacatgacagatccctgaatgcagagtagtatctgttggtgagagctagctgccactgcaaaaaaaaaaaaaaaaatgttacttgtggcgggtgtttgtagatacaacatatgttttgagaggttctattattctttttatacatgtgcattatctaaat

SEQ ID NO: 51902 - DNA, 490 bp, Glycine max
catcagccactcacaataaataaaataaaaagggttttacaaaaaaataaacaaagaagtaatatcatatctagggtttctctttctctttcgcattctctctgaattcgtaagccatggaatcacccggtaacgagcatgtggtgggtggcgcagaacataacgacgtcgttacgcccttttcccacagagaagaaccccacaattcccaacccctcaccggcgacggtgccagtcccggaaagatatttataggtggtttagcgagagaaacgaccattgcccaatttatcaagcactttggtaagtatggtgagatcacggattcggtcatcatgaaggacaggaaaactgggcagcctcgtggatttgggtttataacgtatgcggatccctctgtggtcgataaagtcattgaggatcctcatatcatcaatggcaaacaaatgaatttagagacttctttacacgctatggcgaagttaaagat

SEQ ID NO: 51903 - DNA, 474 bp, Glycine max
cggtcgcgtgggcggacgcgtgggcggacgcgtgggttacagaggaagaccattttcaaatcctccccaagcagaccctctccatggacgttgatgcagccgcgcagcacccactgccccccgccacccgggagtctcaggcaacgctacgtgccctcgaggcaagggcagcgcggctggagaggattgtagggcaggatgtcgttgcgggcgcacgcggcgctcttaccaccccggccccaggcctggccacgcgtgtgcagcagcaggaggtagcttttgcgcgggccgtgcaggagttgaagtgggtggcggaggcacttgagaaatatgaccgccactcccgcctgctcgccacccccgagtttgaacgccagctgctttcagcccaaaccaagtgcgagctggtcgtagcggccgaacgggatctgacggcactttacgaagagctgcgcgagattgagcagctctcac

SEQ ID NO: 51904 - DNA, 446 bp, Glycine max
gcatagttgatgcatctggaactgcaaaggctgtaatttcttgcttcaacaaactgggggtgtcttacgatatggatcagataaaattgatcagggatccccggcaacaacttgaaatggttggagtcccagaggagcatctatctggtcatgcgtttcatatgtatcatttgacatccccagatgacacagttacattcgaatttcaacataatgtttgtggtagatcaatatatgcggagggcactgttgatgctgtgctgtttcttgctaagaagattgaaacaaaggatcccaagagactgtataatatgattgatgtcttgcgagagggtaatatgcgatgaaattttctttggaatctgggtgcaggatgtcaaatgtagaacttgcaatagaagagatatgacattctagtttttgagaaccaaacaattttcatcttc

SEQ ID NO: 51905 - DNA, 438 bp, Glycine max
gataatactatgtccgatgggtatggagtaccggaagattcaagcatgccctaatgattgcacactgtacaaaaatgagtttgaagaaatgcacaactgacctaggtgtggggtatcatgatacaaagtgaaggatgatggcgagtgtagtagtgatcaaagcaccaagaaaggccccctagcgaaggtgttttggtatcttctgatcattccaaggtttaagcgtctatttgccaatgcagatgatgcaaaagaccttacatggcatgtagatgggagaaattacgatggaatgctctgtcatctgattgattcctcttaatggaagaagattaatagtctatatccagaatttgccaaagaggcaagaaatattaggcttagacttgccagagatggaatgaatccgtatggcaatttaagcacgcaacccaattc

SEQ ID NO: 51906 - DNA, 415 bp, Glycine max
cggacgcgtgggtgcggattcgtcatctgctcggttctttgcggcaactggtacggaggtgagcaatgcttcacgagcggcagaaccggcttcgtctcgggcctgaacttcgtctgcgtgatcatcaacatcgttcttctgatcctcaacttcctgaacattaactgctggggcctggagaagatctactcgattgtggctaccgtgctcttcctgattgcctccggtattatggtctggtatgtggtcgacacccgctctcgcggctggccaatcaccaccaccatcctggtcatcgtcgagttcctcctgtacctgtgggacgtcaagatcctccaaggagaagcctcaaactaaatccatcaactctcagatcaattagaccaaaaattttcccaggccaacctaaactcgg

SEQ ID NO: 51907 - DNA, 349 bp, Glycine max
aacgcgactctgccccaacaaaacagagtccataatatggtacgacgagtgcacgctctatttcacaaaccactacttctcccgcaccggcatcgaaccgcgagccatgttgtcggacgacaggaacatctctgcctccgacttggacagcttcaaccgcacgttgttcagcttgttgaacgatttggcggaagaagccgcgaattctcagtcggcgaagaaattcgccaccggccaaagccgattcgacgggtcctcgccgcagagaactgtgtatgccctggcagagtgcgcgcccaccgaaacgagtactcagtgtgaagagtgtttgaaaaatgccatttcaact

SEQ ID NO: 51908 - DNA, 350 bp, Glycine max
cgtatgggcaaccataaaattgtaatgtgtgaggcattcgacaacaaaatgcagccccatgtgaccaacaaccgtgcgcgatgtaagcagacattggacgcggctgccaaagagcacgcgtggcttggcatggagcaggagtacacactgctggacgttgaccagcatacgttcggatggcctaaggcgccgttcggcttccccgggccccaagggccttattattgcggtgctggagctaacaaagcttatggtcgtgatattgaggactcacactatcgcgcttgtctttacgcgggtattctgatttggggtacaaatgccgaagtgatgccgggccaatgggaatt

SEQ ID NO: 51909 - DNA, 441 bp, Glycine max
gtttgagggctctcactcaaacgcatcggttgctgcaaagacaaatcttttcaaaagttgccaaaagagtgtgccaacatcgcaaatactcaactccatcagaattatacgcaatgcaagcctccaaaaacaacaattgtgtcgactcaaatttcaatttcttcgatgcgtttgacttggacagccaattgacggaggaagagcgcactctgagggaccaagcgcacgcgtactgccaggaaaagttgcagccgcgggtcacgcaggcattccgcgaagagaagttcgacccttctcttctgcccgaactcggatcggatgggttttctcggcgcgccttacacaaggttacggttgtgccggcacttccttcgtcggctacggtctgttggcgcgtgagttggaacgtgtggacagtggctaccggtcgattgtgagcgt

SEQ ID NO: 51910 - DNA, 347 bp, Glycine max
tccacgcgtccgcccacgcgtccgcccacgcgtccgcgcaattcggctctaccgcacccacagttttgttgtgtaatgaggactggttgtaggttgtttaacacacagtaagggagaacttagattagttttttttattacttttctcaaccgaggaagcccctagtatatcgctgtaaatgtctttggattttctatgaatacacttgcgttaatttaagttgtcatagtctgatatcatgggctaaaagtgggatgatcttaattgatagcttagctctagaaattaccttctatttgatagtattagttttgtggacgtgcgttgcagtagtttttaacatgaa

SEQ ID NO: 51911 - DNA, 489 bp, Glycine max
tcggtgtgggggttgggcaccgtcggattggccgtagtaatgggcgccaaaaaggcgggcgcctctaaaattgtcggcattgacttggaaaccgccaaattcgagaaagcgaagcatttcggagccacagaatttgtgaatcccaaagaagtgccagcggaacagactttgcaggcatctctgatggacaaattcgacggaggtttcgactacactttcgaatgttgtggaaatgtacaaacaatgcgccaagccctcgaggcagcccacaaagggtggggtgtttcgtgtgttatcggagttgcgggggccggggaagagatcaaaacgcggcccttccaattggtgacgggtcgaacatggaagggcagctcattcggagggtggaaaagtcgcgaccaaattccatcgctcgtcaaggaacatttggacgggaaattggaccttgacaagtttatcacgcacaaattcgccttttccgacattaac

SEQ ID NO: 51912 - DNA, 309 bp, Glycine max
cttacatttggttatctggcaaaggcttatgttgttgagaatgattcgtgctaccatcaactcgtgagccactggctaaacactcatgcggttgttgagccattcgtcatagcaacaaacaggcatctgagcgtggttcaccctatttacaaacttttgtttcctcactatcgtgacaccatgaacattaattcacttgcccgcaaatccttggtcaatgcagacggtattatagagaaaacattcttgtggggtaggtactatatggaaatgtctgctgttatttacaaggactgggttttcactgat

SEQ ID NO: 51913 - DNA, 429 bp, Glycine max
ccctgcttccgcggacgcgtgggggcttttcctgtgggatcaaaacagcctatcaggggaagacaatgactgtccgcgtttcgtagccttcgccatttccttttttctccaattgtcccttcaattcaatcgattccgcggttcttttatttgctgacgacaaatgcccagaaaagatgttcaccggtctctggagctgctggaggaatatcatgcggaattattcagaccatcggacgctgagttgaaaatggccattgaaagggtgatcaatgtcttcaaacattctcttttcaattctctttgtgatatccacgaattctatgaaaatgttctgctgaatgaaagagtccccctgggcgacaaatttgtcaagcgttgggagcgttctcccgtcggcacttccttggccattcctcacattcctat

SEQ ID NO: 51914 - DNA, 382 bp, Glycine max
gcggatcattcgcgccgcggtcgtcgtccgttcgggggggctttaacattggcccgggggcattgaaacttgtgcgactactttttggcggcgaacagtcgcgaggagatggacgaatgggtgaacgcgtgccaacaagtggcggccgaggcgagcaacaaaatgcgacagttgcgcagtcgcgagaaacagtcgcgcatcgccagcgaactgtccagcctcgtgatttattgccaagcagttccgttccatgccgatttcgagttgcaagacccgcgcagctcattctacgaaatgtgttcctttagtgagtccaaacatgacaaattggtcgagcgtgggcttcagctgttcaacaagcgtcagctgtcgcgcgtgtacc

SEQ ID NO: 51915 - DNA, 379 bp, Glycine max
gtccatccaaatgcagcaaaaggggccatcagggtgtttatataaaaattagtgggggtgttcaaaatcgtgttcgcattggcattggcaacagcccaggcccctctggctccactggatcaaacctgaagaatgccttcacagcactccaggcatggaaatctgccatcactgatgacccattgaagattttggatacttgggttggttccaatgtgtgttcctacaaaggtgtcttctgtgcaaactctgaggatgataatggaatcgtgacaacagcagcaactgagtcttctgttgttccaggaatagatctcaaccatgcaaacctccaagggactcttgtcaaagagctctctttgctctctgacatcacact

SEQ ID NO: 51916 - DNA, 439 bp, Glycine max
ttttgattatgactgacccagatgctccaagtcctagtgacccatgtctaagggaacatctccactggatggttacagatatccctggcaccacagatgtctcttttggaaaagagattgtgggctatgagagtccaaagccagtaataggaatccacaggtatgtgttcatcttgttcaagcagagaggaagacaaacagtgaggcctccatcttcaagagaccacttcaacacaaggaggttctcagaagagaatggccttggcctaccagttgctgcagtttacttcaatgctcaaagagagactgctgcaagaaggaggtgattcctgaagaagatgaagaagaaaggttgcagcagtaaataaaattaactttattttaaccttaattgtctcataatgagatttgtttcctttggttttcttagggtttggca

SEQ ID NO: 51917 - DNA, 352 bp, Glycine max
tcgtttgtttgagataaaatttgaagcaattaaaaaatggctgctcgtgcggggttccaaagtggatttggtggtgctgctccaccgtcggcgcgtgggcgtggtgggcctcgcggtcgtggccgtggcgctgccagagggcgaggacgtggaaaggacgccgagaaggaatgggtcccggttactaagcttggccgtcttgtcaaggatcgcaaagtccttacgattgaggagatttatctccactcgcttccgattaaggagtttgaaattatcgaccttttgctttctggactgaaggacgaggtgctgaaaattatgccagtgcaaaaacagacgcgagcaggacagc

SEQ ID NO: 51918 - DNA, 499 bp, Glycine max
ctttctcctcgaagccaaactccaactctctgaccccagaaacgcgctctccaactggaaccaccgcgatgccaccccatgcaactggaccgccgtcacgtgcgacgccggaggcggcgtcgccaccctcgacctctgcgatctccaactctccggccccgtccccgccgccgccctctgccgcctcccctccctctcctccctcaacctctccaacaatcccctcttccctcagcaaaatctcaaccctgaaaacgcttcgcctcgcttacaacaccttcgaccccggtcccattcccaacgatctcggaaatctcaaaaatctcgaggagctctggctcgcaggttgcaaccttgtgggccccatcccaccctctttaggaaagttaagtaatcttttgaaccttgacttgtcgcagaacaacctcgttggatacatacccgaacaactcgtgtcgggtttgcgcaacattgtacaaatcgaactctacgagaacgc

SEQ ID NO: 51919 - DNA, 326 bp, Glycine max
atggttatgaccgctgccatttacaaggactgggctttcactgatcaagcgttacctcctgatctcgcaaagagaggagttgctgctacggacccatctggtccccatggagttcgacttttgattgatgactatccttatgcttctgatgggctagagatctgggatgccatcacgttctgggtgcaagaatatgtttcattctactacaagacagatgaggaactcctagaagaccctgaactgcaagcttggtggaaagaacttgtagaggtggatcatggtgatttgatagataagccatggtggcaaaagatgcaaactct

SEQ ID NO: 51920 - DNA, 299 bp, Glycine max
tcgtttacgcgtgggcggacgcgtgggcggacgcgtgggcggacgcgtgggttcatgaccttctactccttgggtttggcattgtccaaggatatacctgacgttgaaggagataaagagcacggcattgattcttttgcagtacgtctaggtcagaaacgggcattttggatttgcgtttccttttttgaaatggctttcggagttggtatcctggccggagcatcatgctcacacttttggactaaaattttcacgggtatgggaaatgctgttcttgcttcaattctctggtacca

SEQ ID NO: 51921 - DNA, 404 bp, Glycine max
ttatgccattctggaggatctggaatccagctggaagtggagggcgtggggtcataggtgtgttggaagccaattttgttgaacctgctcatgataagcagggctttgagcgtacattagttttatcaagactggagtctaaattgatacaaatgcagaaaaaatactggagcactaactgccataaaatcggttatgcttccaatcgaagtaaaatacaaataagagattatgctgataaagaggcatctcctgattattttccagaatcatcacaatcaaaaaggaaatattctaccatggatgacaaggctacaccgttgacatccgacaaattgcgttcacactcggatcagaaacggatacaaaaacaaacagataaatatattgcctataaaaatggt

SEQ ID NO: 51922 - DNA, 444 bp, Glycine max
atgcgttgactagcacgcaggttcctccagaggctgtgctcaacaaaataatgatggcacaattatcatttcttgccgtttttttatttgtattttttgacactggggttttttcgaagattgttggcacagaagtggaggttgaagatgttgagaccacggaaattcgcatgccgggtgtctcagttgaacataatgaaacttatctttgtacatcatatccattgaacatgctcgaaaccaactatattgttggatttgatccgatcgctgacatgcatgaagttcaccacattcttcttttcggttgcgaagagccaggcagtgaagatccagtttgggattgtggcgaaatgagtattgcaagaacacagtatcgtcgtgccccaacttgcgcaacacaacctcaaattttgtacgcatggggcaaaggtgcacctaaac

SEQ ID NO: 51923 - DNA, 420 bp, Glycine max
caatgttacactagaactcacaaaggacagaagaaacgcgaatgccaggagaactccaattaccacccgggttcagattccaccccactgacgatgagcttgtgaatcactacttgtgtagaaagtgtgctgcacaaaccattgctgttcccatcatcaaagaaatcgatttgtacaagtttgatccatggcagcttccagagatggctctttacggtgagaaagagtggtactttttctctcctcgagaccgaaaatacccaaacggttcgagaccgaaccgggctgccggaagcgggtactggaaggctaccggagctgacaaaccgatcggaaaaccgaaagcccttcttgaagctgggagtcaagactcgcggctgtaacggcttatcctacaccctcaattacgcagatgaaaaa

SEQ ID NO: 51924 - DNA, 441 bp, Glycine max
cccacgcgtccggtgcttttggccatccttcgcaatgcaaaccctcgagaaaattgcccattcgacgatgccattcacttcaggcggacagacaattacagatcggttcaatgcggccaaacattctttggccggctctcagttgggcaaaacaatttgcaaagcgacgaccgaagaattaatggcaccgaaaaagaagcacttggactatttgcttcactgtacgaatgagccgaacgtttcaattccgtctatggccaatttgctaattgaaaggacacaaaacccaaattgggtgggtcgtctacaaagcactactaaccatccacaatttgatgtgctacggcaacgagcgcttctcccaatatttggcctcctgcaacaccacgttcaacttggccaactttgtggacaagtccaacctgcagaacggcgccatcg

SEQ ID NO: 51925 - DNA, 454 bp, Glycine max
acccacgccgccggcttttttgcgtgcgatcgatataacaaagtggagggcggtccaaacagcatgaccgtgggtggatgaacttctgcctatttcaattgagatggcaaagcgaaacttgaggggcatctggaacttcacaaatcctggggccgtgagccacaatgagattcttgagatgtacagggattacatcgatccaagcttcaagtgggctaacttcaatcttgaagagcaagccaaggtgataattgctgcacggagcaacaacgagatggatgcatccaaactgaagaacgagttccctgagcttctttccatcaaggaatcactgatcaagtatgtctttgagccaaacaagaaaactgcttaaatatattaaggcggtttcatgttttagacatcacagattatgcatttttgtggcgggctacatagatcactcattatttca

SEQ ID NO: 51926 - DNA, 423 bp, Glycine max
cccttttgtccgcccacgcgtccgaagtttgagccgaaaatgaatgtgtttcgactttcggccgatttagctcatctcgttgcgattttcatccttttgtggaaaatatggaagacccgcagtgtcgcgggcatctcgggtcgatctcaagtcattttcctcctcgttttcatttgccgttatcttgacttgttcacaaattttgtgtccatttacaacagcgttatgaaagtcttcttcatcggttcttccatcgcgacggtctttttcatttacttcaagttcaaggcgacatatgacagaaaccacgacactctccgaattgaatttctcgttttgccgtgcctttgtctggcactcctcatcaatcacgagttctctctatttgaaattctctggactttcagtatttatttggaatct

SEQ ID NO: 51927 - DNA, 403 bp, Glycine max
gttttataatgcaagagacgcaaataattgtcggaggggcctctctgtgctccattttggccatcctcgccaccgttgttgtggtgccatcgctgtactcggagatcaatgagatcgccaccaaagtgcacgacggtgttcaggctttccgcgtggacactgactcggcctggaccgacctgatggacttacaaatcacagtcacgccgccgtccaagccgcgtcagaacccgttcagctccatcttccgccagaagcgtcagttgcccggccactgccaatgcgcgggtgtgcaacagccgaactgcccgcccggcccaccgggaccggacgggtcgtcgggacagcctggccagcctggacagtccggaggacctggacagcccggagtaccaggacaaca

SEQ ID NO: 51928 - DNA, 287 bp, Glycine max
cggacgcgtgggcggcgacggccccgaaggctactggaaccgtggaatctccgcgtgcgccgtctgcgacggcgccgccccgatcttccggaacaagccgctggcagtgatcggcggcggagactccgccatggaggaagccaccttcctcaccaagtacggttccgaagtttacataattcaccgtagggatacgttcagggcttcgaagattatgcagagcaaggtgatgaataatagtaagattaaggtgatttggaattcggtgggtgggtgaggcttttggg

SEQ ID NO: 51929 - DNA, 347 bp, Glycine max
ctatgacttaatctgtggtttgcaattttacaaggcatattctctcgggattagcttacttacatagtaacaaaaccatccacagagatatcaaaggtgcaaacttgctggtcaatgaatcaggcactgtcaagcttgcagattttgggctggcgaaaatactaatggggaattcatatgatctttcttttaagggtagtccttattggatggctccagaggtattttattgttcaaatcatctatagtattttggatgggtagacatgccccttttgactctaagttgtccatttgaaggtcgcgaaaggttccataaagaacgaatccaatcctgatgttgtcat

SEQ ID NO: 51930 - DNA, 284 bp, Glycine max
ccctcgcgtccggttctttcaaaaggaaacatttctctaatgtcaccaacgcataccaataccaattccgatacgcaattgaggatacaagaacgagctctttccgcagccggtgccgccttcgtgtctgctatcattgttaatcccctcgatgtcgccaagacaagacttcaagcacaagctgcaggtgttccctaccaaggtgtttgtcaaatggctccttttcaaacgaacacgacgccacacgatattagatggtctgcagtttctagctctgagccacc

SEQ ID NO: 51931 - DNA, 368 bp, Glycine max
gaagatgcttttaaggttttacggaggaggggtcatggggttgggattctagtttctaaaattccaaaagaaactgatgcttcctacactttgcaagatccaacagaggttgggcagtttttgaggcatttggtggagtggaaaagaacgagttcccaataccacaagttgtagattcttagatgaattcagggaaattgacaccagcccataatttggtcaaggggtggttccaattatatcccttttcttgttcgaaataggaaatagtgtgttccataatttaaagttttagggaggaacaaagttgaaatagctagctaggttctctctctattttctttttctaatgtaatctattccatcac

SEQ ID NO: 51932 - DNA, 301 bp, Glycine max
gttattgctgacaggatcaacaagatgcttgcgggtcttgaaagcaacattctctgggtcaacccagattgtggccttaagacacgcaaatacactgaggtgaaacctgccctcactaatatggttgctgctgccaaacttattcgcaaccagttagctagtgccaagtgagctgagaatgagccaataaagtcatccatgtgagataatgtactcatgttgaaaaaccgaactttttgtatttccaataatgtcttgatataaggttttgtccttctcccgaatgatctttttctgctct

SEQ ID NO: 51933 - DNA, 401 bp, Glycine max
gtaatttatagatatcttgaatttattttgtttcctcatccgatggcctcgagaacgttttctcgttttgcgagcaattttcgtcttttcggttcagttatggcgacaaatttgtcaggaaggagtcactgtttcgttgccaagaagtccttaagcacgtcccctttggtctatgctactgcagcagccgcttcgcagccgaccactccaaaggcgaccgttaagggaaagaaagggcgtgtcgttgctgtcattggtgctgttgtggacgtgcaattcgatgagggacttcctccaattttgaatgcgttggaagtgcagaaccgcgcttctcgcctcattctcgaagttgcacagcacttgggtgacaatgttgtgcgaacaatcgccatggatggtac

SEQ ID NO: 51934 - DNA, 403 bp, Glycine max
cagcttcttagtggattggatcattgtcatagtcgtggtgtcctccaccgcgacataaagggctcaaatcttctcattgacaataatggcatcttaaagattgcagattttggtctggcaaattttattgacccccatcacaaggttccattgaccagccgtgtagtaactctgtggtatagaccaccagaactcttacttggagcatctaattacggagttgctgtggatttgtggagcactggttgcatactgggggaactgtatcgtagcagacctatattacctggaaaaacagaggtatgcagtatgctacttcagaatctagttttcatcatttactcacaataactgccttcacttggatttttcaagtggtctcttcactgatatgcacaatttc

SEQ ID NO: 51935 - DNA, 460 bp, Glycine max
  unsure (1)..(460): unsure at all n locations
gtttgagagagtacaagaaatactaaaaaaatgaatgtgttcattatattattttccatcatttcaatggctgattcattggacaacggactcgcaagaacccctccgatgggttggatgccgtggaccaaattctattgtcaaaccgagtgggccaaacacccattcagttgcatcaatgaacaactttatatggacatggccgatcggctggcagaggacggattccgcgaggtcggctaccaatttgtgcacatcgacgactgttgggcggaaaaggcgcgggactcacagggccgaattgtggcagatccgactcggttcccatccggaattcgcaatttgtccgactatatgcacaaccgtggactgaaattgggcatttacggngacattggcacggagacgtgcgaaaattacccgggcagttaccagcactatgacatcgacgcgcaaactt

SEQ ID NO: 51936 - DNA, 371 bp, Glycine max
ctattcttgatccttttgaaggttagaagtgctacaatacaaacaatggctgctactcaggacgatgtgaagctttcgggtattgggggaagcccatttgtgtgcatgctaacacattgcccttaacagaagggagttgaatacaaatttttggaagaaaattcgggcaacaagagtgattatgcttctcaaatacaaccctgttcacaagaaggttccagtgtttgttcacaatgagcagcccataggatagtactcttgagattggtgaatacattgatgagacatggaagaacaaccccatcttaccttctgattcttaccaaagagccttgggtcgtttctggaccaaattcattgatgataagatt

SEQ ID NO: 51937 - DNA, 371 bp, Glycine max
cccacgcgtccggaattttagaaaatggatttgttagaaatcattgcccagaaaagaaaacagattgaggatattgcaatcgaacatgggagtggtgcgaaaatgatcagacattctgatctgtttaagaaagagaaggacgcttatttggagcgacaaaaacagctgggaaaggaacagcacctttctgtcaagggtttaaacaccgaggaacttttggacgcaaagttttcattgaccggctcggattcgatgccgcgtcccgaagttgtgcgtcgattgagggcccgagggcagcccattcggctttttggtgaatccgatgcgatggctttaaagcgattgaggcgtttggaaattgaaaagacgga

SEQ ID NO: 51938 - DNA, 386 bp, Glycine max
  unsure (1)..(386): unsure at all n locations
aaatctcaagcataaatgctatcgttaaagtattagagttagctttgaaggtgagcaatgtcattcacttcattttccattgacttcttaaatattggtattggctaacacttctttattgccagagacaaagatctttattgattgtcgccgaggatgtggaaagtgatgcccttgcaactcttattctaaataaacttcgtgctggaatcaaggtatgtgccatcaaagctcctggttttggtgaaaaccgtaaatctggtctccaggatcttgctgttcttacaggaggtaagtaagttntctgtttgctgaggttactacagtattaaattattccatcttacaaacttgtgaatgatacattntctctatttatctagctt

SEQ ID NO: 51939 - DNA, 413 bp, Glycine max
gtaaaaagttgtattgaatctctccaaactgcaccagatcttattttctccatacaagatggggaaattcaacctctatcatagggcggtattggctcccatgaccagatgcagagccctcaatgggattccattgccagcgcatgctcaatactatactcaaagatcaacactaggtggattcctcatgactgaaggcaccttgatctctcccacttcttctggatttcctcatgtccccgggatatattcagatgaacaagtagaggcatggagaaatgtagcggacgccgtgcatgccaaaggcagtattatcttctgtcaactctggcatgttggccgtgcttcacatccagtgtatcagccttgagggggctgcacccatttcgtccaccagcacacccatatcagac

SEQ ID NO: 51940 - DNA, 434 bp, Glycine max
agcatatatacatatatataattgtatatacctaattatcttcaacacgcttttgttgcccttgccagtaaatggaattgcgggtcggaggtcgttaccgccttgggcgtaaaattggcagcggttccttcggagatatttatttaggcgagaacattatgacacacgaggaagtggcaataaaattggagtgcgtcaaaaccaaacatccacagcttcacattgaggccaaactgtacaaaatgatgtccggcggagtcggcattccacaggtccggagtggtggtttttggtggtgaatacaatgggattggggatggaactgcttggcccctcgctcgaggatctgttcaatttttgctcacggaaattcacactgaaaacagtgctgttgctcgccgaccaaatgttggccaggatccaatacattcaca

SEQ ID NO: 51941 - DNA, 368 bp, Glycine max
cccacgcgtccgcggacgcgtgggcaacctttcctctctctctctctctggtggggggggggagccatgcccatgtgctcgcgtttggtggattcccgtaccaaatgcagagcctcagcccctaccatctttgccccactcttcttctacctcttcctcacctcttccgccgcatgctttaatggaaattgccaggttctggaagcatgtacagctgccaccgattgtgggccaggcctctattgcggcaattgccccgctttgggcaggactcagcccgtttgcaccagaggccaagccaccatcgttacatctctcgtgaatggtttgcccttcaacaagtactcgtggatcatgactcataattc

SEQ ID NO: 51942 - DNA, 462 bp, Glycine max
tgtttctaaaaaccctttttttctctctctttcacacacaccaaccagactcgatcagtggtggcagatagagagagacatgatgtcaacttccggcgccggcaggtacatggcttttccgccgtctccgtccgcgcctccgtcgccgcacctctccggtcttcgctccactcccctctccgacccggacaaatatctagctgagttgttgggagaacgtaacaagcttagtcccttcatggctgtgcttcctcactgctttcgattgtttaaccaagagacccagcttgttacagtcctcatcaacacaaaactggctgagtccacaaggtagctcatctggtattattgttaaaaagacggtcagagtagatattcctgtggacgcatattctaatgtatggagggattttatctctgctccaatatatattaaatttttctttatagaaagatctacta

SEQ ID NO: 51943 - DNA, 422 bp, Glycine max
  unsure (1)..(422): unsure at all n locations
ccctcgcgtccggtttgagatcaaaaaataataattgatgatggctgctcaaaggattttaggcgctcttggacaaattggtgttggacttactgccgctggagtttttgctcaagctgcactttacaatgttgacgctgggcaacgcgctgttattttcgaccgttttaccggagttaaaccgaatgttactggcgaaggaacgcattttttgatcccatgggttcaacgtcctatcatgttcgacattcgctcgacaccaagggctgttaatactatcactgggagcacaaacgaaattctgaggcgtgtgtggtcgccgtatcccaagtaccgncgcagggcgacgagcctcagccgtcgctgacaacaatgggcactgaacaaagtgcaatgggtctatacaagcgaggacttgagat

SEQ ID NO: 51944 - DNA, 404 bp, Glycine max
cttagagatcgcttgactattcgcaagaatgactaaagccgaacaagctgcggaaaaaaaggagaagaagttgggaaaccccatgagagatttaaagattcaaaaactctgtctcaacatttgcgtcggtgagtctggtgaccgtctcactcgtgctgcaaaggtcttagaacaattgactggtcaaactccggttctttcaaaggctcgttacactgtgcgctcgtttggaattcgtcgtaatgaaaaaatcgctgtccattgcacagttcgtggaccaaaagctgaggaaatcattgatcgtgggctcaaagtcaaggaatatgagctttaccgcgagaatttttcggacactggcaattttgggttcggcattcaggagcacatcgatttgggcataaagt

SEQ ID NO: 51945 - DNA, 391 bp, Glycine max
tcgtctgagtgggaattgttcgtcgcacatgcaacaaaatgaatgctttccgcttaatcgctgatctttcccacctttttgcaattcttattttgctgtggaagatatggaaaacgcgttcttgtgccggactcagcggaaagtctcaagtgctttttgctttggtgttcacctgccgttacttggacatccttcactttatctccatttacaacaccttaatgaaggttctgttcatcggttctctcttcgccacctgttatttcatgttcgtcaaattccgtgccacttacaataaagacgaggacactttccgcgtcgaacttctcgtcctcccgtgcattgtgctggcgctgtttgtcaacgccgatttcactgcgttggaagtttt

SEQ ID NO: 51946 - DNA, 374 bp, Glycine max
gtttctatctgggcagtgcgatgatcatcaatgttctaacaacgctacctgcacaacggtcgacagggttgggttccggtgccagtgtatcgaaggtttcaccggagacggctttaaaaacggcatcggttgccggaaagcttcggcttcaagttgcagtgcttcaacactaacgtccggtggatgtgggaaagcaactaaaatcggtgttgttgttggagtaatcaccactggagctttggtggtggctggtctgtttcttctatgctactgtgccaggcggcgttctacttggttgagaaaacataccatggtaaagcgccaattacgcgaagctgcaggcaactctagtgtacctttctatccctacaaag

SEQ ID NO: 51947 - DNA, 409 bp, Glycine max
gccggccactgttgtgcgagggagccctaccagcgccctgacatgagccatgtggtgaatgttttggcacctcttgtcgagatttggaagccttctgaagcagatgatgatgacatttatgcgattgacttggatatgaccttacctcaagcactcagtaagtggcaggctattgaaggaaagaacacctttgatgtttcatgcacttcatcaatgcttactagtggagatactacacagtctagcatactaactaggccttctggatttgctgattcctttacttccaatgatggaaggtgaagtttgatttacatttacattatacttgtctatgttttttttttttacttcaccaaactttggagatctttataggcttgttttatagtgtctagttagcatatat

SEQ ID NO: 51948 - DNA, 421 bp, Glycine max
ccttaaggtatttgttttatttgattttaccaataatttgctattttcggcacctcaactttatccatggcactgttttcgccttcatcgtctgacaatttttctttcacacgtccttttgctaaccttcgtccaaaattactcaatttctgttcattttggcctataaaaaacgcaaaatgcgaggatcggcattcttcgggtcttaccggcgggtttatgccacgggccaactcagaacaattgctgaacttattcaacgaatatgcaagcatcgaaaagaatgaaaagcgatttatgacggcttctgactttattcgaaagtatcttggactttacacggaagaaaattataatagagaaaccgttcgtcttttggcgagtgcggctgacacggcaaaggacggattgatttcatacg

SEQ ID NO: 51949 - DNA, 351 bp, Glycine max
  unsure (1)..(351): unsure at all n locations
cccacgcgtccggtccaattaagataaaattcaaaacttagtacaattaattcgaatgaacagaggcggtggcttccatattacgattcaagcaccagtgaacatcgcactgatcaaatattggggcaagaggaatgaggaactcgtccttccgctcaacgattccattgctatcacaattgatgagctgagcgccaccacacacatcacaattgggcccgatgtgagcacggactcggtgacattgaacggagtcggcattgacatcgccggcagtgcgnggtttcgaaacgtttttcagcaaattcgtgaatactcaaacagaaagcgaaaactgaagggcgagcatgc

SEQ ID NO: 51950 - DNA, 445 bp, Glycine max
ccctcgcttccggtcagaaccgggaggttgtgtattgaggttacttcctcgtccaagattgctttcatttcggaggaattgtgtattggatgcggtatttgtgttaagaaatgtccttttgaagctattcagattatcaacttgccgaaggacttggacagggatactactcatagatatggtcctaatacttttaagctgcataggtgagttgatttgatttgtttcactggagaaatttgaggctgtggttgttttgtttggtttgtgatggactgatttgtggtggcaggttgccggttccgaggcccgggcaggtgcttgggttggttgggactaatgggattgggaagtccaccgctcttaaagttttggccgggaaactgaagccgaacttgggtcgattcactaatccccctgattggcaggaaattttgacctattt

SEQ ID NO: 51951 - DNA, 485 bp, Glycine max
  unsure (1)..(485): unsure at all n locations
gttgagtatatgattnngactgctttctttattctgttcttccaaaaaacatggcgcgtggacccaaaaagcatttgaagcggttggccgcaccaaaaaaatggatgctggacaagctgggcggcgtttttgcgcctcgtccaatgtgcggtccgcacaaattgcgcgagtcgttgccgctcattctcttcctgcgcaaccgtctcaaatacgcccagtcgtacaacgaggcgcgcatgatttgcaaacaacggctgatcaaggtggacggcaaagtgcgcactgaaatgcgcttcccatgcggaatcatggatgttatctcaattgaaaagaccaacgaaacttttcgtttgttgtacgatgtgaagggacgatttgtcatccaccgaatccaaagtcgtgaaggccagtacaaactgtgcaaggtgaagaagcaggcggtcggtgacaagcaagtgccgtacattgtcacgcacgacgcacgc

SEQ ID NO: 51952 - DNA, 468 bp, Glycine max
tttcgcgttattcggggattgtatcgagggtttggtctgtctgttattacttatgcacctgccagtgcagtatggtgggcaagttatggttcaagccaacgcttcatttggagattaatataacagattgatctctaagcatggaattatgtatgatgctgtaactgcatctgcatgctggcagtggattatattaagttgggagagctataatttcttcttgactgagaaaccatgctgaaagaataaactgaatttgcagtaaactagtgatttcaatttttttatggtggtgaattttgtaataataggataattcacttttagtacatgtgcttgctgttatttttatttctatgttatcatgcaaacccaatattaaaaacaattagcacatggttgcatgaacagattcctggatcatggtgccaaatatgatgaagtcgcacctagtatgcagaaaattat

SEQ ID NO: 51953 - DNA, 294 bp, Glycine max
cgtactcgtccgcccacgcgtacgaaaagcttttatcaaactttgttgcaatttattggcttatcaaatgcttccgtctaatcctgacgacaaaatagatgaggtcgacaagattctttcaaaacttgatggaaaaattgaacgtaaaatggaccctttgatgtgtcgccataaccaaagacagaaatgcacagattgtctcccattggacccctacgatgaaaaatttctgcatgaaaaggacatcaaacacttgtcttttcatgcccatgtgcacaaattgaccgatttgca

SEQ ID NO: 51954 - DNA, 434 bp, Glycine max
cctcgcgttctttgaggaccaagtattcgaagaatatgttgaaccccctgtttttggaaagagaactatattcagtgcctgttcatctggggggaaggaacaatgggctcagtgtgatgattgctctaaatggcgaaagctgcccgttgatgctcttcttcctcccaagtggacatgttctgaaaatgtttgggattcaagcaggtgttcatgctctgtgccggaggagttaagttcaaaggaattagaaaatcttctgaaaaccaacaaagattttaaaaagcggcgaattgcagaaagcagcaagtcaatccaagaacacgaggcttctggcctggatgcccttgccagtgcagctgtccttggagaaaatcttgttgacactgccgagtcatcagctggagccaccaccaaacatcctagacaccgtcccg

SEQ ID NO: 51955 - DNA, 404 bp, Glycine max
  unsure (1)..(404): unsure at all n locations
gnttctgcaaaaccgatccaatttggtcaatctgcatttggtaccaatgcaaaggatttcaagcttttccaacaaccgccttctcagccttcattcagttcaaatattcataccgttgataaaactaccgatgaatcgtacagaggtgatgaggggtcggacaaagaagacgctgcagaggaattcgttccggacgtgcattatgagcctgttgttcctcttccgcccgaagttgaagtttctactggggaagaggaggaagaggtcattttctctgctcgttgcaaattgtaccgctttgataaggatgctcgggaaaacaaggagcgtggtttgggtgatatcaaattgctttacaatcctcggagcagncggtatcgntgtgtgatgcgtcgtgagcaagt

SEQ ID NO: 51956 - DNA, 387 bp, Glycine max
ctttcttggttgatatctggagggattgcttccaaaactctgcattgtctgtgtgtaatgttgaaagcaaatggggaatcttttttgttgtgtgaaagttgatcaatctacggtggctatgagagaaggatttggacgatttgagaaggtacttcagccgggatgccattgcatgccatggttccttggaaaacaacttgctggtcatctctctcttcggctacagcaactggatcttcgttgtgagaccaagacaaaggataatgtctttgtcaacgttgttgcttctattcaatatcgtgccctggcagagaaggccaatgatgctttttacaaactgagcaatacaaagacccaaattcaagcctatgtttttgatgtaattag

SEQ ID NO: 51957 - DNA, 155 bp, Glycine max
cttaatgtgttccgaggacccatagtggtataaaaccacacaagacttttgagtgaaatcagtgccaggggaaactgacattgccgcaaggcactcacccaagagcaaaaagaatgcctatggctatagggggaggagctgaggcaaagaatgct

SEQ ID NO: 51958 - DNA, 257 bp, Glycine max
ggtgtatgtgtatgcactaccacgcgaaattggagaaaacggcaaacggtgatgtgtttctggggatggggaagacatgacattgattacaggaaccagcgttgaagaggctgacaacacgcttatataggaacttgagaaaagggtgactacattggttggcattgaatgccccaaggatgaaaagcaagctcggcataaaattttggacatacctaagacgcactgattaactattctccctatggagttaaatc

SEQ ID NO: 51959 - DNA, 432 bp, Glycine max
ttttgaatgttcttcaagtcaggaggaggtgacccttttgggagctactggaagcccatttgtgtgcagggttcatattgccctcaagttgaagggagttcaatacaaatatgtcgaagaaaatttgaggaacaagagtgaactgcttctcaaatccaacccagttcacaagaaggttccagtgtttattcacaatgagaagcccatagcagagtctcttgtgattgttgaatacattgatgagacatggaagaacaaccccatcttgccttctgatccttaccaaagagccttggctcgtttctggtccaaattcattgatgataaggtttttggtgctgcatggaaatccgttttcacagctgatgagaaagagcgtgagaagaatgttgaggaagcaattgaggctctgcagtttcttgagaatgagat

SEQ ID NO: 51960 - DNA, 513 bp, Glycine max
cctacgcgtccgcggacgcgtgggcagaaatcaagtgatgaagtcccaagacttgccggaaggatgcgtcgcacacatattgtcgtacatttgtactcctgaagacatagtcaggctctccctcgtttccaaggccttttattctgcagctgattacgacactgtgtgggatcgttttataccctctgatttctcctctaccatttctccactttcttcctctaactctaagaaggatctctatttcactctctccgaccgtcccaccatcatcgaccagggtagaaaggtacgtacattatttctccttgcatgtagtgatgttttttatggaatacctgaaatgaaatgtgttgtgtacgttgcgtcactcaaattcctgcagagctttcaattggaaaagcgaactgcgaagaagtgctacatgctttccgctagggatatttctattacatggggtgagaattttatccaaagtttaaatacttttacatattctcatacaatttttat

SEQ ID NO: 51961 - DNA, 427 bp, Glycine max
cttgttttcattctcatttgcagttttcctttcttgttcccccttcccaccttaattagcctcgtcatattcaatctctctctctctctctctctctctcttgaagatctgagaaagttgcatttgggcttgaaaaaatagatgtattttatttctgttgaggagatgaaggttgacgcggggttagggcgcgtggtgtgggacgatgaggacaaggccatgcttggggctgttctgggtggtcgagctttggagttcctaatgacgaactccgtgccgaatgagagtgttttaatggcggttgggagcgacgagggacttcagaagaagctgtcggatctggtggagcgtccccacgtgtccaatttcagttggaactacgccattttctggcagctctcgcagtccaaatccggtgactgggttc

SEQ ID NO: 51962 - DNA, 373 bp, Glycine max
acgcgtgagacacagggtgttgacgaacacaacaaaggccagaatgtcaatgatgtactttgcagcaccaccgctgaattggtggatcactccactgccgaagatggtgacaccccacaatccaagtctctataagcccttcacctgggcccaatacaagcaggcagcatattctctaagattgggagacgctcgccttgacctcttcaagatccaacgacaacaagatacccatctcatcgcacctgcttcaacctgacactttgatcgcattattcattgttgatattcttccaccacctaattaatatgttgtgtttgtcaatagttaattcgagtgtttcatatatagccccttatttttctttctttc

SEQ ID NO: 51963 - DNA, 380 bp, Glycine max
gtgattcatccaagagtatcagtattggatacgtatccaatacggatatgtgaaacaaattgaagtattggcgtgcttcatataccttccgtgtagttgttgtatgaacactcttatgtatgcaggtggggattgctggagtccctaatgatactgttatgaagaaaaccgagaaagtagaggataattggtcaccttcatggaatcaagtattcaagttcccacttgctgttccggaacttgctctgcttcgtgtagaagttcacgagtatgacatgtctgagaaggatgattttggtggccaaacgtgcttacctgtgtgggaactaagaagtggaatccgagcagttccactgtattcccgcaaaggagataagtat

SEQ ID NO: 51964 - DNA, 525 bp, Glycine max
tttctactgtgttgtttaattgactttttagtcctgcaattaggacttttgaaaagggtactttagttattagcttaattggtttgttttgcaggaggaggatctcaggtggaatgggaaactatgttatttgccatcaagcaaggcatttggattgggaattgcagctttggttagtttctttcttgcccagatcattgggaattctatattattaaagtattcttgttggagaagaaaaaataaaccccacttcaaggtgcctgctatcgcaaagattctggttttgatatcttgggttagctttggatttgcagctattttattgattgcagccacaagcatgaacagaaagcagccatatagggtagggtggttgaaaggtgagtgctacctagtcaaagggggaacctatgttggatcagccatattggtcctagtcacggtgtgttctgtaaatggttcggctttctcaacattaaaatcaagccaagcaaatcagcatcagcatacaaaaagacacaa

SEQ ID NO: 51965 - DNA, 464 bp, Glycine max
ctaatcacatcgcaactcaagaaatgaaactagcttggtcaccagagagagcatccaaagcatacatcgacacagtccaatctgtaagcccaatcattcaacttttattttagtttcgttacctcctaatgttgtgttccagttctaactcttaattaattttcgtgttgtgcagtgccaggttttccgcgaatccggagtggcggagtttatttcggccatggcggcggggtggaactcgcagctcatagtggagacgtggtcgcagggaggacttattgccaccagcgtgggattagccctggcgaggtctcacacgtgcggaagacacgtgtgcgtagttcccgacgagcgggcgaggtcggagtacgcggagagaatgggcgaggcgggcgtgacggcggagatcgtggtgggggaaccggaggaggtgatggagggtttggtcggcgtggacttcttgg

SEQ ID NO: 51966 - DNA, 476 bp, Glycine max
  unsure (1)..(476): unsure at all n locations
tctcaactcttatccccccaatnatatataaaaccaaaaacccacctaccttgatgcatgcttgcgttgcttgttcctatattacaattacaattttcaaagacaaacatgtccgagaatattgactccaactctccttcgctttccctctttctctgaaaggtatggagtgctttgacttctggaagagataatggtgcagtgcctagacggattaaagcatttgtgtgctgctctgataaattgttgtgatgctgattcgtcaaagcaacctacaggtttagaaaatcctgaagttcttgcaagagagaccgtgtgaagaatttcagttggcattgttcaagacgaacaagaaagagagcttatttgcagatagggtgtttgactcgtttgatacaaagcacaatgggatacttgattctgaagagttngcacgtgctctctctgtctttcatcccaatgcaccaattgatgat

SEQ ID NO: 51967 - DNA, 243 bp, Glycine max
caaattcggcgggggtttgttttgagcaacacactcgatagtactcagaaaaacttgaacaagactagcaagttgcttgccaacacagaggaagaattgaagaaatgccactataccctgaaagaaaaagacttcatcatttccgagcggagaaaagcagaaaatgctctggctcatcaagcatgtgttctacgagctgatttggagaaagctcatcaggataatgctgcattatttttgaaa

SEQ ID NO: 51968 - DNA, 160 bp, Glycine max
tgaaattctgagttctaacgccactaatcctatgctgacgcgacttcttgagaactgtaagagtctcaaatatctggttgatgagtgtccttttgcatttgtgaactagcatgtaatattttattcactcaaataaagcgcattactatgtgcaatgagt

SEQ ID NO: 51969 - DNA, 269 bp, Glycine max
gttaaaaggaacaatgtggtctatgatgaactctgactggatgctacacatgaaaaagaccagcgctgaagatcataaacgtgattttgaactcacaggcgctcggaaggtgattatttttccaggtagaaaattggagtatggaacaagatactgccgaaatgaaaaaggaaattgcttcatgacagcagtagaattctctggaacacatccttatggaaaagcagtggctttgatggatttggcaaaaggatttctggagatcaagg

SEQ ID NO: 51970 - DNA, 397 bp, Glycine max
tctttgaaacaagatcttaatcacacaaatcagtatatagtgggacttgctctttgagctttaggaaacatttgttcagcagaaatggctcgtgatcttgcaccagaggttgagagattgcttcaatttcgagatccaaatattcggaagaaggcagcattatgctctataaggatcataaagaaagttcccgacttggcagaaaattttatcaaccctgctacttccttactcagggagaagcatcatggggttctgatcactgggggtcagctttgcacagatctgtgtaaaattagcactgaagctcttgaacatattatgaagaaatgcacagatggtttggtcagaactattaaggatctagccaatagtccatattcaccagagtatgata

SEQ ID NO: 51971 - DNA, 367 bp, Glycine max
gaaaataagatttacatccatccattcaccaaatgatttagttgagaggcttgaagacattgtaactgaaatgggattcagagtccagaagaaaaatgggatgttgaaagtggtgcaagagatcaaaacacagaaatgtcttggtaacctctcagtggcagcagaggtgtttgaaataagtccatccctatatgtagtagagttaagtaagtcatgtggagatgcttctgtatatagacagctatgcaagaagctatctaatgatttgggtgttcacaaaaaggaatagctagggagctcagaagtcatggcctgacagaaaataatttggaagctagataatgtatatattttgcgattctctttg

SEQ ID NO: 51972 - DNA, 147 bp, Glycine max
ctggagacaccaggtttactgagacaacatttttcaattgcagagagtgggacatcttggctgcttattatacaataggagcgtaattgagaaaatttttaccacattacaggaggtggcatgtgtgtacctggctgatctacattc

SEQ ID NO: 51973 - DNA, 112 bp, Glycine max
gttttaaatccacacaatccttttgtgctaaataggaggctggggaaactgactttcccccagggcactatccgaagcgacaaaagagtgcctgtttctatagggggaggag

SEQ ID NO: 51974 - DNA, 331 bp, Glycine max
ctgagataaagcagacacagttgacaacaactacagtatcctcagcagtgagtctagttttggaatctttagacgcaatactcactgaccaaagccttggatttgtgagcttaaaagacatagacacgctctataaagaaggatttcacgtgccagcgcttcaagccaatgggaatgcactgcaaagagtaattgccaagttactcagggttgttaatgataaacagaaccttttgcgatgcgatactccggatgcatttaagagggacagattcttttgggtgtcagatgagcaatttgctagggaaactttggcaggtgtcaacccata

SEQ ID NO: 51975 - DNA, 423 bp, Glycine max
gatggccttcatcaccgcattgaccttccggctcgatcttcgtccgcctttcccactgcgactgactctccgcccacagaccgtccgtcgtctgtccgtcgcttagccaatggactcccagcagtgtcccatgaaagagacggatgagcaccgtcagatgcgccgtatcgctttcgttgcggtcgttgtttcgacggttgctgtgattgcttccgtcgttactttgccaatgctttacaattacgtccagtccttccaaagtcatctgatggttgagacggattactgcaaagcccgtgctcgtgacatgtggctggagatgaccgccctccaaattggcaagggacatgtgaaccgcatcaaaaggggctggttgttcggccaatgggtgcccgagagcggcgccgatgcttacgctgcggg

SEQ ID NO: 51976 - DNA, 248 bp, Glycine max
  unsure (1)..(248): unsure at all n locations
gcttagcagctggttcaanagaccggcaaaaatgcgctcatgaaagcgattgcaggacctatccagaaaaaaatccacagaaaccttgggagggaaaaaggcacggggaaactgactaccccccagggcactaaccgaagggctaaaagaatgcctgtaggtatagggggaggagctggtgcaaagaatgctatgccaaagaatatgccaaaagcggggatatcaatggggagagatcttgtcggaga

SEQ ID NO: 51977 - DNA, 312 bp, Glycine max
gttttgttctggacgctctgcttgcagcgagtgttcttttttcgttccaacaccttaatttgcacacgctgcttcttcagcttgagaaatggcacaagaaacctttgtatccacatctgaatctggaaacgagggtcaccccgacaagctgtgcaaccagatctatgatgcattgctcgatgcgcgccttgaacaggaccctgacagcacggtcgcctgtgagacatgcaccaagacctacatggtcatggtctttggagagatcacaaccaatgccaacgtagactatgagaagattgtccgtgacacatg

SEQ ID NO: 51978 - DNA, 273 bp, Glycine max
tttctttttgatttgcaccaggagcaactacggtatggggtggcttggttttggcaaagggagattgtcagggaaaagaaggcacagattgaaaaggaaggagattgcactgacacccttattattctacaacatccttctgtttatacattaggtacagctagtactgaggggaacctcaagtttgacatgaaaaatgctccctttaatatttatcgcactgagcgtggtggagaagttacataccatggccctgctagctatgtaccccat

SEQ ID NO: 51979 - DNA, 319 bp, Glycine max
tgtcttttgatgccccggtgctgttcttgtcaccaatcttcatggaaaagagttctacctagttgagatcatcgttcatggcttcagcggaggacccattttcttcccagcaaacacgtggattcattcgcgtaacgacaaccccgaaaccagaatcattttcaagaacaaagcatacttaccgtcgcaaacaccggctggcatcaaagatcttcgacgcgaggacttgctaagcataaggggtacccaacacgggcaaagaaagcaacatgatagaatctatgattatgctacgtacaatgacttgggcaaccctgat

SEQ ID NO: 51980 - DNA, 354 bp, Glycine max
cttacacttagtttcgttttagtctgtcatggtcaatttattcaaaatcaacccacgcgtccggcagaatgctgcagagaagcctcctttcttcatgccaagctggactgcaatgtatgtcttcaatgcattcattgtggtatgggtttttgtagttggatttgggcttggaggatgggccagcatgaccaacttcataaggcaaattgacacatttgggctttttgccaaatgctaccagtgccctccaccagcaccaaaagttgtggcagcaccaccccctcatgctcatcattagagccaagctgactcattattcaccacaacatagtagagttcagcaacaatcacatt

SEQ ID NO: 51981 - DNA, 310 bp, Glycine max
tcgcatattccctttgcctaactatgcctcttgattggacttctgtggacactcgcaacgcacttttgtgcgccgccgttccttccattggcgccttcgtgggctcgacgatggccatcaaagatcaggaattggttcaatttctcaagaatcaaaactttccttctttcgcccgttgttgcaaatacaattatttgctggccaacactgccgtcaccattccgttcggttacgcttcttatttggtctacaaaattggaggaggttttgattacacggacacgactgttgcattgggactgtacggggc

SEQ ID NO: 51982 - DNA, 470 bp, Glycine max
attttggcaagcataactgttgtcataggcacaaccttgaattactttttggatgacaaaatcaacaaagctgagatccttttcccaggagttggttgctttctgattgcagtttttctaggttctgctgttcattcatctaatgctgctgataataaagcaaagctcaacaatttcaccggtgattataaaaatggagacacctctttgaaggatggagatatagttaaatcaaaagacctcgagggtggaagtagttctgcagacaatgttgaagcaggaactgcagttttcctcatggagcttgaggaaaaaagagctattaaggtttttagaaacaatccaatcaaagtgctctttccaaaaaccttaatagctctttgattggattgtttctaactttctttgctggactttgcttttctatgttctcaccagcattcaacatagcaacaaatgaccaatggaat

SEQ ID NO: 51983 - DNA, 467 bp, Glycine max
tcttttttttccacgagtgcctttcttattttaattcacaaaattaggcaaatcgctccgtcgcaaaatgtttttgcatagattaagaagattcgacctttacacaaagcctgtggaggactgtcgggtgaaaacgccgttcggcggagtcatcaccttgatcagcttcgtcgtgattgttctgttgttcatctcagaaacatggtcatacctaagtgttgatgtcgttgaacagctttttgtggattccaccagcgccgaaatgcgaattgaaattcattttgacattactctgcacaaactttcatgtcccttggttaccatagacgtgatgagtcaatctggagagagtcaagatggcattcagcacgacgtgttcaagcagaggctggacaagcaggggaacaacatggaaggggcacagcccgagaagcaggttgtgaacacaaatgcatccaaaagtgcta

SEQ ID NO: 51984 - DNA, 437 bp, Glycine max
cccttgttggaatggtagctctctttatctttgacactctgaggtgtatcaatttgcaaattgctgctgagaagatctcgtctggttaagggctaagatggcctctatgactgctccatttctgagacatagtatgatttattgcaggaaggctttttgaacgaggattagcttatgttggaacagattatctttcttttcccctctgggataaatacattgaatatgagtacatgcagcaggactgggcctgccttgctgtgatctacaccagaatattagagaatccaaatcaacaattagatcggtatttcagcagcttcaaagagttagctggaaatcgtcctttatcagatatacgaactgctgatgaagctgctgcagtggcaggagttgcttcagaggctactggccaagctactgagggagaagttcat

SEQ ID NO: 51985 - DNA, 372 bp, Glycine max
tttatgacagtatcaaaacaaactgcattaacaaatgaaatcagagaaaatgaaagggcagagtagagaatttcttgagtccggttcctcatcggtggtctcaaacgcggttcagcagcgcctccaattcattctgcagagccgtcccgagtggtgggtatatgccatcttctggcaagccacgaaagacagtgattcgcgtctcaaattagaatatggcgacggctactttcggggcaaagaggagaaggaagaggaacaaacgaggaacgtgaacgacatcgaatggttctacagaatgtcgcaaactcggtcgtatgttgccggggacggtgtggttgggtgtgcctacagctcaggggtagatgtttg

SEQ ID NO: 51986 - DNA, 417 bp, Glycine max
aggggtgcatggtcctggagctgatatagataccctttgtgtgggacctagacatgcatccagagatgaagatttctttggtgagctacagaagatgctatctgagatgcaagaagtaacagaattgcaccctgtgcctgatgctcatgtgcctgtgatgaaattcaagtttaatggagtttctgttgatctcctgtatgcaagattagcgttgtgggttattcctgatgatttagatatatcacaggaatcaatattacaaaatgttgacgaacaaactgttcttagtctaaatggttgtagagtaactgatcaggtcctgcgattggttccaaatattcagacctttcgcacgacattgagatgcatgaggttttgggccaagcgtcgtggtgtatattccaatgttgcaggttt

SEQ ID NO: 51987 - DNA, 384 bp, Glycine max
agggctacatcaagtatgtcgagggcagtgagttcatcgacaccaaggaggacctgattgagcagggcgaccctaccggcggtggcctcaaggacctggacgagaagaaccgcaaccgcatcgaaaacctcaaggacatggtcctctaccgattcggatccacgggtgtcgtccaagtcttgtcaaaggctgccgagctgctgggtctggtgcccgtctttccggtcaggaacaccaccaccttcacctgtggcgcctccgagtccaagttcgtcttccgagactgtgttcttgtcaagaaaggcagcaccgtcggcgatgtggcccgcaagatcatgggtgatgcgcccattgcgtttgtcgaaggtgctggaaacatccgag

SEQ ID NO: 51988 - DNA, 495 bp, Glycine max
cgttttagtccacgcgaggccatcttccgcgtcaccggccaacacttggaacagttggcacagagtgaacagccggacgcacagctgcgcaacttcttctccgagaaattcgccaatgcgtacagctgcgacgacgagcagtgccaacagaggggcgattgcgaacaatgcgagcaaatcgagcagcaacaacgagaggacgcgcaggagttggaggaccaacagatgcgacagcagtcgctgcacagcttcatcagtgcgtacaagccgcgccagcaatacaaacactcgctgaaaatggtcgcgcagacgaacggcggggcgaaagacgcgaaagcccagggcgacatccaagccatatgcgacgagcagaccgcgtactgcaaagtgctggtgaaggtggagcgaccaccaatcggcaatgagaaccaaaaatggatgctgaacgcacaagcgcacgttttgatgccggagaccgccgatcagtggagcagc

SEQ ID NO: 51989 - DNA, 396 bp, Glycine max
tctacgcgtccgcccacgcgtccgcggacgcgtgggcgctgccgacgaccaccgacgtggcgtcgagggtgctcgacggtgcggcgaagcttcccaagcagctgatgggggagagtgtgcttgcgccgcatgaggttatgcaaccggcgagaggggggatggatttaatgaggctgttcaaggagttgaggcagtctgtggccaatgattggggaggttccaggccttccgttgtggaggaggataaggagttttttggagaagaaggaaaagatttaggagcttgagcagcagatcactggtgcatctcaacaggctgaatcacttgtcaaagcacagcatgatatgggagagacaatgggtgaactagggctggcatttattaaattgacaaaa

SEQ ID NO: 51990 - DNA, 348 bp, Glycine max
  unsure (1)..(348): unsure at all n locations
tnacttgttcctcactatttgaaaagattaacaaaactaatgttgtgttatcgggggatagtgctccaatgaaggaacgtgttttacttattgctaatcacacaactgatgctgattgtatgtgcttgtgggatctcgcactttgaaaggggaggctgggatgcataaaatacatccttaagagcagcttgatgaaactacctatctttggttggggatttcacattctggagtttattgcattggagaggaagtgggagatagatgagcaaatattgcaacaaaaactttcaacctttaaggaccctcaagatcccttatggctagttctttttcccgaaggaactg

SEQ ID NO: 51991 - DNA, 134 bp, Glycine max
gatcttactcactgtggaccaatcgcccaaagacgataacagcagcagactaatggcacagactaaaatggatgacctgggaccgctacgaggcgactcgatccttctcaaaggcaaaaaacgtggagagacaa

SEQ ID NO: 51992 - DNA, 306 bp, Glycine max
gtgttttgcaggttggcgcgcctgaactaagcatgcatttgcactcgctgcttgagcttaataacccttcatttgcatcattcatatctgtggacaaatggcacaggaaaccatattattcacatctgaatctgacaaccagggtcaccccgacaagctgggcgaccagatcattggtgcaacacttgatgcatgccttgaacaggaccctgacagcaaggacgcctgtgagacatgcaccaagaccaacatggtcatggagttcagagagatcacaaccaaggtcaacgcagactatgaaaagat

SEQ ID NO: 51993 - DNA, 376 bp, Glycine max
tgatcattcaccaatctttgaggatttaatgttggttgggttttctgcatcaacagggttgcttgctagctcccattacatcttgggttggagcttcaagatcaatggaccagctccaccccttgagctctcttctctcccacagcttccaggcccaaagaagaaacacacatctctgataactggggtttcaatttctggttttcttgcattgtgtggttttttatttggcatctacatgtacaggaggtacaagaatgctgatgtcatagaagcttgggagcttgagattgggccacataggtactcctatcaagagcctaagaaagcaacaaaagggtttaaggacaaagagctgtttggacaaggtgggttt

SEQ ID NO: 51994 - DNA, 406 bp, Glycine max
gtttttatgacattgcaaccactatagcaacaatgaaatcacatattcaagcacttgaagagcgtgcaaatacagcaacagttcaaagtactgtgtttgctcaaatatcagctgaagcactacccaagagtcttcattgctttaatgtgaaacttatggctgattggctgaagatgccatccctgcaaaaacgagaacatgagagtagaatctccccccggctcacagataacaatctatatcatttctgcattttttcagataatgtactggctacatctgtagttattaactcaacagtcatgaatgctgaccatccaaaacagttagtctttcacattgttactgatggtatcaattatggagcaatgcaagcatggttcttcagtagtgactttaaaggggc

SEQ ID NO: 51995 - DNA, 357 bp, Glycine max
atttgtgcctgatccacctcactctagacctctaaaccttgtatctccctttccctgtcaaaagctctaaaaccctatgcgcctcccaacagcgacgtcgctttttgtttcgccatctttctctctcaagactcttcatcaccaaagcgcttccactatctcacccctcctttctctctttccctctcccgaaatccctactctctctctccacgtgccaccgcaccttcactgcccgttccgaatcccagattgacgttgacctcgttcccgcccactaggacttcaacctcttgaccatcgacgcaggcagcggtagggtccgagccgcttgcttcgctgccaactacgacgctt

SEQ ID NO: 51996 - DNA, 392 bp, Glycine max
ttctcgcgtccgcccacgcgtccgcccacgcgtccgtccacgcgtccgatcgaagcccgtcgcgagaaggagctgcttcgtcgcggatcccaaaaatcgcgtttccccatgctccgtttcaaacccgtcgctatggctacgctcggcgctcgcatggtggccgccgcacccaccgtcactccgccggcctcgctcgacttcgaaacctccgttttcaagaaggagaagattaacctcgctggacacgacgagtacatcgtgaaaggagggggggatttgttccctttgttgcagggtgctttcaaggggattaagcagattggcgtcattggatggggttcgcagggacctgctcaggcacagaatttgcgggactcgcttgctgatgcaaa

SEQ ID NO: 51997 - DNA, 359 bp, Glycine max
ggtactcgacattgcagttgactttacagcacctgcgtttcctgggcgatacatatcatactggaggatgacaactccatctggacataaatttggccaacgggtgcgggtccttatacaggttaaatgagagtccctatacaggatgatgcatctctccaggactcattgcatgatacctctcaaggtctgaacttgaatattcccctcgatatcagtggctctaaaggacctcagattatagatatcaatgtccagcctactgaggaagatactgttcttcaaacccgcaatcctaatgctcccattgaacctgtgaatcaaatggttgataatgaaccaaggtttgagctggaaaa

SEQ ID NO: 51998 - DNA, 394 bp, Glycine max
cctacgcgtccgtgtttttactgctaaaggaactaaaattcaggattacttttaaccgatttgagttttgggaccgtgcttaataattttagatcgttcaacatttttccttgtggctttatctttgtttactttttactttattatcatgttttattaatttgttatttttctttttcaatagactccagaaatatggatgaagccaaacagtgacaaatattacaaatgcgtttctcgacccaggaatgtaataaggctaaaaaagacaaatggctatcttcttgttcatgcaaatggtggattgaatcaaatgagaactgggatatgtgatatggttgcagtggcaaaaataatgaatgccacccttgtgcttccctctcttgaccatgat

SEQ ID NO: 51999 - DNA, 419 bp, Glycine max
  unsure (1)..(419): unsure at all n locations
gcacaatttctctctttctttttgtgtccaaaatggctcctagttctactcacaatactgggttctatgtgcttatgctagttgggatagtgattagcactatggttgctacctgtgctggtagcttctaccaagactttgatctaacatggggtggtgaccgtgctaagatattcaatggtggccagcttctatctctttcccttgacaaagtctctggctctggcttcaaatcaaagaaagaatacctatttgggaggattgatatgcagctcaagctcgttgctggcaactctgctggcactgtcactgcttactacgtatgttcattaatatttgcaatacattatttaatttcattactacaatattctatcctacaaagtacaaacaaaanaattaaatatggtttcttttga

SEQ ID NO: 52000 - DNA, 476 bp, Glycine max
agattattgagttcaaagataagcaagtcagagtttgacaggatttgcactgtgataattgggagggaaaatatccctcttcacaatcgactcattagagcaattttgaagaatgcttgtctggctaaagtcccacctgtgagaggctctgcaagagttgggagtgccaccagtgtaaaagattcaaatgggtcgcagagaggctctgctcaatcgctgtttggggaagcatttcctccttccatgcggaggatcagctctttggctgctcgagactgtaggttcaagggacgccataatgcttttgggccgctgggcaagcctcattttggtcttgcgtctgaagaattggtatataagacactggagcagcagagtgcaacagaactgaattcccttggcagtagacctccgatttctgttgaagagggagaagaggttgaacagatggctggaagccccagcattcaaagtag

SEQ ID NO: 52001 - DNA, 454 bp, Glycine max
ttttccaagaatcagcagcaattgggcggcaaagtccgactgatcgtcaccggctctgccccaattgcgccggaagtgctgcaggacttgcgcattgcattcggcaccacaatcatcgaaggctatggccaaacggaatgcactgcaatggtcaccgtcacttggccaggcgacgtcgacggcggccattgcggagcgccggccgcgtgttcactggtcaaattggccgatgtgcctgaactgaattatttcacgagtgatcggaagggcgaagtgctggtgaagggaccgtcggtgaccaaaggctattaccgcgacgcggaaaagaccgtcgaattgttcgatgagaacggctttttgcacaccggagacattggccaattgttgccggatggacggttgaaaatcatcgaccggaagaagcacattttcaaattggcacagggcgaatatg

SEQ ID NO: 52002 - DNA, 342 bp, Glycine max
gggtggacaaatacagaccaggagacttttctaagctcactttccaccaagagcaagcagaacaacttgtcagtttggttagcaccagtgattttccacatttactcttctgcggaccaagcggagctggaaaacggacgcgaattcattgtttactgaagaaattatacgggaaaggcgtggaaaatgtgcgagtggaggaaattcccttttcggtgcccagcggttagaagcttcaaattcactcggtcaacagtaactaccacatagagctgaccccgagtgacgttggcatttacgaccgagtgattgtgcaagaagtggtcaaaacaatggcacaag

SEQ ID NO: 52003 - DNA, 323 bp, Glycine max
tctattaacataagctgcacttccatcttccggttcaaggtttggtggattaaagcgatgggcagcactagcagctatgtttcaagcagcagcagcagcagcaaatggctgggcttcgtggcggccgtgtggattcaatgcatctccggcaacaactacactttctcaaactactccgacgccctcaaatccctcatgcacctcactcagctccaactcagacgacaacgttgcggtgtgtgtggagagcggctccagccacgtaacagcctcatcattcgacactgtcgtctacttgcacgcaggggacaaccccttcacgc

SEQ ID NO: 52004 - DNA, 391 bp, Glycine max
ctttgttccattattatttagtagatactagtgttatgttacctggtgcccaagtctcagagttgcaattcaatatcgtatcagaagaaccattttttgtacatggactgaagttcaccccattaccagtgtggcacggccagaattatcggtcccttggttttcgttttggtaatatatgttacattagtgatgtcagcgacattcctgaagaaacatatccacttctgaaggactgtgaaattctaatcctggatgctttgaggcctgattgctctacttctacacattttggacttcaaagggccttggacgaagtgcgaaaaattcaacccaaaagaacactttttaccggtatgatgcatctgatggatcatgaagaagtgaatga

SEQ ID NO: 52005 - DNA, 370 bp, Glycine max
tttattattgcggtagcacaggtgtgcgaaagcgagggatttcaggcgtttcagcagtcagctcttgaggcgctgtctgacgttgtggctcggtatattttgaacgttgggaagtctgcacattgccatgctaatctttcaggtagaactgagtgccatgcttttgatgtcattcaagggttggaagatatgggatcagtgcaggggtttgcgggtgcttcagatgttgatcactgccttgaaagttcaggtgttattcgggaaattgttcattttgttaatgatgctgaaccggttatgtttgcacaccccattcctcagtttccagttgtgaaagaacgggtgcctaatccaagctttttgcaaaaag

SEQ ID NO: 52006 - DNA, 328 bp, Glycine max
tggttcgcaagtttgtcatccgccgtgaggttcagcccaagaaggagggcgcaaagccatacaccaaggctcccaagatccagcgtctggttactcctcagcgtctccagcacaagcgccacagggtcgcactcaagcgccgccgcgcggaggcttccaaggatgctgccaacgagtatgctcagatcctttccaagcgcctgaacgaggccaaggctgcccatgccgaggagaggaagaggagggcctcgtccatgaggcattagatgtagacgataaaaagcatgaatgggtcgtgaatgattactatggcgtcggcacgaaaaca

SEQ ID NO: 52007 - DNA, 220 bp, Glycine max
ttgtcgcgtgggcggacgcgtggggtttgttggggtcttaattgatttatttagacccggaagctgaagttgtcgccttgtctccaaagactctcttggcaactaataggttcatttgtgagatctgcaacaaaggatttcaaagagaccagaatctccaacttcacagaagaggacacaatttaccatggaagctgaagcagagatcaagcaaagacat

SEQ ID NO: 52008 - DNA, 391 bp, Glycine max
tctacttttccgtggacgcgtgggcggacgcgtgggagagtatctgactgcttcatctttagcatatgctgcggtttccagaagtgctcaagaaaatctccttcaggctcccttattgtctagatcaaatagcacggaggcttccttggcaaaggatacttcctctaatgatgtgaaaaatggtcaaggattcctgttttgagttcactggcagttatgataactataaattgaaaagatattcatttggagagtccatgttcaaaggccatagtatgcttgctcctttcacggctgggtggcagactactgatttgcatcctctggtcatagaaaagtcagagggaagctatgtatatgacattaatgggaagaaatatcttgatgcact

SEQ ID NO: 52009 - DNA, 378 bp, Glycine max
ttaatctatctgcgaattcacgttctaaccaggcacttaacgctcatcacaaacaaccgcctaaatgggtaaggaggacaagactcacctcaacgtcgtcgtcatcggccacgtcgactctggcaagtcgaccaccaccggtcacttgatctaccagtgcggtggtatcgacaagcgaaccatcgagaagttcgagaaggaagccgctgagctcggtaagggttccttcaagtacgcctgggtccttgacaagctcaaggccgagcgtgagcgtggtatcaccatcgacattgccctctggaagttcgagactccccgctactatgtcaccgtcattgacgcccccggccaccgtgacttcatcaagaacatgatcac

SEQ ID NO: 52010 - DNA, 438 bp, Glycine max
aatcgcaaattttcttccccaaatcgtagatctacggtaaaattctccttccatcgctgcttccttttccttttcgcggattcccaaatctacatattcctcttcctgcacccccgtttgtgttccccgattcgcttctcgccttttgcacgtgcgaattagggtttcaattcgcgtttgccatttcatgaggccagatctagttgtattgcatgcattggtttaactggagtagtgtggtaagatgggaggtggatttagagtgcttcatttagttaggccgtttctatcgtttcttcctgaagttcaaactgctgacaggaaagtgccatttagagagaaggtcatatacactgtgatctctcttttcattttcctggtttgtagtcagctccctctatatgggatacactcaacaacaggtgctgatccattcta

SEQ ID NO: 52011 - DNA, 505 bp, Glycine max
tttttctttttttttaaatttgattcagatagtagcagaaatgaaggccataggaaagatatcagggccaacagctctcaccggtttaatcatatattcgagagccatgatctccatggtcttcctgggctacctaggcgagatggagctcgccggaggctccctctcgatcgggttcgccaacatcaccggctactccgtgatctcgggcctggccatgggaatggaacccatttgcgggcaagcctacggtgccaaacaattgaagacactgggcctaaccctccagagaaccgtcctccttctcctctcaagctccctccccatttccctgacgtggctgaacatgaagaacatcctcttatggtgcgggcaggaccatgagatctccagcacagcacagaccttcatcctcttctctatcccagacctcttcctcctctccctcctccaccctctgagaatctacctcagaacacaaagcatcacattacccctaacctac

SEQ ID NO: 52012 - DNA, 358 bp, Glycine max
ctgcacgctctgcttccagcgagtggtctttcttcgcttcaacaccttaataagcacacgctgcttcttcagcttgagaaatgggacaagaaaccttactatttacatctgaatctgaaaacgagggctaccccgacaagcagagcgaccagatctctgctgcagtgctcgatgcgtgccttgaacatgaccctgacagcaaggttgcctgtgagacatgcaccatgaccaacatggtcatggtctttgaagagatcacaaccaaggccaacgcaaactatgagaagattggccgtgacacatgcctgcgaaaacggattcatgtctgataacgttggacttgatgctgacaaacgca

SEQ ID NO: 52013 - DNA, 358 bp, Glycine max
ctttttcgtccgcccacgcgtccgctccctgcatggtttccttggcatcaaaccataagggatgtttggaaattggttttcttcttttttagggagaacaattgaagagtgtgtgttgatttgatcaggtccatggagtgctgaatgcactgagctgggggattttgatgcccgttggtgccataatagcaaggtatttgaaggtgttcaaatctgcagaccctgcttggttttaccttcatgttacatgccaaacctctgcctacatagttggtgttgctgggcggggaactggtctcaaactcggaagcgactcagatggcattaagtttaacacccatagagcactggggatcac

SEQ ID NO: 52014 - DNA, 449 bp, Glycine max
atctgctgatgcttgccttaagggcctcaatggagtcccagatgttgtggagtgctcattcgtgcaatccactgttactgaacttccctactttgcttccaaggtgaggcttgggaagaatggagtggaggaagttctgggcttaggacctctctcagattttgagcaacaaggcctcgaaagccttaagcctgaactcaaatcatcaattgagaagggaatcaaatttgccaaccagtaattgaacatgttatcacatacgtgtctggtaggctaatgctaatgttattccttcaagaaccaaatcaaattttgcaatctcagaaccatggttgtattgctgccggcagcggtgtggcgactttgttgctttatttagagtaggcatacgccatgattcaataatttaagtctgagagctttttgacgctaaagagattcaacgatct

SEQ ID NO: 52015 - DNA, 415 bp, Glycine max
ccctctcgtccggtttgagattttatagacaaaatgttatgtacaaatatttattcaatcttcttttataaatggctgccaaactcaacacggcttatctgagctctcatcgagggataatcaaaattttgcagattgatttcgggctcattgtttgcactttactttgcatcggcagttacggctttttcagcggatgcttttacgacggaaaaatcggtgccgccagcggaattaacgcagtcatcgccatactgaacattgttttctttgtgctcaatttgatggacactcacaacaacaaatgggaacgcatttacacactcgtggcactcattcttttcgtcgtagcatttgcgctgatgctatggaatctgctggagacccattcgtactatggccagaccaaaatacc

SEQ ID NO: 52016 - DNA, 240 bp, Glycine max
gtaacgacaggtcgtttggatgagccatggcgacgaggccgtcgcgctgcccgatggattccacgtcgtcgcccgcagcgaccagggcgctgttgccgctattgaaaacccccccgccaagctctacggcctccagtatcaccctgaggtgacccatacggaggatggaatggagacattgcggcgctttctgtttgatgtttgtggtgtgggagcagggtggaagatggaggatgtgat

SEQ ID NO: 52017 - DNA, 356 bp, Glycine max
tgttcctttgaccagaaacgagggtgattatgaggatgatgcctgctggaggcatcaacggatctgaaaataaagataaatccccttcttttgccaaaaccttgacacagtctgatgccaacaatggtgggggcttatttgttcccagatattgtgctgagacaatttttcctcggttggactattccgcggaccctcccgttcagaacatccttgccaaggatgttcatggtgagacatggaaatttaggcacatttataggggcacgccgcgccggcacttgttaactaccgggtggagtagctttgtgaatcacacgaagcttgtggcggaggattcaattgtgtttatgagg

SEQ ID NO: 52018 - DNA, 491 bp, Glycine max
cattatgttgcagcttctgtacgcggtgatatttgcggaaatgttcgtgatcgtgagcttcctcttcaaaactccggcgaggaagctggtgatcgtcacattggatcggctcaagcgcggtcgcggccccgttgtcgtcaagaccgtcgccgccacgctgctggtggtgctcgcttcctccctctacagcatcgcaaaaatccggcatcggaacctcgatgctcccgtcgctaaccccaccgaccaagtcctcgtgtacaagcacatgctcgaagcttctcttatgggtaaatctagtttctctctcgtttatctgttacttcgggggatattcgatgctctcaaactatgcactaagcaatgatttcgaattccaagtgtatatctgaagaatgaattgatggtgactgtgataccctagggctagagctttgtgatatcatatttcagatatttattatttacttgtgtattacctacttattaatagt

SEQ ID NO: 52019 - DNA, 393 bp, Glycine max
attattccatcctgtgtgctatttcagtttttagctgaattgattgtgttcagttgtcatacactgctaaatattataaggccatcaacaaccacaagtttaccaaaactccgcattttaaggataaggggatgtaatgagctagaggaaatttgcggaagcagtaatgagggtgatggagcagtactggatgagattgcttttatgaaattggaggaattgacattgaacaacttaccgaggctcacaagcttttgccagggaagttacgacttcaggtttccatcactacaaatagtacgtttggaaaattgtccaatgatggagactttttgtcagggaaatataaccacaccaagcctcacaaaggtggaatatggaggttacgactac

SEQ ID NO: 52020 - DNA, 424 bp, Glycine max
ccgggtacgactacttccaagtacgacaccaccacttccaagtacggtacaacaacacccgaatacgatacgacaacatccaaatacgatacaacgacttccaaatacgacacaacaacttccgactatggtacgacaacttccaaatacgatacaaccacttccaagtacgatacaaccacttccaagtacgacacgacaacttcaaagtacggtacgactactcaaaagtaccgtggcaaacgctttgcggatgccgtgctcgttcgggctgctcgcgctgagtacgacgcctattgcccggccggtcccccgggagatgccggcattgccggaccgcccggcccccccggcgagccgggcaaatgctatggcagcgggtccaaagagtccaaagaaaaggagtacaaacccagcaagcgca

SEQ ID NO: 52021 - DNA, 319 bp, Glycine max
ctctcactcacatgatggaatcccagaaccagaacctactacgccaacccttgataaactcaacgcatcatcatcatcactctgctgattcccgtctcgaagaggtcctctctgaccccaccctaccctggtccaagcgcatcctctccgccacatggatcgaactcaacctcctcttccccctcgccgctcccgccatcctcgtttacgtcttcaacaacctcatgtccaacgttactcgcgccttcgccggccacctcggaaacctcgaactcgccgctgccaacctcggcaacagtggcattcagctcttcgccta

SEQ ID NO: 52022 - DNA, 416 bp, Glycine max
ttttcttttgggcggacgcgtgggcaaagtaacactagaactcacaaaggacagaagaaacgcgaatgccaggagaactccaattaccacccgggttcagattccaccccactgacgatgagcttgtgaatcactacttgtgtagaaagtgtgctgcacaaaccattgctgttcccatcatcaaagaaatcgatttgtacaagtttgatccatggcagcttccaggtacctttttttcttttctcactctagtctctgtattcttttgccttttttaatttcattagggtcttaattctactacattttttttctctccaccttaaagtcctattatttatgtttttatgtacagagatggctctttacggtgagaaagagtggtactttttctctcctcgagaccgaaaataccc

SEQ ID NO: 52023 - DNA, 361 bp, Glycine max
tttggttcgactatgtcaaaacagctgatgaagaagagcgacatccttcagttgagggaggaacagatgcgcagaagtgaaaaagagaggcggcgaaatgagcggaagcaagaaggaaaagcggccaaaacactttcggccattctgttcgccttcattatcacttggaccccttacaatgtgatcgtttgcctcgaggctttctaccccaactcagtcccatcatatctcttcacacttagttactttctttcctatgtcaattccaccataaatccgctctgttacgcgctgtgcaacgcgcgcttccgcatgacttatttgcgcattatcaaatgcaaatggaggcattcaccaatcg

SEQ ID NO: 52024 - DNA, 393 bp, Glycine max
tcgggtcagcacacacagccgaaaagcgcttcttctcatcgccttcgccttcaaaacttagaagcaccaatcccaaccagaaaaaatgtgcgacgaagaagttgctgctctcgtggtggacaatgggtccggaatgtgcaaggccggtttcgcgggcgatgacgcgccccgcgcggtgtttccgtccattgtgggccgcccccgtcatcaaggcgtcatggtcggcatgggacagaaggactcgtacgtgggagacgaggcgcagtccaagcgtggtattctgacgctgaagtacccgattgagcacggcatcgtcaccaactgggacgacatggagaagatctggcaccacaccttctacaacgagctgcgtgtcgcccccgaggagcaccc

SEQ ID NO: 52025 - DNA, 413 bp, Glycine max
tttacgcgtccgactcacccaactccaaacccacctcaccgatttctccgccgagttccccaacgcctccaccacaaaccccctctccctccacctcctccactcaatcttcaaaaccctaaacgacgccgtttcgctctcccgctcatgccaaccccaaaccctcccaaacggaaaactcaaaacccaaagcgacctcgactccctcctcgccaccctcgaccgccacgtcagcgactgcgacattctcttccgcagcggcctcctcctcgaaaacgacgccgtttccgtttccgtttccgtttcatcgaaacgcgaagccatccgctccgaatcacgtaacctaataacccgtcttcaaatcgggtcgcccgagtccaaagcctccgccatggactccttactgggccttc

SEQ ID NO: 52026 - DNA, 398 bp, Glycine max
tcctcacgcgtccggccgtgcggtgtacagaattagaattagaaagagaaagagaaagagggggggtcgtgtcggcttgaaaccaaacacgaccttatcggcgatccaatttcgatctgtgcaaatcgtaaaccctacctacttgcttctgcaattctggtggactggatccattttcatctcaattctcagtaagttggggcacatcacacaataactttgacatggcttccgctgcgccaggtgcaaccaatgatgctttatacaaggaattgtggcatgcctgtgctggaccccttgtcactcttccgcgtgaaggggagagagtttattacttccctcaaggtcatatggaacaggtacaacttgcctgggcatgttctcttaatttctgactt

SEQ ID NO: 52027 - DNA, 414 bp, Glycine max
gtgcatccaagagaaggaggaggagttcgagaacacgcgcaaaaaccaccaacgggcgttggaaagcatgcaggcgacgctggaggcggaaagccggggcaagcaagaagcactgcgcatcaagaagaagttggagagcgacatcaacgagttggagatcgcattggaccacgcgaacaaagcgtacgcggacgcacagaagacgatcaagaagcaccaggaacagatccgcgagttgcagctgcaagtggaggacgaacaacgccagcgggacgagctgagagagcagttcctgaacagcgaaaagcgcaaccagattctccagagcgagaagaggagttgatgcaccaggccgaacaggcggagagggcacgccgtgcggcggaggccgatttgatcgaactgcgcgaagca

SEQ ID NO: 52028 - DNA, 385 bp, Glycine max
ttttcgcgtgggcgggcaaagagcttctttaccgctcactgaaccatgtccaagcactcgtcaagccaaatgctgtccaattggatgagaacacaaatttccaagatgccataattaattgcgattggatcagcaaagaggggcaaggtgttctcaagcccgatcaattgatcaagcgcaggggaaagcacggattagtcaaaatcggaacgaccgacgaactcgccaaatggttcgatgaaaaaaaggggcaaaatgttcagatcggaaagaccacggggcgtctttcgaaattcattttggagccgctttgcaaacacggggccaaagatgagctttacatcgccatttatagcaaaatgaatgaggatgtgattctgtttta

SEQ ID NO: 52029 - DNA, 370 bp, Glycine max
  unsure (1)..(370): unsure at all n locations
acattgacatttccttttgagaccatggggatgggatccgaaggaaggcctattactctagacattccgcataaactttcgcttaaagggtttatagggttcttgagatcgtggcagcccgcgatgaaggctaaggaaaaaggagtagagcttataaatgaagatctaataaccaaatttgaggaggcttggggtgatgaaacccaagtgaaagatgttttctacaaggctcacatgattgttggaaaaattccggtatgactacaacatcttaggcaatcattcaatacgttaaaatatacttaattntttacactaaaataacaactagtgttttttttttggttaaggaaatatcaactattattac

SEQ ID NO: 52030 - DNA, 392 bp, Glycine max
ctgtgatggtgcaattctcagttggtgaccaatttcttgtttatttagaagggtgtcgatcgacaagtggggtggtgtcgatcgacaccatcgcgcaacttcgaatgtctacttcctctgaaatgtgagtgtcgatcgacatagtaagagtgtcgatcaacactgaagctatcacgtttgcagtcatcttcttcagttgtatcaatcatgtataagttctcttcaggcaagaaatcgtttatagggacatcatcatcgatcctaatgcgtgataaatgatctgctacaccattctcaactcctttcttatctctaacctcaatgtcaaattcctgaagaagcaaaatccatctcaaaagtcttggcttagcatctttcttttgcatcaaata

SEQ ID NO: 52031 - DNA, 567 bp, Glycine max
aatcaggatgttagagactatatttaacttaagttgttctatatcaaaagcaaacctacgtcaagagaacccttctttgaaacactttggtagttcttctgtattgtattagaattcaaaaataatcaatcagagtacttggaaccatttcttatcttttttttaagaaaaaatatggtagactaactgatctttcgatcagttaatgaaagagcccaatgcaaaaaaaaatgcatgttgggtctttgaaagagttcgaatcattttgataataataagttcgaactcttttaccgagcaggtctacggctcgagtccgtatagccctaactaagaaatttattctaaaaaatcacattaaaatcaaaataattggataaatttttttacttttttttgtattctttatttctaacaggttacttttaattgctcggttcataaaaaaaatttccatatcataaaccataagtcctgcggatcgttcagaataaaacggaaaatttcattttatttcaatggagccaatcactatctatcgatatatcgagatagatacttaattta

SEQ ID NO: 52032 - DNA, 481 bp, Glycine max
gaccgttccgagctccttcttcgccgccggagactcccatacctaattagagcattcctttttgctcagcttcggagatccgtcgctctgtgttctgataccattcgtttccaccgtcgataatgcaatctcctggctccatgtattcggagaaggcgtcgattgtttggtcaacgggagctccagctttgacgaggatgatgagagatctaggccgttggatcgagaggacgaaatcgcggggagagtattggccggagactgggaggtttccttcgagggcggctcgatctagggtttcgtcgactttggaagtggttcgattgtagactgagattgggaaacctttctcggcgatgtttaaggcgaggttttggcccatcacggcgagtccggcgagaccgattcgggatagtgcggcagactccattgtagatagagagatgagcttaggattggttaggtagagagagaaaaatga

SEQ ID NO: 52033 - DNA, 425 bp, Glycine max
tagcactagtctccatgaacaaagctccaaactcacgagctttattctccccttcctatatcgaaacttgcctatagttaaatcaatcacatcacacaacatcatatggggtttgtgaaatgaagaagctatctttagacttgattctaacggacatagttataccttttattaacaagatcggtcttgttaccaacaagaacaatactgacatagctgcctctttctgcacgaacttcttcgatccacttggaggtgttaataaatgattgcttacctgcacatatataacttgtgtaagaagaaaacgagcatgatgagtggttatgaaactattttttgttatagagtaaataagtcgcataactggcaacatcatagacaataacagcaacagaagaatctctgatataacttggtactag

SEQ ID NO: 52034 - DNA, 201 bp, Glycine max
ttagtttatgctgataaatgaacatcgaagatcatgagaagagctaaagtaaaaaccaacatgattgtccttatcatagcaactgcaacttaacatacgacattttgggaaaaaatgctttgtgggtttaggactaagactcaaagcaaatgttacatggttttctaaaaatatatagatccgatttggagaacttatgtt

SEQ ID NO: 52035 - DNA, 367 bp, Glycine max
ctggaacttaaaaatgatcattttacaattgataagaatttttccccttatatcttacctgcaaactgcaacgttcgtggttgaatatccaacagcggcatattcatgttgctgtgacaaaatgactcaagtatcaaacagctaccacttgcagcaggattctctccacccctatttcaacaaaaaaataataagagaaagatcagcccagaaccattcaagtatgaaactgtcgacactagagcgaaaaacaaactcagatctatactctatttgggacaatcataaacccgctctcccattgggaacatgacgaaatctaaccaaacagtcaacaatcagaaaagtttctctgttacactctttc

SEQ ID NO: 52036 - DNA, 589 bp, Glycine max
agattgaaacaaacaacatatttgagtaagaaaacataaacacatcaatattgaaaatagttagaaaagagctcttcactgttattgaaatctgaatgaatctctgtaaaacatggatgaatagcttatgtctctaaaagaaaacttggatgagaagaacatcttaggtctaaacaatgacttttaaaactatatatattacctaaaaacgttcatggactaataataaaaatagagaagtcttatgggcaaaattttcacttctttaaacttgaaatcgtcatggacttctctgggccgaaaccggtgtcgatcgacaccaagagtgtgtcgatcgacactcttaactaaaaagactctaaaaataacaaaaagactcaaaatcctatatctaaaacacagttaaaaatggtaaaaacagggttatatcaccgcaccggctaaaggattacttactagggttatatgaaaaataaaaaagtagtgtcatgaataatctaagattactcagtaagcctgactaccaaacctataatttaccccaacccattcccgaaactaaaaggaagcaatcaattcacacaataat

SEQ ID NO: 52037 - DNA, 433 bp, Glycine max
ttctaaaataaatatgattgttttattactagattcaggtgttggaagactaactgaaagggaaatacatcagacacatagagccaagcaacatttattactttttataggatcgagcattagagtaaggcttattttatttaaagtcaaaatcttatctatcacacacacagaccaaggccattttctaagcaacttgtgcgactctccttcgtcctcatctgccaaaaacttcatacgagtcgctacttctctgtctatatataaactgcttaccactctctttttttctgattttatgacgttaagagatagaaacagagagagatagagagatagagttatggcttaggcgatgatgatccgaaacgcagcttccaagcgaggaatgactccgatctacggtgatttcggtaggttgagatctatgttt

SEQ ID NO: 52038 - DNA, 506 bp, Glycine max
cagaaaaacaactttgagatcaagagtggtcttatctcattgatccaaggaaacaagtttcatggtctacctatcaaagacccttggaccatcttgacagctttgataggctctatggccttaccaagatcaatggtgtcactcaagatatgtttaagctcagactatttcccttctctttgggagacaaggcacaccacagggagaaaactctacccccagactccatcacctcatgggacgattgtaagaaagcttttcttgccaagttcttctctaacgctcgcaccgctagattgaggaacgggatctcaggtttcaaccagtaaaacaatgaaattttctgtgaagcttgcgagaggattaaaagttacatcactcagtgcctccattacggtttcaagaaggcttaattattgagcacactctacagaggagctttaccaaagatcagaatgctacttgacactgcctccaatggaaacttcctgaacaaggatgtagca

SEQ ID NO: 52039 - DNA, 431 bp, Glycine max
tattctagcaaaaccgtccatcagagccatcgttatttattggttagcaaggcgtattttcaaaatacctatgtcaacagctgtggcaatcggcgcgtggtttgctaatacaccaatttgtccactgtttgtagataaaatgatttgttttacttctgaatcccaaacaattcgattcggagtcagttcacaaagatttaaggtcatttctttaatttactctccatttctaagttcgtagccttcgcagtagcttcatcgatgttacccactaagtaaaaggcctgttctgtaagagaatcaaattctccggaaaggatcaaattaaaccctctaattgtttccgctagaccaacatattttgccggagaacctgtaaatacttctgctacgaaaaagggttgtgataagaaacgctcaatttttcgtgc

SEQ ID NO: 52040 - DNA, 438 bp, Glycine max
gccctctttcctctggcgatttcagctcttctctgattatgtcggtctgtagagcgttcgagctcatccctgaaactctggtaaatatgttgctctctcggtctagcggaccaggactcagcttcatccacgttgtaatcagggtccatagaggattctccactgtagttagtcatgatgaaacatgaaaacaaatgtaactcaaaaataaacgttaatacgttagttccaacaaaaccaaaaacacaaaccaacagagtaaaccagtcgagtgtaccaaaaattcttaaattttttttttcttcttttttttttcggtttggtgaactcgcggtcgagtgatcccttggttgtgcttggcgatcaagtgaccttgagaggcgagagatggagaagcggtttgaaagacgtcgagtttggttgcttaatcgagtgaac

SEQ ID NO: 52041 - DNA, 519 bp, Glycine max
cactaaacttaaactctacaccctaacctatattttttttgtttcataaagtatcatagcacgtgaagatcctagaacactaaagcttagactctacaccctatattcgataacctataacacaacctctacagcctaaccctgaaccctaaatcttaaacccaaagccggacaccctgaaccataagactcttaaccctcaaccattaaacctagaccctaaaccatagatcccaaactttaaaacctaaatcctactgtaggcttccgtaatccggttgcggttctagttcttatgatcaatgatacacaaagcatctagtcatatttgactacaaatccgctaacaaatcttcttcttgattcccaaagcattgatggtgaagccgaaattcttatgaaattttggtgttttgaatcgtttaactaggaagcactactttacttttcgagatctggttgaggttctagttttctatataatcatacacatgacatgaagtcatatttcactctgat

SEQ ID NO: 52042 - DNA, 415 bp, Glycine max
tgatgtcatgtgtatgattgagtataagaactgacaccgcaaccttatcctaaaagcctaagtagtgtacacttgttcgaagagacagagacacagactcatatggactgcggctaatccttcaaagctttgagaagcaaaaagaagcttggttagtgttttggagtcaaatatgacttgatgtcatgtgtatgattgagtataagaacctaaaccacaaccttatcctaaaagcctaagtactgtttccttgttagaagatacaaagacaaagactcttatggactttggctagaccatcaaagctttgagaagcaagaagaagcttggttagagttttggagtcgaatatgacttgatgtcatgtgtatgattgagtataagaacttaaatcacaatcttatcctaaacgcct

SEQ ID NO: 52043 - DNA, 191 bp, Glycine max
ttacggattgatgttctatttcactgcccgacggggggtctttttacccttccctaaggggactacttcgatatcggacacccacgagtatttaaccttgcaaggaggttcttgctgattcacacgggattccacgtgccccatgctactctagtcagagcataagctagcgatgctttacactactggac

SEQ ID NO: 52044 - DNA, 402 bp, Glycine max
aatgcctatacacatcattcataaacaacgttcatcttaaaccaatttaacatgatgggttgtgttcgtaactagaaacataagaatttgatgatggagctccgtacgtattatgtaccctcggtgatttattatataaatatcaatttaaaaaataaactactcaaatcattaactaattcacgactattatacactcatactttgagtttggattacaaaaaaaatcttcgagtatgaaaaaactattaaaataaaatattaaaataaatttattgaaaaagttattgaaaaatcatgtaatatttaaataaatttagtaatagtacagtaaatatgtaaaataaaatcatatataaaattaaataataaatttatcattaacttataaattagaagttg

SEQ ID NO: 52045 - DNA, 281 bp, Glycine max
aaactgagttggggaagatgcgctcagcttgactgcctttgagttttagatctgccacgtcataggctattgccgccatcttggtggtagagaatgttcctaaccagatacggttaggttttctgggctcacggatctcagaaacccatttgtttgagttctttcgctgccttactcccctgtacaaagggtggcggccgccattgtctttggaggttccttgcatattgataatgagtattagggttttgagtagagaagagtgatgagtttgaggaagg

SEQ ID NO: 52046 - DNA, 409 bp, Glycine max
ctccaaaataatagataggaataccgcaaatagagccattgcaacacccatcaaaggggtcgttccccatccgggagctactttaccatattcggaattcaatggtttcaataacttccctacagtagtgcttcttggaccagatctagaactatcttcaacagtttgtgtagccataaatcttattttgtattcattacgatctgttgactttgtataccattccgttgtaaataaatgatcttagcatagatccggtgtggtctttcaattctataataatggaaacagcaaccctagtcgccatctttatatctgggttacttgtaagttttactgggtatgctctatatactgcctttgggcaaccctctcaacaactaagagatccattcgaggaacacggaga

SEQ ID NO: 52047 - DNA, 333 bp, Glycine max
ccccgatccgcaacaattcaaccatttgttttatcgattcagttttactcgcaatctcgggatctataagctcttcttctttatgttgtgcgattgaagattgcacccattcgactatatccgtccctcctttaccagtatttaggtactgagacgggaacttccccgtcatgacctcgagaacgattattccaaggcaatagacgtctgattttggtgaaacctgctggttttgtacaaactcgggggatttgaacgcgaataaagcttgcgaggcagttgttaggctgaagaagccggaggaacgcgtaatcgctaatcaatggctcatag

SEQ ID NO: 52048 - DNA, 140 bp, Glycine max
ctataacggatcctggacttaatggtgctatttttcaaattatttctcatggatttattggcgctgcactttttttcttggcaggaacgagttatgatagaattaggcttgtttatcttgatgaaatgggtggaatggct

SEQ ID NO: 52049 - DNA, 524 bp, Glycine max
tctcaggtgaatgtgaaaacccaagtggttattggggttcccaattttaaaatctgcgaagctgtagagaatttgcatgctgatcttcttgtcatgggctcccgggcttatggccgcattaagaggtaccaaactcttcttccagtactctagtatcttgctatgttgaacactgatgaaagcgctgtaaatcaaattccaggcgtttgatcttggttactatgctgaattagttgttccatatcggtttactctagtttaagattgtttcgctttcgcttgaaatggcatatagatatctactgttattttttccaactcgtgcggtcaaataacagaagaaatgtttagttaatctttgaacttgtgtgaagacaaatctctgctcaaccaccaagtagtgcttcgcggaatctttatccctttgaaaatgtttataccatatcactgtcactgtgtgttctttagtgagttaaatcttatttagtgagcaaatgccagtgttgaatccagtttgttctttc

SEQ ID NO: 52050 - DNA, 495 bp, Glycine max
  unsure (1)..(495): unsure at all n locations
ccttcataggttggagataggtttctgttttctaagactatcaaagaacttttatatattatactgtaaaaggtgctatagattgtagaatttatacaatgtaatacatcattcatatatgagcaaagtatacttgtatgggaaaacaaagagcccgcgagactgcgactagtttttaggagctcttgttcctagaaaattcactgaggataacatcaaagatcaacacactactttaaaccagtcacacagcacataaatgttaaaccgaggagaaaacaaaccaagctcagaaactgataaacagcaattactgacatatactttaaacaatcatctgtgactaaacgtgtataatatattaagacaataacctgtttactctacatgaaaccagngggagaaacagagggacagaaacaggttttggaccaagttaagcaacaagattgtgaaacagctttcagcataaagattacaaggttagagaggacg

SEQ ID NO: 52051 - DNA, 406 bp, Glycine max
atggctactatatgcatttgcatcttagaacttcttctaacgatttacgctttttgttataattttaaaatggacgatccattaattcaactgtccgaagattataaatggatcgatttttttgatttttactggagaatgggaatagatggactttctataggaactattttactgacgggatttattactactttagccactttagcggcttttccagttactcgggattcccgattttttcatttcctgatgttagcaatgtacagcggtcaaataggatcattttcttctcgggatcttctactttttttcatcatgtgggaattagaattaattcccgtttatctacttttatccatgtggggtggaaagaaacgtctgtattcggctacaaaatttatta

SEQ ID NO: 52052 - DNA, 316 bp, Glycine max
gacaaaaagacagaatatttactggtatatatatatatatatattaaaattacacactcaatctcttccgcttctttggtctttaaaacctttccctaaatctatcacgctccgttacgtttttctcctttacgaaaatctcagcaaagaattttcgataattctctcctccgattcaagcgatttttaatggtatgtgttcttcaatctctttatgtgtgtgtgtgtatgtgttatgttctagttggagtttttttttttcttcttacgtttatttagggttcttatatacatgttaccgatctagttttttttt

SEQ ID NO: 52053 - DNA, 450 bp, Glycine max
atccaccggcattgagggtgtcattgggagatgtagcagctaaattgctcacaccgggtgctgctatatcaggctgcattgtgtaaaaaattagagatattgcagaaaaactgataagtcagaaaataaggatccagacatactttcagaatcgctggggaaatcgagttaggccctcttgatgagaaagttgctacctttgtcccaacaggttctccgacgagtgttctagaaggttgtatcttcacaacaggtgatctgtattttttttcttatgattatgtgtttcttgaagggaatgaaacaactgagcatgtgctaatataagaagtgaagatcataattcatagtttcatacccagtataacgtatgtagaaaagtatatcggtcccaagctcattgtcaatggctacacaaggaaaatcatcactacatggagcgagattata

SEQ ID NO: 52054 - DNA, 450 bp, Glycine max
  unsure (1)..(450): unsure at all n locations
ggactttggctacaccatcaaaactttgaaaagcaattagaagtttggttagtgttttggtgtcgaatatgacttgatgtcatgtgtatgattgagtataagaacttaaaccgcaatcttatcctaaaagcctaagtagtgtttccttgttagaagatacaaagacaaagactcatatggacttcggctaaaccatcaaagcttttagaagcaagaagaagcttggttagtgttttagagtcgaatatgacttgatgtcatgtgtataattgagtataagaacttaaaccgcaaccttatcctaaaggcctaagtagtgtttcattgttagaagatacaaagataaaaactcatatggactttggctaaaccatcaaagctttgagaagcaagaagaagctttgagaagcacgaagaagctntgttagctttttggagtcgaatatgact

SEQ ID NO: 52055 - DNA, 433 bp, Glycine max
caggctcgtgaaaatgtcgctttacgccgtcatgctttagagtttcgatctttacagagacatttccgatggattagcgcttttgttagacagtttcttccatctgcaataccaatcttgcatcaatgcgtttcaagcttgtgttcgagcttcgaaacagttcgaagagcttaacgcattctacgatctttccaaatcgatcggtataggaagaacatcggagtatcctagcattcaaaagatctctttagagcttcttgagacattgcaagagtttttaaaagatcaatcgtcgtttccagcgagctcagggttgtatccgtcaccgaatagttttcttcctccgcctccatcgtccaaagattcagcggtttcaagctcgcttgattttggggattccacgattgatacgtcggagaggtattcagattac

SEQ ID NO: 52056 - DNA, 288 bp, Glycine max
aagcttcatggaagccaacatccttcaagcctaatcaattaattccacactagttgtagttttgtcctccattgacaaaacaaattttatgataataggaataaggtacaaaaatatattttttgatgcaatacatgttgccaaaacgtatatcaaccaacgaaatcttatgtactttgtccattaatcagtatgattcacaacttccttaaattccaccaaaatttcggactttggcctattcaaacccattaatgactgtttaaaagctttggcctaaagattaat

SEQ ID NO: 52057 - DNA, 448 bp, Glycine max
tacattcgtatatataatttacttatcataattttatagttgggttcatattttagtggtagagcattcgactgcagatcgagaggtcatcggttcgaacccggttgagcccttttttatcaacatttttttttttttttttgaatatgtttctctgaaaattcaagatctttaagcgtttcaacatttgcaaaattcaagaaaaaaaggaggggaataacattatagcagagagaggttcatacttcattctatacaataatacaaacattgaattacattaaagcgaataatacacaatgtcacaatcatacatttttaagttttgtcatcatatctccatagacacttcttttcttctctatgatacgaaacacgtctgtaccattgaacttaaacaacaacaataaacacagtccactcactgtaatcgaataatcacagtggc

SEQ ID NO: 52058 - DNA, 278 bp, Glycine max
aaggaacctcagaagcgggtggggctaatctggaccaagaggtatccaccgaagaagctccttttccttctcttttttcggaagaaggggaagatctggacaaaatcgatgaaatggaagaaatccgagtgaatggaaaagacaaaattaataaggatgatgaattccacgttcgaacatactattactataaaactggttctgaaaatctatatggaaataaagaaaattcgaatttagaatttttcaaaataaaaaaaaaagaggatcatttaaaa

SEQ ID NO: 52059 - DNA, 425 bp, Glycine max
cacacccatcatgtggtaggcgctggccgagtaccaatccaggttgggaaacatcttcttcatgtccatcatcacgttctcgatgcgctcggacacctcgaacagcgtgtcgttgccgccctcggaacacagcttgcggctgatctccttgatgatggggttgcgcggatcgccgatggtgtacaccggatggccgaaaccgatcacgatttccttgttggacacgcgctcgcggatgtcggcctcggcctcatcggcgctgcggtagcggctgatgatctccatcgccacctcgttggcaccgccatgcttggggccgcgcagggcaccgatggcgccggtcagggccgaatagaaatccgagccggtgccggcgatcacgcgcgcggtgaaggtggaggcgttgaactcgtgctcggcgtaca

SEQ ID NO: 52060 - DNA, 546 bp, Glycine max
agttgcagcagggtctagttccagaaaaccttccggttcgttattagctactttccctgtaagaatgtaatgaggcacctgatgggagaatcttaacatttcttccttggcaatcttcctcacaccaagtttctctgtgcatctgcggaaaactaccctgaacccttcagttttgagtaagagagccaccgttagactctgatcgtcttctgtatagtcatcaagaacttccaccatctcatacttgtgtttaacttcatcaggggtattcttgtcccattcaggggaccaatttcgatacaatgcccaaacttgtccctttttgggaagaatatggaggagtcctcttgcacctttggtaaaatcgacactgtgagaaaaggcatttagtgtatctgtagattcatatctcccacacctaaaatccccacatgatttagcaaaaccagcacccatccagtctatgggaccaaattcactggtggttttggaattgagccaactgattttcaacttaaaaggattcacagaaatcaccttttggat

SEQ ID NO: 52061 - DNA, 528 bp, Glycine max
ggcttttgcccatcttcaatagctaacaagaactctttcttttctttacaaatcccaaaacctttactagactttttctgcttctttagcttactccacctagagtcttttaccttttctcatcaatgaatcaaccccttttttcttttaaacacatcccaacccaaagtacaagcgcccacctagtcctatctagtccaaaaaatgtgaactagaactacatgagacactatctctgtcgttacgaacctaacactttctaccaagcttaatcggaataagacctcacaaacactcacaagtgatatagggattgaaagaaagtctaggtttgggtttgggttaactgctctaataaggagagttagctacttggattaacaagagtgatcaaaatgaataagaaaatccaagtattttagggtatccatgagttcgaatttgatgcagacatgataattaaagatcagattcaggttcaaattgatagggaatggtatcagctcatgacagtgtggtcgaatagag

SEQ ID NO: 52062 - DNA, 190 bp, Glycine max
tcatcttgctcccaatttgcttcaaaatcgggatctagtatatttgattttcttacaaagttatgtagtgccagaatttctactacaagtttttttgttgttcggacatcataccttgctcgatcgtgcattatcttccattttcctttccacactctaaatgttctttcagtgactaatcgaagtgaag

SEQ ID NO: 52063 - DNA, 319 bp, Glycine max
cttcttcccacctagctgccaagtactctggtgttttaaagtttttaaacttgagccttggatctctgagaattgtctcccagtttccatacccatgtctgcgaatcccaatccagagagaatctagctcatcctcggaccatgcatctactcttgttttctttttctgtacgtgcccaattccagagccagttcttagcattatattctccagcacctttcgatggttctctgggatagatgaaagagctgatggaaactgatccaaacccaaaggcggtgagtccttctctagctggttgaagacagggggatccat

SEQ ID NO: 52064 - DNA, 477 bp, Glycine max
ctccgcagtatcgtctaaatagtattttgctttgtttggcttttgtccaacggtgcaagcgaatatctcagccacaggagacaaagctggaccatctttagcactcattatcacctcaaacatatcctcatcagaccgatcatcaccgacgcagagaatgaaatccaaaagtttccctttttcttgcatcgttgttagaagcctctctgccacaagacctttgttcacaccctgttttttttatcggaacaacaaaaaagtttagctatcggaactttcatgcttgaaaagagaaaacagacaataaaccaactcttttaacgtcttacctgtggtttaacttcaacgagttgttgtccagtcttgacagagactggatcattggtaagcacgctttcgaggtgttccataagctctttggcttgacaagatccaaaatcaggatctgcgaattggtaattccaaacgagagcagtc

SEQ ID NO: 52065 - DNA, 459 bp, Glycine max
catccactatggttatttcgtatccccccttttcttttcgttttattatacttattatccctcctgccgcaggattataaactgtattgttacttttgctaccatcaggataaatctgaccccttcccctgtttccacctacatatataggatattttaagaagtgaacatctttattagtagcagggtctggagcaagaataggaaaggctatttcactatatttttgaccaggaacaggacctatcacaagaatattttttttattgggacgataattctgaaaagaaagatttcctatcttttctttcatctcgggtgaaatacgatcggggggggctaattcaaaaccctccggtaaaataagaacagctcccacattcaaagccccttttttaccattagctagaacttgttttagttgcatatcataaggaattttaacaactgcttcaaata

SEQ ID NO: 52066 - DNA, 444 bp, Glycine max
cggtttcatcgtctttgttccttagacttagatcgttcctttactcggtcaagacatgcatatgttcgctaagcattctaagccaaacaatcgcatattcctttatcctactttcacggtcaattaccaaacgtctatcttaactaataagctagatcgttacataccttggtcaatatgcggatttgattccttagcccgtttgtcgccttactccattcgttcaacgactcgtcatcggtcgtgaattgatgaaccaatccctatcgttacttagccatacaaccaaccaaccccactggtctaagtacaacgatagagaattggggatcgtacgattcccttggttcacgatggccgaatcaagctcttggcttattggtccattcgttctcaaacgtacgcccctccggctacatggtggacgattgagccctcggctta

SEQ ID NO: 52067 - DNA, 276 bp, Glycine max
tgagattggttgaacttttgaaaagttaactttttaaaagtaaatattcttaatctgcgtgcttttagctaaaacaacttatattgtgaaacaaagagagtagattcgtaagttatcaatcactttgtattattggggttttaatcctccgtaatatgtttgtggaagactctttgtagcaagagttacaaattatgaattcttcgtgtattttgtatatatggttgataggaaggattaagaaaaaatgcagagaatataaaaagaatcaaggag

SEQ ID NO: 52068 - DNA, 409 bp, Glycine max
caagtaccattattcttctgatgcttttatttaggttataatttaaatgagcaaatccagaaacaattcaaattttcttgggagggcaacattgttcttcatcttacggctaaactatgatcttctttatgtatcaattttttttttgtgttgaataagagagtgagtactcagcgagaagaatttctgagtttcgctagtctctctctgctggaggggctcacggcacgagccttattggcgcttggatttattactctttgggccgattaaaattggattggctttactgggcttttgttagacctcaaattgaacgaggcttatgacgcatcgtaaaggtgtaaaagaatacaaacatgacacacctttagacgatgaaaccatgagcgtcctcaagccaacagat

SEQ ID NO: 52069 - DNA, 438 bp, Glycine max
tcgttctggttcaaggaattgcttactgctctgtgcaattcatccacaaattgccatgaaattgttgagaactcattatttcttatgggtgaaatcggaggaaacgatttcaattatcttttctttcaacaaaagagcatagcagagattaaatcatatgtgccatatgtgatcaatgcaatagcttcagctatcaatgaattgattggtctaggcgctcgcacgctcatggttcctgggaatttaccaataggatgtagtgtaatttatttaacgatttatgaaaccatagataaaacccagtatgaccaatttgggtgtttgaagtggttaaacgagtttggtgaatattacaaccataaactacaaagtgaattagataagcttcgagtatttcatcctcgtgctaatatcatttatgcagattattacaatgct

SEQ ID NO: 52070 - DNA, 254 bp, Glycine max
tcgtccacgcgtccgaaaaaatcaaaacgggagggcataatgccagggagcatgcacaagattggggagaccctgcatgtgggagggcacaagacggacgaggagcaaaaaggagagcaccatgctggagaatacaaaggggagcaccacggtgaacacagcagagagagcaaaggagagcatcatggagaacacaaaggtggggagcaccatggaaagcacaacccagagcacaaagaggggttcctagacaa

SEQ ID NO: 52071 - DNA, 237 bp, Glycine max
  unsure (1)..(237): unsure at all n locations
nctactcgtccgaaaaaataaaactcacagaggaggctgtctgggatcattcacaagattggggagacccttcatgtgggagggcacaagatggaggaggagcatatggttgagcaccatgctggcgaatacaaaggggagcaccatggcgaacacagctgcgagtacaaaggagagcatcatggtgaacacaaagctggagagtaccatggtgagcacaagccagagcacaaagag

SEQ ID NO: 52072 - DNA, 460 bp, Glycine max
tttctttacaagaaaaaaggttacctctttcaattttatcccttgttgtgagcttaattcaatttctgctcacacataatggcttgcacgctcgctgattcattactcctattcaaggtatatttagtctaaacagtaatgggcttatccagaaaaggttcaggcgtcaaaggaattttgttactaggaataaggttactgtcatacatgccgtggcaattccagtacaaccagctccggtggaaagtgcggagtatagaaaacagctagctgaagactacggtttcaggcaagttggagagccgcttccagatgatgttactttaaaggatgtcatcaattcccttcctaaggaggtctttgagattgatgatgtgaaagcatggaaatctgttctgatatctgtcacttcttatgcactgggtctcttcatgatttccaaagccccctggtatcttct

SEQ ID NO: 52073 - DNA, 438 bp, Glycine max
ttcatttcgtccggccacgcgtccgcccacgcgtgcgtgctgatgtcacccacgatgttgtgtccctcctctcttctcctcaaagggactttcttcttcgaaacaacggcgatcaggttaaaattgacagcttgaagggcaagaaacttggtttgtatttttcggcatcctggtgtggtccatgtcaaacatttacgccaactttggtggatgtgtacaatgagggtgcaaaaaaaggtgacttccagatcgttttcattacggctgatgaagatgatgagtcctttaacggttacttttgcaagatgccatggcttgcaatcccattttctgattcagacacacgcagcgcgcttgatgaattgtttcatgtgagggggattccccatcttgcattacttgatgaagctggcaatgttgtcactgaagatggagctg

SEQ ID NO: 52074 - DNA, 304 bp, Glycine max
tgagtgtccgcaaacgaacaaactgcagggggggtctatttagctttggcaacagtacataactgccaagcgagacaccaggtccacttttgaagtacaaaggagaaggattgatgaatgttagaggggctggaactggagagcgcaagggatgggataggacctatgattatgatgtctacaccgacttgggcagcccgggtagcggagatcaatatgcacgccccgttctaggggggtcatgcttaccttacccttgcagaggaagaacctgaagaggaaaaactagaaacgatcccaacag

SEQ ID NO: 52075 - DNA, 391 bp, Glycine max
cgtgcacacctctcatttgcggacggacccattttatttttccaaaaagatcacaactttgcttcaatctagaagactcctctttttccgttcctgtttcatgggcatctcttggaatcgggaatcatagacaccgcatggcatggacaaggacaagtctaatactcacagctttcttcacagtattgttaaacacttcaaattcggttcccctaaaggagcagaagatcttcgcctacgaaaccttggcagctgctactaagaattttagtgctattcataagcttggtgaaggaggctttggacccgtctacaaggggaagctgaatgatgggagagagattgctgtgaagaagttatcacacacttcgaaccaagggaagaaggagtt

SEQ ID NO: 52076 - DNA, 443 bp, Glycine max
tcgtctcaatttaattcccattccctctctgaggactcatcatcatggccgttgattctgaggtccctcgtgccgagaggagcgcaaaggctcttcagttcatcgaggaagttacaaaaaacactgactccgtccaggagagagtcctcaccgagattctcacccaaaacgccgagacggagtacctcaaacgcttcggcctcaacggcgccaccgaccgtgacactttcaagtccaaggttcccgtcgtgacctacgaggatctgcaacctgatattcagcgcattgcaaatggtgacagctctcccatcttgtgctctcacccaatctctgagtttctcaccagttctggaacatctgccggcgagagaaagttgatgccaaccattcatgaagaaatggaccgtcgtcagttactgtacagcctgctcatgcctgtgatg

SEQ ID NO: 52077 - DNA, 432 bp, Glycine max
aaaatcaaacttattggttcattgattcttgaacttaaaagaaaaaaagagttgatctttttttagtaacttgaatgcacaagtgatgcgggtagcaaatgacaagattagaagacaatataaaattttccttgttctatgtaatggagatcactagaataggccaatggttaagtcttctgatatgtgtactactattactgcagacagaaggggttcctgtgggaatcacttttgttgaaaatgcagtggcaaaaggggctgtttgtttggatgggagtcctccagcttaccacttccacaagggatctggagcagggattaacaactggatagttcactttgagggaggaggatggtgcaacaacgttactacttgcctttcccgtagggacactcgattaggttcatctaagaaaatggatacatcac

SEQ ID NO: 52078 - DNA, 342 bp, Glycine max
gttttgaaaaggcgtataaggaaaggaattcccgattgtttaaggggccttgtttggcaattgatatctggaagtcgagacctattgctgatgaaccctggagtttatgagcaactagtcatatatgagacatctgcctctgaactggatataattcgagatatttctcgaaccttcccttcacatgtattctttcaacacacacatggacctgggcagcggtccctttacaatgttctaaaggcttactctgaccttgacagagatgtaggctatgttcagggcatgggatttttagcggggcttttgcttctttatatgagtgaggaggatgcattttgg

SEQ ID NO: 52079 - DNA, 353 bp, Glycine max
gcttagaaatgtgtgttggcaccttatttccctccaactgaacctgccaagtttactattgcacaccgcgtatttggtgctagcaacatcatcaagttccttcaggagcttccagagtctcagagggctgatgcagtgaccagcatggtgtatgaggctagtgcaagaataagagaccctgcatatggttgtgcaggggcaattagccagctccaaaagcaggatattgaacttcacgcacaataggccaaggcacaaggcgagcttgagaacatgcaacttcagaaagccaatcttgtggctctaatttgcatggcaatggcacagagttcacaggaattaccacaacaatc

SEQ ID NO: 52080 - DNA, 216 bp, Glycine max
agcgaatactctttattcattataacgcaaatctttgtcaagaccctcaccggcaagacgatcaccctcgaagtcgaggcgagcgacaccatctagaatgtgaaggcgaagacccaggacaaggagggtatcccaccggaccaacagcgtctcatcttcgctggaaagcagctggaggatggccgaacccttgcggactacaacattcagaaggag

SEQ ID NO: 52081 - DNA, 476 bp, Glycine max
cagccttgacctcatccattgatagagtagcctttctatacaacattgtatcagcaaaatgctcaaatggcttaggaagaaagctcaatagaatgatggcttgatcttcatcatctatctttacgtcaatgctcttaaggtctaagatgatcctattgaaattgtccagatgtttcttgaagagcttgtcgtcttccatcagcaaagcatacaagcatttcttaaggtccaatatcctctagctctgccgaattccaatttcttgtggatatatgaacccttcagctgtccatagttggatcaattgtcttgcactgatcttatatatagtcttcgggatagattccaaaatacagaaagcatggctttaatctttgaggcaagctgtcatagctaagcttcagtatatccatcagttgagtcttgtctggtgtaagataccaactcacttccttgattctcttcctgataggaac

SEQ ID NO: 52082 - DNA, 364 bp, Glycine max
aggtgaaatgaatacaatcccattctactggacttttactatctacaattgaatagtaagtccatgaagactgaactatatatgagagcctacacatgttgtttttgtaaaattgagttgaatatattctaaaggggctgaactatgagtggaagtccatgacttggccttagggagagcatgatagaaggtgaatgattgtaacctggtgaaagcttaaaagtaaacctagagagaagtagggttaagacaatcttgtactccatgaaggtgaaattccttcctacacacatttttccttcaaacccaaaaggcaagtaccccatcttgtggttgcacccaccatttacattattcatgaacc

SEQ ID NO: 52083 - DNA, 391 bp, Glycine max
gttcaactaggcaattgaaaaaagaatttctgtctattctcaaataccaattgaaaatggagagcttatgcaagtcctgaggtgagaatatgacttattttttcatgctacatctgaacatgatgggttttaccagtatcaagactaacatctgcagcagcacaggtacgagaagaatcaatattacaaaccacatcatgactatttttctgatactttcaacttgaagcgtggtgggcagcgaatagccacaatgcttatgtatttaagtgacaatattgaaggaggagaaacatattttccattggctggttcaagtgaatgcagcttgggtgggaaacttgtcaaagggctatctgtgaagccgattaaaggaaaagcagtgcttttc

SEQ ID NO: 52084 - DNA, 133 bp, Glycine max
ccttcttttctcaaaatgtcgatgtcgaagagttccaagatgcttcagtacatcaactaccgtatgcgtgtcaccattcaggacggtcgtcaactcgtcggaaaattcatggccttcgaccgccacatgaacc

SEQ ID NO: 52085 - DNA, 259 bp, Glycine max
tcgccggcgccgatggctttggccacgcggctgttggctccgtcggcaccgatcacgacgtccacggcgagggagcggcgcgaggagccgttggcggtgtagtggacggtgtagggcgcgtccggcgaggcggggaggtcgagggcggtgacgaggccggagaccgtggtggcgccggctgcgtgcgcgcgggagcggaggaaggagtcgaggacctcacggcggagcatggcgatgaactcgtggggttttagtgttt

SEQ ID NO: 52086 - DNA, 309 bp, Glycine max
cctttctccgagacaaagactttggggctctgggatgtcgattgtactgtgaaaggaggtggtgtgtcagggcaagttggagctatacgattggggatcagcaaggctttgcaaaactgggaaccagatttgcggcctgcacttagaaatgctggtttcctgacaagggactcacgagtggtagaaaggaaaaagccaggaaaggccaaagcaagaaaaagtttccaatgggtcaagcgttgatactacgagcatgctttgtctggacagccatttttgtatggaatattaggatttctcaataacatc

SEQ ID NO: 52087 - DNA, 448 bp, Glycine max
cccacgcgtccgcccacgcgtccgcccacgcgtgcgaaaatgatgacccattttaccctctcaatgcagaagattcattggctactatgtctcatagctcattttatgccaggtaaccaagagaatacagagaaaaacacacactatagactagggctacaaactggtttcacttgtgcacgtcaaataacttggccaggcttatgcttatgccatggaggtcactaccagtgtatttgaaattttggataattatcattttaacttcatgcctacacacaaggacagcagttaagccagatttcccataaggataatgggaagcaaatggtgcataaattacatctccggatatgatttgtcactgaagaaaaattgaatgtattactagtttactgtaacaggctactatttatctgtgctttgatctgaaaacatgttttaatag

SEQ ID NO: 52088 - DNA, 331 bp, Glycine max
ttcgcgtggtttggcttcggctgctgcagcacaacgacaaaccaatggatctggagcctccacttctgaacaatgtatggaaagggaatacaaatttggtgctcataactacaagccaattccagtcgttcttgcacatggcaaaggtgtaaaagtatgggatgtcgaaggaaaatgctattatgacttcttgtccgcttattccgccgtcaaccagggacattgccaccctagacttgtcgaagttatgaaacaacaatccgaggttcttacgttaacttctcgagctttttacaacaatgttttgggagaatataaggaatacataact

SEQ ID NO: 52089 - DNA, 330 bp, Glycine max
gcctaggccatattttcccactaaaatacagggagggtggtgtgctgaagagagctggacatacagaagcttcagttgatcttgccatacttgctggtttgaatcctgtggcagttctgtgtgagattgtcgatgatgatggttccatggctagattacctaagcttcgccagtttgcagagcgagaaaatttaaaaattgtatctattgctgacttaataaggtacagaaggaagagagataaactagtagagcgtgctggtgatgcactaataccaacaatgtgggggccatttgtagctaactgctataggtcacttttagatggga

SEQ ID NO: 52090 - DNA, 436 bp, Glycine max
cccacgcgtcctaaagcttggaacagagactgacgagttccatacttgttactgggggaagttctcttttccccggtatagttgaacgcctggaagctggaattcggatgattagaccttgtggcacacctataaaaatagttagagcactggatccagtaatggatgcatggagaggggctgcttcatttgcctcggacccacagttccatatgcaaactttcagtagactggattattatgaaaaaggtgaagactggcttcgaaattatcaactgcaatatacattgtaattgatcacacagtatagtactgtatattattttctataattttctaccacagtttagaaagtatactcctgttttataatccgtttgtcttgcttttgctgaaactagaacgaggaacatcaacaaaagcatggtactatact

SEQ ID NO: 52091 - DNA, 391 bp, Glycine max
tttcggcttcaatggcaggtttaggtgttgcacctgcatggatgataattatatgggggttgatcctcacgttacggcgctgcaaacggcaatatggtcttgcacaaactcaactccaatcaagaaatactcgcattgatccttacgagaaatccgactcaatgacggacaggatcttctttggggtacccgtcttttcttataaagagctcaagaagccacaaacaattttgaccacaaaacaaagctaggagagggaggatttggaagtgtttactatggaaaactccaagatggacgggaagttgcagtgaaacacttgttcgagcacaattataagagagtgcagcaatttatgaacgaaattgagattctcactcacttacgccat

SEQ ID NO: 52092 - DNA, 337 bp, Glycine max
cccacgcgtccgcttaatgcaggaactgctggtatttggagaatagctgctatcaacgaagctggtgggtggaaagacagaacaacagtggaagatatggaccttgctgttcgtgctagtcttaggggatggaaatttttgtaccttggtgacctccaggttaatcaatgttccatctacttacctattagtacttccaaagttaacaattaacggagaatatgaatgacatatgattatgaattatcatttcaattttcttatactaagtaatggtgccttttttttaaatggtaactttatataggccaaaagtgagcttcccagtactttgaga

SEQ ID NO: 52093 - DNA, 407 bp, Glycine max
ccttcgcgtccggcttccttaagctcgggagtgctgctccttgcagctgtgattctatcccctcaagttcttgcaaactatgagaatcccccagtgtacacgcctcccactgagaaaccaccagtttataagcccccagatgagaagcctcctgtttacaaacctccagatgaaaaccccccaatttataagcctccagtagagaagccaccagtgtacaagcccccagttgagaaacccccagtgtacaagcccccaggtgaaaaaccaccagtgaacaagcccccagatgagaaaccaccagtgtacaagcccccagttgaaaaacccccagtttacaagcccccagatgaaaaacccccagtgtacaagcccccagttgaaaaaccaccagtgtacaagccccc

SEQ ID NO: 52094 - DNA, 444 bp, Glycine max
cctacgcgttcgagaggatgagagaaaaagctgctactctgcaccatgtacgaatggagcagggcactgtaacatctcttcttgaacaggataatggaactattataggggttcagtacaaaactaaagatggccaaaaacttaaagcatatgctcccttcacaattgtttgtgatggctgtttctcaaatctacgtcggtctctctgctaccccaaggttgaactgttctaaataagttgagttgcaaaaatatcatttttcttttttaatgatatcaattcaaagacagtttgccgaaactgcaaaatctatagaattttgtcagttgtgtaccagtttgcttgacttgcctgatatattattgaacacttgccaggtagaagtaccctcctgtttcgtgggtttagttctggagaattgtcaactcccacttgaaaattac

SEQ ID NO: 52095 - DNA, 329 bp, Glycine max
attaagactttcgagtcagatgaggttctggtgaaggcatgttctgactaaccaaccactaggtaatgatgctgcagttgtcatacaatcatttattcgtggttggatagtcagaagatgctcaggagatataggactatcaaaatctcaagggattaagactcatgagtcagatgaggctctggcgaaggcatctttcctgggtgaattacagagccgggttcttaaggcagaagctgccctgagagagaaagaagaggaaaatgacatttttcaccaacgccttcaacagtttgagaacagatggtgtgaatatgaattaaagatga

SEQ ID NO: 52096 - DNA, 418 bp, Glycine max
tgttcgcgtgggcttgaatattactatttcataagaaaaactacgtacgtacaaattaaagagaatggtcaaagaaacaagtccagtgaatttagcattcattttaatattattgtgtgcatcaaacgtgtttgtttgtaggggagaatgggagccaacttggagcagtagagctgcagaagaagcagaggctgtggcagccataccatgctcaggacatggaagagcctacttagatggtcttattctaaaaggccatgaacctgtttgtgagtgcaatccatgctatggtggatctgattgctccaagttattatctgattgtgctgctaatgctggaagtggggatccatattttatggagccattttggatgcgacatgcagcaggtagtgccattttagtatcaggatggcat

SEQ ID NO: 52097 - DNA, 397 bp, Glycine max
cttgttcaatgttttgattaggcagaataaggtagctgatggtgttgttttgtttagggagcttatcagattgcggtctaagcccgtgacctacacagtcaatattttaatccgagggttgtgcagggtcggagaaattgacgaggcttttaagcttctcaaggatttaaggagttttggttgtttgccggatgtaattacatataatactctcattcatggtttgtgtctgattaatgaggtggatagagctagaagtttgctaagggaagtttgcttgaatggggagtttgcacctgatgttgttagttacaccatgattatttcgggctatcgttagttgagaaagatggaggaggggagtttactttttgatgaaacgattaattctggaact

SEQ ID NO: 52098 - DNA, 456 bp, Glycine max
ctttctctcgcgttttccaattcccccccaaatgctcacgcctagggtttctatcgcaaaccctccctccctccaaccaggtcgcgtgcaaagggatttcgaagcttcggaagaaaaaaatgaaacctgttttctgtggaaacctggatttcgacgcgcgtcaatctgacgtggagaggctcttcagaagatacggcaaagttgatagagttgacatgaaatccggtatatcattcttcatcatcgtctatttttttttttgaagtttttagggttaaactattcattcggtacttgttatcattttaagttttgtagggtgtttgtataccacgaataaattctacccccacaaaatcacgatgctaccatggaaaagtagaaacatctttttgtttcgttagcttcaccataaaaagttaattaatttttttctcaccattctttcaatacact

SEQ ID NO: 52099 - DNA, 358 bp, Glycine max
tttcgtcctgtcttccttaagctccttagtggggctccttggagctctaattcgatcccttcaagttcttgcaaactatgagaatcccccagtgtacaagcctcccactgagaaaccaccagtatataagcccccagttgagaagcctcctgtttacaaacctccagttgaaaaccccccaatttataagcctccagtagagaagccaccagtgtacaagcccccagttgtgaaacccccagtgtacaagcccccagttgtaaaaccaccagtgtacaagcccgcagttgagaaaccaccagtgtacaagccctcagttgaaaaacccccagtttacaagcccccagttgaaaaaccc

SEQ ID NO: 52100 - DNA, 412 bp, Glycine max
cccacgcgtccgtgccagtgggtactctttgctacgagatccacagtacaacaaagggctatctttcactgagaaagagagggatgcacactatttgcgtgggctcctgcctcccacagtcagcactcagcaacttcaggagaagaaactgatgaacagcatcaggcaatatcaggttcccttgcaaaagtacgtggccatgatggaccttcaggagaggaatgaaaggctattttacaaacttctcattgataatgttgaggaattgctccctgttgtatatactcctaccgttggtgaggcttgccagaaatatgggagcatattcaggcgtcctcagggtctttacattagtttgaaagagaagggtaaaatccttgaggttttaaaaaattggcctgagaggagtatt

SEQ ID NO: 52101 - DNA, 236 bp, Glycine max
ttttcgcgtgggctctcgccctgttcctcgtcagtagctctgtgcagtcttatgtggctctgtggcttccatcacactcggcacttcctctcccaagatagtagatgatggcagacactgcagatattcaaccgctgggttgtgacaatggaacaggaacggtgatggctgcatttgctggacacgataccccacgtgctgggttgcccagcattgctgggcgacctcgtcacact

SEQ ID NO: 52102 - DNA, 447 bp, Glycine max
tttgtgttcattacaactttcattgctctctctccaaatggcacgaaccaagcaaactgctcgcaagtcaacgggaggaaaggcgcctcggaagcagctcgcgaccaaggccgctcgcaagtcggcaccggccaccggtggagtcaagaagccgcatcgttaccgccctggtaccgttgcgcttcgcgaaattcgccgttaccaaaaatcaacggaattgctgatccgcaaactgccattccaacggcttgtgcgtgagatcgcccaggacttcaagacggacctgcgtttccagtcaagcgcagtgctcgctctgcaggaggctagcgaggcgtacttggtcggactttttgaggacaccaacttgtgtgccatccatgcgaagcgcgtgaccatcatgccgaaagacatccagttggcacgtcgcatccgtggcgagcgcacttg

SEQ ID NO: 52103 - DNA, 449 bp, Glycine max
ctttcatgattaggtgttacaaacttctcagacacatctgaaagatattcaagcaaaatctcatagtggttctgctagaagttgcactaaagttcacaagaaggggattgcgctcggtaggtcagtggacctcacaaaattcagtgattatggggaattaattgctgaattagatcaactattcgaatttggaggtttattaacttctccacaaaaggattggcttattgtctacactgataatgagggagatatgatgcttgttggtgatgatccgtggcagtaaggatatctaacaatgacatatgtgattattctgtaatggtaaaaaaaaatcttgacaatgacaattcgtttgcataattctatttttaaatcagggaatttgttgcaatggttcgcaaaatttatatctaccccaaagaggagattcagaaaatgagcccggg

SEQ ID NO: 52104 - DNA, 488 bp, Glycine max
cgtacgcgtgggagaatttttaatgtaatcgattggacggcatggagcatcactctaacacatatgtccgccatttgtttggatcgtcttcttgccataacgttgtacggtcagtacagtcaattgattacggtacgacgtgcaaaactattcaccatattttgttgggccacattttcgacattgaataccgtatatatattggcccgtttctgttgcctgatcagtccgctggccgagtcccatttttacacctttggctacggcgaatttgagtcccaaagtgatcgtgttaaaagtccgctgtggggcgccaatctgttcaagctgacctatacgccgttggaactgtgcacattggccgtcctttcaatctctaatccgatcactttcattcaattgtacaggcggcacaagcggaaaatggcactgaaaatccgtcaatctgcgtccactgcaaagtctggtgccgggtcaggagcgatgat

SEQ ID NO: 52105 - DNA, 369 bp, Glycine max
gttaagaaagaaaccataatgaagaaggaagctaagaagaattcacggattgatgatattggaagtcctgaagatgatgcacattatattcaaacaggagaccccgctaaagacgatactaatcaatcaagaaaaaaagtttctatcattgagaatattcgttggaaggaacttggacttctttttgctggctggatcatgatactagcattagagattggaaaaaaacacaccacaacttgctcacggttattttggctattgaacctacttcaggtccccatagctgtaggaatgagttcatatgaggctgtgcgtctatacaaagggaagagaatcatagcatcgaagggagatcaacaatcacat

SEQ ID NO: 52106 - DNA, 464 bp, Glycine max
tcggtttacggttgcccgtgctggtcagaagggataccaccacagaaccgagatgaacaagaagatctaccgtattggaaagtctgctcttacccaggagggcaagaacaacggtgccaccgagttcgacatcaccgagaagaccatcaaccccatgggaggcttcccccactacggaatcgtcaagcaggactacctcatgatcaagggagccgttatcggacccagaaagagaccgatcaccctccgcaagtctctctggacccacaccaagcgtgtcgcgttcgagaagattaccctcaagtggatcgacacttcgtccaagttcggtcacggtcgcttccagaccaccgccgaaaagaaggccttcatgggcaagctcaagaaggacttccaagcggaaaccgaggctgccgcagcagcgaactaaattgttaaatcctttgttgataaaacttattgtt

SEQ ID NO: 52107 - DNA, 129 bp, Glycine max
cgttaagttgtggaggcccttgacccggaaattgagtatttctgctgcaatcctcagtccttatcggctcatgatattagttcggctagtggttctaggtttctttctaaagtggagggacccaaaccc

SEQ ID NO: 52108 - DNA, 413 bp, Glycine max
cggtcgcgtgggtttagatgcttagcaaattatgaggctttacggctttcaagtcctatattgacaataggtgaatctttggttgaaagaatgagaaaacatagcgccattaatggtggtaaatatgtctccgtacatcttcgttttgaagaggatatggttgctttctcttgttgtgttttcgatggtggaaaacaggagagagaagacatgattgcagctagagaaagaggttggaaagggaaatttacaaaaccaggacgagttatacgtccaggagcaatcaggatcaatgggaagtgcccccttaccccattagaggttggcctcatgcttaggggaatgggtttcacgaagaacacatctatctttttggcatctggaaaaatatataatgccgagaaaacaatggc

SEQ ID NO: 52109 - DNA, 355 bp, Glycine max
ttcgtccgctacacgtccgcccacgcgtccgcccacgcgtgcggatctttcaaagggacccattgaaacaaggccaagggataaatttgggttccaggaagagaacaaatttgattctcttaacttgagcatgttgaacctggactctaaatttactgagaatgtgagcaaaagctcacttcgaaatggtgtttatggtatgaatgcagtgtatcagaaaaacaatgcaaacttggtgagtaatgtgatcagtaacaagtacaatggcagtattcagcataacaaagagatcaacaacaacactggcaacaacatcaacaccaatgaaagcaacaacacaaatgcaactgacaaa

SEQ ID NO: 52110 - DNA, 382 bp, Glycine max
cgtacgcgtggtcggacgcgtgggttttgcaccaaatacctgactctgactgttccacgctgccatataaaaaatttactcattaaagttccccgattaatgcaatatgcagtactgtttcgttggtttcttgatgatgaagagattagaacacgagttgaaaaggaacccgaacacttttcaactacaatgctttcaatgtacagagcctcaaaccttattttctgtggggaaaatgaacttgaggatgtcaaatctttcacgagggatctactaaagagaagcttgctaactaaaaacggtgaaacgcagaggaaattgtcccaattccagcaaatggttcaacgtgaattgaatattccgtggctggctcacatggatc

SEQ ID NO: 52111 - DNA, 396 bp, Glycine max
gcatttcaaaggattgagtttccccactatttcttcagttggctcaaatgcagctataattcactattttccaaaggcagaaacatgtgctgaacttgatccagacaaaatttatctttttgattctggagcccaggtctgtctagtttttaactgttttcagcatagacatatagtgaattatgttgttttcatgtttttgcattcatgatctctatattgacaactggtggtgtctctgaagtatctagatggaacaacagatattacacgaacagttcattttggtaaaccttcgactcacgaaaaagcgtgttatacagcagtatgtgcctttctttgctcttttttacaagttaattagtttcaaaactatactatgaatcatatacacat

SEQ ID NO: 52112 - DNA, 191 bp, Glycine max
gttttgttttatggagacttttgagaaggatcttgatttgccggttgagtgtgttgatgccgtaaatcactttcttacgaagttgaaaggtgtggtggatccagagaccaagaggaagattattgggaaggagtttatttgtatttttgatgcttttgctcaggagcttgaggggaagctggggaagaagc

SEQ ID NO: 52113 - DNA, 111 bp, Glycine max
attctttctttggttgcacaagacatggttgaggaatggttggattgtgttgatgaggaggattcctctcaggaagtttctttaagcgcaccacttaatggtgcagagggt

SEQ ID NO: 52114 - DNA, 284 bp, Glycine max
caggcgttcatgctctgggccagaggagttaagttcaagggaaatagaaaatcttctgaaaaacaacaaagattttaagaagcggcgaatcgtacaaagcagcaaggcaatccaagaacatgagccttctggtcacgatgctcttgccagagcatcacttcttggagaaaatctcattgacactgccgagttatcagctggagtcaccaccaaacatcctagacaccgtcctggctgctcttgcatcgtgggcatacagccaccacgaggtaaggggagacata

SEQ ID NO: 52115 - DNA, 337 bp, Glycine max
tttcggtgacgcgtgggcggacgcatgggcggacgcgggggcttctctgcgaggatttgggcaatttccagatcacgaaactaaagaagatggagaaagcgatcagcagacagaagattttgcttcatcatctcaacccttcatcgtctacccacgtcaacgaatcatcctccctctatgcttcagcatgtgtggcgggggacagcgctgcttatcaaaggacatcgacattcagggatgatgttgtgatcgtggctgcttatcggactgctcattgcaaaggtaaacgtggtggtttcaaagatactcttcctgaagatctactggctcctgtttt

SEQ ID NO: 52116 - DNA, 417 bp, Glycine max
cggacgcgtgggcggacgcgtgggcggacgcgggggcggacgcgtgggcggtgacgacaacatcactctgaagaacgtcgcacgcaccacccttctctctcttcaacaactcagctctcagaacagatacagtttccactgagtaaatcgcaatgcaggtaactgagacgaggactgttcaagttaagcagctttcagatctagctggtgtgagagagattcacgagttcttctccttttctggagaaatcgagcatgttgagatcctgagtgaagatgggaaatcaaagactgcatatgtgacatttaaagatcccaaagcccttgaaattgcattattgttgtcgggagcaactatagtagaccaggttgtgaagataactccagctgagaactatgtaccaaatcgtgaaatgg

SEQ ID NO: 52117 - DNA, 238 bp, Glycine max
cattaacaataaaaagctcttgatagtactcaagcaagctaagccataataatgccttagcttgcttgagtactatcaagcaagctaaggcattattatggcttactaagagttgctaatttgttaggtctacaccatagtgtttgcatacatactatggagaaaacaaagtaagaaaaaccttccaccaagtccaaaggctcttcccataattggccaccttcaccttgggtcccca

SEQ ID NO: 52118 - DNA, 383 bp, Glycine max
catactcattggaccttatgcaaatgctaaagattcggagaggaggagttccacaagtgcagtcacattagctgctgctttaatagcagctgctgctcttttggcattatctgctataatcattagcttgatttctacaagaaatggaaaatttcagcacttgatttccaggaaatcccctaatgtatctattaagatagacagtgtgaaagaatttactttcagagaattggcccttgctactaacaattttagcagctcaactaaagttggtcaaggaggttatgggaatgtctacaaaggcattttatctggtgaaacacttgtggccattaaacgagcagcagaaggttctttacaaggcaaaaaagagtttttgactg

SEQ ID NO: 52119 - DNA, 411 bp, Glycine max
cctacgcgtccgggcggatttagatgtatgagctattaatatggtcagcagactaaattgaagctattgatgtaggagtcgacgagtccgggttgtgtgattctccaacatcagacgcaaccgttgatagcagcagcagcagcagcaacagcaagggtttgctttgtggacacggattctctgagataacatacattcacattcatgaatgtgactatttctctatgggtgtattctgtcttccagcaggaaaagtgtttccacttcatgatcacccgggaatgacagtgttgagtaagctcttgtatggctctacctgtgtcaaagcttatgactggatcgcattggattgtgctggaagccaaacaataagattggctgggagggtagtggatgaagtaatcaaagcac

SEQ ID NO: 52120 - DNA, 313 bp, Glycine max
tttagtttgtacaacagcaaaatgacagcaataggcgcataactgaagtcaacaaaaagcgtcggcttaaacaggaaggtatggctgaaacagagcatgctgctactccagatggacaaattattaaatatcaacctatggtgaatgaagcagcaaaagcaatgcttaggcagatcatgaaatgggatacttcttgtgtagaatctttgaataaaaattctgataactacgtgattggtgatgcttcatcatcttccagtggaatggacagtagcagctcttcaggctggacttctggagtaacttttaaaga

SEQ ID NO: 52121 - DNA, 360 bp, Glycine max
tttacgcgttttggaaaattggcttttatggctggtagaatttccatttgagatacgagctttggaagttttatttgaggcaatttgtagtttccttgatgcacgaacgagagagctagagacttctgcttatccagctttggacgaactgacctctaagatcagtagtcgtaatttggatagagtgcggaaattgaaatgtgcaatgaccaggttgacaattcgagttcaaaagattagggatgaactagaaaacctacttgatgacgacgacgacatggctgatctttacttatcaagaaaattggctgcttcatcctctccaactagtagctctgatgctccatactggctttatgg

SEQ ID NO: 52122 - DNA, 382 bp, Glycine max
ccgttattggcgtgacgaccccttttggcgcgatttgtacccgcgttgggccgagcccatctttaaagatggcatcgacgtcaaaactaacatcaccaacgacagtaaccgtttcgcagtcgaaatggacacttaccaattccgcccggaggaacttcaggtgaaaacgatggacgacactttgctgattgagggacggcacgaagatgttcgagacagagacaattacaccaaaatgtatttcgtccgcaaataccaattgccggccgatgtggagtcccactcgatcagcagtcacatcgacagttctggccgtctgagcgtcgaggcccaaaagcgttggcaggccgtggaaggcgaacgttccattccaattgagagc

SEQ ID NO: 52123 - DNA, 170 bp, Glycine max
tttaaattttagccgtcattgatttttcctcttgcatttgtcttactttctcaggctttttcgattacccatgtggatatttcgccctaatggctgttgctccatccaaagtttccaccttttctggtttttctcccaaacccagaggtgggggtgctcacaaaaaccca

SEQ ID NO: 52124 - DNA, 390 bp, Glycine max
cattgatcctgcttttatacaatccacagaacaccgtcccatagcaaaggtggtggaagttagagagattccagtgatagacctttcagaaggtagaaaagaattactcatttcagaaattggcaaagcatgtgaggagtggggatttttccaagtaataaatcatggggtaccctttgagattagtagagaggttgagattgtctccaagaagttctttgagacgagcttagaggagaagaagaaagtgaaaagagatgaatttaatgcaatggggtaccatgatggggagcacaccaagaacgtaagagactggaaagaggtgtttgattaccttgttgaaaacactgcacaagtcccatcttcccatgagccaaatgatttggattt

SEQ ID NO: 52125 - DNA, 287 bp, Glycine max
cctacgcgtccgcccacgcgtccgcccacgcgtccggtttgagttgtatttagcattctttcctttttactttttgccaaaaaatggctgaaactgaaccaattgtaccgtcatttgtagtcccaagacgtgacgatgacctgttgcagtgttcgaacacaatttactacgtcaaagagttgatccaggacgaggaggagatacgggaagcagtgaacgcgttcggtgacggcgtacgccaaggcgatttcgagcgcattgtcgagcattttgaccatttctttgcg

SEQ ID NO: 52126 - DNA, 99 bp, Glycine max
tttcgcgtactcgtgggcaggaggattataataggcttagacccttgagttatcgaggagctgatgtatttatacttgccttttctcttataagcaagg

SEQ ID NO: 52127 - DNA, 419 bp, Glycine max
cttacttgtgggttcgcacagttggaaatattgtgacgggagatgatatgcagactcagactatcatcaatcatggtgcgctcccatgcctcttgagcctgttgacacacaatcataaaaaaagtatcaagaaagaagcatgctggaccatatcaaacattacggctggaaacagagatcagatacaggctgttattgaagctggtctgattgccccccttgtcaatcttcttcaaaatgctgaatttgacataaaaaaagaagctgcttgggcaatctcaaatgctacatctggcggtacccatgagcagatcaagtatttggtgagccagggttgcatcaagcctctctgtgatctgcttgtttgccccgacccaagaattgtcactgtctgtttagaaggtcttgagaatattctg

SEQ ID NO: 52128 - DNA, 375 bp, Glycine max
tttccttctagtgatgctgaaagtgatgaagaatctgaatctgactctggcattgaatctactgactctgatgatgagtttcaaatatgtgaaatttgcactacagaggaggaaaggaaaaaattgctacagtgttcctgctgcggtaaattagtccattccacatgcctgatgccaccaattggtgatatagttcctgaagagtggtcatgccatttgtgtaaggagaaaacagatgaatatcttcaagctagacaggcctacatagccgaacttcagaagaggtatgatgcagccttggaacgaaagacaaaaatattagagataattcgttctttggatcttccaaataatcctttggatgatattgttgac

SEQ ID NO: 52129 - DNA, 432 bp, Glycine max
cgtgtcgcttgggcggacgcgtgggtgtggacgcacttccagctttcagaacaaaacaatggcaagtggttgctcttttgttcattgatgcattgtccgtatgtagattacctgctcttatctcatacatgacggataggagggcttcatttcatagggttttgagtggttctcaaatacgtatggaagagtatgaggttttgaaggatcttgtagtaccactgggccgagcacctcatatctcttcccaaagtggggcatgacaacaaataaatgttggacttcaccaacgatgagcgcaatattattttttgtttggggaaaatttacctttcaagcattggagtgcttgtttataaaacataaaaaacatgcaatgacaattatgctaggcctcaagcaacacgggaaccagatttctataaaaaataa

SEQ ID NO: 52130 - DNA, 385 bp, Glycine max
tctttataagccctccctcgcaacaacctccacaatcgtcctccgcgacccatcaaggaggtcatcatcgccacacatcttcaggccatcaccgttcgtctggaatgactgcttcttcttcgcgtgctccgaataggacacgtaccggagatgacctgcacattggcaagtacaaactgctgaaaacaattggaaaaggcaacttcgcaaaggtcaaattggcaaagcacgtgccgaccggagtggaagtagcaatcaaaatcatcgacaaaacggcactgaatcagagcagcttgcagaagctttttcgtgaagtccggatcatgaaacaattggatcaccccaacattgtcaagctgtaccaagtaattgagagtgagacgac

SEQ ID NO: 52131 - DNA, 427 bp, Glycine max
atttcaccatctatgattcaggacatttgtttcagtaattttagtcagtggattgcaattgtctcatccaagggtacttgtcatctttttgttttgtcaccctttgggggtgatactggctttcaaattattagttctcagggtgaagaaccgtccctactccctgttgtttctctgccttggtggtatactccggcttccattccttaccagccatctttgcctcctccagcacctgctgttctttctgtggctagccggataaaatatagtagttttggatggcttaatactgttcacaactcttctacaaatgtgactgaaaaagtttttgtgccatctggtgccattgctgccatctttcacaattccttgtctcactcgcaacagcctgttaactcaaaggcaaaacccttagaacatatat

SEQ ID NO: 52132 - DNA, 100 bp, Glycine max
gttatgagcttagtgaatatgggaacatgtcaagtgcttgtgttcttttcatctgggatgagatgaggaggaaatctgctgaaaatggacttaaaaccac

SEQ ID NO: 52133 - DNA, 489 bp, Glycine max
cttacgcgtccttgaaattcgaagtagttcacaaaaaggactcagcgtgccagatgcaagccttgtccctgtatcatctactattgatgttattgaactaatgaaccttggtcaaaggaaccgtgctgttggagcaacagcccttaatgaccgcagtagccgatctcatagttgcttgactgttcatgttcaaggaagagatttggcatctggagcaatccttcgtggatgcatgcatttggttgacttggcaggaagtgagagagtggataagtctgaggctacaggagatagacttaaagaagcacagcatattaacaaatctctttcagctttgggagatgtcattgcttcccttgctcagaaaaactctcacgtaccttacagaaatagtaaactcacacaactactccaagattcacttggaggacaggctaagacactaatgtttgttcacataagtccagagagtgatgctattggagaaac

SEQ ID NO: 52134 - DNA, 454 bp, Glycine max
ttcacgcgtcctcggacgcgtgggtttttttaatggccaacaattttctctccgttcgtcgctttttgcattgctgccctccactacgaaatgttgtcaatggcagatggacgacaacgcattacacacagaggccgagagaaaaggacggaagatggaaatgcgtggacatggctcgtgtggaggacgagttcgacgtggtcattgtgggcggtggccccgctggactgtccgccgccattcgcctcaaacaattggcggcggagaaggcaaaagaattgcgcgtttgcttggttgaaaaagcacccgaaatcggtgcccatacgctctccggcgccatcattgagaccggcggattggaccgtctttttcccaattggcgagaactcgactcgcccatcaaacagccggtgaagaaagacgcattcgcaattctcaccaaaaatggacgaat

SEQ ID NO: 52135 - DNA, 425 bp, Glycine max
cccacgcgtccggatagatagttagaagaagggaaattaacactataattaattaaagattagaggatccatgaaagatggtggtagaaagcagggtgcaccctcaccctgtgctgcatgcaagctccttaggagaaggtgtgctcaggactgtgtttttgctccttattttcctgctgatgagcctcagaagtttgcaaatgtgcacaaagtctttggtgccagcaatgtcaacaagatgcttcagggtatgttcggtataaagaaaaaagaaagagagagagagatcaacattggagactagtgcgacgctttccttcaccataaagtgaatctttcacacattaaggacttagcagagcatcagcgaggagatgcagtgagcagcatggtgtatgaagcaaatgcaagagtgagggaccctg

SEQ ID NO: 52136 - DNA, 496 bp, Glycine max
ccctttcgtccgtccacgcgtccgcccacgcgtccgctggatttggatgccatcctttacgtccaagtggtcgacccgtataaggcgtcttacggtgtgcaagaacctgaatatgcgatcagtcaacttgcacaaactgtaatgcgtgctgaggttggcaaactgatgttggacaacgttttccatgaacgggccaatctcaatagggcaattgtcggaggtataaaagaatcgtgtgctccgtggggcctcatttgccttcgctatgaaattcgcacaatgaatatgcctccggaaattcagcgcgccatgaagatgcaagtggaagcggaacggaaaaagcgtgccgcaattttggagtcggagggcatttgcgaggcggaaaagaaccgagcggagggcgagaagcaggcgcgaattctgcgctccgaagcacaaatgcaagagcagatgaacaaatcgatgggtttggcaaaagcggccgaagcagagaaaa

SEQ ID NO: 52137 - DNA, 298 bp, Glycine max
gacttattaagctatcatgaatatgccacgcctcacttcagcggttgtaaactgaaaagctcactaggcggacataatataaccataactgatggccttgacaaaactagcgcaactttgcaatatagaaagtgagcagaaagctgctcagctgacaatcttttatgctgggcaagttgttgcgtttgatgattttcctgctgaaaaatcggaggagatactgtcattagccggcatgggaatataccaaagccaaaacacctgtgcatgtgctcacactcataaccagcaagggaat

SEQ ID NO: 52138 - DNA, 390 bp, Glycine max
ttctcaatttactccgacgccctcaaatccctcatgcacctcacccagctccaactcaacaacctctccgtcgctaaagacgttggcaaagcctttgggcttctggcgggcctcgcctccgaccgcttccccacttgggctattctcctcattggctccgtcgaaggccttattggctacggagcccaatggctcgttgttagccagagaattcagcccctcccttactggcaggtatatatacttgttttatcgcctttcattatattctctccccaaaccaatcattggtcgtcgactttgctacaacgcagctgtgcgtgtttctctgcatgggaggcaacagcaccacttggatgaacactgccgctctggtaacatgcattcgga

SEQ ID NO: 52139 - DNA, 383 bp, Glycine max
ttgacgcgtgggtttttaacctcttaatggttattaatttttaatactatgatatcttaaaattgtaagtatcattatgcaggtgtccagggaacatgtaagtatggaactcgggtagattacatattatcatcatcaaattctccatacaagtttgttcccggttcctatttagtcctttctttcaaagggacatcagatcatcacatagtgaaagttgatgtggtgatggcaaataacaatcctgaagaaaataatgtgacaaagaatccgcaacaacgaaaacagagatttgtaagaataacacatttcaatccgtcaaaaggtgtctggaaaccatacaattgacttgagacataaaatgagttcccttggtttagatt

SEQ ID NO: 52140 - DNA, 386 bp, Glycine max
tttttccatcatttcaatggtgcttctttttgaataaaaaatgaatgaagttctctatgactttcttgaaattgaagatattcgtcatgtggctggatttggtgacttatttgcaccatcatggccatgaagacaaattgccttggaatcgtggaaaggcatctttcattatttcaagtcctttcttttcttatgaaaatgactggtataatgtcaatgcatacaatctagtttacatctttatccttcttcgtgttgaacaggaatggagctaccttaggggtggtctaactactcttgatcgtgattatggattgatcaataacattcaccatgacattggaactcatgtcattcatcacctatttcctcaaattccacactat

SEQ ID NO: 52141 - DNA, 238 bp, Glycine max
ttcacgcgtccgtgctagtgaagaattcaaaatcaagcagcacaagaccaagtcattcacttgtagccctcaagaagtgatttctggtggagactacaagcaatccacatattgtcaccttcttcttggcctatacttctctgaccaagttgagtttataacctcagcttttatctacagcatggtgcaagctttcaccacttttgaggaactttggagagaaatttgcaatgacata

SEQ ID NO: 52142 - DNA, 390 bp, Glycine max
cttgaattgtagacaaaggatccaatatgtgtggccaggggtctcacctggctgagcccgacggtaaaccagagttattgcctgtagcaacaaatgatggtgatctagatggtttgggggttttgtcaaaccggaataatgatgaggttgatgatgatgatcccttctcaaagcgaaggtttgacaatttctcccaaagctcttagtttctttctgctgcttatgtataattgccgatgatcacaagtttttgttgagcagaaaaatggacgttggaattgctgacatcactcctgtagttaagcctatccgggagccacgtgttgttgtacaaactctgagtgaggttgatatcttggatgatggctatcgctggcgcaagtatgggca

SEQ ID NO: 52143 - DNA, 535 bp, Glycine max
tttcacgcgtccgcccacgcgtccgtgatagcttaaatgtggaaccgatgcaatacgacaagtttttggtgatatcattgggaacaggttctcagaaacaagaaatgaaatacagtgctcttgaagcagctcaatggggtatcttgagttgggtaaccacagccaatggtggcacccctttgattgatgcatttagtcaagccagtgctgacatggctgactttcatatctcttcccttgttcgtgcactcaattctgagcataactacctccgaatccaggacgatacattaattggggacatgtcttctgttgacatggctacggagaagaatttgaatgatctcgtcaaagttggggagtcattattaaagaagccggtttcaaaggttaacttgaagacgggcgtttatgaacctgttaaatcttatgaaacaaacgaagaagcctttgaggggtatattaaaattccatatacgtatatatattgccaaataattattaattaatataagagatgaacatatatcattga

SEQ ID NO: 52144 - DNA, 284 bp, Glycine max
gtttcgtgttcggaaatgatggctcagagtctgctccatggtactcttcatgcgactatctatgaagactataatctcaaaattggtggatgcacttttttaaccaagatggtacaaaacatcgaggagactggtgttattggaaaaggacgtcactaaactatacgcaaccatggatctacaaaaggcactagtgacgacgaccacactgatagaacaagatattcaaactccaatatggacctagtgctttcatattaatcgagcccatatggcatcaaaca

SEQ ID NO: 52145 - DNA, 434 bp, Glycine max
atgattcataactccaagaacatatcgagagcagaaggaataaatttctacaacgatggaacaagattttggccattttttgcttggtggcaatttttgttgatccattatttttcttcctaatctatgtgaagaagaatgaaaaatgtattgctatcaatcagacaatgacaacaacacttgttttatttagaagcattaatgatttgatatatttctttaacattcttctccagtttaagttggcttatgtttctcctgagtcaacggtagtaggtgctggagatttagttgaccatcccaagaaaattgctcttaattatctgaagggttattttttcatcgacctatttgttgtattgcctcttcctcagataatgatattatttgtcctaccaaagtacctgggattatcaggagctaattatgctaaa

SEQ ID NO: 52146 - DNA, 213 bp, Glycine max
gttccccaattaattgggaaacatactaccaaacatggacgcggtccatggaagagctgaaggcaaaacatacaaaatttgaggagctagctgaaagtctttgttgcgaaaagaagtccgaaaagggtgatattgctattaggagaaagaaaataaatgattaatcctgcaaaagaaagtctcccaattcatgtgatttagataatgctgatg

SEQ ID NO: 52147 - DNA, 374 bp, Glycine max
cccacgcgtccgaaaccgttaaaaccaaatgaatagcagtgaagaaacaacggaaaatgttgggatgggcggaaataaggacgaacggcagacaacttcaaaagatgagaccgacgaaagcagcagcgaaaatcaacggaatgaacaacgccaacgacaaatggacagcgaaaaggaggactcgaggttcgaatgcaatatttgtttggacatggccaaagatgcggtcgtttcgatgtgcggccatttgttctgttggccgtgccttttccaatggatggacacgcgtccctatcgccagctgtgccccgtgtgcaaatcggcgattagcaaagacaaggtgattccgctctatggtcgcggtggtggggaca

SEQ ID NO: 52148 - DNA, 267 bp, Glycine max
gttcagacatgttattacgagcttgggacagcaccgttgcttggcaacttacccttactcatccatcaaaactaaaacatattcaggggaacaatctgtcttcaacagatataattgcagatgatagagatctatgtatactcatatttcattctctcattggttcagataaagctgaaattgaattcattaagcaaggggacttgagtcctgaagagcttgatgcttttgtctctgttttacaattagctggtaacaagttgggac

SEQ ID NO: 52149 - DNA, 406 bp, Glycine max
cgtgtcgcgtgggcggacgcgtgggggacagaagactgactgtgacaccttgaagttaataaattgacatttttcttgcattttgatttaaaaggtatggggcaagactgggtcaaaactctatggccctagtgctggagtagattatgaagacaaccaacttagattcagcttgttatgccaggcagcacttgaggcaccaagggttttgaacttaaacagcagcaaatatttctcaggaccatatggcgaagatgtaatttttattgccaatgattggcacactgcccttcttccatgctacttgaaatcaatgtaccagaccaaggggatttacaaaaacgcaaaggttgcatattgtattcataacatagcctaccagggtaggcattcctttgcagacttc

SEQ ID NO: 52150 - DNA, 268 bp, Glycine max
aacatggccccacacccaacaacttcacttccagtttctccaaaaccaaaccaaattggttgaagtgtagcacgctggcgaaggttgccgtgaatttgtctgagtggagcgatgttaggcctgggctggattgtgaggttcacccgtgtgcccttcgtggtaatttgccccagccaatggggcacttttatgtgatttctgggttctttgtggtgtatcggtttttcaatttgactgctgaggccacgcttgaggatgtgttggagaa

SEQ ID NO: 52151 - DNA, 333 bp, Glycine max
cgtcgcttgggtttaggcgtaagtagttctggattatgtagtgggttggttcaacatgatggttattctagtccctgtgaattcttaaaggttaatccacagtgttcttctgatgggtatctcgattacttgaagtttttctattgtacatgtcagggctttagtttgtttggttatctagtgttgggtgtgtggctggctgctttgttttatctcttggggaacactgctgcagattatttttgcccttctcttgagcatctgttaaggctcttgaaattgcctccaactgtggctggggttgtgctgctttcacttgggaatggagcacct

SEQ ID NO: 52152 - DNA, 311 bp, Glycine max
gtcaatgcattcctttagccgcttggggggacccttcaaatatcatgtgtttcttagcttcagaggcaaagatacacgtttcacctttactggcaacctctaccgagctctacaagatcggggattccgcgtctttatggttgatcagaacattgacaaagggaagaaaatatctcaagaactccccaaggcgattaacgaatccataatttatattatccttttatctgaaaatttagcttcttcctggcattgcttagttgaagttgttatgatacttgatgagttcgctaaggggaagggtagatgga

SEQ ID NO: 52153 - DNA, 414 bp, Glycine max
ctgacgcgtgggcggacgcgtgggcgccaccccagttgatttgccaacttcataatgtcacaatgcatgcagatgttgaaacggatgaagtatatgctcaaatgacattgcagccattgactccgcaagagcagaaggatacatttctttctatggaattgggcattccaagtaagcagccgtcaaattatttttgcaagacattaacggccagtgacaccagcacgcatgggggattctctgttcctcgtcgtgcagctgagaaagtttttcctccactggatttctcgctgcaaccaccagcacaggaactaattgctagggatctccatgatgctgaatggaaatttcgacatatttttcgaggacagccaaaacgacaccttcttactacaggctggagtatatttgtta

SEQ ID NO: 52154 - DNA, 444 bp, Glycine max
ctcacgcgtccgaaaatggacaaatgtgtgcaataaaagaggtcaaggttgtctctgatgatcaaacatcaaaagagtgcctcaaacaacttaaccaggagataaatttgctaaatcagctttcacaccctaatattgttcaataccatgggagtgaactggtagaagaatcactttctgtatatttggaatatgtctctggtggttctatccataaattacttcaggagtatggttcatttaaggagcctgttattcaaaattataccagacagattgtctctggacttgcctatctgcatggaagaaatacagtacacagggatattaaaggggcgaacatactagttgatcctaatggtgaaatcaaactggcagactttggaatggctaaacattctgtcacatagagctggagagccggcacatcacacataaattctt

SEQ ID NO: 52155 - DNA, 298 bp, Glycine max
cttaccaaactatgcctcctcaacatggtgtttggatgagctcaaaaagattctagagtgcaagaaagaagtttttccaatcttccatggtgtagacccctctgatgtgaggcatcagagaggaagctttgcaaaggctttcagtgaacatgaagagaaattcagagaagacaagaagaagttggaaagatggagacatgccttgagagaagttgcaagctactctggctgggactccaaggaacagcatgaggcaacattgattgaaacaattgttggacacatacagaaaaaaata

SEQ ID NO: 52156 - DNA, 490 bp, Glycine max
aaaagaggtgaaatatagagagtgaagaagaagaaatagagggttttggtgtttggtgtttgaatcgtgaaaatgttcagaaaccagtatgacacggacgtgacgacatggagccctactactatcactctccaccaccaccatctccttctcctcctgctccctactactaccactctccaccaccaccatccccatcaccgccgtctccatattattacaaatcccctgcacctccatctgcatctccaccacctccttactactatcaaagtcctcctccaccatctcccacttctcatcctccctattactacaaatcccctccaccaccaacgtcatatcctccacctcctccttccccagctcctgctcccaagtacatttacaaatcacctccacctgcggtttatatctatgcttccccacctccacctatctacaagtaagctcaaattgtgaaagcaccattcatgatgaatcatgttct

SEQ ID NO: 52157 - DNA, 241 bp, Glycine max
tcggatcacggcaggcatagctgtgggtatgggcacgaccttgaattactttttggctgacaaaagcaacaaagctgtgatcctttgaccaggagttggttgcttttggattgcagttttgataggctctgttggtcattcatataatgctgctgataataaagcaaagctcagcaattttaccggtgattataaagatggagacatctcttccaaggagggggatatagttaaatcaaaa

SEQ ID NO: 52158 - DNA, 189 bp, Glycine max
cggacgcgtgggttgcaatctcaccaaggcttgctggtgggtgtgattcagagggacacatccttgactctgctgagttatataattccgagactcaaacgtgggaaacactcccaagtatgaaaaaacccaggaagatgtcctctggggtatttatggatggaaagttttatgttataggggggattg

SEQ ID NO: 52159 - DNA, 435 bp, Glycine max
ccctcgcgttcgctcatttgagttaatcttttgtggtttatttacttctgaaagatgagttcgaagaagaagatagcaatacttatcccagcaagcatgttggccatgctccttctgatatcttcatcagaggtggcagccagccattcaaaggagggtgaggttgtcaaaataactaacgaacagggtgatgccaaatttgttggtggtggtgaccttgattttatgatcatttgttttcctcctccccctcgtcgttatcctccccctcgtctttatggccggggtgtttactacgaatacgttgacaatctttctcaaaagcaagcagataaatgctattgtggttgttgctggctgacagagacgggagattgcagacaatgctgccgagaatactattggtcgcctagaagtggcggtgacatacaatat

SEQ ID NO: 52160 - DNA, 312 bp, Glycine max
ttcaaattaaatttgataaatttttgcattatttttgtgatcaaaaatgacagaagatgagacggaagacacatcaacatttggcagctcaagaatcgatggctatctttacaagttggaacagcgtccattcgtcggccaaattcgcagaaagtattggtttgtgctgcctcgcgatactcccgttttatattggtacaaatcgcccactgattttaattgtgcgggtcgcattcttctcacgggcgctgcgttcctttacaaccccagggagcaagggattttcgagattcacgtcgacaacaaatgtta

SEQ ID NO: 52161 - DNA, 290 bp, Glycine max
cttgtttgaggcatttgttcactttaatattttgccatgtcttttcttgtcacattagccggctatttgacaattgccatttttctccagaaactctttcgctctctgtacaatgtggttttcccctatttgttcgctgaccctcagaatatcaaggtgctcgagggtgccgagtgggcagtggccaccggctgcactgacggcattggcaaggcgtacgcgctcgagttggccaagaaaaacttcaacgtggtgctcatctcacgctccatggacaaactgaacgcagt

SEQ ID NO: 52162 - DNA, 313 bp, Glycine max
cgtttacattcgcaggaattcacggacattaagttcagagaggcctatttggacacggtttgtctgaatatggagcaggacccggggcactatgacgtgttggtgatgtccaacctttacggagacattctgtccgatttgtgtgccggacttatcggaggacttggtgtcaccccgtacggaaatattggcgaaggggcggcagtgtttgaaagtgtgcacggcacggatccggacattgcgtgacaggacaagggcaaccctaccgaccttatgttgtcctacgtgatgatgctccgctacatgggcttgg

SEQ ID NO: 52163 - DNA, 369 bp, Glycine max
gtttgaaatctttactgggttggacagttccacaacatttcagattgtaagctctctcaggcactatgtccacattctaaatggaactgctgttatatctttgctccagccagcacctgagacttacgacctttttgatgacattatcttaatctctgatggccaagttgtataccatggtccccgtgaatatgttctggacttctttgaatctatgggtttcagatgtcctgagaggaaaggtgttgctgacttccttcaagaagttacttccaaaaaagatcaagcacagtactgggtgcgtagagatcaaccttacagatttgtcacggttactcaatttgctgaggcatttcaatcattccatat

SEQ ID NO: 52164 - DNA, 250 bp, Glycine max
atttttcacaagcaagttgtatttttggagtattgtattatatgaccaaatattttagtgttttcggactagatattgtgcttctggtggcaatttttctcttctccttctggttctgaattttttgcgttcttctttgtttctcacctttctgaggatttttccatcttagttcctggaggcaccaggaacctgaccaaataaataaaccttctttttcttctaatttttctgaagttgcattttttag

SEQ ID NO: 52165 - DNA, 385 bp, Glycine max
cggtaattggactgatcctttctctctctctctctctctttctcctcaacgcctcttcctttcaatttaatccaacaataataattattcgcaaaaaaacgttgaacagataccatcatcatcacccacatcatcagaatttcaagctatacagagggaagcgcaattgattctttttgtgtgtttgactttgatcaatcagttggatatcgcatagaggattgtgttgccttgaggggaaactcagtttttgactcactaaaagtaagtagccaaacaatttctcggggtcctgttgaagttgattcctttgataagttagttaccaacttcactcaataaaaacccattaacaagccaaacagagcgacaaagattgcaatta

SEQ ID NO: 52166 - DNA, 378 bp, Glycine max
cccattcgtccgtgcaacttttgctgcggcgacgaacaacaacaaacagaaaggaaggaaacagcggagagaagagatggcgaagttggaggtgcaagtgcgccactgtttctgctgcggccttacgcccggctccgtcctcgtcgggctgtacactttgtttctctatgctttgttgaccgggttggccgcttgggcactgtcggacacggctttaaacggtgacaagccgatttatgaggactgcgaattggaagtccagggaaactcctcgggtgatgcaggagagaataacaaaaagttgaaaatccatggcggacagactacaattcaatttgaagatacttcttcctatcactgctcgatcggcatgtacac

SEQ ID NO: 52167 - DNA, 393 bp, Glycine max
gttttatcttgtggtccgtcaaaagtcattaaactatgtgagggccattatgaagaacaggccaccccaccaattctttcgaattgtacgacgcaacacgacacaaaccccacacatgggatgttacgaactccggtttgtggccttcgaaaccggctttggaggaggcagaggtagatgattccgggatttgctcacctcccatgaggaccacgagccccccacgccgaaaaaacaaccaccgaagcctctcgccaacgtcgaggacgcaagccatagtgagagggcagagggagctcatggaaatggtgaagaacatgcccgagtccaactacgagctctccttgaaggacctcgttgagcaccacatggttgttgatgctactagacatg

SEQ ID NO: 52168 - DNA, 356 bp, Glycine max
ggatttgacatagcgcgttacctttggggttataatatttcaacgagggatgcagcttcacttgctctggttgactggctcatgaagaggccggagtggagcacaatgaatggaagagaccattttcttgttgcaggaaggataacctgggatttcaggagactgtctgaggaagaatcagattggggcaataagcttttgtttttaccagcggcgaagaatatgtccatgcttgtggttgaatccagcccttggaatgcaaaggattttggaattccatatcctacatacttgcaccctgcaaaggatgctgatgtgttcatgtggcaagatcgaatgaggcaactagagaggaa

SEQ ID NO: 52169 - DNA, 404 bp, Glycine max
cccacgcgtccgcccacgcgtccgcccacgcgtccgcggacgcgtgggcgacccacgcgtccgggattgccttatgatgaattcttttcacaaagatctgagtctctcttgaaggttcttaggtcaggtgccaggataaagaaggaagcctttcaggctgcttccattcctgttgttttggtcgagaacagtgggagatgcaacaaaaatgacagtgatgaaaaggttcttccaaatgggactgcttggattcctaatctagtccaaacaatcacagatattgcattgaaccaaagtgagtctattcacgttgacaagaatttgattgaagggccaaatccgaatcagagaggaaaattatggactcctcttgtgtttgctatccaatacttccttatcatgaa

SEQ ID NO: 52170 - DNA, 304 bp, Glycine max
agaaaaacacgcttgggcccttgcactggatcgaaatcggagtgaaggatgctggcgagtccgagagcagcagcaacagtaacaacgcaaccgcaagagtcatgggaatcaatgctcccaggcccacccagccgcaacaacttcggatccgcagatctgagtcctcacggcctcatggcattcccctccggcagctccatctccatcgtcgacacccgctccatgcagttactctcctccttccccatccctgctccaccttgctccgccgcgcccttcgtcaccgccctccgctggtcccccc

SEQ ID NO: 52171 - DNA, 416 bp, Glycine max
ccctctcgtccgtccacgcgtccgctacggaccatttgtactctaattacccaagaagtgagcaatgttgagtcgttggagcggagtctacacattgatataacccaggggtttatccttcacaagctcatagagcttcttggtaaatttttggaggttccaaatatcagatcgagattcatgcgagatgacttactttctgaaattcttgaggcccttatcgtaattcgtggcttgatagttcaaaagaccaagttgattagtgattgcaatcggctccttaaagatcttttagatagtttgctgctagaaagcagtgaaaacaagcgacaattcataagagcatgcatcaatggtctggaaatacacagagaggagagaaaggggcgtgcttgtttgtttatcttagagcaact

SEQ ID NO: 52172 - DNA, 352 bp, Glycine max
ggggactttgtttcttcatacacagagagaaagtctggttttatgaaatggtttggtaagattttcaacattggatccagtagaggaaggggtggtggtcgtcatctgcagcagcctgttgaggaaaacatggtttggcctgctcctgctagatccttggatgaccgtgctagatctcggaaggaggaagaggatctagatcacgcaattgcactttctttaggcgaaaattttaagagaccaactggatatagatggcgaacaggaactgatgaagattatgcaaaggctctgcaagatcgcaggttctcatctgcacatgctacatatgcccctgtacctttttatcccc

SEQ ID NO: 52173 - DNA, 369 bp, Glycine max
cccactcgtccggtttgagcaacatatttgttttaatataagcagcaatggtggggagaattaaaaatgtgtattcgaaggtctacgatgtgccaagacgtccgttcgagaaagagcggcttgaccaggagttgaaattgatcggcgagttcggcctgcgcaacaagcgtgaggtgtggcgtgtcaagctatcgttggccaaaattcggaagcgtgcccgtgagctgttgacgctggaggacaaggacccgaagcggttgtttgagggcaacgcgctgctgcgccgtttggtccgcatcggtgtgctggaggaggacacgatgaagctggattatgtgctcggcttgcgcgttgaggacttcatggagc

SEQ ID NO: 52174 - DNA, 393 bp, Glycine max
ggaaggcttgactgcggaagacattgaagcactgacgacggaagtggccattttgaagcagatgaatcacccgaatatcatgatcttgcatgacttcttctcggaagagaagtactattacctcgtcactgaattcatggctggtggggaacttttcgaccgcatcgttgaaaagtcttactacagcgagcgagaagcaagagatttggtcaagctgcttcttgaggctatcaagtactgccacgatgccgatattgttcaccgtgacttgaagccagaaaacctgctgctgacgagcaaggacgacgatgcgtctatcaagttggcggactttgggtttgcaaagaagatcgagttcaacggcgatggtctcgtgaccgcgtgcggcacccc

SEQ ID NO: 52175 - DNA, 427 bp, Glycine max
  unsure (1)..(427): unsure at all n locations
cccacgcgtccgggctaaacactcatgcggttgttgagccattcgtcatagcaacaaacaggcatctgagcgtggttcaccctatttacaaacttttgtttcctcactatcgtgacaccatgaacattaattcacttgcccgcaaatccttggtcaatgcagacggtattatagagaaaacattcttgtggggtaggtactctttggaaatgtctgctgttatttacaaggactgggttttcactgatcaagcattgcctaatgatcttgtcaagagaggagttgcggttaaggatccatctgctccccatggagttcggcttttgattgaggactatccttatgcttctgatgggctagagatatgggatgccatcaagtcctgagtgcatgaatatgtctcattctactacangtcagatgcagc

SEQ ID NO: 52176 - DNA, 176 bp, Glycine max
gagtaaagaaacatggagttttgggatgaaggaaaaatgtgtccaaatgatgaagagcatgtatgaaacagaagttacagattggcctgctccactgagaaccatttctggaaccattcttgctacatttttgggaacaactctgtggaaactatttttcttttttagagatgctg

SEQ ID NO: 52177 - DNA, 302 bp, Glycine max
ttcttctcttgcggctagggttttagcgcagcttgttctagatttaaggaagatgggcaaggaaaaggctcacatcagtattgcggttattggccatgctgactctgggaagagcactaccactggccacctgatctacaagcttggaggcattgacaagcgtgctattgagagatctgagaaggaagctgctgacatgaacaagaggtctttcaagtctgcctgggtgcttgatacgcttaaggctgagcgtgaaagaggaatcacaattgatcttgccttgcggaagctcgaaaccacca

SEQ ID NO: 52178 - DNA, 349 bp, Glycine max
cccacgcgtccgataatctccaccaaacccctcttttactctcctctctcctctctcgaaaacagtgttccaaaatccaaacacactctctctccccatggcgttgaacaatggcgtccccgccaccggcaccggcctcatcgtcagcttcggtgagatgctcatcgacttcgtccccaccgtctctggcgtgtccctggccgaggcccctggcttcctcaaggcccccggcggcgcccccgctaacgtcgccatcgccgtgtcgcgcctcggcggcaaagccgccttcgtcggcaagctcggcgacgacgagttcggccacatgctcgccggaatcctcaaggaaaac

SEQ ID NO: 52179 - DNA, 433 bp, Glycine max
cgccgcgctcgcaccttttcgatctccaaattagggttttcatcttccattttccgagcctagattcattcgccaattgcctcacagatccaccacaccttctccctcaatgttctggaagctcgcctctatctcttcctcctctcccgtggaggtaatattggacaaggagaacttcactttagaagaacttctagatgaagaggaaataatccaagaatgcaaggccttaaacagtcgtcttatcaactttctgagggatagagctcaggttgagcaattgctacgctacatcatagaagaaccaccggaggatgctgaaaacaaacgggtcttcaagtttccattcattgcctgtgagatctttacatgtgaaattgatgtaattttgaagaccttggtggatgaagaagagctcatgaacttattattc

SEQ ID NO: 52180 - DNA, 372 bp, Glycine max
aaagacatgggtctgctcaaatacttcctagggattgatgttgcccaatcctcctatggcattgtcatttcccaatggaagtatgctttggatatcttgaccgagaccggtatgcttgattgtcttcctagtaatactcctatggatcctaatgtgaagcttctctcaggtcagggggaggcattggaagacctgggaagataatgttgtttggtggacagacttaattacctcactgtcactagactagacataacttttgcagttggtgtgcttagtcaatttctgaaagacccgactgatagtcaatggaatgcaacaatccgcatacttcgatatatcaagaatgcaccgggtcatggattgctatat

SEQ ID NO: 52181 - DNA, 203 bp, Glycine max
ggctaattcttgacacagatcgaggagatcagcaacattttgttcgcagagatgagtagaaggcatcctgacagatcttcaccccccttttgcacagaatggattaacgataataaaagccactcacctacaaaccatgaagcaaaggtgctgcaaaagcgggtcattttcttgaaaaagctggctatgttcagacacacggt

SEQ ID NO: 52182 - DNA, 280 bp, Glycine max
gggaagtctggaattagattggactggattagaaggctaaaaatagccctcggtgctgcgagggggctggattatctgcatgaactagcaaatcctccaatcatacacagggacatcaaatccactaacattgtactggatgagcgcttgactgctaaagtatctgattttggtctctgcaagcctttgggtgaaggcgcaaaaggttatattaccacacaagtcagaggaacaatgggctacttggacccagagtattatatgactcaacagttgactg

SEQ ID NO: 52183 - DNA, 186 bp, Glycine max
ttcagcttgggatagatgccattgaagatgtgctctaccatattgaaacatatgatgtgactacaatttgagcatgcacacctatatgtctgatgtctaggctgattaaatcactgggggtcaaatgggttatcccaagagaaggatctagtgagatctttggagggtatttgtacttacacaagg

SEQ ID NO: 52184 - DNA, 355 bp, Glycine max
atcgtagcaaagaaagaaagaaagaaaaccctagcttaccttttgaactttcaagaggcaaatctttgttaagacactcactgttaagacaatcaccctcgaggtggagagttcagataccatagataatgtgaagtccaagattcaagacatggaagggatcctaccataccagcaacgttttatttttgctggcaagcagcttgaggatggacgtacacttgctgattacaacattcaaaaggagctcactctacactaggcgctccgtgtcctgtgtggaatgcaaatctttgataagaccttgaccgaaaagacaatgacccttgaggtcgagagctctgacaccattgac

SEQ ID NO: 52185 - DNA, 318 bp, Glycine max
ttcccacgcgtccgctttgatcattaaagcatctgcaataaatgtggaaacatatgaatctgatagaataattgatcttcctggccaaccttcaagcccatcagtctcacacttttcaggttacatcactgtcaatgaaaaccatggaagggcccttttctactggttctttgaagctcaatctgaaccatccaagaagcctctccttctctggctcaatggaggacccggatgctcctctattgggtatgtggaagttgttgagattggacctcttatagtcaacaaaaatggggaaggactacatttcatcacaca

SEQ ID NO: 52186 - DNA, 484 bp, Glycine max
ctctgttcttccgcctatccaattcttgaatccgctaaccccaactccttcttccctcattttttcatttttcatttttcacacacaacacaacactttcgcatgttttgttgatgtttcctctctcgctctctgcaaacaataatggacacgccagataggagcaagatcaacacccctctttcccaatttgaggattcgcctgtgtttaagtatatcagtaatctatctcctatagagcccgttaaatctgttcacgttactcagacattcaactcatatagcttttcatcccctccatctgttttcacatcaccccatggcaactgtcacaaggaatccagattcctcaggaggcataaccttttggagacatccaaacctaaggtttcgtctgaagatgtaaataatgtttattcatgtgaagagactcctgcagattcagctcaagcatgtcatgaatcaagtgagcaacaggaaaata

SEQ ID NO: 52187 - DNA, 363 bp, Glycine max
tcgcccacgcgtccggcgagaggcaaatttcactgtttcttcgatgcattcggacatggaacaaaaggatcgcgacgctattatgaaatcattccgtgcaggggaaagtcgtgtattgattagtaccgacgtgtgggcccgtgggttggatgtgccgcaggtttcgcttgtcattaactacgacttgcccaacaatcgtgagttgtacatccatcgcattggccgatcgggtcgttatggacgcatgggagtggcgatcaacttcgtaaagaacgacgacattcgaattttacgcgacattgaacagtactattccacccaaattgatgaaatgccaatgaatgtcagcgaattgatctgaga

SEQ ID NO: 52188 - DNA, 498 bp, Glycine max
tcggttgatgcattatgtaaagaaggaaaggtaaaagaagccaaaaatgttttagctgtcatgctgaaagcatgtgtgaaacctgatgttattacgtatagtactttaatggatggatacttcttagtttatgaattgaagaaggcacaacatgtattcaatgctatgtccctaatgggagtgactcctgacgttcacagttacacgatcctcattaacggattttgtaagaataaaatggtggacgaggcattaaatctctttaaggaaatgcatcagaaaaatatggttcccggtatagtcacatacagttctcttattgatggtttatgcaaatcagggagaatatcttatgtttgggatcttattgatgagatgcgtgatagaggtatacctgcaaatgtaatcacctacaattccttaatagatggattatgcaaaaacggtcatcttgacagggcaattgcattgttcaacaaaatgaaagatcagggaatt

SEQ ID NO: 52189 - DNA, 527 bp, Glycine max
aaaaccctaacgccaaaaccctgactgaatacggagaagagaagagaagaagcagaatagtgtaggcggtgtggtgaaagtaaaagagagttcatcaattcattcgaattcgatacaaacaacgaaacagaggaaaaggaagaggaatgggtatatttgaaccttatagagcaatcggatgcatcacaagcagcgtccccttctctgttcaaaggctcggaactgaaactttccttactgtcagcgttggaaaggcttttcagatttttaactgtgcaaagctcaatttggttctcgttggtcctcaactgccgaagaagattagtgctcttgcttcttatcgcgaatacacttttgctgcatatggaaacaacattgctgttttcaagcgtgcacaccagtttgcaacttggagcagccataatgctaaggttaagttgcttctgttgtttggagatcatattgtcagtgttgatgctcgcggaaacatgttcttgtggccatttaagggaattgatgagaaccat

SEQ ID NO: 52190 - DNA, 342 bp, Glycine max
ggaaaaagacttaaaggacgacgagaaaccagatctggcggtttccggcgagttgcggccggaaaacgacaaaaccggcggagaagtggaagaggctggaccggcgaattccgaaccggaggaaagaaccgcgaacaacacagacaagacgttgccaaccacgggcgacgaatcagaccgggagaaccagtcggttaacgagtccaactcgaccggttcgcggttcgagaaaaccggagatggcgacgcgaaaacgggaaccggaccggatccggttcagaccggttcacaggaaccggacgcgtgggcggacgcgtgggcggacgcttgggcggacgcgtg

SEQ ID NO: 52191 - DNA, 452 bp, Glycine max
gtttgagttaaataatgtggcattattgcttaaatagtgcatatcttttatttttgatcaccttaaatacaatatccggttcggttttgactcggcaaaggcgacaaaatgccaaaataactgcttacaatgaacagtatgccaaaacaatggcggcactgtcggccggggcttatgccccatcgccaaatgaatgcatccggcgatggatgccaaattcgagcctttggcgtgtatttacattgtcaaaccaggcttgcgatcttcttgagcagacttgtgcctcatatacccttgtttcggagcagtatcgtcaactgattattgtgttcaggggcaccaaaagcagtgagcaactgtttttggaaggctggcaaagtcttaagcctggcacagattttcatggcctaggccaagtcaacaattatttcaacgaagcattgaatgtctta

SEQ ID NO: 52192 - DNA, 442 bp, Glycine max
gcaactgataaactgtttcatcaattattttttaatagcgaacattagacagaaatttcttacgctgccatacaaaaagaagagcaatgccagtaattcctactacatctaaaagttttagcccaaagagagaaggaaaaaaacttattcaatcaagggccattgatctgtgctgtaagtcaagtcaatgacctttacacagttatctaatttcttgagtgtcaaaaatgagaaacacggacataacatggacatgtcacactgtcatttacatacagatactcgtggagaatgagtatgaaacattaacaagcaaagtcaattcatggctcaggttgcattttctcgcattcttcccgaattgactggaaaagaatagtagacaaatatctttcaccaaagcttgggaagacaaccccaataagcttgcctgcattctcag

SEQ ID NO: 52193 - DNA, 413 bp, Glycine max
aagcggggaaaaaaggggagggggcatcactggtaccactcatctggtattccaactttatccgtgaaatgttaatacaatcaacttattacacacataataatgataattttcgggatgaacgtaggatagagttaaatccaaactaacacaagaagctcttgacgctatattcgactatttttcaattaaaatacacgatagtcaactgcagccatcatactattgcttgcatgcatgcaaattcgcattccatgaacgaggcgtgctatcagtgtttcactactatccatgatcgcaaaaggcaagaaggcatggttagttgcaacaaaaaaaggagtgaacaattttatagataaggataattgttcttacaatttcaaccgtacattaaaattaacaacagaacttac

SEQ ID NO: 52194 - DNA, 279 bp, Glycine max
aagggcccaaaggggaaaaaaaacccaatccccgaacaagggtttttaacccaaagggtcacccccaaaaaaaaacaacccaactccaatcattatccccccggccaggaaaaaaccttcaaaagctttctaaaaattgggggaacccccaggggcgccttaaaaaccctgcccctagaatttttgagagaaatattatgggcaccgggcctctccaacaaatcccaaaaagttgtttaggcttcaaaaaacccaagctcaaaaagcttttggggggcc

SEQ ID NO: 52195 - DNA, 342 bp, Glycine max
  unsure (1)..(342): unsure at all n locations
actgnactccgctcggcatgcgcttcatcgccctccaggttcgccgcccctccggcaggccacaggggattctaaacattggcttcaccgtcctcgacagctccatgcgcagcatgccgctctacactcacaacgcctcggccgtcggctaccgccacctcatgggtgagaaggacgcttacgacagccacaaccacctcagcccccgcatccgccccactgccgtcgcaactcccatgcctgagcttcgccggaccaagagcgacaccagctccatgctcggcgccgctgaagccgtggcgcgccaccaccgagccatggctgtacgagccgactccacca

SEQ ID NO: 52196 - DNA, 301 bp, Glycine max
ttttcacacagccttttgttcggcattacctgggacatttcttcagatccattgtttcgtggaaatcccgaaatttaaccatgcttctccgaaccgccgacttcggcgctattgcttcgaacctctccctgttgagccctacctccgaacctctccgttcggttcccgctcgtggattggtggttcgcgccgcgaaaggatccacgaaccaccgcgccctaaccggcgtgatctttgaaccgttcgaagaggtgaagaaggagctcgatctcggtcccaccgttccacaagcttctctcgc

SEQ ID NO: 52197 - DNA, 411 bp, Glycine max
  unsure (1)..(411): unsure at all n locations
ccttcatcaatattacactcttcaacagccttctgttgcggcgtgaatgttgtactttctcaaatggtgaatatgttaagtctggtctcgcagaacttgagaaatggatagcaaatgcaaaagaggagtatgcaggaacgtcctggcatgagctgaattatataagacaagctgttgggtttctggtaatacatcagaagaggaaaaaatctttggaagaaattcggcaggatctttgtccggcattgactgtgaggcaaatttatcgaatcagtactatgtactgggacgacaagtatggaacccagagtgtgtccaatgaggtagttagtgaaatgagggaaattgtgagcaaggacaatcagagtttgagctctaattcattcttgntggatgatgatatgagcattc

SEQ ID NO: 52198 - DNA, 99 bp, Glycine max
aggttatgagtttgttttactcattgttatcttgccggataataatggatcactatatggtgacctcaaacgtatttgtgagacagatctaggacttgt

SEQ ID NO: 52199 - DNA, 141 bp, Glycine max
tcggttgtaactcatctttggaagctgtatgtgctggtgtgcctttgattacatggcctctatttggagaccagtttttcaatgagaaacttgttgtgcaaatactaagagttggagtgaaggttggggtggaggttcctg

SEQ ID NO: 52200 - DNA, 268 bp, Glycine max
gttattttttctggggcctactcatgacgaaatagactttgagtttttgggtaacttgagtggtgatccttatactctccacacgaacgtatttagtctagggaaagggaacagagaacaacagttccatctatggtttgaccacaccaaggacttccacacatactccgtccaatggaatcctgcaagcatcatgtacatattctatatttattcgtataatatttcattccccaaattaaattaaccataactaatgagttttaat

SEQ ID NO: 52201 - DNA, 359 bp, Glycine max
ctcctcctcctccttcttcttcttctccttctttctctttttcattctttctttcaacatgggtggcatcagcctcgaagaaataaaaaacgagaacgttgatctggaacggattccaatagaggaagtgtttgagcagctgaaatgttcaagagcaggtctaacatcagaggaaggggccaatcggctccaagtctttggaccaaacaaattggaagagaaaaaagtatgttctcatcacaaactcataataataatgtagtttatgcttttttgctgcttcattagatgcatgtaggtgatgatgtcttgtgtgatgaaaacaggagagcaagtttttgaagttcttgggctttatg

SEQ ID NO: 52202 - DNA, 396 bp, Glycine max
gattggagggtatcatgttggaagggacatggcacttattttggacgttgcacgatttaagtatcctccccattggatcccacttaaacttctttgggaaggcatgaattacatcgatgaggatactggacaatctagggggttcatgcttgtatcaaggcctcacagggaacctggattgctttatactctgaggatgtgaaagacatccttcaggttgtttcaattatagccgcttcactgccatctaattttgaagaattcatcaagtggattgctgagatcaggaggcgagaggatggtggtccaagtttaagcgcagaggagaaagcaaggcttgctatcaaggaagaggtattgaaacaggtgcaggagactgggcttttcaaacatgtg

SEQ ID NO: 52203 - DNA, 349 bp, Glycine max
cattttagttcattctctttgcgcagttccctacctctcctttcaagatgcagatcttcgtcaagaccctcaccggaaagaccatcacccttgaggtggaaagctttgacaccatcgacaacgttaaggccaagatccaggacaaggaaggaattcccccggatcagcaacgtatgatcttcgccggaaagcatatcgaggacggacgtaccctcgccgactacaacatgcagaaggagtcaacccttcaccttgtacttagtctccgaggtggcatgcagatcttcgttaagactctcactggcgaaaccataaccctagaggacgaaagctttgacaccattgacaa

SEQ ID NO: 52204 - DNA, 426 bp, Glycine max
cataaccagaaacacaacagggaaagttcttctagtttttcaggttctggaaaagaaaaatgttttttccaaaactagctatcatcatcactgcacttgcattagtccctttgattttcatcaatgaatctgatagtgctgaggttacaccctttgcttctcagaaagttaacctttcagtgtactatgcaagcctaagccaaccttgtgcaactttcattgttaagaatctggaggaaattttccacagtgatctcatcaacattctcaaccttcagctagttccttgggccaatgcttatgtcgataagactaatcattccataatatgccagaatggccctgatgaatgcgagctaaattcgttggaagcatgtgctctcaacgttttggatgatgtgaacaaacattatgctttgatttact

SEQ ID NO: 52205 - DNA, 297 bp, Glycine max
gtttgcttcagtttttactagtttggaacttcacctattgttatagctccaagcatgaagctctcttcttctggatttaaccctcctgctgaagaagaaggggagaaaaaatgtctgaattctgaactttggcatgcttgtgctggccctctggtttctctgcctctggttggaagtcgtgtagtatactttccccaaggtcatagcgagcaggttgctgtatcaaccaacagggaagtagatgcacatattcctaattaccctaacttgccaccacaacttatctgtcagcttcac

SEQ ID NO: 52206 - DNA, 431 bp, Glycine max
gtttcttgaatacaatggaaccacgctttgttgagtatttccgcctggctacaccagagttggagtatggaaggatgaatattggaagtcgaccagcaaagagaagacctagtgaaggtattgcacgcagtgtttcaatgcctccactaggtcttctctttgctggactcatacaaggtttcatcttacagtgtggctaggctttggagcattatttaaaaaagtcattgaagaaaatgttaagaatctcaatctgctgcaagagatgtacaatcaatggcctttctttagggtcacacttgatttggtggaaatggtgtttgccaaaggagatccgaaaattgccgctctgaatgatagactccttgtttcaaaggatctgtggccgtttggggatcaattgaggaacaaatatgaagaaactaggaaac

SEQ ID NO: 52207 - DNA, 383 bp, Glycine max
atttaaatccaaatctatgtgaatctgatccatgcatccagcagacaaataacaagcagccagatggtgatcaacagaagaacaaaaataatatagttatcccggtagtagcatcagttgctggggttttggtgctcctaataattgtagcagcagctataatctgtggccttaaaaggaaaaaaccacaagcatctgatgtgaacatttatgttgagaccaacactccaaatggatcacaatttgcatccaagcaacggcaatatacattcaatgagcttgttaagatcaccaacgactttaccagaattcttggtagaggtggatttggaaaagtttatcatggatttattgatgacactcaagtagctgtaaagatgctt

SEQ ID NO: 52208 - DNA, 277 bp, Glycine max
cctacgcgtccgcccacgcgtccgcccacgcgtccgcccacgcgtccgtttaactctttctctctctaatccgcgtctctttgcgtttcacggcccacattgctgcgttctctggagtctttggcctttcaaggaaaaaatggcagagacaaaaccagacacaccgttgatgccaccatcatcgcggaaccttccagatttcaagaagtccgtgaaattgaaatatgtgaagcttggttatcattacctcataacacatggcatgtacctctttctt

SEQ ID NO: 52209 - DNA, 386 bp, Glycine max
tttttcttctcttgcggctagggttttagcgcagcttcttctagatttaaggaagatgggtaaggaaaaggttcacatcagtattgtggttattggccatgttgactctgggaagtccactaccactggccacctgatctacaagcttggaggcattgacaagcgtgttattgagagatttgagaaggaagctgctgagatgaacaagaggtctttcaagtatgcctgggtgcttgataagcttaaggctgagcgtgaaagaggaatcacaattgatattgccttgtggaagtttgaaaccaccaagtactattgcacagtcattgatgcccctggacacagggatttcatcaagaacatgatcactgggacatcccaagctgact

SEQ ID NO: 52210 - DNA, 389 bp, Glycine max
cctgttcataagtatcaagtctcctcctccaccagtctacaaatacaagtctccacctcaaggtctccgacttcggactcaccgccttctccgaccaccttaaagaggacgggctgttacacaccacgtgcggcacgcctgcgtacgtgtcaccggaagttattgcaaagaaaggctatgacggtgccaaggctgatatatggtcatgcggagtaatcctctacgttctcctagctgggtttttaccctttcaggatgataatttggttgccatgtataaaaaaatccatagaggggacttcaagtgcccaccgtggttctctctcgatgcgagaaagcttgatacgaaactgcttgatccgaatccgaatacgaggatttgtatttct

SEQ ID NO: 52211 - DNA, 334 bp, Glycine max
gttgctccgcactttttatacagcacgaatttattgctgttaggagcgatccgtgaaaaactctgtaaacatggtggaggaccaggacctcgttacaggtgatgagtttttctttgacttcttgcgctacaaggaaattgagaatggaatgctgtgggaagttgaggggaagagtgctgaatttggttcaccgtcaggaacagcaacagccgctcaccattttttatgatggaaagatttgtgttgcggatgtcacagagcttcaggaatatatttatgtagaaattacttcttctttttttttgttgcgacacttaatcatccgtctgccgac

SEQ ID NO: 52212 - DNA, 243 bp, Glycine max
atataccttactttaaatttcctttattatccacaacaaatcatagttaatttgatctaaagaacatgctaggaaatagatcaagtgataagtaccatgaaatttaacaaattaatttcttgattacataataaaatggggggtgtttagtttcttacacaagtttatttgtctgaaatgtaaaaaaattcttctgtttaattatgttatagggccaaactccattgtttgctcgtatatttg

SEQ ID NO: 52213 - DNA, 138 bp, Glycine max
tttatattatggagaagggatgctgtgttggaccgaagaagcgggttatcactcttcgtcagtcgcttctcaagcagacatctcgggtggctctggaagagatcaagctcaagttcatcgacaccttctccaagtttg

SEQ ID NO: 52214 - DNA, 415 bp, Glycine max
atacattatatgccaattgcaagaagccaacgatttagtgaggaaataacttctgatgaacgggtaaagatgcaacaccctacaagttctgattctaccgtcacagagccaactcaccaaactgcacatgaatgctgtatgcaaatggcaaacgaaatgatctgtattcagaatcaactttcagatattgaaatcaaacaggctaacatgatgcaccaattacagatgtttacaactggcataatggatgccctttctacaatccaatcaagaataacaggcttagagaatgtatttgatagattaagtcaagaatctttgcaaagaggaagacattcttattcagaaaactccaaattagggagacagagtgaaaatgttgcctctcccaggttcttcatatgcactccaacac

SEQ ID NO: 52215 - DNA, 396 bp, Glycine max
gttccttctttttctccttgaactcaaacatggcagatgaggtggttctgctagatttctggccaagtccatttgggatgagggtcaggattgcacttgctgaaaagggtatcaaatatgagtacaaagacaaggactcgccacacactagttgtatgctggttcaaatgaacccgggtcacaagaagattccggttctcatccacaatggcaaacccatttgtgaatccctcattgctgctcagtacattgaggaggtttggaatgacagaaatcccttgttgccttctgacccttaccagagagctcaggctagattctgggctgattatgctgataagaagatatatgatcttggaaggaagatttggacatcaaaaggagaagaaaaagaag

SEQ ID NO: 52216 - DNA, 430 bp, Glycine max
tcgcatttttttgctattgaaatggcttctacttctaatgccatcatccaatgcacctcttcttcttcgtttcagtatgacgtgtttgtgagcttccgcggtgaagacacgcaacagcttcaccggttttctttttgaagctctgaaaaaacaaggcatcgaggccttcaaagatgataaagatatcaggaaaggagaatccatagcaccagagctaatacgagccattgaagggtctcatgttttcgctgttgtctttcattggaggagtgcattggtttcgctaagagaaaataaaagtaaaagtatcatggatgtgttgcgaataagttttgatcaattagaggatacacacaaggaaatatctatagatattgcatgtttcttcaactattttgctgtggaatatgtgaaggaagttctagatttt

SEQ ID NO: 52217 - DNA, 355 bp, Glycine max
ttttacgcgtgggcggacgcgtgggctgtgttgtgttgtgtacttgtgttaattgtgttgttgttgtaggaaatttaagtgaagagagaatgatgatgaagtctgctatgtgtgcattggtgcttgtggcactggttgtggttgaagtggggcccatggctgaggccggtgacttgcaacccaacacagttgactccttgtcttccggcaattaattcaggttctgcaccttcgagtgcttgttgccagaagctgaaggagcaaaagccatgcttctgtggctacctcataaaccctagcttgaagcagtatgttaactctcctaatgccaaaaaaaccgttagttcttgtggta

SEQ ID NO: 52218 - DNA, 397 bp, Glycine max
ctctccttctccatgcttctcttcaaatctagctaagcttcttagttctaaagagcacacagcaagttcttaaatgcagtgactattactacttcattggcagaattataagaaaatgagagaaaatatttcagaatcatggctagttatgatcactgtgatattggccactgcaatatttgcaaaactatttcaattcaagttaaggaaggaagataaaagcaaatgcagattaccaccaggaaggagaggctggcctttgattggtgacagcatcaattggtacaatgctgttgcaagttctcatcctcctcagtttgttgaagaaatggtgaaaaggtatggtaagatattttcatgcagcctatttggaaaatgggcagtggtgtcagcagat

SEQ ID NO: 52219 - DNA, 406 bp, Glycine max
cttaacaacaacttacaccaacgctgtccgaatccaacaagctccacctaaatccacgtccaatctcaccgacccatctggttttttcttatcagtcttcaccgatccacacttggctacactacttaggtgattgtagcgaagaagtggacgtaaatttgcatgcagtgataggaggattcatatatacgtgggtgaaggacgttgatgatgaccatgaacaggttggtgagagtgaacagggatgcgattgcagcatgcatgacttgcccgctttgcaaaaagttcctcaaagaagccactgctatttccctttgcctgcatacgttttgcaggaagtgcatttatgacaaaattacagatgaagaattggaaaattgtccagtatgcaacattgatttgggca

SEQ ID NO: 52220 - DNA, 164 bp, Glycine max
ggtgatgaagggtatttctcatggggcctgtgattatctgctgaaacctgtaagaatggaggagctcaagaacatttggcagcatgtaatcaggaggaagaagtttgactcaaaggagaagaacaaaacccgcaacatagacaaacctacttcaaacagtagca

SEQ ID NO: 52221 - DNA, 442 bp, Glycine max
attaattcagtgttaatccatttgaaattcttcgatcactctctaaattgttatctcttgatattggcggcaatctttttcacggagttgtcaaggaagatgatcttgcaaatcttacaagcttgatggggtttgtcgcatcggggaacagtttcactttaaaagtgggtcccaattggattcctaattttcaacttacctatttggaagtgacatcatggcaattaggtcccagctttccattgtggattcagtcacaaaacaaacttcaatatgttggactatctaacacggggattttcgattctattcccacacagatgtgggaagcactttctcaggtttcgtatttaaacctctctcgtaatcatatccatggtgagattgggactacattaaagaatccaatatctatcccaactattgatctaagctcaaatca

SEQ ID NO: 52222 - DNA, 329 bp, Glycine max
ttcacgcgtccgatccattcagataagggatgttgaagaggaagacaataaccctgactgggtcaaaattaaggattggttggacaaacaagagtcatcatccgtggtttatatagggtttgggagcgagttgaggctgagtcagcaggacgtcaccgagttggctcatggtattgagctttctgggttgcgtttcttttgggctttgaggaacctgcacaaagaggatttgccacatgggtttgaggagagaaccaaggaacgtggcattgtttggaagagttgggcaccccagattaagatcttaggccatgcagctattggaggat

SEQ ID NO: 52223 - DNA, 398 bp, Glycine max
gttgtgtcgattttggcgaaggagtttcctcttcttgggttaaagaaggagaattgcactgaggttttctcaaaagaaaatctgattacgtccagaatgctatttccagagatgggttggagtggctatttaaaaggatgattgagttgggaaaaacggggcttgttttcaacccttatggagggaaaatggctgagattccttctgatgccacgccgtttccgcaccgtaaggggaacttgtataagatccagtactctgtgaactgggatgatccttcacccggtgctgctctgaatttcacgaaccaggctaagaggttgttcagttacatgaccccttttgtgtccaagaatcccagaagtgcgtttttgaattatagggatcttgatattggg

SEQ ID NO: 52224 - DNA, 441 bp, Glycine max
gttttcacagatgctgaaagagtctgcagaaaagattgtgggcttaagcaaagaaagagagcaattaatcaggcagagagatgctgctattcaggaagcaaatatgtggcgttctgaactggcaaaagctagagagcatgatgtgatcttagaagcagctgtagtaagagcagaagaaaaggttagggttgcagaagcaaatgctgaaactaggataagggaggctgttcagagagaatccgcagcattaaaagagaaggaagagcttcttgcatatgtgaatgtactaaaagcccaacttcaaaggcaacacattgatacaactcaagtttttgagaagacagagtcatgctcagatacaaagcatgttgaccccacagaagagaatgtggataaagcatgcctgagtgtttctagagccatccccgtccctgcagagaa

SEQ ID NO: 52225 - DNA, 395 bp, Glycine max
atctttcaatattttttcagtacaaaaggatcaagaattaagaccttcactttatcgtctctctactccctcctagacattctttcttcgaataattgcttttccaacctattctattgcttgagcctttctccaattttgtttctttagttcttttcccaccctttacaccaaaaaacaaaaaatgaggctactgtctacaaaagccacatgcaactctcacggccaagattcttcatacttcctaggatggcaggaatatgaaaagaacccttacgatgaggttctgaatcccaagggaattattcaaatgggtcttgcagagaatcagctctctttcgatctcctagagtcttggctcgaaaaaaaccctgacgtggctggattcaaaagcg

SEQ ID NO: 52226 - DNA, 347 bp, Glycine max
  unsure (1)..(347): unsure at all n locations
tttatatgcggtaaccaaagtagtttacatcaaccttctcaaaacaaaattcccaccccgctaaacaacacaaaatccaaaaagctattgtatccaatggcattacatgcatcagtgcacaacaacaatagcaattacttatcctctgcctatgcctagtcataagtatggttctggtggtatttgtaagcatactgatataataatatatgtgtgtgtgtgtatatatatatatatatatatatatatgctttgnggcaggcggagggaagaactgagaaagctcaaatatgggatactgccgggcaggaacgatacagagcaattacgagtgcctactaccgggg

SEQ ID NO: 52227 - DNA, 401 bp, Glycine max
gtttttggtaaggttaggactatgcgtgctaaagatcactatgagatgcgagaatataatattgatgtgcttgaagatggaaaagatttgtctttttttgctaaagagaggccatatcctatctacccttcaaaaggccgtttgaacccaatatttcttagggacactattgcaaggtttgtgcttcaaattcctagctttacaagccttgcctgtcaatgttgatccaattcctaaagatatcacagagcaatttggattaccaagtcttcatgatgcatattttggaatccacaaaccgaaggacataaatgaagctgatttggcccgcaagagacttatatttgatgagtttttttacgtacagttgggacgcttattccaaatgctcgaaagtcttg

SEQ ID NO: 52228 - DNA, 394 bp, Glycine max
cacattctcaaaactcaagctccaaattttcactttacacctttgaattcattttttcacacatggacgagatcgacgtgcctccgttcttcgtgtgccctatttcattagagctcatgaaggaccccgtgacggtctccaccgggatcacctacgaccgcgacagtatcgagaagtggctcttcgccgaggtgaagaacgacacgtgtcccgtcacgaagcatcccctccttccggacctcactccgaaccacacgctccgcagactcattcaagcctggtgcaccgtcaacgcctcccacggcgttcagagaatccccacaccaaaaccaccggtcgacaaaaccctcattgagaaactcctccgcaacacctcggcttcggactccccgag

SEQ ID NO: 52229 - DNA, 295 bp, Glycine max
accttttcccagttacagcaactcccatttccacgctcaccaaaaccctccctctctcaaatcactacttactctcctatgaatgcaaatgacaactccctcgtaccacattgttccctgttcgaccgcgaggagcatcgctggctccgcgaggagcagtgctggttccgtgactaacggcgctcgctacgcgaggagcagcgctgggctcgcgagcgcgaccagctgctccgcgagatcgtcgacctcaacctccatatccaggcgcttgagcgtcggctctcgatgcgcgatt

SEQ ID NO: 52230 - DNA, 132 bp, Glycine max
tttccgggcttttgtcacacaagtggtctatgctgttggtgctgtcacaaggattggaccaacgttccttaattttagggttggttttgggggctcctgcttacagaaggacatgttgaaccttgtatacat

SEQ ID NO: 52231 - DNA, 431 bp, Glycine max
tctttttgtttactatcccgatcgtaattacttcctaactttgcgttttgcggcatataatttgccatggaactcagttttaggccacaacttgggcttgtttgtgtgatattgctgctccctgcactgtgtaactgccaggaatatttcaccaaatcaagagcaacctattatggtacccctgatggctacgggactccaacgggagcttgtggctatggcgaatttggacgcttgatggatgggtatggcggaagagtcactggggtgtctgggctgtggaggaatggagctggctgtggtacatgttatcaggtaaggtgcaaaataccaaaattgtgcgatgtgaatggagtaaccctagtggtaacagactacggtcagggagacagaacagacttcatcatgagcccacgtgccttctcaaaatt

SEQ ID NO: 52232 - DNA, 450 bp, Glycine max
ctcttctcttgtttgtttctgcagttttgcctctctctctctctctctctctctcactatctatctatcccaccataaccattaaccaccacctcttaaatatttttccacaaatcaccaaaatttcccatttttttcaccctctgaatcacaatttttttctttctaactaaaatcgcctctacacacaaggattcagaggcagaaggaaacaataccttgaaagtaaatagatgtcgtcatcttcgtcttcgatggctgcttccagtgaaaggtggattgaccgtcttcagtactcctcattgttctggcctcccccaccagatggtcaacaaagaaaggatcaaattgctgcatatgttgagtacttcattcagtttacatcagaacaatttgctgatgatattgctgagttgatccgtaaccattatccatccaaggatattcttc

SEQ ID NO: 52233 - DNA, 372 bp, Glycine max
cggtcgcgttgtcggacgcgtgggcgcggcgggatcatcacgagattgcaaaatgaaggtgttgtctctgaaccctaattgcttccgtgtttggatttttgtgtgtttgtcgctgaaacatgttcggttttgctgcagttcaacattgcaaatcccaccactgggtgccagaagaagctggaaatcgatgacgacctgaagctgtaatcatttcactttctctgcaattttcatttgtattactcttctgattgtgtgtcgcgtgttgcgcttagaggaaaaaccgttgctttttaagtggggatgctcagaaacgaagctttacttcagtgttgctttgtgctgcgtttgggactccttattgattacgat

SEQ ID NO: 52234 - DNA, 163 bp, Glycine max
gtctgatcattgaactcatcaaccgaggaggcgagaagatatcaccaatcgaagtggatgctgttcttctttcacatccagaaattgctcaagcagttgctttcggagcgcctgatgccaagtatggagaggagatatattgtgctgccatcccaagagaagg

SEQ ID NO: 52235 - DNA, 452 bp, Glycine max
tcggctcttgagaggggcaagtcccgaggcaacagaattcgcttagcggttatcgaccacgtgacttccatgcccagcgtggtcatccccgttaaggacttggttaaaatctgcagagaggagggtgtggagcaggtaatttcttcttttcaaatgataattgttaataatgattaacagagaaaatcatcatcttataacttggatgaagtaggtattcgtggacgcggcacactcgattgggtgcacgcgcgtggacatgcaggagatcggagcggacttctacaccagcaacttgcacaagtggttcttctgccctccctccgtggcgttcctctacgcacgtgcctcctctaaggcacgtgacctgcaccatcccgtggtgtcgcacgagtacgggaaggggttggccgtggagagctcgtggaccgggaacagggactacagcgcgc

SEQ ID NO: 52236 - DNA, 331 bp, Glycine max
tcgccctcgcgtccgccgagaacaaaaaaagaaaaagaaaaaaattccgcgattcgctcttctcttggaaaagtgaaaaccagaagtacgaacgaaagagaagagcgatttagaagtgagagaagatggggttgtcgttcacgaagctgttcagcaggttgtttgcgaagaaggaaatgaggattctgatggtaggtctcgatgctgctggtaagacaaccatcttgtacaagctcaagcttggagaaatcgtcaccactatccccaccatcggatttaatgttgagactgtggagtacaagaacatcagcttcactgtgtgggatgttgg

SEQ ID NO: 52237 - DNA, 258 bp, Glycine max
ctttcgctttcggtccttgtttggctgatttaaagcatttgaattacttggacttgagcggcaattatttccttggagaaggtatgtcaattccttctttccttgggacaatgacttccttgactcacctcaacctctcttatactggattctatgggaagatccctcctcagattgggaacctctctaagcttcgatatcttgacttgagcggcaattatttacttggaggaggcatgtcaattccttgtttcctcg

SEQ ID NO: 52238 - DNA, 364 bp, Glycine max
gcttttctcatacgaagctctgtgctcgctgttatcagttttttttcctctgtttaacccagaaatatgtaacacaaatcaaaacatcgttgttgttttatttgagcatgcaagttggctaactcttggaaaggaaaggagcttcaagaagagagagataaaataaatggtgcaagatatgaagcagcaagacaatggagaatctaagaagaaggagcgtcacattgtgacttggactcaagaggaggatgatatactaagagaacagattggtattcatggaactgaaaattgggcaattattgcatcaaagttcaaagataaaacgacaagacagtgcagaagaagatggcacacttacttg

SEQ ID NO: 52239 - DNA, 219 bp, Glycine max
ccctcgcgttcgaagatccttacaaaagcttagtaaagatttgaaggaaacacaacaggacagggacaaagtggtgcaggaattgaaccgcctcaaacagcatttactggaaaaggcatctgaagactcagataaaatggatgaagacagcaaaatcattgaagagctacgcgatagcaatcattatttaagggctcaagtatcacatcttgggagaac

SEQ ID NO: 52240 - DNA, 338 bp, Glycine max
tcgagagtatctagtgtctggtctatttcttcctctttattttgtttcaagtggattgaagactaatgtagccaccatcaagggggcgcaatcatggggtcttctggcttttgttatatttacagcttcgtttgggaagattcttgggactctttttgtttcacttttctgtaaagttccttttaatgaagctttggtgttggggttcttgatgaattgcaagggcttggttgaattaatagtcctcaacatcggtaaagatagaaaggttttgaatgatcagacctttgccattatggttcttatgggtgtctttactaccttcatcaccactcctc

SEQ ID NO: 52241 - DNA, 210 bp, Glycine max
gtctggtagtggaaaaacttatacaatgtggggtcccccaagtgccatgtttgaggagccctcgcccaaaagtcacaggggaattgttcctcggatcttccaaatgttgttttctgagcttgagagagagcaccatgtgtctgacgggaaacaattcaattaccaatgtcgatgttctttccttgagatatacaaccaacaaattgggga

SEQ ID NO: 52242 - DNA, 442 bp, Glycine max
tttcaccagaaagtgacactgagagaagaaggaaaaactaaccaacaccacagcccctaatttcctttttctcacaatggcggcttcagtcgacaaccgtcaatacggcacccacataaacgccgtcgttcgcgcttgcggcccagacttcaatacccctctcccgtcggatttcgatttggactcatccagcgacgacgaagaccaaaacgacgacgcttcgtatctcaaggagttgatacaaaaagcgaacgcggaaaccgaggcgtcgctgttggacccgcgagacgagggaaccgcggaccagtggatcccgcggaacgcctccatggtgcggctcacagggaagcaccccttcaactcggaggccccactcccccgctgcgtcatgtgctgaaacgctgtgggatcctcgcccgtatgaagggcgccatgtacgtgt

SEQ ID NO: 52243 - DNA, 290 bp, Glycine max
aacttgagaaagtacaaccggttgatttgcgcagagcatataaatgcgaaataatgctctctaaaatcaaaaatcctttgccagatatgcttaaagcagacctggcattggattctgcagttctggatattgatcagggagagaatctcatcaagttctgtcctacaaaggaagagatggagatgttaaagaattatacaggaaacaaggaaatgcttgtaaagtgtgaacagttttttatggagctcatgaaggttccacgtgtggaatccaaattaagggtttttgct

SEQ ID NO: 52244 - DNA, 397 bp, Glycine max
tgtaagctggtacacctctgacgggaatcctgatctcctttcatctaacgtggcagacataaagctccaatcatcaagtgcaccagcacaaccattagggtttcatggctatgttcttacagggaaactgaaatcgccaaagctttggtccgcagaaaaaccatacctctataccctagttgttgtcctgaaagatagatctggccgcattgttgactgtgaatcatgtccagtagggtttagaaaagtatctaaagcccacaaacaactgcttgttaatggacatgcagttgtaataagaggtgtgaacaggcatgaacatcatccacaagtggggaaggcaaacatagaatcctgcatgatcaaggatttggtcttaatgaagcaaaacaatatt

SEQ ID NO: 52245 - DNA, 252 bp, Glycine max
gtttacatacgtttccgtgaatggaaatggagcacagagtgattccgttttccacgagagggtggaggaggacttatgatgttttcctcagttttagaggagaggatacccgtcttggtttcactggtcatctatacaacactttacgtcatatagggatcaacactttcatggatgatgaggcgcttgagagaggagaacaaatatcagaagccattttcaatgcatttgaagagtctgggatagccatcg

SEQ ID NO: 52246 - DNA, 347 bp, Glycine max
  unsure (1)..(347): unsure at all n locations
ccgtattctttggcaccttaagaagtccttagatgaaaagggtgttgctgatagtagcaatgcttctaaattcttgtatggttatgtgtttaataggcagagacatgacgagcggttaaagcgtggtggggagcagaagtccgtggtcattttgtcttatagtccttattcaagtgtgtttagacctttgctgcaaattttaggtcctttgttttttgacattggtaagaaagcattggagcatattgctgcttatgtttcaaaatggcctgctcctgttcctggtaaggtgatggatcttcctattggaaatgcaacccttaaagtgaatntgccaccagctcaca

SEQ ID NO: 52247 - DNA, 422 bp, Glycine max
atggattgagtctgtggtagttccgcttgagttgttgcagcagctcaaggcttcggattttactgatcatcaagagtatgatgactggcagaagaggaccttgaaggttcttgaagctggtttgattttgcatcctcatatgccgttggataagtcaaattctgcggcgcagcgactgcggcagattgttcatgctgcattggataagcctatagaaaccgggaagaataccgagtctatgcaggttcttcgtagtgctgttatgtctcttgcaaataggtcgtacgaagggtcttatgctgattcatgccactgggcggatgggattccactgaatcttcggctttatgaaatgcttctgcaatcctgctttgatgctaatgatgagtcgtcaattattgaggaatttgatgagctaatgg

SEQ ID NO: 52248 - DNA, 187 bp, Glycine max
gcgcttacttaagctccttagtgctgctccttgcagctctaattctatcccctcaagttcttgcaaactatgagaatcccccagtgtacaagccttccactgagaaaccaccagtttataagcccccagttgagaagcctcctgtgtacaaaccttcagatgaaaaccccgcaatttataagcctcc

SEQ ID NO: 52249 - DNA, 250 bp, Glycine max
gcgcccacgcgtccttagatggtctgctatagcggcaagtttgcccggaagaacagacaacgaaataaagaatttttggcatacccatttgaagaagaggatccagaaaagtggagtgcacaatggcaatccttcctcacgtatcttgcaagaggcacaagcaaatactagttcgaatgcatcaagtgtaatgattgccaattacggtttaccctgagggaatattaatccacctattgcaggattttac

SEQ ID NO: 52250 - DNA, 223 bp, Glycine max
gcgcccacgcgtccttagatggtctgctatagcggcaagtttgcccggaagaacagacaacagaaaaacacaatggctgggagcgctcccactccacgcgaagagttcgtgtacatggcgaagctggcggagcaggccgagcgctacgaggagatggtggagttcatggagaaggtctccgcctccgccgagagcgaggagctgaccgtggaggagcgcaacc

SEQ ID NO: 52251 - DNA, 374 bp, Glycine max
aattgtataaggggcagctctggctacacagttcattcataagctatttcaggaaagtataacaaaggtttcctgaacacattaactttgaattgacagaacatgagaataataaatctgtattctcatcccaaggagcatggtagatttctgtaactattttttcttcttatagatgtgaaagaagctagaacacaagacagtagtcaaggggaacaatgaatgcactagcagccaccaacaggaactttaagttggcctctaggcttctgggattggattcaaagcttgagaaaagtttactgattccattcagggaaatcaaggttgaatgtaccatacctaaagatgatggcaccttgcaatcttatgta

SEQ ID NO: 52252 - DNA, 373 bp, Glycine max
gcatgatacctttacttctgtgtggaggacttaaaacgtacagcgctattcttctttgtcccattttcttcagcttagcacatttaaatcatttcttggagatttatgccaagcaaaactacagaatagtgaaggctgctatggttataggtcttcagcttggctacactgttgtctttgggtcatatgcgtcttttcttttcattcgaactggacaccttatagctcccttagttgcgcacatatattgtaattttatgggactgcctgtattgtattcgcagagaagtgatttggaagcttagtttcagctggacttctgattggaggcacaaggattgtaagtgtaacattcataataggatttctgggc

SEQ ID NO: 52253 - DNA, 436 bp, Glycine max
gaggggcttttctcatgggtcagcggtgtggcttttgattcatattggtcatcacctaattcaaatgacaatgaagagactgttagatatcgatttggttccgttggtcaggacacacaattgcttctatgggacctggaaatggatgagattgtggtacccttgcgacgtccttctggtggatccccaacttacagtgctggaagccagtcttcccaatgggacagtgttgtcccgttgggtaccttgcagcctgctcctagtatgctggatgttctgaaaatctctccactcgttacccaccgtgttcatactgaaccactctcaggcttgatatttacccaggaatctgtacttactgcctgtcgggaggggcacataaaaatctggattagacctgcagctgctgagagccaatcaagcaacgctgaaactc

SEQ ID NO: 52254 - DNA, 420 bp, Glycine max
ctttttaattcttctggctacatagctatttaaaatcatatgttgttagttagtctcttgttttttttttctttctgatttctccatgatattccaattttgagttattgtgttcttctacttgctttttaacaggtccagatcatatgatgtttgaggtatggaacccactaggaatagttggtgtaatcactgctttcaactttccatgcgctgttctaggatggaatgcttgcattgctttagtctgtggtaactgtgttgtgtggtatgcctatatatctatctctgtatattctatgagattactcaactggacatttttaagtcagatcatgattgctttgacaatatttcatgacctctacaatattttgttctgtattttcatgtgacaattggctttgatcgagatatttc

SEQ ID NO: 52255 - DNA, 298 bp, Glycine max
ccctctcgtccgcccacgcgttcgtccacgcgttcgcccacgcgttcgaattctcccaacacaattataaaaagaagaaaaacttagagtgatagttgtaggaaagtaaaaacataagtgttctcttaattcagtgaggttctgaattgttcaacttgagatgatggcatcatttgcagggactactcagaagtgcaaagcatgtgagaagactgtgtatttggtggaattgctcactgctgacaacaagatctatcacaaatcatgtttcagatgctaccactgcaagggtaccctt

SEQ ID NO: 52256 - DNA, 337 bp, Glycine max
ccttttctatggaaaagagaaagaaatttgggaaagccaacttgaaaggcttaagaaagtgcaaagcaaaaagggtcatgatattatcaaattgagctacaatgatcttgatcaggatgaaaagaagatatttttggatcttgcatgttttttcgatggactgaatctgaaagtaaacacaataaaaattctattgaaagatcatgattattcagtggctgcgggattagaaaggttgacggataaagctcttattagtgtttctcaagaaaatattgcaaccatgcacaacatcatacaagaaacagcttggcagattgctcgccaagaatccatt

SEQ ID NO: 52257 - DNA, 238 bp, Glycine max
ccctcgcgtccggagaatggctcccaagggtttaacctttctggctgtgttaatatgcgtttcaacactgtcactgagtccttatgttgcgggggaagggcaaaataatggccttgttatgaacttctacaaggaatcatgccctcaggctgaagacatcatcacagaacaagtcaagcttctctacaagcgccacaagaacactgctttctcctggctcagaaacatcttccatgac

SEQ ID NO: 52258 - DNA, 457 bp, Glycine max
cccacgcgtccgctaggtacctgatcaagggtttttggttagactttgttgctgcattgcctcttcctcaggcgttaatttggattgtcatccccaatcttggaggttcaaccatggcaaacacaaagaatgtgcttcgctttatcatcattttccaatatttgccaaggctgtttctgatttttccactttcatcccaaattataaaagctacaggggttgtgacagaaacagcttgggcaggggctgcttacaacttggtgctttacatgttagctagccattttttaggagctagctggtaccttctatcaattgaaagacaagaagcatgctggaggagtgtctgcgatatggaggagccatcttgtcaatatggattctttgactgcaaaagggttgaagattcgctcagggtgtcctggtttatagcaagtaatatcacaattttatgctc

SEQ ID NO: 52259 - DNA, 357 bp, Glycine max
ttggtcgcgtgggcggacgcgtgggtgagatttcattcactttgacatcaaaatccggcggtgatgacgaaaacgatgaatttgccgatctctatgtcatcaagtggacatctcttatgataccaccaataactatcatgatggttaatctgatagccattgctgttgctgttagcagaactatatacagcgaagatcgcgaatggagcagcttgcttggaggtgtgtttttcagtttttgggtcttggctcatttgtatccctttgcaaaagggctaatgggtagaaggggtaggacacccactattgtgtttgtttggtcggggctaatttcaattactatctcactcctttggg

SEQ ID NO: 52260 - DNA, 487 bp, Glycine max
actgtggtgatgatcagatcagtcttatttacatattggggtctaaagacatctcaaagcttcttcagtggaatgcttgaaagcatcttgcatgcaccaatgtcattctttgacacaactccctctggcagaattttgagtcgtgtatctactgatatactttgggttgatatctcaattccaatgttggtgaacttcgtcatggttgcttacttctcagtaaccagcatcctcattgtaacatgccaaaatgcttgggaaacggtcttcctcttaatcccactgttctggctgaataactggtatcggaaatattaccttgcatcttctcgggaattgactcgccttgattccatcaccaaagctcctgtgattcaccatttttcagaaaccattgctggtgttatgaccatacgcggcttcagaaagcagaacgcattttgtcaagaaaatattgacaaagtgaatgctagtctgagaatggatt

SEQ ID NO: 52261 - DNA, 412 bp, Glycine max
cccacgcgtccgcccacgcgtccggaacaagataggagttctcttcatctcttctttcttctttgtgccttcacctcatatctaccttcagccaccgctgatgatgatcatgtgtacgacactgacggcgataagcttcaatacggtgtcaattatttcgtgttgccagtgataagaggaaatggcggtggaatacaagtagcaaaagcaggaaacgaaacttgccctctgactgtggtgcaatctggcaacgagctctctgaggggttaccgataaagattgcatctcgatcagcaggagtcgctttcatcacccaaggccagcttttcaagagcattcagttcggtgtgtttccatccacactcagaccagggtgtcccccaagtccaattccttctaagtgggacccac

SEQ ID NO: 52262 - DNA, 473 bp, Glycine max
cttgcggctagggttttagcgcagcttcttctagatttaaggaagatgggtaaggaaaaggttcacatcagtattgtggtcattggccatgtcgactctgggaaatccactaccactggtcacctgatttacaagcttggaggcattgacaagcgtgttattgagaggtttgagaaggaagctgctgagatgaacaagaggtctttcaagtatgcctgggtgctggacaaacttaaggctgagcgtgaaagaggaatcaccattgatattgctttgtggaagtttgaaacaacaaagtattattgcacagttattgatgcgcctggacatagggatttcattaagaatatgattactgggacatcccaagctgactgtgctgttcttatcattgattcgaccactggtggttttgaagctggtatttccaaggatggacagactcgtgaacatgctctgctttcattcaccct

SEQ ID NO: 52263 - DNA, 446 bp, Glycine max
  unsure (1)..(446): unsure at all n locations
cccacgcgtccgcggacgcgtgggtgaaacatgagtactataagtttcacaggtcaatctgaggcttgaactattttgttttatttttctatctgattccccacccttttactatagaggtcatgttctgtttcttaattggtcagttttggtgtctttagtatttgtatttacgggaagaaagaaaatatcaatgcaaatgcaatgcattctaaatggaatattgcaaattcttgatctgtttgtcgtcacaggataagtcaaatcaaccaatacaagtccagataaattgatttatgatgatgttatgtctttctgtttgtaattaccagaatctttgaaccctttttatgattttgcagtactttgcttaatatnggcggtgagaagttgagcattgcaaaagatgtgactgaattaattggcaaaactccattggtatatct

SEQ ID NO: 52264 - DNA, 434 bp, Glycine max
  unsure (1)..(434): unsure at all n locations
ggcagtggaacgacttcctttcgcccctcacgcgccgcttcaacgtctacgtcccggacctcctcttcttcggagactcccacacgacccgccccgaccgctctgaagccttccaggcccagtgcgtcgcggccctcctccaggcccacggactccagagaaccagcgttgtgggtataagctacggcggcttcgtggcgtacagtctcgcggcacagttcccggagcgcgtggagaaggtggtgctatgctgcgccggggtgtgcttggaagataaagacttggacgaagggatgttccaggtgaagactgtggatgaggctgcggatattttgctgccgcagacgccggaaaagttgaggcagctcgtgcagctcgcgtttgccaagcctgtcaaaaccatgcccacttgctntctcaatgattacattaac

SEQ ID NO: 52265 - DNA, 353 bp, Glycine max
gttttggtaaaactgtacagggcatggcattgattgcttacttgatggaatttaaaggaaactatgccccacatcttataatagaccaacatgctgttttggtcaactggaagagtgagttttataattggctgccatctgttgcatgcattttttatgctggaagcaaggatcaccggtcaaaattatttttccaagaggattgtgctatgaaatttaatgtccttgtgactacttatgagttcatcatgtatgaccggtcaaaactttcaaaaattgattggaagtatatcataattgatgaagcacagagaatgaaggatagagactcagttttagcacgtgatcttgat

SEQ ID NO: 52266 - DNA, 448 bp, Glycine max
cggacgcgtccgcccacgcgtccgcggacgcgtgggctaaagtgaaatgccttgcagatgctggtttttttatcaatgcgctgtgctccagagacatcctttacattgaagagttctacagtcaagttgttcaaacacatggctcagcaaagaatttgcctacatcctgcacttcaagactcagaccagggctgtgctttttccctcaaaatgtcgtgtcccaaatcagtaccccaatcttctttgtaaatgcagcctatgactcatggcagatcaaaaacattttggcaccaggtgctgctgatccccatggccaatggcgtgaatgcaagcttgatatcaaaaactgctcacctaatcaactcagtgtaatgcaaggattcaggacagatttcttaagggcatttagtgtggttggcaacgccgcatctaaagggcattttataga

SEQ ID NO: 52267 - DNA, 411 bp, Glycine max
ctcattttgcaagctttctttggtttcacaccatttttctattgacttcatcacaatataaaagatcattagtgtcggtattatcaccaccatattcttttggacttcctctgctatttctaggtttcgttttatttggctttgattttcttctgcaaccttatctcctgcaaagctttgattactgagtctaacttcccctgccacagtttgccttgtttacctggatcatcggttataatgttttctctcaatttggtcatcaaggtattctggtctctccatgtgttctgttctattgcaagggatagaagatcttaactctgtttcaatttccctgtttttcttcacaagcagagctctgtttttaactggtctttgatcaaggatggccataaaggcaattgagtt

SEQ ID NO: 52268 - DNA, 339 bp, Glycine max
gaatcggggttcatagttactgtgaagaggttgaaagatgctaggtatcctgccttggaagagttcagggctcacattcaagtccttgggagcctcacccaccctaacctggtcccactcagggcttatttccaggctaaggaggaacgcctcctcgtttatgattactttcctaatggcagcctcttctcccttattcacggatcaaaaacatctggtggggggaagcctcttcactggacatcctgccttaaaattgcagaagatctagcaacaggcatgctatacatccaccagaaccctggcttgacacatggaaacctgaaatcttctaatgta

SEQ ID NO: 52269 - DNA, 372 bp, Glycine max
gcattaacactatagtgatttgactttttccaaacttggttttcatgatatcatggcggtagtttacaagaatgggccagttgaagttgcatttaccgtttatgaggattttgcttactacaaatcaggagtttacacacacatcactggttatgaactaggtggtcatgcagtaaagctaattgggtggggaacaactgatgatggggaggactattggcttttcgcaaatcaatggaacaaagaatggggtgatgatggttactttaagatccgaagagggacaaaccaatgtggaattgaagaggatgtaacagctggcttgccttacaccaaaaacctttgtatagaggtgactgatatggatgctga

SEQ ID NO: 52270 - DNA, 473 bp, Glycine max
tgaatatgcaaattttcaatcttatcttctagaaaatgatactgagatttttgtgtgtgtgttaatgtaattttaagaacaaacgaggtggaaaagtgaagttgcaatccatagtgatgcctctttctgagtttgaccatgaggaaaagggagatgccctgtatgcaatggaacttgctctgtcgttggagaagctaaccaatgaaaaattacttaacttgcacagtgttgcctcaaagaacaatgatgtgcaattggcagattttattgaaagcgagtttttgggtgaacaggtggaagccataaaaaaaatctctgagtacgttgctcagctcagaagagttggtaaaggacatggtgtgtggcactttgatcagatgctgctgcatgaggagggcgttgctgcttgattatctttctttttagtatttgaattgatatttttaatgcacttccatcaaattaaatcaatt

SEQ ID NO: 52271 - DNA, 405 bp, Glycine max
ttttaaatgggtcctggtgctctgcagtcaacatatgttgagaagaaaagattcacgcctgaatccgatagttcatctttaactgagtggaaatgggaaggaaccattgctaaaggcggaacccctgtttgttgtgcacgctgcttccctgttgggaaagtcctagatatgatgttacctgagttcttggattgcactgcaaaaactggtctagatatgctttcaaagcattactaccaagcagttggtgtttgggttgttttctttgtgcctggaagtgatgctgacatggaatgctacaatgaatttatgcattatctggaggaaaagcagcgcgctgcagttgccaagttggatgacaagaccaccttatttcttgttcctccatcagagttctcagagaaa

SEQ ID NO: 52272 - DNA, 419 bp, Glycine max
aaagaagttcacaggtgctgtcaaggagatgctatgcgtcagcctcagatctccccccacaccaggaaattggaatgccttctctctcacctacaatgacagaggttcctactattttaatcttatgagattgctgtatagtgggtcatgatttctcctaaattattcccaatgatattcagggtaacattgcaagatggttgaagaaagaaggtgataaaatctctcctggtgaagtgctctgtgaagttgaaactgataaagccactgttgaaatggaatgtatggaggaaggttatctggccaagataatccgcggggatggggcaaaagaaattaaagttggtgaggtaattgctgtaactgttgaagatgagggagatattgcaaagttcaaagattatcaaccttcagcatct

SEQ ID NO: 52273 - DNA, 359 bp, Glycine max
cactgctattttctggacagattatgttgcaaccaggtggtatagggctcctgagttgtgtggatcctttttttccaagtatacaccagctatagacatatggagcattggctgcatttttgcagaacttttgacgggaaaacctcttttccctgggaagaatgttgtccatcaactagaccttatgactgatcttcttggaactccatctcttgaagccattgctagggtacgaaatgagaaagctcggagatatttgagcagcatgcgaaagaagaagcctgttcctctctcgcagaagtttcctaatgcagacccccttgctcttcgtttgtagaaaaaatggtggcatttgagcc

SEQ ID NO: 52274 - DNA, 471 bp, Glycine max
  unsure (1)..(471): unsure at all n locations
gtcgagctgagaataccagttgctccagtagccggcactaaacaacatggcggacaaggcagtcaccatccgaaccaggaagtttatgacaaacaggcttctctccagaaagcagttcgtcgttgatgtccttcatccagggagggctaatgtttccaaggctgaactgaaggagaagctgggaagaatgtatgacgtgaaagacaccaacactgtatttgtcttcaagttccgaactcattttggtggtggcaagtccactgggtttggtttgatctatgattcagttgagaatgctaagaagtatgagcctaaatacaggcttatcagggtgagttcattaaatctttctgtgtcaattgtcattataatttttttggctttgtttgaatgcttttttttttatattagatggtctgtttataaatttataaagcgatcattntctatcattactgcttcttttttctg

SEQ ID NO: 52275 - DNA, 382 bp, Glycine max
ctcgcgatattgagctggatatccactttatcaagcacgggcttcatcaaacttcccgctctggaatagctatgcaagctggtcgaaacacagtagcaactgggggtgattcaaatgtttggctggctggacactctctaggatcagcgatggcaatgctgactgggaaaaccatggtcaagaatgggatgttgattgaatcttttgtttccaacccaccatttgtatctgctccaatagaaagaattaaggatgagagggtgaaacatgggattcgatttgcgggcagcgttataacagctggactcaccattggtatgcaagccaagcagccgcaggagttatctgctgatccatttgctgctttggctgcctgggtccc

SEQ ID NO: 52276 - DNA, 427 bp, Glycine max
  unsure (1)..(427): unsure at all n locations
atagccgcgagcgaggtttcgtttcgttcagttcacacattctaatctctatcgattcctcttccattttctcaattcactacaccccagtttatgggaagccaacttgtgtgtaatgggtgtaggaacatcttggtttaccctagaggagcaaccaatgtttgctgtgcattgtgcaacaccgttacctctgttcctcctcctggaatggacatgtcacaactttattgtggaggctgtacgacattgctaatgtacacacgtggtgctacaagtgtgagatgttcctgctgtcacactattaaccttgtaccagtactaggtacctaccatatatttctctgttgccagatttgtgaagcttattagctcaatatttattttgctctactaaatgctgatttgcttgacaaactatntacattta

SEQ ID NO: 52277 - DNA, 402 bp, Glycine max
gccacgaataacgaaacgggtttggatacagggtggggctgccgttacccctctggactgggcctgcgtctttgtcgtcacacctcagctaccccgactccgtggaatcctcgcctcgctcccgcaacaccgactcctgggacgagcccttcgcgccggcgtccaccaagctccgtctcatgtgcagctacggcgggcacatcgtcccccgcccccacgacaagtccctctgctacgtgggtggcgacacgcgcatcatcgtgtccgaacgcgccacctcactcgcagacctctccatgcgcctatcgaaaactttcctgaacggaagacccttcacgctcaagtaccagctccccaacgaggacctcgattgcctcatctccgtcaccaccgacgaggacc

SEQ ID NO: 52278 - DNA, 441 bp, Glycine max
cttgcatctcccatgcatgactgggtttttagacaacttgactgaagaactattatcacaccagatcacaactccactgtcttgaggtttgccaagttgatcaaggattcttttgagccaaacagcttgacaagcacacgatgctgctgctacaaattctgcctcagtggtggataaggtcacaatggcctgcttcttagatgaccaagagattggtccagatccaaaggtgaaaacatatccagaagtggattttctgtcatctaaatcacctgcataatccgagtcagtccacccttgcaaatttactcttccattctgtttcttgtaccacactccaaactccatagtgcccttcaaatacctcaaaactctttttgctgcagctaagtgaagttcagtgggtctatccatgtatcttgcaatgagacaaacagaaaa

SEQ ID NO: 52279 - DNA, 453 bp, Glycine max
  unsure (1)..(453): unsure at all n locations
ctcttcttctcttgcggctagggttttagcgcagcttcttctagatttaaggaagatgggtaaggaaaaggttcacatcagtattgtggttattggccatgttgactctgggaagtccactaccactggccacctgatctacaagcttggaggcattgacaagcgtgttattgagagatttgagaaggaagctgctgagatgaacaagaggtctttcaagtatgcctgggtgcttgataagcttaaggctgagcgtgaaagaggaatcacaattgatattgccttgtggaagtttgaaaccaccaagtactattgcacagtcattgatgcccctggacacagggatttcatcaagaacatgatcactgngacatcccaagctgactgtgctgttcttatcattgattccactactggtggttttgaagctggaatttcaaaggatggacagac

SEQ ID NO: 52280 - DNA, 469 bp, Glycine max
gtggaatatggcttccttaagctcctcattagtgctgctccttgcagctctaattctatcccctcaagttcttgctgactatgagaagcccccaatttacaagccacctgtttacacaccgccagtttataagcccccagttgaaaaaccaccagtgtacaaacctccagtttacaagcctccagttgaaaaaccacctgtttataagcctccagtttataagccacccatttacaagcctccagtgtataaacctccagttgaaaaaccaccggtttacaagcctccagtttataaaccacctgtttacaagcctccagtgtataaacccccaattgaaaaaccacccgtttataagccaccagtttacaagccaccagtgtacaagcctccagtgtataagccaccagtttacaagccaccagtgtacaagccaccagttgagaagccaccagtatacaaaccaccc

SEQ ID NO: 52281 - DNA, 241 bp, Glycine max
tcggtaagctttgcttcggaaaacatttcagagagcacgccttgcggcacctagtataatattctttgatgaggctgatgtggtagctgccaaacggggtgacagctctagcaatagtgctacagttggagagagacttttatccactctgctgactgagattgatggcttagaagaagctaaaggaattcttgttttggcagctacaaatcgcccctatgcaattgatgctgcactcatg

SEQ ID NO: 52282 - DNA, 351 bp, Glycine max
tcgcggacgcgtgggcggacgcgtgggtgagcacattgcaatggttaagggtgacattggggatggacatgatgttcttgtaagggtacactcagagtgtctcactggagacatatttggctctgccagatgtgactgtggaaatcagcttgctcttgcaatgcaacagattgaggctgctggtcgaggtgtattggtatatcttcgtggacatgaaggaaggggcattggcttgggccacaagctacgtgcctataacctacaggatgatggacgggacaccgtagaagccaatgaggagttgggattgcctgttgactcaagggaatatggaatcggtgcacagatttt

SEQ ID NO: 52283 - DNA, 341 bp, Glycine max
aatgcaaaactttccgactttggccttgctaaggatggaccagttggagacaaatcccatgtttctactcgagtaatgggaacatatggttatgccgcacctgaatacttagcgacaggtcatctgtatatcaaaagtgatgtttacagttttggtgttgttcttcttgaacttctcactggaagaagatccttagacacgacatttgatggagagcagaaacttgcagaatgggctcattctttgctgaaggaaaagaagaaacttctaaaaatcatagatccaaggttggatggtgattatccaattaaagcagttcacaaggctgcaatgcttgcata

SEQ ID NO: 52284 - DNA, 239 bp, Glycine max
gcgctgaagattctgctgaagaattacttggggtgtgaagagtgtgagcttgaggagtcgattttgaagcggctggaggaggttgtcgacgtggcccggatgactccggcggatataagcgaggttttgatcaagaacagacgcaagagagagaaggcggtggaggagttgttggagactttgaagctgagagcggagatgaatgaaaaaaatggagttctgagggtgaataatggggt

SEQ ID NO: 52285 - DNA, 406 bp, Glycine max
ggtattcacagctgatgaaacttggtgcaaatggcttgatgattgtgctaatgggcggattccaggttgcagtgaccttaaaatgcaaagctatgccagggcagcacttttaaatatgttttgcaatgaccagcctaatcgaaaatctgaaagtggaagtggaggcccttctgatggtggtgtaccaaattataggaactcttgtcctcgttatgatgacatgatattcttgataaattctcatcttccccactggaaatgtcccaaagaaacagatcaacaagaagctttctcagaggagatatctctgtttacttctactgaaatgggggatggaacagaatctgtgaatgacagcaacggttctatttctaatgattcaactaaaagcagcccagatgcagat

SEQ ID NO: 52286 - DNA, 412 bp, Glycine max
cggacgcgtgggcggacgcgtgggcggacgcgtgggcggacgcgtgggtttcaatatgaggaaccccactcacaagtcccctgatacctctatgagttggatgttcaccttgacagattcctaagttcagcctccaaagcaaagatatcctctcccttttctcgatcagtgcttcacagcattctaatacaactaactgcagcatcaaaatgcaagaagggaactctaagatactggctcagtgcaggtcctggagatttcttgctatcatcagcaggatgtccaacatctgcattctatgcagtagtcattgaccaagatatttcccaatgcaaagagggagttaaagtgattacttccaacataccaatgaagccttctctatttgccacagccaaaaatgtgaactatc

SEQ ID NO: 52287 - DNA, 320 bp, Glycine max
atgatattgaagcgactattcattgtgcagagtggctttctattgttggtggatctagcacaagagagcagcgactaagacgtgaagaatcgttacctatttttaagaggagactcttaggaggcttgctggattttgctgctagagaattgcaggttcagactcaaattattgctgcggctgctgctggtgttgcagctgagggtttgtcaccaaaagattctaggctgaagctgagaatgctgcccagctgtctgtggctttagtagagaatgccattgtgattcttatgcttgttgaagatcatttacgactacaga

SEQ ID NO: 52288 - DNA, 184 bp, Glycine max
  unsure (1)..(184): unsure at all n locations
ctaattgttcgtctgagcagcatagtgagaatcgcaatcaaacccgagcagcagagtttttgggccanccattattccctggtgaaaatgcagttcaccagcttgtacatattataaaggtgcttggcacacccacccgagaggaagtacgctgtatgaatcccaattacaatgactttaggtt

SEQ ID NO: 52289 - DNA, 282 bp, Glycine max
ccaccaatccaaatcttacgctggctctgctctttttgcttctctacttctccttccacttactccctctcttcctcgcacttgattcttcttctggttctggtatggatgctgctgcaagtcaaagtctctatccattgcaccgttgcaaaactgttcacctggttaggcatgcgcaaggagttcataatgtagcacgagagaaaaaccacgacgcatacaattcttatgagtttgttgacgcacacctaacctctctcggctgggaacaggttaataatc

SEQ ID NO: 52290 - DNA, 355 bp, Glycine max
tttctcacgcgtccgatttcaatgattttgtattttaagaaaaacctttagcctggatatgtctcttatgggtttataattggggcgaaatggtttttcattccaaatatataagaacatggaggagacacgagaagatgcagggccggcagagcaagggccatctaatgtgtcggggcggccttcagattttggtgaaaaatttggatctgattctttgggttctcaggatgagatcttaagtgataaggagtctgctcgacatttggacaaagatgttttgtgttctcagaaagcatcacaaacactgtggcgcattggagtgctttcagaaccaataccaaatggtttctat

SEQ ID NO: 52291 - DNA, 415 bp, Glycine max
cttatcgcttccgaacaaattggaaggtagagaagttgtgaaaaagaaggcttttgttcctcctcctcgttttatgaatgttgatgaagcaagggaactgcatattcgtgtggagcatagacgcgatgcctatggggaacgatttgatgcaattggaggcatgatgttcaaagatggattcttatacaaaactgtatcgataaaatccattagtgctcagaacatcaaacctacttttgatgagcttgaaaaatttcgtaaaccaggcgaaagtggagatggtgacgtagctagtctgtcaactttgtttgcaaacaggaagaaaggccattttatgaaaggagatgctgttattgttgttaagggtgatttaaagaacttgaaggggaaggtggagaaagttgatgaagataat

SEQ ID NO: 52292 - DNA, 313 bp, Glycine max
  unsure (1)..(313): unsure at all n locations
attaaattgtattggttttggctatgtattttggccatcaaccaaaagttgcttatttatgtaattagttaatccttgcggtaagtattgctgtgctgctgagctgtatggtgcagttagtatggctcaaattccggcctgaatccgttgtgtatattctnnctttacgacccatcaactactttttcgtctctgagcttaagcttggaatcaaaggcattgccttaggcgctgtttggactaattttaacctcggtggttcgttgattctctacatatgggtctccggcgtatacaaaaaaacatggccagg

SEQ ID NO: 52293 - DNA, 432 bp, Glycine max
  unsure (1)..(432): unsure at all n locations
cttttcgatctctcccccacaaaattagggtttagacctagatccggccttcatgttttggaagctcgcatccctttctgcttcctcccccgtggagacaatattagacaaggagaatttcactttggaagagcttctggacgaagaggaagtgatccaagaatgcaaggccttaaacagtcgtcttatcaactttctgagagatcaagcccaggttgagcaattgttacgatacattattgaagaaccaccagaagatgctgaaaataaacgggccttcaagtttccattcattgcctgcgagatatttacatgtgaaattgatgtcattttgaagaccttggttgatgatgaagagctgatgaacttattattctctnttttggaacctaatcgctcacatagtaccttgttggctggctactttagcaa

SEQ ID NO: 52294 - DNA, 286 bp, Glycine max
tcgcggacgcgtgggtggaacaaatatccttccctatcccattgactttgacactgaacccattgggatagggaaggatggaacagagatcttcttcaaggatatttggccatccagtgaagaaatagcaaatgttgtacaatcaagtgtgctgcctgatatgtttagggacacatataatgcaatcacccaagggaatcccatgtagaataatttatctgttccaacgggcactctttatgcttgggaccctacatcgacttatattcatgagccaccttatttt

SEQ ID NO: 52295 - DNA, 422 bp, Glycine max
tctgttctctaggtctaaaaagatacagtttctccgatatcaagaaaataaccaactccttcaaaattaaactgggagaaggtggttatggttctgtctacaaaggaaaattactcaatggttgctccgtggcagtgaagatactgaacgagtcaaaagagaatggccaccagtttatcaatgaggttgctagcataagcaaaacatcccatgttaacattgtctctctccttggattttggctagatggaagcagacaagctctattctatgagttcatgtccaacgggtcacttgaaaaatacattcacgcgatgacagttggaacaaaaactactaccccatccttgagttgggagagattgcaccagattgcaataggcatagctcgaggactagagtacctgcacaaaggatgcaac

SEQ ID NO: 52296 - DNA, 427 bp, Glycine max
tttcccacgcgtccgcccacgcgtccggctaaggctgctgaagctggagcgcataaaggactacctcttgatggaggaggagttcgtggcgaaccaggagaggctgaagccgcaggaggagaaggccgaggaagacagatccaaggtcgatgatctccgaggttctcctatgagcgttggtaacctcgaggaactcattgacgaaagtcatgccatagtttcgtcctcggtggggcccgagtactatgttggtatcttgtctttcgtcgataaggatcagctcgagcctggatgcgctattttaatgcataacaaggttctctctgttgttgggcttcttcaagatgaagttgatccaatggtctctgttatgaaggttgaaaaggcacctttggaatcatatgctgatattggtggtttagatgct

SEQ ID NO: 52297 - DNA, 109 bp, Glycine max
ggttgacacactctctactcactcacctgatgaggagtacttgggtgagaggcaacaaccttccatttggtctggcgacgctgagattgtagaggcgttctacgatttc

SEQ ID NO: 52298 - DNA, 417 bp, Glycine max
gattccttcacgaattgactaactgcaaatgtgatatctggtctagtgacagtgaggtaattaagcttgcctactagacgacaatatcttctagggcctttgaatggctccccctgacttggaagaagcttcatattaggatccatggcagtatgactcaggaataattttgctaggaaatgacaattccagatgaggattgagcaactttgatgccaaggaagtacttgagggggcccaagtccttagtctaaaagtgactatgaaggtgtgagatttgaggggtaggatacctgcggactcatcgccagtgatgacgatgttatcaacatatacaatgggatagaggcatagtctagacttagaatgaaggaaaaatactgagtgatcagcttcacattgagtcataccaaactc

SEQ ID NO: 52299 - DNA, 373 bp, Glycine max
gttaaaccgtgctttacccaattttcttcctggtgaattttccacggttcagtcttcaaaatcacatttttctcgatcttcaccttctggggtgctttttttttcttttgtttttcgccatggaatcgaaaaaccctgcgaggtttacgctggggaagcagtcgtcgctggccccagaacgccataacaaagaagcagagctccaaaacgatggagaagttgttgatcagggtgtgaggttgatgtattcggcattcgaaggcgatgtagatggaatttgtgaggcgttggagtctggtgtgagtgtgaattacaaggatattgataatcgcactgctcttcatgtcgcagtgtgtgagggattcactgatgt

SEQ ID NO: 52300 - DNA, 417 bp, Glycine max
gttaccaatcatacgcaagaacagcattggtgatggaaagaaggggtggtgatgttctctctggtggtccccattcactgcgagcattaacctttgacaatgaggggagacgtcgactaatatctgagattcgccaagtcttgatggcaatgcggaggggtgagaacttacgagctgaggattatatggtctttgaccaccctttcttatatcatggcatggctgaaatgcacgacaggcacagagaaatgcgccttgatgtcgacaacatgtcttatgaggaattgttggcattggaggagcatataggagacgtgagcactggattgaatgaggatgtcatcattaagttgatgaaacagagaatttacgtgcgtgccattatcatgacagactcttatacagatctggaacctt

SEQ ID NO: 52301 - DNA, 334 bp, Glycine max
ttaaggttttttgcagcaagggagcaatcccagtctggtcaggaggaggctgaagagtggaagcggaagtatgacattgctgttagagaagcaaaagctgctctagagaaggcagcaattgtgcaggagtacacaaacaagcaatcacaattgagggaagatgctttaagagaggaattttctagcactttggctgaaaaggaagataaaataaaggagaaaactgccaaaattgagcatgctgagcagtgtttaacaactttgaaattggaattgaaggctgctgagtcaaaaataagaaattatgagtcagagatatcaccactgaggcttg

SEQ ID NO: 52302 - DNA, 396 bp, Glycine max
tttccacgcgtccgcccacgcgttcgcccacgcgtccgggaaacatgtactctcttgagtccttctatgacttccttagagacaagtacgttgaggccagcatgtttgttgtcccaaccaaactcattgatgttgtctctaaggaagtcatagaaggaaacatgtactctcttgagtcctacaagtcctcagcagagagcttcatttgcaccctcatacccgaatcaccaagctcacacatagagtacacgccaggtggacttgtgtacagacccggaggcagcaacttgcaacatgcaacttcaattgctttccttgaattggtctatgccaattacctaacacacgcttcacaagccatcaattgtggcaatgtctatgttagtgcacaaacac

SEQ ID NO: 52303 - DNA, 371 bp, Glycine max
atgggattgattgtcagttcccgcaaagattcgctccaacattttaagaagccctgggctcatgagcatgaacctgttagaaatcttgtagatgctgttaatgtatgatttcttatctttctgttcattacaccacacatacacagcagaaggttacaatgttcatacatggtcaatgttatcttctcagaaaattaagccaacagtgttgattggaacatctggacaaggaagaacttttactaatgaggtgattgaggcaatggcttctattaacgagagacctattattctttctctttgcaaccctacgtgacagtcagaatgcactgctgaagaagcttacaagtggagccagggacgtgccattt

SEQ ID NO: 52304 - DNA, 321 bp, Glycine max
ttgtacgcgtgggctcaaatatgtgcatgtgattgttttaggcatcgatggactggtcgatatgaggctcatttgtgggataagaattgctggaatgaatcacagagcaagaaaggaagacaaggctcttcattattttgctctctataatctccatatagatttctgatttccttcacttatatgattatttgatttattgtcatattaattatgttgggttggttgaaaatggctatggaaaacaactggatgcagtatatctaggtatgatttgagagtattaattaattagcttgcatatataacaaaaaccttcat

SEQ ID NO: 52305 - DNA, 324 bp, Glycine max
tttacgcgttcgcccacgcgtccgatttatgcattccatttcagttccaaagttgcaacagaagagagaggaattttatggatattcgaataactccttctcggggtggggatcctcctaccacagtcaggtggattcgtctaggctttctgatttttctggctcatttaatgaatcaatgcatagtcagagtttgcagattgttccagtgcagaataaagggtccttgagagttttgctgctacatggaaatttagatatatggatccatgaagccaagaaccttccaaatatggacatgtttcacaaaacattaggagatat

SEQ ID NO: 52306 - DNA, 337 bp, Glycine max
ttgagatattcaacagcttgcttggtacaggagaacaccatttctaatgtttattgggggtcttgtgccttttagtgcaatagtcctgcaactacaccaggcatatgctagtatgtggggctacaaaatatacactcttcctagcattttgtttgccacattcattcctgtcattttgatcattgcacttgtcagtattggcttgacatacattcaactatctgcggaagaccatgaatggtggtggagatcagtgctgtgtggtggctcaacagccattttcatgtttgggtattgcgtctacttctatgtgagatcaaatatgagtggattcttg

SEQ ID NO: 52307 - DNA, 421 bp, Glycine max
tgtcagaatgctatgcttcacccaccttcttgcccatgttttcgttgctatgacaacaaaagaagaggtccagtgccggcacctgctgcattcggtaacagcagattccctcataccccaaatgattctatgctataccgtcatgagattccaggggcagttggtccacatgttcataatgctagaactgccattcctgctgtgagtttgcatgaaaaacaactgcatacaagatggcccagagactacaattctgagatgggtggatttgttggaagccgtcctcgaaaagtagtgcctggtagtggtggtcgtcattgccttcctatagctggtggttctcctttcatcacatgtcatatttgctatgagttactgcaactgcctaaaaagacactggtcatggtgaaaaattgtcagc

SEQ ID NO: 52308 - DNA, 273 bp, Glycine max
gctttgtgaacgtgtgaaaaactaagaatcagagagcataatgtgagggatcattcacaagattggggagacccttcatgtgggagggcacaagaaggcggaggagcataagggtgagcaccatgctggagaatacaacggggagcaccatggtgaacacagcagtgagtacaaaggagagcatgatggagaacacatagctgtagagtaccatgatgagcacaagccagagcacaaagaggggtacctagacaaaggcaaggacaagatcca

SEQ ID NO: 52309 - DNA, 283 bp, Glycine max
cactagggatggaattgtaatgcctgcttgtgttcctggcctggtttcgagcgttgtccttacaaatttcacacaatctctctactcgggtaatctcaatgactccaagtttacaggaattggtattggttcagaagataactggattgtagtcgtactgaccactaacactcccgaaggaagctttgttcctgagactgagactaagactgacagtggtgccaatttcgtttctaaaattggatcgatttactgctcaatgtttttgttagttggtaatctt

SEQ ID NO: 52310 - DNA, 495 bp, Glycine max
gttccttcgatggaattcgtggcttcttcttcttccttctcacagtcgaaaccttcatcatccttctcaaaatcgaaacccaaacggctgtacgatgtgttcataaattttaggggagaagacactcgagggaagttcgtttctcatcttcattatgccctctcaaaagctggagtcaacactttcattgacgacgagaacctacttaagggaatgacactgaaagatgaactgatgcgagcaatagaagggtctcagatatctttggttgttttctccaaaagctatactgaatctacttggtgtcttgatgagcttgaaaaaattcttgaatgccgcaaacttcatgaccaaatagttatgcccatattttacgatattgaaccatccgttggtcgacatcagaagggtgcttttggaaaagctttagaatcagctgtagaaaaaacatattcaggagagcatgcggaacaagtgttgtggaggtggagcagc

SEQ ID NO: 52311 - DNA, 485 bp, Glycine max
catcttgtcatgttttataaatatttctgaacttcttttttaaatccttgtttctatttattcaggcatatgtgcaacaactagagagcagtaggttgaaactgatatcgccagcagggaatatttatttcaagtactggagatcaggcacagtcaatgaatggaaatggcgctatggcatttgatgtagagtacgcacgatggttagaagagcataatagacaaaccaatgagctaaggactgcaataaattctcatgctggagatattgaacttcgaaccattgttgacaatttcatgacgcagtttaatgatatcttcaggctgaaagctattgcagcaaaagctgatgcttgccagattctgtcaggaatgtggaagactccagctgagaggtgtttcatgtggattggaggctttcggccatccgaactcttcaagcttcttctaagtcagttggagcctttagtcgagcaacagatgga

SEQ ID NO: 52312 - DNA, 373 bp, Glycine max
cccacgcgttcgcccacgcgtccgcccacgcgtgcgcccaggcgtccgtctctctcaccaaagccttcctagaacgaaaaaaaaaagaagagcaattgtccctcaccaaagaagaagaagcaaacaatggccgatcaacttaccgatgaacagatctccgagttcaaggaagccttcagcttgttcgacaaggacggcgatggttgcatcacaaccaaggagctcggaactgttatgcgttcattggggcaaaacccaactgaggcagagctccaggacatgatcaatgaagtggatgctgatgggaatggtaccattgacttccctgaggtcctaaatctcatggccaggaagatgaaggacactgattctg

SEQ ID NO: 52313 - DNA, 409 bp, Glycine max
caacacacacatcctctctgatcagtgcacctgggttctgttcttgagccatggctcctactacctcccagcgagccacgctagccaggctctgcagctccaaggactggtccaaggccattcgagtcctcgattcgctcgtttctcagtctggtgcaatccaagacatctgtaacagggccttctgttacagccgattggagctgcacaagcacgtaattaaggattgcaacaaagcgcttcagcttgacccctcgcgacttcaagcctacattctcaaaggtcacgccctttctgcattgggaaggaaaacagatgctctgttagtatgggagcaaggttatgaacacgcccagcatcagtctgcagatttgaagctgttgctagaactggaagagcttttgacgac

SEQ ID NO: 52314 - DNA, 402 bp, Glycine max
ctcacgcgtccgacactctctcaacacatgctttgcttagatcacagaaaatgttgtgaatgagagatgcgtgttgctagcagtttgactgactgcaaagttgaattggtatgctactaagggggttctgctggctgtcaaatgatgtttaagattcgatatatggtaaaaataaattggaaagtatggaagaaatacagtctcaatcagataattatagatcttcatcatcgtcggcaagcagcccggcaagtagggtgccatcaagtaactttttctacctgcgtaaacctggttcacttaggcatcccatctcttttgaggattcacctgagtgggaggatactgatattgatgctagagttgaggaaggaggtgactctattaatgttgcaacaacac

SEQ ID NO: 52315 - DNA, 311 bp, Glycine max
cgttcgcgtgggcggacgcgtgggcggacgcgtgggaaacagagcaaagagagagtgtgtgaaaagtgaaacaaaaaacagaacaacaatggcgacacttaaggtttctcagcctcttccccccgttgcagatgattgtgagcagctccgaaaagccttctcatgttggggaactaacgaggagctgattgtatcgatcttggctcataggaatgctgctcacaggaagcttatcagagaaacttatgcccagacctatggagaagatcttctcaaggccttggacaaagaactcacgagtgattttgaga

SEQ ID NO: 52316 - DNA, 382 bp, Glycine max
tcgattgctaggagaatgcattttgagtatagcactccaaagaagaaaaccagaatttgaatatgacgttagggtttgagggttatagttataccacaacacttggaaggaagagggtcgtgttattacacaatgaagcttcttctctcaactctaattcggcggtgaatccattgaagagaatgtgcagcggaaaattcacttttgactctgaaaggtctcgccttgaggcccttcctcttgatgttctgattagggtgttgtgtggtgtcgatcatgaagatttggagcaacttgttcgtgtctcaaaaactgttagagaagcggctgagattgctaggagaatgcattttgagtatagcactccaaagaagaaaacttt

SEQ ID NO: 52317 - DNA, 435 bp, Glycine max
tctaagtaggcaacaaaggggttcagccaagagattggaagaggtgcaggagggattgtgtacaaaggcattttatcagatcaaagacatgttgcaattaagagactctatgatgctaagcaaggagaaggagaattccttgctgaagtgagcatcattggaaggctcaaccacatgaatttgattgaaatgtggggatattgtgctgagggaaagcataggttgttggtgtatgagtacatggagaatggttctttggcacaaaatctctcatccaacacacttgattggagtaagagatatagcattgctcttggaacggcaagggttctggcatatcttcatgaagaatgcttggagtggattttgcactgtgacataaagccccagaacatacttcttgatgctagttatcagcccaaggtagcagatttt

SEQ ID NO: 52318 - DNA, 476 bp, Glycine max
ttcgaggagtactttatcttcatcgagactcaagactaaggattatacatagagatcttaaagcaagcaacatcttactagatgatgagatgaatcccaaaatatcagactttggtttagctagaattgttagaggcggcgatgatgatgaagctaacacgaaaagggttgttggaacttatggttatatgccgcctgagtatgcaatggagggaattttctcagaaaaatcggatgtttatagctttggagtgttattgctagaaattgtaagcggacgaagaaacaccagcttttataacaatgagcaatcacttagccttgttggatatgcatggaaactatggaatgaagacaacattatgtctataatagatcctgagatacatgatccaatgttcgaaaagagtatattgaggtgcatacatataggacttctatgtgtgcaagaacttacaaaagaaagacccacaata

SEQ ID NO: 52319 - DNA, 436 bp, Glycine max
gtttattctcttaactggcaaatatgtgttgttaagcttccgattgtctttaatgctctcaaagacatcttggcatctgaacatgaagaggctatatacgcagccactgatgcattcaaaaacatgataaattcttgtattgatgaacgattgatcaaacagggagtggatcaaatcagtttgagtgaaaacaaagaatcaaggaagtcagcgccaaccatcattgaaaaaatgtgagcaactattgagagcttacttgattatcattatactgctctctgggacagagtatttgaaattgtttgagccatgattcatagattaggaaatcattctccttattttatgagaggaatactcaaaaacatggaagacgtgcagaagcttcctgatgaagattttccatttaggaaacagctgcatgaatgctttggat

SEQ ID NO: 52320 - DNA, 509 bp, Glycine max
  unsure (1)..(509): unsure at all n locations
gcatggcttcatgtgacttacacttcacttcaactctctagtgacagagaaggaattaagagcctcaagaagtggtcctaaacacagtacagaatctgtcaacgcacatagtttttattctttcgcctcgattcatctgatatggtcctttagacgataacatagtcacatcactagaagggtacaattctttagaggggttagtgctatttaatttgcagaattatcacacatgggagtggtaactgttggtgaattgaagcccagcatttcaggaaaaaggacatttcgtccaagttcaagcataagacatgccactgaatggccaatatctgacgtctctagtgatcttaccatcgaagtaggagcatcaaccttcgcacttcacaagtttcctttggtttctcggagtgggagaattcggaagctgctgttagatgcaaaagattcaaaagttntacgcataagtctcccaaatgtgccaggtggtcctgaaggatttgaactag

SEQ ID NO: 52321 - DNA, 351 bp, Glycine max
cccacgcgtcctcccacgcgtccgcccacgcgtccgcccacgcgtccggtcggagctgtctgtgcaaatttgcgttgttcttcgcggcacacctcactcactgaacggtaagtatggcggacaaggctgttacaatccgaacccgaaagttcatgaccaacaggcttctttccaggaagcagtttgtcgttgatgtccttcatccagggagggcaaatgtttccaaggctgaacttaaggagaagctggctaggatgtatgaagtgaaagaccctaatactgtatttgtcttcaaattccgaacacattttggaggtggcaaatccactggatttggtttgatttatgata

SEQ ID NO: 52322 - DNA, 388 bp, Glycine max
gtttaggcggcagagggatgtgctcaacagaaggatcgagttctgcaagcagaaggacgccatcggaatggcagcgaggctcgccgagacaacgttctttgcgttcagggagtacaccgaggaggagctccggttggcgacggataacttctccgagcgcctcaggttgaagtccggcggggattggaccaatgtgtataggggacgctttaaccattccactgttgctatcaagatgctgccttctttgtcaccccaacatttccaatccaaggtgaggcttcttggtgatattaggcaacctcatctggttgccatggttggcttttgctccgagcccaaatgcatagttttggaatacatgcgcaatggaagcttacgagacatg

SEQ ID NO: 52323 - DNA, 425 bp, Glycine max
gtttatatatctgttaggcaacttcacttagtgccaattggctttaagttgatatctgacatgatatcagagcctatagcccatcttagttcttgcctattctagtaggctcgcctgtattggcaggcatatgtggagggggggtgttaggaagtcccacatcgcctgcctcagttcttgagcttcttcccgtggttctgggaagcatcctcaacttgtgccttcaactccaagatgggctgttgccaatggtgctggtgttatattgagtgtttgtgatgatgaagttgctcgcaatgagactactactttaacagcagctgctgtccctgcacttttgcttcctcctccaacgacagctttggatgagcatcttgctgctggattaccagctctggaaccatatgctcgtttatttcatacgt

SEQ ID NO: 52324 - DNA, 375 bp, Glycine max
cggtcgcgtggtttgacgcgtgggcggacgcgtggggggacgcgtgggttggaagaatcaacaatccggagcttccgcctaccgttctctctgatccaaaaagattaccagagactctacgatttcttctaccagtcttctggttctgtgctagacgaagcggaacgattggggatcacgcgcgatgaggcttgccataatttgttattcgccacgtgcttcaactccttcggcgggatgaagctgatcttcccgaacgtgctgaagtggatcggacgcgccggggtgaagcttcacgcgcgcctggcggaggagattcgctccgccgtgagaggcgccggcggggagatcaccatggcggcgatggagaacatg

SEQ ID NO: 52325 - DNA, 439 bp, Glycine max
atttggggtggctgaggctgtaaaggtcaacaggtggaagacaaaggcaccaaataaagtattagctttcgcatggaggttacttagagatcgactacctacaagggcaaaccttcacagacgacaggtggaattaaatgatacgagttgcgtgttttgcagtaatctggaggagaatacaggtcatgtgttttttcattgcagcaaaatcaatccgctgtggtgggaatcgatgtcttgggtgaattgcgtgggtcctctcccgcaaaacccaaaacatcatttccttcaacatatatttggggtggctgaggctgtaaaggtcaacaggtggaagtgttggtggctagcgctgacatggtctatttggcagcagcggaacaacattatcttttctaacgacatattcaatgctaacaaaatcatggatgatgcacta

SEQ ID NO: 52326 - DNA, 385 bp, Glycine max
ttctagttcgtgttcttcgtcgcaaatccgaagtaggatctctcttgttttttctctaggtttttcgcgatggcgtcgaagcgaattttgaaggagcttaaggatttgcagaaggatcctccaacatcttgcagtgccggaggcttgcctgagctgcaaattctttgaggcttgatgaagctgaaggagaaataattgttttttttgtagagtattgaattaatttttgccatggacaaaaaaatgtttaggggaatgtacaatcctaagcatatattgtttcatatattttaaggtgggaataggatacatagtccccaacatctccctatgcaattgtattcatgattcagcgttttgtttcctggatcatgcatctgttggc

SEQ ID NO: 52327 - DNA, 385 bp, Glycine max
ttgtacgcgtgggctgtatagatcacgatcggagacggttgattttgcggagaagtggaaattctataataattcgaataggttaggggagggtttgtgaattcataggaaaaatgggggttatgtccaggcgggttgtccccgtctgtggtaacctctgtgtgttttgtccttctcttcgtgcaagatcaaggcaaccggtgaaacgatacaagaagttcattgctgatatattcccgcgtaatcaggttgctgagcctaatgataggaaaattggaaagctatgtgagtatgcttctaagaatccattgagaattccaaagattactgacaacttggagcaaagatgttacaaggatttgcgtaatgaaaactttggttcagt

SEQ ID NO: 52328 - DNA, 486 bp, Glycine max
  unsure (1)..(486): unsure at all n locations
ccactgctctcaactcgatctgaggctgaaactatcatatatatatatataaccaattaactaatatctctccacaaagaaacattattcgacatggggcactgcttcagcaaacccagcacaaacgaaataccaatcaactatgattattcaccaccccctcatcattatcagccacgcccgcactcacactcagactcaaggagaacacaacaacctcaacttcaacctcaacctggttaccccaatcgtactccaaaatcagacccatctccatcatcatcatcatttggtgatcaagtcgcagcacgaatattagacaaaccatactttgacatcaaatctctttacaacctcgagagggaactcgggaggggtcaattcgggatcactcgtctttgcaccgagaagaccacgggaaggaaatacgctngcaagtccattccaaagcggaagctaagtaaaaaaaagcatactgatgatgtc

SEQ ID NO: 52329 - DNA, 460 bp, Glycine max
atcgagttctgcagccaccaccacaacaacccaatgcgtgagatcgaaaagccattgaagagctcggacatgcacgacgtggtctcggactgggacgccaactttgtggacattgagcaggacatcctcttcgagctgatcctggcggccaactacatggacatcaagagcctgctcgatctggcgtgcgcgaaggtcgcgagcatgatcaagggcaagaccccgcaggagatccgcgagactttcaacattgtgaacgacttcacacccgaggaagagagccaaatccgcgaggagaacaagtggtgcgaagaagcgtaggcggctagtcagtcaccgaatgcagaacggcgacgacccggtccttgggctcgattgccgttgtgcagcagtccgttcaccatttgcgctctgcatattagtcagctgattgattgagggagagcagcgagcagtcagt

SEQ ID NO: 52330 - DNA, 309 bp, Glycine max
ggaacatggctcgtctgctctcaattctgacataccgctcctgacttatggggaggaggatcctgagatatcttctgatagacatgcgctaattgatccgccttatgtgaatcatgggagcagagtccatccaatgccttataccgatccgtctattccattgcaacccagacccatggtccccaagaaagacattgctgtgtatgggtatggaagtgtggcttggaaagaccgcatggaagattggaaaaaaagacagagtgacaaacttcaggtggtgaagcatgaagggagcaatgatggaaattt

SEQ ID NO: 52331 - DNA, 416 bp, Glycine max
ctatttcgtctttccctattttatatatcgctgctgctgctgctgattatgattatgtttttgatggggatatacctcagcactcccaaaacagagaaggcctctgaagatggtgagaacgacaagcttcgcttcggtttgtcttccatgcagggctggcgtgcttccatggaagatgctcatgcagctcatccatatttggacgagtctacgtcatactttggtgtttatgatggccatggaggcaaagcagtttcaaaattctgtgccaagtatttacaccagcaggtgcttaagagtgaagcttacttagctggagatttaggcacatctttacagaaatcttttctcagaatggatgagatgatgcgtggacaaagagggtggagagaattagcagtcttgggggataaaat

SEQ ID NO: 52332 - DNA, 267 bp, Glycine max
ttgtcatggacatggatgtttgacagctacaatcactcgtttcaggcattcttggcttggtagtagccgccttgctttataaggtaacgaaaacacatggtcctaatgcatagatctgcactgcgccacacgcaggaggagcatgggctattgttggtcattggcacctgttatgggctcattaacttacacacaaaacactagggacaacggctgacacacatggaccaattttcacgatacaacttggttcatacaaaggtctgg

SEQ ID NO: 52333 - DNA, 261 bp, Glycine max
  unsure (1)..(261): unsure at all n locations
catgctctctaggatggttcttctgagntaaggattctgttggtaggccaattgcgtatttctattttgatccttatagtcgtcctgctgaaaaaaggcaaggtgcatggatgaatgaagtctttgctcgtagccgagtattatcgcgtgatggcacctcaacaagattgcctgttgctcacatggtgagcaattaaactcctccagtaggaaacaagccatgtctaatgacattccgtgaggttgagactgttttccatg

SEQ ID NO: 52334 - DNA, 418 bp, Glycine max
gcttgttattgatggagaaaggggtagtgagcatcgcagaaagttgctaccttcatataaagcacataggagaaaattcacgagacacatatcatctttgcaaagattttcaagtggccatgttgggaggtccctccaagttatcaatgatgttctcggaaaatgcaatgtgccagttataaaagttgatggccatgaagctgatgatgttgttgctactcttgctggacaagttctcaataaagggtttcgagtggttattgcctcccccgataaggattttaagcaactaatatctgatgatgtgcaaatagttatgcctttgccagagttacaaaggtggtccttctacaccttgagacactacagggatcagtacaattgtgacccagaatctgatctgagccttagatgtatt

SEQ ID NO: 52335 - DNA, 428 bp, Glycine max
ggtatatccttcctaaccgagaggaagtagctgtaaagagattatcaacaaattctaagcaaggagcggaggaattcaaaaatgaagtgttgttaatagcaaaacttcaacacaaaaaatttggtgagattagtaggattttgccaagaagacagagaaaaaatacttatttacgaatatgtgcctaacaagagccttgaccacttcttatttggtatgactcttcaatatttatttctactttaagttttacatttctattttttcatcattatttgaaaaaaatgttttgagtatgtttgaattatgtagctgatcataaattggtgcccacttatacttttcgaactttgttggctgatggtacgtattttatagattcccaaaagcacagacaattaacttggtcggagcggtttaaaatcata

SEQ ID NO: 52336 - DNA, 291 bp, Glycine max
gaggctgtgtacctgctcttggagccgatcaatttgatgaaaagaaaccaaaagagcacgcgcaactagccagtttcttcaattggtttttgtttagcattacagttggggcgagcttaggagtcacctttgtagtttatgtgagcacgggattccaatggtacaaaggttttatcatatctatgtcatgttctgctgttggtcttattttcattgcctcgggaaagagattctatcatgccactgttgccggagagagttcgttgttgatggttttacaggtgctggtgg

SEQ ID NO: 52337 - DNA, 243 bp, Glycine max
tatcgaagtcatctacaatcgaatccatcgcagattcacgggtagatgtttcattgaagatattcgagaagtttgtgaaacagatcgaagagggcatgttcatttgcaagaacaacttctttcagatgtccttaaaacacaggtgaacataaaaagcgttgggataggacgagctatgatggagagcaaactttctggaacagaggcactcattgtacttgatgatgttaatgagtttggtca

SEQ ID NO: 52338 - DNA, 268 bp, Glycine max
tttgtgcgggtgatactgtaaagttcaacatgggacttatactcttgcccgtgtgcagaaacaccataacttggctcaggtcgaccaagcttggctatgttgcaccttatgatgacaacatcaactttgataatacaattgccggggccatcgtgattggtatcatacttcatgccggtgatcaccttgcttgtgattttccaagacttgttagtccgtatgaagaacgttatgaaaagtattggtaaggcgtatttggtgatcataa

SEQ ID NO: 52339 - DNA, 445 bp, Glycine max
cttactcgtccgtgccattccgagcaaagaaaccaaaaggaaccttctctgtttccaaaccagtcatggcaagtatgtagaatgcctgctttctgtgagtaagaaattggacgtagagggcctagttactggggtcttctgcttcttacagctagctagcccagagctccaacaagcattacatattcagcgcctatccgagcaaactgccttgaagagattaaatgcattaagttacatgaaaaggcaaatcaggaatcctttgtgtggaattatattttcccggaaaatgttggagggtactgccttgggaacagagcagaaacaacttctacgcactagtgctcagtgccagcagcagcttagtaaaattcttgatgactcagatcttgatagtatcatagatggttacttggatcttgaaatggctgagttcactctgcat

SEQ ID NO: 52340 - DNA, 370 bp, Glycine max
gagagagaagttgagagaggagaaggcggacttaagggagggaattggtgatgataattaagcgtaactttagtattgcagaccagaataccctagctgatattgcctatcagcatgagctctacttaaagccatgcttatagtaaggggaaggttctcattgctagcaaagttccattgcctgattatcgcgcagatcttgatgagcgtcatggatcaacacagaaagagattaaaatgtccacagacattgagagaagggtaggaaatcttttgaatagctcacagacaactggggcaacactgtctagtcttccttctatatcagctgaccttggacaaaaacaatctgcagcccctataaaatatg

SEQ ID NO: 52341 - DNA, 365 bp, Glycine max
tttatgcacgaagagaaagtcatgttagacgaaatgatcatcagggtgggtcaaactctgatatcaagagagaactcgcctcgagtaaagaaagggaactttcatacgaatctgctcttttagatagggatcataaagaagccgtgcttcaaaggagaattgaagaatcaaagcaaagagaagcatacctggaaaatgagcttgccaacatgtgggttcttgtagcaaagctaaaaaagtcacagggagctgacactgatgtttgacattgatatgatcttgtattgtattgggagatttaagttaatccattatgacaattggatttcagtgggaaggatttgagcgagaggtgtgcaatgatt

SEQ ID NO: 52342 - DNA, 110 bp, Glycine max
gcctcactttgggtcaccaacggcacgtgcctttggggggccgaggccccctactgctggtcggcaaacggacagcgggcgcacgcgtcgattatagcccggattctgac

SEQ ID NO: 52343 - DNA, 417 bp, Glycine max
acatgacttcgttgccgtactcaggtgcccagctttccgcgaacacgtagttcattcccagcgccgccgccaaatccgacaatggcttcatcccattctcttcctcggccttcacatcttgcagccccaaaacatcagcgtccacttgcttcagaacctcaaccacagttctgttactcacgtgggccccaccacctacccacgaggaggccttgtcgtgttccgagaagctcgattgtcggcttcgcagcagcgatatctcgttgtctggtaaatttatggaaaccctcatcttcgatttcgccaacctcgccggctcttgtctgctccccacgttggtgtcgctgtcgcttactctgttcttcactgactgcgactgcgattgcgattgcgattgtttcagtatgcttctgggac

SEQ ID NO: 52344 - DNA, 409 bp, Glycine max
acttgtaaatacttttttctatgcctgcttgagcaatagccagttgccaatacttgttctgatggatgtttttactaaaattctgattttttaatgttgaaataataactcgtactgacacttcaccatgagaaaaaatgattttgactatctgagtatgttcgttaattcttagcgctagcatattgattgctaagcggacttgatgtgaatcgagtgatctttttttatcgctcatcgacatcaggtgaaacgaacattaggccaattcacaccagcccactgggacaaagacgagtggcatccattgcttggtccttggcgtttcattcaagtccttagtctttgcattgtatttttgacagtagagctcaacacattctttttgaagttttgtctctggatacct

SEQ ID NO: 52345 - DNA, 329 bp, Glycine max
cattcttgttggatgtggttacaacaagggaaccacactctttggatacggatatgatttcaggcaaagcaataggattggcaagggaatggaaggtcttaaaagccagttggcaactgctcacagagcttctgggggaagaaaagtcaatttgattccgcattccatgggaggacttatgatatcgtgtttgatgtcactttatagagatgtgtatacgaaatatgtgaataagtggatctgcttggcttgcccttcccaaggagccccagggtgcatcaatgattctttattaactggattagagtttgttgacggctttcaaagct

SEQ ID NO: 52346 - DNA, 427 bp, Glycine max
gtttctctacctgttcctcaatagatttttagttgttcctttatgtgtagattatagccccaagcggcatatgaggtggatatcctttggtatatagttgaggttaatttcattgccactgcctacaaatcgaccaaatagcattgaccctgcattgaaaaggtctggtagatttgatagtgaaattgatattggtgttcctgatgaagttggaagacttgaagtccttcgcgtacataccaaaaacatgaagctttcagatgctgtaaattcagcattcttaacttccatttctgttggtggatttttgtgattttttctttatcaatttttggtatgtctaacttactgtactggttctcctactgtaggttgatctagagagaattgcaaaagatactcatggatatgttgatgctgaccttac

SEQ ID NO: 52347 - DNA, 344 bp, Glycine max
ctgttccaaaagctgcgttcagcgtcctcccttcatcatcccattccccgaatccctttgtgcgtttcgcaatcccatacagcccccatcactcccagcaccgttctctcagaatctccagcgccctatccgatgcaaccacgaaatcctccaccgccgccgctgaagctttcgcctcccgattcggcctcgatgagccccgcaagggcgccgacatcctcgtggaggcgctggagcggcagggcgtgacggacgtcttcgcctaccccggaggcgcctccatggagatccaccaggcgctcactcgctcatcctccatccgcaacgtcctccctcgccacgaa

SEQ ID NO: 52348 - DNA, 286 bp, Glycine max
  unsure (1)..(286): unsure at all n locations
cggtcgcgtggtaatgtggcttgccatagtggaactgtgtattaatgagtttcgtgatttcaattgcgggttgcgcttgagatttacaatgtttcagtcgtgtatgtgttttattgacgagaacaatgtggcttggtggtttagtgatttataaattttttattgttgctatgtagttgcctcttttttattgacgagaacaacgttggattttttttttttaagtcaatgactcgagttttttctttntaaaaaaaaaaaaactaaaataaaaaaaaaaataaaa

SEQ ID NO: 52349 - DNA, 424 bp, Glycine max
  unsure (1)..(424): unsure at all n locations
cggtcgcgtggtgagagagcgagagagagagagagaatggcaggacttggtggcaatggtgatgtggcaggaagccagaacagccttgagatcgatggtttagctcgctttgctgttgaagaacacaacaaaaaacagaatgcccttttggagtttgaaaaggtagtaagcgcaaaacagcaagtggtttgtggtaccttgtacaccatcactttggaggcaaaagatggtgggcaaaagaaggtttatgaagccaaagtttgggagaaggcatggttgaacttcaaggaggtgcaagagttcaagcttgttggagatgcacctgcatagtctagtgcttaattaggttgcagaagagtgaagagtgagacagcctggctcgaatgggaaagcctaangatatatcaaagcatgctatatgtat

SEQ ID NO: 52350 - DNA, 439 bp, Glycine max
gttttcaggtccataatatgatgcaattactcattagatcagaaaatgacggtattctgtgtcccattccacagtaccctctgtactcagcctcaattgccctccatggtggctgcctggtaatgttttctccatacagttgcataatgcataatttaatttggtcactatatagatgcaccctgttttgatgattttataggttatgtgccatctttgaaaggacaaataagagaaatggtctatgtatatgtgcatgattgacatgaaactttgaatgcgaactatcttgttataatgttttggttggattatcagcttaacttcaatatctttttttctaaaggtaccttattatctagatgaagcaacaggctgggggttggaaatacctgaactcaagaagcaattggaggctgccaagtctaagggcatcaat

SEQ ID NO: 52351 - DNA, 105 bp, Glycine max
ccctcgcgtccggagaaacatgggtggcttaagctccttagtgctggtggttgcagctataattctatcccctcaagttcttgctaactatgagaatcccccagt

SEQ ID NO: 52352 - DNA, 422 bp, Glycine max
ggtctggttcgctgcttgtcactcctgccatggaataaagaagaaactgatttgcacaataaggatgctactggacaaagggtattgcatgcctttgaagttgatgtgtctatgagctctaatggtttttcttatatcataaagaatttgaaggatctagtgccagtattaataaatagtttcctggaatttattccattggttcatgctatggaaagtcttgaagggaagtcttttggttgtatgatatccattcttcatagcatatatcttatagtcaggtctattgcttatgggactgataaggattcagaatccccaagttctcaaggtggacctgatgcagctgtatgggatgttaacatctcttctacattcttgaagaaattatttgctcgtttccccctcaacccggttgatca

SEQ ID NO: 52353 - DNA, 304 bp, Glycine max
cgttcgttttgggcgggcgcgtggggcaacatagatatagaaacttgaaagaataatgatgctcggggaacaccatcgagggaatccgacggtccttgtgccaccgtgtccagcccacgacgatacaacggctgagaagtacttcgcgttcttaacatacgacgtcaatgctggtgagtactctcacgaccatgttcaagaagcactaacggcgctgtagagttttgtgccgacgaacgaaacggacacagactcggactcctaggaggcggctcagcccgacgcggtggtggacgcgtacacg

SEQ ID NO: 52354 - DNA, 412 bp, Glycine max
ctcattcttatttttttcctctcttcactttcactctctctctctctcagccatcatcatgggagcagtgattctcccagatctcggcaccgagattttgattccggtctgcgccatcattggaatagggttcgccctcttccagtgggtcctcgtctccaaggttaagctctccgctgccagagacgcttcccctaacgccgccggcaaaaatggctacaacgattacctcatcgaagaagaggaagccctcaacgatcagcaccttgttgaaaactgcaaaggttcaagtagatacttattggccaaccttatttgctaaacttgctgagaagaaaaatcttggcgatttgatagccaatgcagcaggcggtggtgcaccagttgctgatgcagcagctgcccctgttgc

SEQ ID NO: 52355 - DNA, 308 bp, Glycine max
ctctcgcgttcgcccacgcgtccgcccacgcgtgcggtgatcggcgttcgcttgatctcattataatcggcagcgtcaattgaagaagatgccgatcagaaacatcgccgtctgaaggcctgaagaggcgactcaccccgacacgctgaaggcggctttggctgagttcatcgtaaccttcatcttcgtgttcgtcgtctcaggctccggcatcgactacaacaagctcaccgacaacggcgcctacacccctgccggcctcatctccgcctccatcgcccatgcattcgccctcttcgtcgccgtct

SEQ ID NO: 52356 - DNA, 370 bp, Glycine max
gttccttagactcaccgaactcaccgtaacaccaaacaaccaccaccaccaccaccaccgtcaatccaaaagcaaacccccaacaccaccctccaccatggactccatcgccggagctccaccccacgccgacgtcacccctccgccgccgcggtcgtcgccgttccccggccgggaagactgctggtcggaggaggccacgttcaccctcatcgaagcgtggggacagcgccacctcgaactcaaccgcggcaacctccgccagcgccactggcaggaggtcgccgacgccgtcaacgccctccacggtcacgtcagcgccaaggcccgccgcaccgacgtccagtgcaagaaccgcatcgacacgctc

SEQ ID NO: 52357 - DNA, 506 bp, Glycine max
cccacgcgtccgccggaaacttttaaaggaaatctggtagaatggattacggagctcacaagcaatgcaaaactccatgatgccattgatgaatcactagtcagaaaggatgttgatagtgagcttttccaatttctaaaggttgcatgcaactgtgtctcaccaactccaaaggagaggcccaccatgtttgaagtgtatcagcttttaagagctattgggggtagatacaatttcacaactgaggatgatatattggtacctactgatattggtaatactgataacatgcaggaacttattgtagcccaagaaggaagttattgaaaggtatgtgagatatatagggtataaatataatttatgtaattggtattaaattttaatgtgtaattatatatcttactttggtgtcctaaaataaatgttagaggtaaatgtagttctgaggatctagatccaagtgtgtgctattgatattgaaacatcaatataacatcatcaat

SEQ ID NO: 52358 - DNA, 424 bp, Glycine max
cccacgcgtccgtttcagaatatactgctcaggggtgagggtgaaaactggagaaggcattgcagaagtttgccttagtgggtttattgcttttgacattcctcctcctcgaggtcctctctggattcttggcgatgttttcatgagggtatatcacaccgtctttgactatgggaacctccgagttggtttcgccaaagctgcctaacaagacatctaggagattatatagggcatgttttaataagcttgttagtgtgttgtaaataagctttctgtaactactatggcacaggtttacattatagatctcaagaatgtacttgtgaaactatgcaccttgatgtattgtgttgtatttgaagggaccattttcattaaatgtcatgtagaaccgtatagattattatacccgctatgttat

SEQ ID NO: 52359 - DNA, 484 bp, Glycine max
  unsure (1)..(484): unsure at all n locations
ccattctttctctttgactcctttctctctctctctctctcttttctcttcccgaattttggacaaacactttcgttgcgagaaaaaaaaatgtcgagtatcactttcttccaccgtctctctagtgctttccgtgacaaccagtcgcatcttaagcttgtactgctctgcaccgccgtaagtggtggtggcctttgggcttatggtgagagtgttgcacctgaagaggcagttacggagaagaagaaggtggtggtgctgggaactggttgggcggccacaagttttatgaagaatttgaacaatccaaaatatgagattcaagtagtttcgcctcgtaactactttgcattcacccctttgctngctagcgttacgtgcgggacagtcgaagcgcgcagcattgttgaaccagttcgcaatatttttaagcagaaaaaggtggacgtacaattcagtgaagcagaatgtttcaagattgatg

SEQ ID NO: 52360 - DNA, 451 bp, Glycine max
cccacgcgtccgcttcttctccttctaacccaacctgtttctccgacaatcacattcaacgcttctgtcatggaagaagttaatgtcgtggaaactaaggatggaactgtctcagtagctgctgcgtttgctggtcaccaggaagccgtgcaggatagagaccacaaatttttaagcaaagctgttgaagaagcatataaaggggtagattgtaaagatggaggcccttttggtgccgttatagttcataatgatgaaatagttgctagttgtcacaatatggttctgtgtaacacagacccaactgctcatgctgaggtgacagcaataagagaggttagattttgaataccaagtgatttagttattttcttgtagcaaataatggtattgctgtgtttttctgactgaaatttgcacatgatgaatatgccctgccccattggatagc

SEQ ID NO: 52361 - DNA, 502 bp, Glycine max
gtaacacctttggacagtacctgaggaatcagagtcccccagttccactctctcagtgcaacttcaaccatgtgttggatttccttcggtacctcgatcaatttgggaaaaccaaggtccacttgcacggttgcatcttctttggccagcccacccctcctgcaccctgtgcctgccctctcaggcaagcatggggtagcctcgatgccctcataggccggcttcgcgctgcctatgaggagcatggcggatcgccagagactaatccctttggaggaggagccattcgggtgtacctgcgtgaggtcaaggagtgtcaggcaaaggctagagggatcccatataagaagaagaagaagagaaacccaattctcaaggggactcaaagagctaaagatatcgagcaacacgcttcttgagaagatatatatctatatctatatatatatatatatgatatgaacgggccatatacgagcgagttaattggatatagcagatt

SEQ ID NO: 52362 - DNA, 449 bp, Glycine max
ctttcgcttccgcccacgcgtccgcccacgcgtccgcccacgcgtgcgtgatggtttcatgaatctcatgcacagggatgaagaggtcaattacttcccttcaaggtatgatcctgtccgtcacgcggaaagggtccccgttcctccacgtaccctaggtgggaagcgtgaaaagtgcatgattgacaaggagaacaactttaagcaacctggggagagataccgatcctggccttctgacaggcaagaaagatttgtccgccgatgggttgatgctctgtatgacccacgtgtcacccatgaaatccgcagcatgtggatatcatactggtctcaggctgatcgtgctcttggacaaaagatagcatctcacttgaacttgaagccgagtatctaagattggtggtggataccatagcttccaagagttgcagatgtaggaacaagtg

SEQ ID NO: 52363 - DNA, 444 bp, Glycine max
tcgtgttcgcgtgggcggacgcgtgggcggacgcgtgggcggacgcgtgggttttgcttccttcgtatagggattagagagcagcaagtaatgatggatgcgctgataaaggtgcagttcaacgcaccaaaaccataaaaagcgcttctttcgtcttatggcatgtctgaggaggaagaagcactgcgtcaaaggccaacatcgttgatttctttcccaccccatgacaattcttcgcttgttctgccccttctttatactcttcttcactccaatagggatatcgaagttgctagcgtgtattttttgttggctacatcatgttaatggagctctaccctccctgtttgatttccagcttctgtgcaagcgttcaccggaacctatggtataaattatggtaggattgcaaataatattccttcacccgatgaagttgttact

SEQ ID NO: 52364 - DNA, 404 bp, Glycine max
gtattgcggaagcaccattcacgatgaatcatgtaagttcacgatcctgaagtgaaaatttgttatctatacatgtatgaactttagtaatgaaaatacctatttaatttgttttcaggttctagtttttatcgaggaataaaggcaagctctatttggagtcaagtgaaacatctatcttcctgtccaagttctttgaataaaagtctgaatgtgtcatctctgcactacaatatttgtgattctgaccaagttggttctatttgtttgatggccatcttgcacgtcctgatcttattgtgttcaagtgacagacaaatcagaacagggaagagagatttgaaatgtaaatgccaagtgaaagtgaaaagtacagtccagttttagtgatctctttaatttat

SEQ ID NO: 52365 - DNA, 376 bp, Glycine max
attacttcttatccatttcagcacaaattctcttggttttaccccagagtttttgggacgtgtcaagcttgttacctcaattgcatctctgctcggtgttggtctttataatggatttctgaagaatgtgcctttacggaaaatattttttgcaactacccttttaggttcaactcttgggatgactcaggttttccttgttactggactaaaccgtaagtttggcattagtgatgagtggcttgcaattggtgattcattaattctcactgttttgagtcaggcttctttcatgcctgttcttgtgctagcagcaagattatgtcccgaaggaatggaggcaactcttttcgcaactctcatgtctgtatctaat

SEQ ID NO: 52366 - DNA, 402 bp, Glycine max
ttttcaattgaacatgatcgcgacccaatttccaaatttacccatcacagaattttggagaaagaaaaaaatacaaggaagaaagaaagtcttcaacctctattcaattctccaagtgggattttgagatggcatcatttgcaggcactacccagaagtgcacagcatgtgaaaagaaagtgtattgggtggaacagctcactgctgacaacaaggtgtaccacaaatcttgcttcagatgtcaccactgcaagggcaccctcaagctgagtaattattgttcctttgagggtgtcctatactgttagcctcatttccatcaactgtttaagatgactggcagcttggacaaaagttttgaaggtgttccaagaagtgttagagtggaaagatctgctgatc

SEQ ID NO: 52367 - DNA, 283 bp, Glycine max
cccacgcgtccgcgatgttcttgcgtccacgttaaatgatttaaagcaggaggccttgaactcttcttcttcgggtaagaagtttgctacaaaagaagcgaatttcacgagctcaatgaagctctacaccctggcgcagtgcacgcccgatttgtccacttctgactgcaacacgtgcttctcaagctccatcggtggctttccgaactgctgtgacggcaaacgaggtgcacgggtcctgcttcctggctgtagtgtcagatatgaactgtatcccttttac

SEQ ID NO: 52368 - DNA, 395 bp, Glycine max
gataaaggaaaggaactttcgttgcgaagttgattcaaaagttttaatttttaaacagcagctaccatgatctctttgtcctgcagagttatgaatttgatgttgaagcagcaataattatcttagcatggagacagagcaagaattggaatgggctgaagcccagaacatggtgttcttaagcgaagacctcgtggccacggctaagcaacagcttctgtttctggcagaggttgataggaatcgttgcctttatgatggtccagttttacacagagctaactacaggtataaatattgttggcttcctttactagccaaacatgctgagtcacatgtgacacaagacccttttgttgttcctcttgactgtgaatggatttggcactgtcata

SEQ ID NO: 52369 - DNA, 219 bp, Glycine max
ccttctcgtccgctttacctacactggcagaaagagcaaggccgcaagaaaagctggctggtatacctattgatggaaagcgcaatactaggagtcgcatgtcattctacactggaatagggatccatcaaattcttcctgacggtacattagggtcagagactgaagtgtccggtctccctgatggagctaaaataaattttgtttcttggccttctg

SEQ ID NO: 52370 - DNA, 325 bp, Glycine max
attgcgatggttttgtactcgttcattacttcgtgaatcacttgattattcacttatagacaagatccctggccgtccaaatgaccgaaagacacttctgggtgaattgaattggatctttacagccgtaactgatacgattgcctggaatgttcttcctcatgatctttttcagagactgtttcgacaggatttgcttgttgcaagtctgtttcgaaattttctacttgctgagcgaatcatgcgatctgcaaattgttctcctgtctctcacccaatgttacctccgacccatcagcatcatatgtgggatgcatgggacatg

SEQ ID NO: 52371 - DNA, 444 bp, Glycine max
gtttaacataagcacaaactgtttagtttttctgcaaacgttgtgcttaaaaccagtctcattggtaccatatataaagaaaggtcattctttcttcccattataagataaattctcaggcattctctcaaactactctgaatctttgagatttttcattgcacacttctcttgttcactgcaagtaccaccatgccgtcactgggggtgcaacttactattcaagataatcatgtggcgatggagaatggcatgctaaaagtcaccttatcaaatcctgagggaattgtgactggaatacagtataatgacatagacaacttgcttgaagttttgaatgacgaatctaatagagggtattgggaccttgtttggagctcaccaacaagtacaggaacaagtggcacatttgatgtcatcaagggaacaactttcaaagttatg

SEQ ID NO: 52372 - DNA, 383 bp, Glycine max
gcttctgcaaataggttgtccagattgcaggaacaggctgaagaatatgcagctctaatcatggaagagttggaccccgaaggacttggctacatcgagctatggcaattggagacgcttcttttacaaaaggacacgtaccttaactacagccaagctcttagctacacaagccaagctttgagccagaacctacaggggctgaggaagaaaagtcctatacgtagaatgagccgcagattggtctactatttgcaagagaattggaggagactttgggttttaacactgtgggtttccataatgattgggctgttcacgtggaagtttattcagtacaagaacaaagatgcatttcagatcatgggttactgtcttctcac

SEQ ID NO: 52373 - DNA, 354 bp, Glycine max
ttttaaatgcaagcgagcggaggttgcattgtcgcttctgagagagaacaaaaatgggtttgatatcgttttaagtgatgtgcatatgccagatatggatggatttaagcttttggagcatattgggttggagatggacctttcagttattatgatgtcagctgatgatggaaaacaagttgtgatgaaaggggtgacacatggtgcctgtgattacctgattaaacctgttcggattgaggctttgaagaatatatggcagcatgtggttcggatgagaaagaatggcttgagagatgtggagcaatctggtagcatggaagaaggagatcggccttcaaagggatcagatga

SEQ ID NO: 52374 - DNA, 392 bp, Glycine max
tttcgattcgccccacaattaagccatagtgcacaaagcttttacaagaaattgaaaagtcaatatccaaattcatcaattaattgctaaacttcaattcgcaatcatgcaaaaccaacaaccctccggtatcataaaccctaagtattgtgctccatataatgtcgacctagcaattgtgagaaaggtcttggcattaactgatagctttaccgtcaccgatgtcaatggccaaattgttttcagccttaaggcctctctcatgaccctccatgaccaccgtgtcttgcttgacgccgccggaaaacccgtcgtcacactacgccggaaggtttgaccatatatttagatatattgcttaatgtatcttattatttataacctattttata

SEQ ID NO: 52375 - DNA, 376 bp, Glycine max
ccccatcaaaatctaattgctctctggtctccctcttcacccactcaccctcgatcctcttccacctctcttagttcccttccatcaagggtcgatctagatcttctttttccacacccaatatttcctatttcaacccctttattcatctccctgtaaaactcaaaaaaaaataaaaaacacgaagaaaatatacatgggttgcaccatgagggaaaagcatatcagagctaatcggagaccccgatcggtgaaaccggacttggattcttgcgacaaagatgccatattcaaatccatagcggagtctggtcttaagcccttcaaataccatctggatctcaacgattcttcccagagtccgaattcaaaccct

SEQ ID NO: 52376 - DNA, 414 bp, Glycine max
  unsure (1)..(414): unsure at all n locations
catgactggagctccctgccgatctgaaaggcttgccaagtacaaccaggtaaaaatcgtcaaagcttatctttgttttttttacatgagctgtatactagaatacctttgaaaactggattttttaaaggctttgatttagaaccaatgtttttatttgttttaatttttgttctctcccatactatattacatgccgcagcaggaccaataaaaaaattagtgtaaaattaaattgggatgtccattgcttatattattgaccgttgtcacttaccctttggtctgtggtgcagctcctgaggattgaggaggaacttggttctgctgctgtgtatgctggtgccaaattcagagcccccgtggagccctactgattgnttagcccaagattaccaagcatcatttaaataa

SEQ ID NO: 52377 - DNA, 229 bp, Glycine max
ataagaatctgggaaacagatctggggtggatttctcaatgctgccttacaaaacatgcattcaagatcaatagacagtgcctggctaatggggcactaaaaatcaatgtgaagatgggaggaagaaacacagtacttttggatgctttaagacggaggattccacttgctagtgatatcccaacaataatattcggagccgatgcaactcatccaaaatcaggagagg

SEQ ID NO: 52378 - DNA, 192 bp, Glycine max
gtgtaatagagttcaccgaagcccaacatgagaacccttgacaaaggcttactgattgtattcactctctagcacctttcgctattcaagcattcccatgctgcaagaatggatatctactggggccaaaacggcggagaagggaccttagcccatgctggcaccactagaaactaccaatatgtgaacata

SEQ ID NO: 52379 - DNA, 441 bp, Glycine max
gtttttcaaaactggaaaggttaaccgtgccttcatcgcgcaggccggggcaattcctcatcttaggaacttgctttcctcacctaatgctgttgcacaggagaattctgtgacagcactgctcaacctatccatttttgaaagaaataaaagcatgatcatggaggaggaagggtgtttggggtcaatagttgaggtgttgcgattcgggcacacaactgaggcaagggagaatgctgctgcaacattgttcagcctctctgctgtccatgattataagaaaagaattgcggataatgtgggggctgttgaagcactggcttggttgttgcaagaggggactcaaagaggaaagaaggatgctgtcacagcattgtttaatctctccactcacactgagaattggttgagaatgatagaggcaggggcggtgaaagctat

SEQ ID NO: 52380 - DNA, 262 bp, Glycine max
tcgtgtacgcgtgggttagacttgaggagcaagcatcccatgttgcacaaagagctgcagaagctttacgtcagtcacgaatgctcctaagccatgatagcgtatctgtttcgacatggacaggaaggtcaggaactgctggtgcaccatcgtctgtcaagcggaagtttggatcaactgcgaattcccagctgggaaataatagcaaagcatctgacgaattacccaacaagggaactaacaagatcaatggatttgctgc

SEQ ID NO: 52381 - DNA, 449 bp, Glycine max
cccacgcgtccgaagggatttataggcgagttcaacatgccaaagaatgaaaatccttcctcagtggaatttcaattccagtggctgtatacaaatggattactcgcaatcattttctgttttggactactcgtcactgcccttaaaagcagaagagctagaacgtggcgatatggaacagggtggctacgaggatttatagcagattatggggttccaatgatggtagtgttatggactgcactgtcttatactgtaccaggcaaagttccagatggtgttcctagaaggctcatttctccccttccctgggatgctgcatctctctatcactggacagtagtgaaggacatggggaaggtaccagtggtttatatatttggggcaattattccagctctgatgatagcaggcttatactttttcgatcacagcgtagcttcgcagat

SEQ ID NO: 52382 - DNA, 306 bp, Glycine max
cggtcgcgtgggcggacgcgtggggtgatttcagtgagtgatcggtgttcgcttgatctcatcataatcgtcagcgtcaattgaagaagatgccgatcagaaacatcgccgtcggaaggcctgaagaggcgactcaccccgacacgttgaaggcggatttggctgagttcatctcaaccttcatcttcgtgttcgccggctcaggctccggcatcgcctacaacaagctcaccgacaacggcgccgtcacccctgccggcctcatctacgactccatcgcccatgcattcgccctcttcgtcgccg

SEQ ID NO: 52383 - DNA, 348 bp, Glycine max
gcctgcctccatgctcattaccactttccctttccctcttcttctcacttgagccgtgaaagaacatggcaatggctgccgagaaattgaaattgaaattgaacaacggtacgttggtgagggaatagaaaagatcgacatggctggcattggagtgatgggcaccaagttgggtatgatgagctatttcgaatccgacggagaggttgttcctgtcactgtcgtgggtttcaaagaaggcaacatcgtcacccagatcaaaactgaggccaccgatggatacgacgccgtccaggttggttaccgaagggtcagagatcgcaaattgaccaaacccgaaatcggtca

SEQ ID NO: 52384 - DNA, 342 bp, Glycine max
ggtgatcctcttgttgaagaagatgacattccaattgttcttaggtcttggcaatctcaaaacttccttgtaactgtaatgcatataaaaggatcagtatcatggataaatgttctgggtataacagaagttcaggagcttctttctgctggagggtataatatgccgagaacagtgcatgaagttatagcactacttgcttgtcgtctctcacggtgggatgataggttattccgtaaatctatatttggggcggcagatgagattgaattgaagtttatgaacaggagaaaccatgaagatttgaatcttttcatcttaatcttaaatcaagaaatcaga

SEQ ID NO: 52385 - DNA, 489 bp, Glycine max
  unsure (1)..(489): unsure at all n locations
gtccgcttcgtatttttgggttttctgagaagagcgtgtgttgatggggggtcaaaattctaaggaggaaagttggaggcagagttcatctgtcaggtcttcttcttcttctnggnggccccttggatccactatcgagttatggtttcaatgaaccgcaaccatcatattcttcttatggctatgaagcttatggtggcgatggaatggtacgctatgatagtacaaagctagagaggaggtactcaagaatttctgatcattacagttccatagatcaggttagtgaggctcttgcacttgcaggccttgagtcttctaatcttattgttggtgttgatttcaccaagagtaatgagtggacaggcaagaattcattcaataggcgaagcttgcatcacattgggagaggtctgaacccttatgagcaagcaatatcaattattgggaaaagcttggcagcattcgatgaggataacttgatcccct

SEQ ID NO: 52386 - DNA, 390 bp, Glycine max
agaatggctcccaagggtttaacctttctggctgtgttaatatgcgtttcagcactgtcactgagtccttctgttgcgggggaagggcaaaataatggccttgttatgaacttctacaaggaatcatgccctcaggctgaagacatcatcacagaacaagtcaagcttctctacaagcgccacaagaacactgctttctcctggctcagaaacatcttccatgactgtgctgttcagagttgtgatgcttcactgttgctggactccacaagaaggagcttgtctgagaaggaaacagatagaagctttgggttgagaaatttcaggtacattgagaccatcaaagaagctttggaaagagaatgcccaggagtttgttcatgtgctgat

SEQ ID NO: 52387 - DNA, 348 bp, Glycine max
aaaccctctcaaaacaaaacctcatcatcatctaactcattcacatttttctctatcatctcgtttctactgtttcctcatggacactaacattggatctctatccctcgactcataccggcctgctaacaacgacgtcggttgtcccccgaacggagccgtttcagcaatcaaaccctccgtccccgcaaccacgatgacgtcctcggatgccacgctaggacgccacctagcacggagactcgtgcaggtgggggtgacagacgtcttctccgtgccgggtgactttaacctcaccctcctcgaccacctcatcgcggagccgcagttgaaaaacataggatgttg

SEQ ID NO: 52388 - DNA, 138 bp, Glycine max
gtatgaacaagatggaaagccactacctaagttcggggaatgggatgtgaatgatcctgcctcagctgaaggattcactgttatattcaacaaggccagagatgagaaaaaaactggcagaggaggatcagggcgcgc

SEQ ID NO: 52389 - DNA, 354 bp, Glycine max
ccggagctggccacggtggcggcccccacttcggcgaccgacgtctacagcttcggggtggtgctgctggaggtggcgtgcggtaggcggccgatagagacgtcggtggcagaggaggaggtggtgctcattgattgggtcagggagctgtacgcgaaggggtgcgcgcgtgaggctgcggatttgaggattagaggggagtacgatgagggagatgtggagatggtgttgaagctagggttggcttgttgccaccctgatcctcagaggagacccaccatgaaggaggtcgttgcgtttctcttgggagaggacccgccggaggcacccggaaaagacttgtccgatttggtt

SEQ ID NO: 52390 - DNA, 390 bp, Glycine max
  unsure (1)..(390): unsure at all n locations
ttgggatgtttgcaggttggaaaaggtttgtccaaggatgataaggctcaaaaattagccctccaacattggctagaagctagaagttacctacccattattccattaataactnttactaggcttgaaataatgttacactttagtttatggtctaatctaatatcaacaatgcccattcttgcttgttttctgcacagattgacccacgtcatcgctatggacacaatttgcacatgtattacgatatttggtttgagagccaaagcacccaaccatttttctactggttggatgttggagatggtaaagaaataaatcttgagaaatgcccaagatccatcctacaacgccagtgcattaaatatcttggaccaaaagaaagggaag

SEQ ID NO: 52391 - DNA, 402 bp, Glycine max
tgatgatctgtttgatcaggcatgttgctgccagtcttgtaaagagccagcagaggctcacgtcctatgttttactcaccagcaaggaaatcttacaatcaatgttcggtgccttccctctgtgaagttaccaggggaaagagatggcaagatttggatgtggcaccggtgtctgaggtgtccatttgaggatggagttccaccagcaactcagagagttgttatgtcgaatgctgcttggggattatcttttggaaagttcttggaacttagcttttcaaaccatgcaactgcaaatcgagttgcaacctgtggacattctttgcagagggattgcctccgtttctatgggtttgggagcatggttgctttcttccggtattcccctattgatattctttc

SEQ ID NO: 52392 - DNA, 451 bp, Glycine max
gcaaatcaattagaaccttttatagttctctgaagtacttaacccgaaatatattacaatgcttgctaccttggttttgatttgctgtttatttacggcatttctattcctctccttacctgttatgtctcaagaagttgaagatgagagcgagtttagttacgacgaaaagagcgagaatggaccatctaattggggagacatacaccccgaatggagtttgtgcaacaatggatccatgcaatcgcctattgatctattgaatgagagggttcaaatagtatcccatctagggaggcttcagatgaactaccaaccctctaatgccactattaagaataggggccacgacatcaagctagaatgggttgctggcgcaggctatcttcaaattaatgaaactgagtacgtactcaaacaatgtcattggcattctccctctgaacacacc

SEQ ID NO: 52393 - DNA, 463 bp, Glycine max
cttttctctcctctctctctctctctacaaatccttctttcttctcttcgctgctcactgtagcgtagctatggctttcagagttggaggagcgggaggaggaaatgcctcttctggcatgggtgatttttaaaattgacgagaaaaagaaagaggttgttgttgaaaaaactggaggccctgctgagagctatgatgatttcactgcatccttgcctgaaaatgattgccgatatgctatctttgactttgattttgtgacatctgagaactgccaaaagagcaaaatcttttttattgcatggtctccttcggtagcccgcattcgccctaagatgctatatgcaacatccaaggacaggttcagaagggagctgcagggcatccattatgagattcaggcaacagacccaaccgagatggatcttgaagtcctcagagagcgtgcaaactgagcacctac

SEQ ID NO: 52394 - DNA, 309 bp, Glycine max
cccatgcgtacgggcgaacagtgtgcaggcagatctggaagaactggacctggacactgttaccgactctattcttttgcaggcgatagtaatgaatatgatgagcactgtacgtgcgaagatgagaaagatcctgttcatggaggtgcacttctctagaaattcatgcatataaaaaaggatgaaaactttccatttcctacttttcttaaagattcttctgtgcttgagggtgagaattgtttgacagctgtagaagcacttgataacaaggatgaacttacacttttaagaaaagccatggaacat

SEQ ID NO: 52395 - DNA, 413 bp, Glycine max
cggtacgcgtgggcggacgcgtgggccaagtgtggttgtttagatgcggcctttgatgtctttagtggaatgatggcgaagaaagatgtggtgtcttggaattcgatgattcaggggtttgccatgcatggacatggcgagaaagcgcttgagcttttttctaggatggtacccgaaggttttgagccagatacatatacatttgttggccttttgtgtgcttgcactcatgctggccttgttaatgaagggcgtaagtacttttattcgatggagaaagtgtatgggattgttcctcaagttgagcattatggttgtatgatggaccttctcggccgcggcggacacctgaaagaagctttcacgcttttgcgcagcatgcctatggaacccaatgccattatattgggtac

SEQ ID NO: 52396 - DNA, 432 bp, Glycine max
tttggagtcgaagacacgtctcaggagtgtaagtaagcatgacctcggcggcgatgacggtggcgtcaatgctgctctgtggtagctgacggagcctcgccatgcccgcggcggcgcgcgcacttcgcatatcgcgagcagcgctcgtcaataaccgcaacaagcaccctgcaagatggtgctgtcggagttcacacaacacttacactgcactcgtcggtgaagctgaattcttaacaaccgacgccggtatcttaaacgccacctcttcttccgatagttttcggaagtatgaccggttgcttccatgtccatcgcacaaaactccaccgagaattgaacacttagttgtatcagaaggaggacctgtgttggaacatatttgcaaggctctggatcttcctcctttgtacgtttcagatctgattcaat

SEQ ID NO: 52397 - DNA, 392 bp, Glycine max
tttggatctaagagcaaatatatgtttgggaaagtgaccatccagctcaagcttgtggagggtgactctgctggaactgtcactgctttctatgtaagtggaaattttatattttttttttaagaacaaatttgctcatgatgctcttttgctgttttagtacggagcttatgataattactatttactagctatagtgcttagttaacaatgaacataatttacggtgtacatattcagctcaatacattgagcgtttctcaagtgcagacagccagatttgcatcaatgaattgaatattaccagagccattagtgtcagctacctactttcatttgattcttgcatttattgtctctctctgtccctgtctgcacatttgagccacgat

SEQ ID NO: 52398 - DNA, 315 bp, Glycine max
gtgtcaggagctggaaaagacgatgctttaacagcggacacagatctagaggcttcctcctctggtcgaattgcttctagaaagcaaaaatattgggtgagcagcatcaaattgtttggggtagaattatcccctgataatgttgctgttgcgatggtttattttgttcaaggcgctttagggcttgcaagactggctgtgaacttttacttaaaagatgatttgcatttggaccctgctgaggcagctgtgatttctggtttttctgcattgccgtggcttgtcaaacctctttacgggtttattagtgattct

SEQ ID NO: 52399 - DNA, 450 bp, Glycine max
ggctacataacatggttgcttcttcaatgatgtttgcatggtatcctctagtgctgttttggctgacattattctgaaagagaagctacacaatcttgggatattgggctgtataatgtgcattgctggtagtatcattattgttattcatgctcctaaggaacaacctattacatctgttctggaaatatggaatatggccactcaaccaggttagaatgcactgtatttttttaaaaatgcaattcactgaagttccttgataacaaagatatcctccttgcttgcagcttttctggcatatgtgggctcagtaatagtgttggttctcattctggtcttccattttgcaccaagatgtgggcatacgaatgtgctagtttttactggaatttgttcattgatgggttccctctctgtaagtaaattaagttactggtatctctcctg

SEQ ID NO: 52400 - DNA, 456 bp, Glycine max
ccctcgcgtccgcgttgtctgataatcacattacaggaacaattccttcggagattggaaactgctctggtattgaaattcttgagcttggatcaaattctttggcaggtcacattcctgctgatatctctcgcctcacccttttgaaagtttttgatttgagtgggaacaatttaactggggatgtgcctgaagaaatctccaaatgctcgtcactaaccacgttgtttgtggatcacaaccatctttctggggccatacctgggtcgttgtcagatctatcaaacctaacaatgctagatctctctgctaataacttgagtggggtaattccgagtaatctttccatgatatctggtttggtgtacttaaatgtctcaggaaataacctagatggtgagataccaccaacgttgggatccaggttcagcaacccctctgtgttcgcaaataatc

SEQ ID NO: 52401 - DNA, 434 bp, Glycine max
cgttcgcgtgggcggacgcgtgggcggacgcgtgggcggacgcgtgggcatgggtatctccagagattctatgcacaagaggcgtgccactggtggcaagaagaaggcctggaggaaaaagagaaagtatgagcttggtcgccagcctgctaacactaagctgtcaagcaacaagacagtcaggaggatccgtgttagaggtggaaatgtgaaatggagggcattgagattggatactggaaattactcctggggaagtgaagctgtaactcgcaagactcgtgtactagatgtggtttacaatgcctcaaacaatgagcttgtgcgtactcagactcttgtcaaaagtgctatcgttcaggttgatgctgctccattcaaacagtggtatcttcagcactatggtgttgagattggtaggaaaaagaagacag

SEQ ID NO: 52402 - DNA, 322 bp, Glycine max
ctagaacaaaaaaaaaaaaaaaaaaaaatccgcgattcgctcttctcttggaaaagtgaaaaccagaagtacgaacgaaagagaagaggtaagcaaattcaatccctctccgattgaataatccctttcgaattcgatctctctctgttccagtttttattttctttcatttgaattttttaattataatgattgattttggtgtgtgattggaatgaaattgtgatggatctgcgatggatcagcgatttagaagtgagagaagatggggttgtcgttcacgaagctgttcagcaggttgtttgcgaagaaggaaatgagg

SEQ ID NO: 52403 - DNA, 314 bp, Glycine max
aaggctttgactgaaagagctgtgaaggttgttgaagaggtcaagttcttcccaaattatgcgcatcatgttgccactagtgatcatgcaggtgatatcctaaagagggtctacatgattccagaagaaagggtccatattattctcaatggtgtggaccaacacatttttaggccaaatgtttcaaaggggaaggacttcaagaagaggcatggcattccggattcgaagtcattggtgataggactagctgggaggttggtcaaggacaagggacaccctctgatgtttgaggcattgaagcagataattga

SEQ ID NO: 52404 - DNA, 287 bp, Glycine max
tcgcggacgcgtgggtctggagttactggcactatacagttttcagagatttactgataaggggttgcgtggcattgggaatggatgtaagaagttaaagaatttgactctgattgattgctatttcataagtgataagggttcggaagcaattgctaatggttgcaaggaacttacacatcttgaagtcaatggatgtcacaacattggaactttggggctagaatacattgggagatcttgccagtatctcactgagttagcattgctttactgccatagaatag

SEQ ID NO: 52405 - DNA, 391 bp, Glycine max
tgcttccctattagagaacattttaccaattgagcactttcaaacaacgttgttgttttttgtacacaaccatcagagataaggagagtgaggtgggcatggctagttgtttaatgttactaaccaaagttagtgataccgaaaccccatcaagaaagagggttctaagtggtggtgattttaagtgcaagacttgtaacaggaaattccaatcgtttcaagcacttggggggcaccgagccagccacaagaagctaaagctcatggttttaaacctttcgagttcgaccgtgacacacaagatgcaccagtgccccatttgtggaattgaatttgcgattggacaagcactgggagggcacatgagaaaacatagagcttccttaaacga

SEQ ID NO: 52406 - DNA, 355 bp, Glycine max
atcctagatgttgaaagctccgacaccatcgataacgtcaaggccaagatccaggacaaggagggtatccccccggaccagcaacgtctcatcttcgccggaaagcatcttgaggacggtcgtaccctcgccgactacaacatccagaaggaatcaacccttcacctcgtcctccgtctacgtggtggcatgcagatcttcgttaagaccctcaccggcaagactattaccctagaagtcgaaagctccgacaccatcgacaacgtcaaggctaagattcaggacaaggagggaatcctcccagaccagcagaggctgatcttctccgggaagcagctcgaggacggacgcaccc

SEQ ID NO: 52407 - DNA, 333 bp, Glycine max
cggacgcgtgggcggacgcgtgggcggacgcgtgggcggacgcgtggggaaggatccaagtaaatttgctgtcgctgctgttgcggctcctgctgctgagtctggtgctcctgctgcagccaaggaagaggaaaagaaggaagaaccagctgaagaatctgatgatgacatgggtttcagtctgtttgactaatttatgtaatgcttttgttgagtttatttggttagaattgaagttgagtttgcctttcatttcaggtgatattttagagtattcatgttacattgcaactacttttaatttccataggtaattaaagcttcaacgtttct

SEQ ID NO: 52408 - DNA, 493 bp, Glycine max
tcgcccatgcgtccgcttgattcttttggtacaagttatagttcaaaatcattagttacttttaacggacaaaatgtcagaaggagaaaacccagctgttacgcgttttagagattatttacgtattaagactgttcaacctaaccctgactatgagtcttgtacaaattggcttttagaccaagcaaaagaaataggcttgtcctcgcaagtgtttgagtacgttaaaggaaagccaatagtcctattgacctggattggtcgtgacccagaattacccgctatacttttgaattctcatactgatgtagttccagtttttgaggaaaaatgggcgcatgatccatttgaagcttttaaaggcgaaaatggtgatatttttgcaagaggtgcacaagatatgaaatgtgctggagcaagttatcttgaagctattagatgtcttaaagatcaagataaacaaccatgtcgaacgattcacctttcttatgtg

SEQ ID NO: 52409 - DNA, 428 bp, Glycine max
tcggtgagaaacatggcttccttaagctccttagtgctgctccttgcagctctaattctatcccctcaagttcttgcaaactatgagaatcccccagtgtacaagcctcccactgagaaaccaccagtttataagcccccagatgagaagcctcctgtctacaaacctccagatgaaaaccccccaatttataagcctccagtagagaagccaccagtgtacaagcccccagttgagaaacccccagagtacaagcccccagttgaaaaaccaccagtgtacaagcccccagttgagaaaccaccagtgtacaagcccccagttgagaagcccccagcttacaagcccccagttgaaaaacccccagtgtacacgcccccagttgaaaaaccaccagtgtacaagcccccagttgagacgcccccagt

SEQ ID NO: 52410 - DNA, 428 bp, Glycine max
cttttcaccaaccaaagtttgccatttatgtatgattaattgcatatccttctctaaatcacaacacgaactaacccacaaccaaaacttacattaatttcttcactcaccatggattccacctccagcgaagtagccatcgatctctcaccccttctcaaactctacaaagacggtcacgtcgagagactcataggctgcgacgtcgttccgccgggtcacgaccccgcaacaaacgttgaatccaaagacatcgtaatctccaaagacaacgacgtatcggccagaatctatattcccaaactcaccgatcagacccaaaagcttccacttttcctttacttccacggtggaggtttctgcatagagacaccgtcttcatccacttaccacaaatttctcaactcaatcgtttcaaaagccaacgt

SEQ ID NO: 52411 - DNA, 447 bp, Glycine max
gagcgatccgagatagtgttcttcgatgtggagaccagcgttccgacccgggcggggcagggttttgcgcttctggaattcggcgccattttggtttgccccaggacgctcaccgagctccgcgattactccactctcgtccgcccagccaacctctccgtcatcacccccttgtccgagcgctgcaacggcatcaacgccgtcgctgtctccgccgcccctaccttcgccgacattgctcacctcgtttacgacctcctccacggtttctttcttcacctctctctctctctctctctctactgaaattaatcaattgttctgaattttgactgtttagggaggatttgggcggggcataacatcataagattcgactgtgttcggattagagatgcgtttgctgagattaatcagccaccgcctgaacctaaggggaccattgac

SEQ ID NO: 52412 - DNA, 354 bp, Glycine max
ccttactcgcggcagaggaagatcagatggcgcagtctctggagctgttgctgattcagttcctgatgcccgacaacgacgctcgccgtcaggccgaggaccaaattaagcgcctcgccaaggacccccaggtggttcccgccctggttcagcacatgcgcaccgtcaaaacccccaacgtccgccagctcgccgccgtcctcctccggcgagtggcccgatttgttgccctttctcttccaatgcagtcagagttcgcaggatgaccatcgcgaagtggcattaattctcttcagttctttaaccgaaacaattgggaatgctttccggccgtattttgcaaatctgcaagct

SEQ ID NO: 52413 - DNA, 330 bp, Glycine max
aggcatttcaattatcgtgtcttcttggctctctgtttagggcacaccatactctagtgcttctggaaagagtgaaagtaatgtgaaaacagctgtttttctgtctcctaagtttgaacttggaccgggatcggttgcaaataaatatgattatgatatggattttccaagaggacatatagcacttaagagtttcaatgcagaggcagttgatgaagcaaggaaccctgtgcctcttcatgaaacttatctccaccactgggttgttggaagatactatcaacctaaatatgtgacgactcacacaaactatgatggacataggatact

SEQ ID NO: 52414 - DNA, 316 bp, Glycine max
ttctttctgcacaatatctatcccatccatttttggcgaattatcatgacgatatgaggatacctttggatatgataatccacaagcttgttaaagcttacatttgctcgtcttccttacgcaaatctgctttacgggctcttgcaaagacattaacagtagctcagctaacatatctcagagatcaatatactctgttagggccaaacaaaagtggattaatttctatgcagaactttaagacggtcagcacatatctgaagttagaagttattgttcgtttttcaaatttctttaaggcattaacggttatatt

SEQ ID NO: 52415 - DNA, 500 bp, Glycine max
cccacgcgtccgcaaaatttgtctggttatggatgccccactataaatgaattcaacttttccattagtgccttcttggaagtactatttgttatcctttaagaagcatttattgtttaccttgaagtttacgttaaattggtaaagtagtttcttcatttagactctaaaactttggtttaatatgtctttgtactattatcttaaaggattgagccaaggtaccaagaaatgttgagcaaggacatagctgaaactatgatagatggtatcaaagttagagttatagcaggggaagctcttggaataaagtctccaatctacacaaggacaccaaccatgtacttggattttactcttaaacctggtgctcacttgcaacaacttataccaaagtcttggaatgccttcgtctacatattggaaggagagggtgtatttggaaaccaaaagtctcaacctgtaacctctcaccatatacttcttcttggtcctgggga

SEQ ID NO: 52416 - DNA, 465 bp, Glycine max
atgaatattggcacgtacagcgatatccatatcctccactgtggtcctctccaaccaaccaccagcatcctcaaggctggaaatttattttcctcaatgatgttgagtgccaatgtgagctacctgaatcttatgaagcttatagaaaacagcagcatagatggcactctggcccaatgcaattgttccgtctttgtttgcccgacataatacgctccaagataagcatatggaaaaaattcaacatgatatttctcttctttcttctaagaaaattgatattacccttctattcatttacccttttctgtataattcttcccatgacaatgtttgtaccggaggccgagcttcctgctttggctgtttgttacatccctgccaccatgtcgatacttaacatccttccagcccccaaatgcttccctttcattgtcccttaccttctcttcgaaaacaccatgt

SEQ ID NO: 52417 - DNA, 428 bp, Glycine max
cccacttcgtccggagagctagtatggtggctgcttgtcttcagcaagttttgggtatggggaagaagaggcagctagggaaagacatgcctaatggttttctacatagccttctctatggaaagaaaattttggtggttgatgacaatggggtaaaccggagggttgcagcaggtgcactaaagaagtttggagctgatgtgaagtgtgctgaaagtggcaaagtctcttgaaatgctgcaattgcctcacaattttgatgcttgcttcatggacatccaaatgccagaaatggacggatttgaagcaactagtagaattcggatgatggagagcaaggcaaatgaggagatgaatggcagtgagtggcatgtacctatactggccatgacagctgatgtgatccttgctacgtacgacaagtgcgt

SEQ ID NO: 52418 - DNA, 404 bp, Glycine max
atcatggtgtttttttttcccctaaaaattaattgtcaggttctttccatgttgttggacaggaatatgaacgttgacatagtgaatcacaataatcagaccccgttgatgtatgctgcaaagcagggaaagattgattgtgttaaaaagcttatccaggctggagcaaatgtattcatgattgattctgtacatggaggaggttgcttgcacgatgcagcttctcatggccacgtagattgccttaaagccattctttttgctgctcatttcacagcttttgaagattctcggggatatttaagatttgtcgactcgagagattttaacggttttgccccactgcatcttgcagccctcaaaggacaatctgaatgtgttgatgcccttttagacaatgatgc

SEQ ID NO: 52419 - DNA, 430 bp, Glycine max
cccacttcgtccgggagaaggagattgttgagaggcagaattcttggctcaacgaggagttgaatgctaaagttaacattgtttttgagctgcgcagaaagcacacagaatatgaagctgatatgacttccaagcttgcagatatgcagagacagtttggtgaaagctctaaatctctacagtggaataaggatagagtgagggaacttgaaatgaagcttaaatctgtgcaggaggaattaatttctgctaaagatgttgctgcagccaacgaagaacaattatctgctgaactctccactgttaataagcttaatgagctatataaagagagttccgaggaatggtcaaaaaaagctgcagacctagagggcgtgataaaagcaatggagtcacaccaaaagcaagttgaagatgattataaagagaa

SEQ ID NO: 52420 - DNA, 257 bp, Glycine max
cggactcgtgggcggacgcgtgggcggacgcgtgggcggacgcgtgggctacttcaagggttctagaaacattatcccaaagtacttgtatccacacctgtctacatatacaattttgatatctcagtcttcatacggagcttagcagataaattaactaggagagtgaccattccaatatgttaaatatattgctgcatattgttattttggtgcaaacttgaatctaatatattaagtcacatatcttctttctc

SEQ ID NO: 52421 - DNA, 372 bp, Glycine max
cccactcgtccgcccacgcgtccgcccacgcgtccgcccacgcgtccggatgctgcaggttgcccaaagcttaagagttttccaccgttgaagttgacctctcttgaaaggtttgaattttcggattgttacaatctcaagagttttcctgaaatattaggaaagatggaaaatatgacacaactttcctggactggttgtgccataacaaaactcccaccttcatttcgaaatcttactcggcttcaaaagttgattctgagagaaggacgtcgtgagttaatggactttgatgctgccaccctcgtttcgaacatctgcatgatgccagaactgtattatatttcagctagcagtttgcaatggaggcta

SEQ ID NO: 52422 - DNA, 418 bp, Glycine max
acttagccaacatggagtttctcccacctggttttcgattctacccaacagaggaagaattagttgtcttctatctacacaaccagctagaaggccaaatacacgacacaagcagagtcattccagtcactgacatcaatggcgtagagccatggaaccttccaagtactaccaccactttaattttgttactattcattctttgctgctaaaatatatagtttggtttgtgttgttgtaatcagcacttgcaggggagttttgtcgtggagacacggagcaatggtttttcttttcacctagacaagagagagaggccagaggaggcagacccaacagaaccacggcaagtgggtattggaaggccacgggttcccctggccatgtttactcttctgacaacaaagtcattgggatg

SEQ ID NO: 52423 - DNA, 179 bp, Glycine max
ctcgcggacgcgcgggcggacgcgtgggaccgacagctagaatggaatagcgacgctgaggcatctgtttgaccatgctgtgctctcttgctctcgcaggagagagccatggccatgcatcgctacctgaggaagatgatggagaagatgactggccaaacactgccagtcccactgca

SEQ ID NO: 52424 - DNA, 285 bp, Glycine max
gttatttattgcttgcagcacttcaattgtcaataacagatagtgcaaaggatcaatcaagccagtcagacatgagcaaattgttagctgatcaatcctttgtatcttctatccttgcatcgcttcctggggttgacccaaatgacccttctgtcaaggatttgctggcgtccatgcaaaatcagtctgaggttagtctttctatgaaaaagaatatattggatttgaaaggaatttcttttagaaaatttcagtgcaggccagtaaacgctaaccttgaacacc

SEQ ID NO: 52425 - DNA, 238 bp, Glycine max
attgccctttctcatcatggcaatggaggaattggcaggcgaaccatgaggagcacgctcaatttcagagatgcttttggaattatagaccatgggtccgattaagttattgtaccttaaataattattacttgatgataaaattttgaacaacgaaaactttggtaactatagacatcaggctactcatgatgtctatagttaccaaagtttgcttttatgaatagacccatggctc

SEQ ID NO: 52426 - DNA, 177 bp, Glycine max
ccctttcgttttcttaactacttccttaaaccctggaaacttggccgtgccttataccaaattgtaaaatttggcattgtacaatatatgctcaccaaggatttcactggtattctcgctgcaatccttgaagattatggagtctactgtcaaggagaatttaaagcaagatgtggg

SEQ ID NO: 52427 - DNA, 519 bp, Glycine max
tcgcggacgcgtgggctgattcgcaaaaattttgatatagagaatgagacaaatgttgctgagaaaccactggtactgcctatatacaatatcagcattacaaataatgtcttggagattcggttctactgggctggaaaaggaactactagaattccggatgttggagtttatggtctccttgtatcagctttttctgtggtttcaagtgagtactaccccccattgcaagatgagtgtaaatttattttgttaaatttgaagtgtttcaccatcatgttactattaagtacagctgcatatacaaatacaactgctactattaaaaaaagaatgctcttaaagaaagagaacctcatgaaatagtagttctattctcattttctatttggtatgtttggttttgcttcttgaatagcacttttcatatgcctttcttgatcttgttagcaggatcagatgcagtgtctatttcttatcactttttagttagcattccttatactcaatatcatttat

SEQ ID NO: 52428 - DNA, 357 bp, Glycine max
ttggaatcatggcttccttaagctccttagtgctgctccttgcagctctaattctatcccctcaagttcttgcaaactatgagaatcccccagtgtacaagcctcccactgagaaaccacccgtgtataagcccccagttgagaagcctcctgtctacaaacctccagttgaaaaccccccaatttataagcctccagtagagaagccaccagtgtacaagcccccagatgagaaacccccagtgtacacgcccccagctgaaaaaccaccagtgtacaagccctcagttgagaaaccaccagtgtacaagcccccagatgagaagcccccagattacaagcccccagatgaaaaac

SEQ ID NO: 52429 - DNA, 422 bp, Glycine max
tcggctacatacagcttgagattttcttcttgcaattgttgttgtcttgtctccagagctgaaatggaaagaagggttgtaattattggagcaggaatcagtggccttggtgcctgcaaataccttctagagtttggatttaacccaattgtctttgaagttgatgatggtgttggaggactatggagacataccatggactccaccaagctccaaaacaataaacaaatgttccagtttatggattttccatggccttcttctgtgaaagaagataatccaagtcacaagcaagtgctagattatgttaactcctatgctgaacatttttccctcattccttacattagattcaacttcaaagtcattgacatagattatgttggtggagagtctagtgaagaaatgaagtcatgggaatt

SEQ ID NO: 52430 - DNA, 403 bp, Glycine max
gcttttagcttaacgacagaagcttggacctttcatgcaagttctacccttatgtacgagactcattaatcaagagattttaagggttaccggaaagaatgaatcattgcagaaccaaggatttagtgactttgatagaatgcgattcataaattcgagtcatatgacttctccaaactcaacaccaaacttcactggctggaaaagcctgttacatgaaaggttagctggtgtacaaggactaagcatggattggcaaacttcaccggttgttccaagttcttccattgtgaagaagatattgcgcttggatattccggaggatagctatccaaattttaattttgttggccggcttcttggccctaggggcaattcactgaagcgagtggaagctactaca

SEQ ID NO: 52431 - DNA, 428 bp, Glycine max
ccatttttcttgttctgttccctctagggtttggtctttgagtgctctcaggtctctggatttgtctgataacttgttggagggagagattcctaaggggattgaggcgatgaagaatttaaggagtgttagcgtggcgaggaaccggttgactgggaatgttccttatgggtttggaagttgtttgcttttgaggtccattgatttaggggacaattctttttctgggagtattcctggtgattttaaggaacttacattgtgtggttacattagcttgcgcgggaatgctttctcgggaggggttcctcagtggattggggagatgagagggcttgagacgttggacctttcaaacaatgggtttaccggtcaggtgccaagctctattggaaatcttcagtcgttgaagatgctgaatttttctg

SEQ ID NO: 52432 - DNA, 440 bp, Glycine max
gcgttcttcggaggtaaaatgcgcaagttttaggcttgctgtggaagcacacaacatccgagcctttaaaaccattcctgaagagtgcgttgaaccaacaaaggactacattaatggcgaacaatttagatcagactctaaaacagttaaccaacaagctttcttttatgctagtgaacgcgaagtccatcacaacgacatatttatattcggcatagataacaccgtactctctaatatcccatactatgaaaaacatggatatggggtggaggaatttaatgaaaccttatatgatgaatgggttaacaagggcgacgcaccggcattgccagagactcttaaaaattacaacaagctgttgtctcttggcttcaagattgtattcttgtcaggaagatatcttgacaaaatggccgtaacagaagcaaacctaaaga

SEQ ID NO: 52433 - DNA, 363 bp, Glycine max
gactcagtcgggcgagcctgatcgatttctgaaagaacaaagatgacggcggatattgggctgattggattggcggtgatgggtgagaaccttgttctcaacatcgagagccgagggttcactgtggcggtcttcaaccgcacgacctcggtggtggacaagttcttggaagcacgagccaagggcaagaagatcattggcactcattccctcgaggagttggtgagcaagctcaagagaccgcgcaagatcatgctgatgatccgagctggctccccggtcgaccaacagatcaacgcgctgcttcccttccttgaagctggagacatcgtcatcgatggaggcaactcccactatcccgac

SEQ ID NO: 52434 - DNA, 427 bp, Glycine max
gtggcttgggaaaaggaatggaaccatgtggaggttagttatgaaagtgtgttagcctatcaaatcatagagagctcagtcattaaagcaactggaatccatatagtcagagaagaaggcagtacgtatgaagatattcgatttgatgatccttatctcagcagctctgcatcagaaagcagtagggaggaagatattcgatttgatgatccatatctcagcagctctgcatcagaaagcccctccttcctacaaaccttagctttggggacacgcaagttttccattgcttttttcttattcttttcatgttttttattttattattttgggttccgttgtcaaaaattcacttaacccaactgctcttcaccctatcttcatcatgtacttttgacgcatttatatatattcatcttttacgact

SEQ ID NO: 52435 - DNA, 200 bp, Glycine max
ccaagacttgcaagactccacatgcactaggctctcttctctctgctctcatgcaacactgtgcacctccacagaggaggtttcctctggagagagggctttcccctccttggtggcccagtggggaggaagtttggtggggccaacagggccttctggcccaagaacacggcccacctccttacagaaagccccatgac

SEQ ID NO: 52436 - DNA, 424 bp, Glycine max
cctacgcgttcggggtattagtaaagaagagaaatacatgctgcggaggattggcttgatgatgaagcccttcctgttactaggtagacgaggggtttttgatggaacggttgaaaatatgcatcttcattggaagtatcgggaacttgtgaagataatatgtaatggaagcctggaagaagtccatcagatagctctgaccttagaggcagaaagtggtggaatattagtggcagtagagagagtgagaaagggattcgcaatcattgtgtatcgaggaaagaattatagtgtccctgtttgtttgaggcctcaaacgcttttaaataaaaggcaagctttgaagcgttctatagaggcacagcgccgagagtcattgaaacttcgtattttgacgctagataaggaaataaatgaattgaag

SEQ ID NO: 52437 - DNA, 364 bp, Glycine max
atcgttttatacatttttatagattttgcaatttaattttagtacacaattttgataggtagtactaccatataagaggggtaagggttaggggttaccagatttgttttcagtgagctgaaaagttatgaaattttcatatgagacaggtctacgattcagcaaaggaggacttcgtggcaagatggtgttcttggcacaaactatcatattcctgcaaagtggaattggacttaccagtttcaggtgaaagatcaaattgaaagctttttctacttctcttcccttcatcttcaaagatgaaggggtttcatcataaacaacaaacttgtcattccgattccttttgatactctatatgggg

SEQ ID NO: 52438 - DNA, 359 bp, Glycine max
gctttgtgaagagtttgcattattaggatcagaacggttagattctgatccagacatggatgaagatgagaatgaagctgtgagaaaagaagagtcaggaaatcaatctgattcagaggaatttgaagtagaaaaattacttgctgtgtgctatggtgatccaaacgacgtcaaaaaaccaggactatattttaaagttcgttggctgggttatgcttccagctatgacacgtgggagccaatagaaggattgagtgattgcaaggaagctatgaaagattttgtgacaaaaggctacaagaaaagattattgcctcttcctggtgatgctaactttatttgcggtggacccccatgcc

SEQ ID NO: 52439 - DNA, 462 bp, Glycine max
cttacgcgtgggttttggtttcaaccaaggaaacccactgaggcttacttatggacttgactacaaagggaatgtgtgtggggacaagcatgcacaccctggccttagtgaattagagctcagatattggcaaaatcctaatcaggtttatcagagtggattgaaggatagccaattcaaactggctgatgcccgcagtatatgcttgtcggagtgccctatgccttcagaagattcccttaattgggtgtgtgattatcctgaaggagatattcgtctttcgatgaaagattggattaataggaactatgattattttgagttccttacaccagaaatgagaaactcgtctcttcaactacagggtccttgttatcctgtcatatttcccactgtaaatgtttactggagttgccaatttattgctcgggcgtcaaatacatctttgaagcattggcagca

SEQ ID NO: 52440 - DNA, 435 bp, Glycine max
actggagctaacatctcttccccgtctaacaactcttctgcttgatcataaccagctcacagggccacttccatcagatataatatcatggaagtccctaataactctagatttgtgccacaatcaactctctggagtaatcccagacgcaattgctcagttacctggccttaatattttggatttgtcagaaaacaaaatctctggtcaaattccacttcaactagcccttaagagactcacaaatctcaatctgtcgtccaatcttttgacagggaggattccaagtgaactagaaaaccttgcttatgccacaagctttttaaacaattccggtctctgtgctgatagtaaagtactaaaccttaccttgtgtaattctaggcctcaaagggcaagaattgaaagaagatctgcatctcatgctataatcat

SEQ ID NO: 52441 - DNA, 378 bp, Glycine max
gttttcttgtcaaatggttccctctttgctgttcttcatggaagcatggaatactctttagattgggctagcatatacagaatagcggttggggtggctcaaggactttcttttcttaacggattcacctctagtccaatactactccttgacctgtcaagtaaaagtattatgctgaagtcccttaaggagcctctagttggggacatcgaacactacaaggcgattgatccctcaaagagtacaggaaatttttctgcagatgctggttcagctggctatatttgtccagagtatgcatacacaatgacagtaacaatggctgggaatgtgtacagctttggagtcattctgcttgaactgctgacaggaaaacct

SEQ ID NO: 52442 - DNA, 385 bp, Glycine max
tcggttgaccaacaccttgcatttgtcagcattgagcaacagagcccggatatcgcccagggtgtgcacggccacttcaccaacctccgagtacatgcccctcagccatgtccttgcaaccaaacttggtgctcgcctcacagaggttaggaagaatggcacctgtgcttggttgaggccagatggcaagacacaagtaaccgtcgagtactacaatgacaatggtgccatggttccagttcgtgttcacactgtcctaatttccacccaacatgatgagactgtgagcaatgatcaaattgctgcggaccttaaagagcatgttatcaagcctgtcattcctgagaagtaccttgatgagaagaccatcttccaccttaaccct

SEQ ID NO: 52443 - DNA, 220 bp, Glycine max
ctacactcctcctcttctcacgggcagtgttttagggcagcttctttctttgagatgagagtttcagtactaatgggtagggaaaaggttcacattaacatcgggggcattgggcatgccgactctgggaagtcaaccaccaccggtcaccttatctacaagctcggaggtattgacaagcgtgtcatcgagagattcgagaaggaagctgctgagatga

SEQ ID NO: 52444 - DNA, 287 bp, Glycine max
aaaccaaatacagtttgctttagaaagaggaattccggcatatcttggtgtcttggggacactaagactcccttaccctagtagatcttttgagcttgcccattgctctcgctgtagaattgattggcttcagagagatggcatacttcttcttgagctagataggatactcaggccgggaggctactttgcctactcatcttctgaagcctatgctcaggatgaagaggatcagagaatatggaaagaaatgagtgctcttgtagggaggatgtgttggaaaatag

SEQ ID NO: 52445 - DNA, 452 bp, Glycine max
tcgttttttctctcctcgaatttgttccctctccttggtcccctcccaacatcatcctcttttgttccgaaattctcgggttctctgctaatttccgccattttttttgtccacaccaagtacttgtgctctgaccggcttccccttccgtaactcgtcactcactaccgcaagctctcttcgcaagatcgagcccgtgcataggttctccgggtacccaattgaaaaaagttgagatttgatatcatatccagaagtgagtagattcgatactcacgagttcagttctgattaggattaggaagtgtaaggatgaagagagggaaggatgatgagaaggttgatggggccaatgttccctagactacatgtcaatgatacagagaagggaggcccaagagcaccacctaggaataagatggccctctacgagcagtttagtattccttctc

SEQ ID NO: 52446 - DNA, 408 bp, Glycine max
ctctgccaggggaacaaactggagcatctcatcacgttcgcgaatcgcttctctggaacgctccctgaccaatacggcgagtgtgtttcacttcaatatgttagaatccagaacaaccagttctcgggcccggtgccgccatcgttttgggcccttgctgggcttcagtttctggaaatgtccaacaacaggttccaaggttctgtctctgcttccatctctaggggactcaccaaactcattttgtccggtaacagcttttctggccaattcccaatggaaatatgtgaacttcataatctcatggagattgacttcagcaagaaccgcttcaccggtgaagttcccacgtgcgtaactaagttgacaaaattacagaaacttagactgcaagagaacatgttcacc

SEQ ID NO: 52447 - DNA, 369 bp, Glycine max
gaatggtatgccctccctcatgccatcctccgtcttgacttagcagggcgtgacctcactgatgccctgatgaaaatccttactgagcgtggttattccttcactaccacagccgagagagaaattgtaagggatatgaaggaaaagctggcctatattgcccttgattatgagcaagaacttgaaacttcaaaaactagttcttctgttgagaagagttatgagctacctgatggacaggtcatcaccattggtgctgagcgtttccgttgtcccgaagtcctcttccagccatccatgattggcatggaagctgttggcattcatgagaccacatacaattcaattatgaagtgtgatgttgatatc

SEQ ID NO: 52448 - DNA, 374 bp, Glycine max
gattagaacgagtgaagccaaagatatgaaattggaagtgatatgaaacatgaagcattcttagcaatgagggaagaacgacaccacaaggacgagtcgagtgtgcttgtctatgcttcttattaaagcccacatcgtgtagtgtactgagaggaagataactattgatggtataaaaaagaaagcttctagtctctcaaaattacggagtcgtgtaatggctacaaagcgaactattctttcgccttttactaaagaataccgtgtagccgttacataaagcgacatacgcctatttttggaagagtttctctgtatagagaaactctgttatgggtttaaccttttttgcattcgtcatgcttattttatat

SEQ ID NO: 52449 - DNA, 327 bp, Glycine max
cacttgaacctccacaaccgttcctccttccacctcctcctcaagccatggaagaaaaacgggtccaagaagctttctcacaatacggtcttcctctggaacctctccaacgcgaggttcgagtctggactcgaacctcgctctagattctacctcgccatcgaggtagaacatggcctcagcctactcattggggacttatcccccaggagtagtaaggccaagaagcccagcaaaacaaaccaattactcgtcctgaagcgggacaacgtccacgtggcgccacaccgcagccgggtgtaccaaaccaaagcgaaactcggaggt

SEQ ID NO: 52450 - DNA, 439 bp, Glycine max
  unsure (1)..(439): unsure at all n locations
atattatgattatcagaaaagntaaactccatcgnggaggtggtgtttttgactattctaaatggagggatttgaaagtaggagatgtagtgagggtggaaaaagatgaattttttcctgctgatctcatcttacttgcatcaaactacgatgatgcaatttgctatgttgagaccatgaatcttgatggcgagacaaatctgaaactgaaacaagcactggaagcaacttcaaagttgcatgaagactcaaactttcagaatttcagggctgtcatcaaatgtgaagatccaaatgcaaatttgtacacatttgttggtagtatggagctcgaggatcaacagtaccctcttgcacctcaacagctactgcttagggactctaagctgaggaacacagattttgtttatggcgtggtaatatttactggacatgatac

SEQ ID NO: 52451 - DNA, 212 bp, Glycine max
gaaacgaggccaagctagctgggcctacattggacatctatagaatgatacaatgtataaaacgggagcctaaaggagtattttaccaaaaacatacagttcaacctaaggagaagggtgacataagtgagcattcaggagcttccgggataatagacatgaatcttactgcagatatgaccgatccaactgtacctactaattctagaaag

SEQ ID NO: 52452 - DNA, 297 bp, Glycine max
cctactcgtccgcccacgcgttcggagcgcttgtgagcaatttcatcaatttagactggagagcatatcttagctttttgaattggatgccagaagcacttagaatgccagaacctgagcttattgaccatgctggattggattctgttgactacctgcggatttacttgatagggcttaaaatctttattcctattgcattcctggcttggattgttctggttcctgtcaattggacaagtactggtctagaaggatcccagataaaaaacataactttcagcaacattgataaac

SEQ ID NO: 52453 - DNA, 347 bp, Glycine max
gttggcctttcgtgcggccacgcgttcgttcaaaggcatgctgaattgactagaaaaatgaagtctatgaagggtagcagcagtagcggggaagatagcagggaacaggaagaggatgacaactctgctggttctgatcaggacatggattacaagattttgggaaaagctaaagaaaaaacaatgaaagtgttggaggaagaggaagaagttcccaaatcaggattgctttctttgccttttatgaggcgtggattggagaaaagaaaagaggcagctgctgaagaagctaaccttgctttccaagaatacgaagattccttgaagaagctggagaattctggtgg

SEQ ID NO: 52454 - DNA, 511 bp, Glycine max
tgatttcttaccaatgtcagccactccattggaagatatattcaagtctcttttctgtttgccatgcctattgtgcttgaggtgcatgagggatacatgtattccagaggagaagatgctcagagatcccaggagactctatgcacccggtcgcctttatcacattgttgagaggaagccttttagaatgggaaggtttcccccagtagtgaggacagcagtgccagtagatggaaggtttgagcatatagtcctttcttgtaatgccacatctgatcatgccatcatttggatagagaaagaagcccaaagagctctggatttgatgctggagaaagatcaacccatggaaccccctgccaagcaaaagatggagcgtcaggaaacgctaactagacacaatgacgaatataaagctgcattacaaagggccaaaacattagatgttccacatgcttatacaccgccatcagagtatggcacttttgatgatgagggagatgagaactca

SEQ ID NO: 52455 - DNA, 406 bp, Glycine max
gcggacagcactcgtagtgtccagttttgggacagtcaacatggaactctcttgcaagcacattctttacacaagggacatgtacatgctctggcagcatgtcctagtcataatagggtgttctctgctggttctgatggccaggtaattctttacaagctatctagtagtcagtcaacatcatccaatgatatcaatcctccatcaacaatgaagagatggatctatgttcactatgtaagggctcatacacatgacatcagggccctagctgttgctgtaccgataagtcatgaaggtcaatatttcagtacagccaaccgtacttttcaatgctgaaaaagtgtttctttgccataggaaagcttatccaaatgggcagtatctttagttgatattttatgca

SEQ ID NO: 52456 - DNA, 431 bp, Glycine max
ccctcgcgtccggacgaagggggagtagtagtgctccacgattgcctttgccaacgcgtctggatccatgtcgcttctcgcttcgtcagcggcaacctccagctcgccggcgaacaacacgccctcaagttcagccaaatgttccatttgataccaacaccacagggaagctattatgtgttgaatgacatattccggttgaactatgcgtgaaagatagacctctgagtatgttgacatttgcctacagctgttttgcttcagacatttgcatttgagaattaacgagttcattttggttcgtgttgaacgcataattgtgcctcttctgttttagaatttcctgttgcgattggtcaaaacgctttcatcgataaattgttgaagattgatgcaaattggagggtgaaaacttttatttttttatatat

SEQ ID NO: 52457 - DNA, 503 bp, Glycine max
  unsure (1)..(503): unsure at all n locations
ctttgctccttgngtggtcaccattcttgnnggagatttcaactctttctccttcagacttcttggctttatgtgatgatggctctcaatatctcttctcctgctgaagtcaagtccatttttttcgctgattacttcaagtctaactgcatcactgcaaagttcacaggtggttttgcttttaagagaaaagagcgtggagctgcatctggagggcgagtttgttgctcagtgctggcaccaccaccaccaccggcctggccgggacgagcggttccagaacaaggtagcaagacttgggatggaccaaaacccatttcaattgttgggtgtactggttcaattggaactcagacactagatattgtggcagagaatccagataagtttaaagttgtggcacttgcagctggttcaaatgttactgttcttgcagaccaagtaaaaagatttaagcctcaacttgttgctgttagaaatgagtccctaattgctgaacttaa

SEQ ID NO: 52458 - DNA, 517 bp, Glycine max
  unsure (1)..(517): unsure at all n locations
ngtaatcagcttcattaagacgangnnnctaagggccctttcactggtttaatttccaagtctccttctcttcaacagataagtactcctggatcagtctcatcttcaccaaattcagttaaagtggacaacttgccatctgtcaaaaaagaaaacatggatggttctggtgggactcgacgtttgatggtgaatgttattgagccacagtttaatcttcactctgaggatgcaaatggtagatttttgcttgctgctgtaagtggccgagttttagcccggtcatttcattcaatccttcatgttggttatgagatgattgagcaagtacttgctactaaagatgtacaaattaacgaataccaacctgaaatgacatggaaaagaatggaattctctgttatgttggaggatgtgcaggctcatgttgcaccaacagatgttgatccaagagctggattgcagtggcttccaaaaattctcaaaagctctccaaaaatattgcgtacaggtgctc

SEQ ID NO: 52459 - DNA, 257 bp, Glycine max
caccacccccaccatacaagaacccatttccaccaccccacaaacaagtacccattaccgccacccccagtgtacaagtacaagactccaccacccccagtctacaagcacaagtcacctccaccaccatacaagtacccttctcctccaccaccaccctataagtacccatcttcaccacccccagtgtacaagtacaaatctccttctacttcctacaagtacccattttcaccaccttcaccctacaagtaccc

SEQ ID NO: 52460 - DNA, 325 bp, Glycine max
  unsure (1)..(325): unsure at all n locations
ggtaaacaacatttatcagttgagtactgttccaaaagcataaccattggttccgcatcaaagccactatttgtcagtaatggggatacaaaatcattaaaacgngaaggaactttctaatggttatgcttatgggtcagtactcaactggtaaaacaacatttatcaaacatctgcttaaaagtagttatccaggagcacatattggacctgagccaacaactgataggtttgatgttgtcatgtctggatctgaagagagaagcgttcctggaaatactgtagctgttcaagcagacatgccatttagtggtcttacaacttt

SEQ ID NO: 52461 - DNA, 445 bp, Glycine max
aattcctccaacgatgtcctcttcaacacggcacctaacccttccaaccccgaaacttttcttatttttaaggatcaatacctgcagctctcttcctctcttccatcacaaagagcctctctattcggcctcggggaacacaccaagagctccttcaagctgcgaccgaaccagacccttacactgtggaatgcagacattggaagtgacaacttggacgtgaacctttatggctctcaccctttttacttggacgtgagatcaccctccgctgatggaacagtcaaggctggcaccacacacggggtgttgctactcaacagcaatggaatggatattgtgtacggcggtgatcgcattacttataaggtcattggtggagtttttgatctgtactttttctctggatcctctccagaactggtgttggagcagtacaccgaac

SEQ ID NO: 52462 - DNA, 370 bp, Glycine max
cttctcctttcaactccttgctgagagagagagaaagaactgacatgatggggcagaatcgttttccagaagaaaggaaaagagattggcttggtgcccttttgaagtgcggctttggatgttgtgaagaacacaaagacattaggtttaatgagaagaatgtgttctgcatagattgcgtagctggcttgtgtaggcactgcaaggaagctcattctctccatagaaggtttcagatatacaaatattcctatcaggatgttgtgcgccattatgatcttcagaagtattttgattgctcaaatattcagacttatgtgtccaacaatgaaaagattgtgcatctcagaccccggacttcaaccaaaga

SEQ ID NO: 52463 - DNA, 445 bp, Glycine max
aggttatcttcatctgtgcatacagcaatggaagaagcacttgttcgtattttaacccctaggcgttccattgacatattgagggatgttcatgctgccaaggagcaaaggaagccatatgttgttgtgtttgttggagttaatggagttggaaaatctactaatctagctaaggttgcttactggcttctgcaacacaacgtcagtgtcatgatggctgcttgtgatacatttcgatctggagctgttgagcagctgcggacccatgcacgcagacttcagattcctatatttgagaagggttatgaaaaagatcctgccattgtagcaaaagaagcaattcaggaagctgcgcgcaatggttcagatgtggttctagttgatacagctggccgtatgcaggataatgaaccattgatgagagcactgtcaaagctcgtctacc

SEQ ID NO: 52464 - DNA, 289 bp, Glycine max
attttgtctcgttttgactgaaatgcaaggaacagggtattttagggagttatcctcaccaggctcatgggatcattcaagagagtaatggaaaaactggatcaactttgtttggaaaatgggatgaacgcatgcattatgttaatggagactacactgggaaagggaaaggtcatgaatctttgatagatgcccgtttgctctggaagctgaatcaaggctcccaagtttcccactagatataacttcacccgctatgccatcacattaaatgaacttacccctggat

SEQ ID NO: 52465 - DNA, 228 bp, Glycine max
  unsure (1)..(228): unsure at all n locations
ggactcganggcattagtggaggcnaagaagacccggcaangngtatggcatttgatccagaangactcaatccatgcacggggcctggataggcagcttggctattgcgcacagggagatcgaatgagaaatgttggtgtggttgattctgagtacatagatcatctgggtctgcctactcttgggggctcaaaagagaatgaggcaagtgattttcatttgtacat

SEQ ID NO: 52466 - DNA, 361 bp, Glycine max
  unsure (1)..(361): unsure at all n locations
tgttcncggagtttcatggctnccgaagcnccgagggctgctgcgggcattctaagtctatcccctcaagttctcgcaaactatgagaatcccccagtgtacaagcctcccactgagaaaccaccagtttataagcccccagttgagaagcctcctgtttacaaaccttcagttgaaaaccccccaatttataagcctccagtagagaagccaccagtgtacaagcccccagttgagaaacccccagtgtacaagcccccagctgaaaaaccaccagtgtacaagcccccagttgagaaaccaccagtgaacacgcccccagttgagaagcccccagtttacaagcccccagttgaaaaac

SEQ ID NO: 52467 - DNA, 381 bp, Glycine max
  unsure (1)..(381): unsure at all n locations
gagatcgatagcgaacaagtaccgcgagggaaagatgaaaaggtctttgaagaggtttcaattcatatcatatcaattagatttgttttcagagtttgctagtgagataccatggacaactacaacagcaatgacttttggaaattcagtgaccagttgaggcttgaatctggtttggccaatctgtctctgaatgattattccatttggagcaacagctacagctccaagaggcctgatcagaggaggaactttgatgtcaagggcagtgatttcaacaactcatcaaagccttttgatgatgatttcaatgatggctggaagatcaccaattccaatggaccccttttctctatgcctnacaacaacaacactcacact

SEQ ID NO: 52468 - DNA, 333 bp, Glycine max
ttcttccggattgaaagttaagtggaggtataaatcaagaaggaatcgattattacaacaaccttatcaatgagctactagcaaatggtttgaaaccatttgtgactctttttcattgggatcttccccaatctttagaagatgagtatggtggctttttaagccctcgcattgtgaaagattttcaagactatgcagacctttgcttcaaggaatttggagatagagtaaaacattggataactttgaatgaaccatggagttatagccaacatggttatgcaacaggggaaatggcaccaggtcgatgttctgcttgggcgaatcctaatt

SEQ ID NO: 52469 - DNA, 390 bp, Glycine max
aaattaatcaaacactgctcagaggttgaatgaacgcacgcacgcacgctcgcagagttgatcatagtactgaaagtgattcaattcagggccgagttgcatgagtggaatcggtggaaatgggagcgagtcgaaaactccaaggcgagattgatcgcgttcttaagaaggttcaggaaggcgtcgaagtcttcgatagcatctggaacaaggtttacgacaccgataatgcgaaccagaaggagaagttcgaggcggacctgaagaaggagattaagaagctgcagaggtacagggaccagattaagacatggattcagtccagtgagatcaaagacaagaaggttagtgcctcatatgagcaggctctggtggatgcacgcaagctta

SEQ ID NO: 52470 - DNA, 239 bp, Glycine max
ttctataccaaaattcagtgaggagttgaagtttgcttcttgtatgagaaaattcacattcaatggacttaaggtggcaactaggaatttcagaccagagagtcttcttggtgagggagggtttggttgtgtcttcaagggttggatcgaggaaaatggaactgcacctgtgaaaccaggtactggactcacggttgcggtcaagactcttaaccacaatggacatcagggtcacaaag

SEQ ID NO: 52471 - DNA, 377 bp, Glycine max
gtttcactgatttctttagggcctactatatcaggctaaaattaaaaaggcaaatacttttgttcaatcatttgcttgagcatcagtatcatatgatgaagtatcccttgcctacaaagattccactggctcccatacagaatggagtccatccaatgcctgtcaacaacctacctatgggataccctgtgctacagaagtcttccattcctgcagctggtcaaccacatcttgactccatgggtagcggtatatcaagttgtcatgtagttaatggagtcctggcatcaagcaactcccatcccattagaattcacgggaatggtatggtgatggaccacagtgctcctgttattccaccaaatagtgcgatgtca

SEQ ID NO: 52472 - DNA, 372 bp, Glycine max
gaaaaatttctaacattctctatgtccctggcgatattgtcaaggttggagaaactctgttaaagatattagttgacgagtctacattttcttctgggatcccttgtgattccgaaaatgcacagtcacctgatactgatcagacattagttaatgagtctgtgtttactacagtaattgatgattcagacaatgccaagttgatagattctgatcctggaaaagggagacaaactggagtatcatcaacacctgctgtaagaagtctagcaaagcaacatggtatagatataactgaaatctgtgggactggaaaagatggaaggattttaaaagaagacgtgctcaatctttctgtcaagaaaggaatca

SEQ ID NO: 52473 - DNA, 499 bp, Glycine max
tgtctaaattctctctctctctctacaaaactctctctttctctctctagaaattccattttaaagagatgctcatgctcctctctttaccttgctcccgttaaagctacgcttccaactctttttttcttcattcttatagggatagagctgtgttaactggtcctggttggtgagggtgctattggtgttgttctgttgatgtaagcagctgaatattgtttctatatcagaatgggtgctgtttgttgtgttgctgccaaagataaaactatacaaagtgcatcacccagtgaaatcttgcatcggaatattcgacattctccaacatggaacttccgctgggatcatcgagggcgtgtagctggtgaagatactgctgtaacttggttttctaacagtattagcgggaatgatggatttgagaacaaaaatgaatcctcgtatgtatcggaggatggaagcccattgcagaattatcaaattcaaaggaataata

SEQ ID NO: 52474 - DNA, 378 bp, Glycine max
cggtcgcgtgggcggacgcgtgggcggacgcgtgggcggacgcgtgggctttgttaggcaatacaacatttattacgcatactcaaagtagcttcgaagttcgtatttttattggcatatcatggagaataataatcagtcgttttggcaattcagtgaccagctgaggttacaggcatctaatttggcgaacctttctctaaacgattcgatttggagcaacagttacatctccaagaggcgtgatgaaaggattaattttgacatcaaagttgggggtgagatcaactctttcaagtcaaaggagccagcttgtgattacaatgaaaacatgaatggatctcttcttgccgtgccttacaacaacaataacatttt

SEQ ID NO: 52475 - DNA, 234 bp, Glycine max
tcgcccacgcgtccgcccacgcgtccgggctttctttattctctccttcctcttccttcttcttgtttcatctgccactgcttgtgatcgctgcttgtatcaatccaaggcttcctatttctccaaagcttctgctctttcatctggggcatgtgggtatggctctttggcactagacataagtggtggacaccttgcagctggtgtggattctctcttcaaaaatggagcagg

SEQ ID NO: 52476 - DNA, 476 bp, Glycine max
tcggtttgaatctccaatgacccctttactggaatctgcattgccaatgtgacaattaatatggcagccaaggccaagaagcagccatgggcatgcactgatattgaagggatcacaagtggggtgactcccaagccatgcaattctttgcctgatcaagggccagagaaaatcaaagcatgtgattttccccaagagaatctaccaattgatatgttggagcttcagaagtgtgtttacaagcattaagcatgcatgactacacttgttttaagatgcgtcttatagatttatttaaggctagtcttttcccatttcatccagaaatcattgctcaagatgagaaatgaattttctgtctagtaatgaaacaatttttttttctctacaagttgatttaagaaatggctttatggttcttaaagcctaagcattatgctgttgcattaatcaaattttgctagttctggtttggt

SEQ ID NO: 52477 - DNA, 285 bp, Glycine max
tctttaatatttacaggagcgacctgcactcattgtaacttttgtggacctcgactgggaccatcccgcctggttggaaatgcgcgcagaatgtgaagccaaaatcaacgcaatgagacagaaaattggtcagcgggagacaaagttagcactggtgttgatccaacctccaaaggcaacatccatggacgacccaatagcgaatgaaaaagcgcttgaattgtgccagcattgtcgtttgaactcacgtcttttgttcgtttttccccgcctatctgatgatcg

SEQ ID NO: 52478 - DNA, 391 bp, Glycine max
tcgagaaaagccttcttttttcccctcactatttcctccatcaccctctgcaacattaccaacctgctgctttgttgcaatcagggtattggggtagaggagcgatggatccggagccagggcggtgccggagaaccgacggcaagaaatggcggtgctcgagggacgtggtggctgggcaaaagtactgggagcgccacatgcatcgtggaagaaaccgttcaagaaagcctgtggaactacccacaccaactagtgctaataattgtgatggtggatctctaggactaggagcttcttcatcttccatttcttcaccacccctagcttctgcttcactcaaatccccatttgatcttcttcgtcttaatgaacggtaatcttaatgcct

SEQ ID NO: 52479 - DNA, 413 bp, Glycine max
acagtggaaaagggaagctaaaaagtggtacccaaaattccatgtagagcttttacatgattctgctcaagattctgctccaagaaagaagcgagctaaatctgaagaaacagactatgaaagcaatagtaaaagtgatagtgattatgagaaaagtgtggcatctaaaagtacaagaaaatgggaatccctgataaatcgtgtcatgagatcagaatctggattacttatcaccacttatgagcagctcagaatattgggggagcagctgcttgacattcaatggggttatgcagttcttgatgaagggcatagaataaggaatccaaatgctgaagttacccttgtttgcaaacagctacagactgtacaccgcattataatgactggtgcacctattcagaacaaactga

SEQ ID NO: 52480 - DNA, 382 bp, Glycine max
gcttactttgggatacatgataccccttgttctgaactttgaggcacttattgctcaaaatcctaacaacaaaaactttgtgtttggaaatgttgtgtggcttgaagtgaatgaaatagctgtgaggctaatcaccatggtggctttcttgttgcaattccgactccttcagctaacttggtcatcaagaaagagtgatgaaagcaataaaggcctttggattgctgagagaaaggctacttgtgtcactttagccttgtacgctgctggtttattgattgcattgctgttgaagttgaagaaagatggagatgcggttcctgtcattactccattgaaccaacaccattcatcttgggagaacataaaatctatggcggtt

SEQ ID NO: 52481 - DNA, 383 bp, Glycine max
catttacacaatggccaaccatgcagctcaaaaccctatatctgttttccttatgaccttcctcttgctaattaccagctccaaatcagactcattttctttcaacttcccaagttttgagcctggtgttagaaacatactagtcggtgatgatgccaagacaacaggtggagtgctacaactcaccaaaaaggaccaaagcggaaaccctactcaacacagcgttggcctctcagcatactttggaccacttcatctctccgaccgaagaaccggtagagtcgcggactttgccaccgagttctccttcgtcgtgaacacaaagggtgcgccactccacggcgacggcttcaccttctttcttgcatcaatcgattatgaat

SEQ ID NO: 52482 - DNA, 104 bp, Glycine max
catactctcaagtccaacctacccctttttgttctcccaccaatttcaccgtcttcttgctcgatcatgtgtcacttcaagggcaagtaccatgatgagcttat

SEQ ID NO: 52483 - DNA, 320 bp, Glycine max
cggacgcgtgggatgctcccagctgtggtagatccttcaacagtgcagcgcttctctgaccgggttgttgatggtctttcagctctttttttggcattaaagcgaagaccagtaattaggtatcaaaggacatctgacattgcaaaaaggatagcacaggaagcagctaaattgatgtaccaagaggaaagtggtctttttgattttaggcgaatggaagtttctccactgctgttagtgattgacaggagggatgatcctgtaaccccattactaaatcaatggacctatcaggctatggttcatgaattaataggaat

SEQ ID NO: 52484 - DNA, 414 bp, Glycine max
aagtaaactcttctcttactggccttctcattcttttctctccgccatggacatctcattgccattcacagtcctcttgattatctcaatcctctgcaaccttaaaggactcgaacattcttcactggtagagggagagggaatggatttcagcgagctgagaaaagcagtggaggaggttgaactggtggatggtcactcccataacatagttgccctaaactccacctccatctccggttttgttcaggcctttactgtgggagcctttgttgatgctgatgccattgcttttgcacaaacctctctatccttcaagagaagtttgagagatgttgctgagctataccgaaccgaggtatctttgcaaggtgtagaggaataccgtaaagcgtctggaatagaatccatcag

SEQ ID NO: 52485 - DNA, 275 bp, Glycine max
  unsure (1)..(275): unsure at all n locations
tcggttgagttcttaaaagcatcgncagatatgnggaatgattttgattcacgtgtattgcgatacaaggtccttccaccactttgtgcagagcttaggaatgtggtgatacagccaatgattctaccaatggttctaaccattgccgagtctcaggacaagaatgattttgagcaatcaacacttccagcacttgtccctgtctttagttctgctgctggagagacactattactgcttgtgaagcatgctgagtttataataaacaagactag

SEQ ID NO: 52486 - DNA, 311 bp, Glycine max
tcccacgcgtccggtcacttctgattcatggaaaaggaagattcaactgctctaaatccccaagcgtaagcactgatgtttgtgacacatcaaaccctcaatgctctccctttgtacaaactgtgatcccgggaaaaacataccgactcagaattgctagcttgactgctttatcagcacttagcttcaaaattgaggtaatcaaatgttctctttagataaacttctttgtaaacccttaaggtaaaagaaacttaatgaaaaagtttctataacttaaaggtcaacttacacttcaacttttaaagttc

SEQ ID NO: 52487 - DNA, 401 bp, Glycine max
tcggacgcgtgggcggacgcgtgggtaaattctttgcaaataaatttagaatctcacatctattttatgttatgccaggggtttcaatgaggcactcaatgggtttactgatgagggatggacaacgattggcaatgatggtgtagatgatgttactattctagtgaactcatcccctgacaagttaatgggtctgaatctttcctttgccaatggatttccgtctgtcagtaatgcagtgctatgtgccaaagcatcgatgctattacagaatgtgccccctgccattctccttaggtttctgcgggagcatagatcagaatgggcagacaataatatggatgcttacacagctgctgctattaaagttggcccttgcagcttatcaggatctcgtgttg

SEQ ID NO: 52488 - DNA, 203 bp, Glycine max
ttatagaggagattatcttggaaagactgtacaggttgttccgcacgtaacagatgctatccaagagtggatagaacgtgtagcaaagataccagttgatgggaaagaagggccagctgatgtttgtgtcattgaattgggtggaactataggggatattgagtccatgccttttattgaagcacttggtcaattctcatacc

SEQ ID NO: 52489 - DNA, 425 bp, Glycine max
gtcttcttgagatgaaccaggaagtagtcaaagttattttggattgcaagaaagatatatggggaaactcagaattgttctccttggtgaatgattactttgataatagcctccacacattggagttctgtaactcacttgagaaatgcttgaggcaagcacgcgaaaaccagatgatagtcaagtcagtggttacctactttgaggaagaggtgcaaaatggggccgaaggggtgacttatgtgaagacattgcaagagcttaagaagtttaaggatgccggggacccctttactgaagagttttatttgttgtttcaatcggtttacacgcaacaggcatcaatgttgcagaaattgcatatcaggaagagaaagctcgataagaaattgaaatccctcaagacatggaggagggtgtcaaat

SEQ ID NO: 52490 - DNA, 355 bp, Glycine max
tccacgcgttcggaaagaaagaaaaccctagcttaccttttcaactttcaagatgcaaatcttcgttaagacactcactggtaagacaatcacccttgaggtggagagttcagataccatagataatgtaaagtccaagattcaagacaaggaagggatcccaccagaccagcaacgtctcatttttgctggcaagcagcttgaggatggacgtacacttgctgattacaacatccaaaaggagtccactcttcacttggtgctccggctccgcggtggaatgcaaatctttgttaagacattgaccggaaagacaatcacccttgaggtcgagagctctgacaccattgacaat

SEQ ID NO: 52491 - DNA, 404 bp, Glycine max
tttgagctcaacgacaacgctctctctctctctaaaccaaaactgcttgctctgttttcttcaggcttcgctatgagctcagatgctagtagagaacgcggtgcatcaaccgtggtggaactgaaatttcaatatagagcacttgtgtttttggcataccagagtttaggctttatgtttggtgacttgaccttatcccctctttatgtctatcaaagtatattttctggaagactgaaaaaggtccaaaatgaggatgcaatatttggcgcattttctttgatcttttggactctatcaattatttctttgctgaagtatgccattataatgttaagtgcagatgataatggtgaagggggaatcgttgctctgtattcacacctttgcagaaatgcaaaatt

SEQ ID NO: 52492 - DNA, 425 bp, Glycine max
ctgacgtgtgggttacaatcagctggtaaagaattatccaccacttgttcccattgaaacaaatctcaaagatgggattaacttcagttcttccaatttcactggattttcaaacattagaaacatgtacataactggacacagcaatggagccataaatttttgggatgcaacatgtccctttttcaccccaattttgcaattaaagcaacagagtgaaaatgatttttctttaagtggtatacccttgacggaattatattttgatagcaactctccactccttttttctggtgaccaaagtggaatggttcgtatctatagattcaaacctgaaccatatgcctcgaatagcttcatgtcccttacaggaggtacaaagaaagggaccgatcacgtaatccacagtatgaaacttataaaga

SEQ ID NO: 52493 - DNA, 326 bp, Glycine max
ttgacgcgtgggtcgatgcatgcttggagcacagcatcgagcacagcatctgagatctggtcacagagcttgtcagggtgcccctcgttcactgattcagatgtgaataggaaagtttcttgggccagatctccgatgctgtgctcgatgcatgcttggagcaggaccctgacagcaaggttgcctgtgaaacctgcaccaagaccaacatggtgatggttttcggagagatcacaaccaatgccaacgtggactatgagaagattgtgcgtgacacatgcatgaacattggttttgtctctgatgatgttggacttgatgctgac

SEQ ID NO: 52494 - DNA, 330 bp, Glycine max
tgaaaactcactactttcctctcttttcattctttttcttcttcttcttaatctccatcaacgccaaacttgatctctacccttcagaaacggagggcgtgctctgcgagcggaggcggctctccggcaaggaaacctacgcgctccgaatcaccagactcgtcttcaaatcgaacaacctaaatggtgttttgtctccttccatcggacgcctcacggagctcaaggaactctctctctccgacaaccaactcgttgaccgagtccctccccaaatcgttgactgccgaaagctcgaaatcctcgacctcgccaacaacatcttctccg

SEQ ID NO: 52495 - DNA, 246 bp, Glycine max
tttgctatactgagattggctatggacgatatctgaattgcttgaatgcattctggcatcctgaatgcttccgctgccgtgcttgcaacctaccaatctctgattacgagttttccacatctgggaattacccttatcataaatcatgctataaggaaagctaccatccaaaatgtgatgtctgcaagcacttcggcacatccattctggatccagaaatattgccctactcacgaacatgatggt

SEQ ID NO: 52496 - DNA, 251 bp, Glycine max
tacagaatgcggcaggaagccgatgcacaggctattgaagtttccaaacgcctggcaaaagtaagagaaacaccaggcaatgctgagaatgctatgaagctggaagcagctgaaacaaagctgcaagacctgaagacaaacatggctatattgggaaaagaagcagctgccgcaatggctgctgtagaagcacagcaacagaggttaaccctccagcgtcttatagctatggttgaagcagagcatgccta

SEQ ID NO: 52497 - DNA, 249 bp, Glycine max
ttccactcgtccgcattggtaaaacaactatggcaaaagccatttacaacaagattggccgcaattttgaggtaaaaagcttcctcgcaagtattagggaagtttgggggcaagatgctggtcaagtatatctacaagaacaacttatatttgatatcggaaaagaaacaaacacatagatacgtaatgttgactcaggaaaagttatgttaaaagaacgacttcgcaataaaagggcactccttatac

SEQ ID NO: 52498 - DNA, 437 bp, Glycine max
tttattttttgggcaggtgtattgtatggttgcacatactttgcagccgcatcttgtagctgttggaaccaacattggtgttattatctgtgagtttgatgctagatctcttccacctgttgctcctctaccaaccccatcagatagtaaagagcattctgccatatttgtaattgaaagggaattaaagctattaaattttcggttaaacaattctgcaaatccatctcttggaaataacagctccttgtcagaaacaggaagacccaagggagatttttttgaaccattacctatcaagcaggggaagaagcacataagtactcctgttccacatgattcgcattcagttctttctgtcagcagttcaggaaagtaagttgcctctgacttttgctacaacttggttgattttttttttctgtaaagaaattttg

SEQ ID NO: 52499 - DNA, 325 bp, Glycine max
ttttcttgcaagtgtgcaaaagaagaagggtttataaaggctgctttcatccatccattggtataataaccggacgagttcaagataggtcgggaagcttcagtttctgtcatgatatcaaaccatctttgaaggaattagtggccagggaactcgttgaacctggttattgcagccgtgtccctgatttcactgttggaagatttggttatggatatgtcaggtatctcaatgaaactgatgttagggggttacgtatagatgaaattgtgaagtttcataggcatgagatagttgtatacagtgatgaaaatgataagcctgc

SEQ ID NO: 52500 - DNA, 420 bp, Glycine max
cataatattaaaagctccccaaggcaccgaaatggaggatgtacaacaagagccagctcagactcctaagaaaagcaatgtccaagaaagtgacattcaatttaggtgcttagaccaagtggattctttaggattgattctcatcactaaccggtcaaggtacctgataaactggctggtgaactcaatgttgaagcttaagcatcccaacacacaaggggtttctttggtcaagatttatggtccaaaggtgaaatttgatagagggcctgctttggcattcaatatatttgattggaaaggtgaaagggttgagcctgctcttgtccagaaacttgctgataggagcaacatatctatcagctatgcatttctgcatcatatttggtttgcagataagtatgcacaagagaaaggaag

SEQ ID NO: 52501 - DNA, 462 bp, Glycine max
  unsure (1)..(462): unsure at all n locations
atacctttcatcactnggccagctcaaaaatttgggtgtgtttgatgcatcacacaatagactgcagggtcatatcccagactcattctcaaacctctcattcttagtgcaaattgatctatctaacaatgagttaacagggcagattccatctaggggacaactgagtacacttccagcttcccagtatgcgaacaatccaggactttgtggtgtaccattgcctgattgcaagaatgacaacagccaaaccacaacaaatccaagtgataatgttagcaaaggagaccgtaaatcagcaactgcaacatgggcaaacagcattgtcatgggaattctcatctctgttgcttcagtgtgtatcttaattgtgtgggcaattgcaatgcgcgcaaggaggaaggaagccgaggaagtcaagatgctcaatagcttacaagcatgccatgctgctacaacatg

SEQ ID NO: 52502 - DNA, 407 bp, Glycine max
gtgaatctttgaagcgcccggaagcacaagggctgcttttcaaacgattgctcaataactccaccttggacatggaatgcaccctccaatttctcctaaaccggaatggagggctctgatggatgagatggctgtcattgccactgaggagtaccggtccattgtgttcaaagaaccacgatttgttgagtatttccgcctggccacacctgagttggagtacgggaggatgaacattggaagtcgaccagcaaagaggaggccaagtggaggtattgagacactccgtgccataccttggatctttgcctggacacaaacaaggttccatcttccagtgtggctaggctttggtgcagcattcaaacatgttattgagaaggatgttaggaatattcatgtgctgc

SEQ ID NO: 52503 - DNA, 296 bp, Glycine max
ctgcaaatggagtcataccacagtctccaatgcacacaaaaagtctggcaactcttaaacatcaggtgccttcgaacaaactggtggtaaccgcacgaaaaagtatgggaaagaatgctagtttaggacagatatatggcaacatgctagaagcctacaatcaaatgcagacccctcttgtttaccaggacccctctgctcgagcacaaggactaagagaacttaaagaatcaaccattcaagcagctaccagtatgggaaacgtggatgccccaggagatgagactatatttgat

SEQ ID NO: 52504 - DNA, 286 bp, Glycine max
agctatatacgaggccggtggggcctacttggtgttgcttacggatggtatgaccagagcacccgttgttcggtttccctccgcccagcgcgccgggcaagtgaaattcttcttggaggagcctctcaacttcgatctctcttgctgtcgctttcaataagggcaagctgtgttggtttaaagttggctgagagagtgtttggtaacacattgagaatccacattcactgtaaaatcgcactgaaatcaacccaaaagcaactatttgttacttcaagaaaccacc

SEQ ID NO: 52505 - DNA, 368 bp, Glycine max
tcacgcgtttgtccacgcgcccggaattctgcagagagaagaagattcttaatcgatcatcacttcacttcactaatacatcatggcagacgagacccagaacaagtatgagagctctgaggttgaggtccaggatcgtggtgtttttgactttctcggtaagaaaaaggatgaagaagacaagcctcatcctcaggaggaggtcatcgccaccgagtttcaaaaagtcactgtctcagaccaaggagagaacaagcacagcctcttagaaaagcttcaccgatctgacagcagctctagctcttcaagtgaggaggaaggagaagatggagagaaaaggaagaagaagaagaaggaaaagaaagggc

SEQ ID NO: 52506 - DNA, 458 bp, Glycine max
  unsure (1)..(458): unsure at all n locations
ttaatnctgttatatcaaaattggttctgatttgcattcagatccttggcaattgtgtcatctcatgatatctgtttattatcgaaacaacatgctccaagatcttgttaagcttttcaagggactggaagcttttgatcgaaaacctcgggataaatctatcattcagaaagtggcaaatgcatatgaggtgttaggcttagttaaagagaaagagagggtactggaaaaatataaccatctcttcacagagacaggaccaaccaagagacataaaaggaactcatttgaggcaaagaaacatgtgcatcctacaaaagagaaaaggcatcagaagcaatctagaaaggcctcatctgaggaaaagtacaagtcagagcaaaaagatccaaaattggatattggacatatctagtgcactctnttctgatgccatgatggtattatgatatgatagt

SEQ ID NO: 52507 - DNA, 397 bp, Glycine max
  unsure (1)..(397): unsure at all n locations
gcagaagggangagcnaaagttgagaactgaggtactcaaatcaaactccaaaaccctatccctcagttgatggccatcaagaacaacaccagttaccgcgaattcacctccatcaacaaatgccaaacatagcacaccttttctcacttcaaccaaggaattgtgggcacatatgccataactcactttcctaaatcgaccatccatggcaagcttgatatctggcacagcctttccatccttgatggtattggcatcgaagcactctccaaaagggtgcacggatttcaccctctttatgtttttggccggtgctgcctccacgaaatctctaacaaagggcttgtagatggaatggtgcaacacagtgtaaggactcatggtgctaataacact

SEQ ID NO: 52508 - DNA, 359 bp, Glycine max
atgctcagcttactcctacgttctacagagaaacatgtccaaatctgttccctattgtgtttggagtaatcttcgatgcttctttcaccgatccccgaatcggggccagtctcatgaggcttcattttcatgattgctttgttcaaggttgtgatggatcagttttgctgaacaacactgatacaatagaaagcgagcaagatgcacttccaaatatcaactcaataagaggattggacgttgtcaatgacatcaagacagcggtggaaaatagttgtccagacacagtttcttcaacctcactcaacttaaagcttcctttgcttgtcaaggtctcaacacccttgatttagttacac

SEQ ID NO: 52509 - DNA, 360 bp, Glycine max
  unsure (1)..(360): unsure at all n locations
gacactngccactgancttccagtttgagcacagttgacggctttgcaacaagggaagcagattcatgcttatgctctgaaacattggtttctgccaatgtactctaagtgtggtgtttttgagtattctagaagattatttgataatatggaacaaaggaatgtgatttcatggaccgccatgattgattcttatattgaaaatggatatctgtgtgaagcacttggtgtgactaggtcaatgcaattgtcaaagcataggcctgactctgttggtataagaaggatgttgagtgtttgtggtgaactaaacttgtaaagctcgcngaaggagattcatgggcagatattgaaaaggca

SEQ ID NO: 52510 - DNA, 407 bp, Glycine max
  unsure (1)..(407): unsure at all n locations
cttaataacacacagnttgatcgatgatggaaacgttggccacatcttcttctgcaactcttccatcttcttcttctcccttttccattttcccttcaagaagaacttccctttatcctcccaagactctccaatttcgtttaccctcctccaagcactccaaagaaaaaaacaagcttccaattcttagtgatcgctgcctctctctttcccctctttccaaagatgctgcgatggggctggtgctgagtgctgcgacgggcagaggatggaccacgggttcagggatggaaggcccctctgttcctgcagttggtagggatagcgaatcggggacggggaacatctccactttcccttggtctctcttcacaaaatcccctaggagaaggatgctggtggctttc

SEQ ID NO: 52511 - DNA, 357 bp, Glycine max
tccacgcgtccgccaaaacaaaatttactaatttatcatagacatgaaacatatataagccttgagaaatttttccaaacatgtgcaggttagagatccacaaacagaaatcccacatgctagggagataaagctgggtgaactattgaagaagaaggcagaggaaggagtagctgtgagggttatgatttgggatgatgaaacatctttgccttttattaagaacaaaggtgtgatgaagactcatgatgaggacgcttttgcctacttcaaacacacaaaagtaatatgcagaaagtgtcccaggttacaccacgagtttcccacactctttgctcaccatcagaagaccataac

SEQ ID NO: 52512 - DNA, 271 bp, Glycine max
ttcacgcgtccgcccacgcgtccggttctttgttctttatttattccattcaactttcttcattcttccttgcctatgaggcacaagcctaccccccagtagtgaatggactatcatattctttctattcccaaacctgtcccaagcttgaatccattgtgagacaccatcttgagagggagttcacgcaagctagttggcaagctgcagccttactcgtcgttttcttccatgattgttttgttcagggatgtgatggatcgttgctgct

SEQ ID NO: 52513 - DNA, 220 bp, Glycine max
taactgcagatttccatacctattccattctttggaatcctcagcgcataatcctgagttatattaatcaatccatggtggttcatatgtacgtatgtttcagcttctcagtggatgggaccccaataagagaattcaagaacatggaatcaaaaggagttgcattcccaaaggaacagccaatgaggatatactctagtctatggaatgctgatgactg

SEQ ID NO: 52514 - DNA, 373 bp, Glycine max
ttcgttcgtccacgcgtccggcgaatcggtggtttacgtgtcgtttgggagcggaggaacgatgtcgtatgagcagatgacggaattggcttgggggctggagttgagtgagtggagatttgtttgggtggtgcgcgcgcccatggaaggaactgcggacgctgcgtttttcactactgggagtgatggggttgatgaggtggccaagtatttgccagaagggtttgtatcgagaacccgcaaagtgggactgttggttccggagtgggcccaacaggtaacaatactgaagcatcgttctattgggggttttctttcgcattgtggatggggttcgacgcttgagagcgtaacgaatggtattcccttgatt

SEQ ID NO: 52515 - DNA, 266 bp, Glycine max
ataaacatggcttccttaagctccttagtgctgatccttgcagctctaattctatcccctcaagttcttgcaaactatgagaatcccccacagtacaagccttccactgagaaaccaccagtttataagcccccagttgagaagctctcctgtgacaaacctacagttgaaaacccctcaatttataagcctccagtcgagaagccaccactgtacaagcccccagatgagaaacccccagcgtacaagcccccagttgaaaaacc

SEQ ID NO: 52516 - DNA, 357 bp, Glycine max
tttccacgcgttcgtccacgcgtccgattgtattcctgccttccttagctccactacctcttctctcttcctccttgttccttcctgttacaatggcaagaatgcccatagagcctctaatagtggggagagtcataggagaagttcttgactcttttaccacaagcacaaaaatgattgtgagttacaacaagaatcaagtctacaatggccatgaactcttcccttccactgtcaacaccaagcccaaggttgagatcgagggtggtgacatgaggtgcttctttacactgatcatgactgaccctgatgttactggccctagtgaccctcatctgagagagcacttgcactgga

SEQ ID NO: 52517 - DNA, 435 bp, Glycine max
gtcgccgttttgttgacacgcaaaacagatggtcttttgctgaccggctcgcaagatcgcaccgtcaagtgctgggatctgagcacagcagatctcgaagaaccagatgagaagcatcgcttcaagtcccattatacgatccaagcacacgacaaggacattaacgccatcgctattgcacccaacgacaagattttcgccactggctcccaggacaagttggccaagatttggaatttgcaggagggcacgttgatgggcacatgcaagggccacaagcgaggcgtgtggtcagtgcaattctagcctgtggatcaatgtctagccacaagttcaggtgatcgaacaatcaagctgtggtcgctcaatgatttcagctgtttgcggacgtttgagggccacaccaactcgattctcaaggtagatttcttgaca

SEQ ID NO: 52518 - DNA, 505 bp, Glycine max
ttgtcgcgtgggcggacgcgtggggcaagacccatatggtatctttaacacagaagagtccattccaagggacattggtccttataagaacttggtcatattcacctctagctctatggatcccaagttcatctcaagtccatcctctataccattactaaggaagttaaggatcttgatgagcaatcttcaaacagttgacttgaaaagccttacaaaccaacagaaattagcattctggatcaatgtgtgcaatgcttgcatcatgcatggatttatccaatatggagtgccatctaccccagaaaaattacttgcattgatgaacaaggcaactctcaacgtaggaggcaacataataaacgctcaagcaatagagcatttcatattgaggaaacgagatatttctaatgtgaaagaggtacagcgaaagggtgaatgggaggagaaagaatcgtttgtccgtgaactttatggacttgagtttaatgatcctaatgtcaca

SEQ ID NO: 52519 - DNA, 451 bp, Glycine max
tttgaaccgtttgcagaacatcccataaaagcttagcttgtattcagtttctcttctcccaacgtttttgtcgctagtaacagaatattacaaagtaacggctttctcagtggagcgcttgatttggagacggtgggggtgggaaggttatggctttttgcccaattttttgttgcggaaatagttcggatcgcaaaggacgagggaagaaacaacctccatggcgggtgttttctttgaaggaattacactccgctacaaataatttcaactatgataacaagctcggcgaagggggattcggcagtgtgtactggggccagctctgggatggatcgcaaattgcagtgaaaagattgaaagtttggagcaacaaagcagacatggaatttgctgttgaagttgagatattggctagagtacgacacaagaatcttctcagtctacgtgg

SEQ ID NO: 52520 - DNA, 435 bp, Glycine max
tctcttagtgactgagagagttgcttctgctataaattatggtgatcatggaagcacttttgctggaagccctctagtttgtagtgctgctcttgctgttttggataaaatatcaaaacctgatttcctgtcatctgtatctaagaaaggcctctacttcaaagaactacttagggaaaagttaggagaaaaccggcatgtgaaagaaattcgtggtgttgggctaatcataggaatagatttagatgtacctgcatcacccctcgtagatgcatgccggagttctggcctcctagtgttaactgctggaaaaggaaatgttgtcaggctagtcccgccattgatcataacagagaaggagctagagcaagcggctggcattttgtgccaaactttaccagttcttgataactaggagtgtaggagaaagagtat

SEQ ID NO: 52521 - DNA, 326 bp, Glycine max
tttacgcgtttttccacgcgtccggaaagaagctggctttgatccgcttacaaaatatgtgttgcatgacatagatcaggaaggccaagaaaaagctcttcttgcccacagcgagagacttgctatagcttatggtctccttaacagccctgctagcactccgttgagggcaataaagaacctgcgagtcagtggtgattgccatacagcactgaagattatttctaagcttgtaggcggagaactcattattcgagatgcgaaaaggttccaccattttaacgatggactatgctcctgccgggattattggtgcacatgaactt

SEQ ID NO: 52522 - DNA, 373 bp, Glycine max
gtgaaatcacaaaagcaaaattggcttttgaggggatgactgagagggaaacagcttcgtggaatgctttgataaatggttttgcagttaatggctgtgcgaaggaagcgttggaggtgtttgcgaggatgattgaggaagggtttggaccaaatgaggtgactatgattggcgtgttatctgcttgcaaccattgtggtctggtagaggaaggaagaagatggttcaatgcaatggagagatttggaattgcgcctcaggttgagcattatggatgcatggttgaccttcttggaagggctggatgcttggatgaggctgaaaatttgattcagaccatgccttatgatgctaatgggataatattgagttc

SEQ ID NO: 52523 - DNA, 390 bp, Glycine max
ttttccacgcgtccgcccacgcgtccgcccacgcgttcggtgacactaaaacgagatggtggagtcagtaattttgatgttcaaggcacattgtctctccaaattcttgacaaagaggatggacatattcaagttcaggtccaaactggggagaatcaagccatcattttcaagacacaccctaacatgaataaagaattatttgccaatgaaaatgtactaggtctaaaggatcccaataggcctttccccacgggtcaagctggtggttctgaaggtgttggtcttttaaagtggcgaatgcaaagcactgatgagtcaatggtgcctctgacaatcaactgctggccctcttcttctggaaatgaaacttatgtcagcattgagtat

SEQ ID NO: 52524 - DNA, 378 bp, Glycine max
ttccacgcttccgttgaaagccaatctaactgaactggaatcacgtcatagcaataattatactgaggaagagttacattctgtaaaaaagtcatctaaaaagttacctcccatacaagaagcaccaaagagttatactccatatatcaagtacaccaagcttcaatttaaggttgatacattctttgccgttggatcccctcttggtgtatttcttgcacttcgtaatatccgaattggcattggtagaggccaagaatattgggagcaggaaaatataagagaggagatgccggcttgtctgcagatgttcaacatttttcacccctatgatcccgtagcatacaggatagagccacttgtgtgcaaagaatacat

SEQ ID NO: 52525 - DNA, 417 bp, Glycine max
tcggacgcgtgggtgcagcacatacagcaacatcatcacgttcagcagattgccgtcttacggcatttaaatcagttgatgatagtacaagattctggatcaagggtcgaaagttttcagttcaaggtcttttggggaaagaaatgtgttccagtgcttttgttgatggaccaatggtgattttccgtttggcaccacaggattatcaccgtttccattttccagtatcaggaattattgagcaatctgtagatatccctggatgcttgtatactgtcaatcccattgctgtaaatagcaagtactgcaatgtcttcacggagaacaagagagttgtttcaatagtttcaactgtagattttggaaaggtggcatttgctgcaattggagctacaatggttggcagcattactttta

SEQ ID NO: 52526 - DNA, 228 bp, Glycine max
gcttctgcattggaacactgcttgtgtgttaatgggtttcctgcaattagcatccatggtgacagaacacagcaagaaagagaactagcattgtggtcgttcaagactggaaacacaccaattctagtggcaacagatgttgcagcacgtggtcttgacatcccactggtagcacactgtggtaaattatgatctttcaaatgacatcgacgattatgtgcaccggat

SEQ ID NO: 52527 - DNA, 245 bp, Glycine max
gcctgaaactttgggtcgattgccaacaggacagtaagctactaccttgcttgaactgatgactattagggcatttcatagcaagatcttacgcagattcaatcttggcactgccattggatttcgaattagaggaggtgtcttgactgatattacagatattcttgtattcaatggccagaaagttctcaggcaatggctcaaccatgttcagtgcctacctgctgaccttgatgggccgggag

SEQ ID NO: 52528 - DNA, 194 bp, Glycine max
ttgatactcccattaacatggatccggcttactatgttcttaaagaagacgaatctccttgcctttttggttctattgagaagcctaggcggtcttatgcatgtgcaaaacagttgattgagaggctgatttttgctgaaggtgctgcaaatggttcagagttcacaattgttaggccatttaactggattgga

SEQ ID NO: 52529 - DNA, 363 bp, Glycine max
ttagtttataggatatgtaatacccaccccagttatcctacattttatccgagactatgaaaagaatggggcatatacaggatttccaatccttggagttgagtggcagaagatggaaaatcctgatttacgaatgtcaatgggcatgggaccagatcaaaaaggtgtgcgtatcagaagaattgaacccactgctccagaatctcatgttctgaagccatctgatgtaattctcagctttgatggggtcaatatttcgaatgatggaacagtgataatacattacatagcagcaacgtttgatctggtaagggaaaatattcaaggtggtggtccaattaagcatggggagcgcattggttt

SEQ ID NO: 52530 - DNA, 469 bp, Glycine max
tttctgtgattctgcagatgccattccccaattgcttaagccaatttgtggcagagattcttttggtagtgttcaccctgatctccaagaagatgtaatcacaacactcctcaacatctctattcatgataacaacaaaaagctagtggctgaaactcctatggtaattcctctccttatgagagcattgagatccggaacaattgaaacgaggagcaatgccgcagctgcgcttttcactttatcagctctcgactcaaacaaggaactcatagggaaatctggagttttgaagccgttaattgacctcttggaagaagggcatcccttagccatgaaggatgttgcttcagcaatttttaacatatgtgtaatgcatgagaacaaggcaagagccgagaaggacggcgcagtgagggtgattttggcaaagataaataagcagattcatgttgctgagttactagct

SEQ ID NO: 52531 - DNA, 423 bp, Glycine max
ttgtcttgtgggcggacgcgtgggttcgcttctttgaatagagaaacaagagcgtgcggtgtcggaatcgttctccgatcgcaccgttggtcgatttatggtcatcggagaatcgccgatctcgccaagtttcgaatcgcagcggtgacaggaaatggtgaattccatggtggaacgcgctacgagcgacatgctcatagggcccgattgggccatgaacatcgagatctgcgacatgctcaatcacgaccctgggcaagcaaaggatgttgttaaaggcataaagaagcggattggaagtaaaaattcaaaagtgcaacttcttgcactaactttgttggagacaatcataaagaactgcggagatattgttcacatgcatgttgcacaaagagatgtgcttcatgagatggtgaaaatagt

SEQ ID NO: 52532 - DNA, 304 bp, Glycine max
tccacgcgtccgaacatggcttccttaagctccttagtgctgctccttgcagctctaattctatgccctcaagttcttgcaaactatgagaatcccccagtgtacaagcctgccactgagaaaccaccagtttataagcccccagctgagaagcctcctgtttacacacctccagttgaaaacccaccagtttataagcctccattagagaagccaccagcgtacaagcccccagctgagaaacccccagtgtacaaccccccacttgaaaaaacaccagtgtacaagccctcaggtgagaaac

SEQ ID NO: 52533 - DNA, 218 bp, Glycine max
ttaatagtcagcgatggcacagaagagatttatcattaaaggctagaaggccaaagaggccagcgaaggaaggccttgtagaggacctgtctatggtcacctcttctccaaggatggattccctgctcctatacaaggtctcaatagatgctgagacgttcttcgagtgtctgatgagaaatatgcatgaaatccattgcttgttcaccaggaaattg

SEQ ID NO: 52534 - DNA, 373 bp, Glycine max
tcggtgaaaaaattgaatatgcgtgaaatcgtccatattcaagctggccaatgcggaaaccaaattgggtcaaagttctgggaggttatttctgacgaacatggaattcaaccagacggaacttacaaaggcgaatccgaccttcaactcgagcgaatcaatgtctattacaatgaagcacatggtggcaaatacgtgccccgtgctgttcttgtcgatcttgagcctggcactatggattcaatccgagctggagcgtacggacaactctttcggccggacaatttcgtttttggacagagtggcgcgggaaacaattgggcaaaaggccattacacggagggtgctgagttggtggacaatgtgctggatg

SEQ ID NO: 52535 - DNA, 314 bp, Glycine max
gttttacaacaggcatggagacagtctcagactatggggctttcatggggaaatgcactttaccaccaaattctgcaccctctcttactcttaattcactcacctttgcagtcaatgagatttttgacgcggaaggatatgcgaccggttttggtaatcctgactgggcaaggactcatacagtggctacctctactgttccaacagttttggctctccttagagcaggtgccacttgtgttggctaaactgctatggatgaaatggcttacagcataaatggagagactatacattatggtacacctagaaat

SEQ ID NO: 52536 - DNA, 421 bp, Glycine max
ctttcgcgtccggttttaaagaattattatctagatccttaattcaaaaagatattgctattgcagaggaaaaatttcgaatgcatgacctcgtctatgatttagctagacttgtatcaggaagaagttcttgctactttgaaggcagtaaaattccaaaaactgttcgccatttatcattttctagggagatgtttgatgtctctaaaaagtttgaggacttctatgagctaatgtgtttgcggaccttcctaccacgtttgggatatccattagaagaattttatttgaccaaaatggtatcacatgacttgttaccaaaacttagatgcttgagaatattgtcattgtctaaatacaaaaatatcactgagctgcccgtttcaattgacagtttgttgcacttgcggtatctggatct

SEQ ID NO: 52537 - DNA, 330 bp, Glycine max
cgtcctttgtgaagctttttagctttttttctatcacacacttacagctttccaaccacctacctctcaataacaaaatgtcctccttaaacgaaagattgaacaaaccagacatcaactccagcatttatgaaaatattttggagcacattggccgcacaccaatggtcaaacttaaccgtatccctcaaaagtatggtctagagtgcgaattggtcgccaagtgcgaatactttaacgctggtggctccgtcaaggatagaattggtaaacgtatgattcttgatgctgaaaagagcggaagaatcaagcctggtgatacattgattg

SEQ ID NO: 52538 - DNA, 300 bp, Glycine max
acgcgtccgggcttccttaagctccttagtgctgctccttgcagctctaattctatcccctcaagttcttgcaaactatgagaatcccccagtgtacatgcctaccactgagaaaccaccagattataagcccccagatgagaagcctcctgtctacaaacctccagatgaaaaccccccaatttataagccttcagtagagaagccaccagtgtacaagcccccagttgagaaacccccagtgtacatgcccccagttgaaaaaccacctgtgaacaagcccccagctgagaaaccacc

SEQ ID NO: 52539 - DNA, 458 bp, Glycine max
tctcctacgcgtccgggcaaacgagtgggtttcagctgcaaagctggcccacatggtcgttccacagctgatggggcaaatatgttccgggagtttctgtgtggcagggaagattcgaaaagaaagcctcctgaaagctgcaatgcaatgattagaatcgagcagaatggtcaaaataagtgggttgttacaaaatttataaaggagcatagccattccatggctagcgttagtaaggtgcataatattcggccacgtaaacccttttctagtgttggaagaaccatgcctgaaacttaccaaggagtggggcttgttccaagtggtatgatgtatgtatctatggataagaattgcattcccactaagaatattcagggaattaagaatattcccacagctgttgctgttgctgaaacatatcagccggttaaaagtcctacaatgatgaattatgc

SEQ ID NO: 52540 - DNA, 309 bp, Glycine max
gagtatcattgcttccttaagctccttagtgctgctcggggcagctctaatactatcccctcaagttcatgcaaactatgagaatcccccagtgttcaagccttccactgagaaaccaccagtttataagcccccagttgagaagcctcttgtttacaaaccttcagttgaaaaccccccaatttataagcctccagtagagaagccaccatatgtacaagcccccagctgagaaacccccagttgtacaagcccccagatgaaaaaccaccagtgtacaagcccccagttgagaaaccaccagtgtac

SEQ ID NO: 52541 - DNA, 390 bp, Glycine max
  unsure (1)..(390): unsure at all n locations
gattaatgntttgctattgaccttaggagtgctggttgcatcttgttagagctgattgctggaaagctaataatgcctggccgaacagaggatgatacatgactaactttcgggttgcttggggccaggttgaacaactgcacaaaatatttaaagatgcgcggctctccatctgaggaatactggaggaagtatagattgccaaatgctactatctttaagccccagcagccatatcaacgttgcattttataaacatacaaggactttcctccatcttcactacctctaattgaaacccttctcgcaatagatcctgaggatcgtggcactgcctcagcaacactaaatagtgaattctttaccacagagtcttatgcttgtgaacca

SEQ ID NO: 52542 - DNA, 217 bp, Glycine max
tgtacgcgtttgtaccctgccatagcatgttgcattagccattgtggctggaactcaaccattgaaggttcatttaaaggggtgcccttatagtgctggccatcatgcagtgaccagcttatgaacaagatatacatgtgcgatgtgtggaaggttggacttgaaggttacagggacgaaaatgggataataataagggaagagaccaaaaacaagg

SEQ ID NO: 52543 - DNA, 351 bp, Glycine max
cggttgtttgggttcggaatttcaagggactaaggaggtgaatgggattacttctgaggaagagcttacgtctgatccagcgtatctttcatactactactccaatgtgaatttgaaccctaggctgccacctcctttgctgtcaaaggaggattggaggtttcaacaaagacttaaaggtggagcttcagctctgggtggaattggagataggaggaaagtgaacagaactgatgataatggtggaagattgctttttcctaccccgccaggttttaacatgaggaaacaagagagtgaggtggataatgaaaaaacaagaggttcggccgagtggggtggtgatggact

SEQ ID NO: 52544 - DNA, 272 bp, Glycine max
ttcacgccttcttatcatcaaagaaacttccgttctctgttgtttgccttctctgacacatttggagccatgtagagcgtgattcggcaagaaggtggtatggcaaaggacgttgaggaagctgaacggggctccttctgtgggaaggactaccatgaccctccaccagcaccactcattggtgctgaggagcttacaaagtggtccttttacagggctctcattgctgaattcattgacactttgctcttcctatacattactgtgctcac

SEQ ID NO: 52545 - DNA, 487 bp, Glycine max
ttggacgcgtggggttcgtgaaggggatccagttgatgaaatgctgttcataatgcggggaaaactagctactgccacaacaaatggtggaagaactggtttcttcaactcctttgagatcaaggctggtgacttctgtggagaagagcttctaacatgggcattggaccccaactcatcctcaaatctacccatttcaactagaactgtggaaactatatcaacagttgaagcctttgctctcatgtctgatgacttgatgtttgctgcttcccaatttcgacggcttttaaacagcaaacaacttcagcacactttcaggttctattccctgcaatggaggacatgggctgcacgtttcttacaagcagcttggcgcagataccgaaaaaggaaggagaccacggcacatcattctttcactgatctctcctacaggttctattccccgcgatggaggaaatgggcagcatgtttcattcaagca

SEQ ID NO: 52546 - DNA, 464 bp, Glycine max
tttcaggttgagagtgttccagtgatggaacgtgctgtgaggcctgggaagaagggttcttgctataggtgcctcaaggggaaccgtcttacgccaaaggaggtttgcattgtttgtagtgcaaagtattgtcgcagctgtgtggtgagggctatggggtccatgccagagggaagaaaatgtgtgacttgcattggctacagaatttatgagagaaatagaagcaagctggggaagtgttctcgtatgatgaaattgttgctgtctgagttgactgtgactcaagtcatggatgatgaaaggtcttgtgaagcaaatcaaataccaccggagcttgtttgtgtcaacttgcaacctctgaatagggaacagcttaaattgctcctcaactgtcgaaacccaccaaaacaactgaagccaggatcctattggtttgataaagcatctggattttggggaaagga

SEQ ID NO: 52547 - DNA, 438 bp, Glycine max
gaaactatcttattttgcgtctagggagtcattttcttgaaaatttatttacatgtactgtttattttctaggtccgaaattttggatactatttttgaagttgtgcaacgatgatacggaatcttcaatgaactttcactcatcatcttcatcgttatcagcagcagagttgagagatgccacacgtgcaatcaacttagccttcctctcctcataagtcagcttcttcaagttgtacctcttgtgctccttcgggagctgcttatcagatttcttccaagcttcccggtaatctcaaggtggtgtttttcacaaactctggaacagaagcaaacgaattggcgatactgattgcaaggttatacacagggtgtcatgacataatatctctaaggaatgcttatcatggtaatgcagctgggacaatgggagctaca

SEQ ID NO: 52548 - DNA, 404 bp, Glycine max
cccacgcgtccgtgaggctaagttaggcttgaagcctgaaaaaatggaagctactagacatgtgctcagcgagtatggtaacatgtcaagtgcatgtgtgctattcatcttggatcaaatgaggaagaaatcaatagaaaatggacttggcacaaccggtgaaggccttgactggggtgtgctatttggtttcggccctggactcaccgttgagactgttgtgctccgcagtgtcactgtctaatcagtaattgagtcagtgtctaatcagtaatagtattttcttaagacagcaaatctttctcttttcttatgtattctttgctgttcagtttgaaaaatgtattctttgtcttttgaattttccccctgatttcatcaaatgcttctttttgtataccagt

SEQ ID NO: 52549 - DNA, 461 bp, Glycine max
tttcgtccgcggacgcgtgggcggacgcgtgggcggacgcgtgggcggacgcgtgggtgcagatgatcaaagaaaaatatttattgattataacggtttggagttgcttatgggacttcttggctcttataaccccaagcaacaacttgatggagctgtggctttatgcaagttggccaataaagctatgactctgtctcctgtagatgccgcacccccatctccaacaccccaggtgtatttgggagagcagtatgtaaacaatgctaccttgtctgacgttacatttttggttgaaggcaaacgattttatgctcacagaatctgcctgcttgcatcttcagacgcatttcgtgcaatgtttgatggtggttatagggagaaggaggcacgggacatagagattccaaacattagatgggaggtttttgagctgatgatgagatttatatacactggat

SEQ ID NO: 52550 - DNA, 403 bp, Glycine max
gtttcgcattgtcattgcaagagcaatcctgaaaaatccgagaattctacttctggatgaagcaacaagtgcacttgacgcagagtctgaaaggatagtgcaagaggctctagacaggatcatggtcaacagaactactattatagtggcgcatcgcttgagcacagtgaggaatgctgatgtgattgctgtcattcatagagggaagatggttgagaaaggaacacacatagaattactaaaggatcctgagggagcttactctcaacttatacgcctacaagaagtaaacaaagagacagaaggaaatgctgaccaacacaacaacagtgaactttctgtagaatcctttagacaatctagtcaaaagagatcacttcaaagatctattagtagggggtca

SEQ ID NO: 52551 - DNA, 499 bp, Glycine max
cttcaaggctgtaccatccccacccttctcattctttgctcacagataaagctgcccttctggaattcagaaaaacaatcatatcagacccgcattcctcacttgctaactgggatgaagctgttcatgtgtgcaacttcacgggtgttgtatgtgacaaattccataaccgtgtcacacgactaatcctgtacgataaaggtctagtggggctgctttcacccgttctttccaatctcactggactgcactaccttgagattgttcgcagtcacttatttggcattattccacctgaattttccaacctcagacgccttcacagcatcactctcgaggggaacaatttgcatggctcaataccagagtccttttccatgctttccaagctttacttttttatcattaaggaaaataacatatcaggttcacttcctccatctctcttttccaactgcactctgctagacgttgtggacttttctagcaactcattaac

SEQ ID NO: 52552 - DNA, 165 bp, Glycine max
tttacgcgttcgggcttacttaagcttcttagtgctgcttcttgcagctctaattctatcccctcaagtgctagcgaactatgagaatcccccagtgtacacgcctctcactgagaaaccaccagtttatcagcccccagttgagaagcctgctgtgtacaaacc

SEQ ID NO: 52553 - DNA, 358 bp, Glycine max
ctttggcggaacctctctcaaacaccgaactctcttcttccaaaaccctggacccaaccaacggtcacgattccacttcggaaccgcatcaaacggctccggaagacgctcagctcaatcgagaagacgacgttgttccaaccgcgaaacggaagagggacgacgacgtcgaagaccgttcgctgcatccgctgtggaagaccagcctatgctcttacttccggagccacaacggatcgtgcagccacggcggcgcttgccgatacgcgcacggcgaggaggagctccgcccccgccccgacaacacgtgggacccgacctccgagcgcgcgaagaaagcgctgaagaccgagtcgga

SEQ ID NO: 52554 - DNA, 259 bp, Glycine max
cccacgcgtccggatctctatatatgatattgttgttggggatgttataccccttaatattggtaaccaggtccctgctgatggaattctgatcactggccactctcttgcaattgatgaatcaagtatgactggggagagcaaaattgtaagtatttatttctatctcctgggaaattggattttttttcccctttcctgctacctattatgttttttgcaggtccataaggattctaaggatccttttttgatgtct

SEQ ID NO: 52555 - DNA, 436 bp, Glycine max
ttcttccggtttgccaaagctggatcatctgaattttcattctggttttctgtacaatattcttaatatgcagcctctacattgtggctttctctcagacaatggaggcaatgcaaatactgttcgctggtacaaaaggaagcaaaatctccaccatatttgggatagtaccatacttctgacagaagtcgacaaattttatgactctgacatggacgagttcatcgatgcacttcaacagaatattacgaaagtatgggccgatcaagtagaagaatgggagaattgcggagataaggaccttccatgcccagctacatacgcatctgaaagtaccatagatgcctgtaaatgggcgtataaagatgccacggaaggatccgtactaaatgatgattactttctgtcacgtttgccaatagtcaatatgcggtta

SEQ ID NO: 52556 - DNA, 435 bp, Glycine max
gtgtcgtttacaatccccatttcccaatcccgaagctgcggcttcctcattcttgcatcacatatcccaatcgcttctgattcgaattccatttcaatttcgattcgacgggtttttcatttgataattgaagagaaggtttgaattgagattgaggagtttatttgagggagagggaaatggctaacaatgcagcagcctgtgctgagagagcaactagtgacatgctgattggtccagactgggcaattaacatagagttgtgtgatataattaatatggaccctaggcaagcaaaggatgcaataaagatacttaagaagcgtttgagcagtaaaaatccccaaatacaacttttggctctttttgcactggaaacccttagtaaaaattgtggcgacagtgtatttcagcagatcattgaacaggatatct

SEQ ID NO: 52557 - DNA, 300 bp, Glycine max
cttgtggtttaaccttggcaagattttgattctttttggccaacaacaagagatctcaaccgttgccaaaacctatgtttccaatctcatacctgacttgtttatcaaggcactcctttgtcccttaaaagcctacctcagctctcattgcgtgactcttcccaccatgtttagttctgcagtggcactagcctttcacatacccgtcaacatagtactctccaaaaccatgggactccgaggagttgcaattgcggtttggataaaccgatctcatggttatggttatgctggcgattt

SEQ ID NO: 52558 - DNA, 497 bp, Glycine max
tcggttcaagttgttccatctctcccacgagcaaaagaccgttactcaattaactgctacaagaagtacaatttttttcctatcttgaaccagtcatcagttttgtttggtccaggacgaggtcttagaaatatcatcgtgcttttttacgaggtccgcacacaccaccttcctctcttggtctctttccaccaaattccagtcaaagttggtggtgccaaacatccaagaaagggtgctattttgaaaccagggaagagacatgaggactcaatggggtaagttgatggctactctcagtgaaggtggagatgatgaaaccccactacaggtgaagttgaatggtgttgcaacaattattggcaagataggcctattctttgcagtggttacttttgcagttctggtgcaaggacttgtaagccaaaaactccaacaaggaagcttacggagctggaccggtgacgatgcgttggaaactgtggagttctttgcag

SEQ ID NO: 52559 - DNA, 431 bp, Glycine max
tgatttttttagccattccaaacctgaaatcaccggatccattagtagtaaaggatttgttgaagtattcagtattgatcttgtatgtgccaaggctgtggcggatctatccactataccaagaagtaaagaaaactattggaatattcactgagaaagcatgggctggagctacctttaatctttttctctttacgctagcaagtcatatggttggagctgtctggtacatgctttctatagagtcagaggtgtggtgctggcgcagagagttgaagaatgcttcactctttcatgaagaatacttgagttgtggacacggcgatcaaaatgtctttcaacttctcaataaaacgtgttctttcattgaccctgataaaatcatagacaaaaacaccttcaattttggaatattctttgatgctttagat

SEQ ID NO: 52560 - DNA, 351 bp, Glycine max
tggctgtggaaagacattcatagatgctggtgcgttgaggaaacattcccacatccatcgtagtgacaaacatattgcctctctccatggatgtgagaatggcaatatgtttgtcactacgatggatgtggaaagaaatttctggatagctcaaagttgaaaagacattttctcattcatacaggggagagggattttgtgtgtcctcatgaaggctgtggtaaggccttctccctggatttcaacttaaggtctcacatgaaaacacattctcaagagaactatcatatctgcccatatccagattgtggaaagagatatgctcatgaatacaagctaaagaatcacatt

SEQ ID NO: 52561 - DNA, 371 bp, Glycine max
ttagattcatggcttccttaagctccttagtgctgctccttgcagctctaattctatcccctcaagttcttgcaaactatgagaatcccccagtgtacaagcctgccactgagaaaccaccagtttataagccctcagttgagaagcctcctgtttacaaacctccagttgaaaaccccccaatttataagcctccagtagagaagccaccagtgtacaagcccccagttgagaaacccccagtgtacaagcccccagttgaaaaaccaccagtgtacaagcccccagttgagaaaccaccagtgtacaagcccccagttgagaagcccccagtttacaagcccccagttgaaaaacccccagtgtacaag

SEQ ID NO: 52562 - DNA, 391 bp, Glycine max
agaattgctttaagggtttaacctttctggctgtgttaatatgcgtttcagcactgtcactgagtccttctgttgcgggggaagggcaaaataatggccttgttatgaacttctacaaggaatcatgccctcaggctgaagacatcatcacagaacaagtcaagcttctctacaagcgccacaagaacactgctttctcctggctcagaaacatcttccatgactgtgctgttcagagttgtgatgcttcactgttgctggactccacaagaaggagcttgtctgagaaggaaacagatagaagctttgggttgagaaatttcaggtacattgagaccatcaaagaagctttggaaagagaatgcccaggagttgtttcatgtgctgatat

SEQ ID NO: 52563 - DNA, 433 bp, Glycine max
cggattcgttttcggacgcgtgggcggacgcgtgggcggacgcgtgggcggacgcgtgggtggagctaagaatgtgatcatagcagctgcagaggctaaagttagacgcgtggtgttcacctcatccattggtgccgtttacatggaccccaaaaggagcatcgatttggtggttgacgagtcctgttggagtgatttagaattttgcaagaacaccaagaattggtattgctatgggaaggctgtggctgaagaagcggcatgggacacagcaaaagagaaaggggtggacatggttgtagtgaacccagttttggtacttggaccattactgcaacccagcataaatgctagtacaattcacattctcaagtacctcactggctctgctaagacctatgcaaatgccacacaggcttatgttcatgttagg

SEQ ID NO: 52564 - DNA, 399 bp, Glycine max
tgttccattcgtccgggcttccttaagctccttagtgctgctccttgcagctctaattctatcccctcaagttcttgcaaactatgagaatcccccagtgtacaagcctcccactgagaaaccaccagtttataagcccccagttgagaagcctcctgtttacaaacctccagttgaaaaccccccaatttataagcctccagtagagaagccaccagtgtacaagcccccagttgagaaacccccagtgtacaagcccccagttgaaaaaccaccagtgtacaagcccccagttgagaaaccaccagtgtacaagcccccagttgagaagcccccagtttacaagcccccagttgaaaaacccccagtgtacaagcccccagttgaaaaaccaccagt

SEQ ID NO: 52565 - DNA, 385 bp, Glycine max
ccattttctctgctacacttgtgcaccttgaccctgtctccagcaaccatgaacgcctgcatcattgatccgttgcagggcgatttccctgaagtgatagaggagtatttggaatatggttgtatgaaatgcattgccttcaatcgccgtggcacccttcttgctgctggatgcaacaatggaagttgtgttatttgggattttgaaaccagaggcattgctaagattctgcgtgatgatgaatgttcttctcccataactagcatttgctggtcaaagtatggtcatcaaattcttgtatctgctgctgataaatcattgatattgggggatgttatgagtagtaagaagataacacggatagttttgcaacaaacccccctac

SEQ ID NO: 52566 - DNA, 486 bp, Glycine max
ctactttatcctaaacccgcatcctttagcaggtgagtattcattagcttcaatatactctgagaatggttgtcaatgaatactcacctactacattatcctaaacccgcatcctttagcaggaacgagtgcgttcataatcctgtactgttctttgccatattgtccaatcagagatccggtagtgggtggtttgagacccttttgaatagccacattaatgtaagctccaatggggagatattttctgttagagagagaaggcaaaatgtttcttcaattttgcatactttagataaagtttacaatttggactggttcaatagtgcttccaagaatgagtgctctgctgcaactggcttgaagtggatgcttaatcagggattgatggagcaccataaggaaatagcagagtatttcaatcgtagacgtgtttctattatatttcttttccggagaaacttgctacgcaggatggtatcaatg

SEQ ID NO: 52567 - DNA, 393 bp, Glycine max
attatatgaagatgggtatggaaaaggttcacatcgggcttgtggaaattggccatggggactctgggaagaccactaccactggccacctgatctacaagctgggaggcattgacacgcgtgttattgagagatttgagaaggaagctgctgagatgaacaagaggtctttcaagtatgcctgggcgcttgataagcttaaggctgagcgtgaaagaggaatcacaatagatattgccttgtggaagtttgaaaccaccaagtactattgcacagtgattgatgcccctgggcacagggatttcatcaagaacatgatcactgggacatcccaagctgactgagcgtggcttatcatcgattccactactggggggtctgaagctggaattt

SEQ ID NO: 52568 - DNA, 458 bp, Glycine max
cccatttgtccgttcaacttcaatcctgtcttgtctgtgtctcttttcttgttttgcttacctgcaaccggcttaagctgtgatcaccaattttcaacatgacaaagataagtcctgaagttgaaatcaggatgccagtggaggcatttccgccagtttcagctgatgtgagctttatttctaatagttttccgaagtacaaactggatgctgataatcaagttctggaagagccagttgaggataaccagggtccttctttgaaggacgttattgaacaagaagcttccaatttgtcagaccaacacaagcgtatgtcagttcgtgaccttgccagtaaatttgacaagaacctggctgcagctgctaagttgtctaatgaggcaaagctaagagacgtggcatctttggagggacatgttcttttgaaaaagctaagagatgccttagaatcttta

SEQ ID NO: 52569 - DNA, 322 bp, Glycine max
  unsure (1)..(322): unsure at all n locations
ttcacgcgncttgtacgcgngggctngcagctctaattctatccccttaagttcttgcaaactatgagaatcccccagcgtacaagcctcccactgagaaaccaccagtttataagcccccagttgagaagcctcctgtttacaaacctccagttgaaaaccccccaatttataagcctccagtagagaagccaccagtgtacaagcccccagttgagaaacccccagggtacaagcccccagttgaaaaaccaccagtgtacaagcccccaggtgagaaaccaccagtgtacaagcccccagttgagaagcccccagttta

SEQ ID NO: 52570 - DNA, 449 bp, Glycine max
tgaaaacctttacacaaaaagagtggtttgtgcggtggtgaagaagcgttcggaatagaagaagaagatgtcgtcggtttacgttctagagcctccgacgaaggggaaggtggtggtgaacactacgcgcggtcctttggacattgagctgtggccgaaagaggctccgaaggccgcgaggaacttcgttcagctctgcctcgaaaactattacgacaacaccatcttccaccgcatcatcaaggacttcctcgtccaaagcggcgaccccaccggcaccggcaccggtgcttcccacgcgttctaattcagcccccttcgtctttcattttttttcttccatattcttatctcaaaaattgaaactaagtgtgtgtgtgtgtgtgtgtgtgcgtgcgtgtgtttgagtgagcatttgcataattgattttaaatgattttttcttttt

SEQ ID NO: 52571 - DNA, 424 bp, Glycine max
tgattttggtaacagctagccagattaaagaaccaaagttttcttttataataagtagtaacgtgaaaggatcgaatgactcatggagagaacagagttcacccttttatttcttgttacttgttgctatttgctatccttgtttcctacagctttggaagcagaggatgcaataactccaccacaaaccatcagtggctaccagacactagtctcaccttcccaaaattttgaactgggtttcttcagtcctggcaattccactcacatctatcttggaatatggtacaagcatatcccaaaacagacagttatttgggttgcaaatagagacaaaccattagttaactctggtggctccttaacattcagcaacaatggcaagctcatccttctcagccacacaggaagtgttgtatggtct

SEQ ID NO: 52572 - DNA, 108 bp, Glycine max
caaggaacaatgcccttatgctgaagacatcatgacaaaacaagaaaagcttgtctacatgcgctacatgaacactgatttgtactggctcagaaacatctcccatga

SEQ ID NO: 52573 - DNA, 370 bp, Glycine max
tttctttgcgtccgtccacgcgtccggtcgctgctccgtaccagtttcactgcataaatatgagagaaaactctgcaaacatgttggtaaatcatgacctgcttacaggtgatgagcttatgtcggactccttccgttacaatgaaattgataatggaatgctgtgggaagttgaggggaagtgggttgttaagggagcatttgatcttgacattggtgcaaacccttctgctgagggtggagaagatgagggagtcgatgacgcaactgttaaggttgttgacatatgtgatacattcagacttcatgagcaacccgattttgataagaaacaggttgttaccttcatgaagaggtttatcaagaattt

SEQ ID NO: 52574 - DNA, 358 bp, Glycine max
  unsure (1)..(358): unsure at all n locations
ttttccttctctctttgaaatcagntctcggcggggaccatcgccacgtcacgctcctcggcgtcgccgtcgacatcggcgaaaacctcggcctcctccccggcctcgcctgcaacaagttccccccttggcttctcctcgccgtcggctccctcgccgccttcctcggctacggcctcctcttcctcgccatctccgaaactcttcactccctcccttacataacgctatggtttgctctagttgttgctgctaacagtagtgcgtggttaaccactgccgttctcgtgaccaacatgagaaacttccctgctagcagaggctctgttgctgggattctgaaaggttatggggggct

SEQ ID NO: 52575 - DNA, 448 bp, Glycine max
  unsure (1)..(448): unsure at all n locations
gttattttttttgnaaaganaacaaccgcccggggaagaactatcgccagccacacttgtacttgtaaagaatccaggcaagtttggctgaggcagttcagattcactgctcagcatgagaaccacagatgacatgttcggcctgtcgtctggacttagttgcacacacagtagtcccacgtgaattgttcttagcacttcaggtaaattgagtgagtctattattgttgcatcaactatttcagagcatttgccttcagtaaatagcctccatacctgcatatttttttttcaaaccatttggttaacagaagaaacattttaaacatggtaaaaattcaagttcattcttacatgtgccagaagatctcttgatgacagaacccttattctcttcccactcactatcttcaatatcaacacaccgaagctgaaaacatctgacttt

SEQ ID NO: 52576 - DNA, 422 bp, Glycine max
  unsure (1)..(422): unsure at all n locations
ccttcgcttcttgataactgaaggnaaggaccattgcggtgtcctgggtcgaaccgcgtgggatttcatgcgcacagaaggtgggtccgacttcggagcaaacatcttccttaacctcccacctgtcctcaacatgtcggtgctaacagtcgaacgacaaccctggcgaggccacaaccagttcgccatcccctacccctcctacttccaccccaaaaccctagcccaaacgctgacgtggcagtcccatcttcgccgacgcgccaggccccaccttttcttcttcgtcggtggcacgcgcccggggttacaaaaggcaaaagtccgcgaccacatcgtctcgcagtgccaagcctcaaaacgttgcgttttggtccggtgcgcgagtggagacagcaaatgccacaaccccatgagcgtgc

SEQ ID NO: 52577 - DNA, 126 bp, Glycine max
cgtcgcttgttctaacgcgtgcagagcagagagagacgctttcatggggcgaagacccgcgaggtgttataggcaaattaagaacaaaccataccccaagtcacggttttgccgtggtgttcctga

SEQ ID NO: 52578 - DNA, 166 bp, Glycine max
caaattgcttagtctgtgccttgagaacaattcgacaccgcatttgatgctgttgaaaggtggcttgcggacagagcagttttgcctattgagaattctttaggagggagcatccacagaaattatgaccttttactccggcacagtttacatatagtaggagaag

SEQ ID NO: 52579 - DNA, 409 bp, Glycine max
cggttgcgaggtttctcatctaaggcattgcaacgaactgatctaatggcacagagcgtggaaatccctcgtgcgaaactcggaactcaaggccttgaggtttcaaagttgggatacggttgcatgggccttactggtgcctacaatgatcctcttcctgaagaggaaggcatatctattattaagcatgctttcagcaaaggaatcacttttttcgacacatctgatatttatgggccagaccatgctaacgaaattgtggtcggaaaggctttaaagcagctaccgagagaaaagatccaaatcgcgacgaaatttggcattacaaagatcgactcttctggaatgtttgttaagggtacacccgagtacgctcgctcatgttgtgaagccagcttgaaacgtcttg

SEQ ID NO: 52580 - DNA, 429 bp, Glycine max
tcgcggttgcttgggctccagcgtataaacccccaattgaaaaaccacccgtttataagccaccagtttacaagccaccagtgtacaagcctccagtgtataagccaccagtttacaagccaccagtgtacaagccaccaagttgagaagccaccagtatacaaaccacccgtttataagccaccagtttacaagccaccagtgtacaagccaccagttgagaagccaccagtgtacaagcctccagtgtacaagccaccagtatacaaaccaccagtttataagcctccagttgagaaacctcctatttacaagccaccagtttacaagcctcctatagagaagccaccagtgtacaagccaccagtgtacaaaccaccagtgtacaacccccctgttaagaaaccttctatttacatgccaccttac

SEQ ID NO: 52581 - DNA, 275 bp, Glycine max
cgcgcacgagcgaacttattcgcttctcgcaaagtttaagtcatcatgggtacggacacgcctcacatcaacattgccgtcattggacatgccgcctctgggaagtcaactaccactggtcatttgatctacaagcttggcggtattgacaagcgcgtgattgcgcgctcgagaacgaggctgctgagatgaacaagcaggtcattcaagtatgcctgggcgcttgacaagctcaaggctgagcgcgacagcggcattaccattgatattgcttt

SEQ ID NO: 52582 - DNA, 289 bp, Glycine max
ctcgcggtgaaatccagtctcagttatcacagcgtaatgctgttacgattggtggtaatttagcagtgaatggagcggacggcggtggagctgctactgctgtatttaggcatcatctttcagaagtttcgtcagtagaggttgtggcctcagctggtctgcgtcactaattggggtgcaaacaactcgtaatctatcatcacactcagctgcaacaatgggcatagcactgtctctgaaagacggttcattgaatctttcacatttatggactcgccaactgtcagaa

SEQ ID NO: 52583 - DNA, 277 bp, Glycine max
aggagttcctggagttaccttggagcgtttatctgaaggtctctcaccacgtcattgtgcattatcgcttgttggtgaacctattatgtatccagagataaatgcacttgtggatgagctgcacaaaaggaggatttccacttttctagttacaatgcacaatttccagagaaaattaagtcactgaaacctatcacccagttatatgtaagtgtagatgctgcaacaaaggactctttgaaggcaattgatagaccactctttggagatttctggg

SEQ ID NO: 52584 - DNA, 344 bp, Glycine max
gtttgtttcagtgaagtcactgctgcaacaatgcagtgcgacaaatgcaaaacttccctttctatgacaaacctatgagaattcaatatgcaaaaacaaaatcagactgtattgcaaaagaagaagaaacaagaggagaaagctgaaagaaagcggcgtgctgaggaagcacaacaatctggggtggccaatggaacacatagtgcaagtaatggtggtccaactgcatcattccgtcaaggacctggtgctcaagaaacagctgctcctaacaatattttgttcatagagaatttgcctcatgaaactactggtaggatgcttgaaatgctcttcgaacaata

SEQ ID NO: 52585 - DNA, 316 bp, Glycine max
  unsure (1)..(316): unsure at all n locations
gttctaatgattataaaaggattgtttggaaggtacgaaagatggaaccctgttcatccaactcatggagccttttggggaatgggtgtgggcgttggttgtggtgtcggatggggtcctgggtttggccctgaagtgataggctatgttggagctggttgtggcattggattcaatgtaggcatcacttttgctggtgttggagttggcctacctgctaattttatctttgaaggtccatataatggggttagctggattgganatttaccttgtatctctngacttgcaagagaagccaatggaaaattgtttg

SEQ ID NO: 52586 - DNA, 325 bp, Glycine max
agagtgttcaatgagacacttgaacgaacccagtttgcttggacagccataatatctgcctatgcccgccatggaggctttgagtcagtgatgagtttgtatacagaaatggagagggaaggaatcaatcctgactccatcactttcctttctgttttggctgcatgttgtagaaagggcatggttgatgccggccatagagtctttgactctatggtgaagaaacattcaattgagccaacctctgagcattattctattatggtggacatgttgggccgtgttggacgactagatgaggcagaagagttgatgcacagattcc

SEQ ID NO: 52587 - DNA, 339 bp, Glycine max
ccaaattagaaagtgttccagcatcaaatatttatgcaccagagtctcttagggctggatatgcaatctttgcatcgggattaattgtgggcttcgcaaatcttgtttgtgggttgtgtggaggaataattggaagcagctgtgcattgtctgatgcccagaactcctctctctttgtgaaaattcttgtgatcgagatctttggtagtgcgctggggctatttggagttattgttggaataattatgtcagctcaagcaacatggccaacgaaagtttagtttcccttgtatcagaatgtggtgttggaatgcaattatggtatagcgcaatatatct

SEQ ID NO: 52588 - DNA, 333 bp, Glycine max
caacggtgctagaatccgcgtcactagtaataactattggattgagacatgcacttaacagtaaggcgcccaactaatatactaaaccagttattgggtgtgttactcatcagcaactacaacgtgagagacatggcttccttaagctccttcgtgctgctccttgcagctctaattctatcccctcaagttcttgcaaactatgagcatcccccagtgtacaagcctcccactgagaaaccaccagtttataagcccccagttgagaagcctcctgtttacaaacctccagttgataaccccccagtatatacgcctccagtagagaagcca

SEQ ID NO: 52589 - DNA, 333 bp, Glycine max
agaagtatcatattaaagcaatggagttatcttttacacaaggtcgatggtactatgaaagatggggtggatttgattcaatatcaagccacaatgcaaagcctccaggtgttgaattgtgggcagtttttgatgtccctctacatcaggttgatgcttcttggaaaaatttaacccattcactatcaggcctcttttgtgcttcaatcaacttcctggagtcttctacctcttattctgatcctgaatgggcatttcaatcagctttgggcagtttaagatatggtacactgccacgtgaagctgtgtgcactgagaatcttaccccctggt

SEQ ID NO: 52590 - DNA, 332 bp, Glycine max
  unsure (1)..(332): unsure at all n locations
ctgtgatctggaaaaagccagcagcggagatgtgtctccccaaccaaaatgaatttggtctagacttatgtgatgattcagatgacccaagttttgcatggtacttcaaattgaagaaatgcgtcactaggatgtcttctgtcaaaggtgaatatgctattggcacaattcccaagtggccttaaaggctaactgcttctccactgagatccacagtcctgaaaaatggtgctgatgtatatgaggcagacactaagcgatgggtaaggagggttgcacactataagaactctctanaaataaagttggggacttcagcagtacgcaatgtc

SEQ ID NO: 52591 - DNA, 330 bp, Glycine max
actgtgattcacgggttcggggtggcgggtgatgttaagaaagcagaagggtttttcatgagatggtgaaggagggtgtggttcctaatgttgctacttacaatgctttgattcaggttttgtgtaagaaggatagtgtggagaatgcagtggtggttttcgaggagatggcgagggagggtgtgtgtgtgccgaatgtggttacttataatgttgttatacgaggtttgtgtcatgttggggacatggagagggcgttggggtttatggagaggatgggggagcatggtctgagggcttgtgttcaaacatataatgttgtgattcggt

SEQ ID NO: 52592 - DNA, 307 bp, Glycine max
  unsure (1)..(307): unsure at all n locations
gantatcctaagtctttgggaatagtgctgcaatggcttcaagtcaggaggaggtgactctgtctggagagctactcggaaggctcatttagtgtgcacgggttcatcatggccctcaagtagaagggagttcaatacaaatatgtcgaagaaaatttgaggaccaagagtgaactgcttctcaaatccaacccagttcataagaaggttccagtgtatattcacaatgagaaggccatagcagagtctcttgtgattgttgcatacattgatgagacatggaagtacaagcacatcttgccttctg

SEQ ID NO: 52593 - DNA, 301 bp, Glycine max
  unsure (1)..(301): unsure at all n locations
aacgtcnccaacactgtgttcctgttcttcttcttcgatggcggcaacctcaacatcactggcttctcaactctacattggcctgcgccgcccatgcctcaagcttgattctttcaattctcaatctttctctgtcttcgaccccaatcttcgcctatccctctctcctcccagaccctcacgcgccatcgtcgccatggcaggcaccggcaagttctttgttggcggcaactggaagtgtatgttgttgtcgcacctccctttctgtacattgatcaagtgaacaactcactcactgaga

SEQ ID NO: 52594 - DNA, 345 bp, Glycine max
tggcaagaggtgttgttcatgagcttgcaaaaagtagactatctaactcattggttcaggccgtgtctctactaagacagagaaatcacaagggagtggtttcttcactcaatgacttgctggcatgtgacaaagcagtaccctcacagccagtttcatgggaagtgccagaggagcttgctgatctatacaccatatacttgaagagtgatccaactcctgagaatttgtctcgcttgcagtatctgttgggtataaatgattcaacagctgctgctcttagggagatgggagatagattactcaataccactgctgaggcagagaagttgtatctagtttgtg

SEQ ID NO: 52595 - DNA, 347 bp, Glycine max
tattcattataattggacggttccaacttcctttgtttattcaaggataatatattggttcccctgtgccagagacagagacacgcacaaaaatggtttcttggaactcatttccattagaagtgatctaccaagtacttggttggttagcttttctttcatggtcagttgctggctacccacaactcatcttgaattttcgtaggaaaagtgtggtgggattaagcttggattatgagattctgaacttcaccaagcagtggtcatatctgatatacaatgcttccctcttctttagtcctgcaatgcagaagcagtattctcgagagtaaggttatggacagatg

SEQ ID NO: 52596 - DNA, 345 bp, Glycine max
gttgaacaagggtgtctctgtctgcttcttcactttctctcgtttcaatcgaaaccaaaacaaaaacatgggcagaaaattcttcgtcggtggcaactggaaatgcaatgggaccactgaggaggtaaagaagattgttactactttgaatgaggctaaagtccctggagaagatgtcgtagaagttgttgtgagccctccttttgtgttccttcctgttgtaaaaagtttgctgcgccctgatttccatgtttcggcacaaaactgttgggttcgcaaaggtggtgcttataccggtgaggttagtgctgaaatgcttgttaatttggggattccttgggttat

SEQ ID NO: 52597 - DNA, 327 bp, Glycine max
caatgatgataatggggatgctaataatttagagaggacaccaagtgaaggaaacaatgatgccaatgatcatcagtctgacaaaccacgcatgttgcagaggggggtgctcaggaccaactgcatagactgcttggatcgcactaatgttgcacgatatgcatatgggttggctgctcttggccaccagctccatgctctgggagttattgaccacccaataattgatctggatgaccctgtagcagatgatttgatggggttgtatgagcggataggtgagacactcgcacatcagtatggtggtactgctgctcacaacaagat

SEQ ID NO: 52598 - DNA, 160 bp, Glycine max
caagaacggcgtgcacaagaccataatgcagctcatgagcgtcgacggcttgactcgcgagaacgtcgcgagtcacctgcagaagtaccgcctctacttgaagcgcatgcagggtttgtcggccggtggcggagttggtagggtcgcctcacgccgaccc

SEQ ID NO: 52599 - DNA, 223 bp, Glycine max
gatcgacatgcttgggctggagaactaccccggcgtgaagcgcatcaccatcaagccccaaactgacagatgggtcttccctgagaccaacaccggtatcattgtcttggctgagggtcgaatgatgaactgggatgcgcaatgacacccagtttgtgagtccgttctcaccaccaggcttctcacttagtgtgaagagagatacgcagtacgaagagttagt

SEQ ID NO: 52600 - DNA, 221 bp, Glycine max
gtgagatatatagaacaacaaaggagaaaagatagaaatggagaagtttccagttgttgacatggggaacttaataatgacgagagatcagcaaacatggagattatcaaagatgcctgtgagaactgaggtttcttgaggtgggtgacaatgggtatccaagagttgatgacacgtggagagttgcaaagagcctacaaagtgttggcaaggtcaagaat

SEQ ID NO: 52601 - DNA, 340 bp, Glycine max
caacctctcaagtccaacctacccctttttcttctcccaccaacttcaccgtcttcttcctcgatcatgtctcacttcaagggcaagtaccatgatgagcttattgccaatgctgcttacattggcactcctggaaagggtattcttgctgctgatgagtcaacagggacaattggcaagcgtttggccagcatcagtgtagagaatgttgaatccaacaggcgtgctcttagggagctgcttttcaccgctcccggtgctcttaaatatctcagtggtgtcatcctctttgaggaaactctctaccagagcacagctgcaggcaagcccatttgtggag

SEQ ID NO: 52602 - DNA, 249 bp, Glycine max
cgacttgaagcaactatatgagtcctacattctctagaattcgaaattctaatttcgttaggggaaagagattgcttgtgtgtgagtgagtatggctggaaaaggcgagggtcctgctatcggaatcgatttgggaacgacgtactcttgcgtcggcgtgtggcaacagatcgtgtcgaaatcatagccaacgataagggtaacagaactaccccagcctacgtggctttcaacgacacagaacggttg

SEQ ID NO: 52603 - DNA, 328 bp, Glycine max
gcaaatgaatacatgtagttactccacataagaaggcacattcaggaccacttgatcagttatatggctgtcactaacgtgtagttagctgcgtcagactcagcatagtattcagttaggctaaatttcaaagtgataggctggttattgaagtgcaagctaaagttcactatacaagactatggagccaacaaaattaatgattcaatgcatcatttcagttttaaacatttttctcagtcttatctctgtttctctctctacacgcaggttcactggactcagttgactagtggcacaattgttctaacaggaatgatttataagt

SEQ ID NO: 52604 - DNA, 331 bp, Glycine max
ctttgagtcttcttgatccttctatatctccttgaactcaaacatggcagatgaagtggatctgctagatttctggccaagtccatttgggatgagggtcaggattgcacttgctgaaaagggtatcaaatatgagtacaaagaagaggacttgaggaacaagagtcctcttctcctccaaatgaacccggttcacaagaagattccggttctcatccacaatggcaaacccatttgtgaatccctcattgctgttcagtacattgaggaggtttggaatgacagaaatcccttgttgccttctgactcttaccagagagctcaggctaga

SEQ ID NO: 52605 - DNA, 162 bp, Glycine max
  unsure (1)..(162): unsure at all n locations
gcttgaacaagagaatctgagactggaaccaagatcaaggagcttgatatgctggaaagcatcaagcgtgacggggtncaccgggttactcttgatgctttccagcatatcaagctccttgatcttgatacgcggctcagcatcaagagtaccccggcgaaa

SEQ ID NO: 52606 - DNA, 313 bp, Glycine max
  unsure (1)..(313): unsure at all n locations
attgaagctgctgagaaattccgaatggagtctggaactgagccagacatagatcttgcaacaataacagatcgcatggctgttanaaaggcagtacaaagtggtaacgttgaagatgcaattgaaaaagtgaatgacttaaatccagagatactggacacaaatccccaattatttttccatcttcaacagcaacgattgatagaactcatccggaatggaaaagtagaagaagcgctagagtttgcccaagagtgagcttgcaccaaggggagaggaaatcaaactttttggaagagtggagaggactgtg

SEQ ID NO: 52607 - DNA, 242 bp, Glycine max
gcaaggacccccagccatgatgcctccacaagctggatttggataccagcagcaactagttcctggaatgagacctggtggtggtcccatgccaagcttctttgttcctatggttcagcaagccacaagggcacgccagggggcgccgagaacaggtctgtgaacaacccacagccatgccatgtgacacagatgttcaagggcgtgtctatgtacctctggcgacatgcagattccatcag

SEQ ID NO: 52608 - DNA, 203 bp, Glycine max
agagaatggctctcaagggtttaacctcactggctgtgttaatatgcgtgtcagcactgtcactgagtccttctgatgagggggaagggcaacataatggccttgttatgaacttctacaaggaatcatgccctcaggctgcagacatcatcacagaacaagtcaagcttctctacaagcgccacaagaacactgctatctct

SEQ ID NO: 52609 - DNA, 322 bp, Glycine max
agaaggccagatcagcatgtccatgtgtcatcttctttgatgagtttgattctcttgcaccagctcggggtgcttctggagattctgggagcgttatggagagagtggtttctcagatgcttgcagagattgatggcttaagtgattcaacacaggttttttatctgcttgaaaaattatcttttagcaaaatatattatcctatgttacttctaacaagtggtgtctctgttgttggcttactattacctgtttattattggtgcaagtaatagaccagatttgatagaccggcgatcgattgataactgctatatgttgg

SEQ ID NO: 52610 - DNA, 248 bp, Glycine max
ctgaatctgatgctgaatcttatcccaagttataaagtttttcctccataatcttgtcaatagaatatgtcccaactgctggtacggtagcttctctaagtatctgcatgatcgtatcgatgctctgcatgggttggtctggctcttcaaattgattgcccatatcttctcgtccatcagttgggacctattcttttgaccagtttatggaggaacaaattgatgacttggaatctgaatctgatgct

SEQ ID NO: 52611 - DNA, 339 bp, Glycine max
  unsure (1)..(339): unsure at all n locations
agagaattcaatttggagaaagtccctggccttgatgggacgaagattactgatattgctgccggagctgagcattctgtcattgtcacagagcatggagaaataaagacatggggttggggtgagcatggtcaacttggtttaggggatactcgcgaccaaaccagtcctgttacgtaagtctcgattatgatctgaatgaagctgcatcaattagagttttctgtggaagtgggttcacgtttgctgtaaccatgccctagagtctactcaaacttgattaaatgctaatttgatatgcatgtcanaagaagttgccatcagcttggttctggttct

SEQ ID NO: 52612 - DNA, 363 bp, Glycine max
caagaagtatcggataagattgagaggaatctaatccttctgggtgccactgctgtagaggacaagctccaaaatggggttcctgattgtatcgacaagcttgcccaagctaagattaagatttgggttttgactggggataaaatggagactgccatcaatattggtttctcttgtcgcttgcttaacaaggaatgaaacagattataattcatttggagattccagatattcaagcattagaaaaggttggagacaagatggctattgccaaggcatcaagggagagtgtgcatcatcagatatctgaagctgctcaactgctttcagcatccagagggacctgccagacatctgctctga

SEQ ID NO: 52613 - DNA, 243 bp, Glycine max
attgcataccgcgctagctagctagcaagcaagcgcagagatggacgcaaatcgaggtcatgcacacatgtgcttagcacgtgttgcactctacctctgcgctctaagcctatcagctgctcacggaagcaccacggttcaagacatcgcgacacagttgaacactcggagacaacgaacttcttcgcacggtgaagaagttctcaggctgcatggagaattactggcagagctattccacag

SEQ ID NO: 52614 - DNA, 331 bp, Glycine max
catcctcatgctatattctacttcgagtttacttgcttctcggattgttgtctccataacaacagctagcagtattgagtcccctgcacttgcttagagaatcagatgatgttcctaatgacctccttggaaccaacatcatgatacaggtgacacagctcattagcggtgacccacttgtttatcttaacaaagtcactgatggatgttgagctgatgttgcagtcaagctagagatgagtcaatctactgtcagcatcaaagacataccagcatatgcaatgatcatagatgctgaggtaaagaatctgataactccttgaaagactac

SEQ ID NO: 52615 - DNA, 328 bp, Glycine max
atttatggttcaatgattatggcaatttggagctagactttaattctgatcctgaggatattcatattgtcggggatatcaagaagattgacacacattctgcctcaaagatagtaaatgagggacatattgctaaccgttttcattattctttacatgcttacttgtccatattgtacttgcggataccagaaagttttagaatgatattgcgagggcaagttgtgaagctacataacattgcagatgatctcaaatatactgacattgtcttgtatagaccacagtgtggtagttctaaagagggagtatctgtaacaactattgg

SEQ ID NO: 52616 - DNA, 337 bp, Glycine max
ggactaatgagtttaaaaatgaagttacagtagtagttaaactccaacacagaaatctggtgaggttgcttggttgttgctttgaaaaggaagaaaggatgctagtttgtgaatactgaatacctaccaaataaaagcttggatgtcttgatttgcggtcaattcagataaaaaccgaagcatcgtcactgacttggaataagcgctttgaaatcatgtttggggattgctcaaggtgttttatatctgtcatcaagattcaaggctgaaaataattcatagagatctaaaagccagcaatgtactactggatgctgcaatgaatccaaaaatctca

SEQ ID NO: 52617 - DNA, 332 bp, Glycine max
atggtaactggatcatatacaattttgtaaaagagcacaatcatgggatctgtcctgatgattttttcaggggtagcaaacaaacaagtattgtagcttctcagaagaagggtatgcaattggctctagaggagggagatgtgcagtcaatgattgaatactttgtctctatgcagtgtaaaaatcccaactttttctatgcaatagacttggatcagaatagacacttgagaactgtattttgggttgactcaaaaggaagacttgattatcgaaacttccatgatattgtgttgattgacactatttacctgagtaactaatataatatc

SEQ ID NO: 52618 - DNA, 356 bp, Glycine max
gcattgacatgttctcctcagtgaacgggaattcggggacaagggaacaaacccaacaaaggcaacctcttcaactttcgacagctgagaaagcgaaaacccagaactttccaccccctttgacaacgataagggggggatcagaatctcttcgcgtgagacctcaccgcgaagatggacggctagtgattgaagtcaccaaggtcccacctagttcctcgtgctttcatgctgaacgaagccatggccgccttcgcctctgctttctgacaaaccacactccaagttttgagacggaagcagcagcagcagaagaagaagatgacgttgaagaaaagaaccatcgtcaatgataa

SEQ ID NO: 52619 - DNA, 148 bp, Glycine max
tgaagttcttgccaagagaatcacggcacttggttattcatgcttctacattcatgcaaagatgttgcaggaccatcgtaacagagcgtgtcatgacttccgcaatggtgcatgtcgacatcttgtgtgtactgatctttctactaga

SEQ ID NO: 52620 - DNA, 149 bp, Glycine max
gtttggttcagtaatgtaccccatacacgtctagtcgaggataaaggcggtcataattggatatccataaagaaggataaatttgtttttcctggtggtggaactcaatttatacatggtgcagataaatacctggatcagatttctga

SEQ ID NO: 52621 - DNA, 252 bp, Glycine max
acaacttggaattcggcactccatcaactcactagatataaacctgctgacttgaaggaatgtgttctaaacctacatgacttgtacctcagtaggagaagggcctctttgcaagctgtgacagagaaatacaaacagcataagttcaaatgcgtggcaacaacaccatctcctcccgagatacctctttcttcggttgaatttgagggcagattctcaggcaattggaacttggctattcttggtatggct

SEQ ID NO: 52622 - DNA, 236 bp, Glycine max
atgcgtgcagcacaacaacttacataggctttcaggcagtcatgactgaagaagagtccaagaaatttgaaggtcttcccggagtcgtcttcgtgctaccagattcctatattgatccggtgaacaaacaatacagaggagatcagtacattaatggaacaattatcccttgacctccaccagtacagtagggaggaatcagggaagacgagactggaataagagtcctggtcaat

SEQ ID NO: 52623 - DNA, 248 bp, Glycine max
  unsure (1)..(248): unsure at all n locations
agtaagacaatcacccttgaggtggagagctctgacaccattgacaatgttaaggctaagattcacgacagagagggtataccaccagaccaacagaggctcatctttgctagacagcagctagcagatggccgaaccttggctgattacgacatccatcaagaatctaccctccacttggttctccgccttcgtggtggatgaaaatctttgtcangactctcactggtaagaccatccccttgagg

SEQ ID NO: 52624 - DNA, 336 bp, Glycine max
gatgcgatgaacccagtaccacctgtcacgcaaaactcaggcatcttacctggtcaaggccttactagagaagggtcacacagtgaggaccaccgtgagaaacccaggggatgtggagaaggttggttttctgactgagctaagtggagccaaagagagactgaagattttgaaagcagatctattagtggaaggaagctttgatgaggcagtgagaggagttgatggtgtcttgcatatggcgtcccctgtgcttattccttatgatgagaacgttcagcaaaatttgattgatccctgtataacaggaactttgagtgtgcttaactcttgtgt

SEQ ID NO: 52625 - DNA, 323 bp, Glycine max
gaaagatgcgttattatgagtcaactcttctttctgcatacaaggcatacttgcaaaggctagtagccttagaaaagaagcctttatttcagcatgtagcagttcgttgtatttgttctttgcttgatgcaaatccccatttcaactttcgtgaaagtttgttggatgctactgtcagaaacataagctctcctaatgacgctataaggaaactttgttgttccacaattaattcactctttgcaaatgagggtaaacatgggggtgaagttactgtggaggctgttcgattgattgccgatcatgttaaagctcataattgc

SEQ ID NO: 52626 - DNA, 244 bp, Glycine max
tgcaaattaaggaatcaagatggcttccttggttgtgtttggtcttcttggttttcctcttgcgattacctatagtgttccctttgccgtcacagcagagttgactgctgattcaggaggtggccaaggattggctataggagttctaaatcttgcaattgttgttcctcagatgattatatcccttggttctggtccttgggatgctctctttggtggtggcaatatccctgcgtttgttttg

SEQ ID NO: 52627 - DNA, 239 bp, Glycine max
gaaagcgtcatttttcaattggtattacttttctatctacctaggtgccattgtgtcatgcagcttaattgtgtggattcaagacaatgctggatggggtcttggatttggcattcctgctttgtttatgggattatctactataagcttctttataggcacacatctatacaggtttcagaaacctgggggaagttcttatacaagaatggcccaggttttgtttgcatctgtccgga

SEQ ID NO: 52628 - DNA, 256 bp, Glycine max
ggctggtgagtttttccactcagctcaaagccaagccttagagcagcagagagaacaggaatcatgccatctgagtggtgaatctatagaaacacctttattacaggaccaagaattgtctgttgattcatcaaagcaagttaagttgggctttttagcaggtcttgttcccagggaaaagtccatggtatttgagagaattttgtttcgtgctactagaggaaatgtatttttgaggcaggctactgttgaggat

SEQ ID NO: 52629 - DNA, 256 bp, Glycine max
ctctcttaagaccagggaggttggaagagagcttcatcaagcatgtcctttctgttagtcattccaataagtaaaacatgcttgatgaagctaggttaagaccagggaggttggaagtccaggttgagataagccttcctgatgaaaatggtcgattgcaaattcttcaaattcatactaacaaaatgaaagagaattcttttctagctgctgatgtgaaccttcaagagcttgctgctcgaacgaaaaactacag

SEQ ID NO: 52630 - DNA, 248 bp, Glycine max
caacgttttctccagatcgtgccatggttaataatgaaaacagataactactttgtcccttctgtattcttaatgccatcttttgagcaggaactgaatgatctcttcccaaataaggaaacagtgttccatttcttgagtaggtatctgttccaccctacaaacagtgtgtggggacttgtggtcagatactatcaagcttatttatctaaagctgatgaaagagtgggcatacaaattagagtgtt

SEQ ID NO: 52631 - DNA, 116 bp, Glycine max
agcagctgacaatcaaactcaggtaggtatcaaggtgctacaaggtgagcgggaaatggctgcagacaacaaaatgcttggagagtttgaccttgttggtattcctcctgctccca

SEQ ID NO: 52632 - DNA, 253 bp, Glycine max
gggaagccaaacaactgctggtaagtcggcagaaactgttcaaatgaaggggcaaccgatcccacagaagagcaactgctgtggttaggttctagttctacgttctgttatagggagactctttcctgactctgtatgatatatggatgttagtaaatgttaaaatatcacctatcatctatttaaatccttggattatattgttctgaatcttatgatgatttcccatgtttaaaatgaaagggatgcaatt

SEQ ID NO: 52633 - DNA, 269 bp, Glycine max
aatgcaaagaagtttgctgcttacagttgggttgaggttgggaacaaagtccacagatttgtttcagaagatcactatcatccagaagtggggaaaatctatggtgaattgaacagattgatctcaatattgcaacaaattgggtataatccagatacaaacattgtcctacacaatgtgggtgaggaagaaaagttagatccatttcttaccacagtgagaaacttgctcttgcatttgccttaattagaaagcccaatggagttgca

SEQ ID NO: 52634 - DNA, 263 bp, Glycine max
ggctgtggcaaaattagttgcaattggccataatgtggacacactaagggctttcaaggtggaaggaactacatacaatccagccgatggccaaatagagaactggccaactagtggattggatgctaatcttcaaatgatagcaaaaatagctgcggtctgtaatgatgctggagtcgcacagtcagagcataagtttgtcgctcatggaatgcctactgaagcagccttgaaggttttggtagagaagatgggccttcctg

SEQ ID NO: 52635 - DNA, 267 bp, Glycine max
caggaggttccacacattggtccttcgtgtggaacctcctgtatacgatccaaggcacggatattatcaagtgtatccaaagatggtgagagacctccatgacaaacagaaggttccacacgaaggaccaatgtgtgacctcttgtggtctgatccagatgatcgctgtggttggggaatatctccacgtggtgctggatatacatttggagaggatatagctgctcagttcaatcataccaatggtctatccttgatatctagagc

SEQ ID NO: 52636 - DNA, 246 bp, Glycine max
gggatgaaatgatagaaaaaggtgttaagcccactttggttacttgcaacactgttataaagggccatttgcgggctggcaatgtgttaaaggcaaatgacttcttcgaaaagatgattttggaaggagtttctcctgattgcatcacgtataatactcttataaatggttttgtaaaggaagagaatttcgacagggcttttgtcttggttaataacatggaagaaaaagggctactgccagatg

SEQ ID NO: 52637 - DNA, 243 bp, Glycine max
agaaaggaagagaagagaagagaaggagaaggagaagggtttggtagttggttacttagtttgtttgattaacgacggcgcactacacgatccccacaatccagagggtacaagggcgatgacgagtacgattacctcttcaagctggttctgatcggcgattctggtgtggggaagtccaacctgctttcgcgcttcaccaggaacgagttcaatttggagtccaagtccaccataggggtt

SEQ ID NO: 52638 - DNA, 244 bp, Glycine max
aaaatggcaaattttgttctacagtttccaaatactttgaggagtttcgctgtgtctgcttcctccaactccaacggagctcctcctggtggttctggaagcagtagtggtgggggtgggggccctgtaatattggaacttcctctagataagatcagaaggcctttgatgaggaccagagcaaatgatcaaaacaaagttctggaattaatggatagtatcaaggaaattggtcttcaagtgc

SEQ ID NO: 52639 - DNA, 242 bp, Glycine max
gtaagaagtgagatagataagaagccagagactggggatgatgttgaggggaaatccaggtctgctaaggaagaccaacaagtgtcaattcgcacagcaactgcaaagtcagtttatcagtggattgtcaagcctcagaccattagtaagacaaatgagatgttcctccctggtcgaatgacatttatttataacatggagggtggataccatcatgatattccaacaaccttgcaccgtag

SEQ ID NO: 52640 - DNA, 242 bp, Glycine max
gtgcaacatgatcaaagttatggtttgggcacctctgcaacaaagctttgaatctctcccacatctcacatagaggtttgtcagatccttgggaaaatgtcgtgatggtggattttgcattgataaatcttgatggaggaaaaaacctcgctatgaatttttcctccacctcttcccaagtgttaaggcttttatttggatgtgattggagccatgtgatggaagcttgcttgtggggcttc

SEQ ID NO: 52641 - DNA, 241 bp, Glycine max
cgaggaagggccatgtgaggatataagctctgatggccaatcttccagcttcaatgaatggattcttcctgcaaaagaatttgacggcatgtgggaaatcttaatatacgaatctggtctaaagcaacggttattacgatatgcagcaagtgctttgctctttactgaaaaaggggttgatccattccttgtttcatggaaccgcataattttgttacatggaccacctgggacttgaaag

SEQ ID NO: 52642 - DNA, 237 bp, Glycine max
aagggactgagttctcttctggtggatggaataaccctctctttggtggtggcttcttgtgtgggagtgagagcaatttgatgagtggtggtgatcatgagatgttggtgggaagagtggctgctgaatctgttgttgaggctgtgacttgtgctgttaatggaaggccctttgaggttgtgtactatccaagggctagttcgccagagttttgtgttaaggcttctgttgtgaagg

SEQ ID NO: 52643 - DNA, 238 bp, Glycine max
caaggatctacctctacaaaatttccccttaccagatataaatccacatacaaagcttaagattgagaattcaatggcaaagattgataatgacatcaaagaagcagcttatcatgcttggctgggctattataactccatcagggaaattgggagggaaaagaccactatggctgagctggcaaaccgattttctgaatcaattggtttacagaggcctccggctctcttccgaaaa

SEQ ID NO: 52644 - DNA, 254 bp, Glycine max
ccagggtaggcatgcctttgcagacttctctctactcaatttacctcgcgaattcaagggttcttttgacttcactgatgggcatgttaagcctgtgaagggaaggaaacttaactggatgaaggctgcaatattagaatcggaccgagtactcactgtaagtccatattatgcccaggaacttgtttccggagaggaaagaggtgtagaattggacaatataattcgttcatgtggcatcactggtatcgtga

SEQ ID NO: 52645 - DNA, 274 bp, Glycine max
ggtgttgcgattctctttctccattgcaaaacctaacaagcgagagttcgatcacgtttgatggaagattcacacagcaacactgcagcggtgcaagccaccaacgatgacgcctccgccagcaaattgtcatgtgtgaaaaagggatacatgaaagatgattacattcatttgttcgtgagaagacctgttaggagatctccaataattaacgaggttactttgctcgctgggctgctattcggaaacttctatatcagtttcttgatgttga

SEQ ID NO: 52646 - DNA, 273 bp, Glycine max
gatcttttctatgtttgtccggctgaattatataaatcttgctgaatagatgtgtccgtctctttttggtaggacagtctaaagactgtaaagttgtctacagatctgtgctctagcattaatggcttggtatcatcttttgtggctttattgcaggaagaaaacccatcacgagagagcacaattgtaagaacagctggtaaacttactccttccaattcaacaggattccagagatcattgatggtaatgttcccttggcaactcgaagac

SEQ ID NO: 52647 - DNA, 252 bp, Glycine max
ctcgagccgatatcaactagctatttttgtggcgatggaaataattggtagcaaacttgcgtgtttctgttgtctatcaactttagtccttgttgaccttttctagacaacttggatgaaggtcatagtcacagacatcacaagagaatgtccagaatttgccttgctttttacaggaatcacatacatatgctttggccatatccaatttgtctagaaaaggtcaacaaggactaaagttgatagagaaca

SEQ ID NO: 52648 - DNA, 251 bp, Glycine max
atagaaaaatgtgaccttgccattgcaaagtggatgattgatgcttctgtgccatttaatgcaattaattcagcatattatcaacctatgattgatgctattagtagcatgggtccaagttataaaggtccaaattttcatagagttcgtggttgtttattaaataaatgggttgatgatgtgaggaagcttgtggatggttatcgaattgtttggaagcaaactggatgcactcttatggctgatgggtg

SEQ ID NO: 52649 - DNA, 247 bp, Glycine max
gtttaaacggataaccactcgggtatctccgcatgtcacgtgactccagtgttagtatgacagaaattgtggggcggccgacaaaagcgaggctcttgctcctatgtatcctcaatgtggaactcagacctacgtagttctggataacttgtgagactaaaaatagtctcggtgttttcttcactaaaatgagaacatgctttagtaaagagacaaaacttccaactaatcagagcaacatatgctt

SEQ ID NO: 52650 - DNA, 241 bp, Glycine max
ccttcttgcaaggcttctttcaagatcacattggatgtgccttcagagcttgttgctctttccaacatgccaattgttgaagaaataacagatggaaatctcaaaacagtttcatatcaagaatcaccaatcatgtctacatatttggttgcggttgttgttggtttgtttgattatgtggaagatcatacctcagatggggtcaaagtccgggtgtattgtcaagttggtaaggcaaacc

SEQ ID NO: 52651 - DNA, 264 bp, Glycine max
gctcggcaacgtatccaagagcagctaagtgccgtaacagctgatatggtcatgctctccacagatgagccagagaagaaggaaacagcatcaagtaagaaaagtgatggttctgaaaatggtaacacgatgcactacagaaactggttggagaagtgaaagcaatcttgaacaaaggtgttgtggcgagtgaattgcagtcccaaatggaagcaattccatcaccagctcaagaaaagatcagtgctctgattgaggccttat

SEQ ID NO: 52652 - DNA, 257 bp, Glycine max
caaggagcgtatcatggctgcaatgcgtggatcttttgaagaaggttatcgcttgcttccacaatactgtgaacaggtgaaacgcactaatccaggcagtattgcatctgtttatggaaatccagctgatggttgtttccaacgtctcttcatctcctttcaagcatctatatatggctttttaaacccttgggggctactatggggacttgacagaacatatttaaagagcaagtatcttggaacattgcttcttg

SEQ ID NO: 52653 - DNA, 254 bp, Glycine max
gcatcctttactatttttggcacaatttgaacctaagactattagacaggctattgatgaccctcaatggtttgctgctatgaaacaagagtatgaggctctttttaacgataaagcatgggatcttgttcctcttcccaaagacagaaaggttgtaggttgtaagtgggtctttagaattaaggaaaatgtttgtggaacagttagctaattcaaggctcggttagtggctaaaggatttcatcagttgctgg

SEQ ID NO: 52654 - DNA, 248 bp, Glycine max
gaaaaatatgagactaattttcttatggctgcagaagaaggcggagagtacgagttggtgtacttcaagaggctcgatgatgagttcaacaaggttgacaagttctataggtccaaagtggaggaggtgatgaaggaagctgctgagttgaacaagcaaatggacgctttggtggctttcagggtgaaagttgagcacccaactgcgtcgtttgatggctccgttgagatgactcgtcttgcttctga

SEQ ID NO: 52655 - DNA, 275 bp, Glycine max
agcgggttgacgaaccgttgattcgcggaaaagagaaggggagtgaaagtgaggtggagagagggaatgtattagcggaagaggcggcggcggagggaatgagtggaccggcggtgggggaggagcacacgatatgggaggctctgaaaacggtggatttttggattttgtttgtttcgtttctctgtggggttggaacgggtttggcggttatgaataatatgggtcaaatcggtttggcgctgggttattcggatgtgtctctctttgtatcc

SEQ ID NO: 52656 - DNA, 235 bp, Glycine max
aaaatggaaagatatctgcattagacatcaagcgcattgcaaaagagctaggacaaaatttcaccgacagagagattcaggagatggttgatgaagcagaccaagataatgatcgagaagttagtgcagaggagttcatcatcgtctgaatttcactcaagttattatcaataaaataaaatagcgaagatgtgtgaaagtggtagtagagtcacatgggaaggttgcagcgtct

SEQ ID NO: 52657 - DNA, 243 bp, Glycine max
agttacccattggcttaatcattggtcttttgtttatgtcctgcttttactgatttattataagctgctattgtgttttatttcacagttcatacattatactttgtttttttcttcaggttaaacctgcacttcctgctcttgcccgtcttatccattcgaacgatgaagaagttttgactgatgcatgttgggcactgtcatatctttctgatggtacaaatgataaaattcaagctgtaa

SEQ ID NO: 52658 - DNA, 239 bp, Glycine max
gagaggcttggctccaccttggtggcccacaggggcagagaattggtggggtgaacaaggccttctggcccatgaacatggcccacctccttataagaagccccatgacctcaaaaaggcttggaaagtgtctctcttggctgcagtcatcaaacacatgtctcctgatttgtataaacttagaaggtcggtgactcagtccaagactttgcaagataagatgacaaccagggacacgg

SEQ ID NO: 52659 - DNA, 265 bp, Glycine max
gtcgtttttgtcttttggttcaacccagctgcgatcataacaaacaccggtgatggttcatcaaaacgacaacgacgacagcagcaccgccaccttccaccatctcgtgtagcggacaacgacaatcggcgattgaattgttcttctacttcttccgcggggatgatgtcgaacctgtacggcgaatacaaccagaagatcgactacgtgttcaaggtggtgctgatcggagactctgcggtggggaagacgcagctcctcgctc

SEQ ID NO: 52660 - DNA, 269 bp, Glycine max
ctctagggttatcatttctccatttccattttctctctcacttttcaagaatcgtaagctatgggaaagtcttacccaactgtgagtgctgattaccagaggccgttgagaaggcgaagaagaagctcagaggcttcatcgctgagaagagatgcgctcctctaatgctccgtttggcatggcactctgctggaacctttgacaagggcacgaagaccggtggacccttcggaaccatcaagcacctgccgaactggctcacagcgcta

SEQ ID NO: 52661 - DNA, 247 bp, Glycine max
atttcaaaggaattaccaaacactatgagaaaactcaagatcctgaatggaatcaagtgtttgcctttgcaagggaaaatcagcagtcaactttgcttgaagttgcggtcaaagacaagaatatattactagatgaagttattggcactgtgaagtttgatctccacgacgttcctacacgtgttccacctatagtccattcggtcctgagtggtataggattgccagggtaaggacagaaaaaggg

SEQ ID NO: 52662 - DNA, 261 bp, Glycine max
cacactgagaggaagagggagtgagagagagtgttcttcgtttgctaccttctcccagaaatggttacgttcaggtttcaccagtaccaggtggtcgggagggctctcccaacggaagcagatcagcatccgaagatctaccgaatgaagctctgggccaccaacgaggttcgcgccaagtctaagttctggtattttttgaggaagctgaagaaggtgaagaagagcaatggtcaagttcttgctatcaacgagattttt

SEQ ID NO: 52663 - DNA, 259 bp, Glycine max
gagaactttttcgtaccatcatttctcagagcaattaaagaaaacacagaagcgaattttagaagtataatggctgaaccttgtaaaggagtttatacatttgaaatgcttcaaccgcaattttgtaaaaaactgatgtctgaggtggatcattttgaaagatgggtccatggtaccaaactcaaaatcatgcgtcctaatgcaatgaataaaaataaacatggtgttatccttgatgattttgcctttgaagccatgc

SEQ ID NO: 52664 - DNA, 255 bp, Glycine max
gtcttaaacctccaagccactgcagggtgcctttcactacatttcttgaaaatgcttccatgttggaggtttttgacagtgaaagcatagctttcatggccaaagtcctccattcctcgggacaaagtgaagaggcatgcctccccccttccttgcactacattcctccaaacactcaccacacagaatccatcaaagaggtgcaaatggttcttttccccatcgtggaagatcttctagcaaaaaccaaccttt

SEQ ID NO: 52665 - DNA, 249 bp, Glycine max
aaactatctggtggtgtagctgttttcaaagttgggggggctagtgaggccgaagttggggaaaggaaagatagagtaacagatgctttaaatgccactagagctgctgtggaagagggaattgttccaggtggtggagttgctctcctatatgctaccaaagtcttggataaccttcaaactcaaaatgaagatgagaagagaggagtacaaattattcagaatgcactcaaggcacctacctctaca

SEQ ID NO: 52666 - DNA, 270 bp, Glycine max
ctttcaagttggttagtttctaggctcaagaaaggaagtacaacaggcaccaccccttttagtttttttcagttttctcttggcatgtcattgaaaaagaatagtttagtgtctaaggtggagaatgaggaggaggaggggaatgtttctctcttggatttgcctgatttgccattggaatgcatccttgagcacctttcaccagctgaattatgcagggtggcaacattgtgcacatctctgagggatagatgtaggagtgatcattat

SEQ ID NO: 52667 - DNA, 262 bp, Glycine max
aatgactcagtgaatgctgtgtcttttgggtttgttgccactgccatcctcatttctatgttccttcttctggctatctttgagaggtttcttaggcaaagatcaagtgaagccaataatgttgcaactccaatagatcttgaacgccaaatgcactttggtagaaagttggaaaatctatcacccaagatgaccatttatggaagaggagtattagtcttgatgcctggagagcagattccttcattcattgcacttcctg

SEQ ID NO: 52668 - DNA, 261 bp, Glycine max
atcatctccgtctatgaagcgtaatatttcaccatctgctgtaccccaacttcatggtaatacaagggcattgccaatgagagtagctgccatgtgcaaagtattggtgcccaccatatttgataaacaaggagcacgattacttgctgttgtttttcttgttgtttcaaggacatgggtctcagatcgtattgcatcactgaatggtactactgtgaagcttgttttggagcaggataaagcttcctttattcgattaat

SEQ ID NO: 52669 - DNA, 261 bp, Glycine max
agaagacagctcgaagggacatcgcacatgttgtagcttgcggtggaaatggtgcaactactgtttctgcaacaatgctttttgcttcaatggttcatattcccgtttttgttactggggggattgggggagtgcacagacattcggaacagactatggacatatcttctgatctcactgagctaggcagaacaccagtaacagttgtatgtgctggtgtaaaatcaatattagatattcccaggacgcttgaatatctgg

SEQ ID NO: 52670 - DNA, 252 bp, Glycine max
attcaggtcaatgtggctcttatggggtttctagtcgagaaaatttaagtgaaagtagattgatggatctccttcatggttcagaatatgttcttacctatgaagacaaggacggagattggatgctagttggtgatgttccgtgggagatgttcactgagtcttgcaagaggctgaggataatgaagagttttgaagcaattgggctaggtaggtccaacgttcgttttaattaatctgttatactctgct

SEQ ID NO: 52671 - DNA, 257 bp, Glycine max
agccacgggagcataatgcgaggtggaaaaggtggcggcggcggcggaggtggtggtggtgatgtgaggatcgctggcgaatcggcgaagggcgtggatccggaggaggtgaagaggattgggaatgaagagtataagagagggcactttgttgaggcgttgtgtttgtatgatcgagcaattgcaatgtctcccggcaatgccgcttaccggagcaaccgtgcggcggcgttgaccggtttaggacggttgccgga

SEQ ID NO: 52672 - DNA, 263 bp, Glycine max
cttagatttgaaactttgttgcaggactgttattgggatcaagtgcaaagatggggttgtgttggctgtagcaggattagcagctgatggcagacaaattgttgccagggctaagtctgaagctactaactatgacagcgtatatggcgaaccaattcctgttaaggaacttgctgaccgtgtggctagttatgtgcacctctgtacgctatattggtggctcagaccttttggatgtggtgtcatactaggaggttatgaca

SEQ ID NO: 52673 - DNA, 247 bp, Glycine max
agacaaacaattcgaggtagaggaagacccaaaaagactataagagaggttatcaagaaggatctcgaacttaatgatttggatagaagtatggtacttgatagaacattatggcggaagttgatccatgtagccgaccccacctagtgggataaggcgttgttgttgttgttgttatcaccttcaatgaataaattcatctgttatcttgatttttagtactattgggctccaattaaaattaaaa

SEQ ID NO: 52674 - DNA, 177 bp, Glycine max
agaatccagagccaactcagggtgaggaagcaaccctgcaagcagaaccaaaatttggaagtaccaggtctctaggcagagcatcaccgccgaagcagcagacagcttaaacaactctggcaagcccgaaaacgcttgaaaactgaaccctctccaagtgtgcttacacttttcact

SEQ ID NO: 52675 - DNA, 264 bp, Glycine max
cgaacgagcgaccttcttcgtgtctcgcaaaggttaagtcatcatgggtcaggacaagactcacatcaacattgtcgtcattggacatgtcgactctgggaagtcaactaccactggtcatttgatctacaagcttggaggtattgacaagcgtgtgattgacaggttcgagaaggaggctgctgagatgaacaagaggtcattcaagtatgcctgggtgcttgacaagctcaaggctgagcgcgaaagaggaattaccattga

SEQ ID NO: 52676 - DNA, 164 bp, Glycine max
aagcacacaactactacaatgacgtccttacaatcaaaaccaacaacaactgatggcaagttatcaaaagcacgacgatgatcagggtcgcaaggttgacgagtatggcaacgttgagaagcaaaccgacgaatacggcaaccctgttcatgctgctagtgtca

SEQ ID NO: 52677 - DNA, 253 bp, Glycine max
agcgttggtggaagctttccagtctctttgtgtgatgcacagagaccttaaacctgaggatgtgctctgtgtcaatcagcacgagggattcccttctcaaaaccattgacttgggattatctggctgcgtgaagccagctgtgtgcaaggggaagaagtaatttgattccatggagaaaaaccgatgagcttgcacttccaggtgagatagtgaatgatgtggtgggcagcccatactatgttgccccggatg

SEQ ID NO: 52678 - DNA, 236 bp, Glycine max
tctctctcattgcgaacgcttcctctcctcttccctcctctccatgtccctccttcaccccgccgcttcctcttcccagcgctctgtcaacaccaacgccatgcgccagtatgacaaccgcgccgatgaccacgacaccgacatcgatcggcactcggacgttgcgttcctagcacttcgcgccgcgtacgatatcgtctcagatttgttgcatcagtgtttccgactcggtgtgt

SEQ ID NO: 52679 - DNA, 252 bp, Glycine max
gacgtgttgagaccggtgtcttgaagcctggaatggtggtgacttttgcaccaactggactgacaactgaagtcaagtctgtggagatgcaccatgaatctcttacagaggcacatcctggtgacaatgtgggattcaatgttaagaatgttgctgttaaggatttgaagcgtggttatgttgcctcaaactcaaaggatgaccctgcaaaggaggctgctaacttcacagcccaagtcatcatcatgaacc

SEQ ID NO: 52680 - DNA, 247 bp, Glycine max
cgtctcgccctccctcatccgctcctttagcagcccccgcgccgccacctcctccatcgaaccgcctccggactccgaccgttccgccgtcgtcgtctactacaccagcctccgcgtcgtccgctgcacctacgacgactgccgcgccgtccgatccatcctccgcggcttcgccatcgccatcgacgagcgcgacgtcagcgtggacgagcgcttccacgaggagctgcagcggatcctcgtccac

SEQ ID NO: 52681 - DNA, 273 bp, Glycine max
gtgattggcacagcctttgctttgaacatactcttccacatccctgtatagtttagagttctaataactggttgcagcaccctcttatttcttggtcttcagagatttggggtaaggtagttagaactgctgatatcaatcctagtttttgaatggctggatgcttctttggggaaacgagctagtttttgtaatggctggatgcttcttccttaacttaattacttttctgtctttatttaaagaatcgatacatcattaatttttagacta

SEQ ID NO: 52682 - DNA, 270 bp, Glycine max
ggtaaatgcagtttctggcagcatgcctggtcctcatgggtcaaatagatctgttcctcggccagtgaatgttgttggaatgcaaagaatgccccctcaagcaatggcagcttataatctctcatctcaggcagccatgggagacggatgaatcctggtggtatctcaaagcaacgaggtgttccacaggcccatcagccgcaacagttgagaaggaaggagcaaatggggatgccgggataccctgcacaacagaagtcaagacgaata

SEQ ID NO: 52683 - DNA, 220 bp, Glycine max
atagaatcaaagaaaggggtggtggctgcttcgaaagcttaataatttgtttatttccagaacatcatagttttcgcagcagcaaactaacaaattactcatatcatataataagatggcccgttctctctcgcaagccaacgtattggtgtccttgttgctcaatctatctccctaattcccgttcatcggcgaggttacgcagtggcatccgatgtat

SEQ ID NO: 52684 - DNA, 168 bp, Glycine max
atcaaactctatccaaactttcatcagaaggaagcagtcctgatgagagagggtacattggcttgtggaaaatagttgttgtaaaaaacttgccatatgaagacatgcggagaactggcaaggtgccaaaatttttatacatcgcctcttcccacattctaggtattc

SEQ ID NO: 52685 - DNA, 235 bp, Glycine max
atttcaacaaggactgaagattttattgttgacacattgaaacttcgcattcatattggaccctatctaagggaaatcttcaaggaccctgccaggaggaaggtcatgcatggtgcggatcgagatattgcaggcttcaacgagactttggaatttacatttgtaatttgtttgacactcaccaggcttcaaagttgttaaacttggagagaaatagtttggagcatattctaca

SEQ ID NO: 52686 - DNA, 237 bp, Glycine max
atgaaccatggtgtgttacttgtgggatatggtgcagccttttcttgctacatatgagagggcatgagacaccaccaatgtatgtagcaagaaaaggttgaaccatggtgtgttacttgtgggatatggtgcaaaggcttctcaattcttaggcttggcaacaaaccatactggatcatcaagaattcgtggggggagaaatggggagaagatggctattacaagctctgcagaggg

SEQ ID NO: 52687 - DNA, 103 bp, Glycine max
atcacaaggcttgatatccgggttggcctcgtaataaaagctcaaaaacatcctgatgcagatgcactatatgttgaagagattgacgtcggtgaagaacaga

SEQ ID NO: 52688 - DNA, 233 bp, Glycine max
gcagattttcgtgaagactcttacgggtaagactattaccctcgaggtggagagctctgacaccattgacaatgtgaaggccaagattcaggacaaggaaggcatcccaccggaccagcagaggctgattttgctggcaagcagctcgaggatggaaggaccctcgctgactacaacatccagaaggaatcaacccttcaccttgtcctccgtctccgtggggggttttaagc

SEQ ID NO: 52689 - DNA, 263 bp, Glycine max
aaagcttattgatgaggaacccccagctataatgcttctttttgaacccaaaggtcgcccggaggatgaaggcaatgatttttatatccagagtaagaaaaatatgtgttgggtgtggtgaaggaaaccactacttacggtatcaataatcccatcgtgttacagaacacatttccctgagcatctgaaaagccatcgttctcatgacattgtccactttgtgtggatttccatgaagttgcacatgctgctgcagaaagtat

SEQ ID NO: 52690 - DNA, 268 bp, Glycine max
tagcggtccaaacactcttctctgcagcttttgcctacaactcccttcaccatggctgaacaaaccgagaaagcttttctgaagcaaccaaaagtgtttctcagcacaaagaagactgggaagggaaagagacctggaaaaggtgggaaccgcttttggaagtccattgggcttggatttaagactcccagggaagccatcgaaggaacctatattgcaagaagtgccccttcactggcaatgtttccatccgtggccgtatcttggc

SEQ ID NO: 52691 - DNA, 263 bp, Glycine max
acagtttatttctgcagtggggatcttagccctccagaatatcatcattatgggcttgcagctcctttgtatacccatttcacatcacctataagaagatatgcagatgtcattgtgcacaggctacttgctgcttctttagggatatccaagttaccacctgtatttcaagacagtctccagctcactagtattgcagacaatttaaattatcggcacaggaatgcccagtatgcagggcgggcatctgtagagctacatac

SEQ ID NO: 52692 - DNA, 240 bp, Glycine max
gaggatataagctctttaaaagatcagcttaaagcacatcctcttgtaggagatcccaatagggttctgcttctaacatgtcatggttcaatggcaacttcagaacagaaactcatatttgagaaaccacctccaaatataaggaaagtgatacttgctacaaatatggctgaggcaagtattacaatcaatgacatagtttttgtggttgattgtggaaaagcaaaagagaccacttat

SEQ ID NO: 52693 - DNA, 204 bp, Glycine max
atcagaatgggtgtttgactttatgccaatgcgcgggggctacttcattggaaatgttagtccggcccggatggattttcgatggtttgctttaggaaattgtgttgcaattctatcttctctggcaactccggagcaatcaatggctatcatggatcttattgaatctcgctgggatgaattagttggagaaatgccccaaaa

SEQ ID NO: 52694 - DNA, 217 bp, Glycine max
aggcggagaagttgttggacaagatgattgagaaggagattgtgttgcggcagaagaatgcttatgagacagagctttttgagatggagcctagtgcttataatttgatgattgggtatttgtgtgagcatgggcggactggtaaggcagagacttttttccgccagttgatgaaaaagggtgtgcaggattcggtttcttttaataatttgatatg

SEQ ID NO: 52695 - DNA, 191 bp, Glycine max
tgtaccaaaatattttggtacgtaagtcttttaaaaagtttgcatctcctctttggttttccttagttctgaaagttatctcctaagaagacaatcatatgtactgtacgtagtgtgaagatatagtattgtatgctgcagaaaaaagaaaaaaaaaaaaaagggcggcccccaaatattaaaccctccaa

SEQ ID NO: 52696 - DNA, 258 bp, Glycine max
ggtcagtccggagctttatggtgacagcaggcccagattattcacttactggacgagtgactcatatcaagcaaccggatgctacaaccttctttgtgcgggttttgtgcaaacaaatggcaggatagccattggagctgccatttcccccatctcatcttatgaatccaaccaatatgacatcaccatcctaatttggaaggacccgaaagtagggaattggtggatgagttttggtgatggcacattggtagggta

SEQ ID NO: 52697 - DNA, 252 bp, Glycine max
catggtggctgagctgcttggtgtgacattgggtccaaaggggagaaatgttgtgctgccaaataagtatggaccacccaagatagtaaatgatggagaaactgttctcaaggagattgaattggaagatccgttggaaaatgttggagttaaattggtgagacaagctggtgctaaaacgaatgaccaagctggtgatggctcaactacatctgttgttcttgctcgtggcttaatcagagaggggacaaa

SEQ ID NO: 52698 - DNA, 259 bp, Glycine max
atccatgttaagctagtggcgatcggatccagctacagcctacgacctacagagtattcgccgcgccttctccgcaatcagacacttctcttctgcagctaaagagattactgtcagggatgctctcaactccgcactcgatgaggaaatgtcagctgatcctaaagtcttcttgatgggtgaagaggttggggaatatcagggtgcatacaagatatccacaggggctgctcgacaagtatggccccgagagggttct

SEQ ID NO: 52699 - DNA, 265 bp, Glycine max
atgaaattaaaaatgctatcaaggaggaatcagagggcaagttgaagggaattcttggttacactgaagatgatgtggtctccactgactttatcggcgatagcagatcaagtatttttgatgcaaaggctggaattgcattgaataagaactttgtgaagcttgtttcttggtacgacaacgagtggggatacagctcacgtgtcattgatcttcttgtattcgttgccaagaagtctctttaaggtgttacttcaaagtagct

SEQ ID NO: 52700 - DNA, 260 bp, Glycine max
agggaccgtttatttcatgaggtagagaatcttgctgctaattcagatggactagcacacaaaactcaagatgttcgtggccaaaaattgaaagcattggaagcacagattttagacctcaagaagaaacaagaaagccatgtgcaactattaaagcaaaaggagaagagtgaagaagctgcaaaaagactgcagactgagatacaatatatcaagtctcagaaggttcagttgcagcataaaatgaagcaagaagcaga

SEQ ID NO: 52701 - DNA, 257 bp, Glycine max
agcaaaaggagaagatcattgagttagccttgcaattaagtgtttgcactttgcacacacatgatcatgggacaccaaaaacctgcatggttggaagccctttatgcacaaaagttctttgtcgggtgctctcaccatgagaatgctaaaaagaatgagaagaacatatgttgcttagattgttgcaccagtatttgccctcactgcttgccatcacatcgctttcataggcttcttcaggttcgccgttatgttta

SEQ ID NO: 52702 - DNA, 259 bp, Glycine max
ctctctctttctctttctctctcatccagatcttgcaaaaaaaaaaatcacaatggcagcgagcgttcccattccacgcgaagagttcgtgtacatggcgaagctggcggagcaggccgagcgctacgaggagatggtggagttcatggagaaggtctccgcctccgccgaaagcgaggagctgaccgtggaggagcgcaacctcctctccgtcgcctacaagaacgtaatcggcgctcgccgcgcctcctggcgcatc

SEQ ID NO: 52703 - DNA, 270 bp, Glycine max
ggaacatggcccgaactattgatactactgtaaccgataatttgcctgcaataatccggctcatggaaactggtcccaagatttgccagaagtatattgaacaacctgctttgttccaggggagaaagtttgatctccgttacatattactggttcggagcatgcaccctctggagatattcctgtcagattgtttctgggttaggattgccaacaaccaatattctttggacagaagtagtttgtttgaatacgaaactcacttcactg

SEQ ID NO: 52704 - DNA, 279 bp, Glycine max
ctcgttcatgaggcataggttacacagttcaaggatgcaatagtgaataattactggtttgaattgttcatggatgaccttccattgtgggggtatgttggcgagttacatcctgataagaacggtgataatggcaagcatgtactttacacacacaagaacataaatgttcaatacaataaagatcagatcattcatgttaatctaacttatgacaacccaaggcctctggaagtaggaaaatctttggacatgacatattctgtcaaatggtctcct

SEQ ID NO: 52705 - DNA, 263 bp, Glycine max
cccagataaaaaccctgatccggaatcgcgaaagctgtttgtaaaagtcgccaatgcttatgagattttgaaggatgaggccacgcgagaacaatatgattatgcaattgcacatccggaggaggtgttttataatactgcacgctactatcgggcttactatggtcacaagacggatccccgtgctgtgttggttggccttcttcttattctttcaggttttcaatatctaaatcaatcaacaaggtataatcaggctgtag

SEQ ID NO: 52706 - DNA, 269 bp, Glycine max
aacactcctccccgacctggaacgaatctccaccacttccaaagcctacatcaccaaagccaacagcgaaattaccaaaggcttcaaaccctacgttggcaaaaaatacgcacccaccgtcgccaccattatctctagcgccttcatactcatccctctcctcttagtctctctcctctgcacaagaatcaaagcctatttctccctccagaagatcctaatcttcatccaagtctatctctctttctacttcaccattctctgtgtca

SEQ ID NO: 52707 - DNA, 265 bp, Glycine max
  unsure (1)..(265): unsure at all n locations
ggcggttgcaattgcatagagaagtgcagagagagcgcacgganacgactcagtcaaacagtcggtaactctttcttttcttttctttctttctccgatcgcatcgctcgcaaccacaatcatgccttcccgaagaagaactctcttgaaggtcatcattctcggtgacagcgggttcgtctctctctctctctctccctccctccatttgtagggtttacttcaatcacagatctcttctcccttctcgctttccaacctcttt

SEQ ID NO: 52708 - DNA, 267 bp, Glycine max
gaaagttgggcacattaaacagcttcctgtggatatgaaggctataatggatgggttttcctcattgatggttccttctcagaaaccaatgttcagtccgcacgtgttgcctttgtcggaggatcctgccttagcaatggcctttgcagttgcacgacgagcagctgctgtgcctttactgcttgtcaatggaacctaccgaaagacagttcgtacatatcttgattcttctattctacagtttcaattgcaaaggctgaataagca

SEQ ID NO: 52709 - DNA, 99 bp, Glycine max
ggcacggttcttcgtttggccaaggatttggctgagaacaacaagggtgcacgtgtgcttgttgtctgctctgagatcactgcagtcacattccgtggg

SEQ ID NO: 52710 - DNA, 262 bp, Glycine max
ctcgagccgattgaacttcttggcgtggatcttccaactgcatatcaacatgccttcacttacatccggcaactggctacaattttaagggaggcacttaatacaaagactaaggaatcttttcggaaggtttatggatggaaattcataaactgccttgaactttggactggggctatctgtgcctacagttcagagtctgactttaagcaacttgcatatccattgacccaaataatttctggggtagcccgtctagttc

SEQ ID NO: 52711 - DNA, 99 bp, Glycine max
cggtgacactggtaggcaacatgggaacatcggtggcccttactatggaaccaacaccgcagacaccggtactggtcccagaagtggaaccacgggcgg

SEQ ID NO: 52712 - DNA, 136 bp, Glycine max
atcagaatgcttcttaatcttgaccagttcatggtctttaaattcagtcaaatgggaattcagtgtactctgactgctaacaaggaaacgttctcgacagactgagtagagatcactgattggcatcccttgttag

SEQ ID NO: 52713 - DNA, 240 bp, Glycine max
ctcgagccgcagtgaactacataagaggcctcatgaggatgcagggcatgaagaaaatacctggttatagtttgattgaagtagggaacaaggtatacacattttttgctagtgatgattcacatccttcttgggcagatatttatcaattattagaaaatttaaggcttgaggtggaggcagaaggttatattcctgatactagttgtgttcttcgtgatgtaaatgagccaatgaagg

SEQ ID NO: 52714 - DNA, 263 bp, Glycine max
ggctaattgcagtgaagtaagtggagacagagaggtacaacgaactatgttagaattgcttaatcagcttgatggttttagcagtgatgaccggatcaaggtttgtctttaattcttgttatctatatgttttttctgatgacattatataagtatgcttcagagaattttgctttctttgggtaaagcataatagtttatatatttttaaatcctatgtttaggggctggtccaatagtttaacttctatttattacaactt

SEQ ID NO: 52715 - DNA, 257 bp, Glycine max
gttactgcaaacaaagaataccagaatgcagactggagactacgtccacttcctgatgagatgataagatatgccagagaagatacacactatctgttgtatatatacgacttaatgaggattaagttatttgcttgtctaaggagtctgaaagttctgagtcttcagacactcctctggtggaggtctacaaacgcagttatgatgtctgcattcagctatatgagaaagaacttttgacagagaactcctatctt

SEQ ID NO: 52716 - DNA, 255 bp, Glycine max
acatgaatctcttacagaggcacatcctggtgacaatgtgggattcaatgttaagaatgttgctgttaaggatttgaagcgtggttatgttgcctcaaactcaaaggatgaccctgcaaaggaggctgctaattcacagcccaagtcatcatcatgaaccaccctggtcagattggaaatggctatgcccctgtcctcgactgccacacttctcacattgctgtcaagtttgctgaactcatgaccaagattgac

SEQ ID NO: 52717 - DNA, 251 bp, Glycine max
ctagtatttacaattgctgcatgttttatggttgagcttggatatgcaaagcctgatgctaaagaagttctgaagggtctttttgtgccaggactaaaagggagtggtgctactggtcttgcaatttctctcttggagctatggttatgccgcacaatctcttcttgcactcagcactggtgctctctaggaaaataccacgatcagttctgggaattagggaggcttgcaggttttacatgatagaaagt

SEQ ID NO: 52718 - DNA, 260 bp, Glycine max
caataatcggtcatatacgcggaagcttgtgatatacgaggaagcatgtttgagggtatgatgcctaaggatttgaagatttatgccacaactgcatccaatgcacaagagaatagttggggaacttattgtcttggaatggatccttctccacctccagagtacatcatttgcctaggggatttgtacagtgttgcttggatggaagataagtactaaatatagtgttcttttgtaatcaacccataataccatgtata

SEQ ID NO: 52719 - DNA, 245 bp, Glycine max
  unsure (1)..(245): unsure at all n locations
aaaatcgtagactacggttaattgtgtatgtgtagatggagaggattagagtgctaactagtaggccattctctcgttcttctgaagttcaactgctgacagganagtgccatttagagagaaggtcatatacactgtgatctctcttntcattttcctggtttgtagtcagctccctctatatgggatacactcaacaacaggtgctgatccattctattggatgcgtgtattctcgcttcaaa

SEQ ID NO: 52720 - DNA, 247 bp, Glycine max
cataaagtggcaatgatcacagttactttatgaagggtgctccaatgcattttttatagcaactgcatccatgatattctaagaactatgtccaagaccatggctatgaagtagaatttcatggatgcagttggtgtttgaaatagattggagctcccttcataaagtggcaatgatcacagttacttcctgccttgagattattcgccgtggcatttggaacttctttaggttggagaatgagcac

SEQ ID NO: 52721 - DNA, 263 bp, Glycine max
caagttcatgcttatataattaggacagattatcaggataatatatttgttggtagcgctcttgttgacatgtattgtaagtgtaagagtataaaatcagcagaaacagtttttaggaagatgaattgcaagaatgttgtatcttggactgcgatgttagtgggttatggacagaatggttacagtgaagaagctgttaaaatcttttgtgatatgcaaaacaatgggattgagcctgatgatttcaccctgggagtgtaatt

SEQ ID NO: 52722 - DNA, 255 bp, Glycine max
tgcgtcttcataaacgcctttcttctccgttccgtttcctcgttcgaattcgctttttgatctgcgaaaatgagagagtgcatctcgatccacattggtcaggctggtatccaggtcggaaatgcttgctgggagctctactgcctcgagcacggcatcgggcccgatgggcaaatgccaagtgacaagacagttggcggtggtgatgatgctttcaatactttcttcagcgagactggtgctggaaagcacgtg

SEQ ID NO: 52723 - DNA, 257 bp, Glycine max
cagaatggtggctttgcaacaccacatatgaacttgaacatgcgccattatcatctattcctaagcttgtaccaattggtcctttgttgagaagttatgatgatacaattgcaactgcaaaaacaatcggacaatattgggaagaagatctatcctgcatgagttggcttgatcaacaacctcatggttctgtcttgtatgttgcctttggtagtttcactcattttgaccaaaaccaattcaatgaactagctctt

SEQ ID NO: 52724 - DNA, 250 bp, Glycine max
gaacaagggtcttcctccagtcgattagaggagccattttgctggcaggcatacaattatgctaaagtatcgttcaagattgttggggcatcagtatctggagttgccgttgatcctaaatctgtgagcatctatccagctgtaaaagcacctatggagttttcaactcaggttacttctggggactacattctgtggaatactcttggtaagtgcccacatgttgccacaataaaaaggtgaagtatga

SEQ ID NO: 52725 - DNA, 265 bp, Glycine max
gttgtgggagccttatctcgcaatcttcatgatcttcaagaccgtcaagggagctacttatcaatttatgatcagcctacgcttccccttcaggatccagtcgttgattcaataaatgcagctgttgataggttaaccaactcgacaaacttccttaactttttggggcagcatgcactcattatgcatgaagagctgcctagcccttctgaggaacatgttgatgatcaacgataccattttatgtctcttctcctgaacctgg

SEQ ID NO: 52726 - DNA, 257 bp, Glycine max
atctagagcattatcatcactgtaggcgagtggtgttactcgtcatgctattgccatcaatatcgtggtttatgatcatcattctgatggagcaatagataaggcacggaagcttctggagagccttttagaaaatggacttaaacctgatatcttcacttttagctctatagttgatggactctgtcaaataaaaaggaccgaggaagctcttgaatgctttactgagatgattgagtggggcatcaatccaaatg

SEQ ID NO: 52727 - DNA, 257 bp, Glycine max
ctctaggtcagatttcttcaaatttataatgtggtatgtttttacatgcaatctaatataaacaggtgtaggatttctaactgttgttccttttcaatgcaggtgtatggcctcatcattagtgcgcacaggatttgtacgaggttctctgacccagggaaatggttgttatcagcacaggtgtatcaacaattctttagaggttgctgtggatggtatctggaaagtgtgtcctcaggctggtggaccccttcagt

SEQ ID NO: 52728 - DNA, 254 bp, Glycine max
gaagaagtattttgcgtttatttattcagcattcggcggagatttcaaacccaacttggcttgttccaattccattcattcgttcattcccaggttgtgatggcagcagcaccagcagctaccttcgctattggaaccaccggttccctcggccaaagaggaagctcgcttcctcaatcaaagtcctttgggttgaaattcaactctctgaatcatttgaagagcttctgtggcctcaaggccatgtcatccgt

SEQ ID NO: 52729 - DNA, 266 bp, Glycine max
acaaaattagtgaagaaaggttgaagcaggctttggatgctgaatcaaaaataatccagttgaagactactatgcaaaggcttgaagagaaattctcagatatggaaactgaaaaccaggttcttcggcaacagtctctgctaaactcatcttcaaaaacaatgtcagagcacctttctacccacatatctgagaagttggaaaatggtcaccatgtgctggaagatcagaacaatgctgaagcacagagtgtcacacctgtgaag

SEQ ID NO: 52730 - DNA, 256 bp, Glycine max
acaagatgctcttggcatcggtttgatgataacagtcctacagttggctcggttgcctaatattaaggttgcaactgtactcctatgttgtgcatttgtatacgacatcttttgggtattcatatctcctgtgatattccagaagagtgttatgattacagttgctcgtggtgacaaggccggtggtgaagcaattcctatgcttttgagatttcctcgtctttctgatccttggggtggctatgatatgattgga

SEQ ID NO: 52731 - DNA, 259 bp, Glycine max
aattggttgtgaagtagtttcactggaaagctattataaacaaaatattgatgacataagaaatggtcaaagaacaaaagtacctatatttgacttggaaagtggtgctcggagtggcttcaaggaacttgaagtttctgaagattgtggagtgattatatttgaaggcatctatgctctgcatcctgatattcgaatatcccttgacttgtggattgctgttgttggaggtgttcattcacatttgatctcgacgtgt

SEQ ID NO: 52732 - DNA, 277 bp, Glycine max
tgcaagaatggcacttcgttgcttggtgatgtccctttctgttctcttcactcttggtcttgcgagagaaagccatgccagagacgaagatttttggcatgctgtttggccaaacactcccattccaagttcattgcagatcttctaaagcctggccctgcaagtgttgaaatcgatgatcaccctatgcaaattgaagaaacacagtacccgaaaaccttcttctataaagaagaccttcatccaggcaaaacaatgaaagtacaattcagcaagc

SEQ ID NO: 52733 - DNA, 278 bp, Glycine max
gaccgccaaagaacatctgaggagactaagcatgaaagaacgtgagcacggagaaaaggagaggcaggtgtcagaggcagaggaacatgggacaattggatatgagagaacatacacacctacatgaccatgtttcaacgtgcgcaacgttgcggcggcgggcagaggactactacagatgcaacaatcaccccttctgcaagaaagcctctttgcaaccggtgcacttacaatttggtattacctgggagtgaaaagagatattacagccatgccta

SEQ ID NO: 52734 - DNA, 274 bp, Glycine max
gttaaatttcaggttgtgctgccagatggatccaaagatcccactgttgagattccttttgaagtgaagcaacatctagagatcaagtattcataccttgatgttgtcggcagaactgtggtggttctagaaaaaagaaatgcagttcctgagaataatactcctttccaggtatttcctaagcccaatgtgaacaaataaataaaaatttctaaaattgatttggaatgtgggcatttcacatgttctaacttctaagagcaagaaatttgtt

SEQ ID NO: 52735 - DNA, 254 bp, Glycine max
cggacgaatacggcaaccctgttcatgctgctagtgtcaccgatgtagccaccagaactgctgctggtggttacagtgatgacattgataagcaacatgataccaccaatgcctacggcgtagacactggtagacagcattctagtggtggctacgatggtgacactaagcgggcatcgtggaactactggtggctatgatgatgacgccagtagacgtcatggaactaccggtgtctatggtatagacaccga

SEQ ID NO: 52736 - DNA, 263 bp, Glycine max
gcatccacccccaatcccaccacgcgcggcgtcaaagaggatttttccgagctcaccaaatccttttcccgccagctctggggagtcgcctccttcctcgccccgccgcccgatccccaatccgaaaagcccgtcgccgattccaatcccaatcccactgacgacgacgaagaggaagatatcatcgcaggaatccgaaacgatttcgcggagattagtgcttggatccgaggaggaatacgatctcgaaggtgtcctcggag

SEQ ID NO: 52737 - DNA, 267 bp, Glycine max
aggggaaaccaaaaaaacacttgctattgatcttcaagggcaccgttctgatgtaagaagtgtcacacttagttcagacaacacttttctgatgtcaacaagtcacaatgctgtaaagatttggaacccaagtactggctcttgcctaaggaccattgattctgggtatggactatgcagtttaattcttcccaccaacaagtatggacttgttggaactaaagatggaaccatagaaattattgacattggaagtggaacttgtgt

SEQ ID NO: 52738 - DNA, 284 bp, Glycine max
tgtattcggctcgagtgtcacctttccgttcatttcctctgttttttcttcaaatcttccgtttcgtggtatccccgtgatttaaccatgcttctccgaaccgccgcctccgccgcttctgcttcgtccctctccctcttcagccctacctccgaacctctccgttcggttcccgctcgtggattggtggttcgcgccgcgaaaggatccacgaaccaccgcgccctaaccggcgtgatctttgaaccgttcgaagaggtgaagaaggagctcgatctcgttcc

SEQ ID NO: 52739 - DNA, 259 bp, Glycine max
gtggggagccctacaaggcggcgataacttcgcagctgattgtgacggtgaagaggttggacggagagataagcgcggcagcgacgagtgacggggaagtgtttgacaggcatatggaggttgtggggagcctgagacaccccaatttggtgcctttgagggcttattttcaggccaagggagtgaggcttgttatgtatgattatcagcccaatggcagcctcttcaacctcgatcacggttcaagatcagcgagggc

SEQ ID NO: 52740 - DNA, 153 bp, Glycine max
gaaggttgtttcctcaggccaagagctttgcaaattagcctcacaaaagcaaagatcaaacaaactaaggacgagtccacgatgttgcttgaacttgcactcggtttattggttttggctctgtttctgcacttgcgttccacacaacatacg

SEQ ID NO: 52741 - DNA, 234 bp, Glycine max
atgggacggccacgctaattgatatctctctctgcgttcgtgtgttggtgtttaggatttgcatcaacgaagaaagatgggagatgtagcagataaattggcgtatttccaagcgataaccggtttagaagctccagacctctgcaccgaaatcctcgctgcacacaattgggacctcgaactcgctttatctaccttcacctcttcttcgaacccttcctccaccgacactcc

SEQ ID NO: 52742 - DNA, 252 bp, Glycine max
acaacaatcaagacactcctgttgttgccgtttctattattgacaccaacagcttggcgcaccagctcgaccagatgcctaggagattctatcttgctgggaaccaagagcaagagtttctaagatatcagcagcagcagcatggaggttcccaaagccagaaaggaacgcaacaagaagaagaaaacgaaggaagcaacatattgagtggcttcgcccctgaattcttgaaagaagcgttcggcgtgaaca

SEQ ID NO: 52743 - DNA, 249 bp, Glycine max
aagaagaagaccaagacgaggatgaggagcaagacaaagagagccaagaaagtgaaggttctgagtctcaaagagaaccacgaagacataagaataagaacccttttcacttcaactctaaaaggttccaaactctcttcaaaaaccaatatggccacgttcgcgtcctccagaggttcaacaaacgctcccaacagcttcagaatctccgagactaccgcattttggagttcaactccaaacccaaca

SEQ ID NO: 52744 - DNA, 245 bp, Glycine max
cagggctccgaggatgcgttggacttctaccctccatgctcgctttgttcatgctgttgaactcttgggtggccacgaaagggctacacccaaatccgttcttgaactaatggatgtcaaggatctcactttagctcatgttaagtcgcatttacagatgtaccggacggtgaaaactacagatagggcggcggcttcatcagggcaatcagatgtgtatgataatggttcatctggtgatactt

SEQ ID NO: 52745 - DNA, 241 bp, Glycine max
ataccctacatcggagtttcagtgtcacacctcttttctcatctctaacatcatagtcctcagaggctaatcgtcctattatcactaacaatgtctgacagtcaagaatctgacaagaacattgagctatggaagatcaagaaattgatcaaggctctggaagctgcccgaggtaatggtaccagcatgattgctctgataatgcctccacgcgatcaaatgacgggggtcactaagatgt

SEQ ID NO: 52746 - DNA, 246 bp, Glycine max
ctttgatacaggcattatggtcaaagtccacacctatcccactaagtgctacataccctgcacaagatcattgcagtcgatgtggattgtgtgatacttactatattgcacatgtcaagaatgcatgcgcttactagggcgatggaatggctaagattgacagattggatcctgttgttcatggtagacgcaggacgactgataacttggatgcgacctacttaggggtctcagaggtgctgctat

SEQ ID NO: 52747 - DNA, 245 bp, Glycine max
gcatggagcattacttggaggttattaacattctggggaatactggccagttgaatgaagctgaggagttcattgagaagataccaattgagcttggagttgaggcttgggagtctcttcgaaattttgcacaaaaacatggagatttagatcttgaagatcatgcggaggaggtgttaacatgtcttgatccttcaaaagccgttgctgataaacttcccccgcctccaagaaagaagcagtct

SEQ ID NO: 52748 - DNA, 245 bp, Glycine max
ctttcttctataaattgttttctgatcgtagttcgtttggatccgatccgtgatttgtggttttagatttgtgtgtctttgcgataaggatttgagcttcagtgggttttttttttttacaatggcaacgaattcttctaatggagcaacaaagcaacctcccatgccatctcccttgcgtttttccaagttctttcagtccaatatgagaattctggttactggaggagctggatttattggct

SEQ ID NO: 52749 - DNA, 238 bp, Glycine max
gtttaggttaatgatgtttgaggacatcaataggcttgtagcatattttcagaggcatattgatgatccccagcatgattcaaccccttcgattagatctgtgtctgctatggtatcaatgcgaaccctgcaactggtggctcatctggggcatctgggggtagtggttggggtggtggttcaaacagtgagggtggctggagaggtcactcttatgatgagggggatcgatcatcta

SEQ ID NO: 52750 - DNA, 260 bp, Glycine max
tgatgatagcgcaacttcaactagctcttcacgagtttgcatcttaggccaccatggctgagaaaggttctgctgagtatgaggagctgaggaagaatccccagaaggcttacttgaagactattacaccaaagtttcagacccttattgacctttctgttatagaaatcttgtcaaggcatgcatctgatgaggtgtaccttggggagagggacaatccaaattggacatctgatacaagagcattagaggcttttaaa

SEQ ID NO: 52751 - DNA, 250 bp, Glycine max
tccttcatccctttggagtgacttatccatggattttattacgggtctttcggcttctcaaggatacaccaccatcatggtggttgtcgaccattactccaagggaacccacctcgggcccttactaacgcattacaccgctcataaggctgccgtattattcatggatactgtttgcaagcaccacaattttgcgcgtagtatcgtttctgacagggatcccattttcatcagtggtttgtggcatgag

SEQ ID NO: 52752 - DNA, 271 bp, Glycine max
ctggtcacccaggaacctggtttgctcagtttgagtataagagacaacattgcttatgggcgagataccaccatggatcaaattgaagaggctgctaaaatagctcatgcacatacctttatcagctcattagataaaggttatgacacacaggttggcagggctggtctagctttgacagaagatcagaaaataaaactttctattgcaagagctgtgcttttaaatccatccattcttttgcttgatgaggttactggtggacttgatt

SEQ ID NO: 52753 - DNA, 264 bp, Glycine max
ctggtggcaatgggtagcgaagaagagagggttcttgagaaccacactagaggcatagcttccaaaatgatggctaatatggggtacagagaaggaatgggtttaggtgtaaccggtcagggaatgctggaccctatagcagtgaaggtgctaccaccaaagcagtccttagatcatgcactcgagtctcataaaagggaagagaacaaagagaagcaaggcaagaagaaacagagccgaggtggcaagagaaaacgcgagaag

SEQ ID NO: 52754 - DNA, 262 bp, Glycine max
cacaacacggcagtgaagttattagaatctgtgttgtgttgtgttgtgttgaggatgccgaagagcaagggaaagggaggtaagagcaggaatcggggtaaggacgaggcggacgacgagaagcgtgagctggtgttcaaggaggacgggcaggagtacgcgcaggtgctccggatgctggggaacgggcggtgcgaggcgatgtgcatcgacgggacgaataggctctgccacatccgcgggaggatgccgaaaaggtgtg

SEQ ID NO: 52755 - DNA, 174 bp, Glycine max
actcgagccgaaaaattccaacttggatcatgatgtcacttacctatacaagctagtacctggtgtttcagagaggagttttggattgaaggttgcccagctttcacagttaccatctcattgcatcaggcgagctattgtcatggcttctaaattataggcgctagtgaacag

SEQ ID NO: 52756 - DNA, 254 bp, Glycine max
aagtgcgggaggcaaaacgcagtctacttgacaatagacgatggacttgggaattgatttccgcagtgtagcacagaccatcgtctattgtcaagtgcgggatgctgaacgaagtgctacttgatcacttatttaccgaactaggcacaatggagaccaagcgtctgtcatcgttattgaatgaggctcctgctattatggaacgacgtagcgcgcacgcaaagagactagagttataccggagtgcacaagct

SEQ ID NO: 52757 - DNA, 281 bp, Glycine max
gatcatttgcgccgtttggggatgttctcgcagaacttggtcacagcgacggtgacacaggcgctggacactaccgccgtccacggcgtcacgccattcatccgatctcaacgtcgacgatgttcagaagctctacactgacgtcaatcgcgtgcttcccgtcatcggatactaccgctggtggcattgcgacgccgtcggatgtcggcgccgctaccgaggatcatgattcgacagagcatggagctcttaatgcagttagatctacaggtagatgtgtc

SEQ ID NO: 52758 - DNA, 246 bp, Glycine max
cacaaaataaccactgaagaatcaccaaacaactaaggaagatgataggtccagttgttgttactaatgggaacttgaatcgaaacgataccaggggaaagaccattacttgcaaagctgccgtggcatatggtcctggagagccctttgtggtggaacgtgttcttgttcatcctcctcagaaaatggaggttcgaatcaagatcctcttcaccacaatctgccacaccgatctcagttcttggc

SEQ ID NO: 52759 - DNA, 267 bp, Glycine max
gacagataccaccaagaagaggcgaccagcagagttgatattccctttgaagacgagatggcgtcccataggccgagctatgaagctggtcagactaagggccgagctgcggcagagacgagccagacgatgggcaatattggagagaaggctcaagctgcaaaggagaagacccatgaaatggcccaagctgcaaatgagaaggcccaacaaacagcgcaagctgccatcgaccagacttgcgacacttcccaagcggcagaggag

SEQ ID NO: 52760 - DNA, 263 bp, Glycine max
gtgtaagctcatgttatctacagctgagaattcaacttaaatggatttgaatgttcatatgtgtagtgcacaatcgcgcatgcacttgagaagacaaaatatccagattcagatttatattggaagaaatttgaggataaataccacttttcatgccaatttactgctgacctaatagccatgaatactgctgattttatcatcaccagtacataccaggagattgcaggaacgtaagtaccgttttcatgatatatatggtt

SEQ ID NO: 52761 - DNA, 185 bp, Glycine max
caagtactataattacatccgtacaatcaaagccagcattagctatggctagttatcacaagcactacgatgatcagggtcgcgaggttgacgtgtatgcgaacgtggagaggtcaatcggcgaatacggcaaccctgttcatgctgctagtgtcacctatgtagccaccagaactgctgctggt

SEQ ID NO: 52762 - DNA, 258 bp, Glycine max
ctaatcagtagtatacgaacacatcgtaggtgatgcgctatgtcatcatgcagtacagctaattggatggggtccaactgtagacgtggcagattagtagctccatgcccatcagcggcacagagactggggatacgatggttcatccaagatctcgatgagggacacacgagtgtaggattagagaggatgtaactgctggattaccttccagcagaaaccgcgtcagagacgtgactgatatgaatgctgaggctg

SEQ ID NO: 52763 - DNA, 266 bp, Glycine max
gtttcatgtggggttttttcaagtggttcttctcagggacacaggattgcggattcgctcagtttcctacctttggattgcaagcttggaagcaaacattctattttgattttaacatgacttatgtgggagcagggatgattgcccccaccttgtaaatttgtctttgctccttggagccattctctcctttggagtgatatggccgctcattgatcgtcgcaagggagattggttccctaccaatttagatgagagcaacatga

SEQ ID NO: 52764 - DNA, 261 bp, Glycine max
cgttgccattctcatcctcttctttctctctctaccattgccatggatccctacaagcaccggccatccagcgccttcaattctcccttctggactacaaattctggtgctcctatttggaacaacaactcctctttaaccgtggagctagaggtccaattctgctggaggattatcatcttgtggagaagcttgcaaattttgatagggaacgtatcccagaacgtgttgtccatgccaggggcgctagtgcaaagggtt

SEQ ID NO: 52765 - DNA, 262 bp, Glycine max
ctatagttcccatcaatataatgcagccgaacctgaatgttgttgaagcatcccttggtccacatatgcagaatatgccccgtcccagaggtgcagatgctgctggtcttcttttacgcgaactagaactccaccctccagagaagagtggcacaggcggaatatgtttggtgcaccttggtctgatccagaggatgtggattgtgctaatgatacacctaaacttgttaattctgacccacttgattttagctcattggag

SEQ ID NO: 52766 - DNA, 272 bp, Glycine max
gagaatatttaacttttttgccatatctaaatcccagccatactgaaattccattgatgtgcttaatcatgtgaaacgagttctcttcatgctgctgctaagattttactaattattatgcttggcttttaggaggtcctcaaagtgatgcaaactcgttccccaatgttgatagtacttggaaaacattcaatgagttacaaaaactgcttagtaagactaatggccaagttgtcggtgacttgatgactccaactccacttgttgttcat

SEQ ID NO: 52767 - DNA, 231 bp, Glycine max
gctgaagacaacctaagcttagaattagcaacacacaacagaagagaggaaagaattgatcgttgaaaatgcagggcggagcgaccgcgggagagtccattaaggcaacagctacaaacattggtgctactgccaaggctggcatggcgaagaccaaggccactgtaccaagagaaggcagccagtatgacagcacgtgatccggtgcacaatgagttggcaatccaaaag

SEQ ID NO: 52768 - DNA, 257 bp, Glycine max
gatggatgtaactattggggaagaggttggttacagtatcagatttgaagactgcagtagtgcgaagacggttttgaagtatcttacggatggtatgctcttaagagaagcgatgacagatccgcttttgcgaacggtacaaggttattattcttgatgaggcacatgagaggactttggccacggatgtgctatttggccttctgaaggaagtgcttaaaaatcgacctgacatgaagtcggttgttatgagtgcg

SEQ ID NO: 52769 - DNA, 244 bp, Glycine max
gcaaaattgcaatattttataactgatgtaccctaaatgcagataaggtttttgcatgatcctgctaaagatacaggttttgtcggcagtgcattgacaagtaacatgatacgattttttaagacccaagatgaatcatggagccatgaggttgccatatcagtgaaaccattgaaagtgcaaaactggattcttcctgaaatgcctgggcttataactgattttctgatttctcttgatgatc

SEQ ID NO: 52770 - DNA, 258 bp, Glycine max
aagtgcgggaggcaaaacgaagtctacttgataatagacgatggacttgggacttgatttccgcaatgtagcagagaccatcgtccattgacaagtgtgggatgcacgacgaagtttacgcgatcacttatataccgacctaggcaaaatggccaccatcagacagtcatggtcattgaatgccgaccctgctatcttcgtacgacgtcttgcgctcgcaaagtgactagatttataccggagtgcacaacctgaagg

SEQ ID NO: 52771 - DNA, 278 bp, Glycine max
cacacacaactactacaagtacttccttacaatcaaaaccaacaacaactatggcaagttatcaaaagcactacgatgatcagggtcgcaggttgacgagtatggcaacgttgagaagcaaaccgacgaatacggcaaccctgttcatgctgctagtgtcacctatgtagccaccagaactgctgctggtggttacagtgatgacattaataagcaacatgataccaccaatgcctacggcgtagacactggtagacagcattctagtggtggctacg

SEQ ID NO: 52772 - DNA, 186 bp, Glycine max
  unsure (1)..(186): unsure at all n locations
gttcaagttcaaattctacacttgtgccaccatctgaagangttcttagtgcaagtgctgctggtcgaattggtcgcttggttttacttnaagcatgtgctgaagcatatttccctccaatctctcaactagagggcttcctttacgactccangctgtggaaggaaaagactggctgtttcaatt

SEQ ID NO: 52773 - DNA, 271 bp, Glycine max
gaccaagccccactcaaccaccacaccactctctctgctcttcttctacctttcaagtttttaaagtattaagatggcagagacattcctatttacctcagagtcagtgaacgagggacaccctgacaagctctgcgaccaaatctccgatgctgtcctcgacgcttgccttgaacaggacccagacagcaaggttgcctgcgaaacatgcaccaagaccaacttggtcatggtcttcggagagataccaccaaggccaacgttgactacg

SEQ ID NO: 52774 - DNA, 157 bp, Glycine max
attacacagtacacacactagaagaataatggcttccagtctccactactttttagccctctctctgtcttgatcttgtcttatgcttcttatccgactcagtcacccctactctacgaataaaccttgttgttgctacccgttcaaaatgatggtt

SEQ ID NO: 52775 - DNA, 265 bp, Glycine max
ctcaagttcacacccttgtctctatggatgatccaattgaagttccaccaaccaccgccaacgacgtggtggcgatgccatacccagggcgaggccacgttaaccccatgatgagcctctgcaagctgctcctatccaaaaactccgacatcctcgtaaccttcgtggtcaccgaggaatggctcggcctcatcggctccgaccccaaacccgacaacatccgattcgccacaatcccaaacgtattccctccgaacacggtcga

SEQ ID NO: 52776 - DNA, 273 bp, Glycine max
gtcgccgcggtcttcgtcttgtgggccaccagggcctccgcgggactcgtcgtttcgctcgccgatggcggtgacgaacaccgtggactcattgcatacgcgtctttcttgatttacactctgttttcgttgcttgtcatattctagggcttgtcgttttggttcggattgtttttggattggatcactgttcttatggttttagttcttttcctgcattttgaaccttgcaattttttggtgcaattatggtatagagaatggagttattag

SEQ ID NO: 52777 - DNA, 283 bp, Glycine max
ggaatgacccttgtggattaggcctagcagcatttgctgtcagattccatctgtaggttctagcttgcttcatggaaagctccgttatgctgttaacagtgtctcatatgttaaccctgacacccctctcaagcttgctgattacttcaacattcccggagtcttcagtgtgaatttactccataactctccctcaaacggtccaggatacataggcacctcagtgttgcaaacttctctccatgattttatcgaggttattttccagaacaacgaaaacacc

SEQ ID NO: 52778 - DNA, 272 bp, Glycine max
aaccgagatatcaagacgaaggccagcatcactgttccctccactcgtcgctagcagatgcgggagatcgatgataacctgaagctacgagcatcttgggacaagaggatctcacaagaggttgttgatgatgctctgggtgaggaattcaacggctatgtcttcagaattactggaggttgcgacaagcaaggatttccaatgaagccaggagtgttgacccctggtcgtgttcgcctcttgctgcatagaggaactccttgtatccgcgg

SEQ ID NO: 52779 - DNA, 271 bp, Glycine max
ggggaattgtcttcctccaaagcacaatgatgaaaggcatgatagaaggtggggcaagacaaggattaaaggagagttttagccagttctcggaccaacttgcacggaattttaaggtgctagataaggcagatttaccagacaaggaacatttgttggcaactttgcaaacagaagaccagtggtgtggtccaaatctgcttcagggcttggaatttagtgggcttgaattgccagatagttttggagagctcattaccagtggaatttt

SEQ ID NO: 52780 - DNA, 274 bp, Glycine max
  unsure (1)..(274): unsure at all n locations
agaaacttaatcgatcatcacttcacttcactaatacatcatggcagacgagacccagaacaagtatgagagctctgaggttgaggtccaggatcgtggtgtttttgactttctcggtaagaaaaaggatgaagaagacaagcctcatcctcaggaggaggtcatcgccaccgagtttcaaaaagtcactgtctcagaccaaggagagaacaagcacagcctcttaganaagcttcaccgatctgacagcagctctagctcttcaagtgaggag

SEQ ID NO: 52781 - DNA, 160 bp, Glycine max
aacttagtaacactttccttagttcagtatggggacgcgcttcttcactctctctccaccagccctaggcgtgctactcgtgtcgagtgcaggcctggctatgaggtccagcagagtcaacgagggcgcaactcaataaccgcaacgcgctggaacgccg

SEQ ID NO: 52782 - DNA, 211 bp, Glycine max
cttccttataaccagagccaacaacaactatggcaagttatcacaagcactacgatgcaaacggtcgcacagtcgacgagtatggcaatgtctgataggccaatccagacgaatcatggtaacccggatcaggccactagtcgtcacttaggtacaccaccagaagtgatggtggactcaaaatgatagacgctagtaaacgacatgatat

SEQ ID NO: 52783 - DNA, 259 bp, Glycine max
attgaattctccagagataagaataaacttaatcgatcatcacttcacttcactaatatatcatggcacacgagacccagaacaagtatgagagctcttaagttgaggtccaggatcgtggtgtactagactttctcggtaagatgaaggatgaagaagacaagcctcattctcaggaggaggtcatcgccaccgtgtttcaaaaagtcactgtctcagacctaggcgagaacaagcacagcctcttagataagcttca

SEQ ID NO: 52784 - DNA, 258 bp, Glycine max
ccaaaacagtaaagctaacttcaacacctttaattttctaaaagtaattcagcggctgaataccaagcggagaagatgagtcaggagcagccacggcgtcccaaaggccaaaaccccatcaaatacggcgacgtttttgtcgtctccggcgaccttgcacagaagcccgtcgcaccggaagatgctgccatgatgcaaagcgcggaaactcgagtgctcggacaaacccaacccggcggagcagcttccgtcatgcaa

SEQ ID NO: 52785 - DNA, 250 bp, Glycine max
attgaattctccagagagcagatgagacttaatcgatcatcacttcacttcactaatacatcttggcagaagagacccagaacaagtatgagagctctgaggttgaggtccatgatcgtggtgtttttcactttctcggtaagaaaaaggctgaagaagacaagcctcatcctcaggatgaagtcatcgccaccgagtttcataaagtcactgtctcagaccaaggagagcacaagcacagcctcttaga

SEQ ID NO: 52786 - DNA, 265 bp, Glycine max
taaaattcttccaccaagttatgggtttccttgtggtgcttcttttctgcctcttaggtctctcttctagttccagcatatcaactcatcgttccatattggaccttgacctaaccaagtgtaccacacagaaacaggtgtcttcactgttccaactatggaagagtgagcatggacgtgtctaccataaccacggagaagaggcagtgtgacgtgagattttcaagaataacttgagctatatcagggacatgaatgcaacaga

SEQ ID NO: 52787 - DNA, 186 bp, Glycine max
tctcgagccgaatcggctcgagaacctttctctatactacacataccacacactagaggaacaatgtcttccatcctccactactttttagccctctctcagtcttgatctattcttttcttcttatccgactcagtcacccctacaaaaccactaaaccttgttgttgtactcgtttaaaatgat

SEQ ID NO: 52788 - DNA, 270 bp, Glycine max
gaaaggttaaaagttttggaaaaaagaatagaagatgatgcaaccagcaaaacacaatctgttttgtacatcataaagagaacggagctagaaattaattgcatccaatgtaactctaatttgttcccacgttacaagaagcagttaataagaaacgtgggaacaaattagagttacattggatgcaattaatttctagctccgtttcttattaactgcttcttgtaacgtacgttgtagatatgtattgatcttcttcccattccgtgg

SEQ ID NO: 52789 - DNA, 244 bp, Glycine max
ctcgagccgctcggatggtaggccagatgaggaagttgcatctgagtgctggaaaaatcatatggctcgaaatgattcattgattgttgatgtatgccagggtcaatacaagtcaacattggtttgtccagtatgtggcaaaatttcaatcactttcgatccattcatttctgaagcatggtagctgtagagatctttgccaagcattaggcactgcatgctgcttgaagagtgatgaaatgct

SEQ ID NO: 52790 - DNA, 262 bp, Glycine max
  unsure (1)..(262): unsure at all n locations
gtcactagctctgtgcattcttctctcgctctctgccttccatacaacatacgatatatnancccaagatagtagaagatggcagacactgaggatagacaatctcgtgtttgtgacaatggaacaggaatggttaacgcatgatcttctggagttcatgccccatggttcaaatagatgcatatgttggtgatgaggcacaatctagagggggtattttgactctcaaataccccatggaccatggattgtgagcaattgg

SEQ ID NO: 52791 - DNA, 262 bp, Glycine max
  unsure (1)..(262): unsure at all n locations
ctattctctcctcaatgggaagcaaccaagccgccatttccttcctcaccaccgtcgacacagnggacttcgagcttggcgcggcggacaacggcctctcctcctcactctacaccgtggacggcgggcagcgcgccgtcctcttcgaccggttccgcggcatcctggactccaccgtcggcgaggggacccacttcctggtcccatgggtccagaaaccctacatcttcgacatccgcaatcgcccccacaattctcctcg

SEQ ID NO: 52792 - DNA, 261 bp, Glycine max
  unsure (1)..(261): unsure at all n locations
gtgatgcactggtccgcattactacgaaggagtanataagtgcttaacgtagccaaaccacttattccaacccttctcaacctgtctccagagtgcaaataagcaccatgactgttaaggaaaatctgatggtggcaggtggtttccagggtgagcttatatgtaagaatttgaaacatcctggagttctattctgtggtaaaataactacagatgataatgccataaccaatgctgtggatgtttaagcaatcctgctgg

SEQ ID NO: 52793 - DNA, 260 bp, Glycine max
cagagctcataagctgatatctcgaggggaaatgcatgggggtgatagaccatatacaatgtttgaagggctagggggcatggcttacctctttttggatatgagtgatccttccttgtctaaatttccagcttatgaactctgagaatctacatgttatacatagtctcctttccaaaacatgtagattctcagagttcataagctggataggagactatgtataaccgtatctcatatgaccatgtaaatgttgtcaa

SEQ ID NO: 52794 - DNA, 258 bp, Glycine max
gatttaacagaaaaagaaagcatggattggttaactcatggaagctcatttcctttgagaggcttaatttcacagaatccagcattttctcatcaatgacagaacaaaacatcattggtagtggtggatatggtatagtataccgcattgatgttggttcaggctatgttgctgtgaaaaagatttggaataacagaaagttagaaaagaagctcgagaactctttccgggcagaagttagaatatgagcaatattcg

SEQ ID NO: 52795 - DNA, 251 bp, Glycine max
  unsure (1)..(251): unsure at all n locations
atatactatgatgagagtgcggtttcctttgttggtgttgctgggaactgttttcctggcatcagtttgtgtctcattaaaggtgagagaggatgagaataaccctttctacttgagaagctctaacagcttccaaactctctttgagaaccaaaacggtcgcattcgtctcctccagagattcaacaaacgctccacacaacttgcgaatcancgagactaccggattgtccagtttagtcaaaacccaa

SEQ ID NO: 52796 - DNA, 233 bp, Glycine max
cacaactacaagaaagaacttccttataaccaaaaccaacaacaactatggcaagttatcagaagcactactctgatcagggtcgcaaggtcgacgagtatggcaatgttgagaggcaaactgacgaatatggcaaccggttcatgccactagtgtcacttatgtagccaccaaaagtgttggtggctacaatgatgacgctaataagcaacatgatattactggtgtctatc

SEQ ID NO: 52797 - DNA, 262 bp, Glycine max
  unsure (1)..(262): unsure at all n locations
gtctgaattaataattactgttagttgtaactaattaagtgcctgctgaatattgcagcttactgtgtggttgccgttgagtctgctggacggcagattccatttgctttccttgaacgtgtcaattaggantttaccaagaaatatgctgttggaaaagcagcaacagcggctgctcagagcctcaacagagagtttggacctaagttgaaggagcagatgcagtactgtgttgatcacccagaggaaattagcaagcttg

SEQ ID NO: 52798 - DNA, 252 bp, Glycine max
ggcaaatctcctgtcatgggcgcgccattgtgcgcgaaatgggaagcttgttgagcttgttgattagtctattgaattgttggataaggagcaggctcttctctgcatcagggtggctttgctttgcttgctgaagtcacctgctcgtcgtccttcaatgaaggaggttgtaggaatgctcagtggagaattggagcctccccaattgcctgttgaatactctccttcaaccccttctaggttccctttcaa

SEQ ID NO: 52799 - DNA, 109 bp, Glycine max
ctccattggtccataaaccgtcatcagtcatgaccatggccaagcgagtattatcgcctagtataatgcgtcgcagtggctgctgcttcgcatagagttccagagagca

SEQ ID NO: 52800 - DNA, 268 bp, Glycine max
cgagatcccctgcttttgattcatttctcttcagttttcatggattcaccgaaaatgattgcttgtttctaggtcaattgtattgcaggttaatcgtattatgttgtctgtcgtgcaatggagaacactaagtcagggttcagttgatatatatgctgctcagtgcaaaaattgcttgaaatggagagagattgatacacaggaagagtttgaagaggttagaagtacagttgctgaggaacttttctttgcagcagaaaggctaata

SEQ ID NO: 52801 - DNA, 268 bp, Glycine max
gttttcctgagtctggtggaagggttgctgatgttgatgtccttggagagcagttagctgattccttgttggtagaggatgagtctgatgacaggactaacttgaggcaacgccgccgagagaaggatgttagatttttggattcaagaggacagcagataatgagccagcggggaagaatgtacagaaggcagatgatgtgtcgaagggacattgatgattttaatgttcctttccttgcaatatatgggtctctaatacctcctga

SEQ ID NO: 52802 - DNA, 265 bp, Glycine max
aactctttggactttgagcaactactgtggtgtgaatcgattattagactctgtttgcttaccaccaccagtgttttatatgatgcagcaccggccatccagcgccttcaattctcccttctggactacaaattctgttgctcctatttggaacaacaactcctctttaaccgttggagctagaggtccaattctgctggaggattatcatcttgtggagaagcttgcaaattttgatagggaacgtatcccagaacgtgttgtc

SEQ ID NO: 52803 - DNA, 247 bp, Glycine max
gaacaaggacgttgtgtttaaaactgatgaagagtgcctgccagcttttcagactctgaaggaaaggcttgtgtctgctcccgtgatggtggcccttaattggagccaagagtttgagttactgtgtgacgccagtgactatgcaattggtgcagttctaggacaacaaaagaataatgtattcccttcaatttattatgctagcaaggtcctaaatgatgcacagttgaactatgcaaccactaaa

SEQ ID NO: 52804 - DNA, 251 bp, Glycine max
aggcgatctcggttgggaagcggggaagatggggaagcttgtaattaagcatttggctgccacagggtgcagaagaatggttgttgttaacaggactgaagagaaagttaatgccattcggaaagagttgaaggatgttgagattgtatttagaccattttcagatatgctggcgtgtgctgctgaagctgatgtgatcttcaccagcacagcgtctgaatcaccattgtgatctaaacagaatgtgcaga

SEQ ID NO: 52805 - DNA, 253 bp, Glycine max
tagtgttcggattgcggcgacgtgagcggttcgctgcccgcgacgttgtgagaagtccactgaaccttatcatttagaggaaaagaaagtggtggtggtggtggtgttcagcatgagaggaagtttgaaacgaaagttgaagagaagaagggttttggggaaaaggctgaactcgagggaataacaagagtggtggtgggaagagagtgcagcaaagaggagaaacaaggaagaacaagagagaaagtagagg

SEQ ID NO: 52806 - DNA, 253 bp, Glycine max
agtgttcggattgcggcgatgtgagcggttcgctgcccgcgacgttgtgagaagtccactgaaccttatcatttagaggaaaagaaagtggtggtggtggtggtgttcagcatgagaggaagtttgaaacgaaagttgaagagaagaagggttttggggaaaaggctgaactcgagggaataacaagagtggtggtgggaagagagtgcagcaaagatgagaaacaaggaagaacaagagagaaagtagaggc

SEQ ID NO: 52807 - DNA, 248 bp, Glycine max
tagcttgtaacctaagtgggggcattaaagtgatgggacatggctcgggctatgctcggtcgggctgttagatgcataattctggcctgcccgctccaagttaagagctgagtcatgggatttgggcgaaggctcaggtctcttggctcctaaactggagggcacagcgtgaggctggtttaacagagcagcgagcacctccggctcctgacagtggagggataacaggctgcagcactttcagccca

SEQ ID NO: 52808 - DNA, 252 bp, Glycine max
gggatactgtttttgagccttatcccttttttgaatcatacaagaattatccacagatagatataacacctgagaatgcagatgaccttagacaatggaaaggttgggttgagtctcgtctccgccagttgacattgaaggtatagcactgtataatttatattttattgtttgttatgtcacattttctcttcccccccacctttttgaatttaggaggttgcatgcgacctttttgtatgttctgacttt

SEQ ID NO: 52809 - DNA, 215 bp, Glycine max
ccgagctagctagctagcaagcaagcacagagatggaggcaaagcgaggccatgccctcatgtgcttggcacgtgtttcactcttcctctgcgctctaaccctatccgctgctcacggaagcaccacggttcaagacttcgcgagaaatttgaaactcggggacaacgagcttctgcgcacggagaagaagttcaaggttttcatggagaattac

SEQ ID NO: 52810 - DNA, 252 bp, Glycine max
ctagacatatactttctctctcttccttaacggttacgaaagtgaaacagaaaatggtggcatcagacggtggcggtggtgggaaattgacgaagaaagttctgggtttggggtattgggtgcaaggattcaggtgttttccatggttggtagtgagtttctacctcaaagatggtctcaatgtggacccttccattcttcaaattcttcagagttccgctaatcttccaatggttgggaccccctctatgg

SEQ ID NO: 52811 - DNA, 251 bp, Glycine max
ggtgcagtcatgactggggaaaatttgaacaagccattgaaatcaccaaaggcagcttcgaataacagagaagccaatggtgaaagcaactctcttgaccagcccaagtctggcaaggaaggttctaaactcatcaaagaggaggagagagagactggaaaagttagcttacatatctataaactctactgcactgaggcttttgggtggtggggcattatagcagtaatctctctttctgtgttgtggca

SEQ ID NO: 52812 - DNA, 250 bp, Glycine max
gagaaaatggatgtgattgacttggaagatgagacaattgatgctgaaatattgaactccatggcagtgacaaatgagcatttccagactgctcttggatcaagcaatccttctgctctacgtgaaaggttgttgaagtgcccaatgtcagctgggaagatattggtggtcttgaaaatgttaagagggaactccaagagactgttcaatatccagtggaacaccctgaaaaatttgagaagtttggaat

SEQ ID NO: 52813 - DNA, 260 bp, Glycine max
aaaaggttttgaatagatgcactgaaactaaccttgttctaaattttgaaaaaatgtcattttatggttgaacaaggtatagttttaggccacattatttccaaaaagggcattgaagtagatcctgcaaaaatttttgttatttcacaattgccttacccctcttgcgtacgagaggtgcgatcttttcttggtcatgcaggattctacaggcgctttataagagattttagcaaggtagcccttccactatccaactt

SEQ ID NO: 52814 - DNA, 270 bp, Glycine max
gatgacatcttgaacaagttggaccctgtcgttgaaagggtcatcaagaagcgccgtgagatcgtcagaaggagaaagaacggagaagttgttgagggcgaggccagcggcgtcttcctcgacactttgcttgaattcgctgaggacgagaccatggagatcaaaattaccaaggagcaaatcaagggccttgttgtcgactttttctctgcagggacagattccacagcggtggcaactgtgtgggcattggcagagctcatcaacaat

SEQ ID NO: 52815 - DNA, 271 bp, Glycine max
acgcattctctccactccccatgtcaactcctgctctgctctctccaaacccaacgatctcaactccgtccctcgcaacactcacgtcagcgaaggtgaaaacaaccgggtaaagcggtgggtagaagtaatgtcctgggaggcgagagcttttctctatcataactttctgaccaaggaggaatgtgaatatctaattaatacggccacaccaaatatgctaaagtcactagttattgataatgaatctggagagggtatagaaaccagc

SEQ ID NO: 52816 - DNA, 260 bp, Glycine max
gattgggaaaaaataatggaaggtgacaacatcataggactcaaaaatggcaagcaaagcatatcattagaacctggtggtcaatttgagcttagtggtatgcctttgaaaacattgcatcaaacttgtgatgagattaattcacatctctatcaggctaaaactgttgctgaggaaatgggaattggatttttgggataaggtttccgccctatgtggactgtggaagatacacctggagcgcctagggtgagatataa

SEQ ID NO: 52817 - DNA, 258 bp, Glycine max
cagcatcgaatggctggacttgctgctattgaaattgcacaaaaagtctcaaaagcttggcgttccctgcatgctgaatggaaatattcgaataaaggaaattcaaagaatgggagaagggccaggagaagggaaagaattaacatgcccagtcaaaatagaggaagtgctggttgtagtacaagcagtacctcagtaacatcttcaaatggaactgtagttgatagattatcctaccgtacattttcgtggcacaat

SEQ ID NO: 52818 - DNA, 189 bp, Glycine max
atgcggcttcctgtgttggtgatgctgcgaactgaactcctcgcatcagacagtgtcccattaaaagtgagagatgatcataataaccctttctacttgaggagctctaacagcttccaaactctctttgagaaccaaaacggtcgcattcgtctcctccagagattcaacaaacgctccgcacaactt

SEQ ID NO: 52819 - DNA, 179 bp, Glycine max
  unsure (1)..(179): unsure at all n locations
caaaccttgcactagacgacacaggacaganaaganaanaaaagaaaaannnananannanaananngcancnaggggacnnacnagcacnnnncannnagccnnaaccgacacagacacccctacaaaaccaatagaccatgntgtactacccgtacaaaatgatggatccacacaac

SEQ ID NO: 52820 - DNA, 266 bp, Glycine max
  unsure (1)..(266): unsure at all n locations
gtgagatacaaagaaaggaaataattgatctttgaaaatgcagggaggaaagatagctggagagtccatcaaggaaacagctgcaaacattggtgcttctgccaaggcatgcantgagaaaaccaaggccacagtccaggagaaggcagaaagaatgtcggcacgagatcctangcaaaaggagncggtaacccagaagaaagaggcaaagcagagtcaggcagagcaggacaagcaggcggcgcgacactanaatacggcggcga

SEQ ID NO: 52821 - DNA, 247 bp, Glycine max
  unsure (1)..(247): unsure at all n locations
gaacttccttataaccaaaaccaacaacaactatggcaagttatcagaagcactacgatgatcagggtcgcaaggtcgacgagtatggcaatgttgagaggcaaactgacgaatatggcaacccggttcatgccactagatgtcacttatgtctccaccaaaagntgttgctgccacaangantacgcgtantagcaacangantntacctgctacnancccgagaaagacaccggntagacacatt

SEQ ID NO: 52822 - DNA, 213 bp, Glycine max
  unsure (1)..(213): unsure at all n locations
ttcgtttgttgttcaatctaacaaacttctctatatcgtttactttttccacacaacttacgagcccctnanngccgnnnnctagtaagttctggnttgagggtgttcggtttgatatcctngatgttgttgcatgaactgatngcactagtgtggccacatccttcaccaagggaggccgatttcagagctaagccagcacacaactgcgac

SEQ ID NO: 52823 - DNA, 252 bp, Glycine max
attttattttgccctacctcctcgattctagggtttcaacaatggcgctgttccttctctacgaatccgattcgggctacagcctgttcgaggttcacggcgtcgatgaaatcggccagacaccgaagcggttcggaactccgtttcggacctcaacaggttcggcaaagtcgttaagcttcgctccttcaaccctttcacttccgatctcgatgctctcaaacagtgcaacaacgtctccgaaggcatatt

SEQ ID NO: 52824 - DNA, 263 bp, Glycine max
attgcttgtgtttgattgtgttgaattgagttgttgcttgcattggatgctcttgataggatggtgaggtgtgagaagtggattcgggatgatgaagatcacttggaggggtctaaggcgacgtggtggttaatagactgatagggcgcacgaagaaagtaactgttgactggccattcccgttttctgaggggaagctttttgttcttactgttagtgctgggctggaggggtatcgtgtttctgttgatgggaggatgtga

SEQ ID NO: 52825 - DNA, 273 bp, Glycine max
tcgagctcataggtggtgcaatgaagcctactacagatggccggtgggctcatttggcttgtgccatgtggatacctgaaacttgcttagctgatgtaaagagaatggagcctattgatggtttgagtagaatcagtaggaccgctggaagttgttatgcagcatatgcggtgtatcttatggtgcctgcatccaatgttcaaataattcttgtcgagtagcataccatccactctgtgcacgtgctgctggtctctgtgttgagcttgagaa

SEQ ID NO: 52826 - DNA, 264 bp, Glycine max
ggcttcccatgttccagcacatgctgaacaacgtagttgccatactgatcctgagctaacatgctaactgctcctaaaataaaggaattagcagacaagatagtgcaaatgagtcaacagaagtttgcctcaatgttgtggagaaatgtttgacctttggaggtccttctgaacgccaattactagtgagtcagatgcttggcaccacagatgaaaacgaacctcttcaggcgatgatgaaagatcaatttgcaaattacgttg

SEQ ID NO: 52827 - DNA, 262 bp, Glycine max
ggaagcgggtcgtccgggaaggtttacaaggttgtgcttaccagcggggaatctgttgccgtgaagaagatatggggcggggtcaaaaaggaaatagatagcggagatgttgagaagggtcatcagttcgtcaagacagttcttttgatgcagaggttgaaactttgggcaaaattaggcacaagaacattgtcaagttgtggtgttgctgcaccactagggacagcaagctattggtttatgagtatatgccgaatggtag

SEQ ID NO: 52828 - DNA, 271 bp, Glycine max
catgagaggtcccccttatatttgcgtgaccctgtgacgtctcaaaaggcaatgtcgttaccctcttctccgcatgattatagacttcaagcttctgagagaagcaaggcgtcagaatatatattgaatgatgaactggagtttacttggaataaaatccttgaatcaccaatgttacagtaatagacctctgttaccatatgaagaatggaatattgatttcacagaattgactgttcgaactcgtgttggatttgggtccttcggagaa

SEQ ID NO: 52829 - DNA, 269 bp, Glycine max
cctttctgtgtcatgtgcccaaatgaatgaaattgtttcagctttgaacacgagtggtgtttgttacttgtgggtggttcgtggagaagtttcatggttaaaagagaaatgtggggataggggtttagtggtgccttggtgcgaccaattgaaggttttgtcacatccttctgtaggtgggttttggagccactgtgggtggaattcaactctagaagctgtttttggtggtattccaatgctgacattccctcttttcttagaccaag

SEQ ID NO: 52830 - DNA, 252 bp, Glycine max
gctaaatatgagacagttggggtctcatcagcagggatattggtgcaatttgtgatcttaactgctattttctctggatcaatcttgcattcacctctctctccagtgtagggatatgaagactcctcctccaacccaccagactcgcgcaaataattgtaggcatttgtcataagacctccattacaccaatatccctgctgatgagaaccaaattgccgcatatttagtaaaaactggtccacttgctat

SEQ ID NO: 52831 - DNA, 134 bp, Glycine max
tggtactggagcgttcaaattcagctgtggtgacacgatatgtgagcgcaagagacaacttgaggagctgaatgaatctgcagagagagtcaagcaagagcatacagagtgaagcatttcatggtttcaagcta

SEQ ID NO: 52832 - DNA, 250 bp, Glycine max
ctctagaagcttatggcagatgcgatggacggatcactttcagttataaagggatggataaaattggtacatcaaatggtgttgaagcttccggaagtgtcaaacctcaaatcacttatggtcttgtgcaatgaggatggtgaagtgaatttttttgacaatataactgactcggtgatacgtaagagagtcaaggcattgtcttggtttcggaatgttatcagtgtgaacaagttttcagagttcatca

SEQ ID NO: 52833 - DNA, 251 bp, Glycine max
ggaggaggcatccgtcaacctcaacgccattgaccaggtcaatgggaagaagccatggtcactctctttctcctttggaagggcacttcaacagagcacccttaaggcatggggcggcaaagaagagaatgtgaagaaggctcaggaagcccttttggtaagagccaaggctaactcagaggcaactctgggaacctacaagggtaactcacagcttgctgatggtgcctcagagagcctccatgtttcga

SEQ ID NO: 52834 - DNA, 265 bp, Glycine max
actacaagtacttccttacaatcaaaaccaacaacaactatggcaagttatcaaaagcactacgatgatcagggtcgcaaggttgacgagtatggcaacgttgagaagcaaaccgacgaatacggcaaccctgttcatgctgctagtgtcacctatgtagccaccagaactgctgctggtggttacagtgatgacattaataagcaacatgataccaccaatgcctacggcgtaaacattggtagacagcattctagtggtggct

SEQ ID NO: 52835 - DNA, 263 bp, Glycine max
ccttctattacatactgagtttctatagtatcaacttgaggttgtgaagaatattaagagtgtatcacttcacttttactacatttatatattaattatatagttgcaagatgatgatttcaagtaggagagcatggactgtggcggttagtgttggagttgttgagagcttgaaggaccagggcctctgcagatggaattcaactttcaagtcagcacaacaaagtgtgaaaagccatatgagatctttgtcacgggcaaat

SEQ ID NO: 52836 - DNA, 135 bp, Glycine max
agagaattcagaagcaagttttagaagtataatggctgaacctcgtaaaggactttatacatttgacatgcttcaaccccaattttgtgagatgctgatgtctgaggtggataattttgaaagatgggttcatga

SEQ ID NO: 52837 - DNA, 259 bp, Glycine max
attccacatcctgcatatggtaacttttctggaaatccttatggctctttaggggctggatatggtgttgctgctggttatcaacagccaatgatatatggtaggggtccaatgccagcaggaatgcaaatggttccaatggtgttaccagacggtcgaattggctatgttcttcaacaacctggtgtacaagtgccagcaacccgaccccgcagaattgatcggagcaatggtccaagtgggcagccagggcgaggag

SEQ ID NO: 52838 - DNA, 232 bp, Glycine max
gctgaacaggattttttgaacatgtacttcaaggacaaatataggccaattcctaatgtctacaatcttgtgctggccatgctgtggcgtcaccctgagaacgttgagcttgacaaagttaaagggtctaagccttggaggtacactgggaaggaggagaatatggagagagaagatatcaagatgttagtgaaaaagtggtgggatatatatgaggatgagactttggact

SEQ ID NO: 52839 - DNA, 152 bp, Glycine max
  unsure (1)..(152): unsure at all n locations
ctacacagtacacacactagaagaataatggcttccatgctccactactttttagccctcnctttttcttgctcgtngctgtcttcttatccgactcagtcacccctacaaaaccaatggaccttgtggtctacccggtcaaaatgatggtg

SEQ ID NO: 52840 - DNA, 248 bp, Glycine max
tcaacaatgaagacactcctgttgttgccgtttctattattgacaccatcagcttggagaaccagctcgaccagatgcctaggaggttctatcttgctgggaaccaagagcaagagtttctaaaatatcagcagcagcagcaaggaggttcccaaagccagaaaggaaagcaacaagaagaagaaaacgaaggaagcaacatattgagtggcttcgcccctgaattcttgaaagaagcgttcggcgtg

SEQ ID NO: 52841 - DNA, 248 bp, Glycine max
agctagcttctgtagaagcgcgagttctccctgccccatggcttagatatcatgaaagtgggaaagaaaagagttgtttaccccaagttggtcagtggaatatgatgaacaagatgatgataaatgggatgactgtcagccagtgggcatgcataaatttttcacgaagtgtagcaagacagtgttgctcgcactttttgtaccgagctagctcaaatgtgccaagtatctggcatggaatgtaatcc

SEQ ID NO: 52842 - DNA, 254 bp, Glycine max
atcatcaacaaaaaaagcacctgataattgatagtattatatattatggcttatcaagtgttggtgatttgtgtggtctccagcatagtgtttgcatacatagtatggagaaaagaaaggaagaaaaagcttccaccgagtccaaaggtcattcccatcattgggcacctccaccttgtgtccccaataccccaccaagatttttacaagctctcactccgccatggacccatcatgcaatttttcctcggctc

SEQ ID NO: 52843 - DNA, 254 bp, Glycine max
cttgcaggttacgtttcactatattggctataatgaatctggacgtcgtattgacagcacttatttgcagggttctcctgccaaaatccgcatgggtaccaagggattagttccaggatttgaggaaggaattaaagacatgagaccgggtggaaagagaagaatcattattccccctgaacttggaccaccagtaggaccttcaacctttttcagttcaaaacagtttgaagtttttgatgtcgagctattaa

SEQ ID NO: 52844 - DNA, 155 bp, Glycine max
gaactgagtaaaagacgaaccagacgatgggcaatattggagagaaggctcaagctgcaaaggagaagacccaggaaatcgcccaagctggaaaggagaagacccaacaaacagacctagctgccaaggacaagactgcgacacttcccaagcgg

SEQ ID NO: 52845 - DNA, 265 bp, Glycine max
ggaaagaccatcaaagtttcacttcagccttatccggtttagggtttcggtttttgacccaacctttgacgtatcgaaaccttaagtttcggatcaggtctgagcaatctggttggtagaacctttggtcttagagagtcaagttttatgtctgaattagacgatcaaattcctactgccttcgatccttttgctgatgcaaatgctgatgactcgggtgctgggtcaaaggagtatgtgcatattcgcgtacagcagcgaaatg

SEQ ID NO: 52846 - DNA, 264 bp, Glycine max
tgctgtgtgttagaattcctaccgagtggtcgggtatggagggtgtaccagaaggtgcctgtggtaagattggtgagaagaaagatgcaatggatggtggtttagacttgagagagtttctgatgatgaattcaataactataagcttgtgttctgtgcacagcaagctgaggatgacaaatgtggggatattgggattagtattgatcatgatgatggaaccaggcgtttggtggtgtctaagaacaaaccgttagtggttca

SEQ ID NO: 52847 - DNA, 258 bp, Glycine max
agggaacctaagcttagaattagaaacagagaaaaggagaaaggaaaggattgatcgttgaaaatgcagggaggaaagaaagcgggagagtccattaaggaaacagctagaaacattggtggttctgccaaggcgggcatggagaggaccaaggccactgtccaagaggaggcagaaagaatgacagcacgtgatcgggtgcaaaaggagttggcaaccaaaatgaagaggcaagatgaacaggcggactgggacagc

SEQ ID NO: 52848 - DNA, 258 bp, Glycine max
cggtaacatgcaatcaccaccctcaccagcaccggcaatacacccttagtgacaagcgatcatgcttgcaactatgtgacagtatgaagcaagagcgagagaaacaagtggtagaggatactcgcgagatgggagaagaacatcaggatcagatgaggtggaggctgaccaaaatccctacgtttttgaagcctatctggagctcttgaccagagtgatacgttggtggcagcttcgggttctcaatagtacagtgtg

SEQ ID NO: 52849 - DNA, 240 bp, Glycine max
gttgctcgtgctcggcttgttcattctctgtttctgcactgcggcaattctgaccaaatcccatcacctttagtttgggcttcctgcctcagaagagtggacttctttaccccttttattttgaggattctatgcttagatgcccattcttgaggaacatcaatgagcctactaacttctcattctcttcacctttggcttcaccaatgcctgttcgtggagctaaaggtccaatttttg

SEQ ID NO: 52850 - DNA, 273 bp, Glycine max
  unsure (1)..(273): unsure at all n locations
gaatttcgatgctcagtcatctctctgaccancttcttctctcttgctcttgcaggagagagccatgtccatgcatcgctacccctataagattattgggaagctgtttggccaaacactcccattcccactgcactgcgacttattccaagcatctccttgcaggtgttgaaatcgatgaactccctaagcaaattgatgatacacagtacccaaaaacattcttctacaaagaagaccttcatccaggcaaaacaatgccagtacaattca

SEQ ID NO: 52851 - DNA, 262 bp, Glycine max
  unsure (1)..(262): unsure at all n locations
gctacgtcgacgttagggccatctacggancggnctgcctctccccaccggcgcgaatctcgncgcattcgcggctccgccgcgttatagccttgacgaatatgaaggttttcgttaagactctcaaaggcactcattcgaaatcgcactgacgccgcaagacatggtttctgaagtgcaaaaaaatatagaaactgttcagggtgcagatgtctatcctgctgcacagaaaatgctaattcatcacgggaaagttcttagg

SEQ ID NO: 52852 - DNA, 261 bp, Glycine max
  unsure (1)..(261): unsure at all n locations
atcacacacaactactacaagtacttccttacaatcaaaaccctcaacaactatggcaagcctacnnaagcactacgatgatcagggtcgcaaggttgacgagtatggtaacgttgagaagcaaaccgacgaatacgcaaccctgttcatgctgctagtgtcacctatgtagccaccagaactgctgctggtggttacagtgatgacattaataagcaacatgataccaccaatgcctacggcgtagacactggtagacag

SEQ ID NO: 52853 - DNA, 263 bp, Glycine max
gtgggtatgcagaggaaggtgaaggaatcagacttggacaagatggagtatttggatatggttataaaggaaaacatgaggctccatccagtggcaccgttactaataccacaccaatcgagggaagattgcatggttgagattttttcataccaagaaaatcaagagtggtaataaatgcatgggcaattatgagagactcaagtgtatggagtgaggcagagaagttctggccagagagatttgaaggaagcaacatagat

SEQ ID NO: 52854 - DNA, 260 bp, Glycine max
gcaagtccgttctcagagacatcaagcaacatatcatgttcatcttgctgcaaggactgccccaaaaggcctacactgtctttctatgcggttgactgcagaatactttgccttgaggcctgaggagagaaagcttccaatgaaaataaaatttatcatcctgacctttatcattatgctgtcttctctgacaatgttctggcatgtgcagcggttgttaattctactatctctactgccaaggaacaggagaaacttgt

SEQ ID NO: 52855 - DNA, 245 bp, Glycine max
ctcatcctcctctgtctctctctctccaccattgccatggatccttacaagctccggccatccagcgccttcaattctcccttctggactacaaattctggtgctcctgtttggaacaacaactcctctttaaccgttggagctagaggtccaattctgcttgaggattatcatcttgtggagaagcttgcaaactttgcagggaacgtatcccagaacgtgttgtccatgccaggggagctagt

SEQ ID NO: 52856 - DNA, 248 bp, Glycine max
gctttgtccggcctagggaggcacaaaaagctgcggatgaagcaaaagctaggtttggacacattgatggggatcatctcacgctcttgaatgtataccatgcctacaagcaaaataatgaggatccttcttggtgttatgataacttcgttaatcatagggcattgaaatcagcagaaatgttagacaacaacttgtgcgaatcatggctcggtttaacctgaagttatgcagcactgatttcaata

SEQ ID NO: 52857 - DNA, 251 bp, Glycine max
tgaacgttatcagataagaacatctcttcagcttttggctttgcagagggagggaagtgcagtaagtatacataatcttttcatattccacttttcttttctttctgaactattttcgttattaagactgtgtattccaggtatctgtcaagaagcagagaagtgcatttcctcctaactttgtacattcattggatagttcacacatgatgatgactgctctagcctgcaatgatgctggattatgtttt

SEQ ID NO: 52858 - DNA, 241 bp, Glycine max
gtaatagcctggtaactattgcaacaagcaatgggacaactgtgttgcattcttctgcaagaaatggctacttggaggttgtcaaggcccttgtgcgcaaagaaccagaagttgcaatgagacttgatataaaggggcagacagcagtccatatggcagttaaaggacagcatcttgagctggtggatgagctcatgaaattgaatccatctttggccactatcgtggatgccacgggaac

SEQ ID NO: 52859 - DNA, 248 bp, Glycine max
cacacacaactactacaagtacttccttacaatcaaaaccaacaacaactatggcaagttatcaaaagcactacgatgatcagggtcgcaaggttgacgagtatggcaacgttgagaagcaaaccgacgaatacggcaaccctgttcatgctgctagtgtcacctatgtagccaccagaactgctgctggtggttacagtgatgacattaataagcaacatgataccaccaatgctacggcgtagaca

SEQ ID NO: 52860 - DNA, 276 bp, Glycine max
tcggaattcgctcgactcttattgttctcagttcaagcaatcgtaaagggttcaaggtggaaactgcagagctctggcattgggtgatgaactccgtgggcactcaaaagcatcggaggatcacaagtggttaatggttgcctcgaaactggccgaacagacaagattgaagggggagcgtgtgaacaaccttgatctttcaaagggacccattgaaacaaggtcaagggataaatttgggttccaggaagagaacaaatttgattctcttaactt

SEQ ID NO: 52861 - DNA, 272 bp, Glycine max
attaccttggatggtatgtgggtatatagtgtctcaaatcagtgtgagttaacttgtgattgattgattacaaggttacaaggatggtatcgaaatcctattcaaacctattggagttggcctctggggaggctccatcatttgggtacatgaacaggagaattccaaggattatgactgtcgctgggttgatatctgatgttgatgatgacccagtggagagtgtgtgctctgatccgtcgtcgtcgacagcgcaccgagaccggataatc

SEQ ID NO: 52862 - DNA, 253 bp, Glycine max
gtcatcatcatcatatgtaatatttactttttgtgtgttgataatcatcatttcaataaggtctcattcatctactttttttgatacaatgtgcatggtaggtgttatatacttcataaaaagtagatgaatgagaccttattgaaatgatgattatcaacacacaaaaaggtctcattcatctactttttatgaagtatataagcccttccatgcacattgtatcaaaaaaaaaaaaaaagggcggcccccg

SEQ ID NO: 52863 - DNA, 263 bp, Glycine max
gccactgtggaagggtattaggcaacaccgtgggaaggtgttggctgcatttctgaaggcaattgggtttattattccgttgatggaagccctgtatgccagttactatactaaggaagtcatgctcattctgattcgtgaattccagtcacctgatgaagaaatgaagaaaattgttctgaaagtggtgaagcagtgtgtgagcactgagggtgtggaagctgaatatattagaaatgatatcctgcctgagtttttcagga

SEQ ID NO: 52864 - DNA, 260 bp, Glycine max
ctttggttgacccctccccggtgaaaatagtaaccgatcaggtcatgaaaccgaatgagcctactaacaatggtaacaattcagtttccgatgacacaaagtggtgggaaaatgtctttagcccaccagcaagaggtgaggactatacaatacttcaggcgctattcagcgtcgacatgttaatacttttcatgacttgcatatgtggtgttggaggcacgttgaccgcaatagataatctgggtcagataggaacctcg

SEQ ID NO: 52865 - DNA, 260 bp, Glycine max
  unsure (1)..(260): unsure at all n locations
gtatgcttatcaatctaacaaacttctctatatcgtttactttttccacacaacatacgaacgaaaaataaacaacttncatataaatatcatggcttcgagggagggttcggatatggtgatagcgatgatgctgtttgccatgaactgtaactgccactagtgttggccacatgccttcaaccaaagaggaaggtcacgattttcaggaggctaaagccaagacaacacaaactgcgaacaaggccatggaaactggt

SEQ ID NO: 52866 - DNA, 261 bp, Glycine max
catattctcatttcaatttgcatttgcatttgcgtttcatacggcgttttgtttctttctggaagcttcgttcgggcatcaatggcgtccttcgatgaagctcctcccggaaactccaagaacggcgagaagatcttcaaaaccaagtgcgctcagtgccacaccgtcgacaaaggtgccggccacaaacaaggttcgagagttactctgtattgatgttgagggaaacattatgcttgttgaggacccaatctgaatggt

SEQ ID NO: 52867 - DNA, 261 bp, Glycine max
tgtgaagctagatttgcacaggctcttaaaatgctggcataagtggccgagtcagcacctattttggctctttgcatctcaacgaatagctttaggccatcttcatggagtcccttctgaacataacccgagatcaaggctgtccatggaactgaactttgatgtgccagatctgcaaaaatcctatttgcttccccaaatttgtcacatttagcgtacatgtcaactaacgaattcctaaccagaatttctgaaatggct

SEQ ID NO: 52868 - DNA, 271 bp, Glycine max
caaaccttgctctatactacacagtacacacactagaagaataatggcttccatcctccactactttttagccctctctctttcttgctcttttcttttcttcttatccgactcagtcacccctacaaaaccaataaaccttgttgttctacccgttcaaaatgatggttccacagggctccattgggccaacctccaaaaaagaacccctctaatgcaagtaccagtcctggtggacctcaatggaaatcacttgtgggttaactgtgag

SEQ ID NO: 52869 - DNA, 225 bp, Glycine max
cattatccatgttgacatggactgcttttttgtctcagtggttatcaggaaccaccctgaattgttgggccagcctgtagctgtatgtcattcaaataattcaaatggaactgctgagatttcctctgcgaactacccagctcgtagtcattgtattagggctggtatgtttgttcgagatgccaaggcgctttgtccccatcttgttatctttccacacaacat

SEQ ID NO: 52870 - DNA, 263 bp, Glycine max
atagcatttctcaagaaaattcaatggaaatacttgattgtggatgaagggcatcggttgaaaaatcacgagtctgctctggcaagaaccttggacaatggatatcgcatccaacgaagacttctgttgactggtaccccaattcagaacagtttgcaggagttgtggtctttgcttaattttctccttccaaacatttttaactcagttcaaaattttgaggactggtttaacgccccctttgcagaccgagttgatgtctc

SEQ ID NO: 52871 - DNA, 283 bp, Glycine max
ctcctcccaggacactcggtggaaaaagatggcgtgtttactattgcactcaggctgctataaggccacctacatttgtgttgttcgtcaatgatgcaaaactttttcctgagacttaccggcgctatatggagaagcaactgcgtacagatgcaggtttttctggtacacccattcgacttctctggcgcacagaaggaaaatgggaaaagatgaaggcaaacctgtagcaaagacccgagaagatcttgcatcaaatggtcgaaaattggtgtcactacac

SEQ ID NO: 52872 - DNA, 289 bp, Glycine max
caccactgctcagtatcttggaaagaaagtagcacaagccaaagatgctactatggaaactggaaagagtgctgcaaaagtggctacatatttgatggacaaggctttgtccacagggtggagtggtgcacagtattctactgagataactatggagggaaccaaggttgcaaccaatgctgttatgggagtagctgagtatgcaggccagaaggcttctaaacttgcaggtatgtcagtggatactgctaaaggtttagctgctatagctgggagattgccaaggagt

SEQ ID NO: 52873 - DNA, 293 bp, Glycine max
ctccattgtctttgaacactcatcagcatggccaagcttgtactgtccctgtgtgtccttcttttcagtagctgcttcgctctgagagagcaggcacagcaaaatgagtgccagatccaaaagctgaatggcctcaaaccggataaccgtatagagtcggagagtgggttcatggagaccgggaaccctaagaacaagccattccagtgtgccggtgttgccctctctcgctgcacccttaaccgcaatgcccttcggagaccttcctacaccaacggtccccaggaaatcta

SEQ ID NO: 52874 - DNA, 279 bp, Glycine max
catccaactactttgaaaaagctcaccatctgcggatacatcatggaagcatcaatgctggaaaggataggacacatcacatttgttacttctctggagtacttgtatatttataattgcctgaatatgaatattccaatgactggttgctacaatttccttgtatcattgagtatcatcaatggctggactctctaacaacctttccactagatttcttcccaaagctagagtacctttttctccgggggtatcgtaatctacatgtgatttcacagg

SEQ ID NO: 52875 - DNA, 158 bp, Glycine max
gtagttctgctctatcagtgaggcccaagtgatgcggctaacatactgatagccagctcttgcaagaggtgaactacagtggattggagtccacaacattagactactacaggaagcacattgataaagatccttctttggagagacgagtccagcca

SEQ ID NO: 52876 - DNA, 279 bp, Glycine max
ctccaacacttcttccctttctcttccaacctcgtcttccctccaaagccaaacccccctcacatcctccacacacaagcagattacatctccttcaccgtagcagagtcctcagcagatttcaccacccttgtctctgattccccgaaacatgtcacacttttgcacccttttgttcccgtgttgcctcctcctcgtaccttgcatgatggaacttttcttatccctctcatggccattcaggtcactgttatatcccattttggcttcaccatatgt

SEQ ID NO: 52877 - DNA, 277 bp, Glycine max
tcaatacctaatgcatcctgagataagaagctttccctctagagagttttatgaagactccttggaagatggggatgaagtcaaatcacggacaatacacgcatggcatgattaccgctgctttggccccttctgcttctttgacattcatgagggaaaagaggctcggccacctgggagtggctcatggataaatgttgaggaagttgactttgttctattcttgtatcaaaaacttatttcactttatccgacactgaagtctggtaaccaagtt

SEQ ID NO: 52878 - DNA, 273 bp, Glycine max
ctggttggtttggtcccggcagcaaaatcatcatcacaactcgggacaaacaattgctaacatctcatgaagtttataaaaaatatgagctgaaggaattggatgagaaggatgctctacagctgcttacatgggaagcttttaaaaaggaaaaagcttgtccaacttacgtggaggtcttgcatcgtgtagtaacttatgcttctggacttccattggtgttgaaagtaataggttcccacttggttggaaaaagtatacaagaatgggaat

SEQ ID NO: 52879 - DNA, 251 bp, Glycine max
atttttgtttgtcattttaaatttttttgttggttttgttgaataatatttctcaatttcagttatgctatcaagaaaaaggatgaaattgagagagttgccaaggctaatcgttaagccaacccaacaaccagtattgtggccagaaagatttcgacctttgtacttcatttatttaaattttgaatattgtgtattacttttgatggatttagttaatttttagttcgcgtaagtattttacatgaacg

SEQ ID NO: 52880 - DNA, 248 bp, Glycine max
caagaacaaggcagttgttaatgaagttatggaagataatgtgaagcacttgcgacaagtgattcggcaactaagggatgaacttcatcgaattaaagcaaatggttacaacccaatggagtcaagtggaggtcattcagcagcttggatccgacgaagcttgactttattacaatccagcctcaaccggccaccaccattatcccgtcttgatgaagatggtgatgaggagatggagattgatgagg

SEQ ID NO: 52881 - DNA, 243 bp, Glycine max
ccaaatcagttgcggctggaatgagtgcaatggacctgaggcgtggtataagtatggctgtcgatgctgtggtgacaaacttgaaaagcagagcaaggatgattagcacatctgaagaaatagcacaggtagggacaatatctgctaacggagagagagaaattggtgagttgattgcaaaagctatggagaaagttggcaaagagggagtaatcacaatttcagatggcaaaaccttatata

SEQ ID NO: 52882 - DNA, 214 bp, Glycine max
tagcactgttcaagacatcgcgagatctttgtaactcgttgacaacgagcttctgtgcacggagtatgagttcagggtgttcatggagaagtacgggagtagctactccacagaggaggagtattttcgccgttaggggattttcgcccagaacagtgtcagagcggctgacagcatgcgctggaccccacgcggcgtccacggcgtcacgcag

SEQ ID NO: 52883 - DNA, 222 bp, Glycine max
cagaagtgcttcacttggtcagaacattgcaatgatggcgttataggtgagatgttgggaaataccccctatgattcccaaattgaatgcagcgatgctgccttacttcagcttactcctctgcctaatcctgagcagtctggcacttcatcattctcatctgtaccaaatgagtgtgcaaagattactcactccagactctcccatggatgtattcgccat

SEQ ID NO: 52884 - DNA, 267 bp, Glycine max
ggactacaaggttgcagttggtttccttgcagtagggatgggaggtactctagttttaatgttcaatgctgagcataggggaacgcactccaacagataagattaaagagcacataggagggtgatggttgcaaaccatccagatgcaggtggcagccattaccttgcatccaaaattaatgaggcaaaagatatgttaattggaaagaccaaaggtggtgggtcagcattttgaagcctgctcaagcctttctttccatcattttg

SEQ ID NO: 52885 - DNA, 258 bp, Glycine max
tgctgtggaagggtctgatatctatgggcaggctgcatccaatctggttgctggaagcaacttggagggaacaattcagcaaattcttgatatgggtggaggggctgggacagggataccgttgtccgtgctcttcgagctgcctagaagaaccctgagagagctgttgaatatttgtatagatgataaatgttagggtatccccgagcaagctgaagctcgacttgtagcccaagtgcctgcaagtgctcaactaca

SEQ ID NO: 52886 - DNA, 279 bp, Glycine max
ctctttaacctttcacaccttgatagttacacttctcaccatgaatctgatctgacctgtcttctgcaataccaggggggaagctccttgtgccagtgggtctaggtgatgatgatcaatgcattgaggatgactttactgcatggaaagaagaactgtggccagcattggatgaattgcttagagatgaggacgatgcaactgtgtctacaccttatactgctgcagttttggagtaccgggttgttattcatgatccattggaagcatctgtcgacg

SEQ ID NO: 52887 - DNA, 273 bp, Glycine max
gatcctccaattctcttggatgatccttgacttcttctctcactttccagaaagtgagagcagatgtcaaggatcctccaattgcctcactttccagaaagccttcacatgttcaccttgttatttgatgatttgggtgttccacaagatcacaggcatatggatggttttggagttaacacatatacgctgatcaacaaggctgggatagcagtgtatgtgaaatttcactggaagaccactagtcgtatacagtgtctattggaggaagat

SEQ ID NO: 52888 - DNA, 278 bp, Glycine max
ctttcttatggttgtacacgattggagattggagtccaaagcacctatgaagatgttgctcgagacacaaatagaggacactgttgctgctgtagctgattgtttttgcctggctaaagatgctggtttcaagggacatggaaagtttccgggagttttttgagagtcccttgtttagagcagatgggcttaaaatatatcctacacttgtaattcgtggaactgggctttatgagctctggaaaactggcaggtatagaaactatccaccagagcaa

SEQ ID NO: 52889 - DNA, 272 bp, Glycine max
gcaggtgaatggtttgcccttcaacaagtactcgtggatcatgactcataattcgttcagcatcgtggatgcgccacctttgcctggaggagttcagagactcaccttttacaatcaagaagacactgttactaaccagttgaggaatggagcgagaggattgatgttggatatgtacgacttcgagaatgatatctggctttgtcattcatttcgagggcaatgcttcaacttcactgcatttcaacctgcaataaatactttgagagaag

SEQ ID NO: 52890 - DNA, 255 bp, Glycine max
aagatattgaggttctttatttggtcgaacctattgatgaggttgccattcagaacctacagacatacaaagaaaataaatttgttgatatcagcaaggaggatttggaattaggtttgtacagttttctatcttactttcatttgctcaaatactattttgtttcctgaaaatcgggatttgaatgtggtgctcaacatttatttaattaggtgatgaggacgaggtcaaagagagggaaaacaagcaagaata

SEQ ID NO: 52891 - DNA, 249 bp, Glycine max
ctcgagccgcgccagtacttttccaattggttcattcaaagaatttcaatgttggagtacaagcactgatgcttcttgataaaatttcatccaaaaatcagatagcaagtgatcggttttaccgtgctttgtactctaaacttttgcttccggctgccatgtatacatccaaggcagaaatgttcattgcacttcttctcagagcaatgaaaagggatattaatttaaagcgcgtggctgcattttcta

SEQ ID NO: 52892 - DNA, 257 bp, Glycine max
ctgctcatgcagctgaggttagcttggaggaagaaatgcaaattcttggtcaagaatatatcaacctagaaaatgagcagaggaagctagagcggaatgcagaatctgtaaacagtgaattattcactgaatgtcaggaactactgcaaatgtttggcttgccatatattattgctccaatggaagcagaagctcaatgtgcttatttggaacttgagaaactagttgatggtgttgtgactgatgactctgatgtc

SEQ ID NO: 52893 - DNA, 243 bp, Glycine max
attcaaaccttgctctatactactcagtacacacactagaagaataatggcttccatcctccactactttttagccctctctctttcttgctcttttcttttcttcttatccgactcagtcacccctacaaaaccaataaaccttgttgttctacccgttcaaaatgatggttccacagggctccattgggccaacctccaaaaaagaacccctctaatgcaagtaccagtcctggtggacct

SEQ ID NO: 52894 - DNA, 224 bp, Glycine max
caatatgcaaacaaatatagactcccggaaggcttaaaggagcaaatgttggcacacatgcaattgaaatttcagactgcagagttacagcaagaagtgttgcaagacctacctaaaacaataagatccagcattgctcggcatcttttccaaaacatagttgaaacaacatatttatttaaaggagtctctgatgattttatcacccagctggtaaagctttt

SEQ ID NO: 52895 - DNA, 100 bp, Glycine max
cacaatcttcatatgcctggtgcaaagaaggctcagctttggcagagaatgaggaagtggcttagtcatgccaaaagtttgtgctcccctaaagaaacca

SEQ ID NO: 52896 - DNA, 258 bp, Glycine max
ggccataaccttcttcttttgcactacaaatcagttttttacttgaattttcttcatccttctctgttctcctagaacttgattacttgaacattccctatgacagatgaggtggttcttctggatttctggccacgtccatttgggatgagggtcaggattgcacttgctgaaaagggtatcgaatatgagtacaaagaagaggacttgaggaacaagagtcctcttctcttacaaatgaacccggttcacaagaag

SEQ ID NO: 52897 - DNA, 251 bp, Glycine max
gcggtttcctttgttggtgttgctgggaactgttttcctggcatcagtttgtgtctcattaaaggtgagagaggatgagaataaccctttctacttgagaagctctaacagcttccaaactctctttgagaaccaaaacggtcgcattcgtctcctccagagattcaacaaacgctccccacaacttgagaaccttcgagactaccggattgtccagtttcagtcaaaacccaacacaatccttctccccc

SEQ ID NO: 52898 - DNA, 243 bp, Glycine max
ccttctgtgtgtgtctctctgctacaccaaatgctttcttgccattgctactgttgagtttcacaaacattcaccaaactcattcattctctcattacccatcaatatttattctgacagcatgtctcagactaactgggaagctgataagatgttagatgtttatatccatgattacttagtgaagagggatttgaaagcttcagctcaggcttttcaagctgtagggaaagtgtctcggac

SEQ ID NO: 52899 - DNA, 252 bp, Glycine max
aacctacctctttttcttctctctcaacaacttcacctacttcctcctcgatcatgtctcacttcaagggcaagtaccatgatgagcttatcgccaatgctgcgtacattggcactcctggaaagggcattcttgctgctgaggagtcaacagggacaattggcaagcgtttggccagcatcagtgtcgagaacattgaatccaacaggcgagctcttagggagctgcttttcactgctcctggtgttcccc

SEQ ID NO: 52900 - DNA, 251 bp, Glycine max
gttttaaatccacaaaatccatgacagataaataggtggatggggaaactgactttcccccagggatcttcccgtcgtgttaaaagaatgcctctttcaatagggggaggagctggtgcaaagaatgctattctcataaatatgccaaatgctgttctttcaatggggagatattttattggagacctcgtctttgaagtttctaagatgacttctccctacattaaatgtacagtctctttcttcatagc

SEQ ID NO: 52901 - DNA, 252 bp, Glycine max
aaatgatatacttcgagtggtcacaccattacaagaagattgggagatacggtttgcaattattaacgattttcgaagcattgttgaatctgtggaaagcctgagaggagcaactgttgagccatatggatcatttgtgtctaatctcttcacgcgatggggtgacttggatatttcaattgagctatcaaatggtttgcatatttcatctgcagggaaaaaacaaaaacagactttattgggggaggtttt

SEQ ID NO: 52902 - DNA, 247 bp, Glycine max
cacctgagttgaccaagctgtaagaaattcctcttgtgcgtcctgcaacagggttgttgcaggagcacctgagttgaccaagctgtaagaaccctgttggctgatgggtgtccatatttgtatgctatggtgcatgacagttcagagtctacaataccaggtgattttgttattggtgttaagttgacaaccataaacaatatgtgtgcatatgggctcaatcctggtatttcaggttctcgtcttt

SEQ ID NO: 52903 - DNA, 244 bp, Glycine max
actcgagcgccagttcaatatcctagtacaccgtattatagaatttacgatgtcctatgatgagatcgtggttcccattactgttgctgggagttgttttcctggcatcagtttctgtctcatttggcattgcgtattgggataagcagaaccccaatcataacaagtgcctccgaagttagcatagcgagaaagactccgacagggaccaagcatgccatgctcgttgcaacctccttagggt

SEQ ID NO: 52904 - DNA, 251 bp, Glycine max
cgctgaagctctcagaaaggcttgcgaaggatggggaactgatgagaacactgtcatagtaattttgggtcatagaactgtgtatcagaggcagcaaatcagaagagtttatgaggaaatttaccaggaggatcttgtgaagcgcctagagtctgagatcaaaggagactttgagaaagccgtgtaccgatggatactggaacctgcagatcgtgatactgttttggccaatgttgccatcaagagtggca

SEQ ID NO: 52905 - DNA, 235 bp, Glycine max
tcaagatggaagtgattagatctcaaggcattcctgctgacgatcttgcaaagcgagctcatgactttgacaaagatctagctcatgaaagcctcaaggattaaattcctgccgttgaccccttatattctactagggtaaataagtttgccgaaattatgatgcttagacccagtgtcgttggtgatcttaaacttctaactgacgggaagttatctgagggtaagcatattcc

SEQ ID NO: 52906 - DNA, 119 bp, Glycine max
tcaagcgggtcgtcgcgtgccagtcaggggacggattcggaacgggcccttctggagctctttcccgggcgtcgaacagtcaactcagaactggtacggacaaggggtatccgactttt

SEQ ID NO: 52907 - DNA, 254 bp, Glycine max
ttcaatatcctagtataccttaataaataacttaagatactatgatgagatcacggttcccattactgttgctgggaattgttttcctggcttcattttctgtctcatttggcattgcttactgggaaatagagaactccaaacacaacaagtgtctctagagttgcaatatcgagagatactcgtacaggaaccatgcatgccatgctcgttgcaacctccttaaggtggctgaagaagtatgtgcagaaggt

SEQ ID NO: 52908 - DNA, 103 bp, Glycine max
ggagtagcaaacattaatcactagtaccactatggccttggaattgaagtgttgcagaaaaagagctcccacgttcatatccacactgcaattcaatggccat

SEQ ID NO: 52909 - DNA, 248 bp, Glycine max
cccatatgtgcatgttgtggactcttttacagatgatgagcctcaagatccatacgagtctcgctccacattgcttttcttccgagggagaacttacaggaaggatgaagggattgtccgtgttaaactagcaaagatattggctggttatgatgatgttcactatgagagaagtgttgctccagaagaaaacataaaagcgtgctctaaagggatgcgttcatcaaagttctgtttgcatccagcag

SEQ ID NO: 52910 - DNA, 122 bp, Glycine max
caggatcaaggctgagagaagtgacatggtttatgggttttccgcagggaggaaggatcaaattttgcattgttttttaaacaaggaaggcgagtgcacggttcgtcctgattcaatagatg

SEQ ID NO: 52911 - DNA, 176 bp, Glycine max
gataaacctcgatcacaggttgccgcaccttaaaaccggacacaatatcaatcgttacttgatgtcaagaatctctcaatttctgcctacttctttgtgtacgatttcttaagggaaagaaaatcactctctgtgctggtcacagacttcgtgaatcatttccttttcgacacatt

SEQ ID NO: 52912 - DNA, 279 bp, Glycine max
atcgacgatgaccttgctcaagatattgaggatgagaatgtgcaatctgatgatgaaagtgaggatgatgattacaccgggacaaagaggaatgaaaatgctccaagtgacgattctggagaggaagacgatgataggcatgcaaggatgctacaagcaattactggcatgccgagtgaggcttttgaagagaataagaagaaaaagaaggtgatgaaggacactgttataccagagctatatccagagtctgaatataatcctagtcgtgatgttgtg

SEQ ID NO: 52913 - DNA, 270 bp, Glycine max
attctctccatttgtccttgaatataatactcagcatggctaagcttgttctttccctttgttttctgcttttcagtggctgctgcttcgctttcagtttcagagagcagccacagcaaaacgagtgccagatccaacgcctcaatgccctcaaaccggataaccgtatagagtcagaaggtggcttcattgagacatggaaccctaacaacaagccattccagtgtgccggtgttgccctctctcgctgcaccctcaaccgcaacgccc

SEQ ID NO: 52914 - DNA, 229 bp, Glycine max
tatccttggtagtcaaaggatattgataatcaaggatattgataatcaacttcagctggttgagacactctgaaccagctgaagttgattatcaatatccaaggtagtcaaagggaggaggatattgaattcattgataacccaaaggcaaagaagtatatcaaatcacttccttattctcctggaacccccctttcgcaactttatcctaatgcgcatacattggcaa

SEQ ID NO: 52915 - DNA, 214 bp, Glycine max
tgcagaccgagctagctagctagcaagcaagcacagagatggaggcaaagcgaggccatgccctcatgtgcttggcacgtgtttcactcttcctctgcgctctaaccctatccgctgctcacggaagcaccacggttcaagacatcgcgagaaagttgaaactcggggacaacgagcttctgcgcacggagaagaagttcaaggttttcatgga

SEQ ID NO: 52916 - DNA, 213 bp, Glycine max
tgactgttgaactagaaaagtcaatttattgtatgcttcttcaacactggtaccaggaattagtgacatttcttcaccatctccaataacaaattcctggtaccagtgttgaagaagcatacaataaattgactgttgaactagaaaagtgtgttccaacattggttggcatagaatgtcccaaagatgaaaaacttccccgtcgcaaaattt

SEQ ID NO: 52917 - DNA, 214 bp, Glycine max
tgcaaataactgtatctaatgagcatctcattaaaaatgctattgcaatagctatatctaatgagcatctcattagatatagctatgaaaaattactgcgccaagctaaagctccaagtatgtttttacaatccttcaaaaattttgtttcattgtgtgtgtatggtgatgataacttaattagtgttcatgaatatgtcaagccttactttag

SEQ ID NO: 52918 - DNA, 232 bp, Glycine max
ctagttcaatatcctagtataccttaataaataatttaagatactatgatgagagcacggttcccattactgttgctgggacttgttttcctggcttcagtttctgtctcatttggcattgcttactgggaaaaagagaaccccaaacacaacaagtgtctccagagttgcaatagcgagagagactcgtacaggaaccaagcatgccacgctcgttgcaacctccttaagg

SEQ ID NO: 52919 - DNA, 233 bp, Glycine max
gttcaatatcctagtataccttaataaataatttaagatactatgatgagagcacggttcccattactgttgctgggacttgttttcctggcttcagtttctgtctcatttggcattgcttactgggaaaaagagaaccccaaacacaacaagtgtctccagagttgcaatagcgagagagactcgtacaggaaccaagcatgccacgctcgttgcaacctccttaaggtgga

SEQ ID NO: 52920 - DNA, 233 bp, Glycine max
ctcgagccgctccatggtgtatgctcttctggctgacaagaacagaaaatttatctatgttgagatggcctttttcaagcgatggtggagagatcaaagtgaagctgttcaggatgtagttaagaaactcgttagttcgggtcaactagagttcataaatggtgccatggctatgcatgatgaggcagtaacacattacatagacatgattgatcagactgcacttggacatc

SEQ ID NO: 52921 - DNA, 227 bp, Glycine max
gttgaaataaatttctgcttgttgacatatatttttcggttttatattctatcctatgatttatggatgttcacctgcagactgagaaaaatgtttttgtggtcttctatgctggtgaaaaagcaaaagccaagattctgaaaatatgtgaagcctttggtgctaatcgttacccttttgctgaggaacttggaaagcaagctcaaatgattacagaggtttctgga

SEQ ID NO: 52922 - DNA, 266 bp, Glycine max
ctcctcaaaacttcgtaaccagaaagcaggtgggagaaaggaagctgagaaagaaatgcaggttattgtggacatgcgggagttcatgagcagccttccaaatgttcttcatcaaaagggaatgaacatcattccagtgaccctagaagttggtgactatattctatcaccattaatttgtgtggaaagaaaaagtattcaagatctctttatgagcttcacatcaggtcgtctataccaccaggtggagacaatggtacatatta

SEQ ID NO: 52923 - DNA, 259 bp, Glycine max
ctcgagccgttcaggaaaaattgtattgaaatcttcactagaggaatttcttacagctacgtcaactcaggtgcgtcctacaacaactctgttggctgatgggtgtccatatgtgtatgctatggtgcatgatagttcagtgtctacaataccaggtgattgcgtcattggtgttaagttgacaaccataaacaatatgtgtgcatatgggctttatcctggtatttcaggttctcgtcttttgggcaccattcccagt

SEQ ID NO: 52924 - DNA, 265 bp, Glycine max
gtttttgtggcacaaactaaacagaaatgaggctggtttaatggttcctgcagttgcttctggtttgatttgtggagatggattatggattctcccttcatctattcttgctttgttcaaaattcgtcccccaatctgcatgagcttcctgtcagccagtgccagttagaagttcacaataacattcaaatatatgcagtcaacaacttagtacctacggtccattatgggcataatgtcgtaggatgcttgcttattagcaatt

SEQ ID NO: 52925 - DNA, 277 bp, Glycine max
gagaaccccaaacacaacaagtgtctccagagctgcaatagcgagagagactcgtacaggaaccaagcatgccacgctcgttgcaacctccttaaggtggagaaagaagaatgtgaagaaggtgaaattccacgaccacgaccactcgcacaacacccggagagggaacctcagcaacccggtgagaaggaggaagacgaagatgagcaaccacgtccaatcccattcccacgcccacaactacgtcaagaagaagagcacgagcagagagacgaac

SEQ ID NO: 52926 - DNA, 277 bp, Glycine max
ccgggcctgccagctcccctgagtgatgagcacttccaagcacccctctgccctttctctgtccttatgctgtcccggcctcgccagccctctggggcattgtgggcgctgcctgccaggaatgagcaagctctgttgctcgggagcctcttgtcaccttcttggacttattccccacctgataccttatagagaaaagtgtgaattcaggtggagagtaggcccaggccccatgaggcaccagtggaagcacagctccaagttcagacaggtgccc

SEQ ID NO: 52927 - DNA, 139 bp, Glycine max
attagatggcttccacatcacaagatcagctaactttcccacctccaccgaaccaacatattgtgatgtggaagccatctttttttggggcaaaaccagaaatggtgatcaaaggtggggtggttgcatgggctgatat

SEQ ID NO: 52928 - DNA, 257 bp, Glycine max
ctcgagccgaaaattttggaattttaaaacagaattttaaacaactaaaaatctgcaattttaatttccttctgaaagatgagaaattagaattctctactaattatacctagaggaacatgtataactagtacaccaattatatcttttcttttttttttcattcattttttttcaccctcataatttgagctttttttttatccaaacacaaaattttgaaaataaaagaatttcaattgaagtatttgaaattc

SEQ ID NO: 52929 - DNA, 258 bp, Glycine max
catttggagaaggaaggaccatgagtcagcaaggtccacgcaaggcacatcccatcgaaaagacattgccttgcacccttgaggaactctataagggcactacgaaaaaaatgaagatctctagggaaattgctgatgcaagcgggaaaactttgccggtggaagaaatcttgaccattgacattaaacccgggtggaaaaaggggacaaagatcacattccctgaaaaaggaaatgagcagccaaatgttattgctt

SEQ ID NO: 52930 - DNA, 255 bp, Glycine max
cgccggaaggccagcagcaaggggagcagaggctgcaagagagcgtgattgtggaaatctcgaaggaacagattcgggcactgagcaaacgtgccaaatctagttcaaggaaaaccatttcttctgaagataaaccttttaacttgagaagccgcgaccccatctactccaacaagcttggcaagttctttgagatcaccccagagaaaaacccccagcttcgggacttggatatcttcctcagtattgtggata

SEQ ID NO: 52931 - DNA, 234 bp, Glycine max
ggctcgaggcaaacattgaacttgttggcaccaaagaacaacaacacgagcagcaacaggaagagcacacctttggaagtgcggaaatatagagccgaattgtctgaacaagatatatttgtaatcccagcaggttatccagttgtggtcaacgctacctcaaatctgaatttctttgctattggtattaatgccgagaacaaccagaggaacttcctcgcaggttcgcaagac

SEQ ID NO: 52932 - DNA, 280 bp, Glycine max
cggctcgagtcaatatcctagtataccttaataaataatttaagatactatgatgagagcacggttcccattactgttgctgggacttgttttcctggcttcagtttctgtctcatttggcattgcttactgggaaaaagagaaccccaaacacaacaagtgtctccagagttgcaatagcgagagagactcgtacaggaaccaagcatgccacgctcgttgcaacctccttaaggtggagacagaagaatgtgaagaaggtgaaattccacgaccacga

SEQ ID NO: 52933 - DNA, 278 bp, Glycine max
tcggctcgagcgtattaaagaatttaagatatactatgatgagagcgcggttcccattactgttgctgggagttgttttcctggcatcagtttctgtctcatttggcattgcgtattgggaaaagcagaaccccagtcacaacaagtgcctccgaagttgcaatagcgagaaagactcctacaggaaccaagcatgccacgctcgttgcaacctccttaaggtggaggaagaagaagaatgcgaagaaggtcaaattccacgaccacgaccacaacac

SEQ ID NO: 52934 - DNA, 267 bp, Glycine max
gcagcatctcatccccttctcagagaggatgattaccctcaaagacgtggtgctttcaccaattacaatgtttgggttacaccttacaataagactgagaagtgggctggtggactttttgttgatcaaagtcatggagatgatactttggctgtttggactaagcagtaagcatgcatatcttaaccttggaaccaaatatgtttcactttaattctgtgtatccaattgataactaacccattgtttttttttttgccaaataaa

SEQ ID NO: 52935 - DNA, 264 bp, Glycine max
cggtgatgcagcagttggttagtagacttgatgtggcaatgttcaatgctattcttcgtgaatccgctgaagagatgcccatggatcctatatctgaccccattagtgattctaaggttcttcctattccagctggaaaatcaggctttggggctggtgcacaactgaagaatgctattggtgactggtcaagatggctttcagatttatttagcattgatgatagtgactcacgtgaagttatcaatgaaaacaatgaaccca

SEQ ID NO: 52936 - DNA, 265 bp, Glycine max
acgtatgtcatcattgagtctggcatcagattctagcacagcaaaaccttcccttatgttcttcaaaatgtttgggccttcttttgaagctgattttgttgagtcagttgtgaaaatgggccaaattggtgtcaagacaggtttccttggagagattaggcgcgtgtgttcagcttttaattgaagtaaatatgcaattaatgatcaattggtcataataaaaatgtatggcttctagaaaaaaaaaaaaaaaaaaggggggcgg

SEQ ID NO: 52937 - DNA, 263 bp, Glycine max
ctcgagcgtttgtccttgaatataatactcagcatggctaagcgtggtctttccctttgatttctgcttttcagtggctgctgcttcgctttcagtttcagagagcagccacagcaaaacgagtgagagatccaacgcctcaatgccctcaaaccggataaccgtatagagtcagaaggtggcttcattgagacatggaaccctaacaacaagccattccagtgtgccggtgttgccctctctcgctgctacctcaaccgcaa

SEQ ID NO: 52938 - DNA, 257 bp, Glycine max
caagaaagccatttaatgttccagatagcatacttagagtgtgttgattttgatgctttagaaggtgctttaaatatgaagtttaaagacaggggactgctggtagaatccataactcatgcctccaggccatcttcaggagtatcctgttatcagcggttggcgtttgttggtgatgctgtcttggatcatcttattaccaggcacttgtttttcacttacacaaatctgccaccgggacgtctgactgaccttcg

SEQ ID NO: 52939 - DNA, 148 bp, Glycine max
cacaggttgccgcaccttagaaccggtgacaaaagcaatcgttacttgatttcaagaatctctcaatttctacctacttctttgtgtacgatttcttaagggcaagaaaatcactctctgtgctggccacagacttcgtgaatcattt

SEQ ID NO: 52940 - DNA, 155 bp, Glycine max
cataaataaagcttaaaaatgatctctcttataagggtagtgctacacattaaaaccttagaagagagatcatttttaaggttttaatgtgtagcactacccttataaattttttagttcccctgctcttgttcttatgaattcagatgcaataa

SEQ ID NO: 52941 - DNA, 163 bp, Glycine max
acctgccttcagccaccgctcagttcgtgctcgacactgatgatgatcctcttcaaaacggtggcacatactatatgttgccagttatgagaggaaagggcggtggaatagaagtcgattcaactggaaaagaaatatgccctctcactgttgtgcaatcacc

SEQ ID NO: 52942 - DNA, 273 bp, Glycine max
aaaggatccttttctgatgtctggatgtaaagttgctgatggcagtggctctatgctggtcactggtgttggtgtcaatactgaatgggggcttctaatggctagcatctcagaagatactggtgaagaaacaccattgcaggttcgcttaaattgtgtagctactttcattggtattgtaggacttactgttgctgttattgtcctaattgtgctactggctagatatttctctgggcatactaaaaacccagatgggtcagttcaattcac

SEQ ID NO: 52943 - DNA, 215 bp, Glycine max
accgattgctagaatggaatttcgatgctcagtcatctcttttaccattctcttctctcttgctcttgcaggagagagccatgtccatgcatcgctacctgaggaagattattgggaagctgtttggccaaacactcccattcccactgcactgcgagagcttctaaagcctctccctgcaggtgtagctatcgatgaactccctaagcaaattg

SEQ ID NO: 52944 - DNA, 279 bp, Glycine max
actcaatgccctcaaaccggataaccgtatagagtcagaaggagggctcattgagacatggaaccctaacaacaagccattccagtgtgccggtgttgccctctctcgctgcaccctcaaccgcaacgcccttcgtagaccttcctacaccaacggtccccaggaaatctacatccaacaaggtaagggtatttttggcatgatatacccgggttgtcctagcacatttgaagagcctcaacaacctcaacaaagaggacaaagcagcagaccacaaga

SEQ ID NO: 52945 - DNA, 236 bp, Glycine max
ataaaattcttccaccaagttatgggtatacttgtgttgcttcttttctccctcttaggtctctcttctagttccagcatatcaactcatcgttccatattggaccttgacctaaccaagtttaccacacagaaacaggtgtcttcactgttccaactatggaagagtgagcatggacgtgtctaccataaccacgaagaagaggcaaagagacttgagattttcagaataacttg

SEQ ID NO: 52946 - DNA, 157 bp, Glycine max
agccgcagcacgaggagcagcctcaggaggagaaggatgtctcacaggaagttcgagcacccaaggcacggttcactgggatttcttcccaggaagcgtgctgctcgtcacaggggaaaagtgaaggcattcccaaggatgacccatccaaggcacc

SEQ ID NO: 52947 - DNA, 134 bp, Glycine max
cagagttcattctgtcattgataagtttgcagagcgaggattacggtctcttgcagtagcttaccaggaagttcctgatggaaagaaagaaagccaaggtgggccttggcaatttattggactcttgcctctat

SEQ ID NO: 52948 - DNA, 230 bp, Glycine max
gtttgttgtgagctatatgctagtttatcgtgaggagaatatgaagttgtttgttttctttgttgctgcagtagatttggtagcatggccatgccatggcgcaggctaccaaaggttccctctccgaatgttaatggctatggtgagcgttcttcggaggtaaaatgcgcaagttttaggcttgctgtggaagcacacaacatccgagcctttaaaaaattcctgaagag

SEQ ID NO: 52949 - DNA, 232 bp, Glycine max
tcctagtataccttaataaataatttaagatactatgatgagagcacggttcccattactgttgctgggacttgttttcctggcttcagtttctgtctcatttggcattgcttactgggaaaaagagaacccaaacacaacaagtgtctccagagttgcaatagcgagagagactcgtacaggaaccaagcatgccacgctcgttgcaacctccttaaggtggagaaagaag

SEQ ID NO: 52950 - DNA, 243 bp, Glycine max
ggctcgagacaaattctggactacacacgatataaattttgctttaccagaagaggaaaagatggaactgattagaagtataggcattcctgctgatgttcttgcgaagcgagctcatgaatttgaaaaacatgttgctcatgaaagcctcaaggatcaaattcctgctgttgacaagttgtattctactaaggttaataagtttgcaaaaattatgaaccttagacaaagtgttgttggtga

SEQ ID NO: 52951 - DNA, 260 bp, Glycine max
gtggtgcaagatgctattcatgtgcccaattgtgagagttacactttccacagtgtttctgcctcgactatgttcctgtacttttgggatgcaatggggagacccccagtagaaaaagtgtcccacgtcatccctgaagttccttcccttgaagggtgcttcacaacccaattcatagatttcatcacttcacagtatgagttccacaagttcagcaagtcgactatatacaacaccacaagggtaattgagagtcttac

SEQ ID NO: 52952 - DNA, 217 bp, Glycine max
accagaccagcagaggctgatcttcgccgggaagcagctcgaggacggacgcacccttgctgactacaacatccagaaggagtcaactctccacttggtgttgcgtcttcgtggtggtatgcagattttcgtgaagactctaaggtaaactctataaccctcgaggtggagactctgacaccattgacaatgtgaaggccaagtttcaggacaagga

SEQ ID NO: 52953 - DNA, 267 bp, Glycine max
agtgctaacatccacagtgtgaaggaaccctttgaggtttctgtcacacccatcgttttcatgtgcgtcttccacaccgtacaccagcatgccacgtaagccgacctcgttgagcgcgctgatgctccgtccggcggtggcggcgtcctcgccggcgcagaattgcgcgtagaacgtctctttcgtggcagccatgaggagattcctcagcaccccgctctggaacacccgagacttcatcaccctcattcccaggtccaccacggg

SEQ ID NO: 52954 - DNA, 237 bp, Glycine max
cgagatatcaacagcttccttagttcaatatggggaagcccttcttcactctctctcttacttccctttgcttgctactcttgtcgaatgcatgctttgctattacctaccagcaagttcaacgagtgccaactcatcaacctcaatgcgtcggaacccgatcaccgcgtcgagtccgaaggtggtcttattggtacatggaactctcagcacgctgagctgcaatgcgcctgtgtc

SEQ ID NO: 52955 - DNA, 267 bp, Glycine max
ctcgaggaaatcgctcgcgcgctgcagtggtcagagccaaagcagggaccgattactattccaccttgaacgttggccccaatgccacgctgcaagaaatcaaggcctcctatcgtaaactggcgcgaaagtaccatccagatatgaacaaaagccctggggctgaggataagttcaaggaaataagtgctgcatatgaggtctacaaggagataatggagggtcgactggtgctccaggggttgatccttttgatttattcgatac

SEQ ID NO: 52956 - DNA, 137 bp, Glycine max
gctcgagatcagtggtcatgcgtatgtcaagccgtactttagtggttctcaagtgatacagcttctagctggtcataatatcaccattactgatggtattgacaggactagtgcaacgatgcaatttaggaagttag

SEQ ID NO: 52957 - DNA, 261 bp, Glycine max
ctcgagcgctccattggtccttaaacactcatcagtcattaccatggccaagctagttatttccctttgttttctgcttttcagtggctgctgcttcgcttttagttccagagagcagcctcagtaaaacgagtgccagatccaaaaactcaatgccctcaaaccggataaccgtatagagtcagaaggagggctcattgagacatggaaccctaacaacaagccattccagtgtgccggtgttgccctctctcgctgcac

SEQ ID NO: 52958 - DNA, 247 bp, Glycine max
tcactttccttagttcaatatggggaagcccttcttcactctctctctttcttccctttgcttgctactcttgtcgagtgcatgctttgctattacctccagcaagttcaacgagtgccaactcaacaacctcaacgcgttggaacccgaccaccgcgttgagtccgaaggtggtcttattgaaacattgaactctcaacaccctgagctgcaatgcgccggtgtcactgtttccaaacgcaccctc

SEQ ID NO: 52959 - DNA, 209 bp, Glycine max
tgctgacgaagatgatgaagatgtacaaattccctctcaccctcctcgtcgaccaagccattgtcagcgcgatcgatacgacgacgaggatgaagatgcacataaacctcgtcgtagttgaccaagccttggtaagcgtgaacgagtccaggaccaggacgaggacgctgatgaagatgaagatcaacctcgcaagatccgcgaatgga

SEQ ID NO: 52960 - DNA, 246 bp, Glycine max
taaaattcttccaccaagttatgggtctccctctgttgcttctcttctccctcttaggtctgtcttctagttccagcgtatcaactcatcgttccatattggaccttgacctaaccaagtttgccagacagaaacaggagtctgcaatggtccaactatggcagagtgagcatggacgtgtctaccataacctcgaagtagaggctatgagacttgagattttcaagaataacttgaactatatca

SEQ ID NO: 52961 - DNA, 222 bp, Glycine max
ttcggcacgaggacaaaactagcgcaactttgcaatttagaaagttagcagattgtgactttctcaaaggagactttaagcagatgtctaatgtcgtgtgggtggctcctgaggcaaaggcgagtttgtggtcacaaccttcattatgttccatgtaacaatctggaaatgcaagaagcttatcttgtcaatctcgtaaatgtgttacgagatttgtctgtg

SEQ ID NO: 52962 - DNA, 238 bp, Glycine max
ttctcttcacttttaagttaaatagtttttcattgtatcattcaatctactatggccgcttcatcaatggctctctcatcatcatacatttgaccggcaagctctcaggtttcgcgcctcgaaccttcagcttcgcgcttgaaagtttagcctcatgttaacagtctccaggactgataccacttggtgcccttggtacggcccaaacggtgtctggtacttgggctcacactctggt

SEQ ID NO: 52963 - DNA, 237 bp, Glycine max
ggcatatatactctgcatccaagcagattagtgctgcaatatctccagatcaaaataccactgcctttaaagatgtagcaattctccgtcacccgcgagtaggtgaatatacgtatgggcacttcactcaactgttactctacagcaagatcatggcgatgaagcgcttcgtggtgttctagtacctacgcaccatctctctattggtgatatatttatggttaattccagagatat

SEQ ID NO: 52964 - DNA, 203 bp, Glycine max
cggctctcgcaaaaacacagttggaggaaccatcctgcgtagtgacctattggccaattcttcgacagagggcaattttagagccagtgatcaattgctgcgcactcatcgtattacacgaatgattgaaatggcatccacagtcggtatacctgataatacaggtgtagcattagcctgcgctataaatagttcttataggg

SEQ ID NO: 52965 - DNA, 240 bp, Glycine max
gttatgagcaagatggcagagatgataaacagtctttgtggtggtgatgacaaattgatgcgtgaaatgacgcacatgctgttggcgtgttgttcaaggatggcaatttgtaagaaagatgtttggagagttgaatgtggaaacgcttctggaattccgctacacagttatttgcaatagcatttttgatgggatcctcattagatatagctatgagcaattactgcgcgaggctaaagc

SEQ ID NO: 52966 - DNA, 235 bp, Glycine max
cttggagatctacaatgaggtggttaatgacttattaaatccagcaggacagaacctaagaatcagataggatgctcagggcacctatgttgagggaataaaggaagaggttgtactctcccctgctcatgcactatcccttattgcagctggagaagagcacaggcatgataggtccacaaacttcgacctactcagcagcaggagccatacaatatttatcctgactatagag

SEQ ID NO: 52967 - DNA, 255 bp, Glycine max
actggatctaccttgtgactaaattcctagtgtcttgactacaactgatgtacagttggtaggcacagaacatgagggatatgatccttttcttggtggaattcaaaaatatgctactcccatgatgcccctagatgaagaaattctttctaaggttgcacaagatatggttgaggaatggtttgattgtgttgatgaggaggattcctttgaggaagtttctttaagtgcagcactcaatggtgttgagggttt

SEQ ID NO: 52968 - DNA, 229 bp, Glycine max
caagaacaatcaaacagaagaggctcaacgtcgcagaagcagcagctacaggacagtcaccacaacattcgtcacttcaatgacggtgacgtactcgtgattcgtcctcgtgatgcctactggacctataacactggcgatgaaccagttgttgccatcagtcttcttggcacctctaacttcagtaaccagcttgatcagacccctagggtattctaccttgctggga

SEQ ID NO: 52969 - DNA, 245 bp, Glycine max
attttagagcaagtgttgatttggatcgcacgcatcgtattaaaggaatgattaaaatggtggtcacagttggtattcctgacaatactggtataacatgggctctgttctaattctagttgcttttagggtgcgtgccagttctgatatttacccatctgctctcaagactgtgaattatgggatcctgtctgcactaaagtgatgaccatgctactatatccagacccgtgttctgatgcatg

SEQ ID NO: 52970 - DNA, 254 bp, Glycine max
ctctccattggtccttaaacactcatcagtcatcaccatggccaagctagttttttccctttgttttctgcttttcagtggctgctgcttcgctttcagttccagagagcaggctcagcaacacgagtgccagatccagaaactcaatgacctcagaccggataaccgcatagagtcagtaggagggctcattgagacatggaaccctggcaacaagccattccagtgtgccggtgttgccctctctcgctgca

SEQ ID NO: 52971 - DNA, 263 bp, Glycine max
ctcgagccgctcgagccgattcggctcgagcgcaacacaacaaaaaaagacaacccagaactcgcgtcataataaacgctcttctctgaaaacccacatttcttttcttctttcttcttctctttcgcttcttcgatcttcgatcttcgtcgctgaaaatgagagagtgcatttcaatccacatcggccaggccgggattcaggttggaaacgcctgctgggagctttactgcctcgaacacggcattcagcctgatgggcag

SEQ ID NO: 52972 - DNA, 208 bp, Glycine max
taccttaatagataatttaagatactatgatgagcgcacggttccgattactgttgctgagacttggattcctggcttcagtttctgtctcaattcgcattgcttactgggacaaagagaaccccaaacacaacaagtgtctccagagttgcaatagcgcgcgagactcgtacaggatccaagcatgccacgctcgctgcaacctcct

SEQ ID NO: 52973 - DNA, 255 bp, Glycine max
atcatattcgaaatttgatcttacaaaacagcaaagtgatactgcctataatcttccctgctatggagaaaaatatacgggaccattggaatcaagctgttcagagcttgaccatgaatgttagaaaaatattctctgatgctgaccaggcactttttgatgaatgcttgaagagattccaagaagaagaaatcaaggatagggagaagcaagaaaagcgagaatccatatggaaacaactggaagatgttgctg

SEQ ID NO: 52974 - DNA, 256 bp, Glycine max
gcatcagcaaagaaagccaaagatttcttgcctttccttcaccgaagtagaaaaatccctgctgttgtggaatatgtccttggtggccatcgctttacattgttaattccaaaagagacttgcagtattgccttttcattttctggtgtcagatgtcctggtcgcgatgagccatattctgacgcagccatcgcactcatgaggcggaaaataatgcagagagatgttgagattgaggtagagactgttgaccgaa

SEQ ID NO: 52975 - DNA, 255 bp, Glycine max
cgaggctctggagtatggtgattgccgtttatcccttgcggtgagttaaaattatgatgttgtaaagctactagattctgctcctgtcagtgttttgtacaatcaattgtctggagttccctctgttatttcagattccccaatatggaatatttgaaaatgtaaattcactggacgagcttgcaaaaatgcctcaatggacagaagaaaagcctctacgagttgctactggtttcacctacgtaagttttaaag

SEQ ID NO: 52976 - DNA, 258 bp, Glycine max
accgggacgctgtccctgttgtccctgctgaaccattggcacgaaaaaattcggcacaggagctgcttcctaggggacgtgtctatcgttatcctcctggtaggggtattcctgatgttcctatacctggggttgctggaggtatgttttctgttccatatgatgtgggtgggatgccgctgcgtgatgcatcaatctcccagcaaatacctgttggggctctggcaacggctctggctaatgcttctccagagcagc

SEQ ID NO: 52977 - DNA, 220 bp, Glycine max
gggttgcaaagatgcttggcgcggtcttctccataggggtcataagataaaagggacagtggtgttgatgcgcaataatgtgttggacgtgaatatcgtaaccagcgtttggggaattattggtcaaagtctcgacttagttggctcaacactcgatactcttactggcttcttgaggcgatccgtgtctctacagcgtattgatgctaccaaagctgat

SEQ ID NO: 52978 - DNA, 273 bp, Glycine max
tgggacactagtgtgacggtggaggtcaaaattggagatagagtagaaactgtccgtttctttcactgctacaagcgtggagtggatcgtgtttttgtggaccacccatgtttccttgagaaggtatgtggcaagactaggtcaaaactctatggccctagtgctggagtagattatgaagacgaccaacttacgttcagcttgttatgccaggcagcacttgatgcaccaagggttttgaatttaaacagcaacatgtatttctctggacca

SEQ ID NO: 52979 - DNA, 266 bp, Glycine max
gttcaatatcctagtataccttaataaataatttaagatactatgatgagagcacggttcccattactgttgctgggacttgttttcctggcttcagtttctgtctcatttggcattgcttactgggaaaaagagaaccccaaacacaacaagtgtctccagagttgcaatagcgagagatactcgtacaggaaccaagcatgccacgctcgttgcaacctccttaaggtggagatagaagaatgtgaagaaggtgaaattccacg

SEQ ID NO: 52980 - DNA, 177 bp, Glycine max
aaatatttcaatattgatgaagacaatattcgtgagatctattcaaacctaaaaggtgctcatcttgtgcctaacgatgtggccgaagctgctctttacttggcaagtgatgagtccaagtatgttagtagtcacaatcttgtgatagatggagcgacctgattaatgcaggattac

SEQ ID NO: 52981 - DNA, 273 bp, Glycine max
aataatttaagatactatgatgagagcacggttcccattactgttgctgggacttgttttcctggcttcagtttctgtctcatttggcattgcttactgggaaaaagagaaccccaaacacaacaagtgtctccagagttgcaatagcgagagagactcgtacaggaaccaagcatgccacgctcgttgcaacctccttaaggtggagaaagaagaatgtgaagaaggtgaaattccacgaccacgaccacgaccacaacacccggagaggga

SEQ ID NO: 52982 - DNA, 238 bp, Glycine max
tgtgtgtgtgtgtgtgtgttgggcatgtgcactaatgactaacctttttggtttggatttgggttcggtttttattttgagcagccggaccgacccgacgagttgcttcggatccaagtagcgggacggcgcgtgatatattgggacggacctagagtgcttggggtgctggctatgtccagagccataggtgactaatcaataaatacacgcgcggcgcattatagcagattggagg

SEQ ID NO: 52983 - DNA, 265 bp, Glycine max
gcaagttatgagcaagatggcagaaatgataaacagtctttgtggtggtgatgaaaaattgatgcgtgaaaggacgcacctgctgttggattgttgttcaaggatggcaatttgtaaaaaagatgtttggagagttgaatgtggaatcccttctggatttccgctcacagttatttgcgatagcatttttaatgagatgctcattagatatagctatgaacaaattactgcgtcacgctaaagctccaagtatgtttttacaatc

SEQ ID NO: 52984 - DNA, 264 bp, Glycine max
cattggtccttaaacactcatcagtcatcaccatgggcaagctagttttttccctttgtcatctgcttttcagtggctgctggttcgctttcagttccagagagcagcctcagcaaaacgagtgccagatccaaaaactcaatgccctcaaaccggataagcgtatagagtcagaaggacggctcattgagacatgggaccctaacaacaagccattccagtgtggcggtgttgcactctctcgctgcacgctcaaacgcaacg

SEQ ID NO: 52985 - DNA, 266 bp, Glycine max
ctcctaccgcatttgttttcggaccccagaaaagcctgactcagcaatcaggttcctcagagaccacggtttctctaactcccaaataaacagtatggttagaagggtaccatggttgctttcctgcgacccttgcaaaagagtattgcccaagtttcaatttttactctcaaaaggtgtttctagctctacaattgttgacatagtgagtaagtcccctgcaatactgagtcgaagcctggagaatactatagtcccaagctatg

SEQ ID NO: 52986 - DNA, 267 bp, Glycine max
cttggttcatcaatattcatgggatctggtaaaagcaaaacagtctcatctgacgtgggatacgttccacttgattctggtgatgcacgtcttcgacaactcggttacaaacaagaactcaatcgtcatctttcggtgatttcgaatttcgcgttttcgtattctattatatcagtgctcaccggagtgaccactctttacaacactgggttgaactatggtggccctgtttcgttcgtctatggttagttcatagcttctggtttc

SEQ ID NO: 52987 - DNA, 254 bp, Glycine max
aactagttcaatatcctagtataccttaataaataatttaagataccatgctgagagctcggttcccattactgttgctgtggacttgttttcctggcttcatgtttctggctcatttggcattgtttactgggttaaatagtactccatacacgtcaagtgtctccagagtggcattagcgagagtgactcgtacaggtaccaagcatgccacgctcgttgcaatctccttaaggtgtagaaactaagaatgt

SEQ ID NO: 52988 - DNA, 266 bp, Glycine max
agagagactcgtacaggaaccaagcatgccacgctcgttgcaacctccttaaggtggagaaagaagaatgtgaagaaggtgaaattccacgaccacgagcacgaccacaagcacccggagagggatcctcagcaacccggtgagaaggaggaagacgtagatgaggaaccacgtccaatcccattcccacgcgcacaagctcgtcaagacgaagagcacgaccagagataggctcaggaatggcctcgctagcgaggaaatacgcg

SEQ ID NO: 52989 - DNA, 257 bp, Glycine max
gcatgacggacttcatcctcaggagcaccatgtgtcaagttattagggtgacctgggaaacatagttgctaatgcagagggggttgcagaggctacaattgtggataatcagataccactctctggccctaattcagtagttggaagagccttggtggtccatgagcttgaggatgaccttggaaagggtcggcatgaactcagtttgacaactggaaatgctggtggaagattagcgtgtggtgtggttggtttga

SEQ ID NO: 52990 - DNA, 258 bp, Glycine max
tttcacatcaaactgtttggactcaaatggcaatggtgttctcactgttgctctttgattccaaacagtttgcgtgaaatagtacagaggaatggtacccaaaagacgagaaccccattgaattatgatactagcaagcagagcttgtgtcaattgtctattgaccttctcggtggacgaatttcagtggacaaacactggatattcgatcacacttatacgatattctccaattagtaacttgttgagagctgctgc

SEQ ID NO: 52991 - DNA, 260 bp, Glycine max
gttcaatatcctagtataccttaataaataatttaagatactatgatgagagcacggttcagcatttgttgctgggacttgttttcctggcttcagtttctgtctcatttggcattgcttactgggaaaaagagaaccccaaacacaacaagtgtctccagagttgcaatagcgagagagactcgtacaggaaccaagcatgccacgctcgttgcaacctccttaaggtgtggaaagaagaatgtgaagaaggtgaaatt

SEQ ID NO: 52992 - DNA, 205 bp, Glycine max
ataaaattcttccaccaagttatgggtttccttgtgttgcttcttttctccctcttaggtctctcttctagttccagcatatcaactcatcgttccatattggaccttgacctaaccaagtttaccacacagaaacaggtgtcttcactgttccaactatggaagagtgagcatggacgtgtctaccataaccacgaagaagagg

SEQ ID NO: 52993 - DNA, 265 bp, Glycine max
caaatatgggcacccatcagccaacagagtcgttgcgggacgcacctgagttgaccaagctgtagacactgaactatcatgcaccatagcatacaaatatggtcacccatcagccaacagagtcgttgcgggacgcacctgagttggctgatgggtgcccatatttgtatgctatggtgcatgatagttcagtgtctacaataccaggtgattttgtcattggtgttaagttgactaagtgcgcactatgtgtgcatagggctcc

SEQ ID NO: 52994 - DNA, 253 bp, Glycine max
agatggtcaagtttgtttcaatagtgagttaatcacatgtgctaccattgcagtttctacaattgcaatggtagcacatgtgattaactcactatttgaaacaaacttgcccgtcttgatagaaacacagaaggccccaacaatggctgatcgaacaaacaaaccaactaaatcaacggattcagaaatcatgcctaaagacatgagacatttttcaaccaatcccaaagcacaggaactagccagaatacac

SEQ ID NO: 52995 - DNA, 265 bp, Glycine max
accttgtcctcgaaacaaggagttgagcatcctctgcttctatcagtccatgagtttgtcaaaggtgccttgttccacaatcttgatctcaagggcccctattgatttatctgacacacgcccttggcgatacacgctgttgagcgactcctcaacggttaagcaacaatcctagatatataagagataagttgatgagagataagatagtaaactatttgcatatttggtttgctgttggaaatcttagaacacatgttcctat

SEQ ID NO: 52996 - DNA, 246 bp, Glycine max
cttattaacactttccttagttcaatatggggaagcccttcttcactctctctctttcttccctttgcttgctactcttgtcgagtgcatgctttgctattacctccagcaagttcaacgagtgccaactcaacaacctcaacgcgttggaacccgaccaccgcgttgagtccgaaggtggtcttattgaaacatggacctctcaacaccctgagctgcaatgcgccggtgtcactgtttccaaac

SEQ ID NO: 52997 - DNA, 266 bp, Glycine max
aattgatagggtcaggcagacggatcgtatgttggtgggaagcattgcttgttgcagttacttcttgtcattagtagttactagctgtcagctgattatcggcagtctctgcagtttcagaatttgaatgcagtaaaacaaaatatacaattggaggctattagaggtgggagaacaattaaaatttcaatatttgatattgttgttggtgatgttataccccttaaaataggagatcaggttcctgctgatggagtattaatcac

SEQ ID NO: 52998 - DNA, 271 bp, Glycine max
aattcttccaccaagttatgggttcccttgtgttgcttcttttctccctcttaggtctctcttctagttccagcatatcaactcatcgttccatattggaccttgacctaaccaagtttaccacacagaaacaggtgtcttcactgttccaactatggaagagtgagcatggacgtgtctaccataaccacgaagaagaggcaaagagacttgagattttcaagaataacttgaactatatcagggacatgaatgcaaacagaaaatcacc

SEQ ID NO: 52999 - DNA, 196 bp, Glycine max
attgtcgatgaacactcatcaccatggccaagcttgtactttcccgttgtttccctcatgtcagtggctgcttcgctctgagagagcaggcacagcactatgagtgccagatccacaagctgaatgccctcaaaccggataaccgtatagagtcggaaggtgggttcatagagacctggaaccctaacaacaagcc

SEQ ID NO: 53000 - DNA, 269 bp, Glycine max
tcctgctcctattccaatcaagcgcgagggaggatatgaaagactaagggatgattaccaaagtcactactaacataaccaacctttcagctatgaacgctctagcagccaccaaccgtaacttccgacgtgcagctcacattctcggtttggacactaagcttgagaatagccttctcattcccttcagggaaatcaaagttgaatgcacgatcccaaaagatgacggaacgctagtatcgtatgtaggattcaggattcaacatgac

SEQ ID NO: 53001 - DNA, 245 bp, Glycine max
gcctcggttgagataggacttttaattgcagtctctatatcctttgcaaagatcctattacaagtcacaaggccacgaactgcaattctggggaagatccctaggactactgtctacagaaacatccaacaataccctgaagccacaagggttcctggtgtactgattattagagttgattctgcaatatatttttccaactccaactatgttaaagaaaggatattaagatggctgatggatga

SEQ ID NO: 53002 - DNA, 247 bp, Glycine max
gttgttgccaaggttggaaatcacaaacaaattgttggtttccatgttgctggaagcaaaggaagactgggatatgcttcattgataccatatgttgagccagttgtgcaagctcaaagtgctgaagtttactttgacttcttccctgtggaggttgatagtcaagagggagttgctcacattggtgaattgaaatctggtgtctatgttccactgcctacaaaaactaatttggtggaaactccca

SEQ ID NO: 53003 - DNA, 178 bp, Glycine max
ctttttgctttctcactaggaacacgatggtttctcttcccatagttcaatatgaagagaaaatcatcgaaaccgttgagcgcaaccctgtcgtcgtcgtcattggagagaccggttccggcaagagtactcaactctctcagatgctccaccgccgcggctacggtaaaatcgccat

SEQ ID NO: 53004 - DNA, 250 bp, Glycine max
cgtgaaggagcacgaaacggtggctgtgaactgcgttttgcagcttcacaagacactctacgacggaagcggaggagccttgagggacttcttgggtctaatccgcagcacaaatcccagcgttgtcgtggtggcagagcaagaagcagaacataacgaaaacaggttggagggaagggtgtgtaactcgttgaaatactactcggcattgtttgattccattgacgagagtgggcttccgcaagagagt

SEQ ID NO: 53005 - DNA, 246 bp, Glycine max
cttggagaaaatgccattatggcaaaaagcaattttgtgtggaatgggacattgtttgtctcggaaaagcaaagaaacatggtatcatgggattggaggaaaaaaggtgtcatcacccaagtaaagtaccaagggggctgtggaagcggttgggcgttttctgccacgggagccatagaagcagcacatgcaatagcaacaggagaccttgttagcctttctgaacaagaactcgtagactgtgtg

SEQ ID NO: 53006 - DNA, 260 bp, Glycine max
agggaatatttacattgccagatttgatctctgggataattttgccaagtttgctgaaacttgatagagcaacatctgtgctctctataagatcaatagagcttaagcaaaatggtattccatcctttgacatttgaacaggacagtcaagaacatccacaccatctgaaatagctttttccctagtacaccgtattaaagaatttaagatatactatgatgagagcgcggttcccattactgttgctgggagttgtttt

SEQ ID NO: 53007 - DNA, 260 bp, Glycine max
tgaagcttggatcttctctcgcattgtggaatctatttggtggcagtctttgactccacatatgcagcttgctgatgcaaagatcactcataaggattcagcaaaaaactatacaaatatgtctagttcatgcgatcaagagtggggaaatttatcactagatatttggaagaatgcttttagagaagcctgtgaaaggctttgccctatccgagctggagggcacgagtgtggctgtttgtctgtgctacctaaattgt

SEQ ID NO: 53008 - DNA, 268 bp, Glycine max
cttattttcaagtctaagcctgatatggatccaacgaaacttcattggatgatcggaattatggtgtgtgtgactgtagtgaagttcattcttatggtctactgtcgaagattcaaaaatgaaattgttagagcatatgcacaagatcacttttttgatgtcattactaattctgttggattagctgctgctgtgctagctgtcaagttctactggtggattgatccaacaggagctattattatagcattgtatacaatcaatacat

SEQ ID NO: 53009 - DNA, 264 bp, Glycine max
ccttctctttattttcaattttcatccaaaagattcttatgatagttacagcataggtgtagaagaagctggggaatatcaaattattctaaacacagatgaaataaagtatggaggtcaagggatccttaaagaagaacagtattttctaaaaactatcagcagaagagttgatggccttcgaaacgcttagaggtgtcactacccagcagaacttctcaggtttacaagttaaggcggattttgagaatataaggcacactg

SEQ ID NO: 53010 - DNA, 249 bp, Glycine max
ttctcgagccgattcggctcgagcggctcgagagaggacaaagcagatgaccacaagaccgtcaccagaagatctataacttcagagagggtgatttgatcgcagtgcctactggtgttgcatggtggattacaacaatgaagacactcctgttgttgccgtttctattattgacaccaacagcttggagaaccagctcgaccagatgcctaggagattctatcttgctgggaaccaagagcaagagtt

SEQ ID NO: 53011 - DNA, 240 bp, Glycine max
gtcccccaaaaatgaagagcaccatcttctaatgctctctttcacttctgtgccttcaccacctcatacctaccttcagccatcgctgatttcgcgctcgctaatgacggtaaccctcttgcaaaatgtgtggcacatattatatcttgtcagacataacagcatttggtggactaagagcagccccaacggggcatgatagctgccctctcactgtggtgcaatctcgcactgtgctcg

SEQ ID NO: 53012 - DNA, 232 bp, Glycine max
cctcgctctatttctcaatctctgtgtttacggctgacgattccgcacgagtgcaattcttcgaatctcgcaaagtttaagtcatcatgggtatggtccaggttcacatgaacattgtcgtcattggacacgtcgactctgggaagtcaactaccaccggtcacttgatctacaagctcggaggtattgacaagcgtgtgattgagatgttcgagaaggcggctaccgagat

SEQ ID NO: 53013 - DNA, 249 bp, Glycine max
cttaattattaacacttccgtagttcaatatggggaagacctacagtctctcgctttcttccctttgcttgcgagtcttgtcgaatgcatactttgctattagctccaacaagctctacgagtgcgaactccagaacctcaacgcgctagctacccgtctaacgcgctgagctccgaaggtggtatgactcaaacatggaactctcaatactctgaggctgaaatgcgccggtgtcactgtttccaaac

SEQ ID NO: 53014 - DNA, 237 bp, Glycine max
cgtacggatgccttcttcccatggtgagtgagaacagcttctgaagctgaatctacgcagctctaattgaacaggtattcttccaacagaatttggggatcttagatgtgttacggaaattggtctttcacataatcaactcgctggcgtgagtcctgatagacttaggcagctgcaaaccgtgagatccttgagacttgaggataacaaattgactggcgatgtggcatcactttc

SEQ ID NO: 53015 - DNA, 258 bp, Glycine max
cgagagcaggcacagcaaaatgagtgccagatccaaaagctgaatgccctcaaaccggataaccgtatagagtcggaaggtgggttcattgagacctggaaccctaacaacaagccattccagtgtgccggtgttgccctctctcgctgcacccttaaccgcaatgcccttcgtagaccttcctacaccaacggtccccaggaaatctacatacaacaaggtaatggtatttttggcatgatattcccgggttgtcct

SEQ ID NO: 53016 - DNA, 242 bp, Glycine max
aggatcgagcagattgaggcctcgattagatcctcaatacaatgaggttcaggctcagatggaaacaaattagtcaatattgcctctagatgatgttgaaactcccggaggttccatgtaggatctaacaatttctcactcgaaaattgtagttcccaaagacacagttctgaggaaccattctgcgtagtgatctattggctaattttcttgacagatggtcattctagggctagtgttga

SEQ ID NO: 53017 - DNA, 226 bp, Glycine max
tggattttgattctcgttatctgtgattgttgactcggcagatgcagatcttcgtcaagaacctcaccggcaagagcatcaccctatatgtggaaagctctgacaccatcgtcaacgtcaaggtcaagatccacgacaaggatggtatccccccggaccagcaatgtctcattttcgccggaaagctactttgcagaggtcgtacccttgctgagtataacattca

SEQ ID NO: 53018 - DNA, 200 bp, Glycine max
tgaatatgctagtgtagcttattaactaatttccgatcatatgattagagcaccgttcccattactgttgctacagattgttgtcctggcttcagatgctgtctcacttggcattgctcactgggccaaagagaaccccaaacagaacaggagtctccagagttgcaatatcgagataggatcgtaccggcaacaagcat

SEQ ID NO: 53019 - DNA, 254 bp, Glycine max
agagagcaggcacagcaaaatgagtgccagatccaaaagctgaatgccctcaaaccggataaccgtatagagtcggaaggtgggttcattgagacctggaaccctaacaacaagccattccagtgtgccggtgttgccctctctcgctgcacccttaaccgcaatgcccttcgtagaccttcctacaccaacggtccccaggaaatctacatacaacaaggtaatggtatttttggcatgatattcccgggttg

SEQ ID NO: 53020 - DNA, 258 bp, Glycine max
catggccaagctagttttttccctttgttttctgcttttcagtggctgctgcttcgctttcagttccagagagcagcctcagcaaaacgagtgcaagatctataacttcagagagggtgatttgatcgcagtgcctactggtgttgcatggtggatgtacaacaatgaagacactcctgttgttgccgtttctattattgacaccaacagcttggagaaccagctcgaccagatgcctaggagattctatcttgctgg

SEQ ID NO: 53021 - DNA, 268 bp, Glycine max
tgaaaaggaagatcgagaaaaacccaaaaagattgatgccagattgagacagagaatagatcctcaatacaatgaggttcaggctcagatggaaacagatttgtttaaattgtctacttaatgatgttgaaactcctaaaggttccatgtcggatcttaaaatttctcaatctaaaattgcacttcgcaaaaacacagttggaggaaccatcctgcgtgatgatctattggcaaattgtttgacagagggcaattttagagccagtgt

SEQ ID NO: 53022 - DNA, 209 bp, Glycine max
tatagtacgacggcagatacaaattctggactacacacgagaaaaatctggctttgacagaagagggaaagatggaagtgattagagatagaggcattcctactgatcttcttacaaagcgagctcatgaatttcaaaaacatgttgctcatgaaagcgtcaaggagcaaattcgtgctgtcgaaaagttctattctactaaggtgaat

SEQ ID NO: 53023 - DNA, 106 bp, Glycine max
cgaaaatctcagattaataacactggcgatacccgtgaacaagcctggtagagttgagagtgtctgcctatctaggattgttgagcgtcagtgctagataggaaga

SEQ ID NO: 53024 - DNA, 258 bp, Glycine max
ctcaaacctggggttgaatatgatgagagtgattttactaaaaatcagcgatatttgctggaaacttggtttcatgatcattatgttgtagaccaaacttttgagtcttatgctgatctgctggcacattgttggtactaagtgggagagacatgttaaggagcaagagtcaaatctgtctcaaataaagcgcaagataagtgaaagtggtcattggaataactgtgcacagcttatggatttggctgtctcagggat

SEQ ID NO: 53025 - DNA, 276 bp, Glycine max
tccgcatcctgatgatagagttgagtacgagctatggaccaatagcaacgatgagtgtgggccaaagtgtgacagtctaattaattttctgaaggagtttaaaggggtagctcagcagcttgagaagacatggttcactcaatttacccctcgctatataacttggttctgtcctgaagcatttctcttgagcagacagtgcaaatctcattgcataaacaatggactgtactgtgctcctgatcctgcagcaagatttcagtagagggtatgatg

SEQ ID NO: 53026 - DNA, 257 bp, Glycine max
tgaccaagttcacaatcctcctcatctctcttctcttctgcatcgcccacacttgcagcgcctccaaatggcagcaccagcaagatagctgccgcaagcagctccagggggtgaacctcacgccctgcgagaagcacatcatggagaagatccaaggccgcggcgatgacgatgatgatgatgacgacgacaatcacattctcaggcacatgcggggaagaatcactacataaggaggacgaaggaaagacgagacg

SEQ ID NO: 53027 - DNA, 233 bp, Glycine max
cggctcgagccagttgcttttgatgatctggatcttgctcttggcattctgtgttatgatgaacactatgactgcaggttttattgcaatgtatgccactcttgctagcagctacgtggactgctgcttgattccagagtggcgctgctacattggaggaaagggtgtacttattccattgatccacatactgctcaaatgcactgcctatatggtcatagtcatagcttagg

SEQ ID NO: 53028 - DNA, 279 bp, Glycine max
ctcatattcattgcatttttggatggactattcgttgagagagctagaaggaaagcaagcacatgactctctattcctagagaaaatgaagagtttcattatcacagacgtattactaactagtgagagaatgtgtgtgggtggccagggccattggatttggggagaagggctttcagggccttgcaacagcagcatatctcaaagagaaaggattgccaagcctaatcttggaaagatccaactgcatagcatccttgtggcaactcaagacctatg

SEQ ID NO: 53029 - DNA, 261 bp, Glycine max
caaaaatatgccactcccatgatgcccctagatgaagaaattctttccaaggttgcgcaagatatggttgaggaatggtttgattgtgttgatgaggaggattcctttgaggaagtttctttaagtgcagaactcaatggtgttgagggtttggactacatggaaagaattcctcttgcaacatctgagggttttcctcaggtgctttcacgcaaaaatggtgaaaaaggtaagaggagattcgtatctggggatggtgaa

SEQ ID NO: 53030 - DNA, 260 bp, Glycine max
cggctcgagtggggaagcccttcactctctctctttcttccctttgcttgctactcttgtcgagtgcatgctttgctattagctccagcaagctcaacgagtgccaactcaacaacctcaaggcgttggaaacccgccaaccgcgttgagtccgaaggtggtttgattcaaacatggaactctcaacaccctgagttgaaatgcgccggggtcactgtttccaaactcaccctcaaccgcaatggcctccacttgccatc

SEQ ID NO: 53031 - DNA, 254 bp, Glycine max
tgaacttaacttgtgctcagagattgttaaagcttgtgattctgcttcagcagattctggcaaagtgacatttatctgtgggcgtgctggtgtttgtgctcttggtgctgtgatagctaagcatactggtgatgaaagattacttgactattacctgaggcaattcaaagagattgcgatacctcgcgagtctccctatgagctattgtatggcagagcaggttacttatgggcttgttcattcttaaacaagc

SEQ ID NO: 53032 - DNA, 264 bp, Glycine max
gtccttaaacactcatcagtcatcaccatggccaagctagttttttccctgtgttttctgcttttcaatggctgctgcttcgcttcagttccagagagcagcctcagcaaaacgagtgccagatccaaaaactcaatgccctcaaaccggataaccgtatagagtcagaaggagggctcattgagacatggaaccctaacagcaagccattccaatgtgccggtgttgccttctctggctgaacctgaaaccgcaacgcccttg

SEQ ID NO: 53033 - DNA, 257 bp, Glycine max
gtataccttaataaataatttaagatactatgatgagagcacggttcccattactgttgctgggacttgttttcctggcttcagtatctgtctcatttggcattgcttactgtggaaaaagagaaccccaaacacaacaagtgtctccagagttgcaatagcgagagagactcgtacaggaaccaagcatgccacgctcgttgcaacctccttaaggtggagaaagaagaatgtgaagaaggtgaaactccacgacc

SEQ ID NO: 53034 - DNA, 243 bp, Glycine max
cccccaataatgaagagcaccatcttctttgctctcttactcattagtgccttcaccacctcatacctaccttcagccatcgcttatttcgtgctctgataatgacggtaaccctcttgaaaatggatgcacatattatatcatgtcagacatgacagcatttggtggaataagatcagcccctacgggatattagagattccctctcactgtggtgcaatctcgcattgagctcgacaaagg

SEQ ID NO: 53035 - DNA, 248 bp, Glycine max
atcgagcgaatcggctcgagattgctggtggtggtggcatcacaccagccagatccgacaactacataacttggggacttgtgggaatcttcttcaatttctacgtttacagcaagttcaaggcatggtgggctagacacacttacatcctctcagctgctttagatgctggtgttgctttcatgggtgtcattctctattttgcccttcaaaattatggtgtttttggtccaatatggtggggtcaa

SEQ ID NO: 53036 - DNA, 250 bp, Glycine max
caggaaccacatactatgtggtcaaccctgacaacaacgaaaatctcagattaataacactcgccatacccgttaacaagcctgggcgatttgagagtttcttcctatctagcactgaagctcaacaatcctacttgcaaggattcagcaggaacattttagaggcctcctacgataccaaattcgaggagataaacaaggttctgttgagtagagaggaagggcagcagcaaggggagcagaggctgca

SEQ ID NO: 53037 - DNA, 245 bp, Glycine max
gggaaaagaaaattggccttacaatccccagagtgaccatctcagaagatgatcttctggctgtagcagcagaaaattgcataccgcgaagtattgtggcatctttcactcatgacatattcatcaaaggttgtcaagttaacttcaacatagatggacttggtgatgttgagattagcactctctatcctgatgaagcattcagaagcttggaggattgcttcgagggctttgctcttatgatc

SEQ ID NO: 53038 - DNA, 242 bp, Glycine max
attttcctttttaagggatgctagtaatggttgtgttgatgttggtaatgttgcttcagcattgactacatcaagtgtgctcgaggcgcaaagccgaaaacccaacagatatgaggtctctcaatataggtatcgcaatgtgccgataaagcgcagagcgtgggttgagggccaaatgtcttttgatcaatcagtggtagcaattatgtcaaaatgtaaagccagtatgagaatgggaaaca

SEQ ID NO: 53039 - DNA, 199 bp, Glycine max
ctctaaccgtgtaattttaataaaccgcgatcacaggttgccgcaccttaaaaccggttacaaaagcaatcgttacttgatttcaagaatttctcaatttcttcctacttctttgtgtacgatttcttaagggaaagaaaatcactctctgtgctggtcacatagttcgtgtatcattttcttttccactcctagttta

SEQ ID NO: 53040 - DNA, 260 bp, Glycine max
gttggtttatctttcaagattggggtggttatcccaatgtacccgtaatatttccatggcttcagctgatcaatctggattggctagcaataataagggaagtgaacaatcagctactaaacagaaaaaggaagcttcaccagaggaatgcgatgaagctgttgaaggcttgagcagcataaaagcaaaagctaaggctaaacaaatgcaagaaccacataagagagcggattctattataaagaaattatgggctaaga

SEQ ID NO: 53041 - DNA, 177 bp, Glycine max
atgaatttgaaggagggattccacccgagtttggacatatcaccaagctgaagtatcttgatttagcagaaggtaatcttggtgttgaaattccaactgagttgggaaggctcaaattgttgaatacagttttcttgtataaaaacaaatttgaaggcaagattccaccagcaattg

SEQ ID NO: 53042 - DNA, 137 bp, Glycine max
gttgtggtcaacgctacgtcaggtctgaatttctttgctatgggtattaatgccgacaacaaccataggaacttcctggcaggttcgcaacacaatgtgataagccaggtacctagtcgagtgcaggagcttgcatt

SEQ ID NO: 53043 - DNA, 229 bp, Glycine max
agctgatgtgcccaccatagcacaaattgaaggatttcattcaatgcagaggattatgaatgctcctgattcaaatgataatattgatcttttgttgagcatcgatttgttgggtcttcagggtgcaggcaaggccttcccaaataagattgtgtttaatgataaattgaagaatttcattcgatgcagaggattatgaatgctcctgattcaaatgataatattgatc

SEQ ID NO: 53044 - DNA, 260 bp, Glycine max
aacgttagcgcctccgaacataccaccaacaaagacgtcaacaacaacgtagaaaacggcgagagcagccgcagattcgagtgccattgttgttgcagaaacttccccacttcccaggccttaggcgggcaccaaaacgcgcacaaacgagagcgccacacgcgaaacgacaccttcaaagtaccctgatctccgatgcaaacgcgtatagcttcgtgaactacaggttcggttccacggcaatgtctaattacactgag

SEQ ID NO: 53045 - DNA, 260 bp, Glycine max
ggctggaaagggttctgcaactttgtcaatggcctatgctggtgccctttttgctgatgcttgcctcaagggcctcaatggagtcccagatgttgtcgagtgctctttcgtgcaatccactgttactgaacttcccttctttggttccaaggtgaggcttgggacggttggtgtggaggaagttctgggcttggggcacctctcagattttgagcaactgggcctcgaaagccttaagcctgaactcgaatcatcaattg

SEQ ID NO: 53046 - DNA, 227 bp, Glycine max
gcccattccctgtggatcttgttcgggaatttggacgtcagcttttggaatctgtagcatgtctggggattattcttggccttcagtttatttttcatgtttcattcttaagtctcttgcttccaaaacaagccatggcttttcccttggcctgctttctttgtccagggatgcagtgtatcttggctgtgtctgcttatttaattgtttcttgtactttatcatat

SEQ ID NO: 53047 - DNA, 214 bp, Glycine max
cccagagaaaaacccccagcttcgggacttggatatcttcctcagtattgtggatatgaacgagggagctcttcttctaccacacttcaattcaaaggcgatagtgatactggtaattaatgaaggagatgcaaacattgaacttgttggcctaaaagaacaacaacaggagcagcaacaggaagagcaactttggaagtgcggaaatatagag

SEQ ID NO: 53048 - DNA, 267 bp, Glycine max
ctctcgctcttgcaattagtcctcttccaacaatccgcacctaaactctagggttctgacatggacactggtggaaagatcaagaagggcgccggaggaagaaagggcggcggcccaaagaagaagccggtttcaaggtccgtcaaggccggtctccaattccccgtcggaagaattggccgttatttgaagaaaggaaggtacgcccagcgtgtcggtaccggtgctcccgtttacttggccgcagttctcgagtactagctgctg

SEQ ID NO: 53049 - DNA, 243 bp, Glycine max
cagtcaggatgaagccggtgctgcggccatcaagacagttgagctggatgcagctcttggaggacgtgctgttcagtatcgtgaagtacaaggccatgaaactgaaaagtttctgtcttatttcaaaccatgtattatcccacaagaaggtggagttgcttctggtttcaaacatcctgaggctgaaaaacataagacacggttgtttgtatgcagagggaaacatgttgtacatgtcaaaga

SEQ ID NO: 53050 - DNA, 251 bp, Glycine max
acggtccttatctatcgtattaacaatcgaaaaatggtcgaaagaaaaaatccctatttgacaaggcttcttactatacctatgaattccattggacccaaaaatgatacattggaagaatcatctgagtcttccaatatcaataggttgattgttccgctcctgtatcttccaaaaggaaaaaagatctctgagagctatttcctggatccgaaagagagtactcgggttctcccaataactaaaaagta

SEQ ID NO: 53051 - DNA, 249 bp, Glycine max
tctcgagtccgattcggctcgagaagcccactagaactattgatgacaaggttgttgtagaatctgtcagatctaatctgacttgcaggtttggagtacctaaagcaatcgttagtgatcaaggaacccatttttgcaacaaatcaatgcatgccatgcttaaaaagtacggggttgtacacagggtatccacaccataccacctccaaaccaatggacagacagaaatttctaacaggtgatcaagag

SEQ ID NO: 53052 - DNA, 265 bp, Glycine max
tgtcaagacagttccagtaatagtactacacagttttggaggactgttccaaagggaacttttgtgtatgtggatcctgaattccttgcttctggtgaacttacaccaaagtcagatgtttattcatttggaatcattttattgagattgatgactgggaaaccagccctgggaataataaaggaagtgcaatatgcattagatgctggaaagttgaaatccatcttggatccttggctggagaatggccatttatgctggctga

SEQ ID NO: 53053 - DNA, 267 bp, Glycine max
gggggctggaatgagtgagttaaagcagtggaatgaattgtatggggaaggaggttcaaggaagcaagaacagttatcttatttcctatgaaaattaccgagggaagaaagaatttgtagctgcatccttctagttgctctttttctatacgagacatccatggggcaatcaggagtttgccagtgatataaaatttgtgtatgatttccagtagtatctagttgcttcaatttaatactcgattaaatgtattagtcacgtttggt

SEQ ID NO: 53054 - DNA, 261 bp, Glycine max
attgaagctcgtgtgaaggaccttctttctcgcatgactctgagggagaagattggtcagatgacccaaattgagcgcactgttgccacctcttctgccattagagatctctccattgggagcatactcagttctggtggcagtgcaccatttgaaaatgcactgtcgtctgattgggctgatatggtggatggctttcaaaaatcagctcttcagtcgcgactggaatacctctcatctatgggattgatgcagttcatg

SEQ ID NO: 53055 - DNA, 264 bp, Glycine max
tctcgagccgattcggctcggtagattgagacaaagaatagacactcaatacaatgaggttccaggctcagatggaaacaaatttgtttaaattgtctcttgatgatgttgaaactcctaaaggttccatgttggatcttaaaatttctcaatctaaaattgcacttcccaagaacacagttggaggaaccattctgcgtagtgatctatatggcaactttttgacagagggattttagagccagtgttgatttgcagcgcact

SEQ ID NO: 53056 - DNA, 255 bp, Glycine max
gcggagacatcagaagacctgcttgaatggaagacagctcttgataaagccctcacacaggcaccaagtgctgcccttgttatgggacacaatgggatttttcggagtgatgcaagtgcttctatcgaagggtctttccatcaatggagggacaagcgtccaattaagtctctggttgttggaagaccaattctgctagcactagaagatattgatggaggccatctttccttgaaaaagctcttcggtttctag

SEQ ID NO: 53057 - DNA, 253 bp, Glycine max
tgcagaccgagctagctagctagcaagcaagcacagagatggaggcaaagcgaggccatgccctcatgtgcttggcacgtgtttcactcttcctctgcgctctaaccctatccgctgctcacggaagcacacggttcaagacatcgcgagaaagttgaaactcggggacaacgagcttctgcgcacggagaagaagttcaaggttttcatggagaattacgggaggagctactccacagaggaggagtatttg

SEQ ID NO: 53058 - DNA, 126 bp, Glycine max
attaagacttccttagttcaatatggggtagtccctcactctctctctcactgccctttagttgctactacttgtcgagtgaatgatctggtattagctcgagtaagctcaacgtgtgtcaactca

SEQ ID NO: 53059 - DNA, 140 bp, Glycine max
ggcatatatactctgcatccaagcagattagtgctgcaatatctccagatcaaaataccactgcctttaaagaggtagcaattatccgtcacccgcgtgttggtgaatatgcgtttggatttattacatcaactgttact

SEQ ID NO: 53060 - DNA, 234 bp, Glycine max
tttctaatctcattctccttctgttcaaacactctctctcatggcatcagataagaagattaggatcggcatcaacgggtttggaaggattggccgtttggtggccagggttgcccttcaaaggaatgatgttgaacttgttgctgtcaacgatcctttcatcaccactgattacatgacatacatgttcaagtacgacaccgttcatggccagtggaagcattttgatgtgaa

SEQ ID NO: 53061 - DNA, 257 bp, Glycine max
gttctagccaagtcattgctcaatactaccaactgattcggcttggttttgagggatatagagacgtgtcggaaaactgcatggacaacatgctggtgctgagagagggactcgagaagacagggccgataccagttgtgtgcaaaagccagtggtgtgccctgagtgggctttgacactgaaaggtccacgaccgactttgtacgagattccggatctcaagacttcctgaggcgctttgggtgggatagagccag

SEQ ID NO: 53062 - DNA, 216 bp, Glycine max
tactcgagccgaatcggctcgaagggaaaagcagaatcccagtcacaataagtgcctctgaagatccaatagcgataaagactactacaggaaccaagcatgccacgctcgttagaacctccataaggtggactcagaacaagaatgcgaaaaggttcaattcaggatcacgacataataccggagagggaagtcagcaacacgtgagaaggagga

SEQ ID NO: 53063 - DNA, 243 bp, Glycine max
agacccccaaaaatgcagagcgccatcttctatgctctctttctctatcgtgactagagcacctcatagctacctgcagatgtcgctgcgtgcgtgctcgataatgaaagtaaccctcttgataatggtcgcacatatcgtaacttgtcagacatagcagcatttcgatggctaagagcagccccaacgggacatgaaagatgccctctcactgtggtgcaatctcgcaatgagctcgacaaa

SEQ ID NO: 53064 - DNA, 222 bp, Glycine max
aatctgcaaaaaagatgtttggagggttgagtgtggtatcccttctggatttccactcactgttatctgcaatagcattttcaatgagatgcttatcagatatagttatgaaagttgttgcgtcagctaaggctctagtatgttctcagtctgtaaaatttattcttgtggttatgagatgatattatagtgtcatgagtatgtagcatatgtagtgtctaa

SEQ ID NO: 53065 - DNA, 286 bp, Glycine max
cccaatcagtggacccacccagaagatccagtgctggtgccatctccagcccactaattggggcagcactagcagcactggtctatgaatatgttgtgatcccaactgaaccccctcatcaacaccaacctttggctcctgaagattactagttgcttccactagttgtatcaaaatatgagtgttattaatagctttttgtgtatctaaatataagggtatgcttgtgttttctctagtgtttgcaccaccctcttgcttgagtggccactaggctcctgcatgt

SEQ ID NO: 53066 - DNA, 201 bp, Glycine max
ctcgagccgctctcatcactacctctgcatttttctctcgctctctgccttccatcactcacgtcatgtccctgccccagatagtagaagatggccgacgatgacgatattcaacctcttgtctgtgacaatggaacaggtctggctaaggctagttttgctggagatgatgcgccacgtgctgtgtttcccagcattcta

SEQ ID NO: 53067 - DNA, 279 bp, Glycine max
cattgccaaggcattggcaaggccaccctcttacacaaccaagtactttggttgcgaacttggggcacagtctaaatttgacgagaaagttgggacttctcatgttaatggggcacatgacactgcaaaacttgcagctcttctgagagatctttatcaagaaatacgtccagtgttatggttgtggaaaccctgaaactgagatattgattactaagaaccaaatgatccagctgaaatacgctgcttgtggttttgtgtcagatgtggatatgagag

SEQ ID NO: 53068 - DNA, 268 bp, Glycine max
aaacaaggttctgtttagtagagaggaagggcagcagcaaggggagcagaggctgcaagagagcgtgattgtggaaatctcgaaggaacagattcgggcactgagcaaacgtgccaaatctagttcaaggaaaaccatttcttctgaagataaaccttttaacttgagaagccgcgaccccatctactccaacaagcttggcaagttctttgagatcaccccagagaaaaacccccagcttcgggacttggatatcttcctcagtatt

SEQ ID NO: 53069 - DNA, 262 bp, Glycine max
gacactcctgttgttgccgtttctattattgacaccaacagcttggagaaccagctcgaccagatgcctaggagattctatcttgctgggaaccaagagcaagagtttctaaaatatcagcaagagcaaggaggtcatcaaagccagaaaggaaagcatcagcaagaagaagaaaacgaaggaggcagcatattgagtggcttcaccctggaattcttggaacatgcattcagcgtggacaagcagatagcgaaaaacctac

SEQ ID NO: 53070 - DNA, 252 bp, Glycine max
tcctacgataccaaattcgaggagataaacaaggttctgtttagtagagaggaagggcagcagcaaggggagcagaggctgcaagagagcgtgattgtggaaatctcgaaggaacagattcgggcactgagcaaacgtgccaaatctagttcaaggaaaaccatttcttctgaagataaaccttttaactaacaaagccgcgaccccatctactccaacaagctaggcaagttctttgagatcaccccagag

SEQ ID NO: 53071 - DNA, 258 bp, Glycine max
caggataaagcatttgaaaatgccttggcaattcaccctgaggatgcttcagaccggtgggagaagattgcagctgatgtaccagggaaaaccttggaagagattaaacaccactatgagctcttggttgaagatgttagccagatcgaatccggttatgtgcctttaccatcttataattcttctccagagggctcaacaagtcatgctagtgaagaaggagctggcaagaagggaggccactcttggaatagtaat

SEQ ID NO: 53072 - DNA, 288 bp, Glycine max
gctcttgctatggtgcatagagatctactgcatcctggacttgttagtcttgttgtgttccgggacgtcttcctcgttggtggcgcagtatttctaagagcaaatagcttgggttggaagtgggaaagctggtttgatttttttaaccttgatgggacctgccgccaaaaggttgaaccactctttctaagcaaggtgaatacagtgttccaattagcactagttgctgcagctcttcttcaaccagagtttggaacccaggaaactcaattatatgttacttatttg

SEQ ID NO: 53073 - DNA, 287 bp, Glycine max
tatcagtttcattcctgaatcaattagtttcttcactttcactttctaactgggaggatcaaagtgtgtgtctttgtcctcttggtgttgtttcttcttcttcttcaagtgtgcttcataaagcagtaggatttggaagcaacaaaagagttgcaaagtgggtagtgatcatggcagctgtaaagcctgaggagataagccacccaccaatggaccaacttcaaggcttagagtattgtatagattcaaacccatcttgggctgagacaatagctttgggtttccag

SEQ ID NO: 53074 - DNA, 288 bp, Glycine max
ataaaattcttccaccaagttatgggtagaccttgtgttgcttcttttctccctcttaggtctctcttctagttccagcatatcaactcatcgttccatattggaccttgacctaaccaagtttaccacacagaaacaggtgtcttcactgttccaactatggaagagtgagcatggacgtgtctaccataaccacgaagaagaggcaaagagacttgagattttcaagaataacttgaactatatcagggacatgaatgcaaacagaaaatcaccccattctcatcg

SEQ ID NO: 53075 - DNA, 272 bp, Glycine max
ccaccaccgactactatcccagtgtcagagatgatgaagaaggtgaaggaatttctaaaatacgagtgcccagacagaaacacatccctgtttccaagtcccaactcctagacgccatcatcctctctatccaagatgatattgatgcccatcactttcgtcttctcacctcatgcttagactctatacttcatgccgagtataaaactatcttagaggagatgcgttccgattatcaacttacggattcactccagcaacttgtgtccaat

SEQ ID NO: 53076 - DNA, 272 bp, Glycine max
cagcaggtgagtgagttagtgagcaatagttgtgagcgatgagaatggctcccaagggttgtaatcttccgtgctgtgttctgcgtctcagcactgtcactgagtcgttgtcttgcggaggatcatggactcattatgatacttctacgctgaatcatgccctcaggtcgtagacatcatcatataacaggtcaagctgctctacaagcggcacaagaacagtgctttcgcctgggtcagaaacatcttccaggtgtgtgctgtgcagagtt

SEQ ID NO: 53077 - DNA, 233 bp, Glycine max
caattccttcacttgcagcactgtagcatcatcatcttcattgcaaaaccctagacttcaccttcaaccatgaccacacaagtaccacaacacagtgtccaagtccacactacaacacgcctaaacgaagctggcgtcgtccaccccggagcccgtttcgaaccgaagcgttatgaagcaggcgtctaagcgccatccatataccattccgagagaggtccaacgaattccca

SEQ ID NO: 53078 - DNA, 259 bp, Glycine max
caaattttaataaaccgcgatcacaggttgccgcaccttaaaaccggaaacaaaagcaatcgttacttgatttcaagaatttctcaattgcttcctacttctttgtgtacgatttcttaaggagaaagaaaatcactctctgtgctggtcacagacttcgtcaatcattttcttgtccactcctagtttatttactgaacactctcctatatgatataggacttcgtgtcagatttagactaattctgtttcattctca

SEQ ID NO: 53079 - DNA, 265 bp, Glycine max
ctatggccaagctagttttgtcgctattgttttctgcttatcagtagctgctgcttcgctttcagatccagagagtagcctacagtcaaacgagtgccagatctacaaactcaatgacctcaaaccgtataaccgtatagagtcagaaggacggctcattgagacatggaacgctaactacaagccattccagtgtgccgttgatgcactatctcgctgcacgctcaaccgcttcgcacttcgtagacgttcttacaggaatggt

SEQ ID NO: 53080 - DNA, 268 bp, Glycine max
ctctaccaatctttaagttcaaattgaagaacaatgaaaatggtgatgaccaggatgccaattcagctatagatgaaggtggaattttggctgcagggacagaaaaggagcgaatgatttcaggagaagatgctgtttgttgcatttgcttagcaaaatatgcagatgatgacgagcttagagagttaccttgctctcacgtttttcacgtcgaatgtgttgacaaatggttaaagataaatgcaacctgccctctctgtaaaaatga

SEQ ID NO: 53081 - DNA, 245 bp, Glycine max
gttacagtccaaattgtcacttctgagaaaagctattggcatgtgtacgatcctgataaatttcaaatgtttgataacagtgaaatcgggatgtatacgaatccagctttggaggtcatcccacattctgcttgggaccttttctgctgggacagtgagaaaaccttgccaaataagtattctggtgaattgctttcctgtaaattggacactgatacgggacaatattatccagaatgggctcc

SEQ ID NO: 53082 - DNA, 240 bp, Glycine max
agatgttaaggaatggttgtggtgttggtgggaatttgagtggaagagtaaaagtgagggctgaggatgttgttgaagctgtgactcttgctgctagtaacaaggcttttgaggttgtgtattacccaagagccagtactcctgagttttgtgttaaggcttcttctgtgggggctgctatgaggattcagtggtgttccgggatgaggttcaagatggcctttgagactgaggatgcta

SEQ ID NO: 53083 - DNA, 251 bp, Glycine max
ctcattgagacatggaaccctaacaacaagccattccagtgtgccggtgttgccctctctcgctgcaccctcaaccgcaacgcccttcgtagaccttcctacaccaacggtccccaggaaatctacatccaacaaggtaagggtatttttggcatgatatacccgggttgtcctagcacatttgaagagcctcaacaacctcaacaaagaggacaaagcagcagaccacaagaccgtcaccagaagatcta

SEQ ID NO: 53084 - DNA, 224 bp, Glycine max
gttctatatgctagtattgcttaatgattagtttaagatactatgatgcgagtacgggtcccattactgttgctgggacttgttttcctgtcttcagtttctgtctcatctggcattgcttattgagataaagagaactccagacacaataagttcctccacagatgttatagcgatatggactcgtacaggatctaatcatgcgacgctcgttgctacctcct

SEQ ID NO: 53085 - DNA, 239 bp, Glycine max
cttggcggaaatgcaaaattagcattggtttgtgctatttccccagcactaagttgtaagagtgaaactcttagtacattgagatttgcacaacgtgtaaaggctatcaagaataaagcagttgtcaatgaagtaatgcacgatgatgtgaatcaattacgagacgtgatatgccaactcagggatgaactgcatcgaattaaacgaaagggttacagtccaagtgatggaagtcgggg

SEQ ID NO: 53086 - DNA, 234 bp, Glycine max
gttcaatatcctagtataccttaataaataatttaagatactatgatgagagcacggttcccattactgttgctgggacttgttttcctggcttcagtttctgtctcatttggcattgcttactgggaaaaagagaaccccaaacacaacaagtgtctccagagttgcaatagcgagagagactcgtacaggaaagaagcatgccacgctcgttgcaacctccttaaggtggag

SEQ ID NO: 53087 - DNA, 271 bp, Glycine max
cataaagatcacacagggtatcaaacttccattcctccctttcaacggcaacaaaaaaatgcgtaacaataatttcactgtctcatcaatgcatggtgacatgcctcagaaagaaagagatgctattatgggagaatttcgtgctggaacaacccgtgtactaataacaactgatgtttgggcccgtggtcttgatgtacagcaggtttctctagttatcaattatgaccttccaaataatcgtgagctttacattcatcgaattggccgt

SEQ ID NO: 53088 - DNA, 270 bp, Glycine max
gtacactggaatttttccatgtatccccccaacaatcataatgctacaatttgtcaacttgacttcttgtttactttatttagcccctattttcttgaggtgtttattgtaaactgagaagtagacaatcttaaaattgatccttattgtgatagattagagtctaccaaaggatcctacgcaaaagaatggataaaatgggaaaaacagttacgggatattctttgtggaaatgctgagtattttaattctattcaggttccatttgag

SEQ ID NO: 53089 - DNA, 270 bp, Glycine max
cactcctgttgttgccgtttctattattgacaccaacagcttggagaaccagctcgaccagatgcctaggagattctatcttgctgggaaccaagagcaagagtttctaaaatatcagcagcagcagcaaggaggttcccaaagccagaaaggaaagcaacaagaagaagaaaacgaaggaagcaacatattgagtggcttcgcccctgaattcttgaaagaagcgttcggcgtgaacatgcagatagtgagaaacctacaaggtgagaa

SEQ ID NO: 53090 - DNA, 223 bp, Glycine max
ctctccattgtctttgaacactcattaccatggccaagcttgttctttcccttaggcaccttcttatcagtggctgcttcgctctgatagagcaggcacagcaaaatgagtgccagatccaaaagctgaatgccctccaaaccggataaccgtatatagtcggaaggtgggttcattgagccctggaaccctaacaacaagctattccagtgtgccggtgttg

SEQ ID NO: 53091 - DNA, 270 bp, Glycine max
atgagggactcagagcaaccctcagatgccaaaatggcatgatggcgagacagcatccttgcaatggggcggtatccgtctctatcattaaggttgtaatatccagcagtaagctccgcagctcgtctatcaaaagaggaggcaaactcaattgctcagaaacctggtgtggtgtctgttttcctgaccccattctgaagctccacactacacgttcatgggatttcctcaaaagccaaactcgtgtcaatatcgacaccaaaccaaata

SEQ ID NO: 53092 - DNA, 266 bp, Glycine max
aacacaacaagtgtctccagagttgcaatagcgagagagactcgtacaggaaccaagcatgccacgctcgttgcaacctccttaaggtggagaaagaagaatgtgaagaaggtgaaattccacgaccacgaccacgaccacaacacccggagagggaacctcagcaacccggtgagaagaggaagacgaagatgagcaaccacgtccaatcccattcccacgcccacaacctcgtcaagaagaagagcacgagcagagagaggaac

SEQ ID NO: 53093 - DNA, 267 bp, Glycine max
aatcgttggtgaagaacattatgagactgcgcaaagagttaaacaaactttacaacgttacaaagaacttcaagacattatagctatccttggcttggacgaattatccgaagaagatcgcttaaccgtagcaagagcacgaaaaattgagcgtttcttatcacaaccttttttcgtagcaaagtatttaccggtacaccgcgcaactacgtcagtctagcagaatcaatttaaaccctctaattgtttctgctagactaacatatt

SEQ ID NO: 53094 - DNA, 225 bp, Glycine max
gattggaaaaagtttcctctacaaaagcacaatttgttagtggaaaaaccttcagatatgatataattggtgctggttcacattcttcaggagattttcctgaaaaggtagatcaagaagaacccaaacagattgataccagattgagacaaagaatagatcctgcatacaatgagggtcaggctcagatggcaacaagttgtctaacttgtctctggatgatgt

SEQ ID NO: 53095 - DNA, 187 bp, Glycine max
atttgaaattttgatcaaccgcgatcacaggttgcagcaccttaaaaacggcaacaaaagcaatcgttacttgcatttcaagaatctctcaatttcttcctacttctttgtgtacgatttcttaagggacagaaaatcactctctgtgctggccacagacttcgtgaatcattttcttttccacaca

SEQ ID NO: 53096 - DNA, 217 bp, Glycine max
gaattagacaaacatgttgctcatgaaagcctcaaggatcaaattcctgctgttgacaagttgtattctactaaggttaataagtttgcaaaaattatgaaccttagacaaagtgttgttggtgatcttaaacttcttactgatgggaagttgtatgagggtaagcatattcctgtatctaatattagtgcaggggaaaatcatgtagttcaaatac

SEQ ID NO: 53097 - DNA, 252 bp, Glycine max
gggattatggtgaactagatggggatagttggactgatcaagaaactttgctgcttcttgaagcaatggagatttacaatgagaattggaatgaaattgctgagcatgttggtaccaagtcaaaagcacaatgcattcttcattttctccgtctacccatggaagatggaaaattggaaaatattaacgttccaagcatgtctttgtcatccaatgcaataaatagagatcatagtggaagactgcattgtt

SEQ ID NO: 53098 - DNA, 203 bp, Glycine max
tgacagtggcatcgagcatccgacgtctggctgatgccatggagcaaagcaaatgctcatttgatgcaagagagctattacatgctgtgatggagatagatgggatggaagagggtaaacagatgtatgcattcgaatatttaaatgctgatcctgtcaaagccagagccttcctcacctagagtgctaggatgagaagacat

SEQ ID NO: 53099 - DNA, 233 bp, Glycine max
ctcgagccgattcggctcgaggaggatgttatacagactggtgtggtttctcgatcggtgggactacgttcaatcgaaagcagcttccgattgaacgtagtccaccgattgaggacgttatacagactggtgtggtttctcgatttgttgagtttctcatgagggaagactttccgcagttgcagtttgaggcagcttgggctttgacaaatatagcttctggaacgtctgaa

SEQ ID NO: 53100 - DNA, 249 bp, Glycine max
ctcgagccgctcgagccgcgccatacccgttaacaagcctggtagatttgagagtttcttactatctagagctgaagctcaacaatcctacttgcaaggattcagcaggaacattttagaggcctcctacgataccaaattcgaggagataaacaaggttctgtttagtagagaggaagggcagcagcaaggggagcagaggctgcaagagagcgtgattgtggaaatctcgaaggaacagattcgggc

SEQ ID NO: 53101 - DNA, 245 bp, Glycine max
ctagttttttatattgctgtcgtatcttctctctgctacgtcgttttttgttttgcgttcgttgccgaagtcgttttaatttcttattgtcgctgtgtattcttcgttgcttcatttcgctttgcgccttctgcagttcaacatcgcgaatcccaccactggatgccagaagaagctcgagatcgacgacgatctgaaactgcgagcattttgggacaagaggatctcacaggaggtcatcggag

SEQ ID NO: 53102 - DNA, 240 bp, Glycine max
cacaacttcagaatctccgagactaccgcattttggagttcaactccaaacccaacaccctccttctccccaaccatgctgacgctgattacctcatcgttatccttaacgggactgccattctttccttggtgaacaacgacgacagagactcctacagacttcaatctggtgatgccctgagagtcccctcaggaaccacatactatgtggtcaaccctgacaacaacgaaaatctca

SEQ ID NO: 53103 - DNA, 250 bp, Glycine max
cggtgacttcctcgccttcgtggcggccggcaacattctcctcgaagccctcgtcggtgctgccggcctcgggcgctcctggtcctcgtacttcgccagcatggtcaaatccgaccccgacatcttccgaatccacgtcccctccttcaaacccgggttcgacatgctcgatcctctcgccgtcgctgttctcctcatcgccaatggcatcgccgtcagcggcactcgcagaacctccctcttaacctgg

SEQ ID NO: 53104 - DNA, 260 bp, Glycine max
aaaattcttccaccaagttatgggttaccttgtgttgcttcttttctccctcttaggtctctcttctagttccagcatatcaactcatcgttccatattggaccttgacctaaccaagtttaccacacagaaacaggtgtcttcactgttccaactatggaagagtgagcatggacgtgtctaccataaccacgaagaagaggcaaagagacttgagattttcaagaataacttgaactatatcagggacatgatgcaaa

SEQ ID NO: 53105 - DNA, 260 bp, Glycine max
tagcatcacaaccgccaccagccttgacttcccagccctctggcttctcaaactcagtgcccagtatggatcactccgcaagaatgctatgttcgtgccacactacaccctgaacgcgaacagcataatatacgcattgaatgggcgggcattggtacaagtggtgaattgcaatggtgagagagttgtttgatggagagctgcaagagggaggggtgctgatcgttccacaaaacttgtgggtggctgcaaatcccaga

SEQ ID NO: 53106 - DNA, 261 bp, Glycine max
gccaaaaaccacacaaagcacaatagaggaggaacaacaatcacaaagggcatgaggaccaatgtaggagatattgttcaagtagaaggagggcacattgttaggtccacaggtagaaaagatcgccacagcaaggtgtacacatcgaaagggccacgcgatcgtcgcgttagactctcggcacacacagccattgagttctatgatgttcaagacaggcttggctatgacaggccaagcaaggctgtggactggctcatc

SEQ ID NO: 53107 - DNA, 230 bp, Glycine max
ggcccactgggattggctattgacagaacccaatgactgaattctggttcttgccgcaaccaacaggccatttgaccttgatgaagcgatcataatacggtttgagcgcaggtaagaccacacttttgtctcatggttggcaggatcttctgttgattacttgcttctgttcaagagttatatttgctttatgagaactgccacaatcattatgttcatcagctgtggtg

SEQ ID NO: 53108 - DNA, 255 bp, Glycine max
gctagctagctagcaagcaagcacagagatggaggcaaagcgaggccatgccctcatgtgcttggcacgtgtttcactcttcctctgcgctctaaccctatccgctgctcacggaagcaccacggttcaagacatcgcgagaaagttgaaactcggggacaacgagcttctgcgcacggagaagaagttcaaggttttcatggagaattacgggaggagctactccacagaggaggagtatttgcgccgtttggg

SEQ ID NO: 53109 - DNA, 251 bp, Glycine max
tgagaggaagagggagtgagagagagtgttcttcgtttgctaccttctcccagaaatggttacgttcaggtttcaccagtaccaggtggtcgggagggctctcccaacggaagcagatcagcatccgaagatctaccgaatgaagctctgggccaccaacgaggttcgcgccaagtctaagttctggtattttttgaggaagctgaagaaggtgaagaagagcaatggtcaagttcttgctatcaacgaga

SEQ ID NO: 53110 - DNA, 271 bp, Glycine max
tcctggtgttagtccacagtacactactcccttattgtgatcgaaccccataaacgccgccttacactgccgttaattcactcatacatctctacacgcactccatgaaacaccagaagctctcctcacaatgccggcggaacgacatgccctcgacaaaatttatcagtggatttttagacaactcgaaggaggatcacgggttggcacagttgatgcgcttaactacattcagaacgacttcgattactgcggagaagagccatctatg

SEQ ID NO: 53111 - DNA, 275 bp, Glycine max
acgcgtacgagctcgaatcgctcagccaccataccaacacaccatatgagcgtacgagttacgacggtggcatcggcaatgaccttggcaccacctactcttgcgttgccaactacgagggcaatggcgttgagatcatcgccaacgaccagggttccttcaccaccccttctttcgtctccttcaccgctgaggagcgtctgatcggtgaggccgccaagaaccaggctgccatgaaccccatcaacaccgtcttcgatgtcaagcgtcttatc

SEQ ID NO: 53112 - DNA, 250 bp, Glycine max
ggttgaacaactgcacaaaattttcaagctctgtggctccccacctgacgaatactggaaaaagtctaaacttcctcatgcaactttatttaagccagagcaaccatatgatagttgccttcgacagtcctttaaagatttgccaacgaccagtgtacatctgctacaaactcttctttctgttgaaccatacaaacgtggaactgcaacatctgctctatcatcagagtatttcaaaacaaaaccttat

SEQ ID NO: 53113 - DNA, 242 bp, Glycine max
gtttcttcctgtctctgctcttgggcttctctgacacatttggtgccttgtagagcgtgtgttggcaggcaggtgttatggcgatggacgttgatgttgctgagcgtggctccttctctgggaaggactaccaggaccctccaccagcaccactcattgatgctgaggagctcacaaagtggtccttttacagggctctcattgctgccatcattgccactttgctcttcctctacattact

SEQ ID NO: 53114 - DNA, 254 bp, Glycine max
aagcccaatgggattggtgagctgttggagatttttgggagcgtgattactgggtttgctttgcccttgaaagaggaacacaaaatcttcttgtggagggttttggtccccttgcacaagccgaaatctattccggcctactttcagcaattgtcctactgtgttatgcagtttatagagaaggagccaaagttagcgagcattgtgataaggggattgttgaatattggccagcaacaaatagccagaaagag

SEQ ID NO: 53115 - DNA, 230 bp, Glycine max
gacaaacatctgatgctgcagctagaaagaggaaaggaaaatgtatagagggagatgatgttttagagtccccaaatgaaggaaaaacattaaatgaaaaacgtttagcaaccttggacatttttgcaggttgtggtggcttatcagaggggttgcagcagtcaggagtttcatcaactaaatgggctattgagtatgaagaacctgctggggatgcatttaaagctaat

SEQ ID NO: 53116 - DNA, 228 bp, Glycine max
ctcgagcgagcacactacacacacacactgtgtttgtgaaactctcacacagactagtcacggcaacaagtttctgtcggtccactcgcatcagcaacaccccttgtgaaagatcagctggacatcgtgatcccaacgatcaggaacctggatttcttggcagatgtggaggccatgctttgagccttaccatctcattattgtgcaagctggagacccttcaaagat

SEQ ID NO: 53117 - DNA, 222 bp, Glycine max
ctcaacttctgctacccactctcttcttccaagtccaaccacgcttttctctacagtcatgggcaaggtcaagatcggaatcaacggatttggaagaattggccgtttggttgccagagtcgctctgcaaagagacgatgtggagctcgttgccgttaacgaccctttcattaccaccgattacatgacatacatgtttaaatacgacagtgttcacggaca

SEQ ID NO: 53118 - DNA, 265 bp, Glycine max
ggagattaaagacactactaaagaagggtatagttttgaagagctatgcatcaagaaagaagccattgagggagaagagaagttttgtgcaaaatccttgggaacagtaattggttttgccatttcaaagctgggaaagaacattcaagtactttcaagttcctttgtcaataagcaagaccaatacactgtgggaggagtgcagaatcttggagacaaagcagtgatgtgtcattagctaaatttcagaactgccgtattttac

SEQ ID NO: 53119 - DNA, 260 bp, Glycine max
attcaaaccctcggccagtttctcggcccccaacgcccctcctcctccgccgccgctaccgccaccgccgccacatccccttcctccacctcctccctcgccgtcggttccgacgaagactctgacggcggcgtcacccaccactccccaacccaagtcctcaagaacttcaacgctattcgcctcctccggatcgagctccccatcggcgaactaggcatcgaagacggtgtgctcctcaaatggcgcgccgatttcgg

SEQ ID NO: 53120 - DNA, 256 bp, Glycine max
gtaactgctgatgctcaggcagtacagaggcaccgtgcaacaattatagaatgtgtgaaggattcagatgcttcgattcagaaaagagcccttgaacttgtttatgttttggtgaatgaaactaatgtgaagcccttggcaaaagagcttatagattatctggaagtcagtgatcttgatttcagaggggaccttactgccaaaatttgctccattgtagcaaagtattccccagagaagatctggtatattgatc

SEQ ID NO: 53121 - DNA, 246 bp, Glycine max
tactggcgcggtgtctggagtttcaggtgcatctgaagacaatattagagagctttttgctaaagcgtacaggtctgcgcctgctattctctttattgacgagattgatgcaattgcatctagaagagagaatttgcagcgtgagatggagaaacgtattgtgacgcaattaatgacttgcatggatcaatcagataggcttcttcaaccagcggatgagtggagagttctggtgatgatcatcat

SEQ ID NO: 53122 - DNA, 235 bp, Glycine max
ctcaatcaacctctcttcttcaccgtcgcaaaccacaaactcaccgtggttggcgccgacgcctcctacctcaaacccttcaccaccaaagtcctcatgctaggacccggtcaaaccaccgatgtattgatcaccggcgaccagccaccttccccctactacatggcggcgcgtgcgtaccaatctgcccaaaacgccgcgttcgacaacacaccaccaccgccatactcgaata

SEQ ID NO: 53123 - DNA, 243 bp, Glycine max
ggcaagccccactcaaccaccacacttctcctcgttcacgctacccctttctgctcttcttctacctttcaagttttaaaagtataaagatggcagagacattcctatttacctcagagtcggtgaacgagggacaccctgacaagctctgcgaccaaatctccgatgctgtcctcgacgcttgcctcgagcaggacccagacagcaaagttgcctgcgaaacatgcaccaaaaccaacttgg

SEQ ID NO: 53124 - DNA, 237 bp, Glycine max
cacttgtctaagatgcgatgtttgggtctgtgagcttcccactgaatgtcctgtgtgtggatttactctgtatttcttcaccccatttggctaggtcatatcatcatttatgtcctatagtgatggttgatgatgtcactccatctcaaaaggattcaagccgcagtgttcccaatacttgttttggttgtcaacaaagtcttcttagtcacggaaacaagcctggactttctgtta

SEQ ID NO: 53125 - DNA, 236 bp, Glycine max
ttgttcttctctctcaacaacttcacctttttgctcctcggtcatgtcttacgtcaatggcaagtaccatgatgagcttatcgccaatgctgcgtacattggcactcctggaaagggtattcttgctgctgatgagtcaacagggacaattggcaagcgtttggccattatcagtgtagagaacattgcatccaacaggcgagctcttagggagcggcgttccactgctcctggtg

SEQ ID NO: 53126 - DNA, 251 bp, Glycine max
cgtttctgtgcgatgcttcgccacggcgttccgttccgccactctaaaaacgctagtttctccataaggcagaaatcgagcggcggaagaaggccgaagaagaaaacgtaccacagagtgcccgaacttgacagagtaatggagctccgcaagaagccatccatgattctccacctcagctccctcatccaatcccaaccccaaaccctcttcctccgcgacctcgagaagcacgtgggcttcgtccgcaa

SEQ ID NO: 53127 - DNA, 258 bp, Glycine max
ctcagaattctctaaaagagatctttttctgctctttgaagaaagaagggtctttgcttgattttggagatgtctctgctctcagatctcatcaaccttaacctctccgataccaccgagaaggtgatcgcagagtacatatggatcggtggatcaggaatggacctgaggagcaaagcaaggactctcccaggaccagttagcgacccttcagagcttcccaagtggaactatgatggttccagcacaggtcaagct

SEQ ID NO: 53128 - DNA, 253 bp, Glycine max
cgcaactctctctgacaagggcgattctgtacatagtcatgcagtgcttggtggctatatgtggtgctggtgtggtcgaaggggttccgagcgctgaggtctatgacggggcttagtcggtggctgccagcacaatcgctaaagggtacaccagtagtgctggccttggagcagagattgttggcacatttgtgcttgtttacactgtcttctctgccactgatgccaaaagaaatgctagagactcccatgt

SEQ ID NO: 53129 - DNA, 269 bp, Glycine max
ctgagtctggaatgctcggattggggaagagaattcatgcgtctatgaggaggtggaggtttagatgtggcgctaaggtgttgaatgcgtttattgatatgtatgccaagtgtggttgtttggatgctgcctttgatgtctttagtggaatgatggcaaagaaagatgtggtgtcttggaattccatgatccaggggtttgccatgcatggacatggcgagaaagcacttgagctcttttcttggatggtacaggaaggttttgagcca

SEQ ID NO: 53130 - DNA, 244 bp, Glycine max
tggacaacttgtggaacaccagagccgtttcacgtgttccccgaccaccctcttacacggcctcgccaagggtgccagaggcatggttggtctcggtaggtcccgcagctcgcttccttctcaggttttcgacaacttcagcacgcaccgaaaactcactctctgcctttcctcctccaaaggcgttgtcctcttgggcaacgtggcaacctacgagtccgaagttcttaaatctctcagcttc

SEQ ID NO: 53131 - DNA, 238 bp, Glycine max
ggcgccggcgccgctggttgacccgacggagtttacgtcatggtcgttttacagagcagggatagcagagtttgtggccacttttctgtttctctacatcaccgtcttaaccgttatgggagtcgccggggctaagtctaagtgtagtaccgttgggattcaaggaatcgcttgggccttcggtggcatgatcttcgccctcgtttactgcaccgctggcatctcagggggacacata

SEQ ID NO: 53132 - DNA, 235 bp, Glycine max
gggcatattgatgccaacgggtgccataatcgcaaggtacttgaaggtgttcaaatctgcagaccctgcttggttttatcttcacatcacctgccaagcctctgcctacatagttggtgtttctggattcggcaccggtctcaaactcggcagtgactccgagggtgttgagtatgacactcacagagcacttggtattgtcctcgtctgccttggaactcttcaggtgtttgcg

SEQ ID NO: 53133 - DNA, 261 bp, Glycine max
gatgaagcgtcggttcctttaggtactcctggctcatccactcacaagatgagccaagtactctacgccaccacgtagaagccgatggtgggtttgtaaaaacaagaggagtgcagcttatgctgaatgggagtccctactatgctaatggctttaatgcctattggcttatgtaccttgcctctgatcattcccagagagactccatctcatcggtatggccacaggcttcaaatcatggactcaacattgccagaactt

SEQ ID NO: 53134 - DNA, 235 bp, Glycine max
gctgacgggtcttgatgctggggattcacttgatattgacaagtcaatttctcagatgctcaatatggccaacttggcagcagaagtgcaaattgcgtatcgaagaaggatcaagtcagtgaagaagggtgatttcgctgatgagaactctgccatgactgagtcagacattgaagagaccttcaacaaccttgtggctcactgaacgaagtcgccccaggaaatctttgatgct

SEQ ID NO: 53135 - DNA, 272 bp, Glycine max
cgaatatcttgttgtttggagcgatccgagacaaactctgtaaacatgtcggtttaccaggacctccttacaggtgatgagcttctctctgactccttccgatacacggaaattgagaatggcgatgctgtgggaagttgaagggaagtgggttgttaaaggagcagttcatgtagacattggtgcaaacccttctgctgagggtggacgcgaagatgagggaattgatgatgcagctgctaaggttgttgacattggtgacacattcagac

SEQ ID NO: 53136 - DNA, 269 bp, Glycine max
ggaagaatcaggcggcagacttgggcacggtgttgactctgatgttctccatccaaagcttatagaagctctaagtaatacaaatattgaacttgtagcttgtggggaatatcattcatgtgctgttacactttctggtgatctttatacatggggtaatggaacatacaattatggccttctaggacatggaaatcaagtgagccactgggtaccaaaaagagtaaacggccccttggaaggcatacacgtgtcatatatttcttgtg

SEQ ID NO: 53137 - DNA, 204 bp, Glycine max
gttagttcaagcgagcgcgctcccactcggacgagtcaactcaactcactaccaacactggtccgtttcccagttccgcccaccgtagccggaagcccccgatgatgtcgtcttgaacggtcactgctgtcgccggaacaagcatctatcgtacctgacgagcttctcggtatccgagagagcgcagaaggcgccatggatctt

SEQ ID NO: 53138 - DNA, 190 bp, Glycine max
ctttagccgaggtcaggaggagcactagctaagttcacaatttcataatggctatgggactacaggagcatttgaaaaggctcaatgctcctaagcataggatgcttgtcctactgggtggtgcattcgcgcttaaaccctcatctggaccacactaatcgatggagcgcctcctgctcatacctatgct

SEQ ID NO: 53139 - DNA, 254 bp, Glycine max
cccaaacgcaatcctcttacgcttgcctcatattatgacagagaaactctagtagggttcactgcctacggcgtaaacgacactttcaaggaatacgagaaaaagggtaccactgtctcattcgccaggtacaccagcattagcacggacctctcagtttcagcttcatcagtcagtggcagtttggtaaataagtgggtggagccgggtaagttttatcgtgagaagatgatgaaggacggacccgtgatgcc

SEQ ID NO: 53140 - DNA, 220 bp, Glycine max
agagaagtgaatgatcagaatggtgatgcatataggaagccacaagtgggcatgctgtttgagtctggagatgctgcaaaatcgttttttgatgcatatgcaagacatgtactgtttagcacacatgttggtcaattcagtcgtgctaagcctgatggtccaattataagttgggactttgcatgttccagggaagtatttagaaggaagaacatagttg

SEQ ID NO: 53141 - DNA, 263 bp, Glycine max
catcagtcgatcagaaagcctccataacccaacaatcgtgagtgcacattctcaacccttacgagtatctgcatccatctgggctgtcttgttctaataataaattattttggttatcgatttttaatctgtgttgcagcctttcaagaggtacgttgagattggaagggttgctcagatcaactatggcaaagagtacgggcggctcgtgatcattgtcgatgtcattgaccagaatagggtatgacctttttcttttttct

SEQ ID NO: 53142 - DNA, 257 bp, Glycine max
gcaagaatggcacttcgttgcttggtgatgtccctttctgttctcttcactcttggtcttgcgagagaaagccatgccagagacgaagatttttggcatgctgtttggccaaacactcccattccaagttcattgcgagatcttctaaagcctggccctgcaagtgttgaaatcgatgatcaccctatgcaaattgaagaaacacagtacccgaaaaccttctactataaagaagaccttcatccaggcaaaacaat

SEQ ID NO: 53143 - DNA, 252 bp, Glycine max
gtgagcactatagtgccgacgacagtcattcatttatggttacgcttattgcgctcagcaaccagtgtagcgaggtaactgctgagtcttgaagagaggcttctgaaggatgagggactgatgagaatactgttatggtaatattaggtcatagaactgtttatcagaaggagttaatgagaagagtctatggcgctattttccaggaggatgttgtgaaacgcctagggtctgatatcctaggggactttg

SEQ ID NO: 53144 - DNA, 215 bp, Glycine max
ggaaaaggaaaacctacaactcaggtggctctttcagtgatattgactgctgctggagttctcattgctgcccttggagatttttcctttgacctttttgggtatagcatggcctttgtttctgtttttttccagaccatgtaccttgtgctggtggaaaaatctggtcctaagattgggtttcatccttgggaatcatgttctataacagcttt

SEQ ID NO: 53145 - DNA, 206 bp, Glycine max
tggtgccttatcgctgtggttatcatcttcttcttcctctttcttagatctcttctttctctacgccgcacgccgaaaccatggccggaaaaggagagggtcctgctatcggaatcgatctcggaaccacctactcttgcgtcggtgtgtggcaacatgaccgcgttgaaatcatcgctcaacgaccaagggaacagaaccacgcc

SEQ ID NO: 53146 - DNA, 213 bp, Glycine max
  unsure (1)..(213): unsure at all n locations
gggaagtctggtgtggagttcagaagggaaatgcagagacattcagtggcagttcgtcagttatttcattacaagggacagttggatcctttgaaaggtgatgcactaaataaggctgtgagagacactgctcatgaggctatctcagccaagatttcagaagacaantagtcatagtagtagccagcgtccgcagaagatcgataccggcgg

SEQ ID NO: 53147 - DNA, 243 bp, Glycine max
tccaagagtgatgaggaggcaacgactttgtcaataactattacttggtcccttactctgcaagatcacgccaatacaatttaccagattacgtcaagtatagcctccttagaacctttcttgtactcagagataatatacttgacgtaatctggtaaattgtctctgagtacaagaaagttctaaggaggctatacgaaattggagcacgtagggtgctggtgacgggaactggtccattgg

SEQ ID NO: 53148 - DNA, 253 bp, Glycine max
cgctcgagcggctcgagccgctcgagccgctcgagccgttcgtgtctccaatacacttggagtgtcgcaacgaagagcagccatctactctagctgcgtgacaatgtttcagtctctcctccttggcattgttttcatgattgccattttcttgagtaaagatgcgtttgccaagatctttaccgacagtgaggatatgatacgagctgttgctgatttagcataccttcttggtgtatcgatggttatcaat

SEQ ID NO: 53149 - DNA, 222 bp, Glycine max
cagaaagcaagctcatcctagagttttaaaaatggcagcagcctcctccatggctctctcttccccatccttggctggcacggccgtgaagctgggcccatcagcccccgaagtcgggagggtcagcatgcggaagaccgtcaccaagcaggcctcctccggaagcccatagtacggcccagaccgcgtcaagctacttggccccatcacatgcgagccccc

SEQ ID NO: 53150 - DNA, 238 bp, Glycine max
cttcttctcttgcggctatggttttagcgcagttcttctagatttaaggaagatgggtaaggataaggttcacatcagtattgtggttattggccatgttgactctgggaagtccactaccactggccacctgatcgacaagcttagaggcattgacacgcgtgttattgagagatttgagaaggaagctgctgagatgaagaagaggtcttcatgtatgcctgggtgcttgataagc

SEQ ID NO: 53151 - DNA, 225 bp, Glycine max
cgcgtcgctccgcaccagtttcaccgcacgaatatcttactgtttggagcgatccgagaaaaactctgtaaacatgttggtttaccaggacctccttacaggtgatgagcttctctctgactccttccgttacaaggaaattgagaatggaatgctgtgggcaattgaggggcagtgggttgttaaaggagcaattgatgtagacattggtgcaaacccttctgc

SEQ ID NO: 53152 - DNA, 221 bp, Glycine max
cgacgctcacgattcggctcggcggctcgagcggctcgagcggctcgagcttcccttcactagcagttctgccacatattagcattccggcgcaaaatgaaggtcatcgccgcctacttactcgccgttttgggaggcaacgcagccccttccgccgatgacttgagggacatccttggctccgttggagctgacgcgaacgatgacaacatcagcaactt

SEQ ID NO: 53153 - DNA, 120 bp, Glycine max
tggcgaacatagacatcgaagggatcttgccgcagcagcagccttatgataagcgcgttccgatgacaatgatagtgtgtacttagggccccgcttctcattccgactaaataaccgacc

SEQ ID NO: 53154 - DNA, 226 bp, Glycine max
cacctttgttcactcttacttctcttagcggctagaggttttacgcgcagcttcttctagctttacggcagataggtaaggacaaggttcacatcagtattgtggtcattggccatgtcgactctgggaaatccactaccactggtcacctgatttacaagcttggaggcacggacaagcgcgctaatgagaggcttgagcaggccgcagccgtgacgtacaagag

SEQ ID NO: 53155 - DNA, 275 bp, Glycine max
aagaatctttacatgctgccgacgaggaggaggatctaaaagaggaccagaaggttgtctttctaaaagagaaacaaaaagaacacatgtttgagatgttttggaatgagaaagtgtattgagaaacaagatttgagaattttcaagagaggatagcaatattgtctctgctttaatttatcaccacattccttctcatctcaagagatgctttgcttattgtgccatattcccaagagatttacatatgtttgtaagagagcttttaattttgt

SEQ ID NO: 53156 - DNA, 265 bp, Glycine max
ctcaagtccaacctacccctttttcttctcccaccaacttcaccgtcttcttcctcgatcatgtctcacttcaagggcaagtaccatgatgagcttattgccaatgatacttacattggcactcctggaaagggtattcttgctgctgatgagtcaacagggacaattggcaagcgtttggccagcatcagtgtagagaatgttgaatccaacaggcgtgctcttagggagctgcttttcaccgctcccggtgctcttaaatatc

SEQ ID NO: 53157 - DNA, 232 bp, Glycine max
gtgtctgctttatgcttatcacactgcaatttgatcatggatgatataatgcacgctttcggatgcggaaagcgaaggaggcatggcatttgagtccaacgaagttgcagccacaacgctccaagccatatgctacaagcgcggttccctccagcttctcgatcagagaaagctccctctggagacagtttacttggaaattcgggattcaacggatggctggaatgccata

SEQ ID NO: 53158 - DNA, 222 bp, Glycine max
ctgctatcacttgcgatatgtcggattttcgaaaggattggctatcacttttattgatagtcacgtcttcacgttcatctataaacattaggcacttggagaaagctacagtttccactggcaaagaaggactattatcagtagggaatgctgcttacaattggtccagatgtgtagatgaattggaatctgtgctttcaaagcatggcagtcttaggaggc

SEQ ID NO: 53159 - DNA, 206 bp, Glycine max
gagaagtatcagatctggagcaggagaatagcgttggcagcgtttgcgtttgctctgctgttccaatcggcctcagcagacgacgtcgttgtgctctctgaagataacttcgagaaggaagttggtcagacagaggagctctcgttgagttctatgctccttggtgtggacactgcaaaaagctagctccagaatatgaaaagctt

SEQ ID NO: 53160 - DNA, 228 bp, Glycine max
acaatggccgataccagacttacctacaggcgccgccagccgtacaacacggtctccaacaaggtccgcgttatcaggacccccggtggcgagcacaggtaccttcacatcaagaagaggggtacctcccccaatgcggtgactgcggtgtcaagctccctggtattcctgccctccgtccccgcgagtacgcccagatctcccgccccaagaagaccgtccagcgtg

SEQ ID NO: 53161 - DNA, 266 bp, Glycine max
gctaagtggaaagaaagaaagaaaatttcaagggctgaaacatctatctttaattgtatcctccctttgtttcctcacaaggttgcaagcatggcttttccaaacccatccatgtcagtttctccacagaagaagatgggaagggggaagattgagatcaagaggattgagaacaccaccaatcgccaagtcaccttctgcaagcgcagaaacggcttgctcaagaaagcatatgaattatctgtgctttgtgatgcagaggttgc

SEQ ID NO: 53162 - DNA, 186 bp, Glycine max
ttttccccttcaccccttcctttttttgcgttcattctgttttcatagtgacgaacttctgaagaaatggcaaatcatcctttgacacactctcactctttccgcgagaggtttgatgaaactctcactggtcacaggaacgaaattttggcccttctgtcaaggcttgaagccaagggcaaggga

SEQ ID NO: 53163 - DNA, 213 bp, Glycine max
gtcagtctctgtgtttgcggctgaggattccgaaagagtgaactacttcgtttctcgcatactttgagtgatcatgggtacggaaaaggttcacatcaacattgtcgtcattggacatgtcgaatctgggaagtcacctaagctggtcgattgatctacaagcttggcggtattgacaagcgtgtgattgaagaggttcgacgaagacgctgc

SEQ ID NO: 53164 - DNA, 208 bp, Glycine max
ttctgtttctgtctctgtgtttgcggctgaggattccgaacgagagaccttcttcgtttctcgcaaagtttaagtcatcatgggtaaggacaagactcacatcaacattgtagtcactgagacatgtcgactctgggaactcaactaacactggtcatttgatctacaagcttggaggtattgcaaaccgtgtgattgagaggttcaa

SEQ ID NO: 53165 - DNA, 270 bp, Glycine max
tacgcagtcgcagtgagtgaaaaggaaaaccctaattgcggtattctcagtgccttcgagagaacgaaacaatggcagctaatcttgttctacgtggacacatgcgcgacctcaccgacgttgtgacggcgaatggaactcccgatcgacaatccgacatgatcattaacgactcacgcgacacatccctcatcctctggcatcctaccaaggaagacaagacttaaggtgtccaccgcagccggctcaccggccattctcattttgtcc

SEQ ID NO: 53166 - DNA, 257 bp, Glycine max
aagatgtcgaagcgtggtcgtggtggttcggcggggaacaagttccgcatgtcgctgggtcttccagtggcggcgacggtgaactgcgccgacaacacgggggcgaagaacctctacatcatttcggtgaaaggatcaaaggccgtttgaaccgtcttccctcggcctgcgatggcgacatggtgatggccaccgttcccatccctgacgtcatgaaggcctctatccgccccgacatcgtcaatttcgtacactcg

SEQ ID NO: 53167 - DNA, 260 bp, Glycine max
cctcgctctatttctcagtctctgtgtttgcggctgaggattccgaacgagtgaccttcttcgtttctcgcaaagtttaagtaatcatgggtacggaaaaggctcacatcaacattgtcgtcattggacatgtgactctgggaagtcaactaccactggtcacttgatctacaagcttggacgtattgacaagcgtgtgattgagaggttcgcgaaggaggctgccgagatgaacaagaggtcattcaagtatgcctggg

SEQ ID NO: 53168 - DNA, 241 bp, Glycine max
ctttgagacgattacttactgcatatgctcgacataacccctcagttggctactgcgcggccatgaatttttttgctggcttattgctacttttgatgcctgaagaaaatgccttttggaccttaatgggcttttagatgattattttgatggctattattcagaggaaatgatagaatctcaggtggatcaacttgtttttgaggagttggtgagggagaggtttcccaaattggccaat

SEQ ID NO: 53169 - DNA, 250 bp, Glycine max
cacagttggaaaaaaaaaaaaaagttgttcaagttggcccttacaaagcaaactggtcgtaattccacaggaggaaaggcacctaggaagcttttcgcaaccagggttgcccttaagtctgcaccactactggtggtgtgaaaaagccaaatcgttatcgtcctggtaccgttgctcttcgtgagtttaggaaatcccagaaggttaccgagcttttaatcaggaagctccccttccagaggctggttcg

SEQ ID NO: 53170 - DNA, 251 bp, Glycine max
tttgggagttaggttctgcacgctctgcttccagcgagtgttctttcttcgtttcaacaccttaatttgcacacgctgcttcttcagcttgagaaatggcacaagaaacctttctattcacatctgaatctgtaaacgagggtcaccccgacaagctgtgcgaccagatctctgatgcagtgctcgatgcgtgccttgaacaggaccctgacagcaaggttgcctgtgagacatgcaccaagaccaacatg

SEQ ID NO: 53171 - DNA, 258 bp, Glycine max
gctccctcagaagcgaagaaggagccacatagtatcagtctcctactctctctcatccacgatagaaatggcatctcacatcgtttcataccccgtcatgtgtcccaagagagagctcaagttcgctctctagtctttctgggattgcaagatcatcgccgatgatttgcagaaggtgtctgctgatctcagttcatccagctgggtgcatattggcgcgtgctgggatcaagtgcatccccaggaacactttctcgt

SEQ ID NO: 53172 - DNA, 238 bp, Glycine max
ggcatggctaatgaagaggaacagagaaaccacctcttcggcatcaaagatctcggtcacaagactctccttcagagtgatgcactctatcagtatatacttcaaaccagtgtctatccaagagagcacgagtgcttgaaagagatacgcaagatgactgctaaagagggactctcacaggattggcttagggatggtatgaccacacttcccgggttcggtttccctccgcccagct

SEQ ID NO: 53173 - DNA, 142 bp, Glycine max
gctctgcattaagaacccgcatgtggaggaaaagatcctccacgagctctgcagtgtcctcaagtttacacgtggagatgatatctccacgtggctcgaggagcctctggtgttcgaggaggtagaccgcctggtctatctc

SEQ ID NO: 53174 - DNA, 254 bp, Glycine max
gcttcatacgggaagacacacaccgtggtttcactttctatctctacaaagctcttaatgccggggaatctacactttcttttatgatcaggagcttcccagagaaaccgaagtaacacctggactttacaaggcaattctagcttccagggtagctattattgtgctttctgaaaactatgctttttcctcattttgtttagatgaacttgtaaccatcctacactgcgagagggaagttataccagtctttc

SEQ ID NO: 53175 - DNA, 251 bp, Glycine max
cgtcaagattttgggctagtagatgaaaccagcgtcgtgtagggaggtactaagatgggcgagatcatgaatctcgctcgctttgctgtagaggcacaaaacaaaagagagaattcagttctggagtttgtgagggtgattagtgcaaagcagccagtggttgctggagtgaatgactacataacattggaagcaaaagtatggtgagattccacatgagtataaagcgaaggtttaggagacggatccca

SEQ ID NO: 53176 - DNA, 246 bp, Glycine max
gtccctcttgcttgggactttgctaaccgatgagatcagtgacttcaaatctcatgaatacctgcgtcttgcaggagccactcaaatggcactcgatgttctcaggcttggtttcttgattgactttttgtcccatgcttccattgtgggattcatggatagagctgccattactattgcactacaacaacttaagggttttcttggcataaaaacattcaccaagaaaactgatattgtttctgt

SEQ ID NO: 53177 - DNA, 248 bp, Glycine max
tggacatcatgttgcaatggtaggtgatgggataaatgatgcaccctctttggctgtggctgatgttgggattgctctgcagaatgaagctcaagagaatgctgcctcggatgcagcatctatcatacttctggggaacaaaatttcacaagttgtcgatgcgctagacctagcacaggcaacaatgggaaaagtgtaccaaaatttgtgttgggcggtcgcatataatgttgttgccattcccattg

SEQ ID NO: 53178 - DNA, 234 bp, Glycine max
tgggaagagtctgggcaggtgtcaaacgcttcctacgactatagaggcactgattctccatgcgatgtgcaggacgacggcattcgatattactcggctgagtaagactatgagggaggtcgctatcgaagctgcaatgaagcccgtatgagcctggagttggtccagcacgggctcatggcagtggcttatgaaatatatgatgatgtccgcgactacaacgaggggatctac

SEQ ID NO: 53179 - DNA, 246 bp, Glycine max
ctgaaattgaggagatgtgcaagacccactacgaggaattcatccttgcagttgatgagcttcgtggagtgttagttgatgctgaggagctgaagagtgagctccaaagtgacaattttaagttgcagcaggttggcagcgcccttcttgccaagcttgaagagcttcttgagtcttattctgttaggaagaatatgactgaagctatagaaatgttgaagaactgtatacaggtgttggagcttt

SEQ ID NO: 53180 - DNA, 243 bp, Glycine max
gctacttcctactccaaccgcacttctgctccgcaattatcatgggcaaggtcaagatcggaatcaacggatttggaagaattggccgtttggtagccagagtggctctgcagagagacgatgttgaactcgttgccgttaacgaccctttcatcaccaccgattacatgacatacatgtttaaatacgacagtgttcatggacactggaagcatcacgatgtcaccgttaaggacgagaaga

SEQ ID NO: 53181 - DNA, 242 bp, Glycine max
tggaaaggtcttgcctatgatgtgtcagacgaccatcaagacatcacaagaaggaagggcgtggttgattccctcttccaagctgcacaggatacttgagcccactatgcaatcatgagctcttatcagtaccttatcactggacttaaacagtacaacttggataacaacatggacggatttcacattgctcctgcgttatggacaagcttgttattcacatcagcaagaacttcatgacc

SEQ ID NO: 53182 - DNA, 238 bp, Glycine max
gccatggccacctccaacttctctattgttctctccgtctccctagccttctttttggtgctacttaccaaggcacactcgaccgataccgtttctttccccttcaacaagttcaacccagtccaaccaaacattatgctccaaaaagatgctagtatttcatcctctggggtgttacaactcaccaaagttggcacaacggcgtgcccacctcgggatctctcggtcgtgcccttta

SEQ ID NO: 53183 - DNA, 227 bp, Glycine max
gacaagctcaaggctgagcgcgaaagaggaattaccattgatattgctttgtggaagtttgaaaccaccaagtactactgcacagtcatcgatgcccccggacatcgtgactttatcaagaacatgattactggtacctcccaggctgattgtgctgtccttatcattgactccaccactggtggttttgaagctggtatttctaaggatggacagactcgtgagca

SEQ ID NO: 53184 - DNA, 221 bp, Glycine max
ctcacacacactttctctctctctctctctcatccagatcgtgtagcaatcgcgagcgctcccactccacgcgccgcgttcgtgtacatggcgaagctagcggagcaggccgcgcgctacgaggagatggtggacttcatggaaaaggtcaccgcctccgccgagcgcgacgagctgaccgtcgaggagcgtaacctcctctccgtcgcctacaagaacgt

SEQ ID NO: 53185 - DNA, 243 bp, Glycine max
ttctatcagcatgggcaatgcaattagatttctcaaaagtcgcattgccaagctacctttgacgctgtctgagtcagaatcaaaaacctctcttcaatcagatattgagcgttttatatatgagaaaattatacttgccaacaaggtgatagtcaagcatgctgttacaaaactaagagatggtgatgttcttcttacttatgggtcttcatcggcggttgaaatgatactgttacatgcaca

SEQ ID NO: 53186 - DNA, 242 bp, Glycine max
ctcttgaaaattttcaattgtctattgacacgaacaatacacaaaagcacagccacaaaggcagcatcatcagagagcaacaatggaagaagaaaaagaagaccaaaagctcctgacatacccccactactggggcttcaccccagaagaggactactacaaacaacaaggaatcacatccacaagctccttcttcaccactccccaaggcctcaaactcttcacaagatcctggctcccaa

SEQ ID NO: 53187 - DNA, 243 bp, Glycine max
aaagagcactggcttatgcattcactcatcagcaaaactggaagaactcgtctagatctgtaaatccaatgtttatggatccaactaatccgagctggggttggagctggttggaacgatggatggcagcccgaccttgggagagccgtagccatatggataaagagttgaatgaccactcctccataagaagctcaagccgcagcattaccggtggagaaatcagcaagtcacttgctcgtt

SEQ ID NO: 53188 - DNA, 269 bp, Glycine max
ataacccttctgccttttgcacccattaatttgctcgctcaaagtgctaaaaaaatgcctcacatcctgcccgatttctcaaactcagtaaagctcaagtatgcgaaacttagctaccaatacctcgtgaatcacatcaaaaccctaaccctaatccccatcatgcttggcatctccatagagacacttcgcctaggcccagatgagatcctcaacctttggaactctctccacgttaaccttgtccaaatcttcttatccaccttcct

SEQ ID NO: 53189 - DNA, 269 bp, Glycine max
gtcagtttcgggggaagagatccagcagcaatggtcgtacgtcaaggctcagaaatcaaaagcctacttcaagagatatcaagtcaagttcaagagaagaagagagggaaaaaccgattaccgtgccaggattcggttgattaatcaggacaagaacaaatataacactccgaaataccgatttgtggttcgctttagcaacaaggacattgttgcacaaataatatctgctagcattgccggcgatttagttcttgctacagcatatt

SEQ ID NO: 53190 - DNA, 230 bp, Glycine max
ctcaccgattgctagaatggaatttcgatgctcagtcatctcttttaccattctcttctctcttgctcttgcaggagagagccatgtcctgcatcgctacctgaggaagattattgggaagctgtttggccaaacactcccattcccactgcactgcgagagcttctaaagcctctccctgcaggtgttgaaatcgatgaactccctaagcaaattgatgatacacagta

SEQ ID NO: 53191 - DNA, 258 bp, Glycine max
cggaagaaaccctagccactctcccggcgtcacgatgcagatcttcgtgaaaaccctaacgggtaaaacgatcacgttggaggtggagtcttcggacaccatcgacaacgtgaaggccaagatccaggacaaggaaggcatccctccggaccagcagcgcctcatcttcgccgggaagcagctggaggacggccgcaccctggcggactacaacatccagagggagtccacgcttcacctcgtcctccgcctccgtgg

SEQ ID NO: 53192 - DNA, 245 bp, Glycine max
gtaaatcatggttttgttggtggagcaaacgatgataggtcgcgagtacaacgtaaaggacctgtccaacgctgacgtgcgatgggtcgagatcgagttggacgacgttgagatgtacggcgtcatggcatgtgcggaccgatttcggaccgtgacagaccttgaagggggctcgcatcaccggttcaatggacatgactatccacggcgctgttctcgttgagacgctcactgcgcttggcgca

SEQ ID NO: 53193 - DNA, 100 bp, Glycine max
ctacaccggactcggacccgttccgagcacgtggaaatgcgcgtgcgagacgggaacgaatttcaccgcgtcgaactgcaacagaaagttgatcggagca

SEQ ID NO: 53194 - DNA, 251 bp, Glycine max
cgatcagagagccatgtccatgcatcgctacctgatgaacattattccggaagctgtttggccaaacactcccattcccactgcactgcgacagcttctgaagcctctccctgcaggtgtggaaatcgatgacctcccgaagcaaattgatgatacacagtacccatgagcattctgctataaagaagaccttcatccaggcagagcagtgaaagtacaattcaccaggcgtccctatgcacaaccttatg

SEQ ID NO: 53195 - DNA, 249 bp, Glycine max
tctcttgcggctatggttttagcgcagtgtcttctagatttaaggtagatgggtaatgtgcatgttcacatcagtattgtggatattggccatgttgactctgggaagtccaatagcactggccacctgatctacaagcttggatgcattgagaagcgtgttattgagagatttgagaaggatgctgctgagatgtacaagatgtctttcaagtatgcctgggtgcttgatgagcgtaaggctgagcgt

SEQ ID NO: 53196 - DNA, 261 bp, Glycine max
ccgcgatgaggtttggtacaataatgttcctcaccctcgtcttgagaaagatatagggggtcaaaactggattaccagaggcaaggataagtttaggtttcctgggggtggtacgcaatttatacatggagcagatcaatacttggaccatatttctgagatggttcctgatattaagtttgggcaaaatataagagttgctcttgatgttggctgtggtgtagctagttttggcgcatacttgttgtctcgaaatgtcat

SEQ ID NO: 53197 - DNA, 249 bp, Glycine max
gacagagacatcctcaacaagctcatggccttttccatggactcatccctaggggattttaactatgcaaacagaatcttcaaccacattcatcacccctccttgtttttctacaacctcatgatcaaggcctttgtgaaaaggggtagtttaaggagtgccatgtctctttttcagcagctgttggaatgtggggtgtggctcgataactatacctacccatatgttttgaatggtattggttgcatt

SEQ ID NO: 53198 - DNA, 252 bp, Glycine max
atttggtttatctcaccgcggattcggagactgtacttgaggagcttgatttgaacaaggtttatgttattggcgggttggtggataggaaccggtggaaggggataacgttgaagaaagcagaggagcaaggtatcccgacggctaaactccccataggaaatttcatgaagatgtctagttctcaggttctcactgtgaatcaagtggtagaaatactactcaagtatttggagacaagggattggagaa

SEQ ID NO: 53199 - DNA, 266 bp, Glycine max
gcagaatggcttggagaaacagagcgcgagagggtaagaaatatcagggaatgggtgcaaatgattagccagcagagaggttcacgtgggagccggagggatgctcaagtaagtgagggtgcccaagctgatcgagctcgtggcttagtagctgataatgatgagagtcagccagagcatgttcggcgggacatgtcaaggttgcgtggaagacaggctctagttgatttgcttgtgaggatagaaagggaaagacaaagagagct

SEQ ID NO: 53200 - DNA, 187 bp, Glycine max
cctcgagccgattcggctcgaggccgagactcggagatccacgggatccgttaagtggttcaccgcgcacaaaggtttcggcactcataactccccaagatggaaccgatgatctcttcgtgcacttcacttccatccgatccgacggctaccgttctttgtccgacggtcagtccgttgagtttct

SEQ ID NO: 53201 - DNA, 258 bp, Glycine max
ctagtctgcatggccatctttcggcatttaaggttgttatttggtggccttccctccgacccagctgcagcagaaactataagtaaccttgcgagggttgtttcgaggtgcattcgtgaaatggatctaggtgcagtaagtgcttgtctagcagcagttgtttatacttccgagccgcctcccctacgtccccttggaagttctgctggagatggggcttcccttattctagtgtctgtgcttgagagggcaactgaa

SEQ ID NO: 53202 - DNA, 250 bp, Glycine max
cttggtttaagcttgggcaatgggaacagtcaattgaagactccaaccaagctttacatatccaaccaaattacaccaaggcccttcttcgaagagctgcatcaaacagtaagctagaaaggtgggacgaagcagtcaaagattatgagatcttgcggagagaacttccaaatgacaatgaagttgctgaatctcttttccatgcacaagttgccctaaagaaatcacgaggggaagaagtatataattt

SEQ ID NO: 53203 - DNA, 253 bp, Glycine max
gaatttgccaaagctctacgcaagttgaaaggctttacaagggctggtttggtagctgagttagatctagaagatgttgaacttactgagaagtatcaatctgatacactagccgacggggtgcgcttgtccaattgggtgattcaagatggcagcccatcacttcatggaatcgttcacgagaggctccttgctatgtatatttgtgccggtcatggaattgaggctgagaggcagttgtgggagatgaagc

SEQ ID NO: 53204 - DNA, 257 bp, Glycine max
tcgttgcataggtgctttcattttacgttcttcaacattccgaattgaacttcagaggtccttgcaatggcaacgaattcttctgatgtactatcgccgaagcaacctcccttgccatctcccttgcgtttctccaaattctatcagtctaacatgagaatcttgattacgggaggagctggattcattggttctcacctagttgatagattgatggaaaatgaaaaaaatgaggtcattgttgctgacaactactt

SEQ ID NO: 53205 - DNA, 253 bp, Glycine max
ccctaggtctccttacacgatacacatcttcatcaagaccctcaccagagagaccatgactcttcaggtggaaagctctgataccatcgacaacgtcaaggcccagatacatgaaaaccgaagcgaattcccccggatcatcaacgtctcatcgtcgccggaaagaagttcgaggaaggtcgtagcctcggcgactacaacatctagaaggagttaacgcatcacctggtgcttcgtctccgtggtggcatgc

SEQ ID NO: 53206 - DNA, 252 bp, Glycine max
gtgaagctaatggctcgcacaggtttaatcttgctggctgtgttatggttctcagcactgtcactgagtcgttgacttgcagacgataatggacttgttatgaacttctacaaggaatgatgcccgcaggctgaagacatcatcatagaacaaggcaagcttctctacaagcgccacaagaacactgctttctcctggctcagaaacatcttccatgagtgagatgttcagagttgtgatgcttcactgttg

SEQ ID NO: 53207 - DNA, 245 bp, Glycine max
catgtggcgtcatacagaagttggaatcccagatgaagtgattactgaggttagatctgatgtaagcctagtggtgagaatggtttcaactgtggccaactacgactatgtcatagattgggaatttaagccaagtggcagcatcaaatctgtggttggacttactgggatattagggcttaaggcagggacttacaccaacgcagaccaaataaaagaggatatttacggcacactaatagcag

SEQ ID NO: 53208 - DNA, 242 bp, Glycine max
ggttgaatagttacgaggataattacaagtttaggagctataaggaagggaaggggttgaaggggtttgtgagagaattgaaggaggagtttgggtcggtggagtacgtgtacgtgtggcacgcgctgtgcgggtattggggaggggtgaggccgggggtggcggggatggcggaagcggcggtggagaagccaaagctgacggaggggttcaacggaacgatggaggatctggcggtggac

SEQ ID NO: 53209 - DNA, 257 bp, Glycine max
  unsure (1)..(257): unsure at all n locations
agacactgcaccaaacaccaacaacgctttagctctctctcttctctccataaccgccaccgggatctggcactaacagatcgccgctgctacatctgaacccgatccagccaacagatctctccaattcaaatggagaatctaatctctttggtcaacaaaatccagagagcttgcaccgccgtaggctaccacggcgataacagctcacgtcccacacgtgtggacgcgcgtcccgccaacgccgncgncggagg

SEQ ID NO: 53210 - DNA, 265 bp, Glycine max
tgtgaagaagcctcatcgttatcgccctggaactgttgctcttcgtgagattaggaaataccagaagagcactgagctcctaatcaggaagcttcctttccagaggttggttcgtgaaattgcccaggatttcaagactgatctgcgtttccagagccatgctgtgcttgcattgcaagaggctgctgaggcataccttgttgggctctttgaggacactaacttgtgtgccattcacgccaagcgtgtgactattatgcccaag

SEQ ID NO: 53211 - DNA, 254 bp, Glycine max
gtcaacaatgccaatgcaccatcttctcatttccttccttatcttctctctcactcctactccgacaacctccctcaactccgacggcctctccctgcttgccctgaaagccgccgtggactccgaccccaccggagttctttcctcctggtcggaaaccgacggcaccccatgccactggccgggagtctcctgctccggcgacaaagtaagccaagtttccctcccaaacaagaccctgagcggttacatcc

SEQ ID NO: 53212 - DNA, 252 bp, Glycine max
gttgagaccggtgtcttgaagcctggaatggtggtgacttttgcaccaactggactgacaactgaagtcaagtctgtggagatgcaccatgaatctcttacagaggcacatcctggtgacaatgtgggattcaatgttaagaatgttgctgttaaggatttgaagcgtggttatgttgcctcaaactcaaaggatgaccctgcaaaggaggctgctaacttcacagcccaagtcatcatcatgaaccaccct

SEQ ID NO: 53213 - DNA, 266 bp, Glycine max
gtcggccctgaatttggtttcttggaatgctgttatgaaagggtatgcaatgcatgggaaggctaaggaaacaatggaaatgtttcttatgatgctgcagagtggtcagaagcctgatttggttacatttacatgtgttttatcagcgtgcgcgcaaaacggcctgactgaagaagggtggcgttgttataatagtatgtccgaagaacatggcattgaacctaaaatggaacattatgcttgcttggtgacacttctcagtcgtg

SEQ ID NO: 53214 - DNA, 243 bp, Glycine max
ctctaacgtgggtctttcctttcccctttctgccgacgatcatgggtgtctcctctagatcagttatggccctttgtgctggtttgtagcttttgctgaataccagtaataatgaagaacgctattggtcaaactgttagggacctgaacagaggagtaaatcagcaagtgctggcagttcctgggcttgaaccgaaagttctcgatgctaccagctatgaaccatggggtcctcatggatca

SEQ ID NO: 53215 - DNA, 189 bp, Glycine max
gaaggaggcacctttgcactctactcattgctgtgtcgccacgcccgggttagcttgctgccaaacactcagcttgcagatgaggacttaactgagtacaccatggataatggaactgttcctgttgataagaaaaatgttgggttggggctgaagaacttgttggagaaacacagggatgctcaaagg

SEQ ID NO: 53216 - DNA, 262 bp, Glycine max
cgctctgtttctgtctctgtgtttgcggctgaggattccgaacgagcgaccttcttcgtttctcgcaaagtttaagtcatcatgggtaaggaaaagactcacatcaacattgtcgtcattggacatgtcgactctgggaagtcaactaccacatggtcatttaacgacaagcgttgagggaatgacaagcgcgtgtaattgagggacgtagaaggaggcagctgagtagatccaagagtcatcatttcagtctgggtgcctg

SEQ ID NO: 53217 - DNA, 267 bp, Glycine max
  unsure (1)..(267): unsure at all n locations
aggtgatttcagtgagtgatcggtgttcacttgatctcatcataatcgtcagcgtcaattgaagaagatgccgatcagaaacatcgccgtcggaaggcctgaagaggcgactcaccccgacacgttgaaggcggctttggctgagttcatctcaaccatcaatctcgagntcgccggcataggcactcggcaactccaataacaagcacatcgacaacggcgcagctaccccagctggccacaatctgtcaccatcgctcagcatcg

SEQ ID NO: 53218 - DNA, 260 bp, Glycine max
  unsure (1)..(260): unsure at all n locations
gcaaagctcatccttgagttaaaaaatggcagcagcttcttccatggctctctcatccccatccttggctggcaaggccgtgaagctgggcccatcagccccagaagtgggaagggtgagcatgaggaagaccgtcaccaagcaggtctcctcaggaagcccatggtacggcccagaccgagtcaagnacnttggcccagtcgcntgcgagcccccggccgatcgatccggtgatgtcctaggcgacgactgcagggaca

SEQ ID NO: 53219 - DNA, 239 bp, Glycine max
ggtggcccagcacaatgctggggttatggcagatcttgatttcttcatcggggatgaggcactttccaagtctcggtctagcagcacttacaatctcagctacccgattcggcatggccaggttgagaattgggatgccatggagcgcttctggcagcagtgcattttcaattattgaggctttagtcggaggatcacgatgtccgctggaccgagagcccatggaccgcgcccgagag

SEQ ID NO: 53220 - DNA, 159 bp, Glycine max
cccaagtactctaaggctaggtatgatgaaatcgtgaaggcagtctcttcttacttgaagaaggttggttacaacccagacaagattccctttgttcccatctctggttttgagggtgacaacatgattgagaggtccaccaaccttgactggtacaag

SEQ ID NO: 53221 - DNA, 258 bp, Glycine max
tagaggtggtgtctcgatcacgcgccgtggagatcgcgggcgtgtactcattttcgggtcgacccgttccactcgggtcgtcgggttggatccgtctcggcgacctctacgtcgaagaagagatagaattgctcgggagctcaaggtacctgcagcttccgctgggtcccaccacgttctgaccgtacgatcttcctatcgggaccctctcactcgagagcctttaaatcccgttgagcaggcaatgctcgttccccg

SEQ ID NO: 53222 - DNA, 247 bp, Glycine max
gaatgcccgccacgtgtgcggcgaggatcttccagctgacccgagagctcggtcataaatccgacggcgaaaccatccggtggctcctcgagcacgccgagcccgccatcatcgccgccaccggaccggcacagtccccgccatcgcgatgtccgtcaatggaacgttaaagattccgaccacctcaccttccgatcaagaacccggagagccgcccgagaggaagatgcgcaaacgacccgcgaat

SEQ ID NO: 53223 - DNA, 251 bp, Glycine max
gtgccgtctttggttcctcatggctgttatctgtctttatgatttcatgattagacaatgtggaattacataactggcgttgcacttaaagtgatgtgatttatgcatttatgcatgagaactaaatagatttttagattcctacttaaacaaaaactttccatgacagtagcatactgatgagactacacacacacacacaaaacaacaacaacaacaacaggacaacaacaaagcatgctcagtattga

SEQ ID NO: 53224 - DNA, 252 bp, Glycine max
attgatgaggaaaatgaacatgcaacaaaggtgccagaagatgttaaagaaggacactttgcggttatagcaatgcatggtgaagaaacaaaaaggttcgttgttgagttagattatttaaccgatcctgctttcttgaagctgctggagcaagcaagggaagagtatggctttcaacagaagggtgcacttgcagttccctgcacccccgaagaacttcagaagattatagagaatcgaccactgcgtaat

SEQ ID NO: 53225 - DNA, 251 bp, Glycine max
atcagcaacactatcttccacaatgattttggttatggtgatgttataagttggatgcaataatacaagtttctagtgaggaggaaggagatcttctttgtttgggaatccagaaaagtgacagcgtgaatatcattggacaaaacttcatgactggttacaaaatagtcttcgatcgtgacaacatgaatcttggttggaaggaaactaattgttctgatgatgtgctctcaaatacatccccaattaac

SEQ ID NO: 53226 - DNA, 177 bp, Glycine max
agcagaagaggatgcatataggagggatttgacaattaacagcttgttctaccatatcaacactgactcagttgaagatttcaccaagagaggcatctcggttgttaagtctggaaagatggtgactcctttacctgcaaaggccacgtcatcatgatgatccattacgagttcttc

SEQ ID NO: 53227 - DNA, 240 bp, Glycine max
ggcaagttgaagggaattcttggttacactgaagatgatgtggtctccactgactttatcggcgatacagatcaagtatttttgatgcaaaggctggaattgcattgaataagaactttgtgaagcttgtttcttggtacgacaacgagtggggatacagctcacgtgtcattgatcttcttgtattcgttgccaagaagtctctttaaggtgttacttcaaagtagcttgtcttcacat

SEQ ID NO: 53228 - DNA, 244 bp, Glycine max
ggcttcttcaagcattcttagaacgcggttcaaacacaatagcaagtgctgcagctgacaaaattcctgggttactaggtgtctttcagaagctgattgcatccaaagcaaatgaccaacaaggttttaatcttctaaacagtataatagagcacatgcctcctgaatcagttgaccaatataggaaacaaatcttcattctgctattccagagacttcagaattccaaaacaaccaagtttat

SEQ ID NO: 53229 - DNA, 205 bp, Glycine max
caatttaatcaccattgtacaacccaattcccttcgtcgttttcgattaagagagcaatggcacgtaccaagcaaaccgctcgcaagtccaccggaggaaaggctccgaggaagcaattggcaaccaaagccgctcgcaagtcagccccggcgaccggcggagtgaagaagccccaccgcttcaggccaggaacggtggctctga

SEQ ID NO: 53230 - DNA, 230 bp, Glycine max
gtctccttggcccaggccaagattgagaagatcaagggcagcaagaaggccatcaaggtgttctccagtgccaagtaccctgctccagagcgcctgcaggaacatggctccatctacacgggcgcccaggaccctggcctgcagagacgctcccgccacaggatccagagcaagcaccgccccctggacgagcgggccctgcaggagaagctgaagtacttgcctgtgtg

SEQ ID NO: 53231 - DNA, 252 bp, Glycine max
cattgttcttctcccaggttatttagaaaagcaaaatggtgaagatttgctgcattggtgctggatatgtggggggtcctactatggcagtcattgcacttaagtgcccatccattgaagttgctgttgttgatatctctaaatcccgcattgcagcctggaacagtgaccagcttcctatctatgaacctggccttgatggtgttgtgaagcaatgccgtggcaagaacctcttcttcagcactgatgttg

SEQ ID NO: 53232 - DNA, 222 bp, Glycine max
tcggagcgcagggcctcgtgctcaccagcgtcctcaagctgcgggggcaggcccaggccccgctacgcgtcatctgcaccgcgaggaacctctatggcgtcacgagcctggagccgcccttccagggagcccatcgactgatgtgggccaagatcgggcctgtcggcgccgtggtcgcctaggcgatcctgattgccatcgtctgctacattacccagacac

SEQ ID NO: 53233 - DNA, 265 bp, Glycine max
tctggatttattgatgttgaatgatgccctacagaatggggatttatatacataccaagtttacaggggttgccttaaaatggatggtccaacaatgataaatctagaactttttgtcattaatgaggatgttggcaaatcaggttcattgtacaattgtcttgataagtgtgtaatctcatctggaaagcggcttcttaggaactggatctgctgtccattagtagatgctgaaataattaacaacaggcttgatatagtggat

SEQ ID NO: 53234 - DNA, 223 bp, Glycine max
  unsure (1)..(223): unsure at all n locations
cttggagaaaggccagtccctgtgacggggcagccctctctgtccctcggtcagctcgtgtgaatcctgggacctcttccggtcggctctgcccgctgttctggggtcgactgccacgacttttgattcatcaagcttcctccaggncggagcggctatttttcctaaatgagaattgttacattgcaaattgttgaataaaatattttgcgctccttcaagc

SEQ ID NO: 53235 - DNA, 141 bp, Glycine max
taattatcaaacctaaccagtaaaaatggtgaccgtggaggaaatccgcaacgctcagcgttcccatggacccgccaccatcttggccttcggcaccgccacgccgtccaactgcgtctcccaagccgattaccctgacta

SEQ ID NO: 53236 - DNA, 249 bp, Glycine max
ttcgatcatctttattttttagaatatccccacttaacatggaataattaacactagcatttccatttttactaacacttcatctgttagtatcaggtgtagtagcaacaacatcgttcacactggttaacaaatgcgactcacagtgtggccaggcattctctcaaacgcagtattgctgcagcggcgcgtatgggtcgcccaccacttgcaagccttcgccttactcgcagattttcaagaacgctt

SEQ ID NO: 53237 - DNA, 124 bp, Glycine max
ttcttcaaactcgcaagcagattgaatctcgtaaccctcttgcatttgctcctaaagtcatcagagattctgattctgtacctgaaagcggggatgacccaaataaaactccagcttccgcacg

SEQ ID NO: 53238 - DNA, 255 bp, Glycine max
actgggtcttcctgattgttgaaccctgacccgaagtctctgggctagctactccccccagctcctagttgatagacatgggggttctggaccagatgatcccttccaatgtggtgctagcaggcaggatcccttctccacctccaaaggccctaaagggtggtgagagatcaccaccttccctcggcctgacatccctcccatcccatatttgtccaagtgttcctgcttctaacagacttggttcttagaatg

SEQ ID NO: 53239 - DNA, 270 bp, Glycine max
  unsure (1)..(270): unsure at all n locations
gtcatcatccgcagctgctgttattcgcaccgcaaactttcagtgagcctctcatcgncgtcnagnnnaagcgcanctccaaaggganaaagggaggcatccagaaggcagctgatcccnncgccaagaaggattgggacgacacgatggnnccnnctcnnnttcaagtgaaaaatgttggcaaaaccctcgtctctcgtacgcagggtaccaagattgcttctgaaggacttaaacatagagtgtttgaggtctccttggctgatcttc

SEQ ID NO: 53240 - DNA, 253 bp, Glycine max
cttagatcaatttggaatagcatcctgctacagcactaaagtatattgcaggcctactttaattggagggaactatggccttctcaataccaccacctttgctcccaatcctgactactacaggtaagtataattgaaaattgcaacaaacaaaaagagcatacttttttttccttgaaggttacttgaagatttctggtgattattacatcatgtttgaacatatctaatcctaggttctggcatagtttct

SEQ ID NO: 53241 - DNA, 242 bp, Glycine max
gaacatgcgtagctgaggaaactgcgctaaggcttggactgtctggaaacgtaggagctactggcactgaagcagcactcaccaggaagagaggtttctctgagactgaaactgaaactgagaggatgagtctgctaccactgtggatttgatgcttaatctttcttctaaggaacacgctgctgctgcagatccaactgataagcacaagactttgcctaaggagaagactcttctgcctg

SEQ ID NO: 53242 - DNA, 220 bp, Glycine max
gcactattgcttccactggtagagtgcatttggacattctgaaggatggctggagtccagcgttcactatctctaaggtgttattggccatcaaagacatcatcagcaatccagatccatactccccacttatgatgagcatttcacgtcagtatctgactgatagagcgacacacgatgaaatagcagctgagtggccaatgagatttgcaagataggg

SEQ ID NO: 53243 - DNA, 259 bp, Glycine max
gttttccggtgccttcgcgtcgctctgaatgtcatcggcggcgagaactcccggtggcgaggagggaaagcactaccctgctccactcgcccctcacgagggcgtcgtgaaggactccactctcttctgggacactctaaggcgctttcactttgttatgggtaccaaatttatgattcctgtgattggagggaaggagctggatttgcacgttctttacgtggaagttacgagaagaagtggctacgagaaggtagtt

SEQ ID NO: 53244 - DNA, 145 bp, Glycine max
agtacctggaccattctcactagacccctctctgcctctttggccaccacatacttgtggtgtcagatctggtacatgaatggccattctacccagatacattttggtttatttaagacatcagattccctagaatccttcgttc

SEQ ID NO: 53245 - DNA, 253 bp, Glycine max
gctgaaagggaacaaggtttacttcagatactgactgagatggatggattcaaactttccacagcacaggttatcatgataggtgccacaaatagattggatattcttgatcctgctctattgaggaagggtcgttttgacaagatcattagagttggtttgccatcagaggatggaagatttgccattttgaaggtgcatgcgaggaataaattttttcgctctgaggaggaaaaggagactctacttaagg

SEQ ID NO: 53246 - DNA, 253 bp, Glycine max
ggagaaaaccatagatggaaaacattactatacctttgaatatatacttacatcaccaaattattctagtgcctcctttgcaacaattgctataggaaatggttaagtaaccaacccagtaccctctcctatctcaatgtgtcagttgccttcataaaatgttctgtcatggtcccaattctacctaacgacgtgtgcttttcacaggaaggtactacacgttaattgttggagccaatgaaaggcgatggaa

SEQ ID NO: 53247 - DNA, 197 bp, Glycine max
cagttgcacaccttttgcaaaatggtaatatgcatgggcaagaaatatcttcaggaaggccagatgaaatgacagatcgagtctgggatttcgtgctctgtgatggcccgagaccataaagcgagatccctgccgctctgttgaacaagatgaaacatgaatttaagtagtggtatcgatttgatatccgtgtgtct

SEQ ID NO: 53248 - DNA, 274 bp, Glycine max
attcttctcagtggaagaactaccatcagatctttcaaatggttgtgacgttgtcatagatgcaatgtttggattctcatttcatggttctccaaggcctccttttgatgatttgctccagagacttgtctctttacataataataataatcagattggccaaaaaagatcagttatagtctctgtagatattccctctgggtggcatgttgtagagggagatgttgatggtacaggcattaaacctgatatgttggtttctttgacagcccca

SEQ ID NO: 53249 - DNA, 270 bp, Glycine max
ctgagattactactgatgacttattgcaagctgcacaaatggaagaacgaggaatgctagatagaaaggaaagaagcagtgagacatggaaacaagtagctataaatgaagctgcaatggctgttgtggctgtgaactttcctgatcttaaaaatatagagtttgtcacgattgctcctagagctggtagggaattgggttatgttcgggtgaagatggattcagtcaaatttaatcaaggaatgctcacacgacaatcccttcttgatc

SEQ ID NO: 53250 - DNA, 212 bp, Glycine max
ttaaattgaaggtattcgtgttcagagcttaaccataggtcatatcataatggatattgatttccgttggggtggtgatcctagtattattcaggctgttgaagctacacttgttgcatcaatccctattcagttgaaggatctacagttttcaccattgtccgtgtgatattccaacttgctgaagaatcccttgcatttctgctgttgtt

SEQ ID NO: 53251 - DNA, 113 bp, Glycine max
cgaacaagcaacatagaaagtggaatacattagcaatgatagagcaacaatggcggcgaagatgttttccatcctgatgctacctgctctatctgcatgtgttgctaacgcga

SEQ ID NO: 53252 - DNA, 195 bp, Glycine max
caccccgtgagcctcttgtcgagttcgctcgctacgttttcttcaagcaccacgcttttcgcgattcccgtgatgacccttttccctggaacgctctgctcaggtcgcactctcacgggtgtgaccccagaggggcactattctgctctgcttgatgatcgaaaatggggtgcgtgtggatggtactcgtattcg

SEQ ID NO: 53253 - DNA, 201 bp, Glycine max
ctaaccatccttattttatcggtgctcaattccatcctgaatttaaatcaagaccaggaaaaccttctcctttgttcttaggtacttctccattacatgtctgcattatatgtccaagttgactttaattgatcttcttgtagtatatgatctccaaacttcaatgttcttaggtacttcattgttgtatgctttccatta

SEQ ID NO: 53254 - DNA, 268 bp, Glycine max
ctttatgaagggggatttttcaatgccatcatgagctgtcgacgcaactactcacaaagtccaccatcagtggaatttacctcagagttatggcatcgcaatggttggtctgacaacatttattgtatcctgcttcgattagtacatgaaattcaatgatgttgttcaatttgcagtgtatcctgatgggcgagatagcatatcaagtcatcatccacctggtgaagatacgaatggttatgagcttgcaagtgagcgctgacgcctg

SEQ ID NO: 53255 - DNA, 271 bp, Glycine max
acacaaggcagaaagcaagctcatcgtagagtttaacaatggcagcagcctcctccatggctctctcttcctcatccttggctggcaatgccgtgaagctgggtacagaagctcccgaagtcgggagggtcagcatgaggaagaccgtcaccaagcaggcctcctccggaagcccatggtacggcccagaccgcgtcaagtacttgggcccattctctggcgagcccccgtcctacctcactggcgagttcccaggtgactacgctgggac

SEQ ID NO: 53256 - DNA, 243 bp, Glycine max
gaagcattagcaaaagcaagaagaactagtctaagcagaaatggcctcttcagtgatggcatctgtggccctcaaacctgcccctttcactgttgagaagtcctcagttagaggccttccctccctctcaaggaactcctcttcattcagagttgtggccagtggtggcaagaagatcaagactgacaagccttatggaattaatggtggcatggctttgagggaaggagttgatgcatctgg

SEQ ID NO: 53257 - DNA, 265 bp, Glycine max
gatgacactaggtagaattttggaggtgaagcattggtttaatgggtttggtttcccaagctgttcatgatggtggtcggcatgtcataggagttattcccaagacactcatgcctcgagagctaactggtgaaacagtgggagaagtaaaggctgtagctgatatgcaccaaaggaaggcagagatggctaagcattcagatgcctttattgccttaccaggtggttatgggactctagaggagcttcttgaagtcaaacctgg

SEQ ID NO: 53258 - DNA, 264 bp, Glycine max
ctagtttcttacaaggctctactctactgcttcaccttctgctctagaaaattcagtggtgatacatggcttcggctactctctctgtagccaaaccagcccttcaggcaaatcggaaacgcttctctgaattctctggcctccgcagctcatcaggcttcactcccttttctagaaatcatacaaggatttccattctgtcattgccttccagacctatgcagttggaagcagtggaggatacaagaagggtgtgacagaagc

SEQ ID NO: 53259 - DNA, 257 bp, Glycine max
ccacttgctctggcaaacgtagttgcaaaccagccacaacaacagctgcaacagtttctgccagcgctcagtcaactagccatggtgaaccctgccgcctacctacaacagcaacaactgctttcatctagcccgctcgctgtggccaatgcacctacatacctgcaacaacattgttgcaacagattgtaccagctctcactcagctagttgtggcaaaccctgctgcctacttgcaacagctgcttccattcaac

SEQ ID NO: 53260 - DNA, 261 bp, Glycine max
ctagtttcttacaagcctctactatactgcttcaccttctgctctagaatattcagtgctgaaacatggcttcggctactctctctgtagccaaaccagcccttcaggcaaatgggaaaggcttctctgaattctctggcctccgaagctcatcaggcttccttcccttttctagaaaatcttcagaggatttccattctgtcattgccttccagacctatgcagtcggaagcagtggaggatactagaagggtgtgacag

SEQ ID NO: 53261 - DNA, 228 bp, Glycine max
gtagaagtcaggtgtcaaattggtttataaatgctcgagtgcgtctatggaaacctatgattgaagagatgtacaagcaagataattgtattgctggcatggactcaaattcttcatctgaaaatgtgtccaaggtaacaaaaagttatgtcaagacctccaatgatgtgggtgatgattcgcagcactgtcaaagtccaattgtggccgatacaaatcacagtggtg

SEQ ID NO: 53262 - DNA, 265 bp, Glycine max
cagacacttcaaagaggacgcaggaatctgtggcatctcactgcaagtcgtgtgtcagtattgctttcttctgctgcagtctgtactgctagcattcatcaattcttgaaaaattatgaagacctcggtgtctgtatttctgactgcgggaagccttttgtggaattgaagcagttgaatttaggcagaagttaaaggttgtctgtgaaaactatttcatagcttttcatcgactaaatgtgcatgcactaaaaatggttttgga

SEQ ID NO: 53263 - DNA, 158 bp, Glycine max
ctagcaacatagaaagcacaatattgtaccaataatggcagcctaaatattttgcctcattatgctccttggtgcttctgcaagtgctgctacggcgagcattttcccgcaatgctcacaagctcctatagcttcccttctcccccatacctctcacc

SEQ ID NO: 53264 - DNA, 264 bp, Glycine max
  unsure (1)..(264): unsure at all n locations
ctcgggcaacgttcagcgctagctatcatacagtcncgatggaccgcacgaagcagacggcgaggaagtccagtggcggcaacgcgccaaggaagcagctggccaccaaggcggcgcgcaagtctgccccggcgaccggcggagtgaagaagccccaccgtttccgccccggaacgtcgcgctccgggagatccgcaagtaccagaagagcacggagctgctgatccgcaagctgccgttccagcgcctggtgcgtgagatcgc

SEQ ID NO: 53265 - DNA, 253 bp, Glycine max
caaacgtcattgcagtctccgtggaatacgggttgttcccgacccgacccatacccgcttgctacgaggattcctggaccgcgctcaagtgggtcgcggcgcacgcaactggaaacggatccgagcaatggctcaacaaccacgccgatccagaccgtgttttcatctccggcgacagcgccggcggcaacataacccacacactgctaactcgggtcgggaagttcgggttaccgggcgccagggttgtcgg

SEQ ID NO: 53266 - DNA, 272 bp, Glycine max
ctgattcaacgatggacgccaatggcaattgggaagaggacgatgacgaggagttcgagttctcacggaactattttctggccaaggaactcgcctcctcctccgccaagaaatcgaaacacaagctcaccgacatcgatgtcgttgatgaacaggaattgagggatgccgcgtcgaaaattgaacccaatcatgaatacgagatcactctcttgttggattcgtacaaaaccagcactcctgaatggatttttgcgctaaggtgcggtttt

SEQ ID NO: 53267 - DNA, 170 bp, Glycine max
gacgagcgctacaagaacagggagctgctcatcatgcgatccatggatcactgcaatgctgtcaccctgaagcattgcctcttctccaccacaagcagagatgaactttctctcaacttagtgatggagtctgttcctgagtcactacatcgtgtgctgaagcactacag

SEQ ID NO: 53268 - DNA, 285 bp, Glycine max
ctgaaatccagaggaacccctggtgattggagccatatcattaagcaaattgggatgtttactttcactgggctgaatagcgaacaagtcgcattcatgaggcaggaataccacatttatatgacatctgatgggaggatcagcatggccggtttgagcatgaggactgtgccccatcttgcagatgccatacacgctgcagttactcaactgaaatgaggatagtatcgcagctttcgtgaataaaacctgaatcacccacaacaatgttctaagtactcagcc

SEQ ID NO: 53269 - DNA, 265 bp, Glycine max
gatgatgttggcaaatttcttcctatatacctatccagtgggattctgcagcatgatccattcgaggtacttgaccaaaaaggtgtgggtcaactaatcaagatttgcacagagaagggtcgtgctgctagaccaaacttgaaggttggaatatgtggggagcatggtggggagccttcttcagttgcattctttgctgaaatcggacttgactatgtttcatgttctccttttagggttccaattgctaggcttgcagcagcac

SEQ ID NO: 53270 - DNA, 224 bp, Glycine max
ttcatggtcaccgctggcttcctctggtggacccttcactcggccaagaagttcagaatccccaggctggtctacttcggcatgagctgttacagcactagcctttgcatggaggccaggagttcgaaaattttgagtgggccccagcccgatcacgagttagtcgagttgactcggttcccatggatcagactctgcaaggaagactttgacttcgaatatag

SEQ ID NO: 53271 - DNA, 247 bp, Glycine max
ctttctcttcttccctttcctcctcctcctcttctctatcaatttctccttcttttttatcatacacttcttcaaattctacacactttgccactcatgctgccttcagatcagtgccagcgccgccgagaagaagaaggtgctcatcgtcaataccaacagcggcgggcatgccatcattggcttttactttgcaaaggagcttcttggtgctggccactctgtcaccatactcactgttggcgat

SEQ ID NO: 53272 - DNA, 254 bp, Glycine max
actccaccaccaccattattattattatcatcaccacatggctatggaatgaggtcatcacctagtgatgaagtgaactgtggagatgaagtgaaggcagaaaacaagcagaggcagcagacataaaagtgacattgattcaaacccatgtgaacttgaaaattgagtgccaaaggaagccagggcaattgttaaaggtcattgttgctttggaggaccttaggctaaccattctgcacctcaacatcacttcc

SEQ ID NO: 53273 - DNA, 247 bp, Glycine max
ctcgagccgcatcaccagaagattgtggtggttgacggtgcgatgccaggtggagggtcatttaggcgaagaattgtgagttttgttgggggtattgacctctggatggaagatacgacactgccttccactcactgttcagaaccctggacacagcacaccatgatgattttcatcagcctaactttcctggtgctgtaatcacaaaaggtggtcccagggaaccttggcatgacattcactcccg

SEQ ID NO: 53274 - DNA, 246 bp, Glycine max
aatattaatgccaaacaataatttcgaggtcaagaaaataaataatggtcacagtgttactagtactactactggtactgttgctactgctactactactactcgccggtgaattcttcttcttctcggtggccgaaggcggaagttcatgctttgataaggataaggacaagtctagaaaccaagtatcaagagaatggaccaaaagctccattgtgggaagatatctcaattgcaatgcaaagg

SEQ ID NO: 53275 - DNA, 246 bp, Glycine max
caaagctgagatctgagtgcgaggaggcattgaaggatggtgacttattaatgaatgtgggaaagctgaaggaagcattgccctactatgagaaggttatggataaattaaccttccagagtgagcttcatggattagctgctttgcagtggtcgatttgtcaagactccctcagtaggtccaatgaggctcgaggtatgtatgagaagcttaaatctcatccaaatcctaaagtaagcaagaaag

SEQ ID NO: 53276 - DNA, 255 bp, Glycine max
cgacactcgcgtctcagcctcagtttcggatctctcccttctctcaccaatttccagtgctgctatttgtatgttgtcttagtggaagtttttgtaggatttgaaaaatggcagattccaaaccaggattgaggaagccagtgttcaccaaggtcgatcagcttcgtccagggaccagcgggcacactttaactgtgaaggtggtcgatgctaagatggtgatgcagaaaggtcgttctgatggtcctcaatccc

SEQ ID NO: 53277 - DNA, 255 bp, Glycine max
aaggagtcgaacttacttaactataagaggatatacaacaactaacgtgcaacctccaaagttatacaaatgtgcacatggaacaaggtactggatgagaatgcaaagggaaaactctctcaattttgcctaattccggcagaaaatattgttactctttatgatgttcccaacatctggcacattcctttgcttttaagagatcagaaggctcacgaagcaatgtttaaagtgctgaaccttcatggtgtagct

SEQ ID NO: 53278 - DNA, 247 bp, Glycine max
ctcgagccgctcgagccgctttgacagactgcggcatagaagacctagtcctatggctacttcaaacagcatgtcaagtgtcactggaacgggattgggtggatggaatagtcttcagcaggagagattacgcggaactcctggaatggcaatggactggcaagttgcacctgcaagtcctagttcatacacagttaagaggattttgcgcttggaaattccagttgatgcataccccaacttcaat

SEQ ID NO: 53279 - DNA, 246 bp, Glycine max
agttggtgttgtaacaactctaaggaataattcatcatcctatgaagttgggcaagagacatactcatgtttcttgaggctgaaaagcacagttgaagaagatgcaataaggttgcagcctggactagtgaagtccatatgttttttccagatagccttggagatgatttgattgttgaagttcaagattccaagggaaagcattttggccgtgttcttgtccaagtggctgctattgctgacgat

SEQ ID NO: 53280 - DNA, 199 bp, Glycine max
gtaatgtgtcatagtccaggtttgagttgagctttgctgtaaatgtcttaggcacttacaccatgacagaattgatggtaccattactgggaaaagcttcccctgatgcacgtgtcattacagttcttctggtggaatgtatactactcctttgaccaaagatctacaggtaactgagttatgatgtcgtcagcttact

SEQ ID NO: 53281 - DNA, 160 bp, Glycine max
attgaatctcagaattctctaaaagagatctttcactgctctatgaagacagaacgggctgtgcttgattttggagatgtctctgctctcagatctcctcaaccttaacctctccgataccaccgagaacgtgatcgcagagtacatgtggatcggagga

SEQ ID NO: 53282 - DNA, 245 bp, Glycine max
tgattttgatgctaaaccaatggtcatgctccttggtccatattccacagggcgaacaaccttcatacaacatttactaagatgtgattatccaggagcacacattggaccagagcctataactgacagatttgttgttgtcatgtctggtccgcatgacaggagtattcctggaaatacaatagctgttgatgctgatatgccgtttagtggccttacaacttttggtggttcatttttgtcga

SEQ ID NO: 53283 - DNA, 238 bp, Glycine max
gaagtttgatgaaggttgtgaattggcctgctttctcaagaacttgggtgatgttggtggggcccactgataatgcattctcaagcctcaaagcagggacactaaactccataaactcacaagaccaaatgcagttgatacagttccacattctccccactctctacaccatctcacagttccaaaccgcaagcaaccctttgcacacgcaagctgggaacagtgatgatggagagta

SEQ ID NO: 53284 - DNA, 238 bp, Glycine max
ccaaaacaaacagagcaaaagggtattcaaaagcagaatctttgacaggccagagacagtaaaactgtaaaacgttacctttccggcgtcttgccatgcgactcccgtgagagcctcaacggccaaagcaccgagagaacccagcattgcccaccttccatgaatgagttcgcactcacggaacctctgaatcccgaaaacctccgagtagggctgaaacggcgtcggcttaacctcg

SEQ ID NO: 53285 - DNA, 277 bp, Glycine max
tcaagtccaacctacccctttttcttctcccaccaacttcaccgtcttcttcctcgatcatgtctcacttcaagggcaagtaccatgatgagcttattgtcaatgctgcttacattggcactcctggatcagggtattcttgctgctgatgagtcaacagggacaattggcaagcgtttggccagcatcagtgtagagaatgttgaatccaacaggcgtgctcttagggagctgcttttcaccgctcccggtgctcttaaatatctcagtggtgtca

SEQ ID NO: 53286 - DNA, 239 bp, Glycine max
gcccaacacgttgaagaggctgagaagataggattggactcctccaagcatacaaatcttcatcttggggcgaggaatgtgaggcaacttaacagagccactaaaacgcttgtccttctggggatcatagtttttcagcccaagatgaagatttgtatgcttggagatgcccaactcgttgaagaggctgagaagataggattggactacatggatgtcgggccttgaagaagcttaac

SEQ ID NO: 53287 - DNA, 268 bp, Glycine max
caccaattggcaagaagaagttcgagactctttcctacttgccagacctcgatgatgcccaattggcaaaggaagtcgaataccttctaaggaaaggatggattccttgcttggaattcgagttggagcacggtttcgtgtaccgtgagcacaacaggtcacctggatactatgatggaagctactggaccatgtggaagctgcctatgtttggctgcactgatgcttctcaggtgttgaaggagactcaagagctaagactgcatac

SEQ ID NO: 53288 - DNA, 267 bp, Glycine max
atagggtgcaaccctttgataaaagttatcagtacctcttgtttgctgctgaaccatacgaaatcgttgctttcaaggtatactcttttcttaccttttatggtctttctttgctcttgcctttttcttttgcccctgtttttcgtcttcaattacaggtgccgagcacggagattgacaagtccactccaaagttcttctcgcactgggatcctgactcaaagatgttcacgctgcaattgtatttgtaaatccaagccgccagag

SEQ ID NO: 53289 - DNA, 265 bp, Glycine max
cgcgtcgctccgcgccagtttcaccggacgaatatcttggagtttggagcgatccgagaaaaactctgtaaacatgttggtttaccaggacctccttacaggtgatgagcgtctctctgacttcttccgttacaaggaaattgtgaatggaatgctgtgggaagttgaggggaagtgggttgttaaaggagcagttgatgtagacattggtgcaaacccttctgctgtgggtggaggagaagatgagggagttgatgatgcagct

SEQ ID NO: 53290 - DNA, 267 bp, Glycine max
tatcgagccgaatgcggctcgagcaggctcgagctctctaccaatatacaactgatggcagatagattgtcgacgtgctcatcgagcaaaacattgttcccggtattaaagtcgacaagggtttggtaccccttgctggttccaacgacgagtcatggtgccaaggtcttgatggtcttgcctctcgctcggctgcatactaccagcaaggtgaacgtttcgccaaatggcgtactgttgtgagcatccccaacggtccctctgctc

SEQ ID NO: 53291 - DNA, 187 bp, Glycine max
gcatcagcggagttgtaaattaagagcatggctgcacaaggtcttgtatcatcatcttctcttaccttctcagcggaggctgcaagacaaggtcttggaccaagatcactcgaatctccatttggcttctccaggaaagcctcctttcttgttaaggcagctgctactccccctgtcaagcaaggat

SEQ ID NO: 53292 - DNA, 175 bp, Glycine max
ctcaattatcacttatgcttcttagtgcctcatataatttcaatttgatttcaattggtaatttcaatcgacatctatcttgttgggcctatgcttcgtcgccgaaggtcttacagggagaagcagtcttcggcggaagttgtttgtataaaacggccgaagttcctctttgtga

SEQ ID NO: 53293 - DNA, 170 bp, Glycine max
aggttccatacgggctgttggtatggtccactggtgttggtacattgcctatgattcaatctttggatctcccactacgacctggtgggaggattggtgttgatgagtggctccgtgttccttcggtacaagatgtgttaacaataggagactgcagtggatttgttgaa

SEQ ID NO: 53294 - DNA, 234 bp, Glycine max
ctcgagccgctcgagccggttgtagggtggaggatcggacacgcgttggctcactttagctttcaaaacgtcggtttcaaccgcacgcccccttattagtgtgtatagtgagaagaatgaggccacaggacgcacagttgctctacctgcggtgttcaaggcacccatcaggcctgatgtggtgaacttcgtgcaccagaacatggccaagaaccatcgtcagccatactgcgt

SEQ ID NO: 53295 - DNA, 244 bp, Glycine max
atcgacctgttaacacattttgcccttgtcacttaattggttcaaataatgtccatatcactggattggcttactcaagctttagtgaactccttgtttcttataatgatgagctcatctatctgtttgaaaagaatgtgcactcagattcctcaccttcatctgctacatctgaggatccgaagaatattcatgaggcccaagtttactcaggccacagaaatgcacagacaattaaaggagt

SEQ ID NO: 53296 - DNA, 240 bp, Glycine max
gctaatgaccgtaagatgcttgcttgcaacagccatccttagtgcatctgtatctccaaagaatcgcggcacaacaactacaacaacagttgctaccaacaatcaatcaagtagttgcagcgaaccttgctgcttacctccagcaacaacagtttcttccattcaatcaactagctggggtgaaccctgctatctacttgcaggcacaacagctactaccatttaaccaacttgtcggga

SEQ ID NO: 53297 - DNA, 246 bp, Glycine max
atcaaagttacacgttcggtacgtgttcccttttccttgggctcttattctgattatgctgattgcgatgttattcctatggaagcatgctctttgttacttggtagaccgtggaaatatgatactgatagtttacatcatggtcgttcgaatcattattctttcatgtttaagggtcagaaaataattatccatcccatgaccactgaccaaattataaaagatgatcttgctcgggctacaaaa

SEQ ID NO: 53298 - DNA, 249 bp, Glycine max
ctcagatgcaatattgtgctgcactctaaaggcattgccagtgttcactttctcgaaccaggctgggcttgacatgctggagaccacccttgttgcattacaagatacacctttagagaaaatatttttcgtccatgatcatcaaatatttttttcagagtttccccagattattcaacaggtctacaattttgttgtaataaaagcattgattccacttccatatggcttgctattggatgtttttcc

SEQ ID NO: 53299 - DNA, 243 bp, Glycine max
actcaccaaagccttcctagaacgataaaaaaatcagaagagcaattttccctcaccaaagaagaagaaccaaacaatggccgatcaacttaccgatgaacagatctccgagttcaaggaagccttcaacttgttcgacaaggacggcgatggttccatcacaaccaaggagcttagaactgttatgcgtacattgggcaaaaacccaactgaggcagacctccaggacatgatcaatgaagt

SEQ ID NO: 53300 - DNA, 217 bp, Glycine max
gtagtggctaacccattggtcgccgccttcctacagcagcaacaattgctgccatacaccagttctctttgatgaatcctgtcttgtcgaggcagcaacccatcgttggaggtgccatcttttagattacatatgagatgtactcgataatggtgccctcataccgacgtgtgtttcctagaaataatcaatatattgattgagatttatctcaaaa

SEQ ID NO: 53301 - DNA, 253 bp, Glycine max
gcgatgcggccaagctgatctcggacgccactgcctcggccgggatggggctgatcagctaaggaggattgaggcgtccagggaggtggcggccacgctggcgaagtcgcccaacgtctcgtatttgcccggtggacagaacttgctcatggctctcggtccttcgcggtgatcattgtggcggtgatggtaatctgtttgttgaattgattttgaagggctcaacgatgctgtgtgatgacatgcttggatc

SEQ ID NO: 53302 - DNA, 262 bp, Glycine max
ataagaagatgtcacaacatctttgcaccacgcgcgagatcaggggcccttcatgcgaactcttcagggcgcggacacgttctccttagcgagcggcgcgatctcctcgccttcgacccctggctcgccgccggcgaccccgaggctgagcagcacgttctcccagttcttggcacggctcttccaggagagatcctggatcatgcagttcctcaccatctcctcgtacgcaggagtgccgaccaccttgatggcgcgctgc

SEQ ID NO: 53303 - DNA, 201 bp, Glycine max
aaatacttttggagggatcaattcttatcctgcttcagatatctctatcagatcatgaggaactaaatagtaacgttcctgatccagtggaagagatccgtcaacaagttggcaggatgcctggggatactgttctcaagattctgatgcagaaagttcgtactctagacttaaatttgcttgtgttggagcggtatatgg

SEQ ID NO: 53304 - DNA, 257 bp, Glycine max
caaaggtaactgctgtaatagggctgacggttgttggaggaacaggtgatagaggtaagatgcctgctgcctacccccagcaatttcttccattcaaccaactggcagcattgaactctgctgcttatttacaacagcaacagctaccaccattcagccagctagctgatgtgagccctgttgccttcttgacacaacaacagttgttgccgttctacctgcacgctgcgcctaacgctggcaccctcttacaactg

SEQ ID NO: 53305 - DNA, 228 bp, Glycine max
atttgtgactgcaagatacaccattctgtagatggactccgtttggatatctgaaggtgatatcatagaggacagtttactaatgggtacggactactatgagaccgaagctgataaggaactccttgccgacaaaggtggcattcgtatcagtattgggaaaaattcatgcatcaggcgagcaatcattgacgacaatgctcgaattggagacaatgttaagatact

SEQ ID NO: 53306 - DNA, 224 bp, Glycine max
gttctctcacgccgccgccgccgcacctgccgcctcgtctcccgttaaaaagtcggctgctcggtctgcggttgctcatgttaatggcggtaaagatacgaataggagggaaaaaagcagagaggatacctacattgttgttagagatcgaaaagtcagaataactgaggatgcgtctctatatgcactttgtagatcttggttgagaaatggtataaatgaag

SEQ ID NO: 53307 - DNA, 181 bp, Glycine max
ttcgccgttgggctgcattattacgtcacggtctttcacagggtcgtgctgcagcaaccgcccaagaccaattggaagatccacgccatttacgccacgtgtttccttctatcagctccggcatggcaacagatgagcagaaaacacgtggcgtaaatggcgtgcttgccggagctgatag

SEQ ID NO: 53308 - DNA, 248 bp, Glycine max
cattgagttggtgatgacccaggcatctgtttcgaggcccaaggctgtcaaggccctcaaggcttctaatggggacattgtcactgccatcatggatctgacaacttagggtgatatttctgtccgtgccacttttgttttggagtgctattgcaacttgagtgttatatgtggacctatgcttcgatgatgttaccatgattgcttcttgggtcaaggtcattccaacaaggtttcatctttgctgg

SEQ ID NO: 53309 - DNA, 252 bp, Glycine max
caaagcggcagtgcgtagagaggatcgtcgaacagaacagcatgaagatggtcatcgttctcgtcgtgtgcctggctctgtcagctgccagcgcctctgcaatgcagatgccctgcccctgcgcggggctgcagggcttgtacggcgctggcgccggcctgacgacgatgatgggcgccggcgggctgtacccctacgcggagtacctgaggcagccgcagtgcagcccgctggcggcggcgccctactacg

SEQ ID NO: 53310 - DNA, 243 bp, Glycine max
ggcgttttcaagctttctaacataagtggcaagaagcgggaacctataccagcttcagcagttgaagctgacactgatgtggatagtgacagcagcagcgatgaagaagatgaagagattaatgaggatacaaaacccatcctacatctaaaaaaggtggctcatgcggggtgtgtaaatcggatacgctcaatgactcagagaccacatataagtgctacgtggggacatactggtcatgtt

SEQ ID NO: 53311 - DNA, 280 bp, Glycine max
ggctttggaaacacatggcttccctgttccaaatgcaatagaaagcaatagacattgtgtagtcatgtcactcgtccaaggttatcctcttgttcaggttaagcagttactgaatccagagacagtttttgaggcaattcttggtcaggtcgttcggttggcagagcatggtctcattcattgtgatttcaatgaatttaacatcatggtactttgaccgtgatgttgaatgcatctttaagtttttcaggaaaaggttcaatctttcttttcaagaaag

SEQ ID NO: 53312 - DNA, 282 bp, Glycine max
aaattgggaagttttatcctggtttaacccaagaacagatagtgggcattgtgaataggtttggtgagctcaaaggtgctaagtgtgaagacattgatgtggcaaaggctgcattgtacttagcatcagatgaagcaaagtttatttcaggtcaaaatctcattgtggatggagggttcaccagctttaaaaatcttacattcccttctccagatcaaactgcttaacctcaactgtttattgagtataatttctatgcattattgtcggtgtaaatcaacc

SEQ ID NO: 53313 - DNA, 267 bp, Glycine max
gtgagatatcccccatgttgcagcaattcccccacaatcctgtatggttcttgcttcaggaaggaaggcgagtgcatgttattgaaagggacttgactgaaccagacaggattgtgggggaattgctacaacctgggggtatcttaagttaattgaattgggtctccaagattgtgtgggtgagattgatgctcagccagtactttggctatgctctttacaaggacgggaaaaatactaagctttcttaccccttggaaaattttg

SEQ ID NO: 53314 - DNA, 265 bp, Glycine max
aaccttgacacgggcattgttgatttgaaagctaatgtaattgaactacaagggactccaaagactgttcatgttgatcaattgactggggcctcaacaattctgtttacattcatcttagatcgtgggatcactgggagttggcaagtacaatgctgaatgaaaagcagaaggatgggcttggttcagccaatgatggcttctatgagtccaagagggagtggttgggaagacgtcatttcattttagcatttgaaagttccgc

SEQ ID NO: 53315 - DNA, 251 bp, Glycine max
ggagattggatcggctatgtcgcttgtgaagcttgattgttcaaataatcagctcacggaacttcctagctcgcttggaagatgcttagaattgtcagacttaaagggatcaaacaatcttattacaagttgccagaagatttagcaaattgttccaaattgtctaaactagatatggaggggaacaagctaacagtgatatctgaaaatctcatttcatcatggaccatgcttactgaattcaatgcatc

SEQ ID NO: 53316 - DNA, 220 bp, Glycine max
acgttttgacttcttccgaatgctatcttgttatcacactaccattggcttctacttcagtaccttggtatacccggtacctaccttattgtggcatatataaatatgatccatcgcaaatactgatttgattttaacagataagtgtcctcacgagtttatgtattcctttatggatcgctctatcttgctcttagtggactcgaagaaggtttgaacc

SEQ ID NO: 53317 - DNA, 258 bp, Glycine max
gaccagctcccctctcctgatcgtcctgttcctcacagcagcagccctcgcggccgagccagcgaagcaagcggcccccgcggcacaggagacggccgtgcacatcgtgtacgtggaccgccccgaggagccgaccctgaggagttccacatccgcaccctcaacctcgtcctcggcagcgaacagaaggccagggacgcagtgctctaccactacaagaacggcgccagcggcttctccgcgaagtcacccccagca

SEQ ID NO: 53318 - DNA, 250 bp, Glycine max
gtgaagtatgtgttcgtgtatgtcccatcgatctacctgttgttgattggaaactagaaactgatattcgaaagaaacagttgcttaattatagtattgatttcggaatctgtatattttgtggaactgtattgaatattgtccaacaaattgtttatcaatgaccgaagaatatgaactttcaacttatgatcgccacgaattaaattataatcaaattgctttgggccgtttaccagtgtcagtaatt

SEQ ID NO: 53319 - DNA, 260 bp, Glycine max
cttttgtctgtatggtacaaggtatcatacctgaaaagaaaaagtcaatgaaaagggggcgtgttcattcggtcttcaaagctaaggaatataatgctaccatagagttctattgggccccatttctagtggagtccaacactgacattcgtatcataggagacccaaagaagagaataataaaagtggatcaaatcacggagcgtgccaaaaactggaccgagtggatatactagttttcaacacctatgtatggtgga

SEQ ID NO: 53320 - DNA, 214 bp, Glycine max
gctcttggtgcaactgttataggaactgtatccaataaagagaaggcagctcaagccaaggaggatggctgtcatcatgttataatctacaaagaagaggattttgttgcccgtgtcaatgaaattacatctggcaatggagttgaagtagtctatgattctgtaggaaaggatacatttgagggatctttggcatgcttgaagctaaggggct

SEQ ID NO: 53321 - DNA, 208 bp, Glycine max
gctcgagcggctcgagcggctcgagtgacactaataatatccgatcatctagaacgcaggcgttgagttgagaatggaaggagggacacgaggcacgattctggtcaccaacgacgacggtatcgatgctcctggcttaagagcattggttcactccctcgtcaacgccaaccttttcaacgttctagtgtgcgctcctgatagcgag

SEQ ID NO: 53322 - DNA, 228 bp, Glycine max
gagagttgcaagagcatttgactagctgggatgccctgcgagctgcattgcccgttggaactgtcagtggagcaccaaaggtttgtaattttctcgacttctttttagtcaactacgaatgagaaaacgtttttgttttcattttctgttttttacttttaattacaaaactgtttaccttacttccaatctatttcctgatttgaaatatgtgttaaaactttccac

SEQ ID NO: 53323 - DNA, 167 bp, Glycine max
gattttggcatccgttatggcttccagtggccagctcttatttatcgtctatcaaaacaacccggtgggcctcccaagctgcgcattacagggatagagctcccacaacctggtttcaggccagcagagagagtccaggagacggggcttcgacttacaaggtattg

SEQ ID NO: 53324 - DNA, 162 bp, Glycine max
aaaatgccagagacggctcgctacacggcccttgtagccaagaatgcaaaacaagctgcttcagacatgtctaaggtgttgcaagttgaggttgaagctgaagaggacaagttgcagcacatggttgagagtgaaaaccaaaagtatggcttgttcagcaag

SEQ ID NO: 53325 - DNA, 254 bp, Glycine max
ctcgagccgaatcggctcgaggtggtattgtaaacaacactttacgacctccagttccaacattttgtgatccagaatggagattgctgatggagaggtgctggtcatcagaaccatccgaaagaccttccttcactgagattgctaatggattacgttccatggcaaccaagatctctcccaaaggacaaaatcaacagcagcaacctgctgtaccacaaagtcaagtgcagaaatgagttccaacgactgca

SEQ ID NO: 53326 - DNA, 171 bp, Glycine max
gttcatataccacaaggccttccccatgccagcattgtcattcaagtttcagaacacagaccctctttctggcaacgaagtggacgatgctgtgcagttcgtgtcctcagtctgttggcgcggccagtcatcgtccaccttgctcgctgcaaattccacagggaatgtcaa

SEQ ID NO: 53327 - DNA, 245 bp, Glycine max
gatggatcctccaccgaagagctggagcatccacacccgatccgagatcatcgcaaaatacgaggtcatggagcgggtcgggtcgggagcctacgccgacgtctaccgtggccgtcgcctctccgacggcctcaccgtggccctcaaggaaatccacgactaccagtccgccttccgagaaatcgacgcgttgcagctcctcgagggctccccaaacgtcgtggttttgcacgagtacttctggc

SEQ ID NO: 53328 - DNA, 256 bp, Glycine max
gtgttcgtaggcatggaaggggtaattgggatgctatgctcagagatcccaagttaaagttttcaaagtacaaaacatctgaggatttatcagtgaggtgggaagaggagcaggtaaaggtctttcaggggccaccttttcctgcacaaagatcattcaagacaacaaaatctaccaaatcggcacattttccaatctctgatggaatgatggaaagggccttgcatgggagcaaatttcttttgccaccaaaatt

SEQ ID NO: 53329 - DNA, 230 bp, Glycine max
cgtttttgctcttttaccatgctaattctgattacgtatgattaatgctatcagattgtgatactgatggagcaccacttcaaaacactcataacacaaagcacatagcaaagctcatccttgagttaaaaaatggcagcagcttcttccatggctctctcatccccatccttggctggcaaggccgtgaagctgggtgcatcagccccagaagtgggaagggtgagcat

SEQ ID NO: 53330 - DNA, 236 bp, Glycine max
tagaattgtacccagtgttggagtccatacaaaaatatctctggccccggctctgcaagctagaccaaagaacattgtatgagctgcattaccagctgattacatttggaaaggtcttctgtactaaaagcaagccaaattgcaatgcttgcccaatgagaggggaatgcagacactttgcaagtgcttttgcaagtgcaaggctcgccctgccaggatcagagcagaagagtata

SEQ ID NO: 53331 - DNA, 233 bp, Glycine max
caatgttccatcatggaaaggattgtataggccgcgttgggaatggctacaaacaaatgtagcatatgatgttgctggtgctgttgaagtcatcaatgatttaggattggatactcttactttcttggctgtgaccgtcttaattgtgcctacattcaagtcacttaaagccagtcctatacttggtttcttctgtgctggtgtggtactcaatcagtttggtttaattagaa

SEQ ID NO: 53332 - DNA, 228 bp, Glycine max
cagaaaatcaatgtcaaaaagaggacaggctatggtacactaggggatgtcctagccaatatggttggcttgcattagttggcctagcactctacatcatattcttctcacctggcatgggaacagttccatgggttgttaactctgagatctatcctctaagatacagaggaatctgtggggggatggcatctacctcaaattgggtctctaatctcattgtggccc

SEQ ID NO: 53333 - DNA, 231 bp, Glycine max
gcattggctgttcctatagggtcagtaggaaaatggtgcaactctctcttcaagcgctatgagaaagctctaaagggacagcgggaagtgatcagctcaatgcagattggtactttcatttcattgaaggacttagacaacattcgagtgcttgtcaacaaattggagggagttctagaatcattattgcagaatgctgattttgccattaaaaatgaggatgttatgaag

SEQ ID NO: 53334 - DNA, 251 bp, Glycine max
tcaaaagccacgacaatggcagacattacccatctccctatggaacagcttcaggaccttgaatgctgcttagactctaatcctccttgggctgaagctatcctactagcatttcaaaattatatattgatgctgggaacaagtgtgatgattccatcatggattgttcatgccatgggaggaagtgcggtgacaaggcacgggtaatacagactctgctttttgtagctggcattaacacacttctccaa

SEQ ID NO: 53335 - DNA, 231 bp, Glycine max
tttatccaattgaaattttaaaaatgactgggataaacttaagaattcaattattgaacttgaataagtacacaatttaaattggattggtcgaatggtatcaaagaaatggagtactaactcccatttcttatttattattgaattaaccgatcaacttgctttgttatcaacatttctttttgatttcaaaaattttccggaaaaaatttgaatctatttttatatgcg

SEQ ID NO: 53336 - DNA, 245 bp, Glycine max
cacagtatgcttgtctagtgaggtttttgtaacaactcagggtggtaacttcccccattttttgatgggccatagaagattcatctatgatggccatgccaagacaattatcccagataagcgcaagcttgttgttcttttggatgacgtgagtattagttggagagctttcaaggatcagatggaaacatgctcactgaaagtgaccgcaaaggcatcctggtacctagagttagaaaaataaa

SEQ ID NO: 53337 - DNA, 268 bp, Glycine max
tgatcttccgaggtgggtccagtcagttgttcgcgaagaatggaccgcggaggtttacgatgcggactcatgaggttccacaacatcgaggaggagatggttcaactgttgcaaatcactatggcttgtgtttcccttgtccacgatcagagacccaacatgcaggacgtggtccgtatgattgaggacattaaccggggcgagaccgatgatggcttcagacaatcctccgatgacccttccaaaggatccgagggtcatacaccac

SEQ ID NO: 53338 - DNA, 262 bp, Glycine max
cctggctttaagcattttaagtctgaaatcctacaaaaaaggacgcacctctcctctcgctttgaagggccaagctgctatagcaagtatattgtttctgcgggagataagctcaataggcaaaggatcatcttatttcactgccttgatcagtggtgcagtggtggcattctatatctatagaatagtactggaacgtaatcatcaaaagagctcaaacttggaaactgaaccaggaaactagttctatgatgagtgtaaa

SEQ ID NO: 53339 - DNA, 259 bp, Glycine max
ctcgagccgaatcggctcgagccgcctccactcccccctcccaggcgctgcccaggtaagtacgcggcggcgatgacaacgacgcttcaagaagaaccgcaagaagcgcggccacgtgtccgccgggcacgtccgcatcggcaagcacaggaagcacccgggaggtcgcggtaacgccggtggcatgcaccaccaccgtatcctcttcgagaagtaccatccgggctacttcggcaaggatggcatgcgttacttccat

SEQ ID NO: 53340 - DNA, 257 bp, Glycine max
tcgcgccgccgccgctgctgcaagcgccagcatcgccgtcgtccgaatagtacactctaacgccgccatggggcgtatgcacagccgcgggaagggtatctcgtcgtcggcgatgccgtacaagaggacgcctacctacctggctgaagaccgctgcctccgacgtggaggcgatgatcacaaaggcagcgaagaagggacagatgccgtcgcagatcggcgtcctgctccgtgacgagcacggtatcacccttgtc

SEQ ID NO: 53341 - DNA, 253 bp, Glycine max
attgcaaccaaactggacaaatgttagctggattgctcaagtggccacaaggaacctttgcctccaaggttacattggacacaggtgaacaaaaagctactgatgagcgagaagttgatggtggaattgaaaccatctgccttgatctgccagcagtgatcaccacggatttaagacttaaccagccaagatatgcaactttgcccaacataatgaaggcaaaatccaaagttattaagaaagtcgccgctga

SEQ ID NO: 53342 - DNA, 179 bp, Glycine max
ggcagctgctaccccccctgtcaagcaaggatcagacaggcctttgtggtttgcatcaaagcaaagtctttcttacttggatggcagccttccgggtgactatggatttgaccctctgggactttcagaccctgaaggaacaggagggttcattgagccgaaatggctagcatatggtg

SEQ ID NO: 53343 - DNA, 271 bp, Glycine max
ggacaagctgtgtttctgtttccaggagcaactattccagagtggttcaatcatcaaagcaggggaccttcaatttctttctggtttcgtaatgaattccctgacaatgttctttgtcttcttgtagcacgtgtgtaccgcgaacgtcaagatattcccacgctcacggcgctcatcaatggcaaacctcgtcattttccccgtatggggtggacgagcggcactaaagtaagcaagacgcaattgaattatacatatctatttgacccaa

SEQ ID NO: 53344 - DNA, 143 bp, Glycine max
gatcgccatttggaaagccggcaacatgcccgtgcagtatcgcaggataaagtgtaggaaggaaggagggatgcgatttacggttactggttctggaatcttcatctccgtgctgatcagcaatgtagctggccatggagacg

SEQ ID NO: 53345 - DNA, 131 bp, Glycine max
attttgagcattcggaaacacacctagcgaacgcagctagcaacgacctaacagcgatggctaccaaggtgttatccctctttgcgcttcttgccctttttgtgagcgcaacaaatgcgatcattattcca

SEQ ID NO: 53346 - DNA, 269 bp, Glycine max
cctcccaacaccacctcgccgcgatctccgtagcctccgtcgcgtcgagcatcgatcatgtcggcctactgcggaaagtacaaggatgagctcatcaagaatgctgcctacattggcaccccaggcaagggtatccttgctgctgatgagtccactggcaccattggcaagcgcctttccagcatcaatgtcgacaacgttgaggagaaccgccgtgccctccgtgagctcctattctgctgccctggtgctctccagtacatcagcgg

SEQ ID NO: 53347 - DNA, 269 bp, Glycine max
aatgggggctgatgattttgagcccctgactatgatagggaagggtgcatttggagaggtcagagtctgccgagagaaagcaaccggtcatgtatatgctatgaagaaacttaagaaatcagagatgcttcgcagaggccaggttgaacatgtaaaagctgagaggaatctacttgcagaagttgatagcaattgcattgtaaagctttattattcctttcaagatgaagagtacttatatctcataatggagtatctacctggtggtg

SEQ ID NO: 53348 - DNA, 254 bp, Glycine max
attcggtcccaactggagaatgattttgtgcattctcttcaggccgaggttgcggaaggggaagatacggaggctattatacctttgccatagactcccgagaatcttgcttggcattcgaatttctcccgtaagcagctcaggaagaatcaaacacttgggaggtttcatgaattcttaaagctggaaaatgaaattggaaatattacaagacaggaagttgtcagcatggcacctcctctgttcttggatgt

SEQ ID NO: 53349 - DNA, 234 bp, Glycine max
gttccccccggaccagcagcgtctgatcttcgccggcaaacagctggacgatggccgcaccctagcacactacaacatccaaaatgagagcaccctccaccttgtgctccgtctccgtggaggtcactaagtcatgggtcgtttaagctgccgatgtgcctgcgtcgtctggtgccctctctccatatggaggttgtcaaagtatctgctgttcgtgtcatgagtcgtgtcagt

SEQ ID NO: 53350 - DNA, 173 bp, Glycine max
ggaaaatccaaggggttcgcgttcctcgcgtacgaggaccagagaagcacgattcttgctgttgacaatttgaatggagctaaagttcttgggaggatcataaaggttgaccatgtgagcaagtacaagaagaaggaagaggaagatgaggaggagctgcagaagaagaggga

SEQ ID NO: 53351 - DNA, 257 bp, Glycine max
tacaaaggtagctcattgccatgtgtaaaatcacctccttggagcataaagctaggaataattctatggaatgggtggagaatcaatttatggagagaagtttgctgatgagaacttcaagttaaagcatactggaccaggacttctatcaatggcaaatgctggtcctgacaccaatggctcacaatttttcattacaaccgtgacaactagctggttggacggaaggcatgttgtttttggtagagttctttctg

SEQ ID NO: 53352 - DNA, 236 bp, Glycine max
tggaaatccaaagagcggatgggtttgttatccaaactggtacatactgaaggtctgctgagggttttattgatccaagtacagagaaaatcaggacaataacattagaaattacggtgaatggagaaaaggcacctgtttatggatcaactcaaagaggagcttggtctatacaaggctcaaacaaagcttccgtttaatgctttcggtacaatggcaatggcaagagatgaatt

SEQ ID NO: 53353 - DNA, 257 bp, Glycine max
cacagatgatgacgcctaacatgatgtcaccattgacgatgccgagcatcttgtcaccaatggtcttgccgagcatgatgtcgcaaatgatgatgacacaatgtcactgcgacgccgtctcgcagattatgctgcaacagcagttaccattcatgttcaacccaatggccatgacgattccacccatgttcttacagcaaccctttgttggtgctgcattctagatagaaatatttgtgttgtatcgaataatgagt

SEQ ID NO: 53354 - DNA, 257 bp, Glycine max
cgctacaacgacaacaacagcgtctgccatcactgaggcacccagccgtcgtgcaccctgccacgctcttgctacagcagctgcttgcatccaacccacttgctctggcgaacgtagctgcataccagcaacaacaacagctgcaacagttctatgccacggctcagtcaactagccatggtgaaccctgccgtctacctacaactactttcatctagcccgctcgcggtgggcaatgcacctacgtacctacaaca

SEQ ID NO: 53355 - DNA, 249 bp, Glycine max
ggaactgtgaaggatagagaagctctttgcttatatgctgcatcatatggaaatgctgctagatttattaatcacagatgtttggatgcaaacttggttgagatcccagttgaagttgagggcccaactcatcactactatcattttgccttcttcacatccagaaaagtagcagcacaggaagagctcacttgggattatggcatcaactttgatgaacatgatgatcagccaattgagctgttccag

SEQ ID NO: 53356 - DNA, 248 bp, Glycine max
atgctctatccgaggcagagaagcgagaagagaatctgaggaaggccttgggtgttgagaaagagtgtgtgcttgatcttgagaaggctctgcgagaaatgcggtcagagcatgccaaaattaaatttacagcggactcaaagttggctgaagcaaatgctttagtagctagcatcgaagagaagtctttagaagtagaagccaaattacgttctgctgatgccaaatttgcagaaatcagcagaaag

SEQ ID NO: 53357 - DNA, 253 bp, Glycine max
cacactctcacataactctctctctctctctctctctgagtccttcttcttcttcgtccagccaacatgagctcaatcgttcagggtttctccaagtcactggccatgaccattctctctgagatcggtgacaaaacgttttttgcagctgcgatactggctatgcgacaccctagacgcctagtcttatcaggttgcttatcggctttgattgtgatgaccattctctctgctcttgttggctgggcagctc

SEQ ID NO: 53358 - DNA, 242 bp, Glycine max
agattgggaccgaaaagatggcattctcatgattgaagctgatagacttttacgaccggggggctactttgtctggacttcaccacttacaaatgctcgtgacaaagacagtcagaaaagatggaagatcatacaaagttttgctgaaaacctttgctgggatatgctgtctcagcaagatgaaactgttgtatggaagaaaactattacaaggaattgctatagttcaagaaagaatagtt

SEQ ID NO: 53359 - DNA, 244 bp, Glycine max
atttgcaggagttgagtcggtgaacattgaaggaggaaaggatttggtgagcgtaaaggggacgatggacgtgaaagaaatagtaccgtatttgaacgagaagctgaagcgaaacgttgaagtggtcccacccaaaaaagagggtggtgataagaaagagaacaacaagaaggaaggtggtggtggtggtggtgctgaaggtgcagcgaaggtggaggtgaacaaaatggagcactacgggtac

SEQ ID NO: 53360 - DNA, 239 bp, Glycine max
acaatagttacaaccttaaggacattggttgatgctttctatcttctacacatggctctccaatttcgtactgcttatattgctccatcttctcgtgtctttgggcgtggtgagcttgtgatagattcagcacagatagccaagcgatacttgcagcggtatttcatcattgatttcctatccgtgttgccgataccacagattgtggtttggagatttcttcagaggtcaaaaggttc

SEQ ID NO: 53361 - DNA, 245 bp, Glycine max
gtgaaagcgatgtccgaattgggtcttctctaccttgggatgggagtttcaggaggtgaagaaggtgcaagacatggtccctctttgatgcctggtggttcattcgaggcctacaagtacatagaagacattctcctcaaggtggccgcacaagtccctgatagtggtccttgtgtgacctacatcggcaaaggtggatcaggaaattttgtgaaaatgatccacaatggaattgagtatggtga

SEQ ID NO: 53362 - DNA, 248 bp, Glycine max
gtttggcagaccaccctaatttggtcaagttaattggtttttgtgctgagggagagcagaggctattggtttacgaatatatgccattgggatctttggagaatcatttgcacgatcttccgcgtggtagaaaaccgattgactggaatacaagaatgaaaatagcagctggtgcagctagaggcttagagtatttgcataataaaatgaaacctcctgtcatatatcgggacctgaaatgctccaat

SEQ ID NO: 53363 - DNA, 249 bp, Glycine max
  unsure (1)..(249): unsure at all n locations
tctcgagccgctcgagccgctcgagcggctcgagcatttcggaggctagttncggagattaatgactaatttgaccgatgctccaaatagagcaaacatattaaaagttatactggcaaaagaggacttgtcttctgatattaatatggatgcaattgcaagtatgactgatggatattccggaagcgatctaaagaatttgtgtgtaactgctgcacaccgtccaattaaagagatattagaaaagga

SEQ ID NO: 53364 - DNA, 153 bp, Glycine max
ttgctccaggcatcggcggagacattggcggatgggtatagtgcgaactacgtataaggcagtgatcgaatcggggttcatagttactgtcaagaggttgaaagatgctaggtatcctgccttggaagagttcagggctcacattcaagtcct

SEQ ID NO: 53365 - DNA, 232 bp, Glycine max
cctcttctcgcaatccgcactaaaattctagggttccgaaatggacgctgacggaaagatcaagaagggcgccggcggaagaaagggcggcggcccaaagaagaagccggtttcaaggtccgtcaaagccggtctccaattccccgtcggaagaattggccgttatttgaagaaaggaaggtacgctcagcgtgtcggtaccggtgctcccgtatacttggctgcagttctc

SEQ ID NO: 53366 - DNA, 233 bp, Glycine max
cgggagtcgcattgggcggaggtccctttgcgaatgcgtctctgtacgtgggcgatctcgaggggaatgtaaatgaggagcaactttatgatctgttcagccaggtggctcagattgcttcaattagggtttgcagggatcagaccaagcgatcctctcttggttatgcctatgtcaactttgccaacgctcaggacgcatccaatgccatggaacttctgaacttcactcct

SEQ ID NO: 53367 - DNA, 231 bp, Glycine max
aagaaaagcgatgtttatagctttggagttgttcttttggaaataatcacaaaccaaccagtaatggaaaggaatcaagaaaagggtcacataagtagaagggttaggtccttgattgagaaggggatatcagggccatagttgactcaaggttagaaggagattatgacattaactcggcttggaaagccttagaaatagcaatggcttgtgtttctaaaaatcccaacg

SEQ ID NO: 53368 - DNA, 228 bp, Glycine max
atgaaatatgacaatccagaacaaattcttgaagagtttttccccctccggctggagtattatgagagaaggaagaaccatatattgaacaaccttgaacgacttttgctgattttggcaacaaagctaggtttatattaggggttgtgaatggagaaattattgtaagcaacaggaagaaagctgatttgttgattgagctgcagcagaaaggtttcactcccatgc

SEQ ID NO: 53369 - DNA, 268 bp, Glycine max
tgtgctcatgccgtctgtgcaatggacgcagggttattccaccttcccaattcgaaattcatgcgtgcaacatatataagagggcagcacaatatatttgccttgaaaatgggaagagcctgcttgacctaatgagagcatgcagggcagctccgctacatacattggaggcgaccattcaaaattttattaattctccgcccgaggagaaatattttacttgcaaaagttgcagagggtgtttcccttcttccaatgtggaaagagt

SEQ ID NO: 53370 - DNA, 265 bp, Glycine max
ctgatgaagaaggcgtagagcttggtcaccatccttgtaaaattggaccaattcaaatcgcagattgcagctagggtacataactcttccccctacactccccaaacgagaccatggaattccgggtccaataacatcccccaaacaccccttacaatcatcactggtcaaatcccgtgtacactgaccaagagtataaagcgtttgcaaatcattcagtttcaacgatttggttccgaatctctcatcactgtcccctgcttca

SEQ ID NO: 53371 - DNA, 160 bp, Glycine max
accatggcatccaccactctatcccctacaaccccttctcagctatgctcaggaaagagtgggattttcagtccctcacaggcacttcttgtgaagccagtgaagaggcagatgatggggaagagcaagggaatggaattgcatgccaagccaccagcat

SEQ ID NO: 53372 - DNA, 148 bp, Glycine max
atgcattggagaagtacgcttacaacatgagggatgctataaacattaaggagattagcttgaagctttctccagaagacaagaaaaatatcaatgatgcaattgattctgccttagagtggctcgaggtcagcatgatgcaacccca

SEQ ID NO: 53373 - DNA, 237 bp, Glycine max
gtggaagaaaggaaaaatgcattcgtacggttacagagtcaatgctttgttaaccttcgccataaccattctggccgttatgtccgccatggcttctctctccgataacctcaattcccccactcccttgtgcatgctcaggtcaccaacattaactggtttcagaaacagcccaacggcgacgacgaggtcagcatgacgatgaatatatcagcaaatttgcagtctcttttcaca

SEQ ID NO: 53374 - DNA, 244 bp, Glycine max
gtttcgttttatttggctttgattttcttctgcaaccttatctcctgcaaagctttgattactgagtctaacttcccctgccacagtttgccttgtttacctggtattctggtctctccatgtgttctgttctattgcaagggatagaagatcttaactctgtttcaatttccctgtttttcttcacaagcagagctctgtttttaactggtctttgatcaaggatggccataaaggcaattga

SEQ ID NO: 53375 - DNA, 245 bp, Glycine max
  unsure (1)..(245): unsure at all n locations
gttaaaagccttagccttccgtacaactccaaacagaaanacatagacatccatggctnnctccgtctccactgtagganctgtcaacacagctcttttgaacctgaatggttctggagctggagcttcagctcccagttcagccttctttgggaccagcttgaagaaggttattgcctcaagggtccccaacagcaaggtttccggtggaagcttcaagattgttgctgtagaagagaagaaag

SEQ ID NO: 53376 - DNA, 252 bp, Glycine max
gattgtatttctctgctcttatgaagggttccaattcttatattctatcgtgtgtggtcacaggagttggaaagtcttgtcttctacttcaattcacggacaagcgctttcagcccgtccatgacttaaccatcggtgttgaatttggtgccaggatgatcacaattgataacaagccaatcaagttgcaaatatgggatacggctggtcaagaatcattcagatctattacaaggtcttattacagagggg

SEQ ID NO: 53377 - DNA, 115 bp, Glycine max
gggaaggctctgacgaggagtactgcagcatcgaccccaagttgaccagctgcgccaccaatgctagcatctgtggggacgaggcacgctgcgtgcgcaccgagaaagcggccta

SEQ ID NO: 53378 - DNA, 272 bp, Glycine max
cccaaagtgcttctctcctctgtctttttctctctcttgctatccttttggctagtggcactgctgcaagtgtaactccaagaagcgcagtgccaagccaccatgtttcaacattcaacagaagcttttttccttccacttttctctttggatatggttcttctgcttaccaggcagaaggagcagcaagtgtagatgggagaggaccaagcatatgggacacctacactagacagcatactgaaaggatttgggatcatagcaccggtgac

SEQ ID NO: 53379 - DNA, 269 bp, Glycine max
ggcatgttttcacagaatggtactggtaatggtggtagtagtaatagagctcaagtgggtaaggaagatggaccctcttgcactcattgcttgcagtttgctgtgacttggtctttgttggttaatgggttccttcagtctctgccacttcctttcaaatctgggaagaagaagtgtcagaaagtgtgtgatgaagacaagctgtgttcttgcacgaagcctactgtttcatcatgtgaagtgaagcaaaatgaatccaaggggggtca

SEQ ID NO: 53380 - DNA, 128 bp, Glycine max
  unsure (1)..(128): unsure at all n locations
ctacacggaaaattgaggttcctaacaacatggtacatatnataattggcaaggctggagatactatacgatactcgcagaacaattcaggtgcaaagattcagatcacgagggatgctgatgctgat

SEQ ID NO: 53381 - DNA, 191 bp, Glycine max
gccagattatgcttacctcaaaagaatatttcgtgacctgttaattcgtgaaggattccagtttgattatgtatttgattggaccatcttggactatcagcaatcacagctagatgctcctccaggacgtgccagtatgcctgtattttagggtcctaatgttggaactagttcagcatctgccaccagct

SEQ ID NO: 53382 - DNA, 247 bp, Glycine max
agatcctgaagaatgtgaaatctttatagttgaaggtgattcagctggaggaagtgctaagcaagggcgtgacaggcgcttccaggccattctccctctgaggggtaagattctgaatattgaaaggagggatgaagcagcaatgtacaaaaatgaagagatccaaaatttaattcttggtcttggtctcggggtgaagggagaggattttaagaaagatgcactccgatatcataagattattatt

SEQ ID NO: 53383 - DNA, 186 bp, Glycine max
agcttagtcactcccagcatgaccctcactcgggccaaggtggaggtgaacatgcctaggaaaaggaaaggcaattgctctcagcatgaccgggccttggagcggttctatgaacaggtggtccaggctatccagcgccacatacactttgatgttgtaaagtgcatcctggtggccagcccagga

SEQ ID NO: 53384 - DNA, 244 bp, Glycine max
acacgctccgaagagaagtggatatggcggaaactcggtgtttggcaattatcgacgaagaggaaatagaagtagacgacgatgacatctacgagaacattgaagctcccaagttcgtcgacctcaccgcacctgattgtcgccgccccgaccatgaccgccactggttctgcttccgcgttgggtgtgaccaaaagcatgagcaagagttggactctgaggcaatttacaagaattttgttct

SEQ ID NO: 53385 - DNA, 240 bp, Glycine max
agcggctctatatggtagagcagtgccaggaactgttctggtgaggcagttaaaaaagttgccgagaaacaaatgctggcttgttggatattcaaaggcagaggcggatgctatggaaatagcaagggaattcaacaaagaatgggaaacaaatttgaggattggccttcatgattatcgcgattataccaatagtaagaatttatttcagaccttatgttgcctaagcccttttatgga

SEQ ID NO: 53386 - DNA, 183 bp, Glycine max
atggacaccaaggagatgatcaatcatggggttgccatctgtcaccttgacacgtcagcttggagcccgcaacatggggccttcttggctttggggtttggccctgggaaaattgaagtgtgccattggattttcgagaacgacatgacttggaccactgccaattgaggagagaatgagaat

SEQ ID NO: 53387 - DNA, 139 bp, Glycine max
atatcaactaattacaatacatgctagagggctagcagaatattgcaagtggctagaaatgtttgaggatgttgaattggccattttctgtgtttccttgagcaactacgatcagttttctgttgatggaaatggttgt

SEQ ID NO: 53388 - DNA, 121 bp, Glycine max
tggatggagaattagtcatagaacacatcatcagaactctgatatggtactagaattgaagaatgcagcaagtggccagcaacactgttcaattctagtaccatatcatggatggagaatt

SEQ ID NO: 53389 - DNA, 235 bp, Glycine max
tgcaatgattggtgaaatttcactcgaagatcagcatcttagaattgagaatcctagattgaaggacgaactagaccgtgtttgtgcactcgctggcaagtttttaggtcgacccatttcatctctaacaggctcaattgggcctccattcccaaactcaagcttggagcttggtgttgggagcaatggttttggaggattaagcactgtgccttcaacaatgcctgattttggg

SEQ ID NO: 53390 - DNA, 238 bp, Glycine max
tgtagctgctgggttgcaggtgcttcaagaaaagaacctcatccatagagatttaaaaccacagaatttactgttggcaactactgcagctacaccagttatgaaaataggggattttggttttgcaaggtctcttacaccccagggattggctgatacgctatgtggttcaccctattacatggctccagagataattgaaaatcagaagtatgatgccaaggctgatttatggagt

SEQ ID NO: 53391 - DNA, 138 bp, Glycine max
gctcaagacagatccttacttgaatgccaaactctcagatataataatcgggacttcggctgcaccaactgttctaccaccctacaactttacgaatgatgatgttgaattcaatttgattgatggtgctgcgacagc

SEQ ID NO: 53392 - DNA, 255 bp, Glycine max
tgtgatgtccatttaaacacataaagctcggcaaagtccccatcctcgtccgatgccttcgatgtaacagtgcttattgtgaatttggttgggattgtggctggtgtatcctatgccataaacagtggttaccagtcttggggtccactatttggcaagctgttctttgctatctgggtcattgcccatctatacccattcttgaagggtctcttgggcaggcaaaatcgtaccccaaccattgttattgttggt

SEQ ID NO: 53393 - DNA, 239 bp, Glycine max
tacaaaacacaaaacataaactttcttccaaccaacccttttccaaccattctttgtttcttccaaaatcttcaatccaatttttcactttttcacaaatggggatggctgcagcggagtcacagtttcatgtcttggctgttgatgacagcatcatagataggaaactcattgagaggctcctcagaacctcttcctatcaagttactacagttgattctggtagcaaggctttagag

SEQ ID NO: 53394 - DNA, 218 bp, Glycine max
atttcgattctatcctatgcccttttccatccaaaccaacccctccctcgacgacctacgcacatccaccaggtcctaagcccctcccaattattggtaaccttcacatgcttggacactcccaatcgttccttcaagccctagccaaaaaatatggcaccataatgtccatcaagttaggtcaagtcccaaccattgtagtttcctcacctgaaact

SEQ ID NO: 53395 - DNA, 240 bp, Glycine max
gttctgagacaaatttattagaagtgatctcaaactggccaatatcacccttggcttgcaacattgcctcaatagggagaagcacagcaaagaatcttatggcttcagaagcaattgatggatatgcatctttgcttcagaatattctcaggcttccatctgaggtttctccacctaaggctgtttcagaaatagcccccaattttaaagactcatggcagtggcatttgcttgaagctt

SEQ ID NO: 53396 - DNA, 245 bp, Glycine max
atgatgacggcgatgggggtgtacgaggacacgaggagtcctaggaggcgccactttgacgaagaaccagatgagttgccattgctaagcaatgagagcttggtgatgatggtggaaaaagagtgccaacactggtctggtctgcgttacttgaataagtttcaaactggggatttggacttcggtgccagaatggaggccattgattggattcacaaggtccgatcgcattttggatttgtcct

SEQ ID NO: 53397 - DNA, 248 bp, Glycine max
agcagtatattttcctgattttgtcaatccaaaaacagtttcctggtgggttgccgagcttcgtcgcttccatgaactagtgcctgttgatggcctatggattgacatgaatgacgcttcaaatttctgctctggacagtgcacaattcccaagggaaaagtgtgccctagtgggacaggacctgggcggatatgttgcttagattgcaagaacatcacaagcacacggtgggatgatctccctacaa

SEQ ID NO: 53398 - DNA, 266 bp, Glycine max
cttggaaacaaggttgatgtagacggtggaaacagtagaagggtcactgagaaaaaagctagagactggtgtgcttcccggggaaacataccatactttgagacctctgcgaaagagggttacaatgttgaagaggcttttttatgcgttgctaaaattgcactagaaaatgaacacgatcaagacatttattttcgaggaatctctgaagcagtttcagaagcagaacaacgaagtgattgtgcatgctgaagtaggatgtaaga

SEQ ID NO: 53399 - DNA, 260 bp, Glycine max
  unsure (1)..(260): unsure at all n locations
ctccatgctcttagccctcctcgtcttcgccgccgtggccaccgncgcgatggcggtcgccgcgtccgacgccgacgatatgctgatccgtcatgtggtgccagatgttggtgaacgtcagaggaggagaacctgctgaacgccgagcaccacttacgcgagcttcaaggccaagttcgctaagacctacgccagcaaggaggagcacgatcttcgcttcggcgacttcaagtccaacctacgtagagccacgctgcacg

SEQ ID NO: 53400 - DNA, 175 bp, Glycine max
ctgaaaaggaagatcaagattaacctacaaagattgatacctgattgagacaaagaatagatcctcgatacgatgaggttcaggctcagatggaaacaaatgtgtttaaattgtctctgatgatgttgaagctccaaaaggttctatgtgggaccttaaaattccgcattcaaaa

SEQ ID NO: 53401 - DNA, 257 bp, Glycine max
ggttgctgtaggagataagattgcagtagtgctaagtgctaacacctgcagtgaacaatggcctctgcatcagcatctctgctcaagtcttcacttgttcttgacaagtctgagtgggtgaagggacaaacccttcgccaaccttctgcatcagttgtgagatgcaaccccaccaccccatcaggcctcaccatcagagctggttcctatgctgatgagctcgttaagaccgcgaaaacagtggcttcaccagggag

SEQ ID NO: 53402 - DNA, 260 bp, Glycine max
ggagaagaagctcaaactgtattcctactggataagctcctgttccttccgagtccgatttgctctcaacctcaaagcactcgaaaaattgttgaaagaccatgctaggagatatcaactggagatgaaattttactggcagatttgtttttagcacctcagttagatacagcaattaagagattcaacgttgacatgaaggaattccctactctatcaagattacacgagacatataatgaaatggcagcatttcggaa

SEQ ID NO: 53403 - DNA, 277 bp, Glycine max
acaactacaaaggttgctgtaggagataagatattgaagtagtgctaagtgcctaacacctgcagtgaacaatggcctctgcatcagcatctcttctcaagtcttcacttgttcttgacaagtctgagtgggtgaagggacaaacacttcgccaaccttctgctgcatcagttgtgagatgcaaccccaccaccccatcaggcctcacaatcagagctggttcctatgctgatgagctcgttaagaccgcgaaaacagtggcttcaccagggagggg

SEQ ID NO: 53404 - DNA, 251 bp, Glycine max
ataccattctacttagagtatcttggcaacacaaggacattgcaagcagtttttgagcttgaagctcttgtcctcactggtcatttttctgagaacgatcatgaccctcctcggggacttcagctgatccttgggacgaaaactacaccccatttagttgatacccttgtgatggacaacctgggatattggcaaatgaaagtctcacctggagtttggtacttgcagcttgctcctggaagaagttccga

SEQ ID NO: 53405 - DNA, 253 bp, Glycine max
aatcgtcgagaatccaaccttgatgatgtcaagcatgacaggtcagcctcttggagtcaccatggcagagtgaggagtcattcatgcaaatcatctaactgcggactccggtgacccgaaatattctgctttgaaacatcctagatgaaggagtttccacaacctccaaaggctggtggaaagaaagctcaacctttggcaaaaatgaaggaattggctagtcatggccaaaagtttgtgctcccctaaagaa

SEQ ID NO: 53406 - DNA, 100 bp, Glycine max
attcttatctgccgatctattcaatgctggaatcagacccgctattaatgtaggtatttccgtttccagagttggatcggcggctcaaattaaagccatg

SEQ ID NO: 53407 - DNA, 238 bp, Glycine max
ctcacacggttgtgttcatagcagttcgaggcaatcgagtgggaagtgaagtgcatgttgcgatactccaaccgcgcaattttgcacaccatggatgcttgtttttcgtatcctatgagcaacatatacaatgtaacggatgcggcagagttcaatagagtgttgggtgagttacttagacatctgagtaacgaagctgcataaggtgactctcggcgcaagtatgccgcggatactg

SEQ ID NO: 53408 - DNA, 249 bp, Glycine max
  unsure (1)..(249): unsure at all n locations
cttcagcgttgcattcttttcgacacaacatcgtcgctgantacaggtcgatatgatggtgtccatcccagaaccacgcgatcttagctacttcactcactcgagcttcgatgatttccaccgccatacttacctcatgaccagctgcaccctcctctggaaggtactctccgaccacttctcctccctcgagcaatacctcagccacaaatccggagcgctcaaacgcaagattcgcaccatcgacaa

SEQ ID NO: 53409 - DNA, 260 bp, Glycine max
  unsure (1)..(260): unsure at all n locations
taataagtagtattgtcaggttacagttggagcgtgtgcagaagagaattgcagatcgtaagatgaaaatccaagttacagaagctgggantcaacttcttggtagtttggggtatgatccaaactacggtgctaggccagtcaagcgagttattcagcaaaacgtggagaatgaacttgctaagggtattcttagaggagagttcaaggaagaagacacaattttagtagacacaggagtcacggtatttgccaatggt

SEQ ID NO: 53410 - DNA, 266 bp, Glycine max
tggaagatatattaaggaaagaaaagaaaaggatccagaggttgagattgaagtagcaaccaagtttgctgcactgccgtggagatttggccgtcaaagtgttctcaatgcccttaaagattccctttgtcgactaggactgacttcagtggatctttatcagctacattggcctggagtttggggaaatgaagggtatattgatggtctgggagatgctgttgagaagggacttgtgaaggccgttggagtttcaaactatagtg

SEQ ID NO: 53411 - DNA, 231 bp, Glycine max
gcgacgtaactcggaatcgctcgagtgctctgctgctggaacaatcatgactttgtccacatgggctaattccaatgttgcagaggtggcttcaacaggacctggcattcgctctttccagctacatgtgtacaatgacaggaatgtgggtgctcagcttctgcaaacagctgcaacggctggaatctaagccattaccacctactgcatgatacaccatcactaggacgc

SEQ ID NO: 53412 - DNA, 256 bp, Glycine max
accaaagccaatcccaatttctctcttataattcgtggcggctaagtcattctcgctcactccgatcccaccattgagtaccagcattggtataaggatgagttgtagattactatggtgaaggatgtagaggggtgccctgttttctctttgatcatcatggttactggtgaagctgtgaagcctctatcggtgtgactgtcactgttcggctgatagtttacaagctcgactatcttgatgagtctattctatg

SEQ ID NO: 53413 - DNA, 264 bp, Glycine max
  unsure (1)..(264): unsure at all n locations
ggacaacataatggatggactctacttngctccagcttttatggacaagcttgttgttcacatctcctagaacttcatgaccttgntcaacatcaaggttcctttcattcttggtatttggggaggcaagggataagtaaaatctttccaatgtgagcttgtctttgccaagatgggaatcaaccccatcatgatgagtgctggagagttggaaagtggatatgcaggagagccagcagaactgatcaggcagagatacgtgga

SEQ ID NO: 53414 - DNA, 259 bp, Glycine max
ctctacttcttactgcagtgtggaattgagttgttcataccttcttgcactaattaatataggcagcatttcaacagtttaccagtgttatttagtgcaagaaggtatgaacaactctacttcttactgcagtgtggaattgagaaggagaacaacttcaagcagcccggagagagataccggtctgggcacctgacaggttcctgttctaaaatatgatatgatcaatgtgaaatgtgtttggtgatgtctaatgttg

SEQ ID NO: 53415 - DNA, 132 bp, Glycine max
gtcgtcgccgagctacggctcagatcttcgtcggcagcttctcctgcaacgagcatccagagatgggagtccgtcaaccagatcggttcctgagcgagctgacgagcatgtacgactggagcacagagaagg

SEQ ID NO: 53416 - DNA, 163 bp, Glycine max
  unsure (1)..(163): unsure at all n locations
cgnccattcactggaactgtatctatcagatgcctaattattgctgcaacatgctacagtgctatgatgaccagaactatcattgttcgcaggatctacctccactctgtatagatgtaccagaagtatgagcacaggcactccaacatgcctgctcacatca

SEQ ID NO: 53417 - DNA, 123 bp, Glycine max
atgttcacgtgatgaatgaacgacctggacacatcccaattgagaagattcctgaagacatgcatggacagtcgggatggtgtagtgaagtcgcctcttacactcttggtcctttgacaactg

SEQ ID NO: 53418 - DNA, 124 bp, Glycine max
tgtttgattggaggagatgactttaagagtggtcagaccaaaatgaaatcggtgttggtggatttcctagtaggggccggcatcaagccaacatctatagtgagttacaaccatttgggaaaca

SEQ ID NO: 53419 - DNA, 323 bp, Glycine max
  unsure (1)..(323): unsure at all n locations
aatttgatgacttcaatcacaatgaaaaagagctaaaggcttatatcttcaactggtgtatgtttacctcattcttgggtgctttgatagccactttaggattggtttacattcaagagaatttggggtggggactagggtatggaatccccactgctggtcttctattgtctttggtcattttctacattggcacaccaatatatcgccacaaagtaagcacaacaanaactcctgctagcgacataattcgtgtgccaattgcagccttcaggaatagacactacaactcctagtaaccctcggatctctatgagcacact

SEQ ID NO: 53420 - DNA, 324 bp, Glycine max
accgtctcgaactcactagtactcagccgccgcaatcaggggggcacgtagctcgagcgcgcgctccacctggcccgacgcgatgcgggccaagtggaagaagcacaggatgcggcggctcaagaggaagcgccggaaaatgaggcagagatctaagtaggcgcatcttgagaccgaggatggcgagcttctcctgcaccatggctgtgacgcgttgggatgattgtctccctttgtagacgtgctttgctgtagacgtaggcgatgtaaaccgtcctttttgattaattctatatgttctgagactgggtttatattgtaatt

SEQ ID NO: 53421 - DNA, 315 bp, Glycine max
gtacaatgtcctccctgccattacctttctcatggcttgtattcttaggcttgagaaggtacaactaaaaagtatacgcagtcaagcaaaggtggtagggactttagccactgttgtaggtgccatgctcatgaccctgataaagggcccaatacttgatctttttggaacacacgcaagtagtacccaacgtcagcaaaatggtggggtgaatcttcaacatgcaataaagggatcagtgatgatcacaattggctgctttagttgcgcttgtttcatgattctcaagctattaccattgaagcctaccctgct

SEQ ID NO: 53422 - DNA, 322 bp, Glycine max
  unsure (1)..(322): unsure at all n locations
cactcacatatacacatatctgactgtcaggctgacgaggttggattggaggattaggaatgatggatggatcgaaagagaagagactngaaccacagcatcaatccctccaatccaaccacctcagcctcacactcatctatacacatatctgaacgcgtatcgtccctcctatggcttcaaagcgcatcctcaaggagctcaaggacttgcagaaagacccaccaacttcttgcagcgctggtccagtagcttatgacatgttccattggcaagcaacaataatgggtctgctgatagtccttatactggaggtgtattc

SEQ ID NO: 53423 - DNA, 284 bp, Glycine max
cagaagaacaagtagttgagaacttagaaggagaagcaaatggcttcctcaatgacatcttccacatctgttaccactgtcaaccgtgcaggtgccggcatggttgctccattcactggcctcaagtccatggctggcttccccaccaggaagaccctgaatgacattacctcattgctagcaacggtggaagagtgcaatgcatgcaggtgtggccaccagttggcaagaagtagtttgagactctttcctacctgccagaccttgatgatgcacaattggca

SEQ ID NO: 53424 - DNA, 126 bp, Glycine max
aacaaatgatcttggtcatttcctccagaagaaccttcttctcgacaagatgaaacaaatcgcataagacactggaactgagggcaggatcgcaaatctgtcatcaattgctcatcatcacacaac

SEQ ID NO: 53425 - DNA, 111 bp, Glycine max
cggctcgaggtgttatgcaatggagatgtattcgcaggcccaatgttgtcacacaaggacgatgaagacggtgttgcttgtgttgatgacatagctggtaaggtgggccat

SEQ ID NO: 53426 - DNA, 285 bp, Glycine max
  unsure (1)..(285): unsure at all n locations
atccttggcatggcaagccgtgaagctgggcccatcggccccagatgatnnnaaggttgagcatgaggactgccgtcaccaagcaggtctcctcaggaagcccatggtacggcccagaccgagtcaagtacttgggcccattctctggcgagcccccgtcctacctaagtggtgagttcccaggcgactacggctgggacactgctgggctttccgcagacacggataccttcgccaagtaccgtgaactcgaagtgatccactccaggtgggccatgctcggag

SEQ ID NO: 53427 - DNA, 138 bp, Glycine max
catgaccatagtcaacgaggagtcaatagtagaggaaacatcagagcagcggaagtggagacctattggaggatttctgcgagatcaaccctgctgatgaggaatgcaaagtttatgaatagaggagacctccttttc

SEQ ID NO: 53428 - DNA, 336 bp, Glycine max
caagatggcaggatatcaagcattcgatcatgttacattctatgtgggcaatgcgctccaagcggcgacattctacatcgcgagattcggaatcaccccctaggcatacagtggtttagagaccaactcacgccaagtctgcacacacgtagtcagacagggctcgatcaactttgcattttcctctgctctgaacccagagggcaaggagaccgacgagatcggtcaccatgtctggaaacatggagatggttgcaaagacgtcgcattcaaagtcaatgattgccgtgccatatatgagaaggcatagagagaggcgccaatctgtctccgccc

SEQ ID NO: 53429 - DNA, 278 bp, Glycine max
  unsure (1)..(278): unsure at all n locations
gtgagagagagagcgagcagtttcagacacagatagagctagntgggattggagggattgacgctgcgtctcttcctcttctctttcgatccatccctcattcctaatcctccaatccaaccacctcattctcacactcacatatacacatatctgaacgcgtatcgtccctcctatggcttcaaagcgcatcctcaaggagctacaggacttgcagtaagacccatcatcttcttgcagcgctggtccagtagctgaggacatgttccattggcaag

SEQ ID NO: 53430 - DNA, 267 bp, Glycine max
  unsure (1)..(267): unsure at all n locations
cttctatacaccaagttcgtgtcgttggtgaaatcggatcccgtgattcatccattgcttcctctttcgccaaagggagagatttgtgatgtgaatggtgtgtgtgttgatgctgctgaggatgagtcttcagttgataccaagaagaaagtgactgggaagagatgtgtgagataaacgggatttcgcatttgcattgacagaccgtcagtcttgatgatgtgcatgattgacagcagtctaggatgcagatnctggatgatgcgc

SEQ ID NO: 53431 - DNA, 254 bp, Glycine max
  unsure (1)..(254): unsure at all n locations
tagcagagttccgcaagttaggtgctatgattgtatttgcaaactttacaaagnattatatagacaccgggaaatatgatctgtctagagccaaatagttatgtgatagtttgttaagaactatacaatcaagagatctatttgaatgggttgagcttgaaccactgcagttctggtgctcgttgctattcatggatcagtataactatggtggaattaacccaacatctgatgaagctctaaatgatgaatct

SEQ ID NO: 53432 - DNA, 319 bp, Glycine max
gcgagtggtctaagctccgcgctctatacgctggcaaggaagagattcttgaacgtcaccgtcaccgctacgaagtcaaccccgactacatcgagacgctcgaaaagggtggcttgagcttcgtcggcaaagacgacgctggtgtacgtatggaggttattgaaatcaaggaccacccctggttcgttggtgtccaattccacccggaatacctctcccgcgtcttggacccaagcaggccttacttgggcttcgtcgctgcaagtgccggtatgcttgaagagatcactcgtgactatcagagtggtgcggcgaacgg

SEQ ID NO: 53433 - DNA, 238 bp, Glycine max
  unsure (1)..(238): unsure at all n locations
ctcaagtccatggctggcttctgcacaatgcagaacatgaatgacattatctccatagctagcaacggtggtagagtgcaatgcttgcangtgtggccaccagttggcaagaagaagtttgagactctttcctacctgctagaccttgatgatgcacaatttgcaaacgatagtagaataccttcttaggaatggatggatccttgttagatatcattggagcacgttcgtgtacgta

SEQ ID NO: 53434 - DNA, 362 bp, Glycine max
gcgtagtaactcggaatcggctcactcgacgaatcggctcgagtgttggtgatgttgctactttacctttgagattatacacgtgcattgagaagagttgagcatgttgatcattctcgcaaatcagctgaacaggctgtgaaggccatcaaggcagctgaggaaggaagaacagttgaggagtatgattaccttccatacttctattcccgttcatttgatctgtcttggcaattctatggcgacaatgtcggcgacacagtactattcggagacaacaatcctgcgtcgtcaaagcctaagtttgggacatactggattaaagatgggaaagctgttggggtctttctggaaagtggaac

SEQ ID NO: 53435 - DNA, 353 bp, Glycine max
  unsure (1)..(353): unsure at all n locations
actctacaaaagggagaagactatgattcacaactctcangacttttnatcgcaatggcagaacaaaaccagaatcatacaactgaagcctcanntancaagaggttggtcacaagagccttctccagagtgatgctctttaccagtatattctggagacaagtgtctacccaagagaacctgaatccatgaaagaactgagagagttgacagcaaaacacccatggattcgcttgacaacctctgcagacgaagggtagttcttgaacatgctccttaagctcatcaatgccaagaacaccatggaaattggtgtctacactgggtattcacttcttgncaccgctctcgct

SEQ ID NO: 53436 - DNA, 333 bp, Glycine max
  unsure (1)..(333): unsure at all n locations
agatgtttgacactccagggctctagcacccatatctaacgtcaatgagattgaaccgggatgagcaaaagatggttgagatacggaaggaacttcggcctcggacatacagaattaaggtagggcaggctatacacattggtggcttgacaagacttgaccttgttgaagcctctgttgaaacaatatatgccacagtttgggcatcactaaatgtttctcttcacatggggaccgggtggnatgctgacgaggtttggagaaatcatgttggtatcagactgcagcctcccactggtaacgaccgtgccgccgnaactaggaacatggcag

SEQ ID NO: 53437 - DNA, 344 bp, Glycine max
agcaaatcaccaattcctccgagttcgagcgaccatgtcggggcgtggcaagggcgggaagggtctgggctaaggcggcgccaagcgtcaccgcaaggttctccgcgacaacatccagggcatcacgaagccggcgatccggaggctggcgaggatgggtggcgtgaagcgcatctcggggctcatctacgaggagacccgcggcgtgcttaggatcttcctcgacaacgtcatccgcgacgccgtaacctacacggagcacgcccgccgcaagaccgtcaccgccatggacgtcgtctacgccctcaagcgccaaaggggcaccctctacggattcggcggct

SEQ ID NO: 53438 - DNA, 319 bp, Glycine max
gtgaaataggggagaagtatgataaaactccaacacaggtatccctgaactggctggtagcacaaggcaatgttgtgccaattccaggagccaagacagcagaacaagctgaggaattcagaggtgcacttggctggagactaactgatgaagaggtagctgagctgcgtagtgtggcttcagaaattaaacctgttataggttttccagttgaaaaactctagaatatagcatacatctttacatttgatttagaaggtgcatgctatattctaaatcaaatgtaaagatgtatctgtttatggatatagctcttgtt

SEQ ID NO: 53439 - DNA, 341 bp, Glycine max
gttaaagtctattcgtcaagacctaactgttcaacgaatacgcaatcaattaacagtcaaggtgtatgaaacacatgcccgattggcactggaatttggggacctgtttgagtataatcagtgtcaatctcagttacaaactctgtatgccgaagtgattgaggggtccgatatagaatgcgtgcacacaacgcgctgtgcgacatgcattcaaataataacagcggacttggagcaatcatgggcagggttgttctctcacgacgcaaagagggatgaagctgtaaaacatgcccttgccgttcgtgctgctgtaacttcaggaaattatattgcattct

SEQ ID NO: 53440 - DNA, 342 bp, Glycine max
tgaacaagacattgtcactaaaaggaggatactatgactttgttaagggatcttttgagctctggggccttcagtttggccttgcatcctctttctccgtttgaacatcaaccattatcaatgacctcatcgtggttccctaagttttagatgtggtcaccattctgcattggaagctatagggccttgcttagaggtcgtgtgaacctgcaatgagaaggcttagccactttcatcaccttttgtcattattaaaatttctttatatggaacttttgacctgcgtttatgcatgtcggaaaatcttcttttgataagagtttggaaatcctcttgtaacaa

SEQ ID NO: 53441 - DNA, 331 bp, Glycine max
  unsure (1)..(331): unsure at all n locations
gactacctcaaggtcaagaagggacgcactaacatgctgcgcagggtggagccatatgtagaataggaatacnccaacctgnaanagcgttagggagttgatctgaaagagaggttacgnggagctgaacaagcagaggattccacttagcaacaacagggtcatcgaggagggcctcgggaagacaatatcatctgcattgaggaccttgtccacgagatcatgacggtgggcccgcacgtgaaggaggccaacaacttcctctggccgttcaagctgaaggcacccctcggcggcctcaagaagaagaggaaccatacgtagaggcggt

SEQ ID NO: 53442 - DNA, 335 bp, Glycine max
gtgcatattgtcagtcgtattggacccactcatacttttacattccagtgattaatgaagataaaatatgccttcatttggatggagcatcgaagatcactgtctgtgtctgtgttcttcggactttctttgatctattttacattcttcgcataatttttcagtttaagacaggtttcagacccctttttctcgtgtttttggaagggatgagctcattcatgatcctgtgcctataatgataagatacttaacttcacacttcatcattgatattctatcaattattccacttccgcagttcccttggacaatacctcaaaacaagtattaat

SEQ ID NO: 53443 - DNA, 305 bp, Glycine max
acaagccttagccttctctacaactataaacataaagacatatacatccatggctgcctccgtctccactgtcggagctgtcagcagagttctttagaacctgaatggttctggagctggagcttcagctcccacttcagccttctttgcggaccagcttgaagagggctattgcctcagggtccccaacagcaaggtttccggtggtagcttcaagattgttgctgtagaagctcagtgacagatatgaagagactcagcatctcgataatgacagacggaacagtcatgcctatgatatctca

SEQ ID NO: 53444 - DNA, 327 bp, Glycine max
  unsure (1)..(327): unsure at all n locations
agttatagcattagtattgcttataagtttacacacaacaaaatactccaacatggctgcctccgtctccactagatcgagtggncaacagagatcttttgaacctgaatggttctcgagctggaacttcagctcccagttcagccttctttgggaccagcttgaagaaggttattgcccaagggtccccaacagcaaggtttccggtggaagcttcaagattgttgctgtagaagagaagaaagagattgaagagacccagcagaccgacaaggacagatggaagggtcttgcctatgatatctcagcgcatatcaagacatcaca

SEQ ID NO: 53445 - DNA, 307 bp, Glycine max
ctcgcacagaatcggctaggtgagacttccagtaggattatctacaactggaagtaactcttcacattggtcaatcagtggcatggtaaaataaccgttcgtctctctcctgacgatccatcattgccatatacttctgcaatggaacttgctactggcgtacgtgctggacatttactccacctgagtttcttgaggcataactgctgggggaagatgaccacgcaagtagtgggcatccctctcatttcagtgacggccaccctatgtttgaagtggggctctcgcaacagtgtctaaccactgg

SEQ ID NO: 53446 - DNA, 270 bp, Glycine max
gcagatcgcagcccttagccaggagattgttaataaggttcttcccactgcttaatatgtctgtgtaatttctgctgctgatggttgccttggacaagatatggttcaccccgcttgggaaattcatggacgagagggacgcggcgatcagggagaagctgagcagcgtgaaggacacgtcggaggaggtgaagcagctggaggagaaggccaatgctgtcatggcggcttctcgaggccgagatagcggcggcgctgaacacgatgaag

SEQ ID NO: 53447 - DNA, 124 bp, Glycine max
gatgatgctggggtacaaccgctctccatcttgcaactgggatgcgtctggcccgagtgaggggcacatgagggactgcattccggagattgcacagttggggtatgtgtggcagttgctcaca

SEQ ID NO: 53448 - DNA, 254 bp, Glycine max
gtgcatgcgggtataagaggaattcaagtacaaattgccggacgtatcgccgcggaagagattgcacgtgttgaatggcatcaggttggtagagttcctctacacatcattcgagggaaaatcgattattattgctatacagttcgaactattgatggggttttatggatctaagtttggatatactctacatagagagaaatatattatgcatcatcttgaatgtgctatatgctatcttaaatgtgatatat

SEQ ID NO: 53449 - DNA, 218 bp, Glycine max
aagcattctacaagggggttgctcctctctgcgatggacagataccatacaccatgatgaagtttcgctgctttgaacgtactgttgaagcactgtacaagtttgtggttcctaagccccgcagtgaatgttcaaagccagagcagctggttgtaacatttgtagcaggttacatagctggagtcttttgtgcaattgtttctcaccctgctgattct

SEQ ID NO: 53450 - DNA, 360 bp, Glycine max
gtgcatgtgggggaggagggagagagatgtactttttaaatcatgttccccctaaacatggctgttaacccactgcatgcagaaacttggatgtcactgcctgacattcacttccagagaggacctatcccaaatgtggaattgactgcctatgccaagtccctggaaaaggagcttcagtattgtggggctcataaaacatgaatcaagcaatccagcctcatgggaagtcctggcacagtttttgtaaagcccttgcacagctggagaaatggcatcattataagctatgagttgaaatgttctgtcaaatgtgtctcacatctacacgtggcttggaggcttttatggggcctgtcc

SEQ ID NO: 53451 - DNA, 323 bp, Glycine max
  unsure (1)..(323): unsure at all n locations
gtctcatggtggtgacttcacacgccataatggcactggtggcaagtccatctatggggtgagattttaagatgagaacttcatcctaaagcatacgggtcctgttatcttgtccatgagcaatgctggactcaacacaaatgtttcccagtttttcatctgcactgacaaatagnatggttggatggcaagcagtgattttggcaagtgaaagaagcatgatttgtggaggcatggacgctttggtccagaatgtcagaccagcaaagatcacattctgactgggacaatcgataagttgactgtgtgtatctaccacagtc

SEQ ID NO: 53452 - DNA, 290 bp, Glycine max
ttcatggatgggatctgccagtagaatgtgcccgcactcgtaggatctcaaccatgctgttgaagaaaggggtagagagaggattgaccccttttgccattggaaacctgatgtgcagagaatccttgaacatcgaatctgtgattgctgtaatagtactagcagcactggatgctgttcgtcctggcacaagtgaagctacattgctggatgctggttcccgaatcatggacttgcgcctcgatgagattgtcagagctcgtctatacaagcattgaatgctagtagct

SEQ ID NO: 53453 - DNA, 338 bp, Glycine max
acctggttcagtgcattcagaacaagcccctgtattttgctgatcggctgtatgactccatgaaggccaaggggacgcgagataaggacctgatcagaatcattgtctaccgcagtgaagtggacatgttgaaaattaggtctgaattcatgagaaagtacggcaagtccctgtactattatatccagcaagacacttcgggcgactaccagaaagcgctgctgtacctgtgtggtggagatgactgaagcccgacacggcctgagcgtccagaaatggtgctcaccatgcttccagctaacaggtctagaaaaccacttgcgaataaagtcccgtgg

SEQ ID NO: 53454 - DNA, 213 bp, Glycine max
  unsure (1)..(213): unsure at all n locations
gggtggtggacacgcagccctccatccgtgctgcatgaaaaacattccacgtgctgcttgtcttgcgtctaccatcatgatcacagacncattccttagctatgtatcnctttcctggtctccgacaggcgattatatctattatgtataagtacatatattatatatggatgtgtgtgtgtgcgtgcgcgtgagtgtgtgagcgcatctgca

SEQ ID NO: 53455 - DNA, 264 bp, Glycine max
gtgaaagcaagcaggctgttgagaactccccattcttggagaaattgaagtatagagggtatgaggatcttttcatggttgatgccattgatgaatatgctgttggccagctcaaggaatttgagggcaataagctttctctgccaccaaggatggtctcaaacttgacgagagtgaagatgagacgatgaagcaagaggcgttgaaggagaagtttgacaacctatgcacggtgatccaggatgttttgggtgacaatgttga

SEQ ID NO: 53456 - DNA, 262 bp, Glycine max
aaaactcaagacaagtatggctgtcggaaagaacaaacgcttgactaagggcaagaagggtggaaagaagaaagtcgtcgacccgttcacgcgcaaggactggtacgatgtcaaggcccctgctatcttttggagcgcaactgcggcaagactctggtaaaccgtacggctggcaccaagattgcgtcggaaggactccgcggccgtgtgtttgaggtttgccttgctgaccttaacaaggacgaggaccaggcttttcgca

SEQ ID NO: 53457 - DNA, 262 bp, Glycine max
tctctctccacccaaaccctaactcacgaccctacgaccctctcgtatccgtcatgaaaggaggaaagtccaagaccacatctaagagagccgatcccaaacttagtgtgaataagaagggagccgccaccaaggctggaaacccgccggcaaggggaaggcagcgaaagaccctaacaagccaaagaggcctccaagtgctttcttcgttttcatggaggagttcaggaaggtattcaacaaagaacatcctgaaaacaaa

SEQ ID NO: 53458 - DNA, 249 bp, Glycine max
ctctcgctgcttcattactcctattcaagaaaccagttctgaggagcaacattgctgctcggtaatccccgggtatatttagtctacacagtaatgggcttacccagaaaaggttcacgcgtcacatgaattttatactaggaataagattactgtcgtacatgccgtggacattccagtacaaccagctccttaggcaactgtggagtatagataactcctagctgcagagctacggtttcaggcaag

SEQ ID NO: 53459 - DNA, 249 bp, Glycine max
cttcaaccaggatgagtttgaggcactgctccacgtgttcaagactgactacaaccagacacactttgtcaggaacaatgagatcaaggaagccgctgacaaacttgagggtcccctcagacagatctttgtggattccttgagaggtcctgtactgctgaattctctggcttccttctctacaaagagcttggaaggaggctaaagaaaaccaaccctgtggtggctgagattttctcactgatgtct

SEQ ID NO: 53460 - DNA, 260 bp, Glycine max
gtttcttacaaggctctactctactgcttcaccttctgctctagaaaattcagtggtgatacatggcttcggctactctctctgtagcctaaccagcccttcaggcaaatgggcaaggcttctctgaattcctggcctccgcagctcatcaggcttccttcccttttctagaaaatcttcagaggatttccattctgtcattgccttccagacctatgcagttggaagcagtggaggatacaagaagggtgtgacagaag

SEQ ID NO: 53461 - DNA, 263 bp, Glycine max
tctctctctctttctgttttttttatttcttgttcttgaatatggcgctatttccccgccttgcgcgggcaggtcttttccttcaccagacttggtcggccgattatggggcaccgtctttaacctttcgaaactcggactagtccccatttactcgaatcccttattgtgtgtgaatgaatgtacgagatggatctaatgtaatattcgggatcgagttatgagctgataaaacgtagatccgagaccttgcgttatttctg

SEQ ID NO: 53462 - DNA, 265 bp, Glycine max
tcacgacctgtaagtcatgaaatttataaatgtaatgagaaatgcatgtgaggaaattcagcagatgtacatatatactgatgcttagttttatattcctgtgtggtggagatggtactattgggcatgtcctgtggcttgtagcttatacggtttggttgcatctcagtttggggatgtaacaagtgcagttgagttaaatgagacagtgaaagagttttttagaagatactttggttatagagatgattttgtaggagttgct

SEQ ID NO: 53463 - DNA, 266 bp, Glycine max
cccccatccccaccccaacttgtatattgtgcataatatctatctgcattctctctcttcagggagtgaatccatggattgaagtagatggtggagttggtccagcaaatgcttacaaggtgattgaggctggagccaatgctctggttgcaggctctgctgtgtttggagctaaagattatgccgaagctataagaggaatcaaaaccagcaaaagacctgaagcagttgctgtgtgaaatgcccatgtggttcaatattcaccg

SEQ ID NO: 53464 - DNA, 259 bp, Glycine max
ctttgcgataatgctggatttgatgccactgacgttctcaataagctgaggcagaaacatgcatctggtgaaggtgctaattatggtgtagacataaacactggcggaattgctgattcctttgcaaactttgttgggaacctgctgttgtaaagatcaatgctataaatgctgcaaccgaagcttcctgccttattcttagtgtcgatgagacagtgaaaaaacccaaagtcggagagcgcacaaggtgaggctgctg

SEQ ID NO: 53465 - DNA, 190 bp, Glycine max
ccactgacctcggggcccgtcaacgagcgcggcttgcttcgctgatccgccgtcgtctatcaccaccagagcaagccatacccgcggctcccgacgccccagcagcctgcaccgagcctcttgtgtaccacctggtcgccatccaccgcgactacaggcacgtccacccgatggtgactcggcgcgccgc

SEQ ID NO: 53466 - DNA, 253 bp, Glycine max
gaagggctatatagcataaacatttgagtcttcattgcacaatgtcgacctcttccattaacgggtggtgcctctcttccatctccccagccaaaacctctctcaagaaggccacattaggcccttgctgtctcgcaaccgttagcactccttcttctccttcttcttcttcttcttcttccttcccttctctcattcaagacaggcctgtctttgctgcccctgcccccatcatcaccccaactgtgagaga

SEQ ID NO: 53467 - DNA, 188 bp, Glycine max
cagcatggtgagggtcagtgtgctcaacgatgcgctcaagtccatgtacaacgctgagaagattggcaagaggcaggtcatgatcaggccgtcatccaaggtcatcatcaagtacctgacggtcatgcagcgccatggctacattggagagttcgagtacgttgatgaccaccgatcgggcaagattg

SEQ ID NO: 53468 - DNA, 255 bp, Glycine max
caagcctctactatactgcttcaccttctgctctagaaaattcagtgctgaaacatggcttcggctactctctctgtagccaaaccagcccttcaggcaaatgggaaaggcttctctgaattctctggcctccgaagctcatcaggcttccttcccttttctagagaatcttcagaggatttccattctgtcattgccttccagacctatgcagtatgaaggagtggaggatacaagaagggtgtacagaagcaa

SEQ ID NO: 53469 - DNA, 254 bp, Glycine max
ggctggtgtgctcggtatctacgggctcatcatcgccgtcatcatcagcactgggatcaaccccaaggccaagccctactacctttttgatggctacgctcacctttcgtccgggcttgcctgtggccttgctgggcttgcagctggcatggccatcggcattgttggtgatgctggagtcagggcgaatgcacaacagccgaagctttttgtgggcatgatcctcatcctcattttcgcagaacgcttgctct

SEQ ID NO: 53470 - DNA, 249 bp, Glycine max
  unsure (1)..(249): unsure at all n locations
ggttgttgctgctgttgctttctctgtggacctatcttctgagcttactgatccttctaaggctacggctccgtatacacgctcatttcggggcgtatgatatctatgntggtttttcagatgtcactgcagccaagtccctggaggagtagctcaaatcttccgggatatcatatgaagttcacatataccctggatgttcgcttgccttcatgaacacttcgcctgaggcactcaagggaagaaggg

SEQ ID NO: 53471 - DNA, 248 bp, Glycine max
gcacaatccttgattttgaaattggaggagggaggcgaatatcagaatttagtactgtaaggatgatgtataacataggcattcagggcgtatcttggaagtttgagttacatcgtgctggtcaaaagttaatcatcccagtcttgctttcaactgatttaaatgccatatttgttaccagtgcatttgctattccttcaacactgtattttctacttcagacatatgttgtaaagcctactacctta

SEQ ID NO: 53472 - DNA, 247 bp, Glycine max
gaatctttgaagtagttttgggaaacaagttccagagtaaactgcttgagattatagatgagagtgagctgccagaatttcttggtggcagttgcacttgtgtagatcaaggtggttgtatgaggtctgataaagggccatggcaagacccaaacattttaaagatggttcttagtggtgaagtgggatgttctaaacaaatagtaacagtttctaacgacgaggggagggtgattgaatgtgacaa

SEQ ID NO: 53473 - DNA, 242 bp, Glycine max
gtcaagcagttgaacgaccttcttacagagaagaacaaggacactgggtgggacgtgcctatccacgtcgacgccgcgatcggagggttcatagcgcctttcctctaccctgagctcgagtgggacttcaggctgcctctggtgaagagcatcaatgtcagcgggcacaagtacggcctcgtctaccctggtgttggctgggtcatctggcggagcaaggatgatctgcctgaggagctcat

SEQ ID NO: 53474 - DNA, 241 bp, Glycine max
cacgagcaggattgcatcgacccgcgctcccgcgttcaccaacaccatccgaagctacgccgccgatgcgaaggcctccccgtccgaggtctcctccatcttggagcagaggatccgtggagtccttgaggagaacagcctcgctgagactggacgtgtgcttaccgtcggtgacggtattgcccgcgttcacggcatgaacaatgtccaggccgaggagctcgtcgagttcgcctctggt

SEQ ID NO: 53475 - DNA, 243 bp, Glycine max
atgtgctgttggatgatgctcttaaggagcaatatgatctcattctgttacctggaggtctgggtggtgcagaagcatatgcaaaatctgataaactaatggatctgatcaagaagcaagctgaggctcatagattgtatggagctatatgtgcctccgctgcgattgctcttgaaccacatggcctactaaagggaaagaaagttacatcctatcctgctatgtggaacaaacttgcagacc

SEQ ID NO: 53476 - DNA, 238 bp, Glycine max
taacgctggcgtaatggtcgtttcttttaccggtttccagatggagaatccgcggctgatgtatatgatagaataacaggattcagagaaacgctgagaacagatattaatattggacggtatcagccacctggggagaagaaaacagacatgaacttggtcattgtgtctcacggtctaacacttcgagtttttctcatgaggtggtacaaatggacggttcaacagttcgagggtc

SEQ ID NO: 53477 - DNA, 238 bp, Glycine max
caacggtggaagagtgcaatgcatgcaggtgtggccaccagttggcaagaagaagtttgagactctttcctacctgccagaccttgatgatgcacaattggcaaaggaagtagaataccttcttaggaagggatggattccttgcttggaattcgagttggagcacggtttcgtgtaccgtgagcacaacaggtcaccaggatactacgatggacgctactggaccatgtggaagctg

SEQ ID NO: 53478 - DNA, 233 bp, Glycine max
gaatgggcgttccaccagtgagggcagatcagaaacgggctacttatcgcagcactctttgctgggcagcacaccagctctatcacctcaacctggactggagcatacatgcttcggttcaagcagtacttcacagaggctgtcgaggagcagcaggatgtcatgacacggcacggcgacaagattgatcatgacatcctcgcggagatggacgtcctctaccggtgcatcaa

SEQ ID NO: 53479 - DNA, 266 bp, Glycine max
cttaaaagagcctttgcttgttctttaggcctttccgaattaagtacttgtttcatttgctctcgaagcaagaaaaatgttcatcgagagtttcaaggttgagagtcctaacgtgaagtacacagagactgagattcagtccgtgtacaactatgaaaccactgaacttgttcacgagaacaagaatggcacttatcagtgggttgtcaagcccaaaactgtcaaatatgaatttaaaaccaacacccatgtcactaaactagggg

SEQ ID NO: 53480 - DNA, 259 bp, Glycine max
cgtgcaaggaaaacccttccttccagttccagcagctcccactacttatgtaacagaatttattagaatttggaattcacaacgtttgattgtcgaattaataacgttgttgttgttgttgtatgatttgttggcgctgcaggttcggagagtggttcagtgcggtgtgtggtgcaggaagaaggagatacacccgcaattccacgaggaagcgaaggtgtactgcaacggggagctggtgctgacgacaggtgggacc

SEQ ID NO: 53481 - DNA, 263 bp, Glycine max
gcttcggcttgttgggcgagaacggtgccgggaaaacgacgacaatatccattgtaactggactgatcacgcccacgtccggtaccgccactgtcgtgggacacgacatccgtacagatatcggacaagtccacctcaacatcggaatctgcccacaattctccgtgctttgggacggtttgaccgtggaggagcacttgttgttctacgccagactcaaaggaattccaagaagcaccgagaaatcacacgtggaccactgt

SEQ ID NO: 53482 - DNA, 259 bp, Glycine max
gccaagatatcaattattcctcgtagctacatgttcatattcaggcattaaagcacccactagagcatggccagcctcatgataggctactaatttctagtgggtgctttaatgcctgaatatgaccctgtagccaagatatcaattattcctcgtggccaagctggtggtctcacattttttgctcccagtgaagagaggcttgagtctggattgtacagtaaatgttaccttgaaaatcagatggctgttgccttgg

SEQ ID NO: 53483 - DNA, 255 bp, Glycine max
ctccgccgccgctcccgctccgccccagcgcatcgcccgccgccacagcgtaccgcgatcacatcgatcaccttcagctttcaatcatggccgacgtcgatgtcgaaccggaggcagccgccggcgctcccaagaagaggacgttccgcaagtacagctaccgcggcgtcgacctagatgcgcttctcgacatgtccacggacgacctcgtccagctcttccccgcgcgcgccaggagaaggttccagaggggtc

SEQ ID NO: 53484 - DNA, 257 bp, Glycine max
atccggataacacaaatcctacttataacacgaaaaatggaatctacaaagaaggaattggactagacaatgttgtgatgtcatggggacatgatgagtatatgtatttggtgagtttgcatatagctcatcacatatagatatattcattttttttttgtttttaatttcctctatattctaattaatagcaccttccttataacatatgatcaacggtacactcgattctgcaggttgtacaggaaaacggcacc

SEQ ID NO: 53485 - DNA, 253 bp, Glycine max
tcttcttctcttaaaagagcctttgctttttctttaggcctttccgaattaagtacttgtttcattttctctcgatgcaagaaaaatgttcatcgagagttacaaggttgagagtcctaacgtgaattacacagagactgagattcagtccgtgtacaactatgaaaccactgaacttgttcacgagaacaagaatggcacttatcagtgggttgtcaagcccaaaactgtcaaatatgaatttaaaaccaac

SEQ ID NO: 53486 - DNA, 251 bp, Glycine max
tggaactggcgcaatcatggccgtcggtgcatcagaaccgacagttgttggtacaaaagacggtagaatcgggatcaagagccaaatgcaggtaaatgttaccgctgatcatcgggttatttatggagctgaccttgctgcttttctgcaaacacttgctaagataattgaggatcccaaggatcttacattttaaaagtccctgagtgattgtttttaaaagttcctgagacattgtttttccttgagcc

SEQ ID NO: 53487 - DNA, 269 bp, Glycine max
ctctgcaggcgatagatcgtaagaaacgccaggacaagatgatctgccgcaaatgctatgcacgactgcactctagggctgtcaactgccgcaagaagaagtgtggtcacagcaaccagctgagggccaagaagaagatcaagaactgaggtgctgctcctagtcagtttcatggacaatgttgggctgtattgctgtgtggttgttgaacggtgtttgtttacccaacatttgggccttctgttatgttttcccttgttgtcgatgac

SEQ ID NO: 53488 - DNA, 268 bp, Glycine max
cattaatcgaagcccatgttgatgtcaagacaaccgacaactacatgttgcgtttgttctgcatcggcttcacgaagaggcgcccaaaccaggtcaagagaacctgctatgctcaggtcatcccagatccgtcagatccgccgtaagatggttgagattatgatcaaccaggcttctacatgtgacctgaaagaacttgtttcgaagctcattccagaagttattggtaaggagattgagaagtctacctccagcatcttcccacttc

SEQ ID NO: 53489 - DNA, 268 bp, Glycine max
ctttccgcgatcaaaaccgagctagggttttaggtccgggggagagggtgaggagcggacggaggcgcgccatggacaaccccgagatgcagcggttccttcagcaagagcagcaaaaggcgatgatgaacgagatggttggcaagctaacgagcgtgtgctgggacaagtgcatcactagcgctcccgggagcaagttcagttccggggaatcaacctgcctgaccaactgcgcccagaggtttctcgacatgagcgtgatgattgc

SEQ ID NO: 53490 - DNA, 263 bp, Glycine max
ggatattgctcttgctgatctggctccaacccaccccatcaggctcgggcttgctctcaacttctcagtgttctactacgagatcctcaactctactgaccgtgcttgcaaccttgcaaagcaggcctttgatgaggcaatctccgagctagacagcctgggagaggagtcctacaaggacagcactctgatcatgcagctcctgcgtgacaacttgaccttatggacttccgacaccaacgaggaccgcggggatgagatca

SEQ ID NO: 53491 - DNA, 264 bp, Glycine max
cgagaagggaatgcgctatgcaatgccaaatgctagagtaatgattcatcaacctcaaggtggatctgagggtaatgtggaggaggtgaggcgacaggttggagaaaccatctatgctcttgataaagttgataaaatgtttgctgctttcaccgggcaaccacttgacatggtgcagcagtggacagagagggatcggttcatgtcttcttcagaggccatggatttcggattgcttgatgctttactggaaacaagatacta

SEQ ID NO: 53492 - DNA, 260 bp, Glycine max
ggatatagcgcatgccgatctggctccaacccaccccatcaagctctcgcctgctctcaacatctcagtgctctactacgagatcctcagcacccctgaccgtgcttgtaacattgcaaatcaggcctctgatgaggcaatcgccgcgctagacatcccatgagaggagtaccacaaagacagcactccgatcatgcagctcctgcgtgacaatataactgatggagtgccgacaccaacgaggacggcagtgatgacat

SEQ ID NO: 53493 - DNA, 219 bp, Glycine max
tgacttctcaacattgtatgctcctctcattcgtgatggacgtatggagaagttctattgggcacctactcgggatgacaggattggtgtctgccgaggcattttcagaacagatggtgttctaaaggaggatattatcaagcttgttgacaccttccttgggcaatctattgacttctttggtgccttgagggccagagtctatgatgatgaattagg

SEQ ID NO: 53494 - DNA, 261 bp, Glycine max
ctcgagccgcaagtcaaaggcacaccagagtaggtgaacttaagaaacttgtggaagggggtaaagtgaggtatattgggttatctgaacctagtccatgtacaataaggagagcacatgcagttcatcccatcactgctgtacaaatggagtggtccttatggagcggtgacattgaggacgaaataattcctctgcagcttggcattggaattgtactatatagtcctcttggtcgaggctttttcggtggcaaaggag

SEQ ID NO: 53495 - DNA, 262 bp, Glycine max
aagaaggttgtcatctctgctcctagcaaggatgcccccatgtttgtcgttggtgtcaacgagaaggcgtacaagtctgacattaacattgtctccaatgctagctgcacaaccaactgccttgctcctcttcgtaaggtcatcaatgacaagttcggtatcgttgagggtctgatgaccactgtccatgtcatcactgctacccagaagactgttgatgggccctcgtctaaggactggaggggtggaatggctgctagtt

SEQ ID NO: 53496 - DNA, 255 bp, Glycine max
cttgggaccatctggtccatccgcttcacctcggatggccagttcatgtacatggctgaatgtgctgactttgtgcacatctacgacgtgatgagtgactacgacaaaaggcatgagcttgacttctttgtcgagatatccggcacatcggtcagcccatacactgacacgcttttcgttggtgtgtgggataggatgtatgggggcctgctacagtttcgccgcctgtacaactactcgtatcttgactccctg

SEQ ID NO: 53497 - DNA, 263 bp, Glycine max
ttgttactatgattttgtatgaggttcttagattataccctccatgagttggtggtcctcgaaaagttatcaaagatgtgaaacttggaaacctatcatttcctgatggagtggagattttcatatcaacaattttggttcaccatgatagtgagctctggggtgatgatgctaaggagttcaaacctgagagattttctgatggagttctgaaggccacgaatggtagattttcatttttcccctttggaggaggtcctaga

SEQ ID NO: 53498 - DNA, 267 bp, Glycine max
actcgagccgaatcggctcgagagataacagaacttacaccaacaggaggatttgcagctgacgtttgctgctgcctctgtgcttctgtttgcttcaaagctgggactacccatctctgcaacccacactctagtcggtgcagtaatgggcgttggatttgcaagaggacttatgagtgttagatcagaaactgtgaaggagattgtggcttcatgggtggttactattccagttggagctactctatcagtcctctacacatggat

SEQ ID NO: 53499 - DNA, 260 bp, Glycine max
aaaaaacaactgcttgattggtgcagacgacttcaagagtggacagaccaagatgaaatctgtcttggtcgattttcttgttggtgctggaataaagcgcacctcaatcgtgagctacaaccacttgggaaacaacgccggcatgaacctgtctgcccctcaaacattcaggtccaaggagatctccaagatcaacgtggtggatgacatggtctcgagcaatgccatcctctatgagcccggcgagcatcccgatcatg

SEQ ID NO: 53500 - DNA, 258 bp, Glycine max
cgcacatgaactccttccgccagtacaagaagaccaccagccacatgagcgccgttttctcggggcagcaagtgttgccgctcgacaacgacctagtctcagagttgaaccaagacaagagtggtggggtgtacgagatcgatgtgaagctctacttcaggattaggttcaggatcggggatgtcaaaacccgtcgcttcaagcccgaggtcaaatgtgatatcagggttcccttgaggaccaatggcagcgtaactt

SEQ ID NO: 53501 - DNA, 257 bp, Glycine max
gttggaaagtggcatcatggatctcagcctcttccacagtcggacgagttactcaagggattgatacaactcgccctcacaggcatcgtcacaggagcaataagtggccttggtctggagatcatactcagacttgcatttcgcggtgtccatgttgttattgcagtaaggagtctggatagtggtatgaatgtcgtagtaacaatacttaacgaaatccctcggctaaaattgatgtcatggagttagatctaagc

SEQ ID NO: 53502 - DNA, 252 bp, Glycine max
aaaaagaagaaacagaaaagtcaagaggagccaatgtttatggcagaaccaatgagagcatcaaattcttttgttggcacggaagagtacattgctccggaaattataactggttcaggtcacacaagtgctgtggattggtgggctctaggtattctaatatatgaaatgctttatgggtatacgccattccgggggaaaacaagacaaaaaacatttgcaaatattcttcacaaggaccttaaatttccc

SEQ ID NO: 53503 - DNA, 261 bp, Glycine max
cgggcttccaatggcagtgttcatatcagtggaaactccatgccagcagttaaccgtgggcactccaaagtaaatgacaatgttagtcctgttgtaatgggcaacaaaatggtcgagagggtaataaatatgcgaaaactagcacctccaatgattgaagacaaaaactctccccatagtaatctgtctggcaagtcagcttcatctccagatagctcaggttttggaagaacactttcaaagaagtccttggatatggct

SEQ ID NO: 53504 - DNA, 259 bp, Glycine max
ctccgtcgccgaccgcctcgcccgcatgaaggtcgactacatgagagaaggaatgcgtacaagtgttgaagcaatcctattggtgcaagagcacaaccaccctcacatactgctcctgcaaatcggaaatgcattctgcaaacttcctggtggacggttgaagcctggagaaaatgaaatcgaaggtttgaaaagaaagctgtgcagcaaacttgctgtgaactcgccttccttcccacctaactggcaggttggagag

SEQ ID NO: 53505 - DNA, 253 bp, Glycine max
cagaatctgatctagctgatcctgcaaacaataattatgtgcatgacgtaacaaatgttgtgtctgagttgcagtccagagttgtaacaatttcagcacaggttgaggcagagcttactgaactaccagttgaagaacgacaagaatatttgcgatctcttggtcggacgtgaaagtggtcttggcaacctaataagggcaacatatgaccttctgggtctcagaacttactttacttctggtgagaaggaga

SEQ ID NO: 53506 - DNA, 275 bp, Glycine max
  unsure (1)..(275): unsure at all n locations
ctgagtcttgccattgaagtataagtcttgnccttctctcttcaactccgaacattagagatcatcatctatggctgcctcagtttccactgtcggagctgtcaacagagctcttttgaacctgaatgggtctggacctggggtttcagctcccagttcatccatctttgggagcagcttgaagaaggttattcgctcaagggtcctcaacacaacagatttcctctggaagcctcaagactgttgctgtagaagagaagttagagattgaagag

SEQ ID NO: 53507 - DNA, 269 bp, Glycine max
caatttacaattttttattgagtttaatttctgagcatagttaattaagattcatgtggaacatgacaatatttgggatgacaacttacaatttctgattggatgacagagtatgaactatttacactttttttattattgaatcttagggttagttctgtgtgattgtgattttgcaggcgcaccgtgtggcgcatctgttgtggcggcaatcacggcggccgttggctttagcgctgcactctcgcatcgcagatgtgtttgcggtg

SEQ ID NO: 53508 - DNA, 272 bp, Glycine max
atgatgatgaagtgaggaagtggatttctggtgttggtgttgacagtgttgggaagaagcttgtgaactcaaaagatggacctccaacctttgagcagcccaagatgactctggagaagctcttgctgtatggtaacatgcttgtccaagaacaagagaatgtcaagagagtccaattggctgacaagtacttgaacgaggctgctcttggaaatgctaacgaggatgctattcagaggggaactttcttccagtcttgaattggaggcaaa

SEQ ID NO: 53509 - DNA, 254 bp, Glycine max
ggcctcgtgtctatataggttgcatgaaatcgggcgaggtgttctctgacttaacccacaagtggtacgaatcagactggtggaaaagtggtgatgggaaatcgtactttcgacacgcttctggtgaaatgtttgtcatatccagggccatagctcagttcatttctataaacaagtccgctctccggacatatgcccatgatgatgttagtgttggatcgtggatgattggccttgccgtgaatcatgtaaat

SEQ ID NO: 53510 - DNA, 261 bp, Glycine max
gtcagatatagcctgttttccacaagaaggcaaaaacaacaaagaagattgtgctaaagctgcagtgccagagctgcaagcactaatataaacacccgatcaagaggtgcaagcactttgagatcggtggtgacaagaaaggcaagggaacctctctgttctaagcgtatcataaacttgctcagggtctcaagtatctgtcagaatttaccattacaaacaccctgtgcttagcttctgcatatgttcttttgtcacatc

SEQ ID NO: 53511 - DNA, 272 bp, Glycine max
  unsure (1)..(272): unsure at all n locations
ctatctagcactcgagatatactccagagatcactggagccaaagtgtccgtagcctgacgctgaatgtccgcaagatcttctctgatcgggattctgcattttttgagaggangcgatcagaggttcagtgacgaggagctcaagcaggaggaatctgattcgaagcgagaagccctatggatgcgcttggaggaaatggccgcctcaaaacctcgcgaaaacagtcccttaggcgcaccgaatggcaaacccagccaagctgctggctag

SEQ ID NO: 53512 - DNA, 267 bp, Glycine max
attaattattgccctttcagttcgccatcggcagccgagcaccatgagctccacaggcggcgacgatggcgccaagaagtcttggccggaagtggtcgggctcagcctggaagaagccaagagggtgaagatgtgcgacaagcccgacgacgacatctgagtgctgcccgtcggcacgccggtgaccatggatttccgccccaaccgcgttcgcatcttcgtcgacaccgtcgcggaggcaccccacatcggctgagaatcaaatct

SEQ ID NO: 53513 - DNA, 279 bp, Glycine max
ctcgagcattagcctccaagcccttattaccaacccaaacccctaaacaccacaccccattttgatttcagtttccatgggtagcctcaaggtgcatttttggctgcagtgctctgcatggttgtggtgagtgcacccatggcacatgcagctatcacgtgcgggcaggtgacgaatagcctgatcaattgcatcggttacctccagaacggaggaacgccgccgtcgggatgctgcaacggagtgaagagcctcaatgccgccgccaagaccaccgcc

SEQ ID NO: 53514 - DNA, 270 bp, Glycine max
ctcgagcgtgaagttaaaagccttagccttccctacaactctaaacagaaagatatcatcatccatggctgcatcggtctccactgtcggagctgtcaacagagctcttttgaacctgaatggttctggagctggagctgacagctcccagttcagccttctttgggaccagcttgaagaaggttattgcctcaagggtccccaacagcaaggtttccggtggaagcttcaagattgttgctgtagaagagaagaaagagattgaagaga

SEQ ID NO: 53515 - DNA, 258 bp, Glycine max
ggaataacaggccaatcggaaaactccacgtcagcagaagcaattgcgagtaagaagagaacgtacagtgatcggccatatcgaaggtggttagaccggcgtcggcatacggagcatggcctcgacggcgtcgtctcgatcgattcggccccatccgccgctggtctgccacattccgttcagcacgcggcatatctccagcgaatcgttcctgttactcaccgtcactcgccgattctcgctcgtggccgtgcttac

SEQ ID NO: 53516 - DNA, 247 bp, Glycine max
  unsure (1)..(247): unsure at all n locations
gttaaaagccttagccttccctacaactccaaacataaagacatatacanccanggctgcctccggctccactgtcggagctgtcaacatagctcttttgaacctgaatggttctggagctggagcttcagctcccagttcagccttctttgggaccagcttgaagaaggttattgcctcaagggttaccaacagcaaggtttccggtggaagcttcaagattgttgctgtagaagagaagaaagag

SEQ ID NO: 53517 - DNA, 243 bp, Glycine max
cgagaataatgatcacaagcctgttacgagcagtagtggacgatttggaacatcctgtcaaatggcacattataaaggatgttccaaatcctcaactacggcatataatactcgagaataatgatcacaagcctgttacaagcagtagagacacacaagaggtgagttttccccaaggtgttgaaatgctcaacatttttaagaattatgtggctagaacttccatattggatgactttgaat

SEQ ID NO: 53518 - DNA, 241 bp, Glycine max
cttaatgtacaatacatatcactgagatattaagtaagattcgtgacaaacatgatgatgaatgatttatttatttttatctctcttagcagatccagattttatagttagctagttgttgccaaattgttcactgatatgtttttctaggttctcaacaggaccttctccagttacataagcttggaagtagaaaccaagcatggcaaacatagcaagtcttccatttttggatctgctg

SEQ ID NO: 53519 - DNA, 246 bp, Glycine max
  unsure (1)..(246): unsure at all n locations
attgaagctaaaagccttagcctaccctacaactcaatacataaagacatcctcanccatggctgcctccgactccactgtcggagcactcagcagagcacttttgaacctgaatggttctcgagctggagcttcagctcccagttcagccttctctgggaccagcttgaagaaggtgattacctcaagtgnacccatctgcaagcgctccggtggaagcctcaagattgttgctgtagaagagaa

SEQ ID NO: 53520 - DNA, 266 bp, Glycine max
ggtagtgtagagttggatttgagaggttctgccctcagttctccgccacgctctgtgctcctggtggaccatgtgttgcatgtagcacgaccatctgtgtcagactgggacgctgctttctcgaactacctttgtccatctggtatggcggtactcagagtgcacggatcgacttattgaattcaggtccaggctggtgagccggtgaatatgtgacgagagctttcagtcaccccactaggtgttgccacctagcgcgtgtatga

SEQ ID NO: 53521 - DNA, 193 bp, Glycine max
ataggttttaagaactcaatcagttggaattgttttccaggcaaaatgttttgaaagtggcgaaacagtggccatgaaaaatgttttacaggacagaagatacaagaatcgttaactacagttaatgggtgtgttggatgatccaaatgtgatgtcgctggaagcattgattgctttcaactacaagtacaga

SEQ ID NO: 53522 - DNA, 270 bp, Glycine max
gttgagactggaaagcaattagtactcgaggaatgcttgatggtaggaatttcttcagtagctgcagctgtacgtgcttaggaaggttggaaacaggcctgagaatggaggaaagcttattgcggttggcatcccaggctttggtgtcatatatttggcaactatacttttgcagtcaatacgggcaggttgcgagttaatgcaacctgagtcatagattgactccgcttgctaatgtttcagacacatgtgccacaagtatctgtatgg

SEQ ID NO: 53523 - DNA, 257 bp, Glycine max
agctgcaatcatgcaggagctttaacaagttggggctcctccagtacctcacagtgcagggggcaagagtccctgagccttcagcccctcccagaatgtccctgacaccttttgtaaattgcactgtaacctggcctgccccagaccttgcttcctgcagcctgttcagtgggggctgctttatccctcaggccctccctctgctgtgtgtagaggtcgcaggtcctctggttcctgaggccattacaggacatgtc

SEQ ID NO: 53524 - DNA, 262 bp, Glycine max
gagctccgtgggagccagcgagcctctcgccctgatcttacgtgctcaagaagctgtagtgaagccagagcagcatctgctgaagagacagagaccagccccagaggcgtcacaggaaggcaccaagaaggacataggtctttgatttgattcagcagtcctgtcaagtatacatgtgatggctgtgctgcctggccctctgcagctactgggagtgatgctaccatttccctgagttccatcatgctcagtcaggctgatg

SEQ ID NO: 53525 - DNA, 263 bp, Glycine max
ttcgagttgtcaataatggttctgattctgctctttgaagcaggaactgtcgttgcttgagtttggagtcctcgctgctctcagatgtcatcctcctgaatgtctccgttagcaccgttgaggtcgaatgcagatgtagcatttggatcggtggatcaggaatggacctgaggagcaaagcaaggactctcccaggaccagttagcgacccttcagagctcccaagtggaactatgatggttccagcacaggtcaagctcctg

SEQ ID NO: 53526 - DNA, 241 bp, Glycine max
ggctcgagaaattggaaggtatagctccttctcctgaagacacaatattgcctagagacttgtttcttttgcaatggaatggttgagaatgctgttggcacctgtgctgatgttatatctgtctccaattgatgcttcctttgctgttaatgcccccctcctaccttctggatttcgcatcattcctcttgaatctggaaggaagcttcttccccaatcgcacacttgaccttgcatctgc

SEQ ID NO: 53527 - DNA, 257 bp, Glycine max
aaagaagtcaatcagcaggttggtcttgacaaaggaaaatcttcatctgataaatcaactaagtttcaaggtcgacgcagagttgatcatgttatttttgaccttgcaaaattcattggcaggggaaagataccctcaaaggtgctgaaagaagtgggagaattgataaatctcactctaagtcaggctcagagccatcaccaattatctggctcaacaattttcaatcgcatcgaaataccagcttcgtttgatcc

SEQ ID NO: 53528 - DNA, 272 bp, Glycine max
tatttctactgcttgatcagatacgaattgggacaaatcaaaggtactacagtacaatccaatttttcacaagtgatgcacattagtattcagttcgtcactcggtttatgcagtgtgctaacattgtacttatgctacagatgctgattctttcactcataacattaaagctcttgaaagcattcttcgatgctgctgattcagagttcatacttggtcaagcaatccccatcactttgtggctgtcactggctcctgttgttattggcgt

SEQ ID NO: 53529 - DNA, 268 bp, Glycine max
agtctccgcattctgtcgtgcttacgccatcgtatgtgccctcttcgcatttcccagcaattgttaccaaatagtgcttggctgagtctgatgcgcaagccttgtgctcattctagaaagtagtcttaatggggggcttacatgatgatagaatcaagcgacaagttatgagaacagcatctggtctttcaggggttgaatcagtttctattgacatgaaagacgagaaaatgaccttattagggaacattgatccagtgaatgcagt

SEQ ID NO: 53530 - DNA, 264 bp, Glycine max
caacacctcacttcgggatctgatgctttctatcactgtttatttttttggcagtttcaattcgacactttcctcgcttcaaagattaagcgaacaatatggttgtccttgctgcatccattgtgagcaaatctggcaaagtgctagtttctagacagtttgtggatatgactcgcataagaattgagggtctctagcagcatttcccatattggtagggactggaaaacagcacacgtatgttgattaagagaatgtgcgcta

SEQ ID NO: 53531 - DNA, 268 bp, Glycine max
gcagatagcaagctcatcctagagttttacaaatggcagcacggctcctccatggctctctcttccccatccttggctggcaaggccgtgaagctgggcccatcagtccccgaagtcggcgacggtcagtcatgaggaagatcgtcaccaagcaggcctcgctgccggaagcccatggtatggcccagaccgcgttcagtacttgggcccagtctctggacgagccgccgtcctacctcactggcgagttcccaggtgagtacggctg

SEQ ID NO: 53532 - DNA, 253 bp, Glycine max
cttgttccactttcttacattgctggtttgctaactggcagacccaactccaaagctgttggaccttctggagaagtacttaacgcaaaagaagcttttgaattggctagcatcaactctgagttctttgaattgcaacccaaggaaggtcttgcccttgttaatggcactgctgttggttagggattagcttctatggtactctttgaggctaatatactagctgtgttgtctgaagttctaccagctattt

SEQ ID NO: 53533 - DNA, 134 bp, Glycine max
cacaaaaatgagggatttgatgaggtacttactgctcagcagagtcctgagaatcctaattggttccaaggtacttcacatgctgtcaggcagtcttagtaggctttatggagtgaacaatgttgtggaattct

SEQ ID NO: 53534 - DNA, 261 bp, Glycine max
agcaagatgccccgtcaacttttggctactcgctatgttgccatccctgaggatgtcaagcttgttctcgatggccgcaaggtgaccgtgagcggtaagcgcggcgagctgagacgcgacttccgtcacttgacgccgacatgcgtcgtgtaaacaaggagcagctccgcgtggacctgtggtttggcaaccgtaagcagctcgcctgcgtgcgtacgatctgctcgcttattgaaaacatgatcacgggtgtgcgtgtcg

SEQ ID NO: 53535 - DNA, 260 bp, Glycine max
cttcaaaacactcataacacaaagcacaaagcaaagctcatccttgagttaaaaaatggcagcagcttcttccatggctctcatctccacatccttggctggcaaggccgcacagctgggcccatcagccccagaatgggaagggtgagcatgaggaagatcgtcaccaagcaggtctcctcaggaagcccatggtacggcccagaccgagtcaagtacttgggcccattctctggcgagcccccgtcctacctaaccgg

SEQ ID NO: 53536 - DNA, 278 bp, Glycine max
caaaacctctctcaagatggccacattcacgcccttagctgtgcttcgcacaccgttcagacactgcgctacgttgctcctatgcttgcttcgttctatctgtctatcgcttcccgttctgctgcattcaacgatcagggccctggtgtttgctggcccctgccccctcatcaccccaactgtgagagaggatatggcaaaggaatacgagcaagctattgaagaactccagaaattgttgagggagaagagtgaactcaaagccacagctgctgaga

SEQ ID NO: 53537 - DNA, 266 bp, Glycine max
gcatatgttatgccttgcaatttcaagatgtgatttgactcaacttctgggatttgagaaattcattccacactttataaaaaagaatggtttaaacatacttaaaggtgttaactatgcatcaggtggagctggaatacgcattgaaaccggctcggacatgggtgctactatcagcttgggattacagttagcaaatcacagagtcatagtttctgaaattgctacgaaacttggaagtcctgacttagctcgacaataccttg

SEQ ID NO: 53538 - DNA, 254 bp, Glycine max
cagcattgggtggaggagttataccagttagtgcagttcttgcagacaaagatgtgatgctttgtatacaacctggacagcatggaaggtttcattttattataaacttataatttatgttaatcttctccttttgtttagcactttcttgcctcgagttgtcaaacttctgggttatgacgggcatctgttttcatccttaaagccctttattagtcagctcatgtgaagagacagaactctcccttctgttg

SEQ ID NO: 53539 - DNA, 254 bp, Glycine max
caggcaccgaaaccttcttcctttgctggcccacgtgtctaggccgggatgccactaccttgtttacgagtgtctgaagtctggcagcttgcatgacaccctgagcaaggttgaggtgggcgagttcgagttggattggttatcaaggcacaagatcgctctcggtgtggccgctggactcgaatacctgtcattgaagcacaaccctcggatcattcatagggatctcaagcctgctaacatcttcttgatga

SEQ ID NO: 53540 - DNA, 263 bp, Glycine max
ctgctcgcagaaagtacacgctattcttacattgaatgagtgagaccatttgatacagaatgatgaacagagagatactgaccaacttactcatgtttacacatttatcctccgtgcggatcctacctacggcatcctgattgataatgtggagacgcaaacgggtagtctcgactctgatggggatcttctccctccaaagaaactcaaagatccggaggctaagataccagaagttggggatgacaaagattttattcctg

SEQ ID NO: 53541 - DNA, 263 bp, Glycine max
gcgtaggatgctctagatacgatgttgactttgttataacccttccatttatagatcaagctttcttctgtacaactggcaaagaagtatatgaaacgtgttgcatctgaacttgatgaactatctggtcctgataaagaaccagctagagagtttttggttctgcaaggtgtgcgtttcgctttccgtgtccatcagtttgcaggaggctttgatgcagagagcatgaaggcttttgaagaactaaggagccgcatccaaac

SEQ ID NO: 53542 - DNA, 219 bp, Glycine max
gtggaagccaataattctgggcgtatgagacctcgtgaaggagttgacacagagtatggcgcaacatataaggcggttaaaacacagagaggccaaggtagtaaaacagcttaaagcacaaagggcactacttagaagcacatcaattacttaagtcaatgttggaaaggcggaatacctattagaagttccagaaaatttgtctaagaatatacctcg

SEQ ID NO: 53543 - DNA, 129 bp, Glycine max
gcaatttattttgggccgttttcactttgttaggttcattggggttattgttcgttgcaatttccagttatcttggtatggatttgttctttatttctgagaaaattagtgatttttcttttattccgg

SEQ ID NO: 53544 - DNA, 127 bp, Glycine max
tgatcttagactttattgttgcctgctgccattgtaattgatatgtattaatgggcctttgagtattggatgctggtgtcgctaaacgtcgccttgtggtttgatcagtcgtataatccgaatcgac

SEQ ID NO: 53545 - DNA, 265 bp, Glycine max
  unsure (1)..(265): unsure at all n locations
cttcaaaacactcatagcccngcgcanntgccccaagctcgcccttgagttannaacacacagnagnttnttccataggtctctcatcnccatccttggctggcaaggccgtgaagctgggcccatcagccccagaagtgggaagggtgagcatgaggaagaccgtcaccaagcaggtctcctcaggaagcccatggtacggcccagaccgagtcaagtacttgggcccattctctggcgagcccccgtcctacctaaccggtga

SEQ ID NO: 53546 - DNA, 267 bp, Glycine max
cgttgccattctcatcctcctctgtctctctctctccaccattgccatggatccttacaagctccggccatccagcgccttcaattctcccttctggactacaaattctggtgctcctgtttggaacaacaactcctctttaaccgttggagctagaggtccaattctgcttgaggattatcatcttgtggagaagcttgcaaactttgacagggaacgtatcccagaacgtgttgtccatgccaggggagctagtgcaaagggttt

SEQ ID NO: 53547 - DNA, 266 bp, Glycine max
gtcattgactttaaaagctaatcaggaagatctgttaggtttctcagcttcacttgtgaaaagagcaccaaatactaaaaataaaaggatactggttgctaaaagggaggcagagatgtcaaaaggcgtaaaggtgctagcagagttagagaaaattaggacagctatagaagaggataccaagcgagtagcaagcttgagtacctgggcagaagcatctggagttgatgagaaggtgctacagaagctattgcatcgtggctatt

SEQ ID NO: 53548 - DNA, 119 bp, Glycine max
ggagaacagataggcgtctgcggaatgcagggtgcgattgttaccagaattcgagctttattgacaccacatccgacgaaggaacttcgtgtcaagggaacatatcttcatcacaaaga

SEQ ID NO: 53549 - DNA, 267 bp, Glycine max
gaggtgtttagaagcgatcgagaaaaactctgtacacatgttggtttaccaagacctccttacaggtgatgagcttctctctgactccttccgttacaaggaaattgagaatggaatgctgtaggaagttgcacggggaaattgggttagttaaaggacgcagttgaatgtagaacattgggtgcaaacccttctgctgagggtggaggagaagatgaagggattgatgatgcagctgttaaggttgttgacaatgttgacacattc

SEQ ID NO: 53550 - DNA, 273 bp, Glycine max
gagtgttgcagcatcattctattggggggttttggtctcattgtggctggaattccaccagagaaggagtttttagtggtgttccttttttggcctttccaatattaatggaccaaccactaaacggtaagttgatagtagaggaatggaaggtggggtggagggtgaagaaggaggtgaaaaaggacactttgataacaaaagatgaaattgctaatcttaataagaggtttatgcatttgggtggggatgagtgagagatatgaggaaaag

SEQ ID NO: 53551 - DNA, 180 bp, Glycine max
cagctcgatcggctcgagcggctcgagtccacaactgatggcaggaagattgttgattggtagagagtttcctcaaagagaatggcaccagagatgtactgaccaagtcctggaactgtcacaaggagggtacggtaccattctctttgaggaaactctctaccaatccacaactgatgg

SEQ ID NO: 53552 - DNA, 267 bp, Glycine max
atgatgatgaagtgaggaagtggatttctggtgttggtgttgacagtgttgggaagaagcttgtgaactcaaaagatggacctccaacctttgagcagcccaagatgactctggagaagctcttgctgtatggtaacatgcttgtccaagaacaagagaatgtcaagagagtccaattggctgacaagtacttgaacgaggctgctcttgggaatgctaacgaggatgctattcaagagggaactttctaccagtctggaattggag

SEQ ID NO: 53553 - DNA, 284 bp, Glycine max
gaccggagtggcggatgctgcggaaggtgtgcgtgctcaagatgctgagcaacgccacgctggactccgtgtacgacctgcgccgcaacgagatgcgcaaaaccgtgtcttatttgtacggtcgagtggggagcgcggtgaatataggagaacaggtgtttctgacggtgatgaatgtgataacgaatatgatgtggggaggggcggtggaaggggcggagagggaaagcatgggggcggagttcagggagctggtggcggagataacgcagctcttggggaag

SEQ ID NO: 53554 - DNA, 278 bp, Glycine max
caagataggtgttgaaactgacaagattggacggattttgtccaatccaagtacagcagtgaatggagtcctaccagcagatacaaggactccattgactgctggacttggattggacaagataggtgacgaaactgacaagattggacggattttggtaaacgaacgatttgccacaaatgtctctggtgtttatgctattggagatggcattccatgcccaatgttggcacacaaggcagaagaagacggtgttgcttgtgttgagtacatagctg

SEQ ID NO: 53555 - DNA, 283 bp, Glycine max
aagaagcagaaagagaagcattagcaaaagcaagaagaactagtctaagcagaaatggcctcttcagtgatggcatctgtggccctcaaacctgcccctttcactgttgagaagtcctcagttagaggccttccctccctctcaaggaactcctcttcattcagagttgtggccagtggtggcaagaagatcaagactgacaagccttatggaattaatggtggcatggctttgagggaaggagttgatgcatctggcaggaaaggaaagggaaagggcgttt

SEQ ID NO: 53556 - DNA, 279 bp, Glycine max
cgtggagatagtacctgttccctgccgcagcactgatgacttcaatttaagtataacttcaatcgagagaaccttcaatcaagcaaagatgcgtggtcaaaaagttcgcggaattataataaacaacccctcaaatcctgctggcaaactattggatagggaaacactgttggatcttttggactttgctagagagaagaacattgcgataatctctaatgaaatgtttgccagctcttcttatggaaacgaagagtttgtgagcatggcagaaatcat

SEQ ID NO: 53557 - DNA, 266 bp, Glycine max
atcggaatcaacggatttggaagaattggccgtttggtagccagagtggctctgcagagagacgatgttgaactcgttgccgttaacgaccctttcatcaccaccgattacatgacatacatgtttaaatacgacagtgttcatggacactggaagcatcacgatgtcaccgttaaggacgagaagacccttctcttcggtgacaagccagtcactatttttggacacagaaaccctgaagagatcccatgggggtcaactggagc

SEQ ID NO: 53558 - DNA, 263 bp, Glycine max
ctcgagccgctcgagccgatctcggtgcgcaattcgccgacgtctgtctccccggatccgcatacaccgaagagtccgccacatggatcaacacggaaggtcgatcgcaactcggtcgagtcgctgtcgtcccaccaggtgccgctcgagaagattggaagattatccgtgccctctccgaagtcgtcggctcccctctcccctacgacgacctgatccaattgagagagcgaatgtgggatgtctcacccaccctcgtccga

SEQ ID NO: 53559 - DNA, 260 bp, Glycine max
tggtcttggccctttagaatttttgactaagtttcgtataccacatcctggaagagttggaggaaggttttttgttgacatcatgatgccttctatgttgagctgggtcttaggtggcaatagcgacaaacttgagggcagaccactaagttgcaggctcacagacaaagtacgttgctcaaataaagtttcttttgtactttgttgctgagaagatattgtatatctggcaaatgatcagttacgtagatggtttgaag

SEQ ID NO: 53560 - DNA, 267 bp, Glycine max
cggctcgaggggaaaatcattcacagaaagggcggtgtgttgtaccttttccgaggcagaaactacaattataaaacacgcccacattttcctctgatgttgtggaaacctgtgcctccagtatatcctaggttggttcagcgagttcctgaaggtctaacgctagaagaagcaactaaaatgcgtcaaaagggaagcacattgattcccatatgcaaactaggtaaaaatggtgtttactgtgacctagtaaaaactgtcagagag

SEQ ID NO: 53561 - DNA, 228 bp, Glycine max
caatggatcaagtagttggatcatttcgttctgctactggatctgtatttttctcaaccttggaggatggaaagattgtaaaaggtctctctggtgttccagatgaaggtcctgtcttatatgttgggtatcacatgttgttggggttagagcttatctcacttacagatggatttttaagtgagaagggtattgcacttcgtggaatagcccatcccgatctgttta

SEQ ID NO: 53562 - DNA, 225 bp, Glycine max
atccttatgttgttcgccttcacgaggttcttgcaagccgtaccaagatttatatcatattggagttcatcacgggcggtgaattgtttgataaaattatacaccatggccgtcttagtgaaaatgactctagaagatatttccagcagcttattgacggtgtagattattgccacagtaagggagtttatcacagagatttaaagcctgaaaatcttttactcg

SEQ ID NO: 53563 - DNA, 263 bp, Glycine max
tctcgagccgattcggctcgagagctaatgaaagtagctatttcaccaagttgaacgagaagattgaactccagaaacaaatgaatatagctgaactcaacgatcttgatgaggctacccgattggagatagaaggcttccgaacagaacttatctaagattggagattcatgatgttccttgtgagatggttgaatactttgatccctaccatccaatattggttggagggattggtataggggaggaaaatgttggataca

SEQ ID NO: 53564 - DNA, 263 bp, Glycine max
gcgggcacagcctttgtagattttgagtttcaagaagaagttaattctggaaaagtatcagccctaacattgaacaaattttcatgtatagcattggctggggtgtctactgaatatcttatatatggattttctgaaggaggtcggatgacataagaaagttggatttattgctcaagggcctaggcttcacacagaagaagacagattctcaggttagatggtctttgctaaacacggtcttgctcttgcggaggcatgaa

SEQ ID NO: 53565 - DNA, 260 bp, Glycine max
cccacaatggcctgcacacgcacctttgctcgtctggctaccaggcagacagccctgcgcccggctgtcttctcgcgcggttttgcctccgttaccgacacgatcgcccgcgagcccatctccaaggtcgccgagagcatcgtcctgacccggcccgcaagcctgcacccgagagcaagacatcgacgaccaaggagcctgagcccagccaggatgcgaagacaaagaccttccacatctaccgatggaaccctgacgag

SEQ ID NO: 53566 - DNA, 279 bp, Glycine max
ggcaaaactaaggttagtactcctccacttacgacaaggttcattcctacacacaattgtctcacatgcaaatatgtgtccattcctgtgtaatgaatgtttgcatgatttgttctgaaaggtatgctgttgttactggagcaaacaaagggataggatttgagactgtaaaagagctggcctcaaatggagtcaaggtggtgctcacagcaagagatgagaacaaaggccatgaagcctttgagagattgaaagagtgtggtttctctgatttggtta

SEQ ID NO: 53567 - DNA, 273 bp, Glycine max
aggatatggtgcaagtgctgtgtgtccgtacttggcattggagacttgtcggcagtggcgtttgagcaataaaaccgtaaatctgatgaggaatggaaagatgcctactgtatcaattgaacaggcacagaagaactattgcaagttactgtggtgcacaaatatttgaagtctatggattagggaaggaagttgttgatcttgcattcagaggaagtgtgtcgaaaattggtggattaacttttgatgaggtggcaagagagactttgtctt

SEQ ID NO: 53568 - DNA, 269 bp, Glycine max
gcttccacaagaggctttgttcagaaatacttagccacaggtcccttcaaggtccaattcggaaagtctatgatcaagatgagcaacattggtgtcaagaccggttctcagggtgaaattcgcaagatatgttctgctattaattaattaaggcaaatattataaggatactgattaatatttgccttaattaattaatcagtatccttataatattgattaaggaattaaaaaaatatttaaaattatattaatcatcacttaaggat

SEQ ID NO: 53569 - DNA, 266 bp, Glycine max
tggatgtatgtatatttatgtttattgtccttttcccttttcaacagaaaatgcccgtgtggtggagatggtactattgggcatgtcctgtggcttggaccttgtatggattgattgcatctcagtttggagatataactgaaagaatgccgggtgaagataacaagatggtgaaagaattcatagaagactattttggtttcaaacatgacttcgttggaatttgtgctgttgtggttgctggcatcgccgttgcctttgcatta

SEQ ID NO: 53570 - DNA, 269 bp, Glycine max
aagcattagcaaaagcaagaagaactagtctaagcagaaatggcctcttcagtgatggcatctgtggccctcaaacctgcccctttcactgttgagaagtcctcagttagaggccttccctccctctcaaggaactcctcttcattcagagttgtggccagtggtggcaagaagatcaagactgacaagccttatggaattaatggtggcatggctttgagggaaggagttgatgcatctggcaggaaaggaaagggaaagggcgttta

SEQ ID NO: 53571 - DNA, 265 bp, Glycine max
aagaatcttggtcaatggttttcaggtggatggacttaagcgattggttgtcatacagggcaaccggtgctgatactcgcagtctatgcaccacagtttgtaaatggtcatatctgggtcatgcacacatgcagcatgtcgatgataaagagtctcgagacatggaagcttgtggatgggatgatgatttttgggaggaaattggtttgggtgatcttattgaaggacatcatgcgaagataggacgagtgttgctttcctggcc

SEQ ID NO: 53572 - DNA, 258 bp, Glycine max
gagaagttggattgaagtgcagggagaagttcatgtttttgtggcgggggattggaagcatgagaggtccaaggaaatttatcagaagttggcagagcttatgggggatattgaaaaattagggtatgttcctgtttgggatgaggtgttgcataatgttggggaggaaaagagaaaggaggccctttggtatcatagtgagaaattagcagttgcatttggagtgttgtgtggacctgcaccaccagggaagccgtt

SEQ ID NO: 53573 - DNA, 257 bp, Glycine max
gtcttcgcaaccgttagcactccttcttctccttcttcttcttcttcttcttccttcccttctctcattcaagacaggcctgtctttgctgcccctgcccccatcatcaccccaactgtgagagaggatatggcaaagtaatactatcaagctattgaagaactccagaaattgttgagggagaagagtgaactcaaagccacagctgctgagaaagtggagcagataacagcttctctgggagcatcatccatctg

SEQ ID NO: 53574 - DNA, 268 bp, Glycine max
agcgctgtgagtggcgggaagaggaggcgtggcgctgggaagaatgctaaggctacagggagagttgcatcaaggaaaaagatggaggaggacgtttgtttcatttgcttcgatgggggtgtccttgtgctttgtgaccgcagggatgccccaaggcttaccatccttcctgcgttaatcgtgacgaggccttctttcgagccaagggaaagtggaattgcggttggcatctttgcagcaactgtgagcagagtgcatcttatatgtg

SEQ ID NO: 53575 - DNA, 268 bp, Glycine max
caaaccatatacggtcttgtgcagtgtacgcctgatttgtcaaggcaagactgcggtgactgcttgcattggagtttggcagatttcggaaatgttttcaaaaacaaagttggtgctgtagtgcttagaccaagttgtaatgttagatatgaaatctaccccttctacgatgaacctacaccatcagcatcggtaccactttccctaaaagaaaagggcaactcactgcgaactacaatcgccatagttgtgcctaccgttctcgttg

SEQ ID NO: 53576 - DNA, 266 bp, Glycine max
attaagcatgatctcctttggcgagcttgatgtttctgaagaaattaaggagcaggttgcacttgtgatcactcagtttagaagagccaaagcgcagtttgatccgcctggttttcagctttacgagcatctgttgtttgtttacaaccagagctatgatgtgaatactgaaactgctgaactacgtgtaatctgtgaaaagctacaatttctcaatgtggatgacatcaagcaagagtcacttgctctgcaaaagatggttgtag

SEQ ID NO: 53577 - DNA, 256 bp, Glycine max
ctcgagccggttcgagctgtggaggaggggagaataataataataatgatggaggcaaacaaggagttgaactcagcacagcacagagacaagagcttcagatgaagaagtcaaaacttgtgaccatgctagatgaggtggagcaaaggtaccgacagtatcaccaccaaatgcaagttgtgataacatcatttgagcaagcagcgggtgttggagctgcaaagtcttacacagcccttgcgttaaagacaatctc

SEQ ID NO: 53578 - DNA, 267 bp, Glycine max
atgtttttctctgttcatgcaagggctgccacagaaaaaaccatttatgattttactgtcaaggatattgacagaaaggatgtttctcttagcaagtttaaggggaaggttctattgattgtcaatgttgcttcacgatggtatgaattatgcacttttcaagggagatatgtagctcaatatgtgtcatggagccctattttcttctttgaatttcccaatttttaatgtaaaaaatgaaaatcaaataagttgtagcttaacatt

SEQ ID NO: 53579 - DNA, 262 bp, Glycine max
atgagctgacacgaggagaatcagagatgggagtacaaggcactatggaatacttatctgacgtacttagcaccaaaaagaagaagaagaagaagcaagtccaaactgtagcactgaaaatcagaatggactgtgaaggctgtgcacgcaaggtcaagcatgttctttttggtgttaaaggagctaagtcggtggaagtggacttgaagcagcagaaagcaacagtgacaggatatgttgagccaaagaaagtgcttaaggc

SEQ ID NO: 53580 - DNA, 258 bp, Glycine max
gaagatgtatcactattacttggattggctattgatggagaacctgtgataggtccaataagtgcaccaagttcagtttgtgaaaaattattagggagagtacctgaggacctgaatggtggaatggtgaagcttacttggctgaaggagttcttctctgagtgtcctgaagatgcatcacaggaggaaattgagcgatgtacttgtgctttccttttatacctagtaggcagtacaatattttctacaacaacaggg

SEQ ID NO: 53581 - DNA, 248 bp, Glycine max
tctcgaaaacttggatgaggtcgtgttcaagccaactgttgctttactcactggttcaaccccactaaaacaatcacggatgattcgtaagggtatccagaccggagaaatctcgatggtcataggaactcacagtttgatagcagacagtgtggaattcgcagccttacgtattactgtggtagacgagcagcatcgctgttggtttgattcagagaggaaggtttaacagtaagttatactgtgca

SEQ ID NO: 53582 - DNA, 245 bp, Glycine max
ggcgaaggacgttgaggttgctgagcgtggctccttctctgggaaggactaccaggtccctccaccagcaccactcatcgatgctgaggagctcacaaagtggtccttttacagggctcttattgctgagttcattgccactttgctcttcctcgacattactgggctcacagttatagggtacaagcaccagacggatcatgctgatgcgtgtggtggggttggcattctgggcattgcatggg

SEQ ID NO: 53583 - DNA, 251 bp, Glycine max
aaaagcgttagcgttctctacaacttccaccctcacgacatcttcatccatggctgcttccgtctccactgccagagctgtcaacagagctcttttgaacctgaatggttctggagctggagattcagctcccagttcagccttctttgggaccagcttgaagaaggttattgcgtcaagggtcgccaacagcaaggtttccggtggaagcttcaagattgttgctgtagatgatcagactgagattgaag

SEQ ID NO: 53584 - DNA, 217 bp, Glycine max
aattaacctcatgacaccataagccggtacattaaaattggaattagcacaatttgccgcattagaagccctctccctattcgcttctgatctcgctaaagctactcataatcaattaacacgaggtcaacgattgcacgagttgcttatactatcgcaatcaactcctcttaccgtggaagaacagttaataactatttctactggaacgaatggt

SEQ ID NO: 53585 - DNA, 146 bp, Glycine max
ggccaggtaaggtgacaagaatcttgacaacatcctgttcaggagttgaatcggtgctaacaattccagtgctgataccaatgcggtcatcgcttgttggtgcccagtagaatttgtcgatatgggcgtcaggttgaaatgtgcat

SEQ ID NO: 53586 - DNA, 180 bp, Glycine max
cttaacacaaggcagatagcaaggtcatcctagggttttgaaaatggcagcagcgtcctccatggctctctcttctcgatccttggctggcaatgccgtgaagctgggcccatcagctgccgatgtcgggagggtcagctatgaggactgaccgtgcaccacagcagcgacctcctaccg

SEQ ID NO: 53587 - DNA, 226 bp, Glycine max
aaaaaagcttcaatttttcgatgatgaggagcgagaacgctagcaagaagaggtacaggaccaagttcagcaaggagcagaaggagaagatgcatggattctctgagaaattggggtggagaatgcagaaaggggatgatgggttggtccaagaattctgcaatgagattggggtctcaagaggggttttcaaagtgtggatgcataacaataagaacactcttag

SEQ ID NO: 53588 - DNA, 230 bp, Glycine max
gttagaggcttctaaattaagtgcatcagagtcagtcacaagctgtttgcaagttgcaaaaagggagaataagtgcttaaagaagcttctgacttgggaaaaacagaaagtaaagacacatcaggatattgcaacagaaaaacagaagatattggagatacaagaagaactagctcagattaaacagtgtgcaaaggaaactgaggtaacgaggaaggaagagttgaagg

SEQ ID NO: 53589 - DNA, 254 bp, Glycine max
gtcgcattctattcacctaacctctttcagtctgtgggtatgggacacgatgctgctttactttcaactgtaatacttggaattgtcaaccttgcttctctcatcttatccactgctgttgttgatcgttttggttcgaaggtcttgttcattactggtggcattctcatgcttttctgtcagattgcggtgtctgctttgctagctatggtgactggtgttcatggtacatagggcatatcaaagggtaacgc

SEQ ID NO: 53590 - DNA, 218 bp, Glycine max
tgtgaagggaaccatgacaaccacacattcctacacaggagaccagaggcttttggatgcttcacaccgtgacttgagaagagccagggctgcagcactgaacattgtcccaaccagcactggagctgccaaggctgtgtctctagtgttgccacagctgaaggggcaagcttaatggaatagcggctcgtgtggctacacccaatgtttcatttgtg

SEQ ID NO: 53591 - DNA, 220 bp, Glycine max
aagaaatataactaatattctttagaataatcaaaaagaatattaaattcaaataaattttagatagaaaaaagacttaaaaaggaggatttgaaatgcgagatctaaaaacatatctttccgtggcaccagtagtaagtactctatggttcggggctttggcgggtctcttgatagagatcaatcggttttttccagatgcattgatatcccctttttt

SEQ ID NO: 53592 - DNA, 232 bp, Glycine max
agttagacaggttctgtgatgctcttatttccattagacaagaaattgctgagattgagaaaggaaaggttgacattaacaacaatgtacttaaggtaaaaaaaaacacggttcttcatttgtacgatgccactaggggataccttggttttgggtaaattgtttaatagtatacaccatggggcgcatatttcattcacaatttcacctcgtgcccggcacttatattgat

SEQ ID NO: 53593 - DNA, 256 bp, Glycine max
tctgccgccgtctccactgtcggagctgtcaacagagctcttttgaacctgaatggttctggagctggagcttcagctcccagttcagccttctttgggaccagcttgaagaaggttattgcctcaagggtccccaacagcaaggtttccggtcgaagcttcaagattgttgctgtagaagagagaaagagattgaagagacccagcagaccgacaaggacagatggaatggtcttgcctatgatatctcatacga

SEQ ID NO: 53594 - DNA, 287 bp, Glycine max
aattcctaattgtttaaacctaattctcatttcttcatcgttcgattcttctcctcctaaagatgcagatcttcgtgaaaactttgaccggtaagaccatcacccttgaggtggagtcctccgacaccatcgataacgtgaaagctaagattcaagacaaggaagggatcccacctgaccagcaggacttatctttgcgggtaaacagcttgaggatggtcgaacccttgccgactacaacatccaaaaggaatccactctgcacctcgtacttcgcctcagggggg

SEQ ID NO: 53595 - DNA, 280 bp, Glycine max
attttgataccgcgattcaacattacacaaaggctttggagttggatgatgaggatatttcgtatctcactaaccgcgatgctgtctacttagacatcggcgagtatgaggaatgcgtagaagaggatgacgaggatgacgatgaagatgaagaccatgacgaaggactagaaggtgatgcatctgtaggtcgaagcagaccagaagtgaaaagaagagtcgcaaggcaatgctgaaacttggaatgaaacctgtcacaggtgtcagacgatcgacagtc

SEQ ID NO: 53596 - DNA, 268 bp, Glycine max
gtaaatgttactgctatctttgcattacatgtgatgcctgacattccactaggtgaagcagcctctaggtctgatcctctggatccccaggttgtgacagttgctaagttccaaggaggtggtgcattcaatgttattccagattatgtcacaattggtggcacctttcgagcttttctagagataaattggaccaacttaaacagcgcattaagcaggttgtcattggtcaagctgctgtgcagaggtgtaatgcaactgtcaactt

SEQ ID NO: 53597 - DNA, 269 bp, Glycine max
cagaaaaacaagtagttgagaactaagaagtaggaaattgcttcctcaatgatctcctccccagctgttaccaccgttaaccgtgccggtgccggcatggttgctccattcaccggcctcaaatccatggctggcttccccacgaggaagaccaacaatgacattacctcattgctagcaacggtggaagagtacaatgcatgcaggtgtggccaccaatacgcaagaagaagttcgagactctttcctacttgccagacctcgatgat

SEQ ID NO: 53598 - DNA, 256 bp, Glycine max
gggactgaaataaaagtatggcatggaaaagttgaaggcctctctgtctactttttggagcctcaaaatggattctttcaggttggctgtgtatatggtcgtgggaatgatggagagagatttggttttttttgtcatgccgctctcgagtttctactccaaagtggatttcatcctgatatcatccactgccatgattggtcaagtgcatttagtgcttggctatttaaagacaactatgcacattatggtctta

SEQ ID NO: 53599 - DNA, 274 bp, Glycine max
tgcttctttaatggctttaggcacatttattgatcaaggtgaagcccctgtcttttatttccagaaataccctgaagatcatcccgtgtttggattttttacttggagatgggttctcacccttggttttgatcacatgtttacatcccctatatttcttggagtgttggctctccttggtgcatccctcatggcctgcacttacacaactcaactccccctcatcagggtttcaagaagatggtcatttttgcactctgctgaggccatacgt

SEQ ID NO: 53600 - DNA, 246 bp, Glycine max
tgaaggttttggtggggaggcttttgcaagattggcaatgatatttcccaatttttgggcccacttatattgaatcagctgttacagtctatgcaaaatggtgatccatcctggactggctatgcatatgccttctcaatatttgttggagtggtctttggggtgttatgtgaagctcaatattttcagaatgtcatgcgtgttggttaccggttaagatcaacattggtggctgctgtatttcgc

SEQ ID NO: 53601 - DNA, 271 bp, Glycine max
gccttttatttggtaggtaatatcgatgaagctactgcgaaagctacgaacttagaaatggcttgttcaggaagaccatctaattctccagaaagaatcaatttaaaccctctaattgtttctttctggagaattagatggtcttcctgaacaagccttttatctggtaggtaatatcgatgaagctactgcgaaagctacgaacttgagaatgggggagcagtttgaagaaatgactttgaatctttgtgtactgacccccaatcgaatt

SEQ ID NO: 53602 - DNA, 186 bp, Glycine max
attttggtctggagcagcttcaaatgctgtggtggttgagccggatgcttttaaggaaaatgacgtcatatatagagcccttagctccagaggtcaccatgatgacatgctccaaactgctgaattggtatgcttctgtgtgaacatgacctccatgttattattatcatttttccactaactctc

SEQ ID NO: 53603 - DNA, 283 bp, Glycine max
gctgcagtgagagtagcagagcaagaacaagtagttccactaaacaaagggtagaagggactttccaccccacttctggaaaccagactttctgatggtgctgaagttgaaatggaagtgatacctatgggtgtcaacaatcgtgacatttcaaacacattcaggatcacctctccattggttgttgatgaagctatgcttgaaaaagtgcttgggcctccaaaatttgatggaagagaagctgaggatcgtgttgctacccctggggcatctgttgggcttg

SEQ ID NO: 53604 - DNA, 280 bp, Glycine max
cttcctcaccgattgctagaatggaatttcgatgctcagtcatatcttttaccattctcttctctcttgctcttgcaggagagagccatgtccatgcatcgctacctgaggaagattattgggaagctgtttggccaaacactcccattcccactgcactgcgagagcttctaaagcctctccctgcaggtgttgaaaccgatgaactccctaagcaaattgatgatacacagtacccaaaaacattcttctataaagaagaccttcatccaggcaaaac

SEQ ID NO: 53605 - DNA, 240 bp, Glycine max
caggcccaacgacacagtgcttctactgatcaacaacttcggaggcatgtcaaatttcgagctcgaagctctgacagcatccactcgcaggcttttgaagaaagactggagcatcgcacctgaacgcctctacgtctcagcattcgagacctcgctgaatgcacctggctggtctctttcgttgctcaacgtctccggcatcgaacgaaccaccggcacatccgttgcagaccttctgaa

SEQ ID NO: 53606 - DNA, 263 bp, Glycine max
catggctgtggtgtgtataggttttggtgtcatgattgcacccgtctatattgctgaaatttctcctgccattgctaggggatctcttacctctttccctgagatatttataaattttggaatccttctcggctacatatcaaactatgcattttcgaggcttccatcacatataaatttcaggataatgcttggtgtgggacttatcccttaactggtaattgctattgcactgtttgtcatacctgaatccccaagatggc

SEQ ID NO: 53607 - DNA, 258 bp, Glycine max
ctcgagccggacaaaattctgccgtgtccgcgctgcaacagcatggacaccaagttctgctactacaacaactacaacgttaaccaaccccgctatttctgcaaggcgtgccaaaggtactggaccgctggcggcaccatgcggaacgtgccggtgggagcggggcgaagaaagaacaagaactcagcctcgcactaccgccacatcacaatctctgaagctcttcaagcggccagaattgatgcccccaacggaact

SEQ ID NO: 53608 - DNA, 258 bp, Glycine max
ctctacactggttctgcaccagtatacacacagctgcatcgtcactgacaccaggaactactgcagaatggtaacatcatactgcagttctgaaactgtcgattaccaatgtcagtgagtatcaagatattgctcagcagatgttgcccaacatggcgcgtgactactacgcatctggtgcagaggaccagtgcactctgccatttgactgatatgccttctccagcatattaccacggccacctactcttattcatg

SEQ ID NO: 53609 - DNA, 220 bp, Glycine max
ctctcgagccgaatcggctcgacgagtaccagaacaccaacgtcacgcagatctacgcccacggcgacgtctgcgacaagggcttcgagctcacacccgtcgccatcgccgccggccgcaagctctccgagcgcctcttcggcggcaacggaccgcgcacctcgagtacgagaacatccccagcgtcgtcttcgcgcacccggaagtcggcagcatcggc

SEQ ID NO: 53610 - DNA, 265 bp, Glycine max
caccaccacaatcatgagactcatattgctttccggccacgagcgtgccttcacccaggtcaagttctccaaggagggcgaccttatcttctccgtttccaaggatcacaccgtctgcgcgtggtacagcgcctatggcagcgtttcggcacatacaagggccaccagggtgccctctggaccgtcgatgtcgacccttacacccgccttctcgcgaccggcggcgacgacaacaccatgaggctatgggaggtggagactggaa

SEQ ID NO: 53611 - DNA, 225 bp, Glycine max
gaggagggcatttggtttaccttgaaattggagatggcatattacaggaagtaaagcatgcccagctagagtatgagatttcatgcctggacataaatcccattggtgaaaaccccaatcacagtaatctagcagcagttggaatgtggacagacataagtgttagaattttttctcttcctgatctgagtctcatcacaaaggaacaattaggaggggagatca

SEQ ID NO: 53612 - DNA, 217 bp, Glycine max
ttgaggggtgtggtgtttcctgcatcaatgtatatgaggatgctgcagttctgaaactttctggggacaaaatattgtcatcacgtcttataattgatgccatgggaaacttctcccctgttgtaaaacagataggaggttagaggaagcctgatggtgtttgccttgtcgttggaacatgtgcacgtggctttgaaacaaactccactagtgatgt

SEQ ID NO: 53613 - DNA, 221 bp, Glycine max
ggatgcaagacccaacagcattccaaggagtgaagccaccccagtttcctgaacaagaacaactcaagtgtccacgttgtgactccaacaacaccaaattctgctactataacaactacaacctctcgcagccacgccacttttgcaagaactgcagaaggtactggactaaaggtggcgctttgagaaacatccctgttgggggtggaagcagaaagacc

SEQ ID NO: 53614 - DNA, 270 bp, Glycine max
atttggtgacttatttgcatcaccatggccatgaagacaaattaccttggtatcgtggagaggtatcctttctttcctttttctttcttttccaagaaaatgtttgcttaacttggtctttccacttttgaattaaggataaaacttagatgtaattccttaggtgcttttgattctgttatccaattaaaattgaattttcacctaataatctgtgttaaaaagtttttattaaagatcaacacaagtttgaggtaaaacttcaattaa

SEQ ID NO: 53615 - DNA, 259 bp, Glycine max
caagaaagaacagcaccacatactgttatgattaacctcttgcattagaaactgccttggaacattcatgggcaatccaatagccatgatttcaaagagccacagataaaaatcttttaaaggtaacagagcttacatttgcagataaagatggtagctgaggttctcctcttgttcctgtggagaattatcctgggctcaatgatgttggcatggtagcctggattatggaaatgtgtacccctgagttcccatctgg

SEQ ID NO: 53616 - DNA, 260 bp, Glycine max
aaaaaactttcgaaagattttatccaattgaaattttaaaaatgactgggataaacataagaattcaattattgaaattgaataagtaagcaatttaattggattggtcgaatggtatcaaaaagatggagtactaactctcaaatcttatttattattgaattaaccgatcaacttgctttgataacgagcatttcttttagatttcaaaaattttccggaaaacatttgaatctatttatatatgcgaatcaatccta

SEQ ID NO: 53617 - DNA, 262 bp, Glycine max
ctcgagccgctgtcatacccacttccccttcaagagcacacgcccagatcagcgttaacaacgtcttacaactgcgaaacaaaaccaatctgaaatgtccgaccaacaagagatttacgctgcgttccccaacgtccctcaggctcctcctgattccatcttccaattgaccgctcgttacgtcgccgacaagcatccgaacaagatcaacctgggtgtcggggcatacaggacggacgatgggaaaccttgggtcttgccc

SEQ ID NO: 53618 - DNA, 271 bp, Glycine max
tacatttgtaaaagccttgctttattgccattggatctcctttccttaggactgtcttaaagatacatattgaacctgagctactgcataaggattctgtccttaaagtggaaagcagacaagatcttattttctataagggtgggaaactagttcttagtaatagtgctctggctaaattcatcagtggttacaagaaatatgggaggattggtgaactttcaaaacttttacttagtattcaaggggaactaaattcagtggcagggtc

SEQ ID NO: 53619 - DNA, 246 bp, Glycine max
tggggtgatgccctcctcaagcttcttaaagaagcttcttcccctgctgctcaggtcgctgctgccaatgctcttgttaacatcacaaccaatcaagacagggttgttactttcattgtggagtcccatgctgtccccatcattgttcaggttctcggtgattcccctatgagggttcgtgtctctgttgccaatttggtctctgctatggccgagcaacatgaacttgctcgcgaggagttcgtc

SEQ ID NO: 53620 - DNA, 263 bp, Glycine max
ctctttatcatttggacagtgtctcggcacttttaatgatggttacattgaagagacttgcaagcactggttacactctcatagtgaccatctatcagagcagcacagaagtctttggcctttttgaccacatatgtttactttcaaatggaaataccctcttctttggagaaacattagcttgcttgcagcacttctcaaatgctggatttccttgcccaatcatgcaaagtccttctgatcactttctacgtgcaattaat

SEQ ID NO: 53621 - DNA, 262 bp, Glycine max
gagcaaacatatcgcccccttcttttgtatctgattgacatgtgtatggttgaggaatttcaatttttctgtgttgttatcgaagatgagaatcccagttcagttgcaagactgggttactatgaaatgttgatgtggttaaaagataataacgaagaaaagattcaaggtatttgtgacaatattgcagagaataaaggtgaagatacatctgatatacaagaaaattatttattagctctttgtgaaagtgaacggatgg

SEQ ID NO: 53622 - DNA, 255 bp, Glycine max
atacaaaggttgctgtaggagataagattgcagtagtgctaagtgctaacacctgcagtgaacaatggcctctgcatcagcatctctgctcaagtcttcacttgttcttgacaagtctgagtgggtgaagggacaaacccttcgccaaccttctgcatcagttgtgagatgcaaccccaccaccccatcaggcctcaccatcagagctggttcctatgctgatgagctcgttaagaccgcgaaaacagtggcttc

SEQ ID NO: 53623 - DNA, 258 bp, Glycine max
tacaaaggttgctgtaggagataagattgcagtagtgctaagtgctaacacctgcagtgaacaatggcctctgcatcagcatctctgctcaagtcttcacttgttcttgacaagtctgagtgggtgaagggacaaacccttcgccaaccttctgcatcagttgtgagatgcaaccccaccaccccatcaggcctcaccatcagagctggttcctatgctgatgagctcgttaagaccgcgaaaacagtggcttcacca

SEQ ID NO: 53624 - DNA, 250 bp, Glycine max
ctcctatttgctgatgagaatgttgacattgctgttattgaggctgggttagggggtgcacgagatgcaacaaatataatatccagctctgggcttgttgcatcagtcataaccactgtaggtgaagaacatttggcagctcttgggggttctttggaaacaattgcaatggcaaaggcaggaatcataaaacaagaccgcccattggtgttgggtggcccatttgtccctcatattgagcgcattattc

SEQ ID NO: 53625 - DNA, 245 bp, Glycine max
gcaaaatggggtgaatggcttggtagattcaaagctggttcagtgatttacattgcatttggaagtgaacactctttgcagcaaaaccaattgaatgagttgttgttgggtcttgagctaacaggaatgccattttttgcagcacttaagccccctattgagtttgagtccattgagaaagctctcccaaaagggttcatagaaagggttcaagaaagaggggttgtgtatggggggtgggtgca

SEQ ID NO: 53626 - DNA, 240 bp, Glycine max
caactagctgtgttatttgattcctcttccactgttctgtgataataaggggggtattgctgctgtctggtctgattatataaagaacagtggaagaggatccaactagctgtgttatttgctaagtattggactatcatatggagtttgaaatgatggataataaaatgagatcaagaaaagtttctggctgcatggagttgatgaagaattatgctccttttggagttccctttatcc

SEQ ID NO: 53627 - DNA, 265 bp, Glycine max
gttaatttggtagatttcttccaagtggtttatgtcttttaggtatggaaccttgaaaccttgcagtgtttagagacactaacagagcacacatctgttgtgatgtctgttctctgctgggaccaattccttttatcttgtcattggataaaacagtgaaggtatggtatgctactgaaagcggaaacttggaagtgacatatactcacaacgaagaaaatgtgaaattcgatgttttctcagaattgtgtggaatcaattctta

SEQ ID NO: 53628 - DNA, 257 bp, Glycine max
cctcaacatcaaggcggagtttgctatctccgattgataggtagaagagtatgcaaaacaatttccaaccattggttttgataaagcaaccatgaagcacaagaattgagaaaagaaaattttccattaggtcacccatgatcttgttgaattgcttgccagtaagaccatgggatgacctaatggtcttactggcaagcaattcaacaagatcagttttcctgatccatggtagaggacgacaacatattttaaaa

SEQ ID NO: 53629 - DNA, 258 bp, Glycine max
gcctatgatatctcagacgaccaacaagacatcacaagaggaaagggtttggttgactcccttttccaagctccacaggatgctggaactcactatgcagtcatgagctcctacgagtacctcagcactggacttcgccagtacttggacaacaaaatggatggattctacattgctccagcttttatggacaagcttgttgttcacatctccaagaacttcatgaccctgcccaacatcaaggttcctctcattctt

SEQ ID NO: 53630 - DNA, 254 bp, Glycine max
caaaggttgctgtaggagataagattgcagtagtgctaagtgctaacacctgcagtgaacaatggcctctgcatcagcatctctgctcaagtcttcacttgttcttgacaagtctgagtgggtgaagggaaaacccttcgccaaccttctgcatcagttgtgagatgcaaccccaccaccccatcaggcctcaccatcagagctggttcctatgctgatgagctcgttaagaccgcgaaaacagtggcttcacc

SEQ ID NO: 53631 - DNA, 226 bp, Glycine max
cacagaaacagttgggtcggaagtcagacatgtacttgttgtgatatagtttgctctgcatgggaatcatcagtgctggggattgggtggctcatgatgattccgttggagtgcgaattatttcaccaagatacagttgggtcggaagtcagacatgtacctattttgttgttcgtatactcactatgttgctccaaagggaaaatttattgcatttgtatcaact

SEQ ID NO: 53632 - DNA, 254 bp, Glycine max
attcattcttattgtttcttacttacccttctgccatccctcactattccatttcttagtgacttagtacagattacaaataagaagaagaaattatcaacaaatggcatcatcttggactccacggcagaacaaattgtttgaacaagccctggctttatatgacagggaaacccctgacagatggcagaatgtggccaatgtggtgggaagatcagttgaggatgttaaaaggcactatgatgacctcaaag

SEQ ID NO: 53633 - DNA, 238 bp, Glycine max
  unsure (1)..(238): unsure at all n locations
atcgagccgaatcggctcgaggtgaagggaaacaacagcaaagaaagtggnaactacctctagcggacaacgcgattccagatctagaaagctcgtcgaaacaacctacgccgtcgacaacacctaccttctgttttcagcgtatcttgtcttcgccatgcagctcggcttcgccatgctctgcgccggctccgtcagagccaaaaacaccatgaacatcatgctcaccaaggtcctc

SEQ ID NO: 53634 - DNA, 243 bp, Glycine max
aagaactgcccggatcttgtggtgtttcgtttatgtataattgggcggtataggccggatcctgtgactgaggaacccatggatgagggttttggtgctattgttatgaattgcaagaagctcactcggcttgctatgtctggtttgctgactgatcgtgtttttgagtacattgggatgtatgggaaattggttaggacgctgtcagttgcctttgctggggacactgacgtcggccttaaa

SEQ ID NO: 53635 - DNA, 242 bp, Glycine max
gcaggggaaaatgcacttgcaagatatgaccgtgaagcttataatcaaatccttttaaatgctagaccaaatggtgttaaccaatttggtcctccaacactaaaaatgtatggtgtcacataccttcgtttgtcagataagttaatgcagcaaacaaactttaatatattcaaagcctttgtgagaaagatgcatgctaatctggaatattgtccagacccagagaagtactatcatttcac

SEQ ID NO: 53636 - DNA, 273 bp, Glycine max
gagaagtaggatggcctactgaaggggacaagaatgccaacgcaggcaatgctttgagattctataatggccttctgccaaggcttgcagcaaatagaggcaccccaggccgccctggatacattgaagtttatctatttggactcatcgacgagatgccaagagcattgcgccaggaaacttcgaacgccattggggaatattcagatacgatggacaacctaagtttccaatggacctttctggtcagaaccaaaacaaatttctcatagg

SEQ ID NO: 53637 - DNA, 271 bp, Glycine max
attgctccagcttttatggacaaacttgttgttcacattaccaagaacttcatgaccctgcccaacatcaaggttcctctcattcttggtatctggggaggcaagggacaaggaaaatctttccaatgtgagcttgtctttgccaagatgggatcaaccccatcatgatgagtgctggagagttggaaagtggaaatgcaggagagccagcaaaactgatcaggcagagataccgtgaagccgcagacttgatcaagaagggaaagatgtg

SEQ ID NO: 53638 - DNA, 264 bp, Glycine max
gtttcttacaaggctctactctactgcttcaccttctgctctagaaaattcagtggtgatacatggcttcggctactctctctgtagccaaaccagcccttcaggcaaatgggaaaggcttctctgaattctctggcctccgcagctcatcaggcttccttcccttttctagaaaatcttcagaggatttccattctgtcattgccttccagacctatgcagaaccgatcagtggaggatacaagaagggtgtgacagaagcaa

SEQ ID NO: 53639 - DNA, 265 bp, Glycine max
ctatggctatcggtaaaaacaagaagctcggcaagaagaagggtgccaagaagaaggtccaagaccctttccttagaaaggaatggtacgacgttaaggcccctgcccctttcactaacagagttgtcggaaagacctgtgtcaccagactaccggcacaaagatcgctactgatgctttgaagggcagagttgtcgaatcctccctcgctgatttgaacaacaaccaagatgcctggagaaaggtcaagctcagcattgaagac

SEQ ID NO: 53640 - DNA, 266 bp, Glycine max
cacgattctcccgctattccacactgtccaatattcctttcgaaaccacaggtaccattgcctcctttgggggcaagcttctcaagttgaagcacaagtccgagagcacaaacacagacatggagcttaacatgttcctacctccgcagcactcaagtccggagccaaggtccccgttctgttctaccgctctggactcacatgtagcggcaacaactgctcggagaagggcttcttccagcacggcgcagctaagcacggcattg

SEQ ID NO: 53641 - DNA, 256 bp, Glycine max
attgggaacccaacagaatcagcattattggaatttggatgccttttgagtgctgattttgatgcgtatgcacagcgtagagagtataagatactcaaagttgagccattcaattcagtccgaaagaaaatgtccgtgcttcgtggtcttcctaatggaggagtccgagctttctgcaaaggtgcatcagaaataatattaaaaatgtgtgacaaaactattgattgcaatggggaagttgttgatcttcctgaag

SEQ ID NO: 53642 - DNA, 266 bp, Glycine max
aagagaagaagctcatacttggaggcaatgtatcaaaagaacctgtatcagttattccttggaaattaattttatcaaaagcacctgtttgggctttaataatctctcacttctgccataattgggggacatttattctattaacctggatgcctacctactacaatcaggtgcttgctgtttataagtcttctttttttttttttgcagaattcataaatgatttctaaccttttagaatatacatgtccttgacaatgtatcta

SEQ ID NO: 53643 - DNA, 256 bp, Glycine max
gcttgaaacacataccatatcagcttagaaatcatgggtccaatctaacagaagaggagcttgaaacacataccatatcagcttggaaaggaggaaaatggacaggatttacacaatgttttatccgtgcagggccatacgataatttgaaagatcttgctgtgaagatcctgcaacatggaatttcaacagttcctattattcattcagaagatggttcatttccacagataatacaaaccaataactttcagga

SEQ ID NO: 53644 - DNA, 277 bp, Glycine max
gcctcagttgcatcgaagagagagagagcgagagagagagagagaatggcagcacttggtggcaatcgtgatgtggcaggaagccagaacagccttgagatcgatggtttagctcgctttgctgttgaagaacacaacaaaaaacagaatgcccttttggagtttgaaaaggtagtaagtgcaaaacagcaagtggtttctggtaccttgtacaccatcactttggaggcaaaagatggtgggcaaaagaaggtttatgaagccaaagtttgggaga

SEQ ID NO: 53645 - DNA, 278 bp, Glycine max
tgagctcaagcacatcttcaaggactggtattattcttgcagacctctctacaggagttgagagtattcctgtatcacttgtcaatgaagttgacaatgagaagggcccttcttttttcacttatttccattctctcagagatccaaaaccattcagtttagcacaatcatcatatggctgcaactgtaacaaaacatgtgtccctggggatttgagctgctcttgcattcaaagaaatgaaggtgactttccatatactgcaaatggtgtcctagtg

SEQ ID NO: 53646 - DNA, 275 bp, Glycine max
aaactatgaaaaatgggaaagttgttgcagtgaaaaaattaatttcaggaaattccagcaagatagatgacgactttgaaagtgaagtaatgcttataagtaatgttcatcatagaaatctggttcagcttcttggttgttgcagtaaaggccaagatagaatccttgtctatgaatacatggcaaacaacagcctcgacaaatttttatttggtaactaattaacatgtcaatttccagtagaagcattaagttttactttgtttcccttctat

SEQ ID NO: 53647 - DNA, 240 bp, Glycine max
cccgaagaaaaggtcaagagcttctaggcgtgcacccaccactgttctcactacggacaccacgaatttccgagccatggttcaggaattcactggcatcccagcacctcctttcacttcctcctcctcgtctttcccaagaacaaggttagatctctttgccacttctaatgcttcttcttcatccattattagagagcaaacaccttatcttcttagcccctttgcacacaaagtcca

SEQ ID NO: 53648 - DNA, 257 bp, Glycine max
ctcaaagaggaggccaagaagggtctgagtttggggaacaaacccaaaatgcacgagtgttccatttgcggcatggaattctctctgggtcaggcactggggggtcacatgagaaaacacaggggtgccaccagtgagaataataacgaagcgttttcttcttctataaagcaagcaatttcaaaagttccagttttgaaacgatcgaatagcaagagggtcatgtgcttggagatggacctgaatttaacgccttt

SEQ ID NO: 53649 - DNA, 256 bp, Glycine max
gtctcactaagtgggtgcctccgccagttaagatgactagtagctacgtaagagacagcataaatgtttcaaggaagagaatggatgtggaatccttggacatgcttcagttccattggtgggattattcgaatccaggctacctggatgcactaaaacacctaacagatttgaaagaagaaggttagtttcatttctgattaacggttacaaattcacttataagttcacgtttcttgcaaactacttctgttag

SEQ ID NO: 53650 - DNA, 256 bp, Glycine max
tgtggatggtcataacattgaagatctggtcaccatctttgaaaaagtgaaagcaatgcctgccccagatccagttttgattcatgttgtgacagaaaaagggaagggataccccccagcagaaaaagcagctgatagaatgcacggtgtagttaagtttgatccaaaaacaggccatcagcttaaggccaagtcctctacactttcatacacccagtactttgctgaatctttgataaaggaagctgaaatagac

SEQ ID NO: 53651 - DNA, 256 bp, Glycine max
ctcgagccgctcgagccgcaggaagattgtggattggtagagagtttcctgccatcagttctggattggcagagagtttcctcaaagagaatggcaccagagatgtactgaccaagtcctggaactgatggcaggaagattgttgacgtgctcctcgagcaaaacattgttcccggtattaaagtcgacaagggtttggtaccccttgctggttccaacgatgagtcatggtgccaaggtcttgatggtcttgcct

SEQ ID NO: 53652 - DNA, 254 bp, Glycine max
caattaattaagctttgcggaaggagacgtttcctcgtttttcagctgtttgtatcttctgacacaccttgattgcattttcattatatatttttatagatttctcagcacagaactgctctctctctctcttcaaaagctctttgttgctcatcaaagggtgcttggcttgtgcatcaaatgatttgaaaagagagggtcaaatcaaaagaagttcccctgttttgatctattcacagttggggtagaattgc

SEQ ID NO: 53653 - DNA, 250 bp, Glycine max
tagaactactcacccgttgtctctttttcaaccatggtttttcaggttattgttgtttttgtttttttattattcaaaatattaagatacaccgtactgtgttgtgctcgtgcagataagtattaataggccagagagaaggaatgcgttccgcccccacacggtgaaggagcttatgcgtgctttcactgatgccagggaagatagctctattggggtcgtcattctcactggcaagggaaccgaggca

SEQ ID NO: 53654 - DNA, 253 bp, Glycine max
tctcgagccgaatcggctcgagagaagatgggaaattgaagcttagacttggaggtgtggcaacaggagacagttggatctcaccctgaagattttgtgttctcatggggtcctctccttaaagacctctcacgacttgacgataatggactgcaaaaatcaaacagtatagctgagaggatcaagcagcaaattgaggacggtaaatttgttgaagccaccgactcatggggtgaacttgagaatgtgattg

SEQ ID NO: 53655 - DNA, 274 bp, Glycine max
agtggtgtgcaatggcatggaaggcttttacatcccaaagcttcatctggtcatgtgcaagtgtggctcttgtggttcaagaaagcagacacttagtgaatgggaaaaacatacaggttgcagatcgaaaaaatggaaacatagtgtgaaagtgaaaagtacaatgctaccactggaaaaatggatggaagaaaacattccacttgatggaatacctgagcagttagatcaacagcaggtgctggcctttttgcaagagaagtatgagcctgtt

SEQ ID NO: 53656 - DNA, 259 bp, Glycine max
ctgacaatggagtatgttcctgggattaaaataaacaaaatacaagctttagaccaactgggtgttgaccgcaaaaggttagggagatatgcggttgagtcatacttggaacaaattttatcacatggtttcttccatgctgaccctgtgagtttgtacttttagaatcaatatcagaaatctctttatatattatgttacattatatatggattagctatctggtaaattgtatagtaaagccaaaatgttaactgtc

SEQ ID NO: 53657 - DNA, 267 bp, Glycine max
atcaaagcaagctaagaaaaagaaaagagaagttaccaaggggaagaccaagaaatctgacagtaagatatcaaagagttctaacacgaaaaaggaagaggaaatgtggatggatgaagaagatttagatgcacctgtgcgtagcgataggtcaattcttcatgctgtgaaatggcagcggatcatattggatgaggcacactatataaaatctagacattgtaacactgctaaagcagttcttgctttagagtctacctacaaatg

SEQ ID NO: 53658 - DNA, 286 bp, Glycine max
aggactcacaaaggagcagatgacaagtcctacggctgtgtcttccaagaagaagatgagacaaaaagaattggtgtggcactctcaaaagacctaatggctgtggcaggagaggccctaaagaccaacatcacaacactaggacccttggtcctccctatgtcagaacagcttcttttctttgccacattggtggctaggaaagtgttcaagatgaagataaaaccatacatcccagatttcaagttggcctttgagcatttttgcattcatgctggagggaggg

SEQ ID NO: 53659 - DNA, 284 bp, Glycine max
attggacttctttgtttgctttcaacttacaatttctgtggaggagtttgtaacatggctgctctaccaacggcggacttagtgacgcaaatgcaacacatgtagcaagttgtgatgtgagggtgttgcatccagtgttcaaggtttacggtggggccactgcgttctccggccccgttgtcaccgtgaaggtgtttgaagacaacgtgttggtgagggagcttcttgagacgaaaggcgaaggaagagtattggttgttgatggacgaggaagcttgaggtgt

SEQ ID NO: 53660 - DNA, 179 bp, Glycine max
ctctagccgattcggctgaggtttgttgctgtaactcgtacgtcttctggtgttgtgctgtgtatgtgtttgtttagtctctcacctgagaatgtcttgctgcggtggtaactgtggttgcggaagctcctgcaagtgcggcaacggctgcagacggtaacattttcgttgtagcattg

SEQ ID NO: 53661 - DNA, 275 bp, Glycine max
cggctcgagtgatgtcccatccctatgacgttggtcaactatatatattaagcacaggccaaggcgagtcccagaaagatgccaaatatgatcagttttttcttggtgattatcgacctctgattcaagacactcatggtaacgtactagaccaggttagttgatcacttgcttgctactcttttcatttaagaaactgttcaaacctaggatgtactgatacaacatgggttacagttacgatgacattgacacagaaatatggcaaatttgag

SEQ ID NO: 53662 - DNA, 284 bp, Glycine max
ccaggacctattgtgttataaatccacagaatccttttgtgttaaataggtggatggggaaactgactttcccccagggcacttctcgaagtgttaaaagaatgcctctttctataggtgggaggagctggtgcaaagaatgctattctcatgaatatgccacatgctgttctttcaatgtggagatattttgttggagatttcgactttgaagtatctaagatgacttctccctacattagatgcacagtctctttctccatagcattaggctatttggctga

SEQ ID NO: 53663 - DNA, 243 bp, Glycine max
agttaatgtagcatgtgctgctgttggcttgacatcaagctatactccgactccattgttggaatctggtttgcaaaaagacagagggttaattgtggagtattttggaaggatgtcttacgttgctcataacgttaatcagccccaagagaaagatttgttggaaggaaatttttcctttgatattaaatctcgctctagattggaaaaagtttcctctacaaaagcacaatttgttagtgg

SEQ ID NO: 53664 - DNA, 268 bp, Glycine max
ggcaacagtgagaacaccattgaattttgattctagcaagcagagcttttgtcaattttctattgaccttctcggtggaggaattttagtggacaaaactggagattggatcacacttatacaaaattctccaattagtaactgttgagagttgctgcttggaagaaaggctgtttaatggttaaaattgtgatgtcggggaatccacctctcaaagggtgttatggcctcactaggaaagaggtttttatacaaacaggacagttca

SEQ ID NO: 53665 - DNA, 176 bp, Glycine max
cgtgttcctacattggttggcattgaatgtcccaaggatgagaaacttcctcgtcgctaaatttttgacaaacctaagacgcgctgctatcatattctccctatagagattaatctagtagaccgtcataagctcaagagaacttgaagcagatgtctaatgttagggacgagctt

SEQ ID NO: 53666 - DNA, 256 bp, Glycine max
gtggataggaactgtttatatgttttcattgatcggagcatttctgagtgattcatactggggtcgatacttaacctgcacggtctttcaacttgttttcgttctgggcttagcactgtcctcattgtcatcttgcgtttcttgatcaacccagttggttgtggtgatggccatactctttgtaaaccctcatcaattggagacgagatattttacatgtccatatagcgtatgggttatgggggacacaaccacc

SEQ ID NO: 53667 - DNA, 200 bp, Glycine max
ggtggtttacccaccactgcttggattagttctgcagttaacaatcgctcctcagatatcaacaaaaggattcgcacagcacttgggagaggtaagaaaattgtttttcttactagagttgatccttttcagtagctttactggctgttctttttggcgttaagaatgaaattctgagttctaacgccactaaccctatg

SEQ ID NO: 53668 - DNA, 172 bp, Glycine max
ctgttctttttggcgttaagaatgaaattctgagttctaacgccactaaccctatgctgacgcgacttcttgagaactgtaagagtctcaaatatctggttgatgagtgtccttgtgcatttgtgaactagtatgtaatattttattcacttaaataaagcgcattactatg

SEQ ID NO: 53669 - DNA, 270 bp, Glycine max
gagtttttgtcaattttctattgaccttctcggtggaggaattttagtggacaaaactggagattggatcacacttatacaaaattctccaagctgcaactctcaacaagttactaattggagaattttgtataagtgtgatccaattagtaacttgttgagagttgctgcttggaagaaaggctgtttaatggttaagattgtgatgtctgggaatgcagcagtcaaaaggagtgattgggcctcattggtacaagtatttttaacaaa

SEQ ID NO: 53670 - DNA, 260 bp, Glycine max
ataatgactaacgcctacgaatctcagctcacgcttctcctaatcgacgactctaccgtgcgatcatcctgcatgctgctcagacgcgcggatgactcctacgtcgtcagctacctgagtaccagtcgcgatgctgtgcggtatcagcaccgtgcagctcgaacgcaagcccgtcgagctgcagatcagggataccactagacaggagcgagtcaggactatggcatgcagtaactacagcggcactcatggaattatta

SEQ ID NO: 53671 - DNA, 275 bp, Glycine max
atatggaaagaattcctcttgccacatctgagggttttcctcacgtactttcacgcaaaaatggtgaccaaggcaaaaggagatttgtttctggggatggtgaagagatgacattgattccaggaaccagtgttgaagaggcttacaacaagctaatagttgaacttgagaaaagtgttcctacattggttggcattgagtgtcccaaggatgagaaacttcctcgtcgcaaaatttttgataaacctaagacgcgctgcttcactattctccct

SEQ ID NO: 53672 - DNA, 262 bp, Glycine max
cttttagggggcgtgccagttctgatatttacaccatctgctctcaagactgtgaattatggaatcctgcttgcacaaaagcaatgaccatgtcatttaatccaaacccgtgttctgatgcatggagtttggaatttctgaagcgtaccggatttcattgtgatatcatttgtgtcactggatggactgctaccccaatgcaggatgttcaggttacaattgattggtttatttcctctcaggaatgtgttcccaggaccta

SEQ ID NO: 53673 - DNA, 267 bp, Glycine max
tcttaactatgcttgatgaggtttacaggaggtacaggcaatactatcagcagatgcaagcggtagtaacttcatttgagtatgtttctggcctgagcaatgcagctccctatgcaagtttggctataaaagctatgtccaaacattttagatgcttgaagaatgcaattactgatcagattcagtttgccaataaagctcattttcatatcagcaacaggaaagatgaatctccaaggtttggcaacagtgatagaggcccatatg

SEQ ID NO: 53674 - DNA, 251 bp, Glycine max
ccacaattcacaaccgatacagtttccatctctctcacaaaatgacaacaatatcaaattgctcccttctcttcctcttcctcttcctctccaccctccacatagctgccaccctctcaacccccaccaacttcatcgagtcctcctgcagcaccacccagtacacagcgctctgaatccagtcccactgcgtctgagaatccaacatccagcaagacccccacgagctcgtccagacagctagctcgctc

SEQ ID NO: 53675 - DNA, 273 bp, Glycine max
ggaccagacatatttaaaagctgatgggaagaactttgctgttttgggcagtgtcagcaccccagatgttatgtatggcaccacctttagagtagaagtactttatgtgatcacacctggaccagagttgccatcaggggaacagtgttcacgtctcgtgatatcttggcgaatgaattttttacagagcaccatgatgaaaggaatgatagaaagtggagctcggcaaggtatgaaggacagctttgatcagtatgctactttgttatgtca

SEQ ID NO: 53676 - DNA, 271 bp, Glycine max
ctcttcctcaccgattgctagaatggaatttcgatgctcagtcatctcttttaccattctcttctctcttgctcttgcaggagagagccatgtccatgcatcgctacctgaggaagattattgggaagctgtttggccaaacactcccattcccactgcactgcgagagcttctaaagcctctccctgcaggtgttgaaatcgatgaactccctaagcaaattgatgatacacagtacccaaaaacattcttctataaagaagccttcatc

SEQ ID NO: 53677 - DNA, 261 bp, Glycine max
gcaaatccagaatcctttatatgggattatgttctcccggtaattgttagagggtactgagttgggagctgaacaaaaacaatttgtgcaaacgggcattcggtgtcaacgccagattagcaaaattctggatgactcggatcttgacagcatcattgatggtaaagaccttgatgtactagtggcccttatgtcctgcataacagctacatggatttggagatggttgaattcactttgcatgaagttttggttgcctcc

SEQ ID NO: 53678 - DNA, 274 bp, Glycine max
caaattataaaaacccccacatactaatgcatctatatcacgaacagaagatcgaattacattaagaaagccccaaaaaaagatgtcgtccgagtgcaaaggtaagagctcatggcctgagttggttggagtggaaggaacggtggcggtggctacaattgagagggagaatcctttggtggacgctaacactgtgctgaaaggaaccatagtcacccctgatttccgatgtgatagggtttgggtttgggtcaccaaagacggaattgtttat

SEQ ID NO: 53679 - DNA, 246 bp, Glycine max
agaaaaataaaaagtaggtaaagtgcatagtagcactagctaaacagtacgtagtgatcataagcaagcatactgatgattaatatggcaaccatggaagacatgagcaacatgagtggtgaaattacacttccagggttccgattccacccaactgaagacacccttctggatttctatctcaaaaacatggttgttggcaagaaacttcgttacgatgttattggtttcctcaacatctatcag

SEQ ID NO: 53680 - DNA, 292 bp, Glycine max
gcatgtgctgctgttggcttgacatcaagttacactccaactccattgttggaatctggtttgcaataagacatatggttaattgtggagtattttggcaggatgtcttacgctgctcacaacgttaatcatccccaagagacagattcgttggagggcactttttcctttgatattagatctcgctctagattggtaacagtttcctctacaagagcacaatttgttagtggtaaaaccttcacatatgatataattggtgctggttcacactcttcagaagattttcctg

SEQ ID NO: 53681 - DNA, 276 bp, Glycine max
  unsure (1)..(276): unsure at all n locations
gaaattctttctaaggttgcacaagatatggttgatgaatggtttgattgtgttgatgaggaggattcctttgaggaagtttccttaagtgcagcactcaatggtgttgagggtttggactatatggaaagaattcctcttgccacatctgagggttttcctcacgtactttcaccctanaatggtgttttnaggcnnaaggagatttgtttctggggatggtgaagagatgacattgattccaggaaccagtgttgaagaggcttacaacaagct

SEQ ID NO: 53682 - DNA, 267 bp, Glycine max
cgcattgattctctgatagcagacattggctcttggggtgccagtgctgtgacaatacatggtaggtcacgtcaacaacgctatagcaagcttgctgactgggactacgtataccagtgtgccaggaaagcccctactacattgccagtagtggggaatggagatgttttttcatttgtagactggaacaaccacagaactgaatgccctgaacttgctacggacatggttgctcgtggtgcactgattaacccttggatatttact

SEQ ID NO: 53683 - DNA, 282 bp, Glycine max
atttacaccatctgctctcaagactgtgaattatggaatcctgcttgcacaaaagcaatgactatgtcatttaatccaaacccgtgttctgatgcatggagtttggaatttctgaagcgtaccggatttcattgtgatatcatttgtgtcactggatggactgccactccaatgcaggatgttcaggttacaattgattggtttatttcctctcaggaatgtgttcccaggacttattgtgttttaaatccacaaaatccttgtgttgaatagtgatgggga

SEQ ID NO: 53684 - DNA, 251 bp, Glycine max
ggattgtaacatgagttctctcaagttgcaaaaaaggctagcagccgatgtgctgaaatgcggtcgcaaaaaggtctggttggatccaaatgaaaccaacgaaattggaaacaccaattcacgtcaaaatattcgtaaattggtaaaagatggtttgatcatcaagaaaccagttgctgtacacagcagagctagagtacgcaaaaatactgaggcaagacgtaggggtcgtcacagtggttttggaaaaa

SEQ ID NO: 53685 - DNA, 251 bp, Glycine max
cctcgatccgattcggctcgatctgatgtaagggcaacgatattctacgttgcgattatgctactcttgatggtttgattacaacgcaagttatgagcaagatggcagaaatgataaacagtctttgtggtggtgatgaaaaattgatgcgtgaaaggacacacctgctgttggcttgttgttcaagaatggcaatttgtaagagagatgtccggagagttgaatgtggaatcccttctggatttccgtca

SEQ ID NO: 53686 - DNA, 266 bp, Glycine max
tggaaattgtatgcggccaaagaaacagtaagattcgtggtaatgaggaaaatgcagaagatctattaagctttgcatggaaaaactggaggggagggacagtttcaaatattgtagataccacactgaaggattattcttgggatgaaataaagagatgcatccatattggattactatgcgttcaagaagatataaatggcagaccaactatgaattctgtttcaataatgcttaacagcagctcttcccttgtgaccttctga

SEQ ID NO: 53687 - DNA, 206 bp, Glycine max
ggagacgcagaaggagtagcggcattaagagtgcggatcgtcgtgaggacactgacagggtggactataatcctcgacgacgttagcagcggcaccatcgacaatgtcacggccaagattcgagacaaggttcgcatacctccggatcagcagcggttgcattttcgccggaaagcagcttgaagatggaaggatcctggccgctt

SEQ ID NO: 53688 - DNA, 247 bp, Glycine max
caaacccgtgttctgatgcatggagtttggaatttctgaagcgtaccggatttcattgtgatatcatttgtgtcactggatggactgccactccaatgcaggatgttcaggttacaattgattggtttatttcctctcaggaatgtgttcccaggacttattgtgttttaaatccacaaaatccttttgtgttgaataggtggatggggaaactgactttcccccagggcacttcccgaagtgttaa

SEQ ID NO: 53689 - DNA, 171 bp, Glycine max
gtcaagccttactgtagtggttctaaattggagagctttctagctggtcatgatatcaccattactgatggtattgacaaaactagtgcagctttgcaatttagacagtgagcagattctgatttactcaggagaaactttgagcagatgtctaatgtggccggggtggct

SEQ ID NO: 53690 - DNA, 211 bp, Glycine max
attttgttggagatctcgtctttgaagtctctaagatgacttctccctacattaaatgtacagtctcctgcttcagagcattcggacatttggctgatgctaccatcaatcttgaggcttttccccacacgctgcgtatagtttgagcgcgattcaggaaaaagttgtattgatattttcacaatcgggatttctacagctgtgtcaaccc

SEQ ID NO: 53691 - DNA, 213 bp, Glycine max
gtaatattcatatttccggcttgttttacgacggcagatacaaattctggactaaacacgagaaaaatcttgctttgacagaagaggaatagatggaagtgattagaaatataggcattcctgctgatgtacttgcaaatcgagctcatgagtttgaaagacatgttgctcatgaaagcctcaaggatcaaatcctgctgttgacaagttgta

SEQ ID NO: 53692 - DNA, 156 bp, Glycine max
caagggtctctatggacaatgctagttgccatgattgtacactgatcaaggttgatagtgttaacaaacctggaattctgctggaagttgtgcaaatcttgacagaacttgacttcataattaccatagcttacatatctgctgatgggggttggt

SEQ ID NO: 53693 - DNA, 237 bp, Glycine max
cggctcgagcggctctacgtgtgtgcatggtgacgataacttaattagtgttcatgaatatgtcaagccttacttgagtggctctaaattgaagagctttctagctggtcataatatcaccattactgatggtattgacaccactagtgcaactttgcagtttacagagttagcagattgcgagtttctcaagagaaattttaagcagatgtctaatgctttgtgggtggcacctga

SEQ ID NO: 53694 - DNA, 248 bp, Glycine max
taagtttttgaattatgtgatgttcattatgaagaaaagggacaatcttagttgtcaagttggaatcaacccatacaccatggactggactggattggccactagattactgagtaagggcaacgatattctgtgttgcgattatgctagttttgatggtctgattaccaatcgagttatgagctaaatggcagagatgataaacagtctatgtggtggtgatgtaaaattactgcgtggtaggacac

SEQ ID NO: 53695 - DNA, 274 bp, Glycine max
  unsure (1)..(274): unsure at all n locations
cggctcgagaggatgtcttacgttgctcataacgttaatcagccccaagagaaagatttgttggacggaaatttttcctttgatattaaatctcgctctagattggaaaaagtttcctctacaaaagcacaatttgttagtggaaaaaccttcaaatatgatatagttggtgctggttcacattcttcagaagatttttctgaaaaggaagantcagaaaaacccaaaaagattgatgccagattgaggacaagaatagatcctcaatacaatg

SEQ ID NO: 53696 - DNA, 269 bp, Glycine max
cttaaacgtatataggattgaggtgtatactcctcagaggcaaagatgagtggtgttggatatattgggtccaagatcagcctcatatcaaagtctgacattcgttatgtgggcatattgcatagcatcaattcagccgattcaaccgtagctcttgaacaagttcgttcttatggaacggagggccgccgaggaagtcctgcagaggaaattcctccttctgacaatatttttgaatatatagtgtttcgtggttcagatgtaaaaga

SEQ ID NO: 53697 - DNA, 238 bp, Glycine max
gtgaggtgaactcgtgagggttgtggtagtttggcagcgacacgtatcttcatcaataatcgcagaagcagtttccggtgcatctcatcgtcttccaaaatgaacgacgcagatgtctcgaagcaaatccacagatggtgcgtttcatccgccaggaagctgaggagaaagccaacgagatctctgaattcaatatcgagaagctgcagttggttgaagccgaaaagaagaagatcag

SEQ ID NO: 53698 - DNA, 273 bp, Glycine max
gcaaagctcaaagcaaggttggaagtcctacagaaaaatcaaaggaattttatgggacaagatttggagggcctaagtatcaaagagcttcaaaatttggaacatcaacttgatagtgctctaaaacacattagatcacggaagaaccaaatcatgcatgaatctatttcagagcttcataaaaaggataaggtcctacaggaacaaaataacactctcgcaaagaagataaaggagaaagagaaggcactagcccagcatgcacaaatggag

SEQ ID NO: 53699 - DNA, 271 bp, Glycine max
gaggattcctttgaggaagtttccttaagtgcagcactcaatggtgttgagggtttggactatatggtaagaattcctcttgccacatctgagggtttttctcacgtactttcacgcaaaaatggtgataaaggcaaaaggagatttgtttctggggatggtgaagagatgacattgattccaggaaccagtgttgaagaggcttacaacaagctaatagttgaacttgagaaaagtgttcctacattggttggcattgagtgtcccaagg

SEQ ID NO: 53700 - DNA, 271 bp, Glycine max
ctcgagccgttcaacaaagaagaggaagagctggtcgtgttcaaccaggagaatgttatcatctctatcctagatgtgtatatgattcttttgcagagcatcaattacctgaaattttgaggatgcccttgcaatctctctgtctgcaaataaaaagtttgaaactaggaagtatatctgagttcttgtctagggctttgcagtcacccgagatacttgcggtgcaaaaagcaattgaatatttaaaaacaattggagctttggatgagaa

SEQ ID NO: 53701 - DNA, 266 bp, Glycine max
ctcgagccgctttctaaagttgcacaagatatggttgaggaatggtttgattgtgttgatgaggaggattcctttgaggaagtttctttaagtgcagcacttaatggtgttgagggtttggactatatggaaagaattcctcttgccacatctgagggttttcctcatgtgctttcacgcaaaaatggtggctaaggcaaaagaagatttgtttctggggattttgaagagatgacattgattccgggaaccagtgttgaagaggc

SEQ ID NO: 53702 - DNA, 216 bp, Glycine max
atgaagttcaggctcagatggaaacaaatttgtttaaattggctcttgatgatggtgaaaatcctaaagggtccatgttggatcctcaaatttctcaatctaaaattgcacttcccaaaaacacagttggcggaacgattctgcgtagtgatctattggccaattttttgacagaggggcattttaagagcaatggtgatttgcagcgcactccat

SEQ ID NO: 53703 - DNA, 275 bp, Glycine max
gcttctcttctcaatcaaacatggacgagaagaacggacaacacgaggccgaggccatgcgccgaatcgccttctttggcgtactatttccaccattgctactctagtcactgttatcagtgtcccaatggtgtacagccatatgcaaaccatccaatctcaaatgcagaatgaagtggatttctgcaaaatgcgctccggaaacatctggcgtgaagtcacccgaactcaagtcctctccaacgtacaagagaaaccccgtgtggctcgtcaag

SEQ ID NO: 53704 - DNA, 273 bp, Glycine max
tcgagcgattcgctcgggtgtatggtgatgataacttaatgagtgttcatgaataagtcaagccttactttagtgagctctaaattgaaaagctttctagctggtcataatatcaccattactgatggtaatggcaaaactagtgcaactttgcaatttagaaagttagcagattgtgattttctcaagagaaactttaagcagatgtctaatgttttgtgggtggctcctgaggataaggcgagtttatggtcacaacttcattatgtttcg

SEQ ID NO: 53705 - DNA, 235 bp, Glycine max
aaaaaaaaaaacgtgattcgctcttctcttcgaataaaccacaaaaccaacaaacgagaagaggagtgagagaagatggggttgtcgttcacgaagctgttcagcaggttgtttgcgaagaaggaaatgaggattctgatggtaggtctcgatgctgctggtaagacaaccatcttgtacaagctcaagcttggagaaatcgtcaccaccatccccaccatcggatttaatgttg

SEQ ID NO: 53706 - DNA, 174 bp, Glycine max
gagatggcggcgtatgtattgtcttgaggctgtaagtcaactatgttcagaagctgtgcgttagtaagtgttacatgtggtagtggacgtggtggtttactcaccactgcttggatgagttctgcagttgatgatcgctcctcagatatcaactctgagattcgcacaccactt

SEQ ID NO: 53707 - DNA, 260 bp, Glycine max
ctcgagacgttttcttttcaatctttctggagatgtctcaattgatctgagatcttcagcacaccggtcgagtgcgtgtagtttcgcgatatgggttgtgggtttagagtgctacacttaggtataccttttctctcgttcgtacctgatgttcagactgctgattggcatgtgccatgtagtgagcaggtcatatatactgtgatctctctggtgatttgccttgtctgcagtcagcttcctctgtacggactacactc

SEQ ID NO: 53708 - DNA, 295 bp, Glycine max
cgtacgggctcggaatcacgtgactcgagcgtatcggctcaggcaattgaaccaactgattaccgtttccgttttgagtactactaccaatggtgatcttgttcacgggaaagatctcgccatggttaaagtcaatgtagcatctgctgctgctggcttgacatcaagctatcctccgactccatcgttggaatctggtttgcaaacagacagagcggttaattgtggagtattttggaaggatgtcttacgttgctcataacgttaatcagccccaagagaaagatttgttgga

SEQ ID NO: 53709 - DNA, 237 bp, Glycine max
ataacataattagtgttcatgaaagagaacaagccttactatagtggttctagaatagataagctttctagctggtcataatatcaccattactgatggtattgccaacactagtgcaactttgcaatttagaaagttagcagattgcgattttctcatgagatactttaatcagatgtctaatgttttgtgggtggctcctgtcgacaaggcgagtttatggtcacacttcataaa

SEQ ID NO: 53710 - DNA, 251 bp, Glycine max
tgtggaatcccttctggaattccggtcacagttatttgtaataggctttttaatgagatgctcattagatatagctatgaaaaattactgcgccagggctaaagctccaagtatgtttttacaatccctcaaaaattttggttccttgtgtgtgtaaggtgatgataactaattagtgttcatcgatatgtcagcttacttagtggtctaaatgaaagcttctagcggtcatatatcacattacgatgtat

SEQ ID NO: 53711 - DNA, 191 bp, Glycine max
agacaaatttgtataaattgtctcttgatgatgttgaaactcctaaaggttccatgttggatcttaaaatttcgccatctaaaattgcacttcccaaaaacacaggtggaggaaccattctgcgtagtgatctatttggcaattttttgacagatggcaattttagagcaaatgttgatttgcagcgcact

SEQ ID NO: 53712 - DNA, 258 bp, Glycine max
gtttgcaagattggggaaaacctccccataagaacttttgttgggcaccagagtgaagttaattgtatcaaatgggatcccactggttcattattagcctcatgttctgatgatatgactgcaaagatatggagtatgaaacaagataaatatcttcatgagtttagggagcattccaaggagatatatactatcagatggagcccaactggtcccggtacaaataaccctaataaaaatttggtgttggctagtgca

SEQ ID NO: 53713 - DNA, 272 bp, Glycine max
atttgcaatagcatttttaatgagatgctcattagatatagctatgaaaaattactgcgccaggctaaagctccaagtatgtttttacaatccttcaaaaattttgtttctttgtgtgtgtatggtgatgataacttaattagtgtccatgattaggtccaggccttacttaagtggtccaaattggaaagctttctagctcgtactaaattccccattactgatggtattgccaaaactgtggcactttgcaatttagaaagttacgatgt

SEQ ID NO: 53714 - DNA, 264 bp, Glycine max
caagcaagttgctgctcaagaagctgagagggctaaatttgttgtagaaaaagctgaacaagacaaaagaagtgctgttattagagctcagggtgaagccaagagtgcccagttgattggtgaagctattgccaataatcctgcgtttatcaccttaaggaaatttgagcggcaaagggaatcggtcacacaatttcaaattctgccaacaaggtttacttgaattcagatgatctcttgctgaatcttcaggagtaatttgga

SEQ ID NO: 53715 - DNA, 258 bp, Glycine max
  unsure (1)..(258): unsure at all n locations
gaagattttcctgatcatgnagatcaagaaaaactcaaganagatgatgccagattgagacaaagaatacatcctcaatacaatgaggttcaggctcagatggaaacaaatttgtttaaattgtctcttgatgatgttgaaactcctaaaggttccatgttggatcttaaaatttctcaatctaaaattgcacttcccaaaaacacagttggaggaaccattctgcgtagtgatctattggcaaattttttgcagagg

SEQ ID NO: 53716 - DNA, 281 bp, Glycine max
ctgcactgtacgaggagatctagttaaaatgctgttggagctggttaggaaaaagcgagacaagtttgatcatattgttattgaaaccacaggtcttgcaaagccagctcctgttattgaaacattttgcagtgatgagctggtctctcagcatgtaaaactggatggagttgtaactttggttgattgcaagcatgccagtaaacatttaaatgaagtgaaaccaagatttgtggttaatgaggcagtagaacaagttgcatagctgatcgtattatttt

SEQ ID NO: 53717 - DNA, 241 bp, Glycine max
  unsure (1)..(241): unsure at all n locations
gataacttaattagtgttcatgaatatgtcaagccttactttagtggttctanattgaaaagctttcaagccagtcctaataaccaccataacggatggaatggccaaaccaagtgcacctttccaatttagaaggttagcggattgggatttcctcaggagaaactttaagcagatgtctaatgttttgtgggtggctcctgaggacaaggcgagtttatggtcacaacttcattatgtt

SEQ ID NO: 53718 - DNA, 262 bp, Glycine max
ggccaagggtctataacaattcctggatgcattgccgccactccaattgaaatgcccattgatcctgtggaaggcattccacttgaaatgcctcttgtttactattatgggcacgcgactcctagtaacaatgtagaattgtataaagtgcttgttaaggagcttgcagggatgattgagaggcaatttactggaaatgctgaatctagagcttcaggcatggtgataaatactatgggatggatagggtgtaggctatgat

SEQ ID NO: 53719 - DNA, 156 bp, Glycine max
aaaacgttgagggaaatggtggcccaggaaccatcaagaagatcactttccttgaggatggagaaaccaagtttgtgctgcacaaaatagaaagcattgatgaggcgaacttgggatacagctacagcgtggttgggggtgctgcattgccagaca

SEQ ID NO: 53720 - DNA, 181 bp, Glycine max
gcagctgcaaaaaaggctgcagaggatgctgcaaaacaagagaagggaggtgagcagcaagccagctcacaagatgcaacaatgactgagcgtgccagtgcagcaatgtctgaagctgagaataagacaagtgatttgatggatgatgagaatgccttactacagcaggcgcttgcaatgt

SEQ ID NO: 53721 - DNA, 228 bp, Glycine max
gcagctgcaaaaaaggctgcagcggatgctgcaaaacaagagaagggaggtgagcagcaagccagctcacaagatgcaacaatgactgagcgtgccagtgcagcaatgtctgaagctgagaataagacaagtgatttgatggatgatgagaatgccttactacagcaggcgcttgcaatgtctatggatgatcctgccattagccatgatgtaaaggttccggttatg

SEQ ID NO: 53722 - DNA, 253 bp, Glycine max
attctgcagttaacaatcgctcctcagatatcaacaaaaagattcgcacagcacttgggaaaggtaagaaaattgtttttcttactagggttgatccttttccagtagctttactggctgttctttttggcgttaagaatgaaattctgagttctaacgccaccaatcctatgctgacgcgacttcttgagaactgtaaaagtctcaaatatctggttgatgagtgtccttttgcatttgtgaactagtatgt

SEQ ID NO: 53723 - DNA, 247 bp, Glycine max
ggaatatcggcagtgatgatgttgaaacaacactctattccattggctcacgattgaaagctttctcagattggctactcaaatacatggtgtcaggtaacctggatacaatatttccagctgctacacgtgaatatggaccaatggtggagggtttgtggaaggataaagccattcaagcaacatatgataggcgaaatgaactaaaaatgctacccagaagtgcaaactatttctggatcgtgct

SEQ ID NO: 53724 - DNA, 214 bp, Glycine max
atggtattagattctggtgttatactgcaggccatgtccttggtgctgctatgttcatggttgacatagccggtgttcgagtgctttacaccggagactattcacgtgaggaagaccgccatctccgagctgctgagaccccacagttctcccctgatgtatgcattatagactccacctatggtgtacagcaccatcagcctcgccacacacg

SEQ ID NO: 53725 - DNA, 216 bp, Glycine max
ctatgcttgcaaaagttttaacggagaaaagattggctttaatcaaagcatgggaagaaagtgaaaagacaaaagcagagaacagggcatacaagaagcactctgctgttggattgtgggaggatagcaagaaagcatccgtagaggcacaactcaagaaaattgaggaaagcatggaaaaaaagaaggccgaatatgttgaaaaaatgaagaaaa

SEQ ID NO: 53726 - DNA, 255 bp, Glycine max
gagaatacaattacattgcatacctatagttctttcggccaggtttcctttttttgcaataagcctcaaacttccatggttgaagctcatgaattttgcaaggtttacgacttgataagaaatcctttactgaaatactgaagatatactttttagatggtcgtattgtcttgaacaatctctttgaggtaaaagacttgagtctacaacgtaagcttttggtgtcagatttcaacctgactattggtaacatgg

SEQ ID NO: 53727 - DNA, 248 bp, Glycine max
attgtggttcattggttgttgccaaggttggaaatcacaaacaaattgttggtttccatgttgctggaagcaaaggaagactgggatatgcttcattgataccatatgttgagccagttgtgcaagctcaaagtgctgaagtttacttcgacttcttccctgtggaggttgatagtcaagagggagttgctcacattggtgaattgaaatctggtgtctatgttccactgcctacaaaaactaatttg

SEQ ID NO: 53728 - DNA, 230 bp, Glycine max
gttgattcggatctagagtcttttttcactcttcagttctcgttgttgttcttcgctttcctgaaactagggttttcaatttcgattcattcgttaataattaaagatgtttgggagggcaccgaagaagagcgataatacgaggtactacgaaatcctcggcgtctcgaagaacgcttcgcaggatgatctgaagaaggcttacaagaaagccgccatcaagaatcacc

SEQ ID NO: 53729 - DNA, 251 bp, Glycine max
tggaaactcccaaggaatggcaactggatctaccttgtgacaaaattcctagtgtcttgactacaactgatgagagattggtaggcacagaacatgagggatatgatccttttcttggtggaattcaaaaatatgccactcccatgatgcccctagatgaagaaattctttctaaagttgcacaagatatggttgaggaatggtttgattgtgttgatgaggaggattcctttgagggagtttctttaagt

SEQ ID NO: 53730 - DNA, 274 bp, Glycine max
cttatcttgtcaatctcgtaaatgtgttacgagaattgtatttgcacagtccagaggaagctcgccaattgagaaggaaagctctctctcgtattgaatggctgcaaaaagctgatgtgcctaccatagcacagattgaagagttccattcgatgtcaaggatgatgaaatgcctcctgatctcaaatggataaatattggatctaactgtatgagcaattgatttggttggggtttagacaaggagcagggtaacagcttattccaaaacaag

SEQ ID NO: 53731 - DNA, 254 bp, Glycine max
  unsure (1)..(254): unsure at all n locations
atttttaatgagatgctcattagatctagctatgagagattactgcgccaggctaaagctccatgtacgtttttacaatccttcaaaaattttgtttctttgtgtgtgtatggtgatgataacttagttagtgttcatgaatatgtctagccatagcttagtggttctaaattgtaaagctttctagcttgtactggtatcaccagnactgatggtanngacaaaacnagngcaagcttgcaatttagaaagtt

SEQ ID NO: 53732 - DNA, 248 bp, Glycine max
ataggattcgcacagcacttgggagaggtaagagaattgtttttcttactagagttgatccttttccagtagctttactggctgttctttttggcgttaagaatgaaattctgagttctaacgccactaaccctatgctgacgcgacttcttgagaactgtaagagtctcaaatatctggttgatgagtgtccttttgcatttgtgaactagtatgtaatattttattcacttaaataaagcgcatta

SEQ ID NO: 53733 - DNA, 245 bp, Glycine max
ctcgagccgctcgagcggctcgagcggctcgagtttttctcttactacagatccaaacaactccgaagaccaccgatgccaagctcccgaccgtcacagactctgctccaacaactgcggcttcttcggtagccccgccacaatgaatctctgttccaaatgctacagagacatccgtttgaaggaagaagaacaagccaaaactaaatccacaatcgaaaccgctctttctggatcttcctccg

SEQ ID NO: 53734 - DNA, 240 bp, Glycine max
ggagtttggaatttttgaagcgtaccggatttcactgtgatatcatttgtgtcactggatggactgccaccccaatgcaggatgttcaggttacaattgattggtttatttcctctcaggaatgtgttcccaggacttattgtgttttaaatccacaaaatccttttgtattaaataggtggatggggaaactgactttcccccagggcacttcccgaaatgttaagagaatgcctcttt

SEQ ID NO: 53735 - DNA, 252 bp, Glycine max
actcgagccgctcgagccgattcggctcgagtgagtttcgagcagtggcgtcagggaactcaaatgacacacaatcaatgcttgactgtcgtcacggggaagcacttgtggtgaactttgcattccagcttcaccacatgcgcgatgaaactgtatcgacagtgaacgagcgagaccaacttcttcgcatggttaagagcttgaatccaaaacttgtgacagttgtggagcaggattaaaccaacaccctcc

SEQ ID NO: 53736 - DNA, 240 bp, Glycine max
attgaaccagacatgaattcaaggtttcagcttttgagtaccactaccaatggtgattttgttcaaggaaaagatctcgcaatggttaaagttaatgtagcatgtgctgctgttggcttgacatcaagctatactccgactcgattgttggaatctggtttgcaaaaagacagagggttaattgtggagtattttggaatagagtcttacgttgctcataacgttaatcagccccaagag

SEQ ID NO: 53737 - DNA, 204 bp, Glycine max
tatgataatcacagcaagagggcagaataaaggttggattccagagaacttgaacacagggcacatggataggtttttgctttctccttgcagggctagctgcctttgactttgtgctgtacttgttctgtgccaagtggtacaagaacatcaatattgaagatagtgacatgggagaccaagaggaggagctggaggatgtaa

SEQ ID NO: 53738 - DNA, 236 bp, Glycine max
atcacgagagccagtccattgcttggatggctcagagtgccagggagaaaggtgctaaagtgcatagtgcatggtttaaatggccaaccctcaaactctgctccactgatttgaggaaacagatttgcaataagaagaagaggaagaaggattcagccactggtctttttgtcttcccggttcagtctagagtgactggggctaagtattcataccagtggatggccttggcccaa

SEQ ID NO: 53739 - DNA, 235 bp, Glycine max
cctgtttgctgtagaagaaactacgtcaattaagaaaagaaaagatgcagataacaaacatgatgacaaagaatttggagatcattttcccacaaagaaagctagagtagtttggtctgtggatcttcatcagaagtttgtcaaagcagtgaatcaaatcggatttgatattggtcccaagaaaattctagatctgatgaatgttccatggttgactagagaaaatgttgctagt

SEQ ID NO: 53740 - DNA, 237 bp, Glycine max
tcaggatattgtggttctgcacagaatgaatctggctgcatacactttggtccacgtggagatagaggatcaaactgcatatatccatctgactttgtaccgtttactagaagaccacttcttttagtcattgataacgacaacagcaaagcttttaaggtcatagcagaagcagaaaagggagagtcagttgctatgctcctttctccaagctgttcgcctgctttgtctgattgc

SEQ ID NO: 53741 - DNA, 132 bp, Glycine max
cctcgctgacgacaccatcaactttgaggcttgtccccacaagctgatacacaaaggagagattcaggaaaaagttgtactgaaattttcgcaagaggaatctcttacagcatggccaactcaagcgcgtcc

SEQ ID NO: 53742 - DNA, 254 bp, Glycine max
ctcaatggtgttgagggtttggactatatggaaagaattcctcatgccacatctgagggttttccccatgtgcattcacgcaaaaatggtgataaaggcaaaaggagatttgtttctggggatggtgaagagatgacattgattccgggaaccagtgttgaagaggcttacaataagctaatagttgaacttgagaagagtgttcctacattggttggcattgaatgtcccaaggatgagaaacttcctcgtcg

SEQ ID NO: 53743 - DNA, 248 bp, Glycine max
  unsure (1)..(248): unsure at all n locations
atggactgccactccactgcaggatgttcaggttacaattgatcggcttatttcctctcaggaatgtgttcgcaggacttattgtgtgtgaaatccactaaatcctttagtgttgaataggtggatggggtanatgactttcccccagggcactttccgaagtgttaagagaatgcctcttactatagggggacgagctggtgcctagaatgctattctcatgaatatgccaaatgctgttctttcaa

SEQ ID NO: 53744 - DNA, 247 bp, Glycine max
tgtcaactcaggtgcgtcctgcaacaactctcctagctgatgggtgtccatatttgtatgctatggtgcatgatagttcagtgtctacaataccaggccattttgtcattggtgttaagttggcaactataaacaatatgtgtgcatatgggctcaatccgtgtatttctggttctcgtcttttgggcagcattcctcagtccatttcacagcaaactgtttggaatcaaatggcaacagtgagaac

SEQ ID NO: 53745 - DNA, 220 bp, Glycine max
atcgtatcaaaggaatgattaaatggtggccacagttggtattcctgagaatacaggtatagcattggcctgtgctatgaatagttcttttagggggcgtgcagttctgatatttacaccatctgctctcaagactgtgaattatggaatcctgcttgcacaaaagcaatgactatgtcatttaatccaaacccgtgttctgatgcatggagtttggaat

SEQ ID NO: 53746 - DNA, 219 bp, Glycine max
gtttacaaagcctaatgttgttctttagttgtttccttgttctctgtcactgatggctgattattcagcacgaactgaatcctgcgaggtagttgtaaatgtaaccaaggacacctccaaaacaatggaaccctcagactcctttgtctctgttcctttcttgcagaagttggtagctgaggtggtgggaacatctttcttgatatttgcagggtgtgc

SEQ ID NO: 53747 - DNA, 223 bp, Glycine max
gccacatctgagggttttccccatgtgctttcacgcaaaaatggtgcataaggcaaaaggagatttgtttctggggatggtgaagagatgatcttgattccgggaaccagtgttgaagaggcttacaataacctaatagttgaacttgagaaaagtgttcctacattggttggcattgaatgtcccaaggatgagaaacttcctcgtcgcaaaatttttgaca

SEQ ID NO: 53748 - DNA, 218 bp, Glycine max
gaaataaacagcttccatttctttgcggtcttcctttccttgagagaagagcatctgaaacggcacatttagttgcagggagatctgggaagcatctcttcctcatggacaatgatgatggaaagcgtcctctgctcgtgcgaatggtcagctttacgtgcatttaagcgtcgagtggcatatgcaaatgcaaattatgatcatatggtaggatggcg

SEQ ID NO: 53749 - DNA, 196 bp, Glycine max
gacttattgtgttttaaatccacaaaatccctttgtggtcaatatgggggttgggggaaactgacttttcccaggggacttcccgaagtgttaagagaatgcctccttctatagggaggaggagctggtgcaagaatgccattgctctggatatgccaaaatgctggtactttcaatggggagatattttggtgga

SEQ ID NO: 53750 - DNA, 246 bp, Glycine max
  unsure (1)..(246): unsure at all n locations
ggaagtttctttaagtgcagcactcaatggtgttgagggtttggactatatggaaagaattcctcttgccacatctgagggttttccccatgtgcttccacgcaacattggatcctgaggcaaatggagatttgtttctgggggtggtgaagagatgacattgattccgggaaccagtgttgaagaggcttacaatcagctaaggtnngaacttgagaaaagtgttcctacattggttggcattga

SEQ ID NO: 53751 - DNA, 243 bp, Glycine max
ccacagttggtattcctgagaatacaggtatagcattggcctgtgctatgaatagttcttttagggggcgtgccagttctgatatttacaccatctgctctcaagactgtgaattatggaatcctgcttgcacaaaagcaatgactatgtcatttaatccaaacccgtgttctgatgcatggagtttggaatttctgaagcgtaccggatttcattgtgatatcatttgtgtcactggatgga

SEQ ID NO: 53752 - DNA, 271 bp, Glycine max
gtgctctcggaaattttcttcgacgtgccaccgccgccgaggtcgccgttgccggaatcttacttatacagtccagaatccgacaacaccaccacgacggagacgcagttttcagtgcagatggcgcggcttattctgattcttctctgcaagatcgacgggaaatcaaggtattacaaggaagtttcgttgtcatacctgtttctcgcgaacaatctccggcacatactggccaaggtccgtgcgtcgaacttgcattacgttctcggcg

SEQ ID NO: 53753 - DNA, 266 bp, Glycine max
caatggtgttgagggtttggactatatggaaagaattcctcttgccacatctgagggttttccccatgtgcttccacgcaacattcgagagtgaggcaaaaggagatttgcttctggggatggtgaagagatgacattgattccggggaccagtgtagaagaggcttacaataagctaatagtatggacttgagtaaagtgtacctacatgggactggcattagtgacccaaggatgagaaacttcctcgtcgcaaaatttttgac

SEQ ID NO: 53754 - DNA, 256 bp, Glycine max
cgcaaaaatggtgaaaaaggcaaaagaagatttgtttctggggatggtgaagagatgacattgattccgggaaccagtgttgaagaggcttacaacaagctaatagttgaacttgagaaaagtgttcctacattggttggcattgaatgtcccaaggatgagaaacttcctcgtcgcaaaattcttgacaaacctaagacgcgctgcttcactattctccctatggagtttaatcttgtggtccgtcaaaagtttt

SEQ ID NO: 53755 - DNA, 251 bp, Glycine max
ggaatttctgaagcgtaccggatttcattgtgatatcatttgtgtcactggatggactgctaccccaatgcaggatgttcaggttacaattgattggtttatttcctctcaggaatgtgttcccaggacctattgtgttttaaatccacaaaatccttttgtgttaaataggtggatggggaaattgatttccccagggggtacttcccggtgtgtaaaaagaatccctctctctatagggggaggagctg

SEQ ID NO: 53756 - DNA, 244 bp, Glycine max
attagacagagggttaattgtggaatattttggaaggatgtaatagggggcttataacgttaatcagcgccaagagaaagatttgttggagggaaatttttcctttgatatgaaatctcgctctagattggaaaaagtttcctctactaaagcacaatttgttagtggaaaaaccttcaaatatgatataattggtgctgggtcacattcttcagaagattgtcctgaaaaggaagatcaagaa

SEQ ID NO: 53757 - DNA, 240 bp, Glycine max
ggactactgaggaatttgagagatagagagttagcccgttatgcctttgatttctatgaggtcacctccaaaacaccaaacagggcaagggaggcaatagcacaaatgaaggctgcagctctctcgggagttaacaacaagctgtttgggcttgatggaaacatctcgaccaactccgaaaatactgaaaggcacactgcaagagatgtgaatcaaaacatgcattctcttctgggcatg

SEQ ID NO: 53758 - DNA, 252 bp, Glycine max
ctcatcacaatatataagcaggccataacctaatgcttttgcactacaaatcagttttctacttgaatcttcgttatccttctttttttctccttgaaccaatattcactatggcagatgaggtggttctgctagatttctggccaagtccatttgggatgagggtcaggattgcacttgctgaaaagggtatcaaatatgagtccaaagaagaggacttgcagaacaagagccctttgctcctcaaaatga

SEQ ID NO: 53759 - DNA, 254 bp, Glycine max
ctcgagccgttagtaacttgttgagagttgctgcttggaagaaacgctgtttaatggttaaaattgtgatgtctgggaatgcagcagtcaaaaggagtgattgggcctcattggtacaagtgtttttaacaaacagcaacagtacagagcatttcgatgcatgtaagtggacaaaatcggaaccacattcctgggaattgatcttcccaatagaggtatgtggtcctaataatggttttgaaatgtggagttct

SEQ ID NO: 53760 - DNA, 244 bp, Glycine max
cagaggagtatgcagggacatcctggcatgagctgaattatatacgacaagccatcgggttcttggtaatacatcaaaagaggaagaaatctttggaagagattcggcaagatctttgtccggtattgactgtgaggcaaatctatcgaatcagcacaatgtactgggatgacaagtatggaacccagagtgtgtccaatgaggtagttagtgaaatgagagaaattgtcagcaaggacaatca

SEQ ID NO: 53761 - DNA, 250 bp, Glycine max
  unsure (1)..(250): unsure at all n locations
aaaacaggcaatgacaagcagagttgtgagcctttggtatcgccctcctgagctgcttcttggggctactgtttatggtgttggtattgacctttggagtgctggttgcatcttggcagagctgcttgctggaaagccactaatgcctggccgaacagaggttgaacaactgcacaacatatttaagtcccccngntctccatctgaggaatactggaggaagtatagattgccaaatgctactatcttt

SEQ ID NO: 53762 - DNA, 241 bp, Glycine max
cacgcggctggccccgaccgcgtacgccgcgctccggtcggcatttcggcagggtatggagaactaccccattgccaacgaggaacgcctatttgacacgtgttatgatttcagtgggtataaggagatttcagttccgaagatagattttgaatttgccggtggcgtcacggtggagttgccattggtggggatattctatgtggtaagtgcgcaacaagtgtgtttggcttttgctgca

SEQ ID NO: 53763 - DNA, 264 bp, Glycine max
atttcaaccctatctctgctctctttttcttcatcatttgtttttgggtctctctgtttccaagtttttgagttatggcatcgatacgcatcgtgaaggagctcaaggatttgcagaaggaccctcctacatcctgcagcgcaggtcccgtggcggaggatatgtttcactggcaggcaacaatcatgggacctcctgatagcccatatacaggttgcatttaggactaaggtattccacccaaacatcaatagtaatggaagt

SEQ ID NO: 53764 - DNA, 240 bp, Glycine max
cggctcgagttctcatttcttcatcgttcgattcttctcctcctaaagatgcagatcttcgtgacaactttgaccggtaagaccatcacccttgaggtggagtcctccgacaccatcgataacgtgaaagctaagattcaagacaaggaagggatcccacctgaccagcagagacttatctttgcgggtaaacagcttgaggatggtcgaacccttgccggatacaaatcaaaaagggat

SEQ ID NO: 53765 - DNA, 260 bp, Glycine max
cttacaacaagctaatagttgaacttgagaaaagtgttcctacatatggttggcattgaatgtcccaaggatgagaaacttcctcgtcgcaaaatttttgacaaacctaagacgcgctgcttcactattctccctatggagtttaatcttgtggtccgtcaaaagtttttaaattttgtgaggttcattatgaagaaaagggacaagcttagttgtcaagttggaatcaacccatactccatggaatggactggtttggc

SEQ ID NO: 53766 - DNA, 254 bp, Glycine max
caaatcctccttggagatgttcgtaattttgcaatagattttcgaaattgatgttaagtctgcagacaggatctcagatgctgctctagaatctgcggttctgcaatttatcccatgcatccgttctggtagttttgctgacattgggccacggagatacatggaagatgaacatataaggatagatgatttgtcgtctcatctgggatctctatacaactttccaaaaccaagtgccttctatggggtgtttg

SEQ ID NO: 53767 - DNA, 245 bp, Glycine max
ggcattcttggtggcacgatgagcaagctcatcttcggtggtcaggtttcggttctaggttgactgaagtattgctttctctccgttttttcatctatcagtatggtttggtctatcacctagacatctctcagcatagcaaaaactttctggtttatgtcctttcttggattgtgattgttgcaattttcctccaggtgaaggctgttaacatgggaaggcaactactcagtgctaattatcag

SEQ ID NO: 53768 - DNA, 238 bp, Glycine max
attcttcacgcagatgagaaggattacaaaactgcatatagttatttctttgaagcttttgagtctttcaatgctcttgatgaccccaaggctgtatttagcctgaaatacatgttgttatgcaagattatggtgagtcaagctgatgatgtggctggaatcatatcttctaaagctggcgtgcaatatcttgggcctgatttggatgctatgaaagccattgcagatgctcattcta

SEQ ID NO: 53769 - DNA, 237 bp, Glycine max
agcagatgggtgtcgtcatgaatggtttcatggtatggtgcattgataatggcacgtctccagatgccaatggtgtatgggtaatgatggatggagaggaacagattgaatacccactgaagcccatcgttgaaaatgcaaaaccaactttgaggcaaatacatgcaccatttctcagatgcagctgaagcttacattgagatgagaaattctgaaagtccgtatatgcctagatat

SEQ ID NO: 53770 - DNA, 236 bp, Glycine max
cttgacgtagaggagaatgattacaaaactgcatatagttatctctctgaagcttttgagtctttcaatactcttgatgagcccaaggctgaagttggcctggcatagatgttgttatgcgagattatggtgagtcaagctgatgatgtggcttgaatcatattttctatagctggcgtgcaatatcttgggcctgatttggatgctatgaaagttattgcagatgctgattctaa

SEQ ID NO: 53771 - DNA, 185 bp, Glycine max
  unsure (1)..(185): unsure at all n locations
atttttgttgcgcttttcagaggcggaaggtacattcgggtggttacatttccacttaccatagtattccangnntnaggnntgagttcaaggtttcagattttgagtacaactttgagtggagattttgatgaaggataagatctggcaatggatatagtaacatgtagcatgtgctgctgttg

SEQ ID NO: 53772 - DNA, 280 bp, Glycine max
  unsure (1)..(280): unsure at all n locations
agtagctcgaatcggtcgaagttttacaatcctcaaaattttgtttctttgtgtgtgtatggtgatgatatcttaattagtgttcatgaatatgtcaagccttactttagtggttctaaattgaaaagctttctagctaggtcataatagtcaccagttagctgcatcggtattgcacaacaactaacgtgcacacttctgcaatattcnagaaagttagcaaagattgcgatttatgactcaagagaacacttctaagcacgatgtctaatgttcttgt

SEQ ID NO: 53773 - DNA, 223 bp, Glycine max
  unsure (1)..(223): unsure at all n locations
actcgagccgaatcggctcgagctcgagccgaataacttcccctgacaatcgcgtttcgtacgtgcaaggttttaaaagacggctgatgctgaggacattcaacctcttgttgttgataatggaactggaatggtcaaggctggttttgcaggtgatgatgctcctagggccgtgttccccagcattattgggagnacacgccatactggtgtaatggttggg

SEQ ID NO: 53774 - DNA, 133 bp, Glycine max
ggatggccgttgcgtggtacccaatatatcatatccccatgggaagaacaattaaagacctttctacatgcttcctcacttatcacacgctttcatcttcatttcaagagcatggcacctgtgacgatagaca

SEQ ID NO: 53775 - DNA, 244 bp, Glycine max
gaaagaaaagacatccaactttagaggataataacatgtcaaagggtgacaaggttgaggttttggacttctgggctagcccattttgtgcaagagtgaaagttgctttggaagagaagggggtgaactatgtagccagtgaagaggatttgtttggaggcaagagtgagcttctcctgaagtcaaatcctatccatcaaagggttacctgtgctcttgcacaatgacaaacctctagccgagt

SEQ ID NO: 53776 - DNA, 227 bp, Glycine max
gggttgttttaggagcagttgatgtatatcttggtgcaaacccttctgctgagggtggaggagacgatgagggagttgatgatgcagctgtttaggttgttgacattgttgacacattcagacttcaggagcaacccgcattcgataagaagcagtttgttaccttcatgaagaggtttctcaagaatttgactcccatgctcgttgcagagcaacaggtgttgttt

SEQ ID NO: 53777 - DNA, 242 bp, Glycine max
cccaaggttggaaagcgctcaccagcatggtgtgatcgtattctttcatatggcaagggaatgagattattgagttacagaagggcagagctcaaactgtctgatcacagacctgtgaccgccaaatatatggttgaagttgagacattttctcctaggaagctacagcgagccctaactttcactgatgcagagattgaaaatgaacaagtcatgacaaatttaagtaattggactttagc

SEQ ID NO: 53778 - DNA, 232 bp, Glycine max
tttgtgaggttcattatgaagaaaagggacaagcttagttgtcaagttggaatcaacccatactccatggactagactggtttggccaatagattactgagtaagcgcaacgatattctgtgttgcgattatgctagttttgatgctccgattaccaagcagttatgagcaagatggcagaaatgataaacagtctttgtggtggtgatgaaaaattgatgcgtgaaaggac

SEQ ID NO: 53779 - DNA, 255 bp, Glycine max
cggaactcaataaaggaaattaggcatgacgctcttgttgagtatgctctgcctatgtgaaaattacgagacctcccttaagggtcgcagcgcagagttgatagtgcagtagcatttttaatgagatgctcattagatatagctatgaaaaattactgcgccaggctaaagctccaagtatgtttttacaatccttcaaaaattttgtttctttgtgtgtgtatggtgatgataacttaattagtgttcatgaat

SEQ ID NO: 53780 - DNA, 252 bp, Glycine max
aacagttctcttgcttggaggaagggtagcagcctcagctgctgcaatttccaaagcagatgagaagaaggcatggctgatattggcttgggccagcaccatatcagggaatctctcattgttgggatcagctgctaacttgatagtgtgtgaacaggcgatccgtgcgcaaactatcctatacatttaacctttggggtcacctgaaatttggccttccttccacaatcatagtcactgctattggtttga

SEQ ID NO: 53781 - DNA, 246 bp, Glycine max
gaaaaatatgcgaggggacccagaagaaagacaggccatcaataaccagatactgtgtgctacactttttcctacttggacttgttggaataacaatgaaagaaggattctacctcttgggtttggagaaaacatcacctacttttgctgctgctatgcagaattctgttccagcacttacctttctgatggctgctctactcagatatgagagtgtgcacttcaacaggattgatggtctggcta

SEQ ID NO: 53782 - DNA, 255 bp, Glycine max
gaggaatttagtggacaaaattggagattggatcacacttatacaaaattctccaattagtaacttgttgagagttgctgcttggaagaaaggctgtttaatggttaaaattatgatgtatgggaatgcagcagtcaaaaggagtgtttgggcctgattggtataagtgtttttaacaaacagcaacagtacagagcatttcgatgcatgtaagtggacaaaatcggatccacattctgggaattgatcttccca

SEQ ID NO: 53783 - DNA, 258 bp, Glycine max
ctccttggagggcaacctcgcctcagacacgttcgccatatccgggtcgggtcaaccgggaattatattcgggagcatggattccgggttcagctccaacgcaaacgaagactccaaaacaaccgggttaatgggcatgaaccgagggtcgctctcgtttgtgacccaaatggggtttccgaaattctcgtactgcatctccggcaaagatgcttccggcgtgttactcttcggcgacgccacgttcaagtggcttgg

SEQ ID NO: 53784 - DNA, 250 bp, Glycine max
gcaatttcctatatggctaaacacttgtacccaattggcaccaccctcaaaactattgatgaaggagaaagtagcaagctgcagaagacgttgtcgatgccgtcgacaccaacaaccccgatgactccgacgactccaacgacaccgggatcggcccgtaaagctgacaacgtttggagctccgtcttccatcctgggagcaactccgccactcccaccatcggtgctcagatgtttgacaaaccacttc

SEQ ID NO: 53785 - DNA, 248 bp, Glycine max
  unsure (1)..(248): unsure at all n locations
attactgagtaagggcaacgatattctgtgttgcgattatgctagttttgatggtttgattaccacacaacatatgagtttgatcgcaaaaatgataaacagtcttcgtagtcatgatgcacaattgatgcgtgaaaggacacatctgctgttggcttgttgttcaaagatggcaatcgtgtaaaccananannnggagagntgaangnggaatcccatctgagattccgctcacagttatttgcaat

SEQ ID NO: 53786 - DNA, 272 bp, Glycine max
tcggctccatctctatctgctctcgcggctcgagcggctcgatctcgagccgcttcctgtcctctgattggagaggacttatacgattgatccgctacttcggacataagttcaaagttgctagacatttgcaatgcattcagctctgagctttcacgtctgaaccaggcaaaccttcctcttaagtgtgcactgcacaatttagactctgcctcttcacagcagtatcttcgggcatgttccctacttgatcattggaggcagcatgttag

SEQ ID NO: 53787 - DNA, 246 bp, Glycine max
gttcagagagagcaagtcagacgatagacggttctatatattcacggccacaaagactctccatctgagaactgattcgaggaaggaccgtgtggcgtggatacaagctttggtttcaacccgtggattgtacccacttcgaccactcagtgaccatctctccctcgcgccaaatcatatatctgtgtcaaccgaggggcttacgacacgcttgcttgaagagggtagcagtgagagccttgccaa

SEQ ID NO: 53788 - DNA, 190 bp, Glycine max
cagccgcggtaagggtatatcctcttctgctttgccctacaaaaggacaccccctagctggctcaagatctcttcgcaagattgtggaagataatatctggaatttttggaaggatgtgactccgtctgagattggtgtcattcttcgacgatctcacggtacagaacttttccaagcgtcactggcagc

SEQ ID NO: 53789 - DNA, 242 bp, Glycine max
ctcgagccgcgttttgcaaggccaagtctctcaaagctatgctataggcgttccgacaagagcatcaacttggtgcagaacatcctcaaatttgtggcactgtggatcattcttgcggcttacacaacacccttcttcatcattcctcccacggttcaccctttgttgggatggcctctctacttgcttggtgtctttgcattgtgctcaattacggtcaatgcctttctgctgccaatgtt

SEQ ID NO: 53790 - DNA, 239 bp, Glycine max
  unsure (1)..(239): unsure at all n locations
gtcatttaatccaaacccgtgttctgatgcatggagtttggaatttttgaagcgtataggatttcactgtgatatcatttgtgtcactggatggactgttaccccaatgcaggattttcaggttacaattgattggtttatttcctctcaggaatgtgttcccaggatttattgtgttttaaatccacaaaatacctttgtcttngantattggatggggaaactgactttcccccagg

SEQ ID NO: 53791 - DNA, 241 bp, Glycine max
tgaaaatgcagttcgtagtatttctgttgcgcctttcagaggcggaaggcccattcgggtcattacatttccgaataccattgtgcatattgaaccagacatgacttcaaggtttcagctcttgcgtaccactaccaatggtgatcttgttcaaggaatagatctcgcactggctcaagttaatgtagcatgtgccactgttgacttgacatcaagctatactccgactccattggtggaa

SEQ ID NO: 53792 - DNA, 233 bp, Glycine max
ccaaaatatgccactcccatgatgcccctagatgaagaaattctctctaaggttgcacaagatatggttgacgaatggtttgattgtgttgatgaggaggattcctttgaggaagattctttaagtgcagcactcaatggtgttgagggtttggactatatggaaagaattcctcttgctacatctgagggttttcctcatgtgctttcacgcaaaaatggtgtctaaggcaa

SEQ ID NO: 53793 - DNA, 222 bp, Glycine max
  unsure (1)..(222): unsure at all n locations
ctctcttccctctccccgcccaaaccctaaccccctancctattccgctttctctcatccatcatgaaaggagcagagtccaagaccgaatctacgagagccgatgccaaacttgctgtgaatcagaagggcgccgccaccaagactagggaacccgccggaaaggggaaggcagcgaaagatcctagcaagccatagaggcctccaagtgctttcttcgtt

SEQ ID NO: 53794 - DNA, 234 bp, Glycine max
tcgtacttcggctcgagctcgagccgggatttcattgtgatatcatgttttgtcactggatggactgctaccccaatgcaggatgttcaggttacaattgattggtttatttcctctcaggaatgtgtatcgaggacctattgtgttttaaatccacaaaatccttttgtcgtaaataggtggatggggaaattgactttcccccagggcacttcccgaagtgttaaaagaatg

SEQ ID NO: 53795 - DNA, 217 bp, Glycine max
gccatgactggttcagaaacagagaaggctttattaagtacgacgcccaaattaacaaaagccatgactggttcagaaacagagaaggttccttttggtttctttgctcggaatggcaagtatgtagaatgcctgctttctgtgagtaagaaattggacgtagagggcctagttactggggtcttctgcttcttacagctagctagcccagagctcc

SEQ ID NO: 53796 - DNA, 237 bp, Glycine max
agagagatgacattgattccgggaaccagtgttgaagaggcttacaacaagctaatagttgaacttgagaaaagtgttcctacattggttggcattgaatgtcccaaggatgagaaacttcctcgtcgcaaaatttttgacaaacctaagacgcgctgcttcactattctccctatggagtttaatcttgtggtccgtcaaaagtttttaaattttgtgaggttcattatgaagaaa

SEQ ID NO: 53797 - DNA, 225 bp, Glycine max
tagggaatggactggtttggccaatagattactgagtaagggcaacgatattctgtgttgcgattatgctagttttgatggtttgattaccaagcaagttatgagcgagattgcatgaatgatgctcagtctctgaggtggtgatgattgattgatgcgtgtcgatgcacacctgctgttggcgctctgatccaggatggcatttgtacgactgatgatggagag

SEQ ID NO: 53798 - DNA, 171 bp, Glycine max
atcgagcttaatcggctcgagcaacgatattctgtgttgcgattatgttagttttgatggtttgattaccaagcaagttaagagagagatcgcagcaatgataaacagtctttgtggtggtgatgaaaaattgatgcgtgaaaggacacacctgatgttggcttgttgttc

SEQ ID NO: 53799 - DNA, 212 bp, Glycine max
gagaaaatggggtctctaatggcctctcttactctcactcttgtattggcattactctctctaagcttgccatctcaaacctcagctgacaagtacgagtattcatgtcctccaccaccggagaagctgaacacataccactctccaccaccatcacttcaggtgtcgctggcagaataccctgctccgcgtgaggatgattagcagtatgg

SEQ ID NO: 53800 - DNA, 100 bp, Glycine max
ctcagccttggagttgtgaatgcgctccatcaagactctcttgttcgtgaaaacattacctttcaccttcatgtacatagcatggtacatgtgcttgtca

SEQ ID NO: 53801 - DNA, 226 bp, Glycine max
ggggatgcttccatggaatttatcaagcatgtttgtgctgtcctggcccttgaccaaagtgtgcagcatgaagttttggtcttgagaaaaaatttgctcaaatatgttgatgttaaggagtttgctcctgaagctaagtttcatggtccttgtcataccttcatcttatccaatgtcatatgcatgtattgtaatgactgcagagacttggatttgtgccgtgatt

SEQ ID NO: 53802 - DNA, 204 bp, Glycine max
ctcatgccggacgagccgcttcagtgcgctaatacacaagcgttcgttcatgagcatggtccagtagcctctaggttcccaatcaaggtgaattatctatatcctgggggtcgatgacctccagacgctagcgttgtagatgttacctgtggtagtggacgtggaggtagacccaccactgcttagaatcagactgcagttaac

SEQ ID NO: 53803 - DNA, 207 bp, Glycine max
gagcaattgagtttctaagataaccacttatactactttaattacatacaataggcaaccgcgaagaccgtgaaggatgtttcacctcacgatttcgtgaaagcttacgcctaccatactcaagacgttccggcaagatggaacttcctaagtggactgatattgtaaaaacagcaaaatttaaggaattggctccatatgatcctg

SEQ ID NO: 53804 - DNA, 217 bp, Glycine max
tggcgaccaccgagccggagcaccgccgcgacgaaaacgacgacgacagcgtgacggcggaggatgaggacaccggagcgcaggtcgctccgatcgtgaagctcgaagaggtcgccgtcaccaccggcgaggaggacgaggatcccatccttgatctgaaggcgaactgtatcggtttgacaaggaggggaaccagtggaaggagcgtggcggcggg

SEQ ID NO: 53805 - DNA, 218 bp, Glycine max
gctgaaattcaatataagcggaatctgagtaatattcatatttccggcttattttacgacggcagatacaaattctggactaaacacgagacaaatcttgctttgacagaagaggaaaagatggaagtgattagaaatagaggcattcctgctgatgttcttgcaaagcgagctcatgaatttgaaaaacatgttgctcatgaaagcctcaaggatca

SEQ ID NO: 53806 - DNA, 215 bp, Glycine max
caagtaagttgatgagagaaagtgtgctacattgttcaaagactgtacggaaaattccatttgtcatttttgcacacggtgattctcgggttggaaaatctttgctagttgatagacttatcacagatttttgtgatcatctagaaattggggaggatgctgtttattcaaggaatccttcggatcctttctggagtgggtataggagacaacca

SEQ ID NO: 53807 - DNA, 237 bp, Glycine max
gccaaagcctagaattgattacactttgaaggctgttggtggaagtttgacggcactgcctggaatttcagatatgattgatgatatggtgaactcaatcgttaccgatacgctccaatggcctcataggattgttgttcctcttgggggcatacctgttgatactagtgaactggagcttaaaccccagggaacgcttagagtgactgtaattaaagcgaatgacctaaagaatat

SEQ ID NO: 53808 - DNA, 234 bp, Glycine max
cgcgctgcttcactattctccctatggagtttaatcttgtggttcgtcagaagtttttaaattttgtgaggttcattatgaagaaaagggacaagcttagttgtcaagttggaatcaacccatactccatggaatggactggtttggccaatagattactgagtaagggcaacgatattctgtgttgcgattatgctagttttgatggtttgattaccaagcaagttatgagca

SEQ ID NO: 53809 - DNA, 230 bp, Glycine max
aaagtgttcctacattggttggtattgaatgtcccaaggatgagaaacttcctcgtcgcaaaatttttgacaaacctaagacgcgctgcttcactattctccctatggagtttaatcttgtggtccgtcagaagtttttaaattttgtgaggttcattatgaagaaaagggacaagcttagttgtcaagttggaatcaacccatactccatggaatggactggtttggcc

SEQ ID NO: 53810 - DNA, 243 bp, Glycine max
ggtgccacaagttggcggctaaggttggtagtgtggtgggccaaattgtggaggaacgaaaaagagatggtggttttgttgggaagaatgatttcttagcactttgctatccttgcccaaagaagaaagattggctgattcagatctggtggctattctgtgggaaatggtatttcgaggaacagacacagttgcaatactccttgaatgggttatggcaaggatggttttacaccaagactt

SEQ ID NO: 53811 - DNA, 226 bp, Glycine max
aatgtttctcatctcatcctgatcatcagtagagtcaccgctacgttatcgtgcgtaaaaaaaatcagtgggtgatttcagttctgacagcgagtacgtttcccccgtctctgctgcaaatttatacatatccatggtgctagatgccagcaatgtcttcccaaaagcattgccagatttgcttaagatcgtagaaaccattgacggcgttggagggccaggaacc

SEQ ID NO: 53812 - DNA, 230 bp, Glycine max
agtattccttacgaccttcctcttgctaatcaccagcgccaaatcagacttattttcctttaacataccacgttttgagccaggtgctttaaacatactactcgatggtagtgccaagacaacaggtggagtgctacaactcaccaaaaaggacaaaagcggcaacccaacccaacacagcgttggcctctctgcattctatgcagcacttcatctctccgacgcaaaaa

SEQ ID NO: 53813 - DNA, 256 bp, Glycine max
ctttcagctagatggcccaattttctctgtgtctgttctgtgttctcatcgggttcagttcaacttcactggtcccagtggcctcctactcagaatggcacaacaccgaagtggttttgcactagtaaaggacttttgggttgtgggccaagtggcattatggccggtgatgctatcataacagacagtggtgccatgcatgtagcaggtgtaccaattgttaatccgtccaccattgtcgtttgggaggttgcac

SEQ ID NO: 53814 - DNA, 258 bp, Glycine max
gcaggagtcatctgtttttagagaggttacagtggtggttatgtcgtctgagaatatcttgaccagaattgatagttgcttggaggaaggagcagaggagtttctgttgaaacctgtcaagttgtcagatgtaaaacgcgtaacagatttcataatgagaggtgaagggatgaaaggagtaaaaatatctaaaaaaagaagccgatcagatgattgcattccatctctatcaactgcattctcatcagtttctcatcc

SEQ ID NO: 53815 - DNA, 259 bp, Glycine max
tgatgatctgatgacgcagcgcctggcattagtgcgtctccttcggaggacaatatccggtatttcaatgtgatgatccttggaccgactcagtcgccatatgaccggggagttctcaagttggacattatttttgccagaagaatatgcactcgctgctccaacaggttaggtttctgacaccaatatctcatccgaacattgatcagcttcgcaggatatgtgctgacattctgaacactaagcggagtcctgcccc

SEQ ID NO: 53816 - DNA, 250 bp, Glycine max
acaaaaactaatttggtggaaactcccaaggaatggcaactggatctaccttgtgacaaaattcctagtgtcttgactacaactgatgagagattggtaggcacagaacatgagggatatgatccttttcttggtggaattcaaaaatatgccactcccatgatgcccctagatgaagaaattctttctaaagttgcacaagatatggttgaggaatggtttgattgtgttgatgaggaggatcctttga

SEQ ID NO: 53817 - DNA, 247 bp, Glycine max
gtgttggagatctataacatgtaccgaactcaactttcagcaaaaactatacttgtcttgtttgaagctttgcgtgatgtggcattacatgctcacaagattaacagcaatattatattacgttcaaagttacaagagtttagctctatgaatcaaatgcaagaccctccactgttacgcctggagaatgaatcctaccaaatatgtctcacatttttacagaacctcgttgtggacagacctacta

SEQ ID NO: 53818 - DNA, 249 bp, Glycine max
agcttttccaaacaagatcgtttttgatgataaacttgtgttggctaacacacaggaattctttgatggaaattttccagtggattcttggttaccaatttttgtgaattgtctttatcctgtaagtcaattacctccagaagctgttgttgtaaatgttacatgtggtggtggacgtggtggtctacccaccactgcttggattagttctgcagttaacaatcgctcctcagatatcaacaaaaagat

SEQ ID NO: 53819 - DNA, 239 bp, Glycine max
gtgaaatttacagataatcttgttggtgggaacaaagctacaaatgatcataactgagatggcactaaggattcaagataggggggaagtcgtcaagggtgcacctgtggttgagccaggagatggattgttctggttcaatcgacctcgcttcatcctctttttgattcatcttgttctctttcaagtaaattttatgatttattttcctatgattcaacctactgtcaaattgaagc

SEQ ID NO: 53820 - DNA, 319 bp, Glycine max
aggacaatccgtctaccggagaaggtatttatcctattgggcaaggtaatggaggctaagaaattgtacattcaggaaggaaaccttcacccaactaaagaagaattagcaagaagggtaggagttactgtagaaaagattgacaaattactattttctgcaagaattccaatttcaatgcagcaaactgtgtgggctgaccaaaatacaactttccaggagattactgcagaccccactgttgaggccacagatgtgactgtcgaaaaacagcttatgagaaggcatgttctcaatgtcctaagtgtcttacacccaa

SEQ ID NO: 53821 - DNA, 306 bp, Glycine max
ttccgctccaaggattcaaggcacataagtgaggttgtgcagtccattaaaacactcaggcgtcaagttgtagcaagggagtctgagagagctgagagggccaccttggttactcaagagaaactgcaacttgctaataatagatttaagccaatacgattgtccgacctttggatccgtcctgcttttggtgggcgtggaaggaagatacctggtacacttgaggctcatgtgaatggatttcgttattctaccactaggcaagatgagcgtgtagacataatgtttcccaacattaagcatgca

SEQ ID NO: 53822 - DNA, 312 bp, Glycine max
tattcagagagagtgcagacaatgagctcaagggaatcctctctgtgtgtgatgagccacttgtgtccgttgacttcaggtgcactgatgtgtcctcaaccctcaaaggcaaactcaatggcattgcactccgtgtgccaacaccgaacgtctcagtggtggacctcgtcgttcaggtctcaaagaagacctttgcagaagaagtgaatgcagcattcagagagagtgcagacaatgagctcaagggaatcctctctgtgtgtgatgagccacttgtgtccgttgacttcaggtgcactgatgtgtcctcaa

SEQ ID NO: 53823 - DNA, 351 bp, Glycine max
attttctgttaggtctgttggtctagttgctgagataaagagactgcttggtgtggttcaagacttgagagagagtgagtgggacttgcagttgatattggaaatgtttagacgtgagtccattgattcaagggatgtcatggatgcaagggaagcagaatacagagcatgggctcatgttcaaagtttgaaatcatctcttgatgagcacaacttagaacatcgagttaagacagccaatgaagcagaggcaagatctcaactagaagctggctgctgctgaagctgagatagcagacatgagactagaattagcagattctaagaggcaaatgtgtgacttgtctgatg

SEQ ID NO: 53824 - DNA, 337 bp, Glycine max
  unsure (1)..(337): unsure at all n locations
tactcgagccgagccgaatcggctcgaggaaagatattgtcgataaatagaagtacatctttagcttagtccaagcaggatctgaagtatctgccttattgggtcgaatgccttctgctgtgggttatcaacccactcttagtactgaaatgggttctttacaagaaagaatcacttctaccaaagaggggtccataacttctattcaagcagtttatgtacccgcagacgatttaaccgatcctgcgcctgctacgacatttgcacatttagatgctactactgtactatcaagaggattagcggccanaggtatctatccagcagtagtccttta

SEQ ID NO: 53825 - DNA, 343 bp, Glycine max
agagttattatcccaatttcctttcttctgtggctaatgctatatcagcgaaaagcatgtttcatgttttctacagtccaagagcaagtcatgcggattttgctgtgccctaccaaaaatatatcaaaagcatcaagaatccagtgaccatcgggacaagattcaaaatgaaatttgaaatggatgaatctcccgaaagaaggtgcactagtggcatagtgactggaatgagtgatttggatccctataaatggcctaagtcaaaatggaggtgcttgatggtcagatgggatgaggatattgagattaatccatcagatagagtgtctccctgggaggttga

SEQ ID NO: 53826 - DNA, 268 bp, Glycine max
aaaccggggtgcacaaggaaattgatgttcggaagctagatgtgaatgataggcaacaaatcattgacaaaattttcagggttgctgaagaagataatgaaaagttcctcaaaaagttcagaaacagaattgacaaggttggaatccgacttccaacagtagaagtgaggttccaaaatttgactgttgaagcagattcctatgtcggcagcagagctctaccaaccctaccaaatgttgcattaaaccttcttgaatcagctcttgg

SEQ ID NO: 53827 - DNA, 265 bp, Glycine max
cagttttggagtacttgtgttggagatggtctcaggtagacgccccacagatgtactcagccatgaaggctcaagcttgtgtgagtggattaaaaagcaatacacacaccaacaccaacttgaaaactttgttgaacaagcactgcaaaggttctctccttgtggcgtgccaaaccatcgtaacaaaatttggaaagatgttatactagaactcattgagctggggctagtatgcacacagtacaatccttcaacaagaccaagc

SEQ ID NO: 53828 - DNA, 261 bp, Glycine max
gaatctcgctgggatgaattagttggagaaatgcccctaaaaatatcttatcctgcaatagagagccatgagtggcgaattgttactggttgtgatcccaaaaataccagatggagttaccataatggaggatcttggccagtgctcctgtggctagtaacagctgcttgtatcaaaacggggagaccacagattgcaagacgtgcaattgaacttgccgagagtcgtttactgaaggatgggtggccagagtattatgat

SEQ ID NO: 53829 - DNA, 270 bp, Glycine max
ataaaattataaggaaggaaaagcttcaccctgccccatcaagagctgtggaatagaattgcatagctgaaaatgaggagtacttgtgatgaatggaaatcttttatagtaatgatagcaattgatttttcttttgcggcagtgaatattcttctcaagaaagtccttgaagagggaatgaaccatttggtttttatcacataccggctgtcaattgctaccattttcatagccccaatctgctactttagggaaagaaacgacagaccg

SEQ ID NO: 53830 - DNA, 270 bp, Glycine max
gtggcagtgcctcctcctccaccaccttcttcttccatggactttaacttcgatagcaactgttcctccccttacatcactgcaccttccagcccccaacgctttggcaacttcttcttcagtgcccccaccagccccactcgcagacactcctctgcttccactcccaacaccacccaagacgagttcgaattcgacttcagtggtcatctccagatgccttccctttccgccgaggaactattcctgggcggaaagattagacctctc

SEQ ID NO: 53831 - DNA, 260 bp, Glycine max
ctcgagccgtgaaaacctaaggaaagtggatggggatgataacacatgtataatagtgggaaaggtggtggtcaccaaaaatccttgccttcacccaggagacatcagagtccttgatgctatctacagtgaagaattagaggagaagggtttgagggattgccttgtatttccacaaaaaggacataggcctcatccaaatgaatgctctggaggtgatctcgatggagatttgtttttcataagttgggacaaagatc

SEQ ID NO: 53832 - DNA, 260 bp, Glycine max
gggctgatgagtgatggttgttgatttgattgagaagagaaagagaaagtaatcagaagaattggagtgagtgagaagaaagaaatgggttggggaaggggaatgttggaaggggtggtggtggtgggatgtctgtgtttactgggttgggcgggtctgtggtttttgaaccgtcgactctacaaagagtacgaagagaaacgcgtcctcgtccaaatcatcttcagcgtcgtctttgccttctcctgcaatcttctcca

SEQ ID NO: 53833 - DNA, 145 bp, Glycine max
attgggtggtccatcatggacaatagggttagggagaagagattcaaccactgcaagtaaagatgctgccactagtgatatcccatcccctctaatggatctcaatgatctcatatctgccttttcaacaaggggtttacctccc

SEQ ID NO: 53834 - DNA, 254 bp, Glycine max
agtcttcaatactgatgattattgctgcagagggacttatggaaaccctgcaacatgtttggcttcaaactactccaagatcttcaaacaagtgtgccctgcagcatatagttttgcacttgatgaccaacaagtctaataacttgttcaaaagcagactttgttgtgatattctgtggatcaaggaatcagacagcttgttcctatcaagacaagcaggttgtatgtaatcgaccaaataaagcctataaagc

SEQ ID NO: 53835 - DNA, 251 bp, Glycine max
atatcttccaagtgcaacaccgggaccattagttaagtatagagaagaagagttgaagattttaagaggagatggaacgggagagcgcaaggaacatgaaaggatctatgattatgatgtctacaagatttgggtaatccagatgaagatgtaaagcttgctcgtccagttcttggaggctccagcacctatccttatcctcgtagggttagaactggtagaaaagccaccaagaaagatcctaaaagcga

SEQ ID NO: 53836 - DNA, 279 bp, Glycine max
agaaagtaggatacaaccctgacaagattccttttgttcctatctctggttttgagggagacaacatgattgagaggtccacaaaccttgactggtacaagggtccaactctgcttgatgcacttgaccagattagtgagcccaagaggccctctgacaagcccctcaggcttccccttcaggatgtgtacaagattggaggtattggaactgtgccagtgggacgtgttgagaccggtgtcttgaagcctggaatggtggtgacttttgcaccaactg

SEQ ID NO: 53837 - DNA, 271 bp, Glycine max
tctcaattgtactaccaaaattgtactcaacatggctgttcccagtggctcgagtggtggagaggcgtcaattgttgcggaattggtggaagtggaggagtcttcatatccctacactggggagagaggtgaatgcaagtttgatccagagaaaatagcagttaagatcacaaatttcaccaatatccctgctgatgagaaccaaattgccgcatatttagtaaaaaatggtccacttgcatgggcgtgaatgcaattttcatgcaaacat

SEQ ID NO: 53838 - DNA, 295 bp, Glycine max
gtcacggacgatggagtgggcggcgagggcggacacctccgcggcattcccagaaaactcgtgattgcggcggtgggcggattcgccaaaacggtgtcgtctttcctcaacaccgccgatgttcacaacggcgacactctcctccgcctcgtccgctccagaccccaccgcgtccccctcattaccgttagcaatcacatgtccactttggatgatccggttatgtgggggttcaagggttttcctatcttcgacaccaacttagctcgctgggttctcgctgccgaagatattt

SEQ ID NO: 53839 - DNA, 180 bp, Glycine max
cgttctagatgttgatgatattcctagaatcgttaatgaagcgtttttcttagccacttcgggtagacctggccctgtgttaattgatatacccaaagatattcagcaacagtttgcgattcctaattgggatcaaccaattaggtacctggtacatgtctaggtgctaagtccccaatg

SEQ ID NO: 53840 - DNA, 289 bp, Glycine max
aaaacattgggcctggcatcacttatgtcaaaggctgggatgcatttgcctgccaagaaaaatccaaaacttccttggtttgaccttatccttgcagatattggagatcaccagtcccttgaacaaaatctctcaacttttagcgggcacatatcacgtatttgtaagattttggaagtggcctcaacacaatcacttgttctcattgatgaaattggtggtggaactgatccttcagaaggtgttgctctttctgccagtatcttacaatatttgaaggatcgtgtta

SEQ ID NO: 53841 - DNA, 286 bp, Glycine max
agttatgagaacttgattggaaaaggtggtcacgctgaagtgtacaaaggctacttacccgatggtcaggttatagctgtaaagaggctaatgaagaatgaaaaggatgctgcagacagagctggtgatttcttgacggagcttgggatcatagcacacataaaccacccaaatgcgacgcgccttgttggttttggggttgattgtggcctatactttgtcctacagcttgctccacatggcagtctttcttctttgcttgttggttctgaatgcttggactgga

SEQ ID NO: 53842 - DNA, 236 bp, Glycine max
caagaaagaacttccttataaccaaaaccaacaacaactatggcaagttatcagaagcactacgatgatcagggtcgcaaggtcgacgagtatggcaatgttgagaggccaactgacgaatatggcaacccggttcatgccactagtgtcacttatgtagccaccaaaagtgttggtggctacaatgatgacgctaataagcaacatgatattactggtgtccatcccgagaaaga

SEQ ID NO: 53843 - DNA, 254 bp, Glycine max
cctaagtgagatacaaagaaaggaaataattgatctttgaaaatgcagggaggaaagaaagctggagagtccatcaaggaaacagctgcaaacattggtgcttctgccaaggctggcatggagaaaaccaaggccactgtccaggagaaggcagaaagaatgacggcacgtgatccgattgcaaaggagttggcacccagaagaaagaggcaaaatgacccagcaaacttgacaagcaggggcggtcacataac

SEQ ID NO: 53844 - DNA, 253 bp, Glycine max
gttccttcgttattgtggtggcagtttgcaccattttggctatgattgctaccttaccccttgctcagctgtttttctttcatattcttctcattaaaaagggaatcaccacatatgattacatcatagctttgagggagcaggagcagcaaggtattggaggtcagcagagtctccaaatgtctcctgttagctcacgtactggaatgagcagtgcaagctcttttactacattccatcgtggagcatggtg

SEQ ID NO: 53845 - DNA, 143 bp, Glycine max
gtaggaactcaagatcgcacgattggccatgtcctctataattagctacattcttcaggccattgtcaccggaactggaccatcggataccctcgccgatcaccttgctgaccctatcaacatcaacgcctcggcctatgtca

SEQ ID NO: 53846 - DNA, 162 bp, Glycine max
cttcggcagaacgtctcggttatgctaccgagcagcttgccttctacacaggacccacagttgggggtctgcttaatgccacctttagcaatgcaactgacatgattctatcaatttatgcattgacaagcaatatgataagggctgttcagcaatccctac

SEQ ID NO: 53847 - DNA, 258 bp, Glycine max
gtcagagacagagacgcagccatggggcggagacctgcgaggtgttataggcaaattaagaacaagccataccccaagtcacgtttctgccgtggtgttcctgatcccaagatcaggatttatgatgttggtatgaagaagaagggtgttgatgagtttcctttctgtgtccatctggttagttgggagaaggaaaatgtttcaagtgaggccctggaagctgctcgcattgcttgcaacaagtacatggccaaattt

SEQ ID NO: 53848 - DNA, 255 bp, Glycine max
gcaggccttcctgtttatttcattgagccccatcatcctgataagttcttctggagaggaaaattttatggcgagcatgatgatttcagacgattttcattttttagccgtgcagctcttgagtttcttcttcaagctggcaagaagccagacatcattcattgccatgattggcagacagcattcattgctcctctgtactgggatatatatgccccagaaggattaaattcagctaggatttgctttacatgc

SEQ ID NO: 53849 - DNA, 245 bp, Glycine max
gggatcctgaaacgggagaaggcttgaccagcattgaaccgacaacgggaacaataaatgacgtgtgtacatttcctggcagtggtttgatcttgctggccttagattgtagtcaaataccatcttacttcataccatcgcttggacctgctcccaagtggtgttcttcgctagagaatttcactgaggagttagacatgggtggacaaacaactatttatgatcattacaaatttttgacaaag

SEQ ID NO: 53850 - DNA, 246 bp, Glycine max
caattaacaaactctaacaacatcatggtgcaatcaaagaagttcagaggtgtcaggcaacgccattggggttcatgggtatccgaaattcgccacccgcttctgaagagaagggtgtggctagggacatttgaaacagcagaagaagctgctagagcctatgatcaagctgcgattctgatgagtgggagaaatgccaagaccaatttcccaataactcaaactccagaaggtgatccaaagagc

SEQ ID NO: 53851 - DNA, 240 bp, Glycine max
cactgtcctcgctcaaggaatcacctttctagatcacccagtaacaattctagcaaagcatgggatgatgcttctttggattcaggctctgaccaagtgggttcatgcacaacaaaggatatgcttggcgccctttacttacagtactctgagaactctccaccttaccagcgggttccattttctgagaagataaccgagttagctaaaagccatccaggattgatgaggttgaagagt

SEQ ID NO: 53852 - DNA, 275 bp, Glycine max
ggacataataatgtctataatgctaccatatttccccataatgttgggcttggatgtaccagggatcctaacctggcacaaaggattggtgctgcaactgctcttgaagttagagctacagggattccttatgtatttgctccatgcatagcggtttgtagagatccaagatggggtcggtgttatgaaagctatagtgaggatcctaaaattgtgcaagacatgacagagatcatacctggtctacaaggaagtatccctgccaattccaggaa

SEQ ID NO: 53853 - DNA, 269 bp, Glycine max
gaggaagctccacgagtcctagagaggcatttcttagatttaaggaaaaaatatggggcagtattggatgttgatcttgttaacaagcatggcggagaagggcgactgtgtgaaaaatttggtgatgcatcgcagcatgtggctggtaatgatgtaagatatctgcactttgattttcaccatgtctgtgggcatgttcattttgatcgtctctcaatcctgtatgatcaaatttcagatttccttgagagaaatggatatcttctgtt

SEQ ID NO: 53854 - DNA, 171 bp, Glycine max
  unsure (1)..(171): unsure at all n locations
gcgtacgtgagcgcgnggttggggtcgagcaaaagtgagagacacctatttgtgagtatgtgggttgtgttgttccataatcattcttgagatcaaactcaaacgacaatatttgtgtcttgagatcaaactcaaacaataatatttgtgttatctggcattgtgtttttt

SEQ ID NO: 53855 - DNA, 264 bp, Glycine max
gtcccaatcccatatgcttgttaactgtggcggaatcaccgtaaccccaaggagactccggacaatagctaagaaacaggtggattacttgcttggagacaacccattgaagatgtcatacatggtggggtatggtccacggtacccacgaaggatacaccataggggctcatctttaccgtcgattgctgtacacccgggaaagatccagtgttccgcaggttcagtgtgatgaattcgcaatcccccaacccaacattctcg

SEQ ID NO: 53856 - DNA, 268 bp, Glycine max
attgaaaggcaagatgtgaagcaaatggtagttgctacacttgctgaatctggcatgaacctatcagatgatgttatagaaagtataattgacaaggttttaccccattttctataacttacatttctaagttctaatagtgcacatgagtcttaagagtctcattttctctttttgaaaactcacatggatagtttcaacattaaattttggatttctttagaccttcgaggaagcagatacaaagcatgatggcaagattgacaag

SEQ ID NO: 53857 - DNA, 263 bp, Glycine max
cgccggggccattgtttacattaagatagaccttgcgttgcaaacaactatggaagggcttgtggtggccatgtccctgattggagcaacggtaatcaccacatgctctggtcctatagcggattggctcggtcggcgacccatgatgataatctcatctgtgctctatttcttgggtggtttggtgatgctgtggtccccaaatgtgtatgtgttgtgcttggcgaggctacttgatggatttgggattggccttgctgtga

SEQ ID NO: 53858 - DNA, 259 bp, Glycine max
ggatgagatgtacaccacaccggaggatcttgttaaggtcgtttaccactccgcgaaccggattgcgcccgctcacgaagggatggaattgggtattggcgacacttccatcgtcaaggcgcttgctgaggcgtacggaaggaccgaggtgtggattaagactcagtatcagaaaaaaggggatttgggcttggttgctaaagagagacgtacctcgcaacctatgatgtttaagcccgaagacattgactattacgaa

SEQ ID NO: 53859 - DNA, 264 bp, Glycine max
ctctaacatcatagtcctcagaggctgattggtgcatactaattgtagacaggctagtcttcctattatcacaaacaatgtctgacagtcaagaatctgacaagaacattgagatatggaagatcaagaaattgatcaaggctctggaagctgctcgaggtaatggtaccagcatgatttctctgataatgcctccacgcgatcaaatttcccgggtcactaagatgttgggagatgaatttggaactgcttcaaacatcaaaa

SEQ ID NO: 53860 - DNA, 254 bp, Glycine max
accgaatctaagagagccgatgccaaacttgctgtgaataagaagggcgccgccaccaagactaggaaacccgccggaaaggggaaggcagcgaaagatcctaacaagccaaagaggcctccaagtgctttcttcgttttcatggaggaattcaggaaggtgttcaacaaggaacatcccgacaacaaagcagtgtctgctgtgggcaaagctgctggagcaaaatggaagacgatgtctgatgcgaaaaagca

SEQ ID NO: 53861 - DNA, 249 bp, Glycine max
ctcgagccgctcgagcgcgctgcgagagactcagattggacgtttcctgaggaacattgtttccaccgtgtcgcagctatgggcggcttcggagtgcggggtaagattctggaacttcaaggatctgtacgcgtcgtggtgcggcgaagaagaagaagaaggagtggttgcgaggaacggcgacgaggagagtgcgccgtttcgagagtcggtgtggacctcaccaacgttgtgtttggttgggatgag

SEQ ID NO: 53862 - DNA, 248 bp, Glycine max
gttaattaaaggttttatgcctatactgaactcactttaatgaacatcttgtagaatgtagattattaaactatatttttaattcaattgctactgctggcattgtactcatgtgtttaaatatttttgtagtgtattggagccacaacattagacgagtataggaagcacattgaaaaagatcctgctttggagagacgattccagccagttaaagtgccagagccaactgtagatgaaccatacaa

SEQ ID NO: 53863 - DNA, 246 bp, Glycine max
tgcatgaataatctgatcttggtgggtggacacgtattgttgttgagaagccttttggtaaggatctggaatctgcagagcaactcagtacccagattggacagttgtttgaagaaccccagatttatcgaattgatcactacttaggaaaggaacttgtgcagaatatgttagtacttcgttttgcaaaccgattattcatgcctctatggaaccgtgacaacattgctaatgtgcgatcgtttt

SEQ ID NO: 53864 - DNA, 246 bp, Glycine max
actgaattaaaatctgttccaattcattcaattgatcttcagttgtttcgagttgagtccattcttctcggggagaaaattgtgaccgaaacctctctggttcaaacaacacagatagcagatggagatgtgtgccgcaatatgacgctgcctatttatgtaatagtaccgcgccttttgacctgtccaacaactttagctggtcccttctcagttgagttcaaagttgccattgttataagcttc

SEQ ID NO: 53865 - DNA, 238 bp, Glycine max
caaccagtgagtggagttttggatcttctgtcaaaaacaaccgaaggtgctaatgctatgagaatgaaaattgcatctgctataacatctgatgaacaacttctcaggaggagactgcctcgtgttataggtggtgataatctgctaaaactatacgatgagtacaaagctcaaggacaggtcatactgcagttggcagaatcaggttcattttttggtcaggttgatctgttcaagg

SEQ ID NO: 53866 - DNA, 238 bp, Glycine max
gggaaactaggagatatggtgttattgaatgtgatcctctggtgcaaaatggccttgaaaagtctgcaaggcacatggtcatcccctatatgccaatgttggtgccacctataaactggacagggtatgacaaaggagcatacttgtttttgccatcgtatgttatgagagtacatggagcaaagcagcaacgtgaagcagttaagagggctcccaagagtcaacttgatcctgtttt

SEQ ID NO: 53867 - DNA, 246 bp, Glycine max
cactgttaaaatggctgtacagtacatgcggagggttattgagaagaaggcaaagtttgatattatgaatctgaactgtttgcaggttgcaccgaagacattcattcctgttttatttggacatgcaagcgatgacaaattcattcagcctcaccattctgatctcatctctgaagcctatgcaggtgacaaaaatgtcataaaatttgacggtgatcacaactcgtctcgaccacaattctttta

SEQ ID NO: 53868 - DNA, 246 bp, Glycine max
cgcttcttgtgggtgctgctttgaaccttgtgggatatggctgggtctggcttgttgtcacttctcaagtccctgtcttgcctctctgggctatgtgtgctcttatctttgtgggaacaaatggtgaaacctacttcaatacagtttctctggtgtcttgtgtacaaaatttccccaaaagccggggtcctgtggtgggaattctaaagggctttgctgggttgagtggtgcaatcttgactcaga

SEQ ID NO: 53869 - DNA, 235 bp, Glycine max
gcctgttatccttatggtgatggttcagcaatgttgacggtgagtgatgatgaattctgggagggagtttcgcctgtggaatttggcgatttgcctgctctgcaagatgctgtaactgttgtgggatatccaattgggggtgacacaatctctgtgacaagtggtgttgtttcacgcatggagatactctcttatgttcatggttcaacggaacttctgggactgcagatagatg

SEQ ID NO: 53870 - DNA, 278 bp, Glycine max
gtaaattatgtggccgacaagctatgcttgatatgcttaagaaggctgagagagaaaaactcagtcagttacaatgaaaatgctttccttgtcacaaccaaatccatgatgtatctattaagaaagccaccaaagcattttgaagcactggtggaagagcactttagaaaatgctcccaacatatacttcttgcttgcaaggcttatcttgaaggagcttctattggatgtgcttttggtagtggaaaaactggacatgaaaaccagaaggggacttc

SEQ ID NO: 53871 - DNA, 275 bp, Glycine max
ctcgagccgaatcggctcgaggttaaacttcctttagagggtcaactagatactttatctttcaagaatatattagccaaatttcctagcgaatgcaatgctgctgcaacaattagcgacatctctcctcatttgtgcttcatatgtctattgcatttggcaaatgagaaaggattgagcattcaaaactcctccaacttggatgatcttgccatacggtttccacaagttgctgattctataaggggaacagtttagattcctcttcactcaat

SEQ ID NO: 53872 - DNA, 248 bp, Glycine max
caacagttctgtatcctacccttggagggaacatacatacttttagggcaataactccctgtgcaatctttgatgtgttgtctccaccttattcctcagaacatggaagacactgcacttacttccggaaatcgcagaggaaggatcttccaggtaatcttcagttgaatggagttacagtttctgatgtgacctggtgggaggatttccaacttcccgatgtttgtgtgatccgtagagggatttac

SEQ ID NO: 53873 - DNA, 125 bp, Glycine max
gtgagctcaaaagaattttatggtgagggatatgatgatagtgacaagagaatccctgacatgaccataataaacaggcagcttggatggaatcccaagacttcactttgggacctgcttgagtc

SEQ ID NO: 53874 - DNA, 253 bp, Glycine max
atggccactcttcttcttcccacgctcctccttctcatacccttcgccaccctcgtctccgcccgccctcacctcgccggagactttctccgactgccctccgaaaccgataacgatgacaacgtccagggcacccgctgggccgtcctcctcgccggttccaatggctactggaattacagacatcaggctgatgtttgtcacgcctatcaaatactaaggaaaggtggcctgaaagaagaaaatattattg

SEQ ID NO: 53875 - DNA, 251 bp, Glycine max
caagattgacaggcgatccggcaaagagcttgagaaggagcccaagtttttgaagaacggtgatgctggttttgttaagatgattccaaccaaacccatggttgttgaaactttctccgagtatcctccacttggtaggtttgctgttagggacatgcgtcaaactgttgctgtgggagtcatcaagaacgttgagaagaaggatcctaccggagccaaggtcaccaaggctgcccagaagaagaagtgaa

SEQ ID NO: 53876 - DNA, 253 bp, Glycine max
gagaagcattagcaaaagcaagaagaactagtctaagcagaaatggcctcttcagtgatggcatctgtggccctcaaacctgcccctttcactgttgagaagtcctcagttagaggccttccctccctctcaaggaactcctcttcattcagagttgtggccagtggtggcaagaagatcaagactgacaagccttatggaattaatggtggcatggctttgagggaaggagttgatgcatctggcaggaaag

SEQ ID NO: 53877 - DNA, 271 bp, Glycine max
cgcataattagggcccatgctcggttcggtaacaaatgggtcagcatagcccgcctcctctcggtccgtaccgataacgtcatcaagaatcactggaagtcgctgtgataactactagtgtagttataatactctttctcgccgttaagaatttggaaatatcttcatttaccatggattggtgtcaaaatcaaaacggaagttttaaaagtacagatgcactatgtattgcggcagaagctgatgaggaggaacttgatttcacaaaggt

SEQ ID NO: 53878 - DNA, 275 bp, Glycine max
aagtgacaagaccattgacggaagaggagttgatgtctaccttgctggtggggctggtattaccatccagttcatcaagaatgtgatcatccatggagtcaagatttttgacattcaggttggtaatggtggacttattatagattctgagaaccactatggtttgaggactatgagtgatggagatggcatttccatctttggctctagcaatatttggattgaccatgtttccatgagaaaatgcaaagatggattgatagatgctattcagg

SEQ ID NO: 53879 - DNA, 267 bp, Glycine max
cttaggtttgtcccacaagtagtgatgctaagcctatgtttgacatgaatttcatactacttatctatatggcactctcagttgctggttcattttgtgttttgctgcgagccatgatggtgttaaatgctggactttggacagcacagacacttttcacaaagatgttgcatagtgtgctccgtgcccccatggcatgttttgattctacaccaactggaagaatattgaacagggcttccacagatcaaagtgtgctagacttgg

SEQ ID NO: 53880 - DNA, 268 bp, Glycine max
tacagatcaggatatggagaagggcaggaagggcagtggatagagccactgctgagcatctctttgaggtcatcaactcaagggaggatgtgttgaggaggttgatccgccgttgcgcttatctcaagtatgttgaggcaaggcttggtgataggacactctttgcagatgagattctcaaagatggtttttgcttgaacatgattgaaacaccactttgtcctttgaaggttgtcacaaacttgcaagaagctgtttgggatgctga

SEQ ID NO: 53881 - DNA, 267 bp, Glycine max
gtcagcccggtctctgttgcacacttctcgcagtacaagctaactatgttactactcaagcgacttgaaaacctaggcttccaaatatgtgcgcctgaaagtttggaaggaaatgaacagtcttgtgagaaaaaaataatgatgggccatgagtgtgtttccattgatgccagcaatgactttgtaacagtaactgcatcttctatcattaaagggaagcgtgtagaacagaacattcactgtaacatccttattggtacagatggt

SEQ ID NO: 53882 - DNA, 248 bp, Glycine max
ggagattcatgtggtggaaactcaacagtggtaagaaagcctctgtgcttagatgttgaaggacctttcaaatatgggatctaccaatgggcacttcctgtcatatccagcaactctttggctgtaaagattctttatcccattttttggggtttgatgaccctcagcactttcggaaatgatcttgaacccacaagccactggctagaagtgattttcagtatatgcatagtactcagtggactatt

SEQ ID NO: 53883 - DNA, 257 bp, Glycine max
atgctatgctggatctgactgctcccagtttttatctgattgtcctgccaacgctgatggtggtgatccatattttatggagccattttggatgcaacatgcagcaagtagtgccattctagtatcaggatggcatagaatgagttattcttatagcgatggatcagtcatctcacaactattggttgagtacataaaaaaagttcatggcatcgttgggaatgcaatcaccgaaggaaagtacatcgtatttggaa

SEQ ID NO: 53884 - DNA, 247 bp, Glycine max
gagaaatgtttgcttattatcatcaaatggtttacaaacgagtttatctgaaatttctcaagatcaacattattggagcacttgttctactctttgcatttctcttcctcagttgtgtgtatgcacaagacacaacaacccttgtgcctgcaatcataacttttggtgattctgctgtggatgtagggaacaatgactatcttcccacccttttcaaggctgattaccctccttatgggagggactt

SEQ ID NO: 53885 - DNA, 250 bp, Glycine max
gaacgatcctcgtcttctaaaggaagatactcttaataatgaactgagttcatcaagaagagatatgcaattatctgtaagggatgcacttaactcaaagaaagacgagcctcagaaagattcagatgctggtagcatggcatgtcttaatttcagtgatgacgatgaagcagattttgatgcaagaatgcgcatgcaaatactcaaaaagaggaaggagttgggtgatctccctcccaagccaaagttg

SEQ ID NO: 53886 - DNA, 260 bp, Glycine max
ttttggaacagaagtctggattatacacgtccccatttggtagaattgatgaattcaacaggggttctcatttcaaatttaaccttcttgaattctccattttggacaatccatcctgtatattgcaggtttgtcccccactgaaagattgagtttatatattattccttgttttccgtagttcaagtacttccattgcctttttaaaactgtgcaatagaggagctttcatgagtagggggagatttgagactgttttt

SEQ ID NO: 53887 - DNA, 245 bp, Glycine max
caacttctgctacttcctactccaaccgcacttctgctccgcaattatcatgggcaaggtcaagatcggaatcaacggatttggaagaattggccgtttggtagccagagtggctctgcagagagacgatgttgaactcgttgccgttaacgaccctttcatcaccaccgattacatgacatacatgtttaaatacgacagtgttcatggacactggaagcatcacgatgtcacgttaaggacga

SEQ ID NO: 53888 - DNA, 247 bp, Glycine max
cgcgactactatgtcaacataagaaaagctatgctagctgggtatttcatgcaggtagctcatctggagcgtacaggacactacttgacagtgaaagacaaccaggtggtgcatttgcatccatccaattgcctggatcacaagcctgaatgggtcatttataatgaatatgttcttaccagtcggaattttattcgtactgttacagacatacgtggggaatggttggttgatgtgcaccacatta

SEQ ID NO: 53889 - DNA, 250 bp, Glycine max
gttaaagaggaagttgcaaatctttaccttgggtataggtggtgttggtctggtttcagcttatgtttcttattcccctgagattgcagctagctttggtgctggctttcttggttctttggcgtatattcgtatgctgggaagtagcgtggactcgctaaggactgatggtgcaaagggatttgtcaagggagcaattgggcagccaagattactggttcctgttgttttggtcatggtctataaccgc

SEQ ID NO: 53890 - DNA, 255 bp, Glycine max
ggagatcatctgtatgaagcatgggaacacatattaacttgcctctcccgaattgagcatttgcaactgttaggtgagggtgccccaagtgatgcaaccttcttcacttcaactaatcttgaaatggaggagaaagcactgaaaacattaggtttctcttcttttaagaaaggaacactccagaatccagccatggtggctgttgttcgtggtagttcatatgacagtacaagtattggggtcaatgcttctgca

SEQ ID NO: 53891 - DNA, 249 bp, Glycine max
catgtacacgttcatgttcaattttgcgaaagagagaccagagttgggccgggatttgtttctggcatggactggatgggtatgtgtctggactgcactgttgctattcttgtttgccatcttaggggcttgctctataatcaacaggtttacccgtattgcaggagagttgtttggcatgcttattgcaatgctcttcatgcagcaagctatcaaaggactcgtggatgagtttcgcataccagagag

SEQ ID NO: 53892 - DNA, 247 bp, Glycine max
atcaaatcaatggtttaaatttgacgatgaacgagtatcaaaagaagatccaaagagggctttagaagaacagtatggtggtgaagaagagttacctcgtataaatcctggcttcaaccactctccttttaaatttacaaaacactcgaatgcatatatgcttgtctatgtacgtgagagtgacaaggataaaataatttgtaatgtggatgagaaggacattgctgaacaccttagaatgagatta

SEQ ID NO: 53893 - DNA, 282 bp, Glycine max
attaatgtgcacaaggatctttgttggttcctggaacattggaggcattacaccacccaagaacttggacatggaagactggcttgacacacaaaataattcagcagatatatatgttctggggttccaagaaattgtaccactaaatgcagcaaatgtactaggtccccaaaacagaaaagtttctatgaaatggaattctctaattggggcagcccttaacaatagagacaccaacaaaggttgttgaagacaataaaacagctgaacctcagaagatat

SEQ ID NO: 53894 - DNA, 279 bp, Glycine max
gcgagacagaggaacccacggttccagaaaacctcttgtcgctgaactcaagtataacattgatgagcgcacgcgctttcttggccgcgtgaggagtaccgtccgtcagaagcgaatacagcgaacgcataaccgaagcctccttggccagaacaccggtcacttccgcaccaacattaacacagagagccagcaaaatggacgcacagtactccttccctgagcgcgaagtagcagattgcaaaatcttagccaccaaaggcaacgcctctgctcgta

SEQ ID NO: 53895 - DNA, 272 bp, Glycine max
tctcgagccgaatcggctcgagagaagaaacttaatcgatcatcacttcacttcactaatacatcatggcagacgagacccagaacaagtatgagagctctgatgttgaggtccaggatcgtggtgtttttgactttctcggtaagaaaaaggatgaagaagacaagcctcatcctcaggaggaggtcatcgccaccgagtttcacaaagtcactgtctcagaccatggagagaacaagcacagcctcttgagacaagcttcaccgatctga

SEQ ID NO: 53896 - DNA, 122 bp, Glycine max
gttaaatttacctgcgaatcttgggttcactccaagtatgataaccctgctaagagagtgtttttctccaacaagtcatatttgccatctgaaacaccagaaggagtgaagaggttaagaga

SEQ ID NO: 53897 - DNA, 265 bp, Glycine max
gatcaaggtcagtgatgcggagcttgagttcctcacaggaagtgacaagattgatgatgaatctgctttgtcattgtggcaccccaatttgaagttgctccttgtcactcttggggaacatggttccagatactacaccaagagtttcaaaggatcggtagatgctttccatgtcaatacagttgatacaactggtgccggtgattcctttgttggtgctttattgccaagattgtcgatgatcagtccatacttgaagatgaac

SEQ ID NO: 53898 - DNA, 267 bp, Glycine max
  unsure (1)..(267): unsure at all n locations
gggagacgtgagaggcgttcgtatcaagaactgctcattgactggcacaaccaatggccttagaatcaaggcatggccagagaggtatccaggtgcagcgtcagatgtaagcttcagtgacattatcatgaaagatgtcaaaaatcctatcatcattgaccaagagtatgaatgttatccagactgcaaaaagaagccgtcacttgtanagctccaaaatattcattctcaaatataaggggaactacaatttcaccacttgcagtg

SEQ ID NO: 53899 - DNA, 265 bp, Glycine max
atttctcaagaaaatccattggctctacttgattgtggatgaagggcatcgattgaagaatcatgagtgtgctctagcaagaaccctggactctggctatcacattcaacgaagactgctgttgactggtaccccaattcagaacagtttgcaggaattatggtccctgctcaattttctccttccaaacattttcaattcagttcagaatttcgaggactggttaatgctccctttgcagaccgagtggatgtctctctaactg

SEQ ID NO: 53900 - DNA, 259 bp, Glycine max
attaggtcaccaccacgatctataatcttatccttgggaaaatatactgtgatcatcatgggaacatggatatacgtggtaatcgtacatattcatgcagactcaagttcaaagagcagacgatccttgatcgaaatcctcgccaggtaagagttattggttattagtggcaagtcacaattctttgcaacctgttctttatattattctatttatcttcctactccttaaatttcgcctgtctaaattccaaagtaac

SEQ ID NO: 53901 - DNA, 258 bp, Glycine max
gaattagctgatatagacgtttttgttagtacagtagatcctatgaaagaacctccacttataactgcaaatacagtactatccatccttgctgtagattatccagtggagaaagtttcatgttatgtctcagatgatggtgcagctatgctgacatttgaagccatttcagagacttcagagtttgcaagaaagtgggttccgttctgtaagaagttaacattgaacctcgggctcctgagtggtattttgctcaaa

SEQ ID NO: 53902 - DNA, 256 bp, Glycine max
atcggataagctatttgagcctgaattattcaagcagattgattctgttatcaaggcatgctcaaatccctcaataatacgctcactgttcagtgctactttacctgattttgttgaagatcaagctcgagaacttatgcatgatgctgttcgtgtaattgttggcagaaagaatatggcttctgaaacaataaagcaaaaattggtttttactggaatgaagaaggaaaacttctagcaattcgtcaaagctttg

SEQ ID NO: 53903 - DNA, 258 bp, Glycine max
ttcgacccctccaagcgcaaaggatacttatcgtgggatgactattttatggcaattgcgtttttgtcagctgagaggtccaaagaccctaataggcaggttggggcttgtttggtgagtcaagatggtgtaattcttggaattggttataatggatttccaagaggttgttctgatgacaagctaccctgggcaaagaaatccaggactgggaatccttggagacaaagtacccttatgtttgtcatgcagaagtaa

SEQ ID NO: 53904 - DNA, 252 bp, Glycine max
tcgcttcttcgccatgggagaagacttcaacaataacgatcctctcatccgcaaccaaaacgccgccgttcaggctcgcgccaaggaccagaaccgcgccaacgcccttcagctcaagctgattggacagagtcaccctactggtctcacagcgaatttgttgaggctctttgagcctaggcctgccttggactataagcctcctccggagaaaagaaatgccatcgctaataggcacaaaaaagagcaaga

SEQ ID NO: 53905 - DNA, 259 bp, Glycine max
  unsure (1)..(259): unsure at all n locations
gttcctctcgaggaaattatgaaggataagaattttgatcttgtaacaaaagaaatatttggaccctttcaggttatcacggactacaaaaacagtcaactatcagttgtattggatgctgtggaaagaatgcataaccatttaacggctgctgtagtttcaaatgattctgaggtgctccggttgcccnggctcttagaccagcataagtagtaccattactgaattgccaacaacttcctgtaaaaacaaaggatca

SEQ ID NO: 53906 - DNA, 253 bp, Glycine max
gtcgatggagattagaaacgtgttgggtgagagtgtgagagaagtgaaagaggaagatctgcagaaacttccttatctgaaagctgtgattttggaaggcttgaggcgacacccgccaggacactttgttttgccgcatgcgtcactgaggacgtagtttttaatgattatttggtccctaagaatgggacggtgaatttcatggtggctgagatggggtgggaccctaaggtatgggaggatccaatggcat

SEQ ID NO: 53907 - DNA, 256 bp, Glycine max
cagagagtgatttcagtgagtgatcggtgttcacttgatctcatcataatcgtcagcgtcaattgaagaagatgccgatcagaaacatcgccgtcggaaggcctgaagaggcgactcaccccgacacgttgaaggcggtttggctgagttcatctcaaccttcatcttcgtgttcgccggctcaggctccggcatcgcctacaacaagctcaccgacaacggcgctgccacccctgccggcttcatctccgcctcc

SEQ ID NO: 53908 - DNA, 252 bp, Glycine max
gaacttcctttatcaccagagcaaggaccagataagagaggccgtcaaactcctcgatctcgataacgtccattccctgttcgatgaattgattcagagagcttccaagtgtgttgcttctccctcttccaaaaaagttactctaacgctaaagggttctgcttcctcggttcctaccagcttgtccaagaattcggttcctgtgggcggttttgataagccgccacttgcccctgctgctactacttctag

SEQ ID NO: 53909 - DNA, 249 bp, Glycine max
cttaatacagcctatgactcatggcaggtccaaacaagcttagctccttcatcagcagatccccatggcttttggcatgattgtagattaaatcatgctaaatgtacttcttcacaaatccaatatttgcaagtggtttgacatatgagaaatagctttcacaagaagtataaatatgtcttcagtaaattactgtaacaagtcatttccctgtatctaatgcaggattcaggaatcaaatgctgaatg

SEQ ID NO: 53910 - DNA, 246 bp, Glycine max
tggagagcttcacttggcagtgagattcacttgcaccgcatgggttaacatggtagcccagtatggtaggcctttactgcccaaaatgcattatgtccaaccaatacccgtcaggcacatagattggctcgccaccaggtcatgcagattgtggcagctcgcctatctagagccgagccaccccttaggcgtgaagcagttgagtacatgctcgacgttgactaccacatgtggagtctaaggaga

SEQ ID NO: 53911 - DNA, 247 bp, Glycine max
aatagattctttccatcagtttgctggggtgaagtggctgcgggagaagcctttgtctaagtttgaagatgtgcaatggctccttatacacaaggcagaagaggagaaactcattcaagttactattaactgcctgagcagtatcttaataagttaatagaccaattcaatgaatattatattagtgacagtgttagcagatctgctcagctgtggaatgatcagaggaagttgatactgcatgatg

SEQ ID NO: 53912 - DNA, 238 bp, Glycine max
gtaaagagaaatgaatgaaatgatatagttgagtttggagcgaaacagaagagaagaaagatccaccgatgaagaaaaataaagagaaagagaaagagaagtgcgtggctgtgacaagccctgtgagtggcgaagacagcgatgataagcaacgccctgcctttccctcggtcagattctcttcccgcaacgcttcttccaaatacgatttcgtcaaggtgaaggtgtggttgggtga

SEQ ID NO: 53913 - DNA, 243 bp, Glycine max
ccttccccctccacccacccagcatatctctccatgccgatggtacccagccacgggtggaagctgccatggttaatgccagaatacgcaagcctgtcagagcaaaccaagccaaagttgggtacattgggcctgctactgatttcaactatgaccacaaacatcttggtactggccctcaaacacttctcgaaattgctgagggtcgccacccatttttcaagacactctcgaatgccaaaa

SEQ ID NO: 53914 - DNA, 241 bp, Glycine max
gggttctgagctcatacactgcaatgctacctacgatagaaagtctcttctcatcaatggttagaggagaatcctcatctcgggctccattcactatcccagaagcacccctaaggtttgtgtttcattttcttcactctttatgtgtttcaatcttaaaatgtgtttcaagctttgtgttgttttgtttgcttcaaatgtgggaggatctaattcggaaggccaaacacggaggacttga

SEQ ID NO: 53915 - DNA, 242 bp, Glycine max
gtggaacctctctctctctctctctctctctgcggaaaccggaatatctcagttctctgatcagatccatccgacgtcgtttcagtgataatggctccgttcagcggcgatgagacggcaccgtttttcggcttccttagagccgcagctccttttcttttcggtcaatgctagcggtcaattttgtggagtggctgagatgaccggacgtgttgatttcaataaaagtatggatttctggc

SEQ ID NO: 53916 - DNA, 239 bp, Glycine max
tttgtcataaaaatgttgtttttaacaacatagactagtattaataatgtgactgaagttgtgtttctgggtcaactaaggcatccacatctcgtgaagctgattggatattgctgtgaagaagaacacaggcttctggtatatgagtatttaccacgaggcagcttagagaatcaactatttagaagatatacggcatcgttaccatggtcaacaagaatgaaaattgcagctggagc

SEQ ID NO: 53917 - DNA, 243 bp, Glycine max
ttcagattggtcaagctccttttactccccgcaacaaaacaccacctagttgcagattttttcttcttcaaaaatttgtttatctttatcctaatttgatttggctttaaggttttccattatagcggttttctgaaagaatcccctgggatcagcaacgtctcatcttcgccggaaagcagctcgaggacggccgtaccctcgccgactacaacatccagaaggagtcaacccttcaccttg

SEQ ID NO: 53918 - DNA, 243 bp, Glycine max
caggggaaaacagtattcacttcctatggtactacgttgtatcagctatttcttttatttaccacatccaataatccagatgtttgggttcctgcatacaagtcgtcacgttggtattgcctgtttttcgtactctttgtgctggtgggagtttactttgttacaaacttgatccttgctagtgaagccgcctcatgccgtttattcccccttagattccactggcaggatagatgatcctga

SEQ ID NO: 53919 - DNA, 235 bp, Glycine max
ggaggggatttaatctgttgtgatggctgtccatcaacatttcatcagacatgcttggatatacagatgcttcctcctggtgaatggcattgtcaaaatttacaggtgcaatttggacaatgccattcaccaggaggaagcatctatatatccaagcagctctgatgaatggcattgtccaaattgcacctgtaaattttgtggcatagccagtggaacttctgataaagatgat

SEQ ID NO: 53920 - DNA, 241 bp, Glycine max
ccttgcttattgaaggtaaccatgttcgattaagtggtcaggatgttgaaagaggaacttttagtcaccgccatgctgtagttcacgatcagacaacaggagagaaatattgtcccctggacaatgttataatgaaccaagatgaagagatgtttaccgttagcaatagttcactttctgagattggggacctaaaacggattatccaaacccaattgggaatcccggttcacaaccaaac

SEQ ID NO: 53921 - DNA, 176 bp, Glycine max
gaaatcttaagacttccttttgcgctgatcaatcaaggtcttctcaggcaaatgatgttcgcaagcaaatcgatggcagcgctgttccagtacatacagaacgttagttatcgccgcggatacgtactcatcatgctggtgggagtatactttgttacaaacttgatccttgctgt

SEQ ID NO: 53922 - DNA, 260 bp, Glycine max
ccgacgtctccactttcaacatcttaattagggctttgtgcaaggcccatcagctccggcccgcgattcttatgcttgaggacatgcccaactacgggctcaggcccgacgaaaaaacgttcaccacacttatgcaggggtttatagaagaggctgacgtggaaggcgcgctgaggattaaggaactcatggtggagtctgggtgcgagctcacgagtgtttcggttaatgttttggtgaatgggctttgcaaagagggg

SEQ ID NO: 53923 - DNA, 261 bp, Glycine max
cacaaaacttgctatagcagtaagctataactcatttgaggctctgtgagaattgagaaatggctaaagatgttgaggttcaagagcaaggaggagagtactctgccaaagactaccatgaccctcctccagcacctttgttcgacccagaggagctcacacagtggtccttctatagagccctcatcgctgagttcatagcaacccttctcttcctttatgtcactgtgctcaccattattggctacaaaaggcagactg

SEQ ID NO: 53924 - DNA, 257 bp, Glycine max
atttactgttgccctgtgttattcttattggattttcatagtgggtacattgattattctgatctgctattgagaacttttgggggatgtaactgggaaggtattaacatactctgctcaagacagcatatacaaggtatttgacctaaaaaactatacaatgctgtactctatttctgataaaaatgtccaagagattaagatcaggtaatttttcttaccgtgcttgtattatttttacttttagaaaacacttc

SEQ ID NO: 53925 - DNA, 254 bp, Glycine max
gaaactcacagaagaaacactgacagagaagagacagttgcagcaactcctttcaatatgtgcagctgaaaggacaacagaagagacggccatgaatgaaactagctccagatctcaccaaattcttagattgacagttgaaagtaatcctcgtgattatgcagacaccgcaagatccggagctctatttgccagtgtgaattttgttgatctagcaggaagtgagcgtgcttctcaagcaatgtcagcaggca

SEQ ID NO: 53926 - DNA, 250 bp, Glycine max
tgttttgttaaagttcacttagaaatccttcgccctctcataattttatctccaatggcattgggaagcataatgcacttccttcaagataagaccattttagtcactggtgccactggcttcctcgcaaaaatttttgtggaaaaaatattgagagttcaaccacatgtgaagaacctttaccttcttttgagagccagagatactgactctgctactcaacgtttacatactgagatcatagggcagg

SEQ ID NO: 53927 - DNA, 254 bp, Glycine max
ggtttggttgggggtaaagagaatgaagattcagtgtaacgtgtgtgaggctgcggaggccaaggttctgtgttgtgctgacgaggctgcgctgtgttgggagtgtgatgagaaggttcatgcggctaacaagcttgccagcaagcaccagagagtgcctctttctacctcttcctctcatatgcccaaatgtgacatttgtcaggaagcattaggctattttttctgtctagaagatcgggctctgctctgca

SEQ ID NO: 53928 - DNA, 253 bp, Glycine max
ctgtaatgtgatgtaggacatctcctattttgataaagaaagagttggtgacttgacaagcagacttgcagcagattgtcaacgactatcccatgttataggaaatgatcttcagctgatattacgcaactcttgtcagggaactggagcaataattaatttgatggctttatcttggcctctggcattatctgccttggtgatttgttctattttatctgcaattttcctggtttatggccagtatcaaaga

SEQ ID NO: 53929 - DNA, 244 bp, Glycine max
ctccaagagaaacttgtatctgacctgttggatattggggagatttcttatgctccctcaaggctgaaagaattggaattctgttctgaggagtttgaaaattatgttccttgctttaatgtttctgacaatctagctcttggtttttctgatggaaatgagtttgaccggcaatgtcgtcatgagctcaggcaaaattgtttagttctctctccaccaaattacaagattcctcttaggtggc

SEQ ID NO: 53930 - DNA, 251 bp, Glycine max
ttcctatggctaacaagcaagtagtacatctttgggagtgcgacttatggagggagaggcgaatttgtccaagcttatgctcacttccccgaccgattgaaagagaatattcttccatggcctccaagcggattctaaaggaactcaaggacctctagaaagaccctccaacctcttgcagttccggtcccgtagcggaacatatgtttcattggcaagcaactaaaatggatcccccttatagcccttat

SEQ ID NO: 53931 - DNA, 244 bp, Glycine max
tggtaatatgacaacagatgtgacctttagtttcttatgttctgtgacagaatctaaggtcaaacctgacgatgtggaagcttggaaccctaccccctgctttgattgcattcaaaggtcatgttcacccgattggcccctcttggcacatgcttggcttgggttatcagaacaaaactgacattgagagtgtgaggaaggctgctgttattcatttcaatggccagtcaaaaccgtggttgca

SEQ ID NO: 53932 - DNA, 247 bp, Glycine max
atcgcgaggtggttgagagacgcgtttttacagttacgggcacaagagctgatgaggagacaattgacagattaattgaaactggagatagtgaacaaattttccagaaggctattcaggaacaaggacgaggccagataatggacaccttggctgaaatacaagagcgacatgaagcagttagagatgttgagagaaaacttcttgatttacaacagatatttctggatattgcggtgttagtcga

SEQ ID NO: 53933 - DNA, 251 bp, Glycine max
tgatcttcttgaagatctaatatgtttcattgatgaaacttgcgatgagggtgccatccttgtatttctacctggaatgtctgaaataaactatttacatgataagttggtggcatcttcccaatttggtgggccatcttctgaatgggttattcctttgcattcagcagtagcatcaagtgaacagaaaagggtatttttacgtcctccaggaaatatacgtaaggtcgttatagcgacaaatatagcag

SEQ ID NO: 53934 - DNA, 267 bp, Glycine max
gaaactctttatatatttattattgttactgacccaaacaaactcaacaaaaccatgatcccaaacgttgaaatccctcactgggacgccgacggaggaggaccactctctccgttcatctcttcttcttccaatgctgacaagtgctcattattattctcctccgaccatttccgaatgttccagttcaaggtccggatctgtccacgtggcaggtcccacgattggacggagtgtccctacgcccaccctgccgagaaggctcgc

SEQ ID NO: 53935 - DNA, 253 bp, Glycine max
catcaacttgtcatcttataattgaattgtgtatgtaacaaaaaaaataaaattcagaagagaagagggttgtgagtgtgactccgctgagggatatgacgccagagagggttttcgggaagatgggacatttgcagaagttgttggatcggtttttggcttgtaggcctactgggttggctaagaatagcaggatggttttgattgcgctgtatcctgtggttaaggagagttttcagttgtatgctgatat

SEQ ID NO: 53936 - DNA, 251 bp, Glycine max
attgaatctcagaattctctaaaagagatctttttctgctctttgaagaaagaagggtctttgcttgattttggagatgtctctgctctcagatctcatcaaccttaacctctccgataccaccgagaaggtgatcgcagagtacatatggatcggtggatcaggaatggacctgaggagcaaagcaaggactctcccaggaccagttagcgacccttcagagcttcccaagtggaactatgatggttcca

SEQ ID NO: 53937 - DNA, 250 bp, Glycine max
tggactacggttttactgccgatatggaaaccgagctggataatgtttctggtggattaactgaatggaaaggcctccttagagactattggacacgatttaaatcatattgtgagcgtacatctaatgttcatattcatcaggttgagaagatgttggaaaaaaaatttggcgattatttatttgcttctctcccagatcagagccgggtgtgtccaagttgtatggaaggcacacttatttttaaagt

SEQ ID NO: 53938 - DNA, 246 bp, Glycine max
gtcgtccgagatcgaggttgtcgaggaggtgcagtcccgcgacgagcaatcggcggcgtctggcggcggcggcgatggcatgggggcggaggagagcctccggaacgacgtgtacacggcggcgtcgtacggggatttggagaaactgcagagattggtggagcaagagggttgccccgtcaccgagcccgacgggttgggatactacgcgcttcagtgggctgctctcaacaatcgcactgccgc

SEQ ID NO: 53939 - DNA, 193 bp, Glycine max
attcgcttgattacgtttggcgtatccagtttcgatccagctggattgtccttgtaactaggaagatccagctggatcgaaagtggattcgcttgattacgtttggcgtatcatcttgatgtttggtgcagtcccggctgctcttacctactattggcgaatgagaatgccagagacggctcgctacacggcc

SEQ ID NO: 53940 - DNA, 268 bp, Glycine max
agagaatgatgatgaagtctgctatgtgtgcagtggtggttgtagcacttcttcttctggcggaggtggggcccatggctgaggctgtgacatgcaccccaacagagttgagtccgtgtcttccagcaatcacttccggtgctaaaccttccaatgcttgttgcacgaagctgaagcagcaaaaaccatgcttatgtggctacctcaaaaacgctagcttgaagcagtatgttaactctcctaatgcccgaaaaaccgttgcttcttg

SEQ ID NO: 53941 - DNA, 268 bp, Glycine max
cagaaacgtatgtcggttcgcgatcttgccagcaaatttgagaagggtttggcagctgctgctaagttgtctgaagaggctagactcagagaagcagcttctctggaaaagcatgttcttttgaagaagcttcgagatgcactgcaatccttaaaagggagagtggcaggaagaaacaaggatgatgtagcggaagctattgctatggttgaagctctagcagttcaattgactcaaagggaaggggaattaatacaagagaagtctg

SEQ ID NO: 53942 - DNA, 275 bp, Glycine max
gcaagggccatacaatggggttggactctgcacaccgacctcaaacttgtgtccgaacagagacctttacgcgttttgggatccattccatccatcagagaaagctagtcgaatcatagtccaacagatcctcagaggcaccactgagtacatgcaccccatgaatctcagcactatcatggccatcgattccaagacttgatcaatgcatcatctacaataaccttccttcgtattctatctatgtgtgtgccccctaattaagtttatttcat

SEQ ID NO: 53943 - DNA, 203 bp, Glycine max
gcataattgaatcgaattgaggagaatgacgatgaccaccatacaatcgacgccaggaagctcagggtatttggatttgtttcctgagcgcaaaatgtcatttttcaagagtccttatattctgggactcagtgctgtggctggcattggaggcatgctttttggctacgacacaggtgtgatatcaggagcacttctatata

SEQ ID NO: 53944 - DNA, 249 bp, Glycine max
cagttgaggagcaacgattatgaatccatgtgagactatgtgggctaggagctttgagtagtagaatatgcaggaaaagttgcggattggatagctgaggagcttcaacatttgcttccagagaacgttgaagccaatttggacaaactggttctatcaggtcacagtaggggtgggaaaactgtatttgctgtggctcttggtcatgcaaaaactaatctcaagttttcagcacttgtaggcacatct

SEQ ID NO: 53945 - DNA, 254 bp, Glycine max
caaatatccttcagtagagtccttgattgagaaggatttgagtgtggacaaattagagatctcgagaagattgacacatccacatccacatcctcatgaagatggcaacaggagaaagattttagaaagacttgattctgattctcagaagttgacaaaccttgaaattaccgtgcaagatttgatgagcacgatagaaattacagagagcacaaagggaaaagatagtgagtatgataccgtgaaaggacagc

SEQ ID NO: 53946 - DNA, 245 bp, Glycine max
ggtttagagaaggtgggaagcactggacggatgcagttcccattgggaacggacgcttgggagccatggtctgcggccacgtccattccgaaaccatacacctcaatgaggacacgctctggactgggacacccgcagactacactaattccaaggctccaccagcactttctcacgttagaaacctcgttcaccgacaacactatccccaagccactgctgcttcttctgccttaacaggaaat

SEQ ID NO: 53947 - DNA, 246 bp, Glycine max
atccaaaaggcatttggcacagcaggatcacagtatgttcaatgggctgcaaaaatggcggtgggccttaacacaggcgttccatgggttatgtgcaagcaaactgatgctcctgatcctgtgatcaacacatgcaacggcatgagatgcggagaaacttttactggaccaaattcccccaataaacctgccttgtggactgagaactggacatctttctatcacagtgtatggtggactgccata

SEQ ID NO: 53948 - DNA, 245 bp, Glycine max
gagtttttgaagtacctcgaccagttcgggaagactaaggtacacatcttggggtgcccgtacttcggacaccccaacccacctgccccttgtgcctgtcctcttaaacaggcttggggcagtctggacgccctaattggacgactcagggcggccttcgaagaaaatggaggccgtccagagtctaatccatttgcaactagggctgtccgaatttacctcagagagataagagaaggtcaggc

SEQ ID NO: 53949 - DNA, 244 bp, Glycine max
tcacaactgagagaaatagcaaatgggttggagaagagtggccacagtttcttatgggtagtgaagaggccaacacaagacgaaaaaacaaagcagattcacgacacaacaacaacaacaacaacaatggatttcgatttgagttcggtgttgccaagtgggttcatcgagagaaccaaggacaggggcctggtggtgagctcgtgggccccacaagtggaggtgctgagccgcggctcggtgg

SEQ ID NO: 53950 - DNA, 241 bp, Glycine max
gctgcccactggacaggagacaatgctgctacatggaatgatttggcatactcaatccctgcgatattaaattctggaatctttggaattccaatggttggagcagatatatgtggtttcggaggaaatacaactgaagaactttgccggcgctggatccagttgggggctttttaccccttcgcaagagatcattcagacaagaactccaataggcaagagctttatctttgggactccg

SEQ ID NO: 53951 - DNA, 315 bp, Glycine max
gatttacctgttgaaggtttggtgtgttgatcaaaaaggattgctacatgatattaatgaaatcctgtacaaccttgaacttattattcagtgataaagaacatgtctaacacccttccatctggggttggcatcgctttgactctctgaataataagttcaaggttgcacaggatttcagtggatgccgatgtgagggatgtaagaatgtccatggcaagaaagaagattatgttgcatttggacatacttcgagtaaagaaagggtgagcagtattgttgaagaaggatcagactgcactattcacaataact

SEQ ID NO: 53952 - DNA, 248 bp, Glycine max
gcaagaatggcacttcgttgcttggtgatgtccctttctgttctcttcactcttggtcttgcgagagaaagccatgccagagacgaagatttttggcatgctgtttggccaaacactcccattccaagttcattgcgagatcttctaaagcctggccctgcaagtgttgaaatcgatgatcaccctatgcaaattgaagaaacacagtacccgaaaaccttcttctataaagaagaccttcatccagg

SEQ ID NO: 53953 - DNA, 254 bp, Glycine max
ggaaaaaactaccgtaatagtcctgccttgcgtaaagcttgcaaatttttgttgtcaaagcagcttcctaatggaggatggggtgagagttacttgtcaagccaaaacaaggtatatatattattgcttgaatagcacactagactctgaaaaaagaggtcagtgttaataaatttctatctacacaaatatatcggatgctttctttgccaaacaggtttacacaaatctaaaaggcaacagggcaaacttag

SEQ ID NO: 53954 - DNA, 268 bp, Glycine max
aggttgcacagatagtcactactcactcacgagcatgcacgtcatctaataatgcactcattgatggtactccaccaccttagctttcaacacgggttcgacagaggcactgtgggaactgggtggctgagattagactcccgaagaaccggaccatgctatcgctgggaaccttcgacaccgccgaggaagccgctactggcgtacgacaaggccgcgtcaagctccgaggtgacttcgccaggctcaacttccccaacctccgaca

SEQ ID NO: 53955 - DNA, 265 bp, Glycine max
tgttgaaattaagctaaaggagttagaacaaaagtcagctgaagtcagtaccgagtggagtattgtccctggacgtggagggcatcccactctggcttcccttcagccaggtggcactgttagttttgaacatcggaatctgcaagggctgaatagatctattaacggttctataacaacaagcaacttcttgaatcctcaggatgatcttgcattaagctagagtatgtgcatccatatctggatggtgtatactattcacgca

SEQ ID NO: 53956 - DNA, 237 bp, Glycine max
agagtgtgcaagtagaataatacccgaactgaatgaagttgtccaggtcactaaggaaaaacatcaaaagaatcgatatacatatatatatatatatatgttccttaatttaattatatagtttgttcctttaactatatatataaagtttgattttgctaccacgactctaggagttaacagtcaacaggagtacttgaagctgaaggcacgttatgagtccctacaacggtccca

SEQ ID NO: 53957 - DNA, 248 bp, Glycine max
acaagattcacgccgagaacaattctctctacaacaccccaccgtgctacgggatttacatgtgtgggttggtttttgaggacttgttggagcagggtgggttgggtgaggttgagaagaagaatgtgaagaaagctgaggttttgtataacacaattgatggaagcaatggtttttataagtgtccggtggagaagtcggtgaggtcgttgatgaatgtgccgtttacgttggagaagccggagctg

SEQ ID NO: 53958 - DNA, 243 bp, Glycine max
atcattcaccaatgcatgtggcacatgccacccaaaacctaccccttctcctcctcctccatcaggaaagtgccctaaggacacattgaagctaggggtgtgtgcagatattctaggtcttgttactgttgttgttggctcccctgtctccagcaagtgttgtgcattgcttgaaggtttggctgatttggaggctgcactttgcctttgcactgctattaaggccaatgttcttggaatcaa

SEQ ID NO: 53959 - DNA, 254 bp, Glycine max
cctatttatatagaagtgagggttttgtgaagtggatccaagccaagcacccgatccattcggctgcatccacgggcatgtgggagtgcccgggtttttatcccgtttctttgaaagggaaaaacgggttagacatatccgtagttgggagtagtagtattaagcatgttctcaagaatagccttgaccttactaggtatgagtactacacaatggaacatacttcagaaatgaggataagtatattccggata

SEQ ID NO: 53960 - DNA, 197 bp, Glycine max
cttggccttgcaatcttggagagaagggcttcaatctgaggcagccgaggccattgcaaatttgtctgtcaatgccaatgtggccaaagctgttgcagaagagggtgggattcagattcttgctggtttggctaggtcaatgaacaagctggtggcggaagaggctgctgggggattatggaatctctctgttggag

SEQ ID NO: 53961 - DNA, 275 bp, Glycine max
gccaactccaatatgcatatccaagccgaacattcattgacacaggctcctgcagctgcttccaatacaactcaacagctgatgccacctctaacttctgactcttgggctgcaatgactgaatccattgatcattctcactcagaacaaagattgcaatcatcattgttgaatgttgataagcctgcagatgatggctacaactggaggaagtatgggcagaaacaggtcaagggtagtgagtttcctcgaagttattacaagtgcacgaatcc

SEQ ID NO: 53962 - DNA, 262 bp, Glycine max
ggacactttaccgtgatatttccaagtacaatcaattagagactcaggaggcagctcaggaagagtcagggtggaaacttgtccatggagatgttttcaggcctccttcaaactcggatttactctgtgtatatgtggaactggtgttcagttttttgggatgattcttgtcaccatgatttttgctgcacttggattcctctccccctcaaatagaggggggttgatgactgccatgctcttgctctgggtccttatggga

SEQ ID NO: 53963 - DNA, 261 bp, Glycine max
atctcaatgagaagtatattgtagggtatggtgcctctagtactgtgtacaagtgtgttttaaagaattcccggccaattgcaattaaacgactatacaaccagcatccacacagctcaagggagtttgagaagaacttgaaactattggcagtatcagacacaggaatcttgtcactttgcatggttatgctctaactcctaatggaaatcttcttttctatgactatatggagaatggctctctgtgggatcttcttca

SEQ ID NO: 53964 - DNA, 262 bp, Glycine max
cacctctaaagaaggatatagttttgaagagatatgcatcaagaaagaagcgtttgagggagaagagaagttttgtgcaaaatccttgggaacagtaattggttttgccatttcaaagctgggaaagaacattcaagtactttcaagttcctttgtcaataagcaagagcaatacactgtggaaggagtgcagaatcttggagacaaagcagtgatgtgtcatgggctaaatttcagaactgcagtattttactgccataaa

SEQ ID NO: 53965 - DNA, 254 bp, Glycine max
atctcagaattctctaaaagagatctttttctgctctttgaagaaagaagggtctttgcttgattttggagatgtctctgctctcagatctcatcaaccttaacctctccgataccaccgagaaggtgatcgcagagtacatatggatcggtggatcaggaatggacctgaggagcaaagcaaggactctcccaggaccagttagcgacccttcagagcttcccaagtggaactatgatggttccagcacaggt

SEQ ID NO: 53966 - DNA, 247 bp, Glycine max
atcgtagcaaagaaagaaagatagaaaaccctagcttaccttttcaactttcaagaacttggggcatgtattgtgtattgtatacagatgcaaatcttcgttaagacactcactggtaagacaatcacccttgaggtggagagttcagataccatagataatgtaaagtccaagattcaagacaaggaagggatcccaccagaccagcaacgtctcatttttgctagcaagcagcttgaggatagac

SEQ ID NO: 53967 - DNA, 256 bp, Glycine max
ttaaaaatgaaaaatatttactgttttttgtaatttttttattctgtttaaattttaaaagtattgcctccacaaggtgaaaattcaaaaaaacctggggctgctcataatgttcgactatattcaattgcttccacaaggtatggggacttttttgatggaaaaactgccagcttgtgtgtgcgtcgtgctgtttattatgatcctgtgacaggaaaggaagatccttccaagaatggcatttgtagcaattttt

SEQ ID NO: 53968 - DNA, 240 bp, Glycine max
cggctcgagatcacagtgaagcagatgctcctgggaaaagacttgctaaaccactcatattttgtcgatccgagagtgactgtcctatggaaaatggctatgcccgacctgttgagggtatctatgttcttgttgatatgcaaaacatggtggtgttagagtttgaagatcgtaaacttgttcccctcccaccggttgatcccttgaggaactatactcctggtgaaacccgaggtggct

SEQ ID NO: 53969 - DNA, 253 bp, Glycine max
ctgacaaccaagatgccattgatgcatcaattgttggaatgttagatgaccgtaaggaggcaagagcaggaatcaccgaggtgcatttcttgccttttaatcctgtggacaagcgcactgctattacgttcattgacaacaatggtgactggcacagaagcagcaaaggtgctcctgaggaaatcattgaactttgtggcctcaagggagagactctgaaaaaggcccacaaggttattgatgagtttgctaa

SEQ ID NO: 53970 - DNA, 255 bp, Glycine max
gaagagcgtcgcagttgtaaccctaatcagaagaagcgcagttcaagcgagtgacagccaccagccatgggtcgtatgcacagccgcggtaagggtatatcctcttctgctttgccctacaaaaggacacctcctagctggctcaagatctcttcgcaagatgtcgaagaaaatatctgcaagtttgcgaagaaaggtttgaccccgtctcagattggtgtcattctcagagattctcacggtattgctcaggtc

SEQ ID NO: 53971 - DNA, 258 bp, Glycine max
ctcgagcgattcggctcaggccgagcgctacgaggagatgagtggagttcatggagacatgtctccgcctccgccgagtgcgaggagctgaccgtggaggagcgcaacctcctctccgtcgcctacaagaacgtaatcggcgctcgccgcgcctcctggcgcatcatctcctccattgagcagaaggaggagagccgcggcaacgaggaccacgtcgccgtcatccgtgactaccgctccaagatcgaggccgagctc

SEQ ID NO: 53972 - DNA, 248 bp, Glycine max
ctgggccaaggggcactacacggagggcgccgagctcatcgactccgtccttgacgtcgtgcgcaaggaggccgagaactgcgactgcctccaggggttccaggtctgccactcgctcggcggaggaaccggctccgggatggggacgcttttgatttccaagaacagagaggagtaccctgacagaatgatgctcaccttctccgtttttccttcccccaaggtctctgatactgtggttgagcctt

SEQ ID NO: 53973 - DNA, 247 bp, Glycine max
catcaacctcctttttttttaattaattttttgtttccgttttgctgatttgtttaattggttgcttgattctcagggtaatgcttgtgggttggggtggaaacaacggctcaaccctcaccggtggtgttattgctaaccgagagggcatttcatgggctacaaaggacaagattcaacaagccaattactttggctccctcacccaagcctcagctatccgagttgggtccttccagggagagga

SEQ ID NO: 53974 - DNA, 263 bp, Glycine max
ttctgtgtctgtgtttgcggatgaggattccgagcgagcgacctacttcgtttctcggaactattgagtcatcatgggtaaggaaaagactcacatcaacatcttcgtcattggacatgtcgactctgggcagtcaactaccactggtcatttgatctacaagcttggaggtattgacacgcgtgtgattgagaggttcgagaaggaggctgctgagatgaacaagaggtcattcaagtatgcctgggtgcttgacaagctca

SEQ ID NO: 53975 - DNA, 247 bp, Glycine max
taaaaatgctatcaaggaggaatcagagggcaagttgaagggaattcttggttacactgaagatgatgtggtctccactgactttatcggcgtgagcagatcaagtatttttgatgcaaaggctggaattgcattgaataagaactttgtgaagcttgtttcttggtacgacaacgagtggggatacagctcacgtgtcattgatcttcttgtattcgttgccaagaagtctctttaaggtgttact

SEQ ID NO: 53976 - DNA, 234 bp, Glycine max
catgactatttcaaaagatcgagtaaaaccatcacatctgccggatagctgtaagctagctgagatatttacaactagcgttgtgcttggcagttacttggcaatgatgacagtcatattcgtttgggcagcatagaaaaccaatttcttcccgcgagtatatggagattctactcttgagagaactgctcatcatgagttccgactacttgcctctgcaatctagcttcaagt

SEQ ID NO: 53977 - DNA, 219 bp, Glycine max
cttcagtaccacgactccaaggtcctggaacatgcctctgtttgtttgacacgaatagctgaagcatttgcatcatctccagacaaattagatgaattgtgcaatcatggactggtaacacaagctgcctctctcatttctaccagcagttctggaggtgggcaggcttctctcagcactccaacatatactggtttgatccgccttctttccacacaa

SEQ ID NO: 53978 - DNA, 260 bp, Glycine max
gagcggcgggtagaatcctttgcagacgaatcaaagcgacaagggctgaatctcagtggatcgctttcagtccctacagcaattcacctctatgatctccaagataggcttggactcaaccaaccaagcaaggttgttgattggttgctcaatgcagcaaaacatgaaattgatgaacttccaccacttcctattccttcaggtaacttcacccttggttatccctctcttgtttcttgtaatgaagttagcacctctcg

SEQ ID NO: 53979 - DNA, 251 bp, Glycine max
gcattagcaaaagcaagaagaactagtctaagcagaaatggcctcttcagtgatggcatctgtggccctcaaacctgcccctttcactgttgagaagtcctcagttagaggccttccctccctctcaaggaactcctcttcattcagagttgtggccagtggtggcaagaagatcaagactgacaagccttatggaattaatggtggcatggctttgagggaaggagttgatgcatctggcaggaaaggaa

SEQ ID NO: 53980 - DNA, 227 bp, Glycine max
cacttgtccccggcgagaaaatcgacataatgctgtagatgcatagcagcttgtctggcaccctcatcaaagccaagatcttggtcgtgatctgcggtgagcagaggatcttctacaccgaaaagatatattccatactccggagtcacaatgagaggagtggcatatgtcgttctcggacacgccgtgaagaacgctggtgtaactgtccctgcgtagctcaacga

SEQ ID NO: 53981 - DNA, 266 bp, Glycine max
ctgcttttgtctcctgcctcccacatttcaccaccccctttatcattatctcctctcttcattgttctgctcttccccttaacaaacaataactctatttaaagcacacacaaagggatcatatatcttggttgcaccttggtaaggtgagaaaatatggcatttgcaggaacaactcagaagtgcatggcttgtgacaaaacagtttatctggttgataagctgaccgcagataaccgagtgtaccataaggcttgcttcagatg

SEQ ID NO: 53982 - DNA, 232 bp, Glycine max
gcactcttagaaggcattactgatacacttggaaccgaactactcgaaagcttgttaaaaatggcaccaagcaaggaggaagaacgcaaattgaaggaacataaagatgattctccaaccaaacttggtcctgctgagaaatttttgaaggcagtgcttgatgtacctttcgcatttaaaagggtggaagcaatgctttacatagccaattttcactccgaagtggagtatc

SEQ ID NO: 53983 - DNA, 252 bp, Glycine max
gggcttactattgggcacatgatgagaagcttctcatcagtgatcacatctccaatggcaatttgactcatgcccttagagggagacatggccaaccatctacaaatcattcatggtccaccaggctgagaatcaccaaaggaacagcgaggggcctggcctatctccacgaatgcagtccaaaaaaattcgtccatggcgatatcaagccctccaacattcttcttgacaacgacttccaaacctacatat

SEQ ID NO: 53984 - DNA, 255 bp, Glycine max
ggaaagttttggttagaataaaatggtaccctgtctgcaatgcttcttgggtgagtggcacagccccgtttggcacggattttgcacggaacagaatctgaaaactgcagaaacttctcaatggcagctatttcagctgaagtatttggcaaactcaactgatgggccaaaggagcatgagtctgtcctgtttcattctgatgaacaacaaaaattcatgtcaatgcgaggcacatccataaattctgggtcctc

SEQ ID NO: 53985 - DNA, 258 bp, Glycine max
aaatgcccttgacaattcttctctaaactcggaagcaaaacaaaaagccatagctatgagtggtgaagcgcgatcctgtgactactgtggccactccacagcacttctttactgcagagccgattcagccaaactctgtttctcgtgcgatcgcgaggttcactccaccaaccagctcttctcgaaacacacgcgcacgctgctctgcgacgcatgcgatcattcccctgccaccatactctgttccaccgacacctc

SEQ ID NO: 53986 - DNA, 220 bp, Glycine max
acgctcgtcccaaatccaggtgcaacaggaataccacagttgtacacggcgacgaagatgagatttatcctccacaatcacggcggccagtgcggcaaccagatcgctacgacgaactgggacctcatctgcgatgatcacggcatcgaacacaccggacagtacagcggcgactccgaactccaatatcaacgcgtgaatgtctactacaacgaggcca

SEQ ID NO: 53987 - DNA, 141 bp, Glycine max
cgcttatggtggatacctaggcatccagagacgaggaatcgcgtagttcgcgacgaaatgcttcggggagtgcgaaataagcgtatatccggggattcccgctataggtcagacctttcgaactgctgctgacatccacgg

SEQ ID NO: 53988 - DNA, 258 bp, Glycine max
ctagcacataaaacttgctacgcgcagtaagctataactcatttgaggctctgggagaattgagaaatggcttgagatgttgaggttcaatagcaaggaggagagtactctgccaaagactaccatgaccctcctccagcacctttgttcgacccagaggagctcacacagtggtccttctatagagctctcatcgctgagttcatagcaagccttctcttcctttatgtcactgtgctcaccattattggctacaaa

SEQ ID NO: 53989 - DNA, 258 bp, Glycine max
gttccagctacagcctctgagttgtttggtttgagaaactttggtgctttgtacaatttcattactatagcaaaccctgcaggaacactggttttctctagtctcattgccagcaccatctatgatgctgaagcagagaaacaacatcgccaaaatatgatgttgcgtgtgctgaatgctagtgagcctctaaagtgcgaaggttccgtatgtttcttcctaacttccatgatcatggcaggattatgcgtggttgga

SEQ ID NO: 53990 - DNA, 124 bp, Glycine max
atacgatacaaattttgaatgacacaatgacttctgaattcccgatgcatttaccataaagaacttcatgcaagttcagttctatctcaaatctctaactctcgaacacattccaaaccaccca

SEQ ID NO: 53991 - DNA, 220 bp, Glycine max
gtaagggcattcttgctgctgatgagtcaacatggacaatttgcaagcgtttggtcagtatcgatgtagagtatgttttctccaataggcgtggtcttagggactatgcatttcacggatcgctgtgctcttaaatatcacagtggtggcatcctctctgttgatactctgtaccagtgtacagtggcaggtactctctacagttctgactatcctcatt

SEQ ID NO: 53992 - DNA, 246 bp, Glycine max
caccagcagtggcgcttcgcgtacaaggtgaccgttcggccttcttcgactgtgccatacatggttaccaggacacactatacgcccacgctcaccgtcagttctaccgtaactgcgaaatctccggacagtggacttcattttcggctacgggacaaccttgatccaaagctccaaactcatagtgaggaagcctgacccgtatcaacagaacatagtggtggccgatggcacggaccagaagaa

SEQ ID NO: 53993 - DNA, 249 bp, Glycine max
gtgatcagggaaatgacgtggagtcaactaatatactggaattcattgaccaatgtacaaacacaatgcagctaaagcaaatacatgctcacatgctccgcacatcccgcttttgtgatccatatactccagcaaattgctgactgcttatgctatctcatcatgctcttgcctcatatatgctaaaaatgtgtttaatcaaatcccgcaaccaaatctctattgttggaacacccttattcgtggata

SEQ ID NO: 53994 - DNA, 249 bp, Glycine max
ctctacttcaatgtttatgttaatgggaaagtggcaatcaataacttggatttatcagccatcactggtgccttgtcaacaccatactacaaagacattgtggtgaatgcaacattgatgtctgagggctaacggttcaggttggtccagcaaatgctgatggtggaaatgccaatgcaattatgaatggcatagaggtcttgaagatgagcaactctgtcaacagtttggatggggaatttggtgttg

SEQ ID NO: 53995 - DNA, 247 bp, Glycine max
caaggtcggtgaaagcgagactcaaaccaaaaagtttattgctattaatatatggctttgttttccagtgtcaaattgcattattacaataatcaaatgcactaaccacactccatcacccccattataccccttctcctctcacactaattaacactctcatcaaaaaacccttctttctttcaggttcattacttgatcagtgtcaaaagggtagttgcaaattgcaatggctaagcctgatgtt

SEQ ID NO: 53996 - DNA, 259 bp, Glycine max
cggggagtggaaggaacgattacgggttcaaagcggagatagagacggtggggaagataaggcacaggaacataatgaggcttttgggttacgtgtcgaacaaggagacgaacttgcttctgtatgagtacatgccgaatgggagcttaggggagtggctgcatggtgccaagggaggtcatttaaagtgggaaatgaggtacaagattgcggtggaagctgcaaagggactatgctatttgcaccatgattgttcccc

SEQ ID NO: 53997 - DNA, 256 bp, Glycine max
gtaacatactaacatgttaatgcagatatttgtcagttgtaccatcttttagtttatgaactcgagcaggttgtccttgcatttggtgctgaaagtgatagaagtcttggtattccaggggagaacttgaaagggatacattcagctagagagtttgtttggtggtataatgggcacccatatggacaaaatcttgagccagacctaaagagcactgatacagctgtaatccttggccagggaaatgttgctttag

SEQ ID NO: 53998 - DNA, 254 bp, Glycine max
atttagttctctggtagggcagagaattagaacatatattggaggcacccgttgagatgtattgctactcatagctttcagaactgtttcaattgcaggaagcaaaaaagctacactttttccagtgccagttttagctttgactaaagcatccatcccctcaaggcaaataggtaggctagcctcttgtatgcgggtcatttgaacatatgttctaattctctgccctaccagagaacttgctagtcaaattg

SEQ ID NO: 53999 - DNA, 245 bp, Glycine max
gctggtcatgcatacacaaattgggctgcaaagatggccgttggattagccacaggtgtcccctgggtgatgtgcaagcaagatgatgccccagatccagtgataaatacatgtaatggattttattgtgattatttctctccaaataaaccatacaagcctagcctttggactgagtcttggagtggctggtttacagaatttggtggtccaatttatcagcgaccagttcaagatctagcatt

SEQ ID NO: 54000 - DNA, 171 bp, Glycine max
agactcaggttggtgagagagggatacaactctcaggagggcaaaagcaaaggattgcaatatctcgtgcaatcgtgaagaatccatcaatccttttgttggacgaagcgagagtgcactggatgctgagtctgagaagagtgtacaagaggctcttgatcgtgtcatggt

SEQ ID NO: 54001 - DNA, 251 bp, Glycine max
gtaagtatggtggttatcttagcagcttgagaaaggaatttctaaagaaaaggaaaaaaggtaagctaccaaaggatgcaaggatgatactcatggactggtggaacaacactataggtggccttatcctacggtaattgaaattaatatcatgaagtatatatatagcaatatagcttacgttatattgtgtattgctcattaacagtagtatgtgatctgatttgatgaaatatgccaaattgcccata

SEQ ID NO: 54002 - DNA, 242 bp, Glycine max
ctcaattttccttctctttcagccatgaatccttctgagcaatttgtggaacatggaatgtctcagcagaatttaaagagaacatcttgtgcaactgtgccactctagcataccaaagtcttggaatagtttatggtgacctcagcacttctcctctttatgtttacaagaccacgttctcagggaaattgaggctcaaagaagatgaagaggaaatttttggcgtgctttcatttatcttc

SEQ ID NO: 54003 - DNA, 229 bp, Glycine max
gtagtgaagaaaatgaaagtccttgttttctttgttgctatagttctagcagcatggcattgccatggctcagaccatgaccatgaccatggccacacctaccaaattttccctctgagaatgaaaactggccatggtggccactacattccggaggtatcatgccaaagttggaggcttggtgtggaagcacacaacgtcattgactggaaaaccgttcctcaagatt

SEQ ID NO: 54004 - DNA, 256 bp, Glycine max
tcgaggaagaattaaaaggaattgaagaagatccaagataggttcatatggagaggtataccatgctgactggaatggcacggaggttgctgtgaagaaatttttggatcaggatttttcaggcgctgcattatcagaattcaaaagagaagtgcggataatgcgtaggctacgtcatccgaatattgttctttttatgggtgctgttactcgtcctcccaatctgtcaatcatttcagagtatctaccaagagga

SEQ ID NO: 54005 - DNA, 183 bp, Glycine max
gcaagaatggcacttcgttgcttggtgatgtccctttctgttctcttcactcttggtcttgcgagagaaagccatgccagagacgaagatttttggcatgctgtttggccaaacactcccattccaagttcattgcgagatcttctaaagcctggccctgcaagtgttgcaatcgatgatcac

SEQ ID NO: 54006 - DNA, 235 bp, Glycine max
ctcccctcttccccacccaaccttctctctatcacacacacaagtcaatggataaaaaacaacagtgtaagacgtctcaagatcctgaagtgagaaaagggccttggacaatggaagaagacttgatcttgatgaactatattgcaaatcatggggaaggtgtttggaactctttggccaaagctgctggtctcaaacgtaacggaaagagttgccggctaaggtggctaaatta

SEQ ID NO: 54007 - DNA, 229 bp, Glycine max
ggaggtgccgaagatgaagtcgactgtgccggagatgacgcagttgcggtagaacatggctacaggaatcgtgatccagggttgcaacatcgtcccagaagccgaacttttccctacaaggttccaagtgaagtcataccttggaaggccatggaagcaattctcaaggacggttgtgatggaatccaccgtgggtgacttccttcaccccgaaggatggtgcccatgg

SEQ ID NO: 54008 - DNA, 273 bp, Glycine max
cagatattgtgtttgtcgtttgcctttgtgcaagatttcagtcttatccaaaaatttctcatgttactgcagttaaaaggatcttaagatatcttgttggaactactaatcattgtctatggtttaagaaaaggtctgagtttgatcttttaggatattgtgatgtttattttgctggtgataaagtagaaaggaagagcactagtagaaatggatgacccgttgtggcgagtgtctctaaacttcaagtctttagctttgtagattgttgtg

SEQ ID NO: 54009 - DNA, 221 bp, Glycine max
  unsure (1)..(221): unsure at all n locations
gtagagtggacaccctcattgacaaggcccttgagnaaattggcaccccagtggcccttaatctacgcgggaaggcagcggtagcccaagcagcattggcttaccagctctaccaaaggaaattttctggtccaaggtgggaagctctagttaaaaagggggccaagaagcaaaggctcctctgggcctcaaccagtgtaaagaatcctgcctattctgac

SEQ ID NO: 54010 - DNA, 252 bp, Glycine max
cgagttaactgataaacttgaaaaaaatgagaaaagtcttgaagaaacggagcggtcattatttgatcttgaggagagacacacacaaggcaaatgcaactattatggcgaaggaatttctaatatcgaatctactgaaatctgaaaaagcacttgtggagcatgcaattgagctacgagctgatctatagaatgctgcatctgatgtgtcaaacctgttttctaaaattgagcggaaggataagattgaag

SEQ ID NO: 54011 - DNA, 260 bp, Glycine max
caggaggagagatatgaggatagcgtttagtgtcagtgcaaaagagaccgtgacatttaaatttcgactgaatagatattttagtccgtgatatttaaatttctcattcactttattattttcgcttctcttttcatttttatcaccctgccacacattcacatttccacttcctatgtacaattttatataattatatcctatcatgtcagtttctccttgaattattaattatttaatatgaccaaaataattattca

SEQ ID NO: 54012 - DNA, 257 bp, Glycine max
aggagatctgcggcctccttgagcagcagatttcgcattcttcttccgccgataaggctcagatttggcaacaccttcagcgctactcgcacctcactgacttcaacaattacctcgccttcatcttctcccgtgccgagggaaaatcagtggaggttcggcaggctgcggggttatatctgaagaataacctcagaaacatgttcaaatctatgcagcctgcataccaacagtatgtgaaatcagagttgctgcct

SEQ ID NO: 54013 - DNA, 266 bp, Glycine max
cgacgaaccaggtgacgaagaagagttcaggaggcgcacccgaagtgcgtcaggggggtggaggtgcaaggagagggctatgcgaggcagaagcttctgtgagaggcattttctgtaccagcagcagagaaataggagtgcgaagaagaaacgtgcttctgggggtgttggtgtgccccagaaaagaggaatgaaacaaagaaaaaaacctgaaggtgatttggaaaatggggttgtgggtgctggagttgttggcgccgatggtg

SEQ ID NO: 54014 - DNA, 237 bp, Glycine max
gattaacaagctatgtgccccatatattgataccgttgggtatcgggtgttcttgggcttgaaccagtactttgttgcttcagatgttggccatgggaagatgcagtggtatgctttccatggggaacccccttcaagtgaccctttcccagaaggtaagaagaagaggcttttggatctctttggtaattggtgcgatgaagtgattgcactcatatcagaaattcagaacatatg

SEQ ID NO: 54015 - DNA, 240 bp, Glycine max
aattgatgctgctatacatgtatggaggctgaaggaccataagaaacatctaagttcagcaaaatccagacggtcttggggtggaaaggtgaagggacttgttgctgatggtgagaagaacaagaacaactttcttgcccaacgggctgagacgcttctagaaagcttgaaacacagatttccagggctccctcagactgcactagatatggccaaaattcaatataataaggatgttgg

SEQ ID NO: 54016 - DNA, 244 bp, Glycine max
ccactctgaagccatccgccacttctccaaaatcctcgagggccgccgcggcgcccctcaggtcttcctcgcagagtgctacaagcacagagtctccgcaaatcgctccgccgggcgaatcgccgactcaatcgccgactgcaaccgtaccctcgccctggaccccaccagcatccaagccctcgaaacccgagcctcactcttcgaatccattcgctgcttcccagactccctccacgacctc

SEQ ID NO: 54017 - DNA, 265 bp, Glycine max
ggaaggagaagtttagggctgatgctaagcaggttatggaagttcttatgtcccttcaagtatctcaaatggagacagatgatccaacaacaagttacatgctacaggcatgggctagactctgcaaatgtctgggacaagattttcttccttacatggagtttgtcatgcctccactacttcaatctgccgcacttaagcccgatgtaaccattacatcagcagattcagacatcgtcattgaggattctgatgatgaaagtat

SEQ ID NO: 54018 - DNA, 259 bp, Glycine max
ctttaatttgtctcaacgttgaagtgaattgcttcaagtccaaaaatggagcagtatgaaattcttgaacagattggaagacgttcctttgcttcagctctacttgtcaggcacaggcacgaaaacagaaggtatgtccttaagaagatacgtcttgcacgccagactgatagaactcgtagatctgctcaccaggagatggagcttatctctaaagttcgcaatccatttatcgtagagtataaagattcctgggtgg

SEQ ID NO: 54019 - DNA, 261 bp, Glycine max
aagattctcaaaaactcttcatagtttacaacatcatttaaatctattgagcacaatggggattcatgattgcctaggatttgtactctttcaagttgagactcttgacaaatgaagagcaacaacaattactgaagttacttcctgtggttgatactgctaaactccctgatagccttgtcgtcatgttcagtagctctcagttcaaggagaacttcacttagttgcagcagctgctagcgggaggagtctctgatatct

SEQ ID NO: 54020 - DNA, 253 bp, Glycine max
gattgatggtggtgtgcatgagtatgagatgggagattacaatcaccctgaggcggaggaaatatttgtcgaattggctgaggtgatggataagataagaaaagaagggtatgatcccagagtttcggaggtcttgcttgagatggatgatgaggaaaaggccgttcagttgcttcaccatagtgagaagctggctcttgcttatggtctaatcaggataggtcatgggtctacaatctggattgtgaaaaac

SEQ ID NO: 54021 - DNA, 257 bp, Glycine max
aagaacagttggtgctcttattgggctctatgaacgagcagtaggaatttatgcttcccttgtcaacataaatgcttatcatcaacctggtttaggcaatatggcttgtgggagaggtatgctgaattgtatccaaatgaagacctagtttacactgttggcattagtgactacagaaaagattggttctttgcacaggttaacaggaagaaagacaatggcactgacataggaaccacatggcaaattaatttcaa

SEQ ID NO: 54022 - DNA, 251 bp, Glycine max
ttgagtctggaagattggcttcactcttctgctcctgctgatatctatgttcttgggtttcaagaaattgtacctctcaatgcgggtaatattttgggcacagaagacaatggccctgccagaaagtggctagctcttattaggaagaccctgaatagtcttcctggaacaagcggggaatgccacactacttcaccgcttcctgaccctattgtagagttagatgctgattttgagggatcaatgaggca

SEQ ID NO: 54023 - DNA, 261 bp, Glycine max
cgagggaaacagaaccgggcaaccttatatttcccaagatctcaaagtctatttcatcatgttctgagtttgtggatgataaatagaaagcagtgactgtgccagctgaatcaccagcaactcagaacatgatgaaatagactttgagttcttgggaaacagaaccgggcaaccttatattttgcaaacaaatgtgttcaccggtggcaagggtgacagagaacaaagaatctacctctggtttgacccgtcaagagaata

SEQ ID NO: 54024 - DNA, 250 bp, Glycine max
tggggatcaatgagaaatctgtcaagtcaatgccttttgaacagcttgctcttctgattgaatcggcttctactcttcagactgtgtaaactttacttgaccggtttgagagccgccttaaagtgtctacagcagtggctcctgccaagaatttgtctagcttggataacatcgatcatcttcttaaacgggttgcttcccccaagaaaagggctactccccggagttctgtgagaagcaggcaggcaaa

SEQ ID NO: 54025 - DNA, 238 bp, Glycine max
cgcagagagagagagatccatcgatcaattaatttccaatggccgatcagctcaccgacgaacagatctctgagttcaaggaagcctttagcctcttcgacaaggacggcgatggttgtattaccaccaaggaacttgggactgtgatgcggtcgcttgggcagaacccaactgaggctgagctgcaggacatgataaatgaggttgatgctgatgggaatggtaccattgatttccc

SEQ ID NO: 54026 - DNA, 267 bp, Glycine max
aaggatcagtggcagttagcatgtcaattgaaggaacaagtttttgttttgtagcagcacacctagcatctggggagaagaagggtgatgaagggagaaggaaccatcaggtagcagaaatttttaggagaacctctttttctaggaccacaaaagaccatcatcattttcctctaaccatcttaggccacgaccgtatattctggttcggggatctgaactataggctatacttggaggacaattttgcgaggcatttgataagaa

SEQ ID NO: 54027 - DNA, 250 bp, Glycine max
ccgtgatagagatggtagactgtgggtacgtgtagttaagctgagagaaatgccattgctcgtatccaattgcgctaaatcctttatcctctccacgctcccaaagtccaagcaaatgtcccgtcaagctcccggcgtcgtcaaaacgcgcctgatgggcgtcgttttcgacatggacggcaccctgaccgtcccggtgatcgattttccggcgatgtatatggcgatgctgggcgacgacgcatacctg

SEQ ID NO: 54028 - DNA, 235 bp, Glycine max
atgctcctgtcacatctccaaacactgatggcactggcaccatggagatactgtccaagatgttgaaaattgccgaagtgaaaccctatgtggtgggccagtttcacaatgactcattcacgggcgatgttcgagaacgtgtgatggatcattgcaaaggtcgggcatttgcctcttgcgtgcatcactgcatcagtccatgggctacctggtggctcagaacggcttgcagctg

SEQ ID NO: 54029 - DNA, 238 bp, Glycine max
aaagaaatataactaatattctttagaataatcaaaaagaatattaaattcaaataaattttagatagaaaaaagacttaaaaaggaggatttgaaatgcgagatctaaaaacatatctttccgtggcaccagtagtaagtactctatggttcggggctttggcgggtctcttgatagagatcaatcgtttttttccagatgcattgatattcccttttttttcattctagttattga

SEQ ID NO: 54030 - DNA, 229 bp, Glycine max
gatcgatcgaacaagtgaattagctagaagcattgaaggacgtagctgctatggctcgaggaaagatccagatcaagaggatagagaacaccaccaaccgccaggtcacttattctaaacgacggaatggccttttcaagaaggccaacgagctcaccgttctatgcgatgccaaggtttctattattatgttctccagcactgggaaactccacgagtacatcagccc

SEQ ID NO: 54031 - DNA, 223 bp, Glycine max
caagtgataggttgcaaatatgggatggtggggagagtgatgctagaactccaactatggggagtgatttggatgaagatttgatggctttacgtgtagatgatggtagtgaaagtttgactcaactccaacctctgaaagcacccaagaaatcaaagaggcagggagagaccatatgcaaaggacacaaaaattatgagcttatgcttaatttgcagctggg

SEQ ID NO: 54032 - DNA, 259 bp, Glycine max
caaaaggtcttgaatatctatacaaggacatgccaagcctaattgcaccccatggaaatctcaagtcctctaatgttctcttgactgaatcattcgagccactcctcacagactatggcttagtcccagtgataaaccagatctggctcaggacatcatggtgatatacaagtctcctgagtacttgcaacaaggaagaattacaaagaagactgatgtgtggtgccttggaatactaattcttgagattctaactggg

SEQ ID NO: 54033 - DNA, 252 bp, Glycine max
gcaggtctggaagggccaaggatcaagaaagtggaaacatgcccagagtgatggtttctttgttcaatttgagtcaccttccctgcgaaagttgtggtttatacccagttcgaatgaaaagggacagacctggtgcaggtttctctcccacttttactcgcaacacttatttactgaatataagttttgtagtttatggagggtgatattgcgaggattgattgttcttttatcaaaatgaaaaacaaggag

SEQ ID NO: 54034 - DNA, 253 bp, Glycine max
ggaaggttgcttgtattggtgcctggcatcctgcaagagtttcattcactgttgccagggctggtcagaatggataccaccaccgaactgagttgaacaagaaggtttacaagcttggcaaagctggagatgaactcactctgctcttactgagtttgataggtaagtgttttgttgattatggttttgtgcaataaatttagcaggaagtattgtgtttgtaagtcaaactaacccctctacttgttttctg

SEQ ID NO: 54035 - DNA, 246 bp, Glycine max
attcccaattcctaattgtttaaacctaattctcatttcttcatcgttcgattcttctcctcctaaagatgcagatcttcgtgaaaactttgaccggtaagaccatcacccttgaggtggagtcctccgacaccacgataacgtgaaagctaagattcaagacaaggaagggatcccacctgaccagcagagacttatctttgcgggtaaacagcttgaggatggtcgaacccttgccgactacaa

SEQ ID NO: 54036 - DNA, 241 bp, Glycine max
atgcctcctaagaacatggaggcctgtttttccttgtgggggcattattaaacggcttcgccgtcaacattgaaatgatcatcatttggaagcccatgttaagtgcaaatcttatcaactatggaacttccaactagaaaacggatggagaatttctttgggtgtcggagctgttcctgccgtcttgttatgttttggagctcttttcttaggagacacacctaattccctgattgaaaga

SEQ ID NO: 54037 - DNA, 243 bp, Glycine max
gtgaaagagaatccgaggcgaagagaagagaaaaattaagatggaggggaaggagcaggatgtgtcgctgggagcgaacaagttcccggagagacagccgattgggacggcggcgcagagccaagacgacgcaaggactaccaggagccggcgccggcgccactggttgacccgacggagtttacgtcatggtccttttacagagcagggatagcagagtttgtggccacttttctgtttcta

SEQ ID NO: 54038 - DNA, 248 bp, Glycine max
ggaagactctgttagagaatgatcagttgtgtatagagcagaggcaaggtcgagtctttgaaggatggaatgaagggaaaatatattttcctccgacttataagtattcagacaattcagacagctatgcaggtgatgacagacgctcaaaacaaaagtgaagaactccagcatggtgtgatcgtatcttgtggtatggaaggggccttcaccaattatcatatgttcgtggggagtcaaggttttct

SEQ ID NO: 54039 - DNA, 252 bp, Glycine max
caagtttttctgtggtgggaggctggtttttggtccggatgtagcttccctgtttcttacaacattcctaattgctggacctgcaattgcattttgtgtaaagatatatcttaaaatcaagaagaccgatggtcttattcatgattactggtttcctgtattgattgtgggttcaattctcactgttttggatttaatattcctccttttgacttctgggagagatcctggaattgtccccagaaattcaag

SEQ ID NO: 54040 - DNA, 240 bp, Glycine max
gacagttgcagaaagcatttgtaacaggggtccccaagttgaatcggggagcgctggaaacagcctgtgaagatttcagcaatattattaatagtcttgatgaatgcaccgtatacaaaggaacactatccagtggagtcgagattgctgtcgattcaactattgttgcttctgccaatgattggtcaaagaacatggagacagcctatcgcagaaagattgctgcattgtcccgtgtta

SEQ ID NO: 54041 - DNA, 248 bp, Glycine max
ccgcaacaatgcaaatgaacagaatgaacagagaagaacatctttatactgccttccaatactttgataaagataacagtgggtttattaccactgaagaactagaacaagccctccgtgagtataacatgcatgatggcagggacatcaaggaaatccttcaagaagttgatggagataatgatggacgcattaactatgatgagtttgcggcaatgatgagaaaaggaaatccagaagttatgaca

SEQ ID NO: 54042 - DNA, 240 bp, Glycine max
ctcaaatggcactcgatgttctcaggcttggtttcttgattgactttatgtcccatgcttccattgtcggattcatggatagagctgccattactattgcactacaacaacttaacgcttttcttggcataaaaacattcaccaagaacactgatattgtttctgtcatgcactcggttttcaatgcagcacatcatgggtagaattgcaagacaatagtcattgcagtagcattcttgg

SEQ ID NO: 54043 - DNA, 240 bp, Glycine max
ggtatggagggcaaatatacctcatacccatcttgcaactgagaaatctgaccagagatggatggttgtaaaaggtgaaaagataggttttcctggtggaggaacccacttccattatggcgctggcaagtatattgcatcaattgccaatgtaagctagttactcctatccggtatggcactaaaataatcaccaaaacatgaaactcttatatgactggaaaaagttataagtttgta

SEQ ID NO: 54044 - DNA, 240 bp, Glycine max
gtgagggtgttcctcgggttctggcatgctggggatgtaatctactcggtgtacagtccaacaagattgtcgctgaagggtaatcccagaggactggagtggacatgaatggtgctaatgacggtgtcttattgatcattgaaaatcccgtcacgggtaatggagatatctttaatgtgggataccctaacgatgaggttacagattggcagcttgctgaaatgatgactcaggtttatt

SEQ ID NO: 54045 - DNA, 258 bp, Glycine max
gtgtcatcatgttatgtgtaaaaatgtcttcttcttcttcttctcctgctgttctctcaaaatgcaccgttttccctcaccggaactccactctgggggacctcaagctctctatctccgaccttaacatgtttttatctcactacatccaaaaaggctgtctcttcaccactccttcacttccctctcactctcacactctcatccctcacctcaaaaacgcgttttcccaaaccctctctctcttccctcccctcg

SEQ ID NO: 54046 - DNA, 267 bp, Glycine max
tattcaacgagaacgatgcagttagtactaggaaagctccatatgaggattcttctggcatattttgggataatgacagtttatcagctttattggcattggaattaaaagctgatcttcttattttgttgagtgatgtagagggtctctatagtggccctccaagtgatccacgttcaaaacttattcatacatacattaagtccaagcatcaaagtgaaattacttttggagacaagtctagagtgggaagaggtggaatgactg

SEQ ID NO: 54047 - DNA, 258 bp, Glycine max
ctcaatcaatcagttttagatacttgatacagcgctccgcatcttcagcagattccattgtaacaaaagcaaaaccacgagaaatctgctgaagatgcggagcgctgtatcaagtatctcaatcaatcagttttagagggtcgttacatcactgttgagcggtcacgaagaaaacgtgcaagaactccaaccccagggcaccatcttggactgaaaaacacaagggagtatggctatcgtggtgaccgaggtggtgac

SEQ ID NO: 54048 - DNA, 260 bp, Glycine max
atgctttctcggagaaagctttttttctttctttgttgacttcacctagcaagcctcgaatccaaatcctttctactttctgctcttacgctatttcgtctttctatagaatacgaagagaggaccttctttcgggctgtctacgaacccttcttctcgtatgcaattttctattctttcttttaaccaaaagagaaagggaaaacactggccaatttcacactttctgaatgtgccatttgaccgaatgtgaaagcgaa

SEQ ID NO: 54049 - DNA, 260 bp, Glycine max
agaaaagcatggcatgttggtccaatgtttcttttcaacagggttaaagaagaaaaagcacatagaggaatggatgcatctattaatgatgagcatgagtgcttaaagtggcttgacacgaaggaaccgaattcagttgtttatgtgtgctttggaactacaacaaagttaactgattctcaacttgaggatattgccattggtctagaggcttcagggcaacaattcatctgggtcgtgaggaaaagcgaaaaagatgg

SEQ ID NO: 54050 - DNA, 249 bp, Glycine max
tttaaatttaaaagacttgtcaatacagagatctcagactgatttgtaatgcttcatgcctccattttactctcttgattgtcagtattgaagaatttataccattgttgagggaccgcatgaatgtattgaatccatatgtccatcagtttttggtaggatggattactgtattggacagtgtcccggatattgacagcctggctttcttcctgattttcttgatggtttgtttaatatgttgagtga

SEQ ID NO: 54051 - DNA, 241 bp, Glycine max
gttgaaacaatttgcactaagggcattggctagcacacttaatgaaggagagttgtctgatctaaaagatcagtttgatgcaatagatgtggacaaaaatggttctattagtcttgaggacatgagacaggctcttgctaaagatcaaccttggaagttgaaagaatcacgtgtgctagagatattgcaagcgatagacagcaacacagatgggctagtggatttcaccgagtttgtggca

SEQ ID NO: 54052 - DNA, 235 bp, Glycine max
atttctttccacctttccaaccatcattacttacaagagctagaggaggacctctgattccagctaaactccctccaagatgtgccaggcttgttgtttacagtaggaaaacaaatgagactagtatatggattgttgagttgtcgcaagtacatgcggtaactcgaggtggtcatcaccgagggaaagtaatttcatcacatgttgttcctgatgttcagcctccaatggatgc

SEQ ID NO: 54053 - DNA, 227 bp, Glycine max
cctttacatactctgatctctctcagagcaatagcaacaatggcttccctcaccccaggcaccctgctgaaaatgctgcaggccatgaacaccaacacccgcgtcaccggcgaccaccgctccccgctcctccaggtcatcggcatcgtccccgccctcgccggctccgacgtctggtccaaccagggcttctatttaaacctctccgactccgtcaactccaccta

SEQ ID NO: 54054 - DNA, 217 bp, Glycine max
cctacttcatctcctggttacagcccatcatccccaggctatagtccctcatcacccgggtacagtcccacttcacccggatacagccccacgtcacccgggtacagtcccacgtcacctgggtacagtcccacctctccgacttatagtcctagctctccgggatatagtcctacaagtccagcttattcgcctaccagtccatcctactctccca

SEQ ID NO: 54055 - DNA, 255 bp, Glycine max
tgcaaatccagcggtgtccaaaagaacttcttcaggtccagcagtgggttggcctccaattcgttccttcaggaagaacattgcaagtggaagcacttctaagttgccttctgggtcccaccagcaacatcaaaatgttgttccatacaaggttgctagccaaaaacctactgacaaatctggtaaaggcttgtttgtgaagatcaatatggatggtgtccccattgggagaaaagtggacatcaatgcttatga

SEQ ID NO: 54056 - DNA, 257 bp, Glycine max
ggacaagagcgtttacggcgggaagggtgttcttaacgccgttaggaacatcaacgaggtcttggctcccatactcgttggcgtcgacgttaggaatcaagctgatgttgatgctattatgcaggaaattgatggaactcctaacaaatcaaaactaggggctaatgcaatattgggagtttcgctgagtgtatgtagagctggtgcaggggcaaagggagtgcccttgtacaggcacatccaggagatttcaggaa

SEQ ID NO: 54057 - DNA, 262 bp, Glycine max
gtagaatgtaaggaagttgtttctgaatatggagaattgttatgggatctcttggtatcaggggtacgacctgatgatgtatgctcacaggttggtttatgtttcaaaagggctaaatcagagaggttaggatttggtcttttaaatttgtaagaagcattttttatatatcaatgttttgtatgctctttttgtcatatttgattcagtatacttcgattgagtaatgatttaaagatgtttgatggatgcttaataattc

SEQ ID NO: 54058 - DNA, 253 bp, Glycine max
attcactacttatgcggagaagaggattgtggaggctgtccaaggagaacaaagagccgcgttgaatattggaatcggttggaggggtttgaatgaggacgttgagaggttcaaggacaacttggagtttacaaagctcaaaaataatcaggaaggaattgaccctgataatgtctattctcaggttccctatgagaaaggttttcagttcttatggcgcattgagcgacaggttgggagacctgcatttgat

SEQ ID NO: 54059 - DNA, 251 bp, Glycine max
tgagaggtggacatcaagcacgggtaggttcactgtcttggaacaatcatattctcacaacaggagggatggatggtagaattgttaacaatgatgttagagtgagacatcatattggtgaatcttataggggacatcagcaggaggtttgtgggctcaggtggtctccctccggacaacaattggcaagtggaggcaacgataatgttattcacatatgggacagggctatggtttcctcaaattcaccg

SEQ ID NO: 54060 - DNA, 258 bp, Glycine max
agtttttcttgtcagctcgctgcaatatggaccagcaaaatgcatctcattgctttgggcttttcttagcagtgcaattcaagggatcagtatctcttcatgttgactatgaatttgctgctagatcaaaatcgactgagagtatataagcaggtgcaagggagattatactttcacggcgggcaaggctgtagggtataggaacctgtttggtattccatggactgcattcatagcagacgatagccatttattcat

SEQ ID NO: 54061 - DNA, 270 bp, Glycine max
ggcattgttccaaatgatcacttctgctgttctcttctaaatgttctgactcaaacaccaaaagaagagcttggtaagctaacagattgcattgagaaggctaatacaaagcttgggactgtggtaagatatttgatggaagagctgagggtgatgaagcctttagaaaggaagcattagaacttttaaattcaattgatgctgaagtaaagaagcctttatgcaattgtctaattgatctttgtgtcaagctgaatgtgcctgaaagag

SEQ ID NO: 54062 - DNA, 258 bp, Glycine max
gagacggaatttggacatggcaccgtataaaccgtctgtttaattggcttcctctagcagccctaattgagaaaaaaattatttgcatgcatgggggtattggtcgttcaataaatcatgtggaacaaattgagaatatcagcgtccaattacgatggaagcaggatcaattgtgcttatggatctattatggtctgatcctacagagaatgacagtgttgaaggactgcgaccaaatgctaggggtccaggattagt

SEQ ID NO: 54063 - DNA, 194 bp, Glycine max
ggaatcagaggcctttgcaggggagctttttgatgcgctttctaggaggaggggaattcaaggggattccattaacaaggccctgttgaaggacttctgggaccaggtttctgaccagagtttcgattctaggctcagaacattctttgacatggttgataaagatgcagatggaagaatcacggaggaagaaa

SEQ ID NO: 54064 - DNA, 250 bp, Glycine max
gaagaatgagcatatctgtggaaggcctttgggactcagatttgacaagaaaacaggtgatttgtatattgcagatgcatattttgggctcctgaaggtaggacccgagggtggtttagcaacatctcttgtaactgaggctgaagggattccattgagatttacgaatgatgttgatgttgatacggaagggaatgtttattttacggaaagcagtgctctttatccaaggaggaatttccttcagctg

SEQ ID NO: 54065 - DNA, 241 bp, Glycine max
gagaatgactgttactgatgagagcttggagtttctggctctcaaattccccaatttcaaagccctttcccttctcagttgtgatggattcagcactgatgggctggcttcaattgccactaattgcaagaatttgactgaacttgacatacaagagaatggtattgaggataagagtggcaattggttgagttgtttccctgacagcttcacatcattggaagtattgaactttgccaat

SEQ ID NO: 54066 - DNA, 245 bp, Glycine max
ccacattcaatgttgtcaagagaaagtggtgtatgtgctgagcacaccgatgccggtatatatggaagacgaaactctggatcaaacaaggaagcgttcgaaatgggagaacgacgattacatttgtcgtggacacattctgaacggtatgtctgactctctctttgatatttatcaaaatattgagtctgctaaggaattatgggactctcttgaatccaagtatatggcagaagatgcctcaa

SEQ ID NO: 54067 - DNA, 110 bp, Glycine max
gcaggaggctccttccacttagtcaactgccctgtcggtcagagcgttgaagctgtatcattctctgaacttgaagttggtgcagatgacagggctgttctggatcaaat

SEQ ID NO: 54068 - DNA, 231 bp, Glycine max
cttggaattccatgattgcgggaatgatgttaaataaagagagtgagagagctgttgatatgtttcaaaggctggaatctgaagggttgaagcctgattcagctacttggaattccatgatcagtgggtttgcacaactaggggagtgtggggaagcttttaagtactttgggcaaatgcagtctgttggtgtggctccatgtttgaaaattgttactagccttttgtcag

SEQ ID NO: 54069 - DNA, 226 bp, Glycine max
ggaagttaccactgccagagtctgatgaagaactttatgaggtctatgaagatgctacattggagaagattgcacacaccaaccaaatgaggtttctagatagagcaagcattcatcaggaaaacatcgagtcacagcaatggaaagtttgcacagtgacacaagttgaagaagtgaagatcctaaccagaatgttacctatactagccagtaccattataatgaa

SEQ ID NO: 54070 - DNA, 232 bp, Glycine max
caagcatggcaacgaccccaagcaccacacagaatggtacagagttattaggaaaggagtctgatggaaaagatcgggtttctgccaaaagttcgaagggtgtgtctacaaacagtggttccaaagcaggagacaatggaaaggcaggctcaggttctggaaatgatggtgtctcacaaagctacaaacaagaaagggagttttaaccaaatgcttgttgatggagccaatg

SEQ ID NO: 54071 - DNA, 230 bp, Glycine max
caaagagatagctcgactgaagaaattgattggatattggaaggagcaagcaggaaggagaggagaggatgaagatttagaattttaaggagagatagtaacaagtattctttctcgttgaaggcatatatgttggaattatatcaagatacacttgtagatcttctgttaccgaagaatgcaaagcgtttaaaattggatattaagaaggattccaagggaatggtagc

SEQ ID NO: 54072 - DNA, 279 bp, Glycine max
cctccttctgatcccgtcgccttttttagggttcaagtcggtgtacaatctccccaagcaatcaccacttctcgactattactacgcagatttagtgatttcgtcaatctcttttctcaactgaaaaaggaatttcccataaaagatctgcctacacctccacccaaaaagataccaagaattaaaagtcacactgtgttggaagagcgacgccttttattagctgattggatggaaaagttgttatcggacgttgatgtatcaagaagtgccccggtg

SEQ ID NO: 54073 - DNA, 263 bp, Glycine max
gccacgacacacaacacaaaacatcaagcattggtattcgttgagttggagaagcaaacatattgcgatcttaaagttctgaataacacagagaactacgttgcctttaaggtcaaaaccacttcaccaaagaagtactttgtacgacctaataccggtgttgtacatccatgggacctatgtatcatcagagtcaccctccaggctcaacaagaataccctccagacatgcaatgcatcgacaagtttctcttgcagagtac

SEQ ID NO: 54074 - DNA, 281 bp, Glycine max
aacaacttctgctacttcctactccaaccgcacttctgctccgcaattatcatgggcaaggtcaagatcggaatcaacggatttggaagaattggccgtttggtagccagagtggctctgcagagagacgatgttgaactcgttgccgttaacgaccctttcatcaccaccgattacatgacatacatgtttaaatacgacagtgttcatggacactggaagcatcacgatgtcaccgttaaggacgagaagacccttctcttcggtgacaagccagtcac

SEQ ID NO: 54075 - DNA, 264 bp, Glycine max
gagagagagaaagagaagtgtgtagttggtgaagtttttgagaagaatatggaacgaagtgacggaatggtaacggggtcgcatgaaaggaacgaacttgttagagttagacacggttctgacagtgggatttgtcaaatatgtggtgacaccattggattaacggctactggtgacctctttgttgcttgtcatgagtgtggcttcccactttgtcattcttgttacgagtatgagctgaaaaatgtgagccaatcttgtccc

SEQ ID NO: 54076 - DNA, 253 bp, Glycine max
caacaactactactactactacctctaaccgtgccgtttgtcaggtgcaagattgtagggctgatcttagtaatgccaaggattaccaccgtcggcataaggtttgtgatgttcattctaaggccactatggcactagtgggaaatgttatgcaacgtttctgtcaacagtgtagcaggtttcatgttcttcaagagtttgatgaagggaagagaagttgtcgaaggcgtttggcaggccacaataggaggag

SEQ ID NO: 54077 - DNA, 250 bp, Glycine max
gtgaagttgtaaatgaagatgaatacctgagggttttccctaggggcataggtccaacactcttgggcgcaagaaccgaatcttctaggcaaacagccatagttatcatgcatcatatgaaactcgttgagatgcttatggatgtcaatcaatggtcaaacatgttttgcggcatcgtttcaagggcggtaacacacgaagtgctgtcaactggagaaactataagatacgatggtgcctgccaagtgat

SEQ ID NO: 54078 - DNA, 247 bp, Glycine max
gggaagacttacctacttagaatcatcaatgctgccctcgatgacgagcttttctttgccattggtggtcacaacttgacagtagtggaggttgatgcagtttacacaaaaccattcaccactcaaaccattctaattgcacctggtcaaaccacaaatgttctagtcaaggccaaccaagtagcaggaagatacttcatggctacaaggacctttatggatgcaccaataccagttgatagcaaag

SEQ ID NO: 54079 - DNA, 258 bp, Glycine max
cagaaaacagagatctatcattaacttcttggtgaattgtacagcagggacaatgttctataaatcaattgatccatccaattttgtgaaatctggtgaaaagacatttgagttgttggactctattgtggaagagattggggaggaaaaggttgtccaagttataacaggcaatggaagcaactatgttttggcaggtaaatttcttgaacgaaaaaggtcacatttatattggattccttgtgcagcccattgcat

SEQ ID NO: 54080 - DNA, 255 bp, Glycine max
gctttgataaccctcccttcaattgggtcacacgtgtttacaataaccccgtcactgtccctcatgcatgttgctatgtcgtggaatagtttataactctgactcgcacggtcgcgcacttctttcggaagatctaaaaggtcaatttttggtaaccctgggatgcttaaatgcgtgttgaggtctttgatggattttgttgtggtttcgtgaatgactgggagttggagaaaggttgcaagagatgaagcgccg

SEQ ID NO: 54081 - DNA, 248 bp, Glycine max
caccaaccaaacctcactctccctttctcccctgaccctctccctgccatggtcatgggagcctttggccacttcgaaccggtctccaaatgcagcaccgagaaccggtctaaccaaaccgtggcctcggacttggacggcaccctcctggtgtcccccagcgcatttccttactacatgctggcagccatcgaagccggcagcttcctccgtggccttgtcctccttgcctccgtccctttcgtgta

SEQ ID NO: 54082 - DNA, 245 bp, Glycine max
cgtggccccaccatggtcgccaacactctccacgccgccgctattgctctgacggagagtgatgactgggattggttcattaatctcagcgcctccgattaccccctcgttacccaagacgatctgctgcacgcgttctcgcatttgccacgcgatcttaacttcattgatcataccagtgacattggctggaaagatcatcaacgggcgaggcctataattattgatccggggttgtatatgac

SEQ ID NO: 54083 - DNA, 242 bp, Glycine max
aaagtcctcttatgggaaatttttcactggagactcctatgtgatcttaaagacaactgcctcaaaaagtggtgctctgcgccatgacatccattactggcttggtaaagacaccagtcaggatgaagcgggtgctgcagctatcaagacagttgagctggatgcagctcttggaggacgtgctgttcagtatcgtgaagtacaaggccatgaaactgaaaagtttctgtcttatttcaaac

SEQ ID NO: 54084 - DNA, 244 bp, Glycine max
gtgatttgatcagaaaggaatatgacatgaagtgcaaattcttacggaatctggaatcaaaaggagaaaagacttctagaattgataaaatgcgtactgtagtcaaggatctgcattcaagaattagaattgcaattcttaggatagactctatatctaagaggattgaggaattgcgggacaaagagcttacgcctcaacttgaggagttgattgacgggttaagtcggatgtgggaagtgat

SEQ ID NO: 54085 - DNA, 255 bp, Glycine max
ccacgttcaagctcttcttgtgcagcttgcaagttcttgaagagaaggtgcatacccaattgcatatttgcaccttactttcgctctgacgagtgcaagaaattcgccaaggtgcacaaggtgttcggggcaagcaatgtgagcaagatcctcgttgaggttcctgaggaacagagagaggatacggtgaattcgcttgcttatgaggcggaagcacggcttcgggacccggtttatggatgcattggtgccata

SEQ ID NO: 54086 - DNA, 258 bp, Glycine max
ataatttcaaaagtctagttcaattgcaggggatagagaagaacctgaacagaaattgtaccagagcactgtactttccagacttgtgcttctttccacaatatgcgttgagatacatatcaacaccatattttatcttgaactctgcctatgatgtattccagcagttcactcatatattggtgccaccctctgctgatatgcgcggacactggaaacactgcaaggcaaacctggcagagtgtacaacagaacaaa

SEQ ID NO: 54087 - DNA, 254 bp, Glycine max
gtgaggacacgacaatcaagaggtggaggatttcagactccaaatgcttggaatcaatccacgcccacgacgacgccgtgaacgccgtcgtgtgcggggacaggggcgtgatattatccggctcggcggacggcaccgtcaaagtgtagcagcgggagcccgaagggcaaggcctgacgcacgtgccgatgaagactctgctgaagcaggagtgcgcggtgacagcgctggcgatggacgcggcggaggggtcc

SEQ ID NO: 54088 - DNA, 248 bp, Glycine max
ctggaattgaggtctattttgatatgatgagaagctttcggacagagtttgatgacctgtttgcagaaggtttgatttctgctgtggaggttggacttggagcatctggagagctaaaatatccttctttctcagaaagaatgggatggaggtatcctggtatcggtgagtttcagtgctatgataaatacctgcagcatagtctgcgcagagcagccaaattacgtggtcactctttctgggctaga

SEQ ID NO: 54089 - DNA, 251 bp, Glycine max
cggctgcatggtgggatgctgacttgcctaactacacgcccgtgttgtacaaacccgaggaccctaaagggttgaggtttacggtgcttaagccaagccaaattgcgagaatgtaccactccacttccacggtgcttcccagtggaaagatttgggtttctggaagcaacacccacaatacctatagggacgtggataagttcccaactgagacaagagttgaagctttctctcctccttatttggacgcc

SEQ ID NO: 54090 - DNA, 267 bp, Glycine max
aaaaaatgaacacttactaaggtctgggcaactgggaatgtgcaatgatccttattgtactacttgccctacctacttcaatgcttctcagcaaagaaatccaaaaccttcgactagatgggatccaaagttccataatgctctttatggggatgccaagagttttgtgagaaaacttctttctttctgctattcgtatgttcctggagttatgaaccctcatgctaaagtcgtacaaaaatggaacaaatttttggccattttttg

SEQ ID NO: 54091 - DNA, 269 bp, Glycine max
ctcatcctcggtgatggcttatacaactttgtcaagattttagtttcctcaatccttagcgtacatgaaaaaattaagaaccgtaaaaatgcttcaagtgcggatcaacagagagataacgctgaagagcttaaacaaaaagaagttttcctgagggacaacatttcgatgtggatcggaaccggcggatacatagttttgtcggtgatttccataattgtaatccctttaatgtttcctcagctgaagtggttctacgtggtggtcgc

SEQ ID NO: 54092 - DNA, 267 bp, Glycine max
gggtgcaagggaagagatcatataattgctttgcttatttgcgatgcttagatggaagaacatctcactccattggctgttacacatctccttcaacacactctcagaagtttgtgcatccatgacaattctcaatgggtctacgcagtcttctggaggatcttgcctagaaactaccctccacgcaagtgggaaggacaaggggcttatgctagatcaagaggaaacagaaggacttggatattggtgtgggaagatgggttctgc

SEQ ID NO: 54093 - DNA, 266 bp, Glycine max
cttaaagctcatctctctgaggatgcctttgttacttgtgcattactagacatgtatgctaaatgtggatgcatggaacaatctcagaacatttttgacagggtaaacgagaaggatgaagcagtatggaatgttataattgcaggatatgggattcatgggcatgggctgaaggctattgagctgtttgaattgatgcaaaataaaggcggcagaccagattcttttacatttctgggagtgctaattgcctgtaaccatgctgg

SEQ ID NO: 54094 - DNA, 259 bp, Glycine max
attgatgttgactctctcaagggcttgccttatctcagaacgttgagtttcatgaacaatgatttcgagggtgcatggccagagattcaacatttgattggtctcaagtctatttatctttccaacaacaagttttctatgggagattccttccagaacttttgaagggttgcagtggctgaagaaggttcatttgtccaacaaccatttcaccggtgctgttccaacttccctcgtgttgctgccgaggctcatagag

SEQ ID NO: 54095 - DNA, 253 bp, Glycine max
gaagaacacgattgtgaaccgtcccttggctgggacagctaaaagggcgaaaacacctgaagaagatgcaaggttagaagcaatactgctgagagatgaaaagcagtgtgcagagcatgtcatgttggttgatttgggacgcaatgatgttggaaaggtttgctatagatacattttaatggatattcctatttatttatcttgttcaaggtgtcttgaagcaatagcttgctcaattatattgtttatttaa

SEQ ID NO: 54096 - DNA, 254 bp, Glycine max
cggaccgtttattaaagccttttggggtctagtgaggagaagttgcagtgcacagtgtgcttggaggatgttgaggttgggagtgaagcaaaggagatgccatgtaagcacaagttccatggtgattgcattgtctcatggctcaaacttcatggttcttgtccagtttgcaggtttcagatgccatctgaggattcaactcttgaagccaatgtgggagttggaaatggggacaatcagaacagtgagctggt

SEQ ID NO: 54097 - DNA, 252 bp, Glycine max
ctagtgcaagtaagatgggcaaggaacataaagctgataatgtattggcagatcaaatgcatgaaatgtggagggaaatctgagcgtcaagaaaggatgatggatctgacagtttacaagtgctgagactctggatggagaaaacaagtaccgatgtgtcaggtgtaaatcttatgagaaggccaagaagaaaatgacagttttggaggcacctaatgttcttactattgcattaaagagatttcagtccgg

SEQ ID NO: 54098 - DNA, 246 bp, Glycine max
gttggtgcgttgatcagtgatttaataatgtggaaagatgtttcaaaatcgaccctttggtttggtttggggtgtctttgtttcttgtcttcttgcttcactaaaggggtcaactttagcattttctcggccatatcgcgattggcaattctcttgttgggtgtttcattcttctcaaactcagtttgtcaaagaaaccaggttgagaaaaggagttttccaagctgaaagaagatgacattttac

SEQ ID NO: 54099 - DNA, 263 bp, Glycine max
caacacgaaagcatagccaaaaccttttttcgaagtctctgattttcgctaatggctccggcaaaggcagagaagaagccggcggagaagaagccagcggcggagaaggcaccggcggagaagaagccgaagcgtagaagaagatctcgaaggaaggagggagcgagaagaagaagaagcgcacgaagaagagcgtggagacctacaagatctacatcttcaaggtcctcaagcaggttcaccccgacattggtatttccagc

SEQ ID NO: 54100 - DNA, 266 bp, Glycine max
cggaaacttggaacaatggctgcatggtgatgtaggaccagttagccccttgacatgggatattcgaatgagaattgctattgggactgcaaaagggctagcctatctgcatgaaggtttagaacccaaagttgtgcaccgggatataaaatccagtaacattcttttggataaaaactggaatgccaaagtatcagattttggactagcgaactcttaggatctgagaaaacacacgtgactacgcgtgtaatgggaacatttgg

SEQ ID NO: 54101 - DNA, 258 bp, Glycine max
gaaacataatggagaggtttttgctggttggaattcttggttctcatgtaacggttgcttcaaggccaacaattttgaatgctttgaagatgttagaaggggatattgaggtcccaccaattccagataggccactgagtcatgggaactatgtgttgtacagtggtgattgctctgggatgagctcaggatgtggatttgtgagctcatgaaaagttgaatgattcataaaatccatccttgatgagttggacaaga

SEQ ID NO: 54102 - DNA, 252 bp, Glycine max
gtccagccggaagtacttgctatgatgtgcaggttgatgtgcctcttccacttgagaaggatatgtctgcgttcttggcaagcactgagaggcacaaagatattgatacttttgatgaattgatctctgattcgataaagaagattcgtgaacatcataggagacgggcattctttctcggctttagtcagtccccagcagagtttattaatgccttgatagcttctcagagcaaggatctgaagctcgttg

SEQ ID NO: 54103 - DNA, 160 bp, Glycine max
acaacaaaatggtgtgtgaacagttcggttcggacaacgatctagccaacagaatacggtgttttggccctcataccactgcgaccaccatcatggtggatgcatgtaacggagttcagtacctccatgccatgaaggacgctgttcttgctggctttca

SEQ ID NO: 54104 - DNA, 177 bp, Glycine max
acactgcaacagcaacagcttccaaatggcacacggacaacgtagagtttgtgtcacgggaggcactgggttcgttggttcacggaccatcaagagatccttgaacacggatatgctgttaacaccactactagatctgactcaggacgcaagagacacgttagcttcctcaccaac

SEQ ID NO: 54105 - DNA, 220 bp, Glycine max
tttcactcgttgaaatgacaatgccgctcttctttgtggaatttgtgtctaattttggattcactaccctctctctgcattctgtgcctttccacggaggccactccctgcctcattcggcacaaactacgttctcacttgggcttttgatcacatcacatacttcaatgcacgttctgagattccacttcatcttgacaactacactggtactggcttc

SEQ ID NO: 54106 - DNA, 104 bp, Glycine max
atcacccttgaggtggacagtctgacaccatccacaacgtcaacgccaacatccaggacaacgaaggaatccccccgcaccaccaaagcctcatcttcgccggc

SEQ ID NO: 54107 - DNA, 256 bp, Glycine max
tacaaatgttgctgtaggagataagattgcagtagtgctaagtgctaacacctgcagtgaacaatggcctctgcatcagcatctctgctcaagtcttcacttgttcttgacaagtctgagtgggtgaagggacaaacccttcgccaaccttctgcatcagttgtgagatgcaaccccaccaccccatcaggcctcaccatcagagctggttcctatgctgatgagctcgttaagaccgcgaaaacagtggcttcac

SEQ ID NO: 54108 - DNA, 207 bp, Glycine max
gcccttcagggtcctgttccttcgtttgagaaaggtgtgaagttcactctcgatgggatcaatagtttttgtctgaaagatgttggaccctgcgattctcgtatctccactttgcttgatatcactgcgggtttcgggtatccccttcagttggcgcgttcctggactgggaacgatccttgtgatgattggagttttgttgtgtgt

SEQ ID NO: 54109 - DNA, 202 bp, Glycine max
caaggctctactctactgcttcacattctgctctagaaaattcagtggtgacacacagcttcggctactctctctgtagccaaaccagcccttcaggcaaatgggaaaggcttctctgaattctctggcctctgcagctcatcaggcttccttcccttttctagaaaatcttaagaggatttccactctgccattgccttcc

SEQ ID NO: 54110 - DNA, 204 bp, Glycine max
caaagaccacaatgagttccattatgtatcaaaagatgcagaggattcagatagaaataatgataccaagtggtggttgcctacacctaaggttcccgcaaacggtttatctgatgcagcaagaaggtttgttcagtatcagaaagattgtgtgaaccaagttcttaaagcagctatggccataaatgctcaaactctatcaga

SEQ ID NO: 54111 - DNA, 202 bp, Glycine max
ctaacatgagtcacgcatggacattattgttgacccaaattcttctggtggcggaggcaaagaaaaatgtcccagcggtgattgttttcggagactcctctgtggattctgggaacaataacgtcatagccacggttttgaagagcaacttcaagccctatggtcgtgacttcgaaggtggtcgtcccacgggacggttttg

SEQ ID NO: 54112 - DNA, 182 bp, Glycine max
ttggtaaagacggagatctgagctgaagatgctggaaggacatcccaatgttgtcacacttcatgcacatgccatcgttgatattagtaagacgaaagaagcattcgttgtgatggaattttgtgagaggtctctggttaatgttctggagtatcgaagagtcgattattttgatgagaaac

SEQ ID NO: 54113 - DNA, 258 bp, Glycine max
ggatcttcagggctatgaatggcgctttaagcatatatttagaggtcagccacgtagacacttgctcacaactggatggtttaattttgtgacttccaagagattagttgctggagacacctttgtgtttctgagagggaacaatggagaattgcgggttggagtgaggcgcattgctcctgtgcagagcagcatgccatcatctgtgatttctagtcagagcatgcacctaggagttcttgcaactgcatctcatgc

SEQ ID NO: 54114 - DNA, 254 bp, Glycine max
gaattaaaacatattttgttttcattgacgggtctaccgttatggttacatgatattccgggtatcgtattcagatctgacaatgagcaattcaagttccacatgcaaaggttcaccgcgaaaatagccaacttaatgaaatcagccaatctttttgcttcacaaggagggcctatcatactatctcagattgagaacgagtatgggaacgttgaaggggcatttcacgagaaaggactgtcctatattcgttg

SEQ ID NO: 54115 - DNA, 252 bp, Glycine max
tttgcttatcttcgatagcagcttcttgaatctggaagatatatttggctattcaaggcattgtatggtcttctgatgtcgcttcctcaggtatctgcaaacaatttcttcttacctattgagaaattgttgaggcattgatttccttgtatgaacgggatgtgttcaaatatccttctttggagcaaagtgccgcctttaagatactaaaaacgcgtttaaaagctgtgccatcgtattcattcaatggcg

SEQ ID NO: 54116 - DNA, 152 bp, Glycine max
gttggaaccgttcttcgtgttctccattcgctctctcagtccttgcatctacgtgaatcttcgcttccgttccttatcttgtgctttctttcctttacttgtgatcttgctcattgttgtgctcaataacagattgtttcgtgcttgtcttg

SEQ ID NO: 54117 - DNA, 258 bp, Glycine max
gggtttagggttttgattcctcagtccaagccgctctccgcaggcgaggttctgggttgcactgcgcccaaggtatcgtcgaaattgctcggtgatgatggtgagagtagtgttttggtttttgtggcggatggaaggttcacttggaggcgttcatgattgcgaatccggggattagggcattcaggtatgacccttacatggggaagttgtttctggaggaatatgatcatttgggtatgaagaggtccaggaaaa

SEQ ID NO: 54118 - DNA, 243 bp, Glycine max
tttaatttccatagttaattaaagcttcaacgtttctgtctaaaaaaacacctctttcttccaggtgctcaacattcctaccaagattaacaagggtactgttgaaatcattacccctgtggagctcattaagaaggggacaaggttggatcttctgaagctgcattgcttgccaagctagggataaggcccttctcgtatgggcttgtggttctttctgtttatgataatggttcagtgttc

SEQ ID NO: 54119 - DNA, 257 bp, Glycine max
cgacctcctcactttctaccacttcaactgctcttccctcagcctcctcggtcgtgttcggctttcttcccgcggcgtcaatgtcaccgttggcggcaacttatcctctctcgagatccacatcgaagccctcttagcctacaactctctgtttcacgacactgatttcaagctcgccaattgtcatcagctcttaaacgacaaagtagcccaggaatgtggattcacttctctatctattcggatcgtcgatgaac

SEQ ID NO: 54120 - DNA, 256 bp, Glycine max
ctaccccaaagtgcaaaagacatttgaaagagtttcaggttactgtgagcagaatgacatacattctccatatataaccgttgaagaatctgtcacatactcagcatggttgcggttgccaacagaaattgattcgtcacgaaagggaaatttgttgaagaagtccttgaaacaattgaacttgatggtataaaggattgtttagttggcatccctcgccagagtggcttgtctaccgaacaacgtaaaagactaa

SEQ ID NO: 54121 - DNA, 249 bp, Glycine max
tttttccctcaccaaagaagaaccaaaacaatggcggatcaactcaccgatgaacagatctccgagttcaaggaagccttcagcttgttcgataaggacggcgatggttgcatcacaaccaaggagcttggaactgttatgcgttcattggggcaaaacccaactgaggcagaactccaggacatgatcaatgaagtggatgctgatgggaatggtaccattgacttccctgagttcctaaacctcatg

SEQ ID NO: 54122 - DNA, 246 bp, Glycine max
ggaactgcaggttatgcgaatgcttgaccatactaatgttctcagactaaaacactgtttctattcaactgctgagaaagatgatttgtaccttaacctagttttggagtatgtacctgaaactgttacagagtttcaaagcactatgtcagaatgcaccaacatatgcctatcattaatgtgcaactgtatacataccagatatgtcggggtttaaattatttgcatcatgtgattggagtctgc

SEQ ID NO: 54123 - DNA, 258 bp, Glycine max
tgtcacccctccttcctttatggttcggatggccatgagattgtctagagcaagatggtttacctttttgagaagagtttttcattaccaaaatggatcaaggtccaaccttggctccaaccctttcaattctagcacttggatgatgctggagtttattgccttgattctccaaataacaattacaacgttcactttggccatttccaagagggagagacctatttggccgatgaggatttggatttctggatatga

SEQ ID NO: 54124 - DNA, 260 bp, Glycine max
gtttgccgtgggagctatctgaatctaactggcgaaggggctttcgaaaaggtactgaaggagtggcatggaattcttgatcgtcattatttgatgctagaagcttgtgaattaaactctgtttctgaagaggactataatgacctgggaagagctggtttaggcagttgtttgcttggaggcctgccagattggctagtttcctatgcagctcgccttgtgagatttatcaattttgaacgaactaaacttcctgagga

SEQ ID NO: 54125 - DNA, 189 bp, Glycine max
cgattaaagacttgcttccaagatggttctgctctcagaagctctgggatgacgttgttgctggccctcaacctgagcgtggccttggcaagctcagaaaactcaccaccctcaaatctattgatgacggagacagtagcaagctgcagaagacgtcgtcgatgccgtcgactccgacaaccccgatga

SEQ ID NO: 54126 - DNA, 241 bp, Glycine max
ccggcaagaccatcgaccttgaggtggaaagctctgacaccatcgacaacgtcaaggccttatccgtctcatggcaggatcaaacaccggaccaatcaaccttggaaacccaggtgaatttacaatgactgaacttgctgagacagttaaagagcttattaatccaggtgtggagatcaagatggtggagaacactcctgatgacccacgacaaagaaaaccagacatcacaaaagcaaag

SEQ ID NO: 54127 - DNA, 233 bp, Glycine max
ggcaagccccactcaaccaccacacatctcctcgttcacgctacccctttctgctcttcttctacctttcaagttttaaaagtataaagatggcagagacattcctatttacctcagagtcggtgaacgagggacaccctgacaagctctgcgaccaaatctccgatgctgtcctcgacgcttgcctcgagcaggacccagacagcaaagttgcctgcgaaacatgcaccaaa

SEQ ID NO: 54128 - DNA, 224 bp, Glycine max
attttatatgtatatggggacagctgagtgcactgctattgatgcttttaagcatgctggggaaaatatggtgtttgcaagtggaagccctttcgaaaacgtagatcttggtaatggaattgtgggtcatgtaaatcaagcaaacaacatgtacctcttcccaggaattggtttgggaacccttctgtcaggtgctcaccttataacagatggatgttgcaggc

SEQ ID NO: 54129 - DNA, 261 bp, Glycine max
aaagtgtaataaaggacgaaagttaggctattctttcaaccgtaagtgtgacttggtagccacttctctgaaataacatatgttactttgtcattttccaaaagggagtagctggtggtgccggagagaaacccattccacttggtgagaacgttctgcagaagcatgctgcattctttgacttgaataaagatggtgtcatctacccatgggagacttttaaagggttccgtgatatcgggactggggttttgctgtccg

SEQ ID NO: 54130 - DNA, 262 bp, Glycine max
gacagaacaaagggctgcagaaagaaagaagaaacttgatgaatagttcaatgctaatgaagcacaaaaagtgcagctgcataccaaactcaaggagaaatctgagaccgagattattagttaactacgccaaagcttgtgcttcaaagccaggccactgcctgatttttacaaggaaaggaaaacatcaacgaatgagacaaaaaaggatccactgacacattgtgaaacacctagagaccgtaggaaatccaccccgagt

SEQ ID NO: 54131 - DNA, 243 bp, Glycine max
gggagaagtttgttccccaaaattgataattctaacataaatagagcagaatctcaacaagacaacaatattgatggcttgaaggctgaatgggtagaacaatacgagctcggtgtttacatcacatttacaactttgccatgcgggaaaaaaggccttaagcgagtgagatttagtcgaaagcgattctcagagaaggaagctgaaaaatggtgggaagagaatcaagtgacggtgtatcac

SEQ ID NO: 54132 - DNA, 229 bp, Glycine max
tgaactcagtttgacaactggaaatgctggtggaagattagcatgtggtaccaaaaaaaaaaatttaaattcgatcagttctcttcttttcatattcacctattcatccattccaacatgatgttatttggtttactctttgcctcaatgttctaagatgaactattttctataacatcatgatcaatttccgttttatgataaaaaaaagtacaacgatttccacaca

SEQ ID NO: 54133 - DNA, 245 bp, Glycine max
gcacccttctacatttccgtcaaagagaaccttccagaacctcacttcaatggcgagcgtgttgagcctaagaatcccagaggtgtccttcacgggaagggtttggaggatgtcattcagtttttcaatagtggaagctataaccctagttataacacctctcttgaaggtcgtcggaagttgtttgctattactaaggaggaggtgttgttgttgaacaagcgaatgcccgacttggcaattgc

SEQ ID NO: 54134 - DNA, 203 bp, Glycine max
  unsure (1)..(203): unsure at all n locations
ccaggaggatcaagacgtctttgtcacaattttatagttatagatcgatggctagngggtcttatcggcgtatggaactggtattgctgctaagacgctatagtcaattgggatcaatcgcaaagatgctcgagtggaagtagataatataattggaaggtgtagtggatttggggctgtgtgagagtccatgtattccccgg

SEQ ID NO: 54135 - DNA, 234 bp, Glycine max
cacttgtattgatgaccaaagaagcaaggcaaagggaaaagttaaagcttctggatttggtctggatgataattctagtaacacagaagagtatttgattggggtgatatctgacatgctaaaggaacttggcaaaggagatagtgtatctacttttgaatttatcggtagtggtgttgttgaagccttgctaaattattgtgcttgtgggtatttctctaaagatcgaatatc

SEQ ID NO: 54136 - DNA, 231 bp, Glycine max
actattcagataggtatgcaggagatgatatgcacccaaaggagaaaaggcgaacacctgcttggtgtgacaggattttgtggtacggagaaggtctccatcaattatcttacgtccgtggagaatcaaggttttcagaccacaggccggtttatggcatattttgggctgaggttgagtcaagtcatggaagactgaagaagagtatgagctgttctcggaacagaattg

SEQ ID NO: 54137 - DNA, 253 bp, Glycine max
ggcgaggagaacgcgcgatgcatcgccgacgggaacgaggtcatacggtttcattgcttgggttttgccgaggacggtgtaccctacgacggtggtggctgtgcatggtcatttccggagaagaagggggcggcgatttgtactttctccggaagcggcggcgcgcatgagacagccggcggaggaaaggggagaagggccatgctggtttgtcgggtcgtggcgggtcgggtctcgaagcaactcgggtttc

SEQ ID NO: 54138 - DNA, 254 bp, Glycine max
ctagaaaaagactacataaagaatgtattaggggaacaagggcagcacatggctgtgaactactatccaccatgcccagaaccagaacttacctatggattgccagggcacactgacccaaatgcacttacaattctgcttcaagaccttcaagttgctggccttcaggttctcaaagatggcaagtggcttgccgttagtccccaacctaatgcctttgtcattaacattggcgatcaacttcaggctttgag

SEQ ID NO: 54139 - DNA, 244 bp, Glycine max
aaaatttgcgggtgttcttgtctccgatgcctggcttcatagccagttcacgcaggttgagcttcgcagcctgaaatcaaaatttgtctctttaacgaatcagaatggtaaagttacctttggagatttgccgcctttgatggtgacgctaaacgcattcagagatatgtacagtgaggatgagattaggggtatcttgggtgaatcaggcactgattttaccaatgacattgattttgaagcc

SEQ ID NO: 54140 - DNA, 250 bp, Glycine max
atgatgttcgttgcagcatgtggtacaaagcagagctatattccttcacttcccccgttgacaagatgcaaccgtgactcaaagttgatcaagttgtggaagaaagctagcccttgtggtgctaatatctcagagctagaacacatccatgaaggtcataatcctaggccatcaactagccgtggcacccagcgcctctatgttcgtctcaacaccttacactatctcctctctaacatcaacacccttg

SEQ ID NO: 54141 - DNA, 245 bp, Glycine max
gagatgtgttgatttggggttaagaactgtgcttatagtcacacctgtcaacgtgctacataattggcgtcaggagttcatcaaatggagaccttctgagttaaagccactcagggtcttcatgctggaagacgtatcgagagatagaagggcagaattgcttgcaaaatggagatctaaaggtggtgtctttttgattggttatgctgctttccgaaatttgtcttttgggaagcatgtgaaag

SEQ ID NO: 54142 - DNA, 245 bp, Glycine max
taacagaggctccaatgtaattaaagggaaaggtcctagtggtggtaggggtgagaaaccaaaagaagagtttggaagtggggttcaagaacccgagaagaacaagttggttttcttgagggaagttcttataattttgatcttgaggatttgctgagagcttcggctgaagttctggggaagggtagttatggtactgcatataaggccatactggaggagtcaatgactgttgtggtgaaaag

SEQ ID NO: 54143 - DNA, 240 bp, Glycine max
gtttccatcttacataacaatagagctgttccttactggagaaagctatgcaggacactatatacctcaattaactaatgttttattggaccataatgctcgttcaactggttccaaattcaatattaaaggagttgctattggaaacccacttttgagacttgaccgggatgcacctgcaatttatgaatacttctggtcacatggaatgatttctgatgaaattggccttgccattat

SEQ ID NO: 54144 - DNA, 239 bp, Glycine max
gtgcgttaggcataaaagatgtatgatcaactacaccatatgggctgtctcatcttcgagagaaaggaattggcttccaactatgagcaagttaaggcttcgattgattcatccgagtttatgtgtaagcatgattcaaccatgactttgtctgcactaattgaagcaaggaaacgggaagaaagcttgaagaaggcagtaggagtcacagaggcatatgaagcgcagaaaaaatcaac

SEQ ID NO: 54145 - DNA, 270 bp, Glycine max
tgagaagtggctggaagaacatctaagaaagagaggtgaggagaaggacggtaaatgtgaaagcgacttcatggatgtgatgatatctgctttccaagaggaagaagagatttgtggttataagcgggagatggttatcaaagcaacatcagtgcttcttatccttactgcctcaggaagcacagccataacactaacatgggcactctccttgctcctaaaccatccaaaggtcctaaaagcagcccaaaaagaactggacacccattt

SEQ ID NO: 54146 - DNA, 269 bp, Glycine max
gaagaacaaaattcaggtttccaacactaagaaaccccttttcttttacgtcaatcttgccaagaggtacatacagcaacgcgatgaggttgtgctttctgctcttggaatgggtactgtttctctaaaacttatattttcattcatcagtctttgaacataaaaatcaaattttcttccgtgtctaaattgcgggaaagttattataaatataaaactgaacatttttaattttttaatgctcatttactccatatcatgtagcagct

SEQ ID NO: 54147 - DNA, 265 bp, Glycine max
cataattcagtgctcttgcaacaattgcctcattgggctccttgttctattacacaagctctagagttactttctcctgcatacaagggtcatccacgggtcatggcatacattctaagggttctggaatcctatcctcctgaacgagtaactattttcatgccacagctggtgcagtcgttgcgacatgcatgcagggaaattggtttaagggtatctgcttagagctgctcagagacgtgacatatttgcccatattcttatc

SEQ ID NO: 54148 - DNA, 256 bp, Glycine max
gtttccatttgattaagagaacaaaagaaaacaagagaagagattataggaacaaaagcaattaatggacacattgagggtgcaaagcttagcttctcagtcgaaggaaacgattcctgcagagtttgttaggtcagagacagagcaaccaggcatcacaaccgttcatggaacccaacttggggttcctataatcgatttcagtaaccctgatgaagacaaggtgctgcatgaaattatggaagcaagtcgtgac

SEQ ID NO: 54149 - DNA, 249 bp, Glycine max
aggactttgaaaaattatacatacgtcactcaatttggatccttggaatattacaaccggtgggatttaggttcaaacaacagctacaggtacaatcatgatgtttatgatcgtttctggtatatctatggtgacaacaaggattggaaacaattaagtgcttctattcctgccgattccttaaaccagaacgattacaaaccgccagagattatcttgagtaccgcagttacaccagtaaatgcttct

SEQ ID NO: 54150 - DNA, 247 bp, Glycine max
gtgtcgagccgattcggctcagcttacagaattcagcataagtaggatgcaatttcgggaatgcccaccaacttatatagaccatatgacaattttcatcccgagaattcgcatgtgttacctgctctcatgagaaggtttcatgaggcaaaggtcaatggtgctaaggaggtggttgtgtggggcaccggaagtccattgagggagttcttgcacgttgacgatttggcagacgcggttgtcttca

SEQ ID NO: 54151 - DNA, 280 bp, Glycine max
gtcgcgtgtacgcgtactcgggatccagttctatcctgtctttcgagatccagacctcttcccaatgatgaacctctgtttcttcttcttctacttcttcaccttcttcgccgccgtcagatctgatccctcagatcaccgctacaaagaaggcgaccccgtccctctctacgccaacaaagttggccccttccacaaccctaccgaatgctaccgttacttcgacctgcccttttgtgaaccaggtgatttgaaagagaagaaggaggcgctcggggag

SEQ ID NO: 54152 - DNA, 247 bp, Glycine max
attgctgtcttgtctgaagttagttcagcaatttttgctgaagttatgcaaggaaagcctgaattcactgaccatttgactcataaactaaagcaccaccctggtcagattgaagctgctgctattatggaacacattttggaaggaactcctattggagtctccatggataatacacgtttggctcttgcttcaattggtaaactcatgtttgctcaattctctgagcttgtcaatgattattaca

SEQ ID NO: 54153 - DNA, 245 bp, Glycine max
gtcagctcaggagtttataatctgagagatgtcagatcttgaggctcccttgcgtcctaagacgtacaaggtttgggtggactatgtcgttcagtttcgatctatccttgttatggacgtggtcgttcccatctccttcgccatttgtttccgtgcgtacgttgggggtgtaagatctgagcggaggtcctatgatgctcgtcggatcgaacatgatgatagtgtgatgagggctatcgaacgcc

SEQ ID NO: 54154 - DNA, 254 bp, Glycine max
cttgacaatttgcgccactacgcaccagagaaggcttctaagaactcaagggatggccaagacaataattgatgctgttttgggcctcactcttgatgattctcccagcaatcttgcagctgcaacccttttgtacgtgttgaccagtgatggccaagatgatcacctccttgaatcacctggttctgttcaatttctgatgaagttgttaaaaccaattgtctccacagctattaaagacgaagcaccaaaat

SEQ ID NO: 54155 - DNA, 240 bp, Glycine max
ctcttcctcaccgattgctagaatggaatttcgatgctcagtcatctcttttaccattctcttctctcttgctcttgcaggagagagccatgtccatgcatcgctacctgaggaagattattgggaagctgtttggccaaacactcccattcccactgcactgcgagagcttctaaagcctctccctgcaggtgttgacatcgatgaactccctaagcaaattgatgatacacagtaccc

SEQ ID NO: 54156 - DNA, 243 bp, Glycine max
caggccgggtctggtctccgtagcggttaccccccaaagatgcctttacccagttcccatttcatctcttctcagacctctacctggctcctctaaaaagcaagccccacttctctccgatgcctctctggacaaccctgatctcggcccattccttctcaagctggcccgcgacaccattgcctctggcgatggccccgccaaggccctcgacttcgccatccgggcctccacttcctttga

SEQ ID NO: 54157 - DNA, 258 bp, Glycine max
gccttgctttgcagcttcagttcagtctctaactgtgttgaatttatctaacaactctattgtggggggactacctgcttgtattgcttcttttcaagctttgactcatttgaacctgtcagggaaccacttgaagtatagaatatatcctaggcttgtgttctcggagaaacttcttgttttggacttgagtaataatgctttgtctggtcctattccttgtaaaattgctgagacaactgagaaacttggccttgt

SEQ ID NO: 54158 - DNA, 254 bp, Glycine max
gccgccgcagagttcctcgcatttgaatgaagagaagaagaaaccgaggcccaaggatgttttcgggcggcctcttccgactgaggaggaattcgaagttcttaaaaatgcgcctaggctggaaacaggagctcctgccagggtgaaaccttttggaattgaagtccgtaatgtaaaatgcttaagatgtgggaactatggtcaccaaagtggtgatcgtgagtgtcccttgaaggatgctataatgcctaatg

SEQ ID NO: 54159 - DNA, 254 bp, Glycine max
gacaacaactgaggagaaggatatcttgaatgggatcactggttctgtaaatccaggggaagttttggcattgatgggcccctcgggaagtggaaagacaactcttttaaaccttcttgggggaaggttaagccatcctataagtggtggttctatcacttacaatgaccaaccatattccaagttccttaagagcaggataggattcgtgacacaagatgatgttctgtttcctcacctaactgtgaaagaga

SEQ ID NO: 54160 - DNA, 254 bp, Glycine max
ggcaggtttgtcattggtgggccgcatggtgatgctggtctcaccggtcgctagatgatcatcgacaccgatggcggacggggtcgcacatggatcgcgtgtgttcgctgcgaaggatcgtaccagtgtcgataggagtggtgcctacatgatgcggcgagtctgttggagcattgttgcctatggcactgtcaggctgggcaattgtgcaagcgtcctatgccattggtgggcccgagcccttgtctgtgttt

SEQ ID NO: 54161 - DNA, 254 bp, Glycine max
ataaagtgaaggtgtttgatttggaggatttgctgagggcttctgctgaggtgttggggaaaggaacttttgggactacctataaggcggttatggaggatgggcccgtggtggctgtgaagaggttgaaggatgtgactgtttcggagaaggagtttaaggagaagattgatgtggtgggagtgatggatcatgagaatttggtgcctctcagggcttactactatagcagggatgagaagcttcttgttcat

SEQ ID NO: 54162 - DNA, 239 bp, Glycine max
ggcctccccggcgtctgcatcgccatctccgggcctcaccgctgcaggagctgacccttttgcgcccagttgaagcccatgtctgtcgagggtgcatagttgcctcacgttggacggcgttcaatacgatgtgtcgaagaagatttgaggatcaagagtggactgcttctcaaatgccaagccagttcacaggaaggttccagtggttcttcagaatgagatgcccatagcagagtctc

SEQ ID NO: 54163 - DNA, 246 bp, Glycine max
cgcaatcagacacttgtcttctgcagctaaagagattactgtcacggaggctctgaactccgcactcgatgaggaaatgtcagctgatcctaaagtgttcttgatgggtgaataggttcgggaatatcacggtgcatacaaggttggttgcttccttagttgctttacttgtcttgccaccctctcctcttaagaacttcattaacttaactttcattttagatatccaaggggctgctcgacaag

SEQ ID NO: 54164 - DNA, 243 bp, Glycine max
caaatgacgaagcttggaacctctctattggttccttctgttcacgagctagctaagcaacccatgaccaaagttccagaacgatatgttcgtctaaaccaagatcctgttgtatctgacacaatctctctaccacaagtcccagtcattgatctgaacaaattgttttctgaagatggaactgaggtagagaagctaaaccaagcatgcaaagaatggggtttcttccagcttataaatcat

SEQ ID NO: 54165 - DNA, 245 bp, Glycine max
tccgcagccactttcccaacccaaaacctctcttcagcccataaccatcatgtatctcccccgccaccacatcctcaccagactctccccttaccgccgtcacttctcccactccgccgccgccgtcctccgccccccggagccggagcccctcacctacctcgacggcttccctcgccccgatcccaagcacgacgagaccatcctcgccgtcccccgcgccgactccggcaagaacatctccg

SEQ ID NO: 54166 - DNA, 290 bp, Glycine max
gaaaagtgaagttcaatatagtctctggcacctcaatgtcatgccctcatgtgagtggcatagcagctttggtcaagtctaggcaccctgagtggagtcctgctgctataaaatctgctttgatgacaacagcttatgttcttgacaacaccaagaaaactctcagagatgcctcaactgctaaaccatcaagtccttatgatcatggtgctggacacattgaccctattagagctcttgaccctggtttggtctatgacattgtgccacaggactactttgaatttcta

SEQ ID NO: 54167 - DNA, 289 bp, Glycine max
aggctcgagtgttagattagaagccggtttgtgatgttgcacttcactttttgcaggctggattccgattccaccatgctgaaccagattaccttgatgctcgtgaattggattcccaatacctcccgatacacttcctgcaaatgcttcgcaccgcgttgctgttggtgcttttgtcatgaatgccaatagggaggtgcttgtggttcaggagagcaatggcaggtttagtggccaaggaatctggaagttgcctaccggaggcgttgatgaaggtgaagatatttgt

SEQ ID NO: 54168 - DNA, 287 bp, Glycine max
ggagcagccatgtagtgggaaaaattagctcatggacagatttggactcagaggatgaaaccctcagggtagattctgaaaccactcttagacaagaaattgcttgggcttctcatctctctttacaggcctgccttcttcctgcccccaagggaacttcttgtgctaattatgctagatgtgtgaatcagattttacagggttcaaacaatatgcagttgtggcttaggcttccattggtgaagcctgatgatgactctatggatgcaaagtctgttgctttggtt

SEQ ID NO: 54169 - DNA, 272 bp, Glycine max
ttcaaagagagtgtgtaactagtaataactgtgtatttgtgtgtatgtttttatgatcatataataatagatatgtttttggcatgccagttatgagtgctactattactactactactaccttaaactagaacaatgaacaggggaattgaagttctttctccagcctcatacctccgaagttccaattggctgttccaagaaagcttggggaccaggtggactccacaggagaacaagctctttgagaatgctttggctgtgtttgacaa

SEQ ID NO: 54170 - DNA, 279 bp, Glycine max
cagaatttgacaggtgtggctgggagccctgcatatgttgcaccagaagtgttgtagggtagatattctgagaaggtggacatatggagttctggggtgctcctgcatgctttgttggttggtggtcttccatttaaaggagattcaccggaagcagtttttgaggaaattaagaatgtcaaactagattttcaaacaggggtgtgggaatcaacatctaaacctgcacgagatcttgttgggagaatgctgacaacggatgtttcagcaacgatagca

SEQ ID NO: 54171 - DNA, 270 bp, Glycine max
gccatggaggaaatgatcaggctactgcaaacgaatgagcccttgtggatgaaaggtgctgatgggagggatgtccttgatcttgattcctatgagagaatgttccccaaggctaatagtcacttgaagaaccccaatgttcatgctgaagcttctagagattcaggagttgtaattatgaacggcttaactttggttgagatgtttatggacccgaacaagtggatggagctatttcccaccattgtcacaatggctagaacaattgag

SEQ ID NO: 54172 - DNA, 269 bp, Glycine max
agcttacttcttcttcaccaaagacatcctccatgggaagaccatcgacgtctaccagacgccggaggggaagcaggtggcgcgtgactttacctacatcgacgacatcgtcaagggttgcctcggcgccctcgactccgcccagaagagcaccgggagcggcggcaagaagcggggccctgcccagctcagagtgtacaatctagggaacacgtcaccggtgccggtggggaccttggtgtccattctagaaggtttgctgaaaacca

SEQ ID NO: 54173 - DNA, 268 bp, Glycine max
aaaagactgatggggacctgtgtaatccctatgcctcagatggaattgtctagcaatgatgatgaagttggaaaggcaagtactgactgtagctgtgaagaccagggttccatgagatgtgtcagacaacatattgctgaagaaagagaaaaacatataaaaacatttggggttgagaaattcactgaattgggattcactaacatgggagaacaagtggcagaaaattggagtgctgaggatgaacagctatttcacgaggttgttt

SEQ ID NO: 54174 - DNA, 266 bp, Glycine max
ctcaagagaactctcaagggatacatcgcagccggattcgccggaatcattctcgaagatcaggtttctcctaaagcgtgtgggcacacgcgcgggaggcgagtggtttctcgagaagaggcggtgatgaagattaaggcggccgttgatgcgaggagagagagcggttccgacattgtgattgtggcgcgcagtgatgctcggcaagctgtgtcgttggaggaagcgcttgttaggtcaagggcctttgcggatgctggagctga

SEQ ID NO: 54175 - DNA, 262 bp, Glycine max
ctcgagccggtttttgagagatcaactacttgatccgagttacacttgctgctcatgtgacttgccatcagaagctcatgttcattgttatactcatcagcaaggcagcctgacaatttccgttaagaaatcggagtttgctttaccaggggaacgagaaggtaaaatttggatgtggcacaggtgcctgaaatgtactcgcatacatggttttcctcgtgctacacgaagagtacttatgtctgatgctgcctggggctta

SEQ ID NO: 54176 - DNA, 258 bp, Glycine max
cacatatacaaattctctgtgttgtgttgtgtacttgtgttaattgtgttgttgttgtaggaaatttaagtgaagagagaatgatgatgaagtctgctatgtgtgcattggtgcttgtggcactggttgtggttgaagtggggcccatggctgaggctgcggtgacttgcattccaacacagttgactccttgtcttccggcaattaattcaggttctgcaccttcgagtgcttgttgccagaagctgaaggagcaaa

SEQ ID NO: 54177 - DNA, 258 bp, Glycine max
cgcacgcagagggagatggagcttcacgataagaaccacgatggcttcgtttccttctccgagtacgatcctcccagttgggttcaaaatgcagataatgaatctttcggttatgatatgggttggtggaaagaagagcattttaatgcatcggatgctgatggagatggtgttctaaacttaactgaattcaatgactttctgcaccctgctgacagcaaaaatcccaagcttcatcaatggttgtgcaaggaggaa

SEQ ID NO: 54178 - DNA, 240 bp, Glycine max
cgagatctgcgtttggcatgaggtgccaggacaaagatgaattcatatcaatcatacaagaaggtgtataagttgcagcaggttttaacataggagatttatttccttctgctaaatggcttcaacatgttactggtttgaggtctaagcttgagaagctgtttggacaaattgatcggatactatgagacatcatcaatgaacacaaagaggcaaagtcataatccagagaaggcacgg

SEQ ID NO: 54179 - DNA, 240 bp, Glycine max
gtaggttcgtataccaaaccagttgcaggtgccactccaggatatgcatcagaggtgatctttgctgatggaaccttcattgatgggagtacaagtgagctttcatgtgatggaccacttagagagccatttactgattttgccagggtggcacccattggactcaatggggactagtcctatgagaagttttgaaatcattatgatggaatataattttcaatcagaagtttatagaaa

SEQ ID NO: 54180 - DNA, 101 bp, Glycine max
gctacaatgtccaaactggtagtgctggagattggggtagctacttctactatggtggtcctggtagaaacccaaattgcccttgatcattcatgttaatc

SEQ ID NO: 54181 - DNA, 240 bp, Glycine max
atgctataggccttgatgttatttgggatgtggggttttgggaaaaacccaactgaaaaattgaatctttttctccaaactggtcctgagaaccttcacaaaggtatagaattagcggaagcagagacaaagaaagagtcacatgcatcattgcagatgctttagtaacctcttctctcctagtggctcagaccctcaatgttccttggattgcactttggcttcccaattcatgctcac

SEQ ID NO: 54182 - DNA, 258 bp, Glycine max
gcgttgccattctcatcctcttctttctctctctaccattgccatggatccctacaagcaccggccatccagcgccttcaattctcccttctggactacaaattctggtgctcctatttggaacaacaactcctctttaaccgttggagctagaggtccaattctgctggaggattatcatcttgtggagaagcttgcaaattttgatagggaacgtatcccagaacgtgttgtccatgccaggggcgctagtgcaaa

SEQ ID NO: 54183 - DNA, 246 bp, Glycine max
ggagattcaaagtctgtgttgttgtggaatgcgtgggaagaggagcaagagaaatggattgataggcatatgttagaagatgttgacttggataatcatagtgaggtaatgaatgaaactgctgacataccctctgatctgacaatgcctttacttagatatcaaaaggaatggttagcctgggctttgaaacaggaaagttctgcgagtaaaggtggaatacttgcagatgacatgggaatgggg

SEQ ID NO: 54184 - DNA, 269 bp, Glycine max
gattgacgccgtggtcattgccaccggcgttcataccttctttgggaaagctgctcaccttgttgataccactaatcaagttgggcactttcaaaaggtgttgactgcaattggaaacttctgcatatgttcaattgctgtggggatggttattgagattattgttatgtatcccattcaagatcgagaatatcgccctggaatcgataaccttcttgtgcttcttattggtggaattccaattgccatgcccactgtcctctcagtga

SEQ ID NO: 54185 - DNA, 252 bp, Glycine max
ctcgagccgaatcggctcgaggcccccactcctggtgagagcatcgcagtgctgcaacagatagagggacccctttcgccagctgagctagcagggattctacaaagaacattggaagaacaaggggtggcttttggaagtgatagggctaagcaggaagaaaagatccgagcagaccgtaggcttagagaagagcaagatgctgcatatcttgcagctttgcaaattgacaaggaaaaagacaaaccgaat

SEQ ID NO: 54186 - DNA, 247 bp, Glycine max
cgaggcccttgaagttcccggtgctcatagaagtgactatgaggacatcagtgtgggtaagaaaattgtattggcttttcagacacttggtgttgtctttggtgatgttggaacaagtccattatataccttcagtgttatgtttagaaaggcccctattaatggaaatgaagacattcttggagctttatcacttgtcttgtacactttaatcttgtttcctttattgaagtatgtcctggtggtt

SEQ ID NO: 54187 - DNA, 253 bp, Glycine max
attaaacccaatgggccgaatttggacaatggtagctgggggaggtgctagtgtcatctatgctgatacggtaggggatctcggttatgctcctgagcttggaaactatgcagaatatagtggtgcacccaaggaagatgaggtcttgcagtatgccagagttgtgattgatgtaatcgattcttatctcaaacatcattgttggcatatttatggataaactatttttgctttatgcgatcagccatttctc

SEQ ID NO: 54188 - DNA, 260 bp, Glycine max
tttcctttttatctctatctttcttcacatcttaaccttgttcttaccagatggctgcctcagttaaactcttatttttgtcctttctctcgttgttcatctctttctccatagctcaaacctctttcagaccaaaggcacttgttcttcctgtaaccaaagatgtttctgcctcagttcctcagtatgtcacacaaatcaaacaaagaaccccacttgtggcagtgaaactaactgttgatcttggtggtggctacttg

SEQ ID NO: 54189 - DNA, 249 bp, Glycine max
cttgaacttgaactatcgggtcttcttcttggctctctctgtttaggatcgatatggatttgtattttcctttggcaatacttgtgctgatattaggcacaccatactctagtgcttttgggaagagtgaaagtaatgtgaaaacagctgtttttctgtctcccaagtttgaacttggaccgggttcggtagccaataaatttgattatgatattgattttccaagaggtcatattgccctcaagagtt

SEQ ID NO: 54190 - DNA, 247 bp, Glycine max
gatcagccaccctaaactcggaaactgccacagatctttgaaaaagatagaggaaagaaatgtgattgaaaataagctgaaagaggaagcaagagagccaggaaggaagcaaattattgctgaatttaaatctttggtttcttcatttcctgatgaaatggggtctatgcaaagccagcttagaaaatataaagaatctgcttcagataccattctctgcgtgcagatgtgaagtctgtttctagta

SEQ ID NO: 54191 - DNA, 224 bp, Glycine max
cttcttgttgattctgtgaaagaactagcaaaggaagcactaatcaaagttcctgagcgatacgttcatccaaatattgaaccccccattttatttcataaagacactttgccacagctccctatcatcgacctaaacaagttattgtctgaagatgttaaggaactggaaaagctagactttgcttgcaaggaatggggcttttttcagcttgttaatcacgg

SEQ ID NO: 54192 - DNA, 253 bp, Glycine max
  unsure (1)..(253): unsure at all n locations
ctcctaatgctacctccttagaaattgcttaatctttttcattcattcaattacttagcaaattgttacgaaatgcaacacaacatcttcgcctcaccgcgtacnttgaagatcatggacggttgcaagggcactcaggtctacgccatcaacccctccagcgccaccggcggtggcaattggcgagaagcttctccaacagcttcacgaccacatcaaaagccacacccttagaaccaaatcggttcggaac

SEQ ID NO: 54193 - DNA, 275 bp, Glycine max
tgcattcttacagagtgggatgagttcaagaacattgattttcaaagagtgtatgacagcatgcagaaaccagcatttgtgtttgatggaagaaacatattgaatgctgagaagttgagggagattggattcattgtgtactcaattgggaggccattagagcaatggctaataagcatggcctaacaggcttgaagattatgaattgagcagagctatcaattatgttatcctttgtgacatttcaccacttgctatttttcatgatttcaagc

SEQ ID NO: 54194 - DNA, 270 bp, Glycine max
gctgtttccccatggagatctcactgaaataggtgagaggggagttaacttgagtggaggtcagaagcagcgaattcaacttgctcgtgcactttatcagaatgctgatgtatatctcttggatgatccatttagtgctgttgatgcacatactgccactaatctgtttaatgaatacatcatggatggtcttaaagagaaaactgttttactcgtaactcatcaagttgactttcttccagcgtttgattctgttttgttgatgtcaaa

SEQ ID NO: 54195 - DNA, 269 bp, Glycine max
ctcaactagatcatggcctcttctaactcctctctttctctccttctaccttctctcacaaccctcattctcctccaaattcaaacatgtgtctcctcatcacaattaacacaaaaacccctccttctgcctctcaaaacacaaacacaaacaccttcacgtaagctctcattccaccacaacgtcacatcaaccgtctcactaaccgtaggctcgcccccacagaacgttaccatggtcttcgacacaggcagcgaactctcctggct

SEQ ID NO: 54196 - DNA, 250 bp, Glycine max
actgcttgttctttaattttgcttcatggaactgcacaaatccacacatgtggttcttcactcaagccctggtctgggccatctcatcccaacgattgagcttggaaagcgcttcgtccatcaccacaacttccaagtcactgttctcgccgttacttcccaaacctcaaaaaccgaaactgagatattaaactcatccctctgccacatcatcgacatcccttcaccagacctcactggtcttgttaac

SEQ ID NO: 54197 - DNA, 209 bp, Glycine max
atctggatgagcttgagaatagacttgatgacatagatagcatagaggctgaggaggaacggaaaagatcaagtcaagcaaatagaaagacatccaatcgtggtgttacaaaagcagctaagaagtacacggaaatacggtagacaagtagtaaagagaaaagagttaagtcagataatgataattattcaatggaaattgagaatgtt

SEQ ID NO: 54198 - DNA, 241 bp, Glycine max
ttgggagttaggttctgcacgctctgcttccagcgagtgttctttcttcgtttcaacaccttaatttgcacacgctgcttcttccacttgagaaatggcacaagaaacctttctattcacatctgaatctgtaaacgagggtcaccccgacaagctgtgcgaccagatctctgatgcagtgctcgatgcgtgccttgaacaggaccctgacagcaaggttgcctgtgagacatgcaccaag

SEQ ID NO: 54199 - DNA, 241 bp, Glycine max
tctgagggccccagaagctcatttgatctgggtttctcttgtttttgtgttgaaggagagtcttttgttttttgtggcgagtttgttgcacgtttaagaagcaatggcacgcaagaagatcagagagtatgactccaagaggttgaaggagcactttaagagaatctctggccaggagttgcccatcaagtctgcacaggttacagaatccaccaatttcagtgagctagcagagaaggaa

SEQ ID NO: 54200 - DNA, 248 bp, Glycine max
cttgcattttcctacttccacgacatagattcacgcttcagccatggacttgacttgcctcccgaagaaaccgagaagggtttcctaggaaaaatcatgcccaggctcgtcaaatccatctctggcgacaggacacacgtgcttcgcttcgagaccccagagactatgagcagggacaggtttttctggtttagggatgaggagtttgctagacagactgttgctggtctcaacccgtatagtatacg

SEQ ID NO: 54201 - DNA, 236 bp, Glycine max
gttcgtgtccactattaaaaaaatcaacaagagtagtaacgctcccaagtccgttgcgagcaccggagcgacaatatcaccattgaacttccgaaccggggttgatcatttttgccttcacaccggaggaaaggcggtgatcgacgggatcggaatgagcttggatctgagcgagtatgacctggaaccggcgaggatgacgctgcaccggttcgggaacacgtcggcgagtagct

SEQ ID NO: 54202 - DNA, 239 bp, Glycine max
aaagcagatgatgagaatatacgtcgccagtccagtaagcgactgggaagatagtgacgctgagagatatgtggaccacactttatctctttgggacgaatatgaagccgaactgtcacattttgtatctcaattatatgattcattattcaaggactgtgctagtatcaatgttgctttgcaacatagctcttgcctcatatcgaagaatgacgtatgtgtgtcatctccccggcgta

SEQ ID NO: 54203 - DNA, 262 bp, Glycine max
tgagaaaaaaatatgggattctcaattccctaaaccagttgatgtgtgtcagacatatgccttgtgtggtgcaaatgctatttgcgatttcaatggaaaagctaaacactgtggatgcttgagtggattcaaagccaactctgctggttcaatttgtgctcgaactacccgtctagattgtaataagggaggtatagataaatttcagaagtataagggaatgaaattgcctgacacatcttcatcttggtatgataggact

SEQ ID NO: 54204 - DNA, 246 bp, Glycine max
gtgccactgcatggttgatggatactgaaatgactgatcatgatgatcgtgttgtgccactgcacacattgaagctattagcgaccatgcaatatgtcctctgtacgagcttggaaaaaagtccccagacaaacgctataattggtcgcattgactgcaagtctggtcatggagctggtcgtccaacacagaaaatgatcgatgaagctgctgaccggtacgttttatggctaaagtgttggaagt

SEQ ID NO: 54205 - DNA, 248 bp, Glycine max
gtctacacggaactcgttcgagcctcaccccatggttgccgatgcctgggaatccctcagaaaatctctagtctattttagaggccaaccggttggcacaattgcagctgttgatcatcaatcagaggaagttctgaactatgatcaggtttttgttcgagattttgtgcccagtgctctagcctttttgatgaatggtgaaccagagatagtcaggaacttcttgttgaagacactgcatcttcagg

SEQ ID NO: 54206 - DNA, 268 bp, Glycine max
caataaaagtatccactttcaccacatctgtcttccatttgtggatttctcaaaagtgagtatcagcttccgggacttccacagtgatcaatacgccccctataaagacctggattacccaaacgggaagatgccattgtcaggaccttttggatcgcggccgggttcgcgaaacggggttcatttggatgaagcagaaggcgccaagccagcacttcttcgaggcaaccaagaccctcgtgagctacgcggcggaagtcaccgccta

SEQ ID NO: 54207 - DNA, 207 bp, Glycine max
ccatgttcttaggaggcttgtttttccttgtgggggcattattaaacggcttcgcgtcaacattgaaatgctgatcataggccgcctcttgcttggtttcggtgtcggatactgtaatcagtccgttccggtgtatttgtccgaaatggctcctgcaaatattagaggagtacttaaggggggcaacgatgttatcaattggaatct

SEQ ID NO: 54208 - DNA, 286 bp, Glycine max
ttcggctcgagatccaatatgacggaggaacggaacgtgcggaagacacgtgtggtcgacgtggtcctcgactgcgtcatcccttacatcgacgaccccaaggaccgcgacgccgtttcccaggtgtgtcgacgctggtacgagctcgactcgctcacccgcaagcacgtcaccatcgcgctctgctacaccaccacccgggctcgtctgcggcggcgtttcgcgcatctagtgttgcaaattctaaggggaaacctcgaggcgcaatgttcaacttgatacccga

SEQ ID NO: 54209 - DNA, 262 bp, Glycine max
gtggattgatgatagtcatagcattaatattgggaaggctgtaccagtgcaccctcaaaagccagaggaacccagaaagccatccaagaagagggctaggccgggggagagtactcgaccgcggccaaaagatcgtcagcagatccaagactgtatcaaagagttgagacgaattatccccaatgatggaaagtgtagcattgatccttggtagaccggaaccatcagatacatgcttttcttacaaagtgtcctcaagtat

SEQ ID NO: 54210 - DNA, 218 bp, Glycine max
aatacaaccaagcaggcaaaactgtctggcggaggaaagttgcatcacttatagcaatggcaaagttatccaagatcttgtccttagattgcgacacgtggaaagcggtgaagtggaaatccaattgcaatggattaatcttcctggctccaagggtttatgattccttaaccatatgcatgcattcaactttcaagcaggggtgggttttatatatc

SEQ ID NO: 54211 - DNA, 266 bp, Glycine max
gctgaagcaagtaaatgagtttgctgcaaagggtcgcggtcctccaagaaagaatggatttgccagggcatcctccatgtcaccaaatgcaagaatggccagaatagcttcacttgagaacatgctgagcatatcatctaattcacttgtagcaatggcttctcaactttctgaggcagaagaaagagaacgagccttctctaatcgtggacgctggaatcagttgcgctctatgggagaagccaagaatttgcttcactatatgt

SEQ ID NO: 54212 - DNA, 272 bp, Glycine max
aacgtttgtctctagcagcgaaaacggaggagtcccatgtgcctttcttactggacctgcaattgtttgagcccaagttcgtcttcgagcccaaaacgattcagagaatggaactctgggttatgtctaatctcaaatggagactccgctctgtcacccccttcgattatcttcattatttcatctccaagcttccttcttcctcttcttcccaatccttgaatcactttttctccacttcctccaacctcattctcagcaccactcgtgtg

SEQ ID NO: 54213 - DNA, 276 bp, Glycine max
tgccagcagatgctgctgcaccacatattgttaaagaagctgtacaagcaaagggacttagagatgatacaacctgcattgtagttgatacattacctcaggagaaaccacctgtttctgcgccacaaacaaagaggccagtaaagggaatgctcaagtccatgtttcgtaaaaaatcttctgaatcatcttcttatattgacaaagagtacatggagccagatgtagtagaagaattgtacgacgaaggatctgccatgctttcagagaggttag

SEQ ID NO: 54214 - DNA, 265 bp, Glycine max
atttcatgccaatttgttcggacacaaaaccaagtttttcttcctttgggaagatattgaagagatacaagtgcttcctccatcattggcaacattagggagccctacattggtcatagttctgcgaagaggccgaggtctcgacgcaacgcatggtgcaaagacctcaagatgaagaagggagacttagatttcattttcaatcttttgtttcatttagtgctgcctccagagcaacaaaggccttgtggagaacaagaatact

SEQ ID NO: 54215 - DNA, 279 bp, Glycine max
agactacgtcattacggtcccaaacaaagaacaaccctttctagcaagtaaacccaagttcccttctctcttcacggttacattgctctctctctctctacacatatatttctctctctctctctacacgttcgatctctcgcttctgaatctcaacgatggtgctcgatgcgactattatctatatagacaattcagaatgtatgcgtaacggggatcactctccttctcgatttcaagcacacacagacgctgtcaatcttatgtgcggtgataaaa

SEQ ID NO: 54216 - DNA, 284 bp, Glycine max
gtttggcagaaagctgtttttgtgtaccagaactaatttcctcttcatttgctttaatcaggaaggacagtcgttatactgaaagagacgcagcggtggttgtaaggcagatgctcaaggttgcagctgagtgtcatttacatggtttggtacacgggacatgaaaccagagaattttctttttaaatcaaccaaagaagattcacctttaaaggccactgattttggtttgtcagatttcataaaacctggaaaaaagtttcatgatattgttggcagtgctt

SEQ ID NO: 54217 - DNA, 278 bp, Glycine max
tccacatctccagaagctgatatggacaatgaagagagaataatctacacttatcagaatgcttttcatggagttgcagccaagttaactgaaggagaagctaagaagctagaggctgaagaaggtgttgtggccatattccctgatacaagtatgagctacacaccacaagaagtccaatattccttggtcttgaaccagcaaaaagcactaacatgtggtcagagaagctagctggccatgatgttatagtgggagtggtagacactgggatttgg

SEQ ID NO: 54218 - DNA, 282 bp, Glycine max
cttaagtataagtctgaagaaggggtgagagtgttgttgctggtttcggatgataaaacttcgcacgataaggttttcctcaagacggctggtgtgatggggactcatgatgaggaaaccaggaagttttttaagcattcttctgttatggtgttctgtcgcctcggtatgccagcagcaagatgagcttcttgaagcaacaggagataggattctttgtgagctagttttcagtggagtcaaatgtgaaatgccctgtattttgtggcctaagctctaaac

SEQ ID NO: 54219 - DNA, 251 bp, Glycine max
caaggttgaaccatgctcatttgctcaaccttctagggtattgcgaagaaggtgaagagaggcttcttgtgtatgagttcatggctcacggatctttgcaccaacacttgcatggaacaaaccaagtgttgagagagcaactagattggataagaagggtcacaattgcagttcaagcggcacgtggaatcgaatacttgcatggatatgcttgccctccagtgattcatagagacatcaagtcctcaaac

SEQ ID NO: 54220 - DNA, 260 bp, Glycine max
atcttgctctatatcaaggcataataatgtttggtctgaggccacttcctcggaatctgttgaaatgctattaaaatctgttggacaggaggaatttatccctagagaaactgttatacaggagtctgatgcctgtgatgaactggtatgcttagctaagcaaatggagcccgatccaaaacctgatggtagaaatgaatttaaaaataatattactgatttacagcctacaggttttattgatgagaacttggctggat

SEQ ID NO: 54221 - DNA, 258 bp, Glycine max
gccataaagaagtttaatgttgcgaagaatgcccttgcacaagttgcatggaactttgttaatgatgggctgaggacatcgctctgcctgcaatttaagccacatcatattgcggcaggtgccattttccttgctgccaagttcttgaaagtgaagcttccatcagatggtgagaaggtttggtggcaagaatttgatgtcaccccacgtcaattagaggaagttagcaatcaaatgttggtaatctacgagcagaat

SEQ ID NO: 54222 - DNA, 258 bp, Glycine max
gtggctgtattgtttgatgatggagctaaatgtgatatcactgccttggaaagagagaagcttttaccactgactggtaattttcctgaagattcgcagtttccgtactatccagggcagagagtaaaggttaagtcctccagtgcttctaaatcaactagatggctatgtgacacttggagagacaatcatgatgaaggaactgtttgtgctgtggaagcaggcttggtgtatgttaattggatttctcatgttcta

SEQ ID NO: 54223 - DNA, 258 bp, Glycine max
gggcaatgaagatctctaattatgcaaatgtagctctgttgatattaaagatttatgccactgtaaggagtgggtcaatagctattgcagcatcaactctagattctctacttgatctaatggctggtggtatactttggttcactcacctctcaatgaagaacataaatatttataaatacccaattggaaagctaagagtgcagccagttggaataattatttttgcagcaatcatggcaacacttggctttcagg

SEQ ID NO: 54224 - DNA, 245 bp, Glycine max
tgtattttttctgtgtgagggacagaaaatacccaactggtcaaaggactaatagggccactggtgttggctactggaaggcaacaggcaaggagagagagatatataaggcaaaggcactgattggaatgaagaaaactcttgttttctacaaaggaagagctccaagtggtgaaaaaactagctgggtcatgcatgaatacagattagaagatgaacattctgtgcacaatccacccaaaaag

SEQ ID NO: 54225 - DNA, 243 bp, Glycine max
gccatgtgttcaatgggttgatgacaaccttaagcaaagcaaagaagattgttttgctcattcaatggaatacgatattgagactaatcaagttcgagcactcacggtaaagacagatccatggtgctcatgtggaggacttacacctgatggtaccctagttgttgctggtggttttgcagacggagggaaaacctccagatactatggcggtcaacctgattgccaagactgtgactggag

SEQ ID NO: 54226 - DNA, 251 bp, Glycine max
gtttagttttgttagtagaggggatcgaatccaagattttttcctcaaagcttctcccttaatcatccaacatatcttatatcttttcttttttatgtaaattaataaattaatttataataaacatttatggatgcaggagatattgagtccatgccatttattcaggcattaggacaattctcatacagagtaggtgctggcaacttttgcttagttcatgtcagccttgttcctgttttgaatgttgt

SEQ ID NO: 54227 - DNA, 241 bp, Glycine max
gattgaacagatgcagatcttcgtgaaaactttgaccggtaagaccatcacccttgaggtggagtcctccgacaccatcgataacgtgaaagctaagattcaagacaaggaagggatcccacctgaccagcagagacttatctttgcgggtaaacagcttgaggatggtcgaacccttgccgactacaacatccaaaaggaatccactctccacctcgtgcttcgcctcaggggtggcatg

SEQ ID NO: 54228 - DNA, 256 bp, Glycine max
ggttatcatttctccatttccattttctctctcacttttcaagaatcgtaagctatgggaaagtcttacccaactgtgagtgctgattaccagaaggccgttgagaaggcgaagaagaagctcagaggctccatcgctgagaagagatgcgctcctctaatgctccgtttggcatggcactctgctggaacctttgacaagggcacgaagaccggtggacccttcggaaccatcaagcaccctgccgaactggctc

SEQ ID NO: 54229 - DNA, 193 bp, Glycine max
cactcataacacaaagcacaaagcaaagctcatccttgagttaaaaaatggtagcagcttcttccatggctctctcatccccatccttggctggcaaggccgtgaagctgggcccatcagccccagaagtgggaagggtgaccatgacgtagaccgtcaccaaccaggtctcctcaggtagcccatgcatacg

SEQ ID NO: 54230 - DNA, 244 bp, Glycine max
acaaaacccgaccctgatacaatgcagccactggatgaaggttttggcgcaattgttcagtcttgcaggcgactcaggcgggtatccctctcgggggacgtgaccgaccaagagtggctctacatagggacgaaggctgactcgctgccgataacgacccttgcatcagcagcggttacatgacatacatgtttctatacgacagtgttcatggacactggaagcatcacgatgtcaccgttaa

SEQ ID NO: 54231 - DNA, 248 bp, Glycine max
agaatccacacaaactcagggtagggcagagagagagagagagagagagagagagagagagaatgggagggtgggctatcgcggtgcatggtggcgctggtgtcgaccctaatctcccactcgagcgccaagaagaagcgaaacaacttctcacgcgctgtctcaatcttggaatctctgctctaaattctaatcttcccgacatagatgtcgtcgaacttgtggtgagggaattggacacggatccg

SEQ ID NO: 54232 - DNA, 242 bp, Glycine max
caacttctgctacttcctactccaaccgcacttctgctccgcaattatcatgggcaaggtcaagatcggaatcaacggatttggaagaattggccgtttggtagccagagtggctctgcagagagacgatgttgaactcgttgccgttaacgaccctttcatcaccaccgattacatgacatacatgtttaaatacgacagtgttcatggacactggaagcatcacgatgtcaccgttaagg

SEQ ID NO: 54233 - DNA, 257 bp, Glycine max
caaaccacaccaacatcacagccacaacaactaccagtgcaacgtcatcgtcatccgcgacggtatcagtgactcaagcattggggagccgggacctgcaggacgttgacacggcagcgctgtcgcgtcccttggatgagtacctcagagctggctccttggccccggcgagcagaagaagaagaagtacgtcgatctcggctgcatcatcgtcagccgcaagatcttcaagtggaccctcggcacaatcctcttcg

SEQ ID NO: 54234 - DNA, 266 bp, Glycine max
cgtgtgaatcttttggtgctgctcaagagcactgcaaagtttgatataatggagtttttcttcaccgtgttaattattctgagtgtgattacacccggattgagcagcacaacaactagtttcaatgtgttgcagtatggagcagttggaaatggacaaaccaatgattccccagcctttctaaaggcgtggaaagccgcatgccagagcaactcacatatatctcgcctcatcataccagcaaaacggacattcttgctgaagcc

SEQ ID NO: 54235 - DNA, 262 bp, Glycine max
gttttcattttctaatttctctctctcccacttcaccaatcaaacctctttttttctcaacaaaaatacacccttcttcatggcgagtgaagctgagatcgaatacgaagaggcgagtgaagctgagatcaaatatgatgaggaatacgtttggaattctcgaggcttgaagctttttgcatgccgatggcttccagcgaatggaagtccaaaagcgttaatcttcctctgccatggctacgccatggaatgcagcatcacc

SEQ ID NO: 54236 - DNA, 267 bp, Glycine max
gtctgtttacatatatgacctggtgagtggtgcacaagttgcaaaacttgatcatcatgaggcacctgtaagagattgtagttggcacccctattatccaatgatgatcacttcggcttgggatggtgatgttgttaggtgggaatttcctgggagtgatgaagcccctgcttctccaaataaaagagaaggtcgaattcataggagaaatttgctttatctatagttcatgctctttgtacatatgtgtctggatccatactatat

SEQ ID NO: 54237 - DNA, 243 bp, Glycine max
gtaaaaggagggaagagtgggagcaacgggtgagtgaaaagtgtgagaaaatgtctaaccctcaagaccagaaaccatggaaagcggaatacgcgaagtctgggagatcttcatgcaggacgtgcaagagccccattgccagcgaaacgctgcgtctcgggaagatggttcaatccaccaaattcgatggcctcgtgcccatgtggaaccatgctgcttgcgtattgaagatagccatcagat

SEQ ID NO: 54238 - DNA, 258 bp, Glycine max
aaatgcttggacatgaaaaatggcactgcatttgctggcatagcatccatcaatgcccatcctcagtgcagcaattgcttggacatgaaaaatggcactgctcagaaggaaccccgggcttctttcatctcagagctagtcattgaccactcagcgacaggtggtgtgaaacgggaacaagaatgtgtgatgtgcctttcagaggagatgtctgttctgttcatgccatgtgctcatcaggttgtttgcaaaacatgt

SEQ ID NO: 54239 - DNA, 248 bp, Glycine max
tgggtattttgagaatctacgggacaattctttctcctctaatgcttggtatcatgctcttcatattcctgatgttgatgtgatactggatgagcaaaatctccatcttgccaaagtcttatctcagactgacagaagcttggtgtacacagtttcgaatcctggttcagaattttcactttgtgattgttcctggtctaggctggggaacctctgtaaacatgtcatcaaggtggcaactttctgta

SEQ ID NO: 54240 - DNA, 248 bp, Glycine max
agcagtttctgataatacatgtcttcagcgtaaaaggaaggctgttcttcaggaagttactaatgtttgccgtgaaaatgcatacaagggttgtttcaactcaactaaaattcaggctaagaaaagcaagctggctaaggctggtcaaattaatgtgtccaaagtggctccttctgttactgttgactccaaagcaaaggaaacagcattgcaatcggaagatactatgtgctcaattaatttggaaa

SEQ ID NO: 54241 - DNA, 254 bp, Glycine max
ctgggactagctttactaaaccaagcaaggaacatgatttcatcgggagataatccgatgaaagctcttgaattatctcttcaagcaatgaaattgtttgagagagctgctgcttatgggaaaccaagtttggatttggccatgtgtttacatgttactgcagcaatatattgcagtttgggacatttcagtgaagcgattccaattatagagcgctcaattgagattcccactattgaggaagaccaccaaca

SEQ ID NO: 54242 - DNA, 260 bp, Glycine max
ggtacattgagacttgaaaatgtgttaacattctttgcaggagttctactagagaagcagatagttgttgtctgttctaatttgggaatcctatctgcttcagttttatcagttattccgctaatccagccttaccggtggcaaagcctgttaatgccagttttaccaaatgacatgcttgagtttttagatgcacctgtcccttatgtagtcggtatgcagaacaagaccagtgaagttcagtcaaagtttaccaatgt

SEQ ID NO: 54243 - DNA, 259 bp, Glycine max
attccgtgtgccgccgttaccgccggtggagaggatgggggtgctggacggtagcggcgtgatgacggaggattccaaggtgggggagttagatcccggtttcgaggaagattctctaaacgacaccttttcgagcgtttcaggtggtgggggtgtgagggagaaggtggagaagtataaaatgtgtgatgtgagaatggtggattatgtgccgtgtttggataacgtgaaaacgatgaagaaatacatggagagtttg

SEQ ID NO: 54244 - DNA, 262 bp, Glycine max
caacaacaacagcaacaacaacaacaacagcaacaatttcaacaacagcaacagcagcagcagccgcaacagcagttgtttttgtttactaacgatagaacccccgctagttatagtaccaattgggcggatcttcatcctgattcccagaagattctccttcagatcgaggagcggatattggagtttagggatgaaagccagagactagatcagtgtagtcgtctttatgattcttcagtttccaacgatggatttgagc

SEQ ID NO: 54245 - DNA, 253 bp, Glycine max
atttacttgtcaatctgggcgatcctgagcgacctgtatgtaaggttggagattttggcctatccagaattaaacgcaacacacttgtttccggtggtgtcagaggaacccttccatggatggcgcctgaattactagatggtaacagttgtagggtatctgagaaggttgatattttctcatttggcattgcaatgtgggaaatgttgaccggggaagaaccatatgctaacatgcactgcggggctatcat

SEQ ID NO: 54246 - DNA, 247 bp, Glycine max
ttcttagcacacttgttgctgtttgtggttctttcacatttggcacttgtgtgggatattcagcacccactcaagcggctatcagagcagatcttaatctatctcttgctgagttttccatgtttggttcattagtgaccattggtgcaatgcttggagctataacaagcgggcggattacagatttcattggccggaacggggctatgaggatttcaacaggattctgcattactggatggttagc

SEQ ID NO: 54247 - DNA, 252 bp, Glycine max
ggtgacaagagcttccattcaattgcactaaatatctaggagtagtaaatgttattcagtttaatatgaattctcatgatgttttgaaaactctggtcttgcagtttgttgcttcgtcgggagtgttgttcctttagcaatggagaatatttgaaggcaggtttacatgagttggaacaatggtgtcttaaagcaacagaccagtttgctgggtcatcttgggctgaactcaaacacatacgccaagctgtg

SEQ ID NO: 54248 - DNA, 260 bp, Glycine max
agaagggttgcttctggacgtgatgcagatgctgagggaggtgaggatagaagttataggggtgcagtcgtcgcttaacaatggggtgttcgtggcggagttgagggctaaggtgaaggaacatgcaaacggcaagaaggtcagcattgtggaagtgaagagggcacttaaccaaattataccccatgctgttgactaaagagggggtgcatgcttgaattttcagggcttgactttatggatgaatattccaagtagaa

SEQ ID NO: 54249 - DNA, 248 bp, Glycine max
tggagagtagtgcaataactcattgtacgttcctagtgtgtgggagacaaagaaagatggctaagtggtgtgttttggtgttggttcttgctctggctctggccacaagtgccagagatgttcccgatcccaaggatgctggtctcaaggaccagaagaacttcatcagctatggtggagttggtgcttattcggggattggtagcaatgggctaccttttggaggagttggtgccggaataggtggt

SEQ ID NO: 54250 - DNA, 255 bp, Glycine max
ggtgtgtcctgttccgttcctaaaagactatcccttttacaaactgaagtgaatcggaggatctgttctgttccataagatggctggacttttgggatataggagccttccacctaaggcaaagaatttggtagttgctgggggtttgacagcttttgtctttggtgcctacttctacaccatgagggctgttggaggcactgatgaactgcaggtagcaattgataagtttgaagctgacaagaacaagaatgc

SEQ ID NO: 54251 - DNA, 251 bp, Glycine max
tgtagctgttggaactctggcgtttcttggagcctttttcccttattacactgtcaacgaggagggagtttcaataatcttgaaggttattgcttccttactttcacctacagcctttgctttgggttcgatcaactttgctgattatgagcgtgctcatgttggactccgttggagcaacatatggcgggaatcatctggagtgaactttttggcatgtcttctgatgatgatacttgatacactgctat

SEQ ID NO: 54252 - DNA, 251 bp, Glycine max
ccgagatacgagcaggtggtggttgtggtgaggagggtgggaataatattactctgtctgggttgctgaattttactgatggcttgtggtcttgttgtggaagtgagaggatttttgtgtttaccaccaaccacattgagaagcttgacccggctctgctgcggagtgggagaatggatatgcatattttcatgagttactgttcgttcccggcgctgaagattctgctgaagaattacttggggtgtgaa

SEQ ID NO: 54253 - DNA, 254 bp, Glycine max
tgtaattcctgagtttccatttcaggtgtggagtttgagacctcgtgaccgtggcatgctggggaaaggagtttcagtagggacttttttctgcactagttgttggaacaatggagatgagctatctgttgtgtgcttgaagaacctaaatcgtgtgctgccagcaatgccacgcctccaccaaatacatgcacttatagagcattatggtcctactgttttctttcgtcctgaggaagtatacttgccctctt

SEQ ID NO: 54254 - DNA, 248 bp, Glycine max
cgtatgtgactgttgcgactcgatcttctacgtcgttctcttcttctcgcgtcgtttgtgcgtccgtcttttctctcacctgaaaatgtcttgctgcggtggtaactctggttgcggaatcgcctgctagtgcggcaatggctgtggaggttgcacgatgtacccagacttgagctacttcgagtcaaccaccaccgagaccttggccattggagcggcaccagttctggctcaattcgagagtgctg

SEQ ID NO: 54255 - DNA, 246 bp, Glycine max
gtccagcacgccggcaacattttgccccgattgtacctcctctgtacgttaggatcagtatacatcaaatccaaggaagctcctgcaaaggatgttcttaaggatcttgtggagatgtgccgtggcattcagcaccctgttcgcggactctttctcagaagttacctttctcaagttagcagggacaaattgccagatattggttcagagtacgaaggggatgcagatactgtagcagatgctgta

SEQ ID NO: 54256 - DNA, 248 bp, Glycine max
gtgtgggtttcctagggaatccattctcattctcacagatgatatggaggagagaaacccacaaaaattcccgacgaaatataacattctgaaggccatgaggtggctaattgagggtagccagtcgggggattcattggtgttccagttctcaggacatggttgtcaggaactggatacgaatggggatttcgatgagcttgatgagcgtgacgaagcaatatgtccggttgattgggaaaagcagg

SEQ ID NO: 54257 - DNA, 247 bp, Glycine max
tctcgagccgaatcggctctagatttcgagagtccttgcgtaaatatgccattgctcatcaatttgcctttaaatataagagaaatgatagtcatcgtgtaactgttaaatgcaaggcagaaggttgtccttggagaatacatgcatcaaggctgtcaactactcagttgatatgtatcaagaaaatgaattcaactcataactgtgaaggggcttttgcaacaacagggcatcaagcaactaggag

SEQ ID NO: 54258 - DNA, 239 bp, Glycine max
gtcacttccaaaaggtgttgacatccattggtaacttttgtatctgctcaattgctgtgggcatgttgattgagctcgttgtcatgtaccctatccagaagaggtcttacagagatggtattgacaacttgttggtgcttctcattggaggaatcccaattgccatgccaactgtgctgtctgttaccatggctattgggtctcaccgcttgtcccaacaaggagccatcacgaagagg

SEQ ID NO: 54259 - DNA, 242 bp, Glycine max
gagctaaactcatatgtggcattgagaaaaacgtacatgaataccattggaaataaaaaacttgaactttttgacaatggagcaggagcaagtgtatctacagctgaagaaaatgttcaactggcatcagaaatgtcaaatcaagaacttatcaatgctgggacgaagacaatggatgaaactgatcaggctattgagagatctaagcaggttgtacatcaaacaattgaagttggcaccca

SEQ ID NO: 54260 - DNA, 239 bp, Glycine max
gcatggactccgccgggtacacctccgacatcaacgaggattccaaaacgacaggtttaatgggcatgaaccgaggatccctctcgttggtaacacaaatgtcgcttccgaaattttcctactgcatctctggggaggacgctctcggtgtcctcctccttggcgacgggacggacgccccgtcgccactgcagtacacccctttagtgacggcgacaacctcgtcgccgtatttcaac

SEQ ID NO: 54261 - DNA, 278 bp, Glycine max
gggactgataggagtaggcttgtattttttgatcggaggagtgagtgtgagttggaggatttgcttcgagcttcggcggagatgttagggaagggtagtttagggacggtttatagggcggtgcttgatgatgggtgcacggtggcggtgaagaggctcaaggatgcgaacccttgcgcgaggcatgagtttgagcagtacatggatgtgattgggaagcttaagcatcctaatgttgtgagactcaaagcttattactatgccaaggaggaaaagct

SEQ ID NO: 54262 - DNA, 267 bp, Glycine max
ggagtgctggctatttttcatttgctttgtgggatgctcgtacaagagagctactgaaagttttcaattcagatggacagattgagaatcggttggatgtgtcctcaattcaagacttttcagtggagcttatttcaagttcaaggaaagacaaaacacaaagttccattgggttctttcagcgttcacgtaatgccataatgggggcagcagatgctgttcgtcgagttgcagcaaagggaggctttggggatgataaccggagaa

SEQ ID NO: 54263 - DNA, 262 bp, Glycine max
gaagcaatgaatggtgttagacatcttcttgttcggaaatctatcccaaatggactagtttttgttggagaattgccttatggatctaacagtggtttcagcccaaaaatggatcacctggtgtgtttcctacctggtacacttgcaattggtgccactaaaggccttacaaagaaacaggcaatggaaaacaatatgcttaactttgaagacctagaaaatttgaagctagcagaagatctgactaaaacatgctttgaaa

SEQ ID NO: 54264 - DNA, 251 bp, Glycine max
ctcctctgtctctctctctccaccattgccatggatccttacaagctccggccatccagcgccttcaattctcccttctggactacaaattctggtgctcctgtttggaacaacaactcctctttaaccgttggagctagaggtccaattctgcttgaggattatcatcttgtggagaagcttgcaaactttgacagggaacgtatcccagaacgtgttgtccatgccaggggagctagtgcaaagggttt

SEQ ID NO: 54265 - DNA, 250 bp, Glycine max
attattattgtctgagaaattatcaataaaataaaacagagattgtatttgcatatctttgtaggttttgttagtaaacaaaagaaaaggaaacatgaaggacgcagatgtgtcaaggcagatccagcagatgatcaggttcatccgtcaagaggctgaagagaaagctaatgaaatatctgttgctgctgaagaggaattcaatattgagaaactgcaattgcttgaagctgaaaaaagaaagatcagg

SEQ ID NO: 54266 - DNA, 250 bp, Glycine max
atgacattgaaatcttgaagatggttcaaaatggcgaaggaaaatgcaagaggaaaaccttatctgggattgaagagaaaacaatcattcaagatgaaatagcatgccaaaaggaacacgatcctttcaacaaagaatctgtgcaactcggcgctgttccagaagtcgcctttgtcccagtgattgacaagcaagttaatgcatcttgggaaaaagcggtacaaaataatcaacttgcagcttctaaaga

SEQ ID NO: 54267 - DNA, 247 bp, Glycine max
attggttgcagtgttgggcaaccatgactacaggggtgatgttgaagctcaattgaatccaatccttcagaaaattgatcctagatggatctgccaaagatcatttattgttgatactggtaaggtgacttctcggaatctcaatagaggttttatcctgaatagtaagttaagtagccttctaatcttaaaactccccagaaattgctgagttcttcttcattgattcaacaccttttgtggacaa

SEQ ID NO: 54268 - DNA, 247 bp, Glycine max
ggttgatgaacattttcagttgttcagtttagtttgattcttttccatcatttgttagtatctttatctgatatgattctgcaacagaaaccacgagaacattccgcccgaaaaaaagtactccttctggaagtaagggagctcaaccttagaaaacacattgatgccacgttgggtagtggaaatctgagggaagcagtaaagctacctcctggggacgacttaaatgagtggctagctgtcaaca

SEQ ID NO: 54269 - DNA, 266 bp, Glycine max
cgaacctttaatgatgtttagcacagatggcactggaacccttacgtcaccatctaaccagttgtgggatgataaggatcttgaattgcaggctgatgtggatcgctttgtggaggatggatctctagatgaaaatgttgagtcttttttgtcccatgatgacacggaccctagagatactgttggccgttgtatggatgtaagcaaaggcttcacattttctgatgtaaattctgtacgggcaagcacaagcaaagtttcctgtt

SEQ ID NO: 54270 - DNA, 266 bp, Glycine max
tttggaacttgtgctcatcacaatggcattgagtggttggttttgtgaggcaaattgcagtggagggagttttctacaagaacctgtcacggggttggttacaatgaagtttcctgatgatttacggtagcaaatcaaacccccggatgccgcaactggcacgcaatcttggttagattcttcttgcagaagaggggggtgatttagcctcttccaagtgctttcagcagagtcaaggataacagattggttaaggttgggagcaa

SEQ ID NO: 54271 - DNA, 272 bp, Glycine max
ggtgtttttaggctttgcttttgctttggggctttcattaatggtcttattttttttaataaattgaccctttcttctgatattcaggcggaagtggtgctcttggtgcagggctcagtaaattcagcactgctgctgccattgaagaaccaattaaaccaccacttaaagttgaacacacccagctcttaattgatggaaaatttgttgatgctgctactggcaaaacttttccaacgttggaccccaggacaggagatgtgatttctcat

SEQ ID NO: 54272 - DNA, 259 bp, Glycine max
gacaaaaacacgttcagaaccgcttcatcaataacatgccgaccgaaactctgtagtaagaggacattttctgcatcagacacacacatagatagaaaatacaacaaaaatgttggtgtccatgtccgtgtgcggccaagatgagattgagttgtcaagagatggcagccactacagtctctcaactggaatactaccttcccttggagccaaaagtaaccgcagactcaagctcaaacccttcattatatctccctat

SEQ ID NO: 54273 - DNA, 260 bp, Glycine max
cgcgtcgctgctccgtaccagtttcactgcataaatttgagagaaaactctgcaaacatgttggtttatcaggacctccttacaggtgatgagcttctctcggactccttccgttacaatgaaattgagaatggaatgctgtgggaagttgaggggaagtgggttgttaagggagcagttgatgttgacattggtgcaaacccttctgctgagggtggagaagatgagggagtcgatgacgcagctgttaaggttgttga

SEQ ID NO: 54274 - DNA, 267 bp, Glycine max
ctatgatgttcacttcacatataacaggatcaatatgagaaggttatatcaagcagctgaggctgcagaaaagttggtaactgattttctttttccatctacatccagaaagagacacattaaaaccacttctctgcttcccatatctggtacttttaacgaggagcaaattagttcaatcaaaatgattcttggttgcaaaggtgcaccaccctatatgattcatgggcccccaggtacgggaaagacaaggacaatggtagaagc

SEQ ID NO: 54275 - DNA, 261 bp, Glycine max
ggcccacaacctcatcgttcactacggcctccaccgccgcatgcaggtcaaccgccccttccccgcggcggaggccgacatcggccgcttccacgccgacgactacgtcgacttcctctccaccgtctcgccgcaaatcctctccgagaattcccactcccactaccgtcagctcaagcgcttcaacgtcggcgaggactgccccgtcttcgacggcctcttcgacttctgccgcgcctccgccggcggctccatcggcgt

SEQ ID NO: 54276 - DNA, 258 bp, Glycine max
gagaaagcacagttttcgtgccctccttcgtttcctgtgggagcaaagtctttaatacacacaatgctggacccaaatcctgaacgtcgtataaccattgagcagataaggaatgatgagtggtttcaaaaggaatatgttccggtcagtctcatcgagtatgaagatgtaaatctggatgatgtaaatgctgcatttgacaatgatgaggatcagaggactaaccagcaatgtgagaatgacgacatgggtcctcta

SEQ ID NO: 54277 - DNA, 243 bp, Glycine max
ctcatacaaattctccacacgatacttctgggctgttgatggagagggtagatgagggtccccttgatgatcaatatgcttcggctatcagaaactgtgatcctgagggtcctctgatgctctagtctcaaagatgattccagcatctgacaagggcagattttttgcttttggtcgtgtattctctggcagagtttcaactggtttgaaggtgaggattatgggaccaaattatgtccctgg

SEQ ID NO: 54278 - DNA, 255 bp, Glycine max
ggagattgtcagagcatcaggtaagtttgaacttctagaccgtttgctcccaaaacttcgcagagctggtcacagagtcctccttttctcacaaatgactcgacttatggacactctcgaagtctatttgcgacttcatgattttaagtatcttagacttgatggctcaacaaaaactgaggaaagaggcaatcttctacgaaaatttaatgctcctgactccccgtacttcatgtttcttttgagcacccgtgc

SEQ ID NO: 54279 - DNA, 243 bp, Glycine max
ggcttggttagtcaagaaccagcactatttgcaacaacaatagctggaaatattttatttggaaaagaagatgcagacatggataaagtcatacaagctgccatggctgcaaatgctcattcttcattcaaggattacctgatggttatcaaactcaggttggagaaggtggcacccaactttcagggggccaaaagcaaagaattgccatagcaagagcagtgctaagaaacccaaaagtat

SEQ ID NO: 54280 - DNA, 241 bp, Glycine max
gtagatatctccaaatgagcctcagttggcatttaattctcggattgccttttgtcttaacatgcacaatgaggcagttcgagcactgcgttttccaccaaacacacagaaggaaaaggaaagtgtgagaagaggagagagaggcatcaacaagagcaagaattggctaaacatatcgcagaggaagatgatgatgacttttgataatgatttgctctttttatcttaccagtttgttgtc

SEQ ID NO: 54281 - DNA, 241 bp, Glycine max
cttctttgttgcatatcttggaattgtgaggagaaaagagtggcctcatttcttcagatttcatgttgtgatgggaatgttattggagtttaccccagtagagtgatagcggcatccagcggctacagtccctataacctgcagggcaatctccaataacatttttggactgccgtatcatttggttatctatttaccgtcttggagtccataaggtgtgctcttgccggtatgtatgctg

SEQ ID NO: 54282 - DNA, 253 bp, Glycine max
ccctcaaaccctagccagggtcgcaattcacttgcggctgcagtagagaagcactcttcgttcttcgactgtctacgatctgctttctctgaattgtgaaaatgtcgctcggagaaactgcttgttcatacgcagctctcatccttcatgaagatggaattagtgtaactgctgacaagatcagcaccttgttgaaaactgcaaaggttccagtagactcttattggccaaccttgtttgctaaacttgctga

SEQ ID NO: 54283 - DNA, 259 bp, Glycine max
gctggctggcaggttagcccagatttatatggtgataacaacacgcggctattcacctactggacgagtgatgcatatcaagctactggctgctacaatcttctttgctctggatttattcaagtcaacagtgaaatagcaatgggtgcaaccatttccccagtttctgcataccgaaactcccaattcgatatcagtatacttatctggaaggtaaaatcccaggaatcttcctggttattaatctgcagatggaaac

SEQ ID NO: 54284 - DNA, 256 bp, Glycine max
gatctagtacggttcattaagacggtgcagaaggtggggctttatgccaatcttcggattggaccttatgtatgcgctgagtggaactttggaggaattcctgtatggttgaagtatgttcctggcgtaacttcagaacggataatgagcctttcaaggcggcaatgcaaggtttcacgcagaaaattgtccagatgatgaagagtgagaagttgtttcaatctcagggtggtccaatcattctctctcagattga

SEQ ID NO: 54285 - DNA, 247 bp, Glycine max
attttacaatcagaaattggagagcagaaagaaagggccttggcagcagcagctaccgaacttgaaagatttttcaagaaggaagacttcagcagaatgaaggtgattgggcaattcaatcttggattttcatttgtaaattggatcaagatttattcattgtggaccagcatgctgctgatgagaagtataattttgagcgtttatcacagtcaaccatcttgaaccaacaacctcttcttaggcc

SEQ ID NO: 54286 - DNA, 244 bp, Glycine max
agttatcaaacctaagagaatcatattcatacacaatcaacagtagtggtcactcctgttttgcagccatgactagtgttttggtgtttggctattgtttagtaataagcttggttgtagcactagttctgtttctgctcaaccaacaagggctttcttcgtatttggtgattcactcgtggacagtggtaacaatgatttcttggtaaccacagccagagcagacgctccaccctatggcatt

SEQ ID NO: 54287 - DNA, 247 bp, Glycine max
ccttgatagtgtgctcaattataagccaaaagctgggcttctgaagcctgcatttaccattatacgtgatacacaatcaaaatgtttacttctattgatccggggtactcatagcataaaacgacaactgacagctgcaactggtgctgttgtccccttccaccattcagtgttaaatgatggtgggataagcaacttggttttaggatatgcacactgcggtatggttgctgcagctcgttggatt

SEQ ID NO: 54288 - DNA, 241 bp, Glycine max
gagccgatctacacttgatttggattccaatctggctaggacccattcatcaagtaatcattcacacaattcctaacctaatgctcaaccagcatagcgatgtagtggggtgtcactaactggtgagggttctgtgacgtatgcgaggggttggtgtccacttgatatggctccagctcttggtagggtgcaatcatcaggtactggtgctcacggtcctgaaacaagtgacttaccagtt

SEQ ID NO: 54289 - DNA, 243 bp, Glycine max
gtcgcctgcaggaagagggtgtgaatatcacagccaactcggtccatccaggagtgataatgactcctcttatgagacactcatcttaccttatgcatttcttaaaggtcttcaccttttacatatggaagaacgtcccccagggagcagccacgacatgctatgttgctctccacccaagcgtgaaaggtgtaactgggaagtactttgtggattgcaatcaatgcaaaccaagttcacacg

SEQ ID NO: 54290 - DNA, 240 bp, Glycine max
ctccatcatccaaatatagttagaattcacgaggttattggcacaaaaacgaagatatacattgtgatggaatatgtttcaggaggacagctattagacaagatatcctatggagagaagtgaatgcatgtgaggcaagaaaactattccagcaacttattgatgccctgaaatactgccataacaaaggggtttatcatcgagatctcaagccagaaaacttgcttcttgacagcaagg

SEQ ID NO: 54291 - DNA, 286 bp, Glycine max
tagtaactcggtgaaggtcttggctggtgtgaacacaaacttcactgtgacctcaaaagcagcagatgatggagaattctcagaactctacatattcaagtggacatcactcttgatccctccaatgactttacttatcatgaatattgtcggggtggttgtcgggatctcagatgccatcaacaatggttatgactcatggggacctctctttggtagattgttctttgcattgtgggtgatcctccatctctaccccttcttgaagggggtgctttgggaaaca

SEQ ID NO: 54292 - DNA, 343 bp, Glycine max
gaaatgagaaatgaaggcttgcttccaaatgtattttgttatactgctctaattggtggtcactgtaagttaggtcagatggacatagtggggagtatcttactggaaatgtcttcaaacggcatacgacctaataaaattacctacactattatgattgatgggtattgtaaattgggaaatatgaaagaagctagggagcttttaaatgagatgataagaaatggaatagctccagataccgtcacttataatgcattgcaaaaaggatattgcaaggaaagggagctaacagttactttacaaagtgatcataaatctaacataggactacccttagaag

SEQ ID NO: 54293 - DNA, 224 bp, Glycine max
aattcatagggttcatggtatcaccttatcgtacaaacaagcatggagaggcaaggagcgtatcatggctgcaatgcgtggatcttttgaagaaggttatcgcttgcttccacaatactgtgaacaggtgcacgcactaatccaggcagtattcatctgttatggaatcagctgatgtgttcacgctctcactcttcagatcaaatgctgtaatgttcgcatgt

SEQ ID NO: 54294 - DNA, 339 bp, Glycine max
  unsure (1)..(339): unsure at all n locations
tgatataattggtgctggttcacattcttcagaagattttcctgaaaaggaagatcaagaaaaacccaaaaagattgatgccagattgagacaaagaatagatcctcaatacaatgaggttcaggctcagatggaaacaaatttgtttaaattgtctcttgatgatgttgaaactcctaaaggttccatgttggatcttaaaatttctcaatctaaaattgcacttcccaagaacacagttggaggaaccattctgcgtagtgatttattggcacattttttgacagagggcaattttagagcaagtgtngatttgcagcgcactcantcgtatagagg

SEQ ID NO: 54295 - DNA, 335 bp, Glycine max
atcgagccgaatcggctcgagccacagttggtattcctgagaatacaggtatagcattggactgtgctatgaatagttctattagggggcgcgccagttctgatatttacaccatctgctctcaagactgtgaattatggaatcctgcttgcacaaaagcaatgactatgtcatttaatccaaacccgtgttctgatgcatggagtttggaatttctgaagcgtaccggatttcattgtgatatcatttgtgtcactggatggactgccaccccaatgcaggatgttcaggttacaattgattggtttatttcctctcaggaatgtgttccagga

SEQ ID NO: 54296 - DNA, 349 bp, Glycine max
cggaaaagttgtgttgaaattttcctgaatctctccaaactggaccaggttgtggggaaaagcctcaaaattgatggtgtcatcaactaaatttgaggcttttccccacaagctggtgcagtttggagagattcaggaaaaagttgtgttgaaattttcacaagaggaatttcttacagcttggtcaactcaggtgcgtcccgcaacgactctgtaggctgatggctgcccatatttgtatgctatggtgcatgatagttcagtgtctacaataccaggtgattttgtcattggtgttaagttgacaaccataaacaatatgtgtgcatatgggctcaatcctggtatt

SEQ ID NO: 54297 - DNA, 334 bp, Glycine max
agggagtactagccttcttcttcgtcgcttctctcttcattgcctgcttcttctacttggattacaagggcttccgctctagaggcaccatatcattgacttggatttttcatcatcatcatcttcttcttcttctgtttctgtttctgtttcttctgccccagttcagtttctgagccaagacggtgataaatgtgatatctttgatgggaattgggtttgggatgagacctatcccctttaccattccgtaaactgttctttcttggatcaaggttttcgctgctccgagaatggcaggcctgatactgtctacaccagtggcgatggcaac

SEQ ID NO: 54298 - DNA, 336 bp, Glycine max
  unsure (1)..(336): unsure at all n locations
tggaaatgtttcctttgatattaaatctcgctctagattggaaaaagtttcctctacaaaagcacaatttgttagtggaaaaaccttcaaatatgatataattggtgctggttcacattcttcaggagattttcctgaaaaggaagatcaagaaaaacccanaaagattgataccagattgagacaaagaatagatcctcaatacaatgaggttcaggctcagatggaaacaaatttgtttaaattgtctcttgatgatgttgaaactcctaaaggttctatgttggatcttaaatgtctcaatctaaattgcacttccaagaacacattggagga

SEQ ID NO: 54299 - DNA, 337 bp, Glycine max
  unsure (1)..(337): unsure at all n locations
tgtttgattgtgttgatgaggaggattctttgaggaagtttctttaagtgcagcacttaatggtgttgagggtttggactatatgtgaaggaattcctcttgccacatctgagggttttcctcatgtgctttcacgcaaaaatggcgataaaggcataaggagatttgtctctggggatggtgaagagatgacattgattccangaaccagtgttgaagaggctacaacaagctaatatttgaacttgagataagtgttcctacattggtttgcattgaatgttccaaggatgagaaactcctcgtcgncaaattgtgacaaactaagagcgctgct

SEQ ID NO: 54300 - DNA, 338 bp, Glycine max
caatattctccaattagtaacttgttgagagttgctgcttggaagataggttgtgcaatggtcaagattgtgatgtctgggaatgcagcagtcataaggagtgatggggcctcattggtacaagtgatgttaacaaacagcaagagtatagagcattttgatgcatgtaagtggacaaaatcagaaccacattcctgggaattaatcttcccaatagaggtatgtggtcctaataatggttctgaaatgtggagttctgagtgggcaaatcaaacttcatggcattctagttgccttattgacaatctcaaacagtctacagtttgtgatatgctctt

SEQ ID NO: 54301 - DNA, 339 bp, Glycine max
gtcctgactgcaacatagttggtgcaatgcttttcgttgatactgagcatagcaatcctgaaaaggcagtgcgtagtatgtcttgttgcagcatactggacctgttatgaccttcgagtaggtatcattccgtcaagctgtgggcagcttgaaccagacatgcatgcaaggtttcagctgttgaggaccactaccaatggtgattttgttcaagggaaagatctcgcaatggttaaagttaatgtagcatgtgctgctgttggcttgacatcaaggtacactccaactccattgttggaatctggtgtcgcaaaagacagagggttaattgtggagtat

SEQ ID NO: 54302 - DNA, 331 bp, Glycine max
gaaacacagtgagttaagtgttcacaaaaaacaatggatgatattgtaggatacggttttcgtccaacagatgaagagcttgtgaagttctacctcaaacacaagttgctcgatgatgatccctgtgtccacttcatcctcgacgttgacctttgtgaagtggaaccttgggacttaccattgttattagcagattcagctgtgcgattcaatggccgtgaatggttcttcttcagtcctgtcgattacaagtattcaaatagtaaaagggttaacaggacaaccaagtgtggcttctggaaacccactggaaaagaccgtggcattagga

SEQ ID NO: 54303 - DNA, 276 bp, Glycine max
aggaaattgaggaaaaacttgtgaggaggaacaatgatccgagtctgcagggcaatcgacttggcccggttcaactgccatacactttgctttatcctagcagtgagggcaatcgacttggcccggttcaactgccatacactttgctttatcctagcagtgaggaagggttaacttttaggggaattccaaatagcatctctatctaagggagcctgtggtttactctaattactctatatatagtgcatgtgtacctccaataaaaaagatgca

SEQ ID NO: 54304 - DNA, 278 bp, Glycine max
aaaaggcgtaacatgcacgagagagcaatgcttcattatggtatttctttagatttgaaaccatctgcaacagatgctgctgctatcaaggctgccattgagaaactgcatgtaccagatgagatggaagacaacttgtagctagatgtatgaagtgcaaagtgctaacttggtgtaaattaccagcatttgaatcctgatcacagggatttggctctgcttgtgctttcggcaaaattgttcactaaagcagcacaactgttgaggagtatttattc

SEQ ID NO: 54305 - DNA, 278 bp, Glycine max
cttattaacactttccttagttcaatatggggaagcccttcttcactctctctctttcttccctttgcttgctactcttgtcgagtgcatgctttgctattacctccagcaagttcaacgagtgccaactcaacaacctcaacgcattggaacccgaccaccgcgttgagtccgaaggtggtcttattgaaacatggaactctcaacaccctgagctgcaatgcgccggtgtcactgtttccaaacgcaccctcaaccgaacggcctccacttgccat

SEQ ID NO: 54306 - DNA, 272 bp, Glycine max
tatatatactatgatgagagtgcggtttcctttgttggtgttgctgggaactgttttcctggcatcagtttgtgtctcattaaaggtgagagaggatgagaataaccctttctacttgagaagctctaacagcttccaaactctctttgagaaccaaaacggtcgcattcgtctcctccagagattcaacaaacgctccccacaacttgagaaccttcgagactaccggattgtccagtttcagtcaaaacccacacaatccttctccccca

SEQ ID NO: 54307 - DNA, 270 bp, Glycine max
caggagctgaacccttccttcgtaagaaatcaaagtgccaccctttacatcagccaatgagttcaagtcaatagagaagttcaaaattttcaacacaaataatttgtgggtgaacttaaacgcagttaaaaggcttgttgaagctgatgctcttaagatggaaattattcccaatccaaaggaagttgacggaataaaagttcttcagctggaaactgcagctggtgctgcaataaggttctttgacaaggctatgggattaatgttcct

SEQ ID NO: 54308 - DNA, 267 bp, Glycine max
  unsure (1)..(267): unsure at all n locations
ggacagtgagaaaactttgtcagcaanaaaagttccaagctgaatgtcggatatcttctaaagtgggattagaataaagacctatttagaagatatcccacattcagcttgggaccttttttgctgggacagtgagaaaactttgccaaataatttttctgcagaattgctctcttgcaaattggatactgttactggccaatattatcctcagtgggctccgattaattgtcgagttcatcgacaaccattcacatcactgaagga

SEQ ID NO: 54309 - DNA, 267 bp, Glycine max
taaaattcttccaccaagttatgggtttccttgtgttgcttcttttctccctcttaggtctctcttctagttccagcatatcaactcatcgttccatattggaccttgacctaaccaagtttaccacacagaaacaggtgtcttcactgttccaactatggaagagtgagcatggacgtgtctaccataaccacgaagaagaggcaaagagacttgagattttcaagaataacttgaactatatcagggcatgaatgcaaacagaaa

SEQ ID NO: 54310 - DNA, 274 bp, Glycine max
tctcgagccgctcgagccgctcgagcggtgaggtagatctacggttaaattggtgtagtgtggtaagctgggaggaggatttagagtgacttcacttagttaggccatttctctcgtttcttcctgaagttcaaactgctgacaggaaagtgccatttagagagaaggtcatatacactgtgatctctcttttcattttcctggtttgtagtcagctccctctatatgggatacactcaacaacatgtgctgatccattctattggatgcgtgt

SEQ ID NO: 54311 - DNA, 215 bp, Glycine max
tgctagtggatcaccatctagccaatgacaacaggaccaagccttatgtggagctaatcggcgaaagcctcgactaggtcttcactgagtactctagagccattaccttgctctcagcacgatcaactcctcttcactgggcacaaatggttaggtcagaaagcagtgcaatggtgccgactatcaccattatcaggacccttgacttttcctcc

SEQ ID NO: 54312 - DNA, 262 bp, Glycine max
ccgtattaaagaatttaagatatactatgatgagagcgcggttcccattactgttgctgggagttgttttcctggcatcagtttctgtctcatttggcattgcgtattgggaaaagcagaaccccagtcacaacagtgcctccgaagttgcaatagcgagaaagactcctacaggaaccaagcatgccacgctcgttgcaacctccttaaggtggaggaagaagaagaatgcgaagaaggtcaaattccacgaccacgacca

SEQ ID NO: 54313 - DNA, 277 bp, Glycine max
cacttccttagttcaatatggggaagcccttcactctctctctttcttccctttgcttgctactcttgtcgagtgcatgctttgctattagctccagcaagctcaacgagtgccaactcaacaacctcaacgcgttggaaccgaccaccgcgttgagtccgaagtggtttgattcaaacatggaactctcaacaccctgagctgaaatgcgccggtgtcactgtttccaaactcaccctcaaccgcaatggcctccacttgcgatcttactcacttt

SEQ ID NO: 54314 - DNA, 262 bp, Glycine max
ggccaggcaagccccactcaaccaccacacctctcctcgttcacgctacccctttctgctcttcttctacctttcaagttttaaaagtataaagatggcagagacattcctatttacctcagagtcggtaacgagggacaccctgacaagctctgcgaccaaatctccgatgctgtcctcgacgcttgcctcgagcaggacccagacagcaaagttgcctgcgaaacatgcaccataaccaacttggtcatggtcttcggag

SEQ ID NO: 54315 - DNA, 246 bp, Glycine max
taaaaggatagaagatgatcagaaatttaaaaacaaaaaaagtaagaaaaggaaaaacttggaggcatcaaatcagttggagaatgatagaaagaaaagtaagaaagaaatgatctctaagacaagagaggaggttgaagctgattacaaggctgcatccttagccccagatgttatggagaagaaacagatgcaaactgaaactctctctgctgtctttgagacatactttcgcattttgaagaa

SEQ ID NO: 54316 - DNA, 248 bp, Glycine max
caattttcacagctttgcatacactttcttttgtgaacaacccatcttcttcacctttctcaatttccacaccaacccttaactttctactaaacattcggcattttatgagttgatcagcacccagatgcggtaagaaaaccaacctacacttattcacaagcgcctctgtcaaagaagcagctccacagtgtgttatgaagcacccgacagaagggtgtcctaaaatcaattgttgttgcacccaa

SEQ ID NO: 54317 - DNA, 258 bp, Glycine max
gggaaccagtgttgaagaggcttacaacaagctaagagttgaacttgagaaaagtgttcctacattggttggcattgaatgtcccaaggatgagaaacttcctcgtcgcaaaatttttgacaaacctaagacgcgctgcttcactattctccctatggagtttaatcttgtggttcgtcagaagtttttaaattttgtgggttcattatgaagaaaagggacaagcttagttgtcaagttggaatcaacccatactcc

SEQ ID NO: 54318 - DNA, 256 bp, Glycine max
ctttccttgaaagttaatgcatgctttttagctagacagaagataagaaggcaaagcaatggctacttcaaagttgaaaacccagaatgtggttgtatctctctccctaaccttaaccttggtactggtgctactgaccagcaaggcaaactcagcggaaactgtttctttcagctggaacaagttcgtgccgaagaaccaaacatgatcctccaaggagacgctattgtgacctcctcgggaaagttacaactca

SEQ ID NO: 54319 - DNA, 246 bp, Glycine max
tatatactatgatgagagtgcggtttcctttgttggtgttgctgggaactgttttcctggcatcagtttgtgtctcattaaaggtgagagaggatgagaataaccctttctacttgagaagctctaacagcttccaaactctctttgagaaccaaaacggtcgcattcgtctcctccagagattcaacaacgctccccacaacttgagaaccttcgagactaccggattgtccagtttcagtcaaa

SEQ ID NO: 54320 - DNA, 246 bp, Glycine max
gtggtcaattgcaacagttttaacacccattgctgcaaaatttgggttgccatgtcttcttattatgcgtgccttcatgggaattggtgagggtgttgcgatgcctgcaatgaataatatactttccaaatggattccagtgtcagagagaagcagatcacttgcactagtatatagtggcatgtaccttggttcagtcactggcttggcattctcacctatgctaatccagaaatttgggtggcc

SEQ ID NO: 54321 - DNA, 235 bp, Glycine max
cctagttcaatatcctagtataccttaataaataatttaagatactatgatgagagcacggttcccattactgttgctgggacttgttttcctggcttcagtttctgtctcatttggcattgcttactgggagatagagaaccccaaacacaacaagtgtctccagagttgcactagcgcgagagactcgtacaggagccaagcatgtcacgctcgttgcaacctccttaaggtg

SEQ ID NO: 54322 - DNA, 254 bp, Glycine max
tgatattctcttgggaatctcaaaaactgtagactgtttgggattgtcaataaggaaactcaaatgccatgaagtttgatttgaccactcagtctacagtttttgatattctcttgggaatctctcaagattttgaaattgctggtaatactcttatgccagctttttctgttccacaggctactgccatatcttctgaaaatgcggaatcctctgcatgatctggaatttgtgttgtctttcgcttgtgcgtt

SEQ ID NO: 54323 - DNA, 276 bp, Glycine max
ccgtattaaagaatttaagatatactatgatgagagcgcggttcccattactgttgctgggagttgttttcctggcatcagtttctgtctcatttggcattgcgtattgggaaaagcagaaccccagtcacaacaagtgcctccgaagttgcaatagcgagaaagactcctacaggaaccaagcatgccacgctcgttgcaacctccttaaggtggaggaagaagaagaatgcgaagaaggtcaaattccacgaccacgaccacaaaacccggaga

SEQ ID NO: 54324 - DNA, 270 bp, Glycine max
gggcatcactcgttgtttctctcttccatgcccaaaatgcgtttcgtctttgtttttctgtttttccattttcatttccctgaaaccctttctgccccaatctcagagtaccgcgcccttctctctctccgttcagtcattaccgacgccacaccacccgttctctcttcttggaacgcctccatcccttactgttcctggctcggcgtcacctgcgacaaccgccgccacgtcaccgccctcaacctcaccggcctcgacctctccggc

SEQ ID NO: 54325 - DNA, 265 bp, Glycine max
cagagatgcttcttgagatgcagaaaaatgaaatgaaaaggcatgaagcttggctggtttatggagccttgctggtcagtgtatatatgatcgactaaagattttcccaacttttccatctcctccccttcatgctgtctggaagaccaatgcaaaagttcttacttcaactcataaacgcaaggcaagccctgagcaattggaacagcagccacctttgaaaaaagctgctacggatggtgagattggtgtggacctaatgaat

SEQ ID NO: 54326 - DNA, 261 bp, Glycine max
cttgaaaatggtggcacatgttatgtctgataagatataatatgtaccaccattttcaagagggttaccttcattatcgagcacatattatatcttgtcagacataacagcatttggtggaacaagagcagccccaacgggaaatgaaagatgccctctcactgtggtgcaatctcgcaatgagctcgacaaatggattggaacaatcatctcgtccccatatcgaatccgttttatcgccgaagccatcctttgagcctt

SEQ ID NO: 54327 - DNA, 253 bp, Glycine max
gcaggttatcttggtcttttcaacgaaaacgagtctggtgatcaagtcgtcgctgttgagtttgacactttccggaactcttgggatccaccaaatccacacatcggaattaacgtcaattctatcagatccatcaaaacgacgtcttgatggatctgatagaattgacgttaattctatcagatccatcaaaacgacgtcttgggatttcggccaacaataaagtagcccaggttctccatacctatgatgc

SEQ ID NO: 54328 - DNA, 267 bp, Glycine max
attttgagtaccactaccaatggtgattttgttcaaggaaaagatctcgaaatggttaaagttaatgtagcatgtgctgctgttggcttgacatcaagttacaatccaactccatagttggaatctggtttgcaaaaagacagagggttaattgtggaatattttggaaggatgtcttacgttgctcataacgttaatcagccccaagagaaagatttgttggagggaaattttcctttgatataaaatctagctctagattggaaa

SEQ ID NO: 54329 - DNA, 271 bp, Glycine max
ccttcaaacttaattattaacacttccttagttcaatatggggaagcccttcactctctctctttcttccctttgcttgctactcttgtcgagtgcatgctttgctattagctccagcaagctcaacgagtgccaactcaacaacctcaacgcgttggaacccgaccaccgcgttgagtccgaagtggtttgattcaaacatggaactctcaacacactgagctgaaatgcgccggtgtcactgtttccaaactcaccctcaaccgcaatg

SEQ ID NO: 54330 - DNA, 279 bp, Glycine max
atgaagatgaagacgaagatgatgaagatgaacaaattccctctcaccctcctcgccgaccaagccatggaaagcgtgaacaagacgaggacgaggacgaagatgaagataaacctcgtcctagtcgaccaagtcaaggaaagcgtgaacaagaccaggaccaggacgaggacgaagatgaagatgaagatcaacctcgcaagagccgcgaatggagatcgaaaaagacacaacccagaagacctagacaagaagaacctcgtgaaagaggatgcgaga

SEQ ID NO: 54331 - DNA, 275 bp, Glycine max
ggaagaggtgggcgtgggaatgggaattgacgttcatcttgttccttctgatgaggtgggcgtgggaatgggaattgacgttcatcttgttcctcatccgaaggaagagcgaaagcaagaggaagatgaggatgaggagcagcagcgagagagcgaagaaagtgaagattctgagttacgaagacataagaataagaacccttttctcttcggctctaacaggttcgaaactctcttcaaaaaccaatatggtcgcattcgcgtcctccagaggt

SEQ ID NO: 54332 - DNA, 267 bp, Glycine max
ttctctccatttgtccttgaatataatactcagcatggctaagcttgttctttccctttgttttctgcttttcagtggctgctgcttcgctttcagtttcagagagcagccacagcaaaacgagtgccagatccaacgcctcaatgccctcaaaccggataaccgtatagagtcagaaggtggcttcattgagacatggaaccctaacaacaagccattccagtgtgccggtgttgccctctctcgctgcaccctcaaccgcaacgc

SEQ ID NO: 54333 - DNA, 268 bp, Glycine max
ttccgcacttccaaaggttgctcttcctgttgctgcctctgttgttgttctttaatgccaacaagttcaatgtttgcttctccttcattaatcactagtaccactatggcctttgaattgaagtgtggcagaaacctagtcaagtgcaggagcttgcgttccctgggtctgcaaaagatattgagaacctaataaagagccaaagtgagtcctactttgtggatgctcagcctcagcagaaagaggaggggaacaagggaagaaaggg

SEQ ID NO: 54334 - DNA, 284 bp, Glycine max
ctgtgatgacaatagcatttgaatttgcatttgaaagccatatgcaagagcatgtaacatctatggcacgccaatatgttcggagcattatatcatcagtccaaagggtagcattagcactttctccttctcatttgagttcacatgcagggttaggtcaccattgggtactcctgaagcacaaacccttgctcattggatctgcaacagttataggtttgtcaaatttactgtctttgcatactgaggttgaggatcatgcaatgcattttaccctgtgcgat

SEQ ID NO: 54335 - DNA, 284 bp, Glycine max
aatttttatccctatttggattttattttatactgttatgttatccatggcttctgcatatgttgagtaccgttgctttgttggtgggctcgcttgggccacagacgatcatgccttggagaaagccttctctcactacggcaacatcgttgatcgaaggtccgtttgttgcagccatcgcacacgatcccgttctgatctctgatctttttccgttacttgatctatgatacttcttcttcttcttcttatataattctcttttattactcacgccaataggt

SEQ ID NO: 54336 - DNA, 281 bp, Glycine max
ctcgagccgggcactgctttttgaagtccagtcctcaccattctgtgtgcatcaaaaagagacatcaaaaggaatgtttggtgttcctaaacctgggcagaaaaggaaatttatggaagtaagcaagcattacgtggcccatgaaaacataagatcggtgatagaaatgattcagttagacttacaaatttcttgatgcctccaagttccggacccagaggatggaaaaatagttccaaaaatgatgccaaagagaaacatggagccgactccaagcccaa

SEQ ID NO: 54337 - DNA, 277 bp, Glycine max
caacaatgaagacactcctgttgttgccgtttctattattgacaccaacagcttggagaaccagctcgaccagatgcctaggagattctatcttgctgggaaccaagagcaagagtttctaaaatatcagcaagagcaaggaggtatcaaagccagaaaggaaagcatcagcaagaagaagaaaacgaaggaggcagcatattgagtggcttcaccctggaattcttggaacatgcattcagcgtggacaagcagatagcgaaaaacctacaaggag

SEQ ID NO: 54338 - DNA, 276 bp, Glycine max
aagttctctccattgtcgatgaacactcatcaccatggccacagcctgtacattccctttgcaatccttctgattacagtggctgcttcgctctgagactgcaggcacagcatgatgagtgccagatccagaagctgaatgccctcaaacggataaccgtatacagtcggaaggtgggttcattgagacctggaaccctaacaacaagccagtccagtctgccggtgttgcactctctcgctgcacccttaaccgcaatgcccttcgtagaccttc

SEQ ID NO: 54339 - DNA, 246 bp, Glycine max
aaatggagagggagtccttgataactgaagctcctaatgcaccggttactgcacagagaagggtcagaagtgacttggaaaattctctaccaaaaccatcaaagccataatttttttcatgtgacacgttcagagcattgaaagctcctgataagggtcacccaaatggaacaacaggcccaaaggcaccacaacttatctgctctccagcaacattgtgctttttttgatcaagatgacaatgga

SEQ ID NO: 54340 - DNA, 257 bp, Glycine max
ttcattgatggtgatctttttcctagccggtattgtctttgtcattttcttgagaactgtaagaagggacttgactcggtatgaggagttggacaaagaggcacaagctcagatgaatgaggagctttctggatggaagcttgttgtgggtgatgtatttagagagcctgatggttcgaagcttctctgtgtgatggttggggatggggttcagattcttggaatggctgctgtgactattgtttttgcagccctgg

SEQ ID NO: 54341 - DNA, 274 bp, Glycine max
ttatcgagccggatcggctcgagttgattacctacacttccttaactcgatatggggaagcccttcactctctctctttattccctttgcttgctactcttgtcgagtgcatgctttgctattaggtcgtggtagtcaacgagtgccaactcaacaacctcaacgcgttggaacccgaccaccgcgttgagtccgaaggtggtttgattcaaacatggaactctcaacaccctgagctgaaatgcgccggtgtcactgtttccaaactcaccct

SEQ ID NO: 54342 - DNA, 252 bp, Glycine max
ctccattgtctttggacactcatcaccatggccaagcttgttctttccctttggttccgtcttttcagtggctgcttcgctctgagagatcaggcagagcaaaatggagggccagatccagctgctgaatgccctcaaccggataaccgtatagagtcggaaggtggggtcattgagacctggaaccctaacaacaagccatgccagtgtgccggtgttgccctctctcgctgcacccttaaccgcaatgcc

SEQ ID NO: 54343 - DNA, 259 bp, Glycine max
ataaaattcttccaccaagttatgggcctccttgtgttgcttctgggctccctcttaggtctctctgctagttccaggatatcaactcatcgttccagattagaccttgacctaaccaagtcgaccacacagtgacagggtcgtcactgtgccaactatggaagagtgagcatggacgtgtctacgataaccacgatgatgagggaaagagactggagatgtccaagaataacttgagctatacccgggacatgattgg

SEQ ID NO: 54344 - DNA, 265 bp, Glycine max
ctccattgtctttgaacacttgtcaccatggccaagcttgttctgtccctttgtttccgtcttttcagtggctgcttcgctctgagagagtaggcacagcataatgagtgccagatccagaagctgtatccctcaaaccggataaccgtatagactcggaaggtgggttcattgagacctggaaccctaacaacaagccattccagtatgccggtgttgtcctctctcgctgcagccttaaccgcaatgcccttcgtagaccttc

SEQ ID NO: 54345 - DNA, 220 bp, Glycine max
atttacaccatctgctctcatgactgtgaattgtggaatcttgctgtgacaaaagcaatgacgatgttctttaatccaaacccgtgttctgatgcatggagtttggaattactgaagcgtactggatttcagtgcgatatcatttgtgtcactcgatggactgccaccccaatgcaggatgttcaggttacaattgatgggttgatttcctctcaggaat

SEQ ID NO: 54346 - DNA, 249 bp, Glycine max
gcacgaatggcaacacaagcaggaaaagcaccaaggaaaggaaagtgaagaagaagaagaagaccaagacgaggatgaggagcaagacaaagagagccaagaaagtgaaggttctagtctcaaagagaaccacgaagacataagaataagaacccttttcacttcaactctaaaaggttccaaactctcttcaaaaaccaatatggccacgttcgcgtcctccagaggttcaacaaacgctcccaacag

SEQ ID NO: 54347 - DNA, 244 bp, Glycine max
gatagctgccgcaagcagctccagggggtgaacctcacgccctgcgagaagcacatcatggagaagatccaaggccgcggcgatgacgatgatgatgatgacgacgacaatcacattctcaggaccatgcggggaagaatcaactacataaggaggaacgaaggaaaagacgaagacgaagaagaagaaggacacatgcagaagtgctgcacagaaatgagcgagctgagaagccccaaatgcc

SEQ ID NO: 54348 - DNA, 277 bp, Glycine max
ttcggctcgagagttcaaatacccttaatggcaaaggaggaaattctgtcttctagtgcaagtgattgcagagcagcaagggtgagtaaaaatagcaacagtcatgctactgcaatgcatgtgggagctatagaaattatcaatgatagttacgcaagtcctgaatgcaccatagttggtgcaatgctaatggttgctagttatcataccaatcttgaaaatgcatttcgtagtatcatggttgcgccttgcagatgcggatggcccattcgggtgg

SEQ ID NO: 54349 - DNA, 268 bp, Glycine max
agacactcctgttgttgccgtttctattattgacaccaacagcttggagaaccagctcgaccagatgcctaggagattctatcttgctgggaaccaagagcaagagtttctaaaatatcagcagcagcagcaaggaggttcccaaagccagaaaggaaagcaacaagaagaagaaaacgaaggaagcaacatattgagtggcttcgcccctgaattcttgaaagaagcgttcggcgtgaacatgcagatagtgagaaacctacaaggt

SEQ ID NO: 54350 - DNA, 278 bp, Glycine max
atcaccattactgatggtattgacaagactagtgcaactttgcaatttagaaagttagcagattgtgatttctcaggtgctacccacaaaagcttagagctctgcttaaagtttctcttgagaaatcacaatctgctaactttctaaagagaactttaagcagatgtctaatgttttgtgggtagctcctgaggacaaggcgagtttatggtcacaacttcattatgtttcgtgtaataatctggaaatgcaagaaggggatcttgtcaatctcgtaa

SEQ ID NO: 54351 - DNA, 272 bp, Glycine max
tatatatactatgatgagagtgcggtttcctttgttggtgttgctgggaactgttttcctggcatcagtttgtgtctcattaaaggtgagagaggatgagaataaccctttctacttgagaagctctaacagcttccaaactctcttgagaaccaaaacggtcgcattcgtctcctccagagattcaacaaacgctccccacaacttgagaactatcgagactaccggattgtccagtttcagtcaaaacccaacacaatccttctccccca

SEQ ID NO: 54352 - DNA, 156 bp, Glycine max
tttcctgttttcaatttcgattctttcgttaatttaataagatgtttgggtgggcaccgaagaagagcgataatacgaggtactacgaaatcctcggcgtctccaagaacgcttcgcaggatgatctgagtaggcttacaagaaagccgctcttaa

SEQ ID NO: 54353 - DNA, 285 bp, Glycine max
ccccaagcgatctgtgctatggtaagcacagattgagagttcatttcatgcagaggatgacggaagtccctgattcaatgataatatcgatctactgttgagcgcttgatttgttggggttaccaggaccaggttaagcttttccaaacaagattgtttttgatggtaagcttgtgttggctaacacacaagaattctttgatggaaattttccagtggattcttggttaccaatctttgtgaaatgtctttatcctgtaagtcaattaccttcagaagctgtcg

SEQ ID NO: 54354 - DNA, 250 bp, Glycine max
cttaattattaacactaccttagctcaatatgggcaagcccttcactctctcactatcatcccattgattgctactcaagtcgagtgcctgcattgctattagctccagcaagctcaacgagtgccaactcaacaacctcaacgcgttagaagccgatcaccgcgttgcagtccgacggtggactcattcaaacatggaactctcaacaccctgagctcaaatgcgccggtgtcactgtatccaaactca

SEQ ID NO: 54355 - DNA, 300 bp, Glycine max
cgcctttccagagcggtatggccattcaggtcgctacatttccgaataccattgcgcagactgaaccatacatgaattcaaggtttcagcttttcagtaccactaccaatggtgattttgtatcagggaaagatctcgcaatggttaaacgtaatgttgcatgtgccgctgttggcttgacatccagttacactccaactccattgttggaatctggtttgccaaaagacagagggttaattgggcgatattttggaatgatgtcttacgttgctcataacgttaatcagccccaagaga

SEQ ID NO: 54356 - DNA, 308 bp, Glycine max
cattggtccttaaacactcatcagtcatcaccatggccacgctagtatgttccctttgtcatctgctgcccagtggctgctgcttcgctttcagttccagagagcagcctcagtcaaacgagtgccagatccaagaactcaatgccctcctaccggatcaccgtatagagtcagaatgagggctcattgcgacatggaaccctaacaacaagccattccagtgtgccggtgttgccctctctcgatgcaccctcaaccgctacgaccctcgtagaacttcctacaccaacggtcgcccggaaatctac

SEQ ID NO: 54357 - DNA, 267 bp, Glycine max
ttaactaacaaccttgatatccccaagttatccgcatgttgaaaaaaagtttatatattaatcatatatcttccgtatttcacaagaatacgacaagacttaatttaagaggaatgggggggcccagctttctagctgtgcataatatcaggattactgatgggagtgacaagactagtgcaactttgcaatttagaaagttagcagattgttgtgttctcaagagaaactttaagcagatgtctaatgtaatgtgggtagctcctg

SEQ ID NO: 54358 - DNA, 282 bp, Glycine max
ggaacaatgacagaatcagataagatgaaccccatcgatcaccttcccctccgtctgctcagatccgacactcttccacgcgcccctaccttctctgaatccaccgtggatttcctccctcacttctccggctactcctggatcgcctacgccgcttcttcacttctcaccatctcccacttcccttcccctctctcccctcaacaaacccgcatcggcccctttttccgccaatacttccagctctccgcccatcccgtcgccgccgtcgcctggtccccc

SEQ ID NO: 54359 - DNA, 241 bp, Glycine max
cggatattgctctgaggattgtggccccaggcaagggcattctggctgcagatgagtccgtgggcagcatggccaaaaggctgagccaaattggggtagagaacactgaggagaatcgccgactgtaccgccaggtcctgttcagtgctgatgaccgtgtgaaaaagtgcattgggggggtcatcttcttccacgagacactctaccagaaagatgacaatggtgtcccctttgtccgcac

SEQ ID NO: 54360 - DNA, 234 bp, Glycine max
gaattcctcttgccacatctgagggttttcctcatgtgctttcacgcaacaatactgaccaaggcatggcgacaccagtgtctgcgctgctagaagatatgccattggttccgggagccagtgttgaagaggcttacaacaagctaacagttgaacttgagaaaagtgttcctacattggttggcattgaatgtcccaaggatgaaaaacttcctcgtcgcaaagtttttgata

SEQ ID NO: 54361 - DNA, 239 bp, Glycine max
ggagagttgaatgtggaatcccttctggatttccgctcacagttatttgcaatagcatttttaatgagatgctcattagatatagctatgaaaaattactgcgccaggctaaagctccaagtatgtttttacaatccttcaaaaattttgtttctttgtgtgtgtatggtgatgataacttaattagtgttcatgaatacgtcaagccttactttagtggttctaaattgaaaagcttt

SEQ ID NO: 54362 - DNA, 232 bp, Glycine max
attgaatatgatgcatgtacaattccaaatgattgtggttcattggttgttgccaaagttggaaatcacaaacaaattgttggtttccatgttgctggaagcaaaggaagactgggatatgcttcattgataccatacgttgagccagttgtgcaagctcaaagtgctgaagtttactttgacttcttccctgtggaggttgctagtcaagagggagttgctcacattggtg

SEQ ID NO: 54363 - DNA, 231 bp, Glycine max
cttgctcagtcctggatgtggaggtccttgactctctcggcttattccccatgccagctactcttgtcgagtgcatgcttagctatcagctccagcaagctcaacgagtgccaactcaagaacctcaacgcgttggaacccgaccaccgcgctgagtccgaaagtggtttgattcgaacatggtactctcaacaccctgagctgacatgcgccggtgtcactgttcccaaa

SEQ ID NO: 54364 - DNA, 271 bp, Glycine max
gatgagtgtgcggtttcctttgttggtgttctgggaactgttttcctggcatcagattgtgtctcattaaaggtgcgagaggatgaggataacccttgctacttgagaaactctaagagcttccagactctctttgagaacctacaacggtcgcattcgtctcctccacagattcgacgaacgctctgcagaacttgagaacattcgagactacaggattgtccggtttcagtcaatacccaacaccgtccttctccgcccacgatgctga

SEQ ID NO: 54365 - DNA, 277 bp, Glycine max
taaaattcttccaccaagttatggaatccctgtgttgcttcttttctccctcttaggtctctcttctatttccagcaattcaactcattgttccatattggaccttgacctaaccaagtttaccacacagaaacaggtcacttcactgttccaactatggaagagtgagcatggacgtgtctaccattaccacgaagaagaggcaaagagacttgagattttcaagaatacttggaactatatcagggacatgaatgcaaacagaaaatcccccatt

SEQ ID NO: 54366 - DNA, 278 bp, Glycine max
ctcgagccgctcgagccgggacctattgtgtttaaatccacaaaatccttttgtgtcacataggtgatatggggaaaatgactttgccccaaggcacttcccgaagtgtcaaaagagtgcctcattctatagggggaggagctggtgcacagaatgctattctcatgaatatgccagatgctgttctttcaatgtggagatattttgttggagatctcgtctttgaagtttctaagatgacttctccctacattagatgtacagtctctctcttctag

SEQ ID NO: 54367 - DNA, 271 bp, Glycine max
aaaaccaaaacagtaaagctaacttcaacacctttaattttctaaaagtaattcagcggctgaataccaagcggagaagatgagtcaggagcagccacggcgtcccaaaggccaaaaccccatcaaatacggcgacgtttttgtcgtctccggcgaccttgcacagaagcccgtcgcaccggaagatgctgccatgatgcaaagcgcggaaactcgagtgctcggacaaacccaacccggcggagcagcttccgtcatgcatctgccgcca

SEQ ID NO: 54368 - DNA, 254 bp, Glycine max
cattcagcgtggacaagcagatagcgaaaaacctacaaggagagaacgaaggggaagacaagggagccattgtgacagtgaaaggaggtctgagcgtgataaaaccacccacggacgagcagcaacaaagaccccaggaagaggaagaagaagaagaggatgagaagccacagtgcaagggtaaagacaaacactgccaacgcccccgaggaagccaaagcaaaagcagaagaaatggcattgacgagaccata

SEQ ID NO: 54369 - DNA, 239 bp, Glycine max
gcacaatgatctcgctcacaatcctcctcatctctcatctcttctgcatcgcccacacttgcagcgcctccaaatggtagcaccagcaagattgctgccgcagcagctccagggggctgacctcacgccctacgacaagcacatcatggagcagatccaaggctgcggcgatgctcgatgatgatgatgacgacgacaatcacattctcaggaccctgcggggaagaatcaactacata

SEQ ID NO: 54370 - DNA, 241 bp, Glycine max
caaaccttgctctatactacacagtacacacactagaagaataatggcttccatcctccactactttttagccctctctctttcttgctcttttcttttcttcttatccgactcagtcacccctacaaaaccaataaaccttgttgttctacccgttcaaaatgatggttccacagggctccattgccccaacctccaaaaaagaacccctctaatgcaagtaccagtcctggtggacctc

SEQ ID NO: 54371 - DNA, 233 bp, Glycine max
aatcagagtaatattcagattaccggcttattttacgatggcagatacaaattcgagactaaatacgagagaaatcttgcaatgacagaagacgaaaagatggaagtgattagtaatagaggcattcctgctgatggtcttgaaaagcgagctcatgaatttgacatacatgtcgctcatgaaagcctcaaggatcgaattcctgctgttgacacgttgtattctagtaatgt

SEQ ID NO: 54372 - DNA, 266 bp, Glycine max
ggtgctaaatctctagtaagtcgccatggtgatgtactcaagggagcctgactatccaaccaagtcttgccatgctagaggcgtcgaccttagggatcattttaagaacactagggagactgcctttgcaatcaggaagttgcccttggttaaagctacaaggtacttggaagactgacttacgcacacgcaggccattccgttcatacgtgtctgtcgaggtgtaggacaggacagctcaagcatggaatagacactcttgtggc

SEQ ID NO: 54373 - DNA, 264 bp, Glycine max
aaattttccagtggattcttggttaccaatttttgtgaattgtctttatcctgtaagtcaattaccttcagaagctgtcgttgtaaatgttacatgtggtagtggacgtggtggtttacccaccactgcttggattagttctgcagttaacaatcgctcctcagatatcaacaaaaagattcgcacagcacttgggaaaggtaagaaaattgtttttcttaccagagttgatccttttccagtagctttactggctgttctttt

SEQ ID NO: 54374 - DNA, 100 bp, Glycine max
attctgggatgaaggagaaatttgtacaaatgatgaagagcatctatgaaacaggagttacagactggccagtaccactgaaaatcatttctggaaccat

SEQ ID NO: 54375 - DNA, 174 bp, Glycine max
gatgagagtgcggtttcctttgttggtgttgctgggaactgttttcctggcatcagtttgtgtctcattaaaggtgagagaggatgagaataaccctttctacttgagaagctctaacagcttccaactctctttgagaaccaaaacggtcgcattcgtctcctccagagattc

SEQ ID NO: 54376 - DNA, 252 bp, Glycine max
ggccatagtgatactagtgattaatgaaggagatgcaaacattgaacttgttggcattaaagaacaacaacagaagcagaaacaggaagaggaacctttggaagtgcaaaggtacagagctgaattgctgaagacgatgtatttgtaattccagcagcttatccatttgtcgtcaacgctacctcaaacctcaatttccttgcttttggtatcaatgctgagaacaaccagaggaacttccttgcaggcgag

SEQ ID NO: 54377 - DNA, 254 bp, Glycine max
cattgtctttgaacactcatcaccatggccaagcttgttctttccctttgtttccttcttttcagtggctgcttcgctctgagagagcaggcacagcaaaatgagtgccagatccaaaagctgaatgcctcaaaccggataaccgtatagagtcggaaggtgggttcattgagacctggaaccctaacaacaagccattccagtgtgccggtgttgccctctcttgttgcacccttaaccgcaatgcccttcgt

SEQ ID NO: 54378 - DNA, 244 bp, Glycine max
ctcagacaaggatattaaagagagagagaaaaaaaatgatggaggttgtgattgttgcaattgctgctacacttgggaatcttctgatgggatgggatagttcaactattgcagcgggtatgacctacatcaagaaggaatttgtcttggatgccacacttgaagggctaatcgtgtccatgtcgtttataaccggcaccattgtgacattattctcagggacagtttctgatttggttggaag

SEQ ID NO: 54379 - DNA, 255 bp, Glycine max
aggccatagtgatactagtgattaatgaaggagatgcaaacattgaacttgttggcattaaagaacaacaacagaagcagaaacaggaagaggaacccttggaagtgcaaaggtacagagctgaattgtctgaagacgatgtatttgtaattccagcagcttatccatttgtcgtcaacgctacctcaaacctcaatttccttgcttttggtatcaatgctgagaacaaccagaggaacttccttgcaggcgaga

SEQ ID NO: 54380 - DNA, 244 bp, Glycine max
ctgatctagcataacgcgcattatagaaccccgccagctacagagcaattgttataccaactaatgcgaacccgtgtactgatgcatgaaatttggactttttgaagcgtaccggatttcactgtgagatcatttgtgtcactgcatggactgccaccccaatggatgaggttcaggttacaaacctttcgttaatttcctctcaggaacttcttcccatgacttgccgagtgttcaatcccca

SEQ ID NO: 54381 - DNA, 253 bp, Glycine max
cttgatttcgtacttgacaaagtctgctggaacaggcattggtattgagtttcgagagtcaggtttgaatattaatgctaaaaatgagcagctagtaaaagaaggcatggtctttaatgtgtcccttgggtttcagaacgttcaaagagaaagttccaagtctaagaacaagcacttctccttgttgcttgctgacacagttatcataaacaaagataaaactgaagttgtgacctctatgagctcaaaggct

SEQ ID NO: 54382 - DNA, 250 bp, Glycine max
cggagaagtatcagatctggagcaggacaatagcgatgggagcgatcgcgtgtgtacagctgagccgagcggcatcagcagatgacgtcgatgtgctctctgacgacaagttcgagaaggaagttggtcaggacagaggagctctcgtggagttctatgctccttggtgtggacactgcaaaaagcttgctccagaatatgaaaagcttggtagcagcttcaagaaagccaaatctgttttaatcggcaa

SEQ ID NO: 54383 - DNA, 270 bp, Glycine max
  unsure (1)..(270): unsure at all n locations
caactttgtttaaattgtctcttgatgatgttgaaactcctaaaggttccatgttggatcttaaactttctcagtctaaaattgcacttcccaagaacacagttggacggaactattctgcgtagnntgatctattggcaaattttgcctgacagagggcaatgtcttagagcaagtgcttgatcttgcagcgcactccatncgtnattaacaggaatgatctaaacatggtggccacagnttggtattcctgcagaatacaggtatatc

SEQ ID NO: 54384 - DNA, 176 bp, Glycine max
aacactttccttagttcaatatggggaagcccttcttcactctctctctttcttccctttgcttgctactcttgtcgagtgcatgctttgctattacctccagcaagttcaacgagtgccaactcatcaacctcaacgcgttggaacccgaccaccgcgttgagtccgaggtggtc

SEQ ID NO: 54385 - DNA, 246 bp, Glycine max
aaagaagaaggctaatgatcacccttcaaaagaagggtccaaaccttatagcagatttgaagttgttgctgctcatatatggagatgtgcaactatggctcgtgctgaatctggtgagaattcaaaccaaccaattctagttcggtttagtgttaattttcgcaatagattgaaaccacctctccctcagaattattttgggaatgctttggcaaaagtagcgacacctgaatgttatgagggaga

SEQ ID NO: 54386 - DNA, 213 bp, Glycine max
accagtgttgaagaggcttacaacaagctaacagttgaacttgagaaaagtgttcctacattggttggcattgaatgtcccaaggatgaaaaacttcctcgtcgcaaagtttttgataaacctaagacgcgctgcttcactattctccctatggagtttaatcttgtggttcgtcagaagtttttaaattttgtgaggttcattatgaggaag

SEQ ID NO: 54387 - DNA, 265 bp, Glycine max
cacgcccacaccaacctcatcaaaaggaagaggaaaagcacgaatggcaacacaagcaggaaaagcaccaaggaaaggaaagtgaagaagaagaagaagaccaagaccaggatgaggagcaagacaaagagagccaagaaagtgaaggttctgagtctcaaagagaaccacgaagacataagaataagaaccctttcacttcaactctaaaaggttccaaactctcttcaaaaaccaatatggccacgttcgcgtcctccagagg

SEQ ID NO: 54388 - DNA, 259 bp, Glycine max
ctctaaagaaggatatagttttgaagagatatgcatcaagaaagaagcgtttgagggagaagagaagttttgtgcaaaatccttgggaacagtaattggttttgccatttcaaagctgggaaagaacattcaagtactatcaagttcctttgtcaataagcaagagcaatacactgtggaaggagtgcagaatcttggagacaaagcagtgatgtgtcatgggctaaatttcagaactgcagtattttactgccataaa

SEQ ID NO: 54389 - DNA, 271 bp, Glycine max
tgggtttccttgtgttgcttcttttctccctcttaggtctctcttctagttccagcatatcaactcatcgttccatattggaccttgacctaaccaagtttaccacacagaaacaggtgacttcactgttccaactatggaagagtgagcatggacgtgtctaccataaccacgaagaagaggcaacgagacttgagattttcaagaataacttgaactatatcagggacatgaatgcaaacagaaaatcaccccattctcatcgtttagg

SEQ ID NO: 54390 - DNA, 142 bp, Glycine max
tcaggcaaatggtgcttggagggtcattgtaaacaatgtgtctggtcatacatgcactgtacatctataccgagaaaaggaggataccatcactcataaagtggtatacagttcagtatcggttaagggtccacacaacata

SEQ ID NO: 54391 - DNA, 267 bp, Glycine max
aagcctggtagatttgagagtttcttcctatttagcactgaagctcaacaatcctacttgcaaggattcagcaggaacattttagaggcctcctacgataccaaattcgaggagataaacaaggttctgtttagtagagaggaagggcagcagcaaggggagcagaggctgcaagagagcgtgattgtggaaatctcgaaggaacagattcgggcactgagcaaacgtgccaaatctagttcaaggaaaaccatttcttctgaagat

SEQ ID NO: 54392 - DNA, 266 bp, Glycine max
  unsure (1)..(266): unsure at all n locations
gttcaatatcctagtataccttaataaataatttaagatactatgatgagagcacggttcccattactgttgctggcacttgttttcctggcttcagtttctgtcttatttggcattgcttactgggaaaaagagaaccccaaacacaacaagtgtctccagagttgcaatagcgagagagactcgtacaggtaccaagcatgccacgctcgttgcaacctccttaaggtggagaaagaagaatgtgagaagtgtanaattccacg

SEQ ID NO: 54393 - DNA, 217 bp, Glycine max
atgggttttttcctaggttggaaatcacaaacaaattgttggtttccagtatgctggaatctaaggaagactgggatatacttcattgataccatatgtgtagccagttgtgcaagctcaaagtgctagagtttacattgacttcttccctgtagagggtgatagtcaagagggagttgctcactgtggtgaactgtaatctggtgtctatgttcca

SEQ ID NO: 54394 - DNA, 260 bp, Glycine max
  unsure (1)..(260): unsure at all n locations
ctccattggtccttaaacattcatcagtcatcaccatggccaagctagttttttccctttattttctgcttttcagtggctgctgcttcgcttttagttccagagagcagcctcaatanaacgagtgccagatccaaaaactcaatgccctcaaaccggataaccgtatagagtcataaggagggctcattgagacatggaaccctaacaacaagccattaagtgtgncggtgttgcctctctcgctgcacctcaacgca

SEQ ID NO: 54395 - DNA, 272 bp, Glycine max
cgacgggaacttcatgaatggactaacaacacttgttgggaaggcaatgcccagtttagtgacacaaataatttagcttctccactagtcgtctgtagctctgtggatcagagaatggaactccatctgcggtcaacttgatccctggctccataggggtttcacatggtttggctcccatcaaacctgtctcattcaacaagtccaaaacatacttcctttgtgataggaagatccccttctttgagtacataacctcaatacccaagaag

SEQ ID NO: 54396 - DNA, 227 bp, Glycine max
cagatggaaacaaatttgtttaaatgtccctgatgatgttgaaactctaaaggttccatgttgggatcttaagatttctcaatctaaaattgcacttcccaaaaacacagttggtaagaaccattctgcgtagtgacctattggcaaatttttgacagagggcaattttagagcaggtgttgatttgcagcgcattcatcgtatcaaaggaatgattaaaatggtgg

SEQ ID NO: 54397 - DNA, 166 bp, Glycine max
gcgggatggtctggtgccgttggcccatctggggcccaagacactcggaaaactgggtttaacatcatgtctggaactttcatgtcctgtccccaaaaaagtggtttgcgtgcggttatgaaagctgcgaatccagatcggagtccaagtgctatcaaatctgcac

SEQ ID NO: 54398 - DNA, 174 bp, Glycine max
gaaattctgagttccaacgccactaaccctatgctgacgcgacttcttgagaactgtaagagtctcaaatatctggttgatgagtgtccttttgcatttgtgaactagtatgtaatattttattcacttaaataaagcgcattactatgtgcaatgagtgtgtttaaatataaa

SEQ ID NO: 54399 - DNA, 253 bp, Glycine max
cactaataatgacacttccttagttcaatatgggggaacccttcactctctctctttcttccctttgggtgctaactcctgtcgagtggcatgccttggtagtaactccagcaagctcaacgatcggcaactcaacaacctcaacgcgttggaacccgaccagcggcgtgagtccgaagtggttttgattcaacatggaactctcaacaccctgagctgaaatgcgccggtgtcaatgttgcaaactcacctc

SEQ ID NO: 54400 - DNA, 283 bp, Glycine max
aaacttattaacacttgccttagttcaatatggggaagcccttcttcactctctctctttcttccctttgcttgctactcttgtcgagtgcatgctttgctattacctccagcaagttcaacgagtgccaactcaacaacctcaacgcgttggaacccgaccaccgcgttgagtccgaaggtggtcttattgaaacatggaactctcaacaccctgagctgcaatgcgccggtgtcactgtttccaaacgcaccctcaactgcaacggcctccacttgccatc

SEQ ID NO: 54401 - DNA, 283 bp, Glycine max
gacagttaggcagttggaggcattaatcagactgtcagaggccattgcacggtgtcatttggacaatgaggtacaacctcgtcatgttcgtctagcagtaaaactgctgaaaacttccataataagtgtggaatccagtgagattgatctgtctgagtttcaagaacaaaaccacaatgatggtgcaggtggtggcaatgaaaatgataataatagagatgctaattatcaagaggggaatgatacagcgcacaagctgccggaaatggtaatgatcaagtgg

SEQ ID NO: 54402 - DNA, 272 bp, Glycine max
ggagagttgaatgtggaatcccttctggatttccgctcacagttatttgcaatagcatttttaatgagatgctcattagatatagctatgaaaaattactgcgccaggctaaagctccaagtatgtttttacaatccttcaaaaattttgtttctttgtgtgtgtatggtgatgataacttaataagtgtccatgaatacgtcaagccttactttagtggttctaaattgaaaagctttctagctggtcataatatcaccattactgatggt

SEQ ID NO: 54403 - DNA, 273 bp, Glycine max
cttgctctatactacacagtacacacactagaagaataatggcttccatcctccactactttttagccctctctctttcttgctcttttcttttcttcttatccgactcagtcacccctacaaaaccaataaaccttgttgttctacccgttcaaaatgatggttccacagggctccattgggccaacctccaaaaaagaacccctctaatgcaagtaccagtcctggtggacctcaatggaaatcacttgtgggttaactgtgagcagcagt

SEQ ID NO: 54404 - DNA, 274 bp, Glycine max
catttgtccttgaatataatactcagcatggctaagcttgttctttccctttgttttctgcttttcagtggctgctgcttcgctttcagtttcagagagcagccacagcaaaacgagtgccagatccaacgcctcaatgccctcaaaccggataaccgtatagagtcagaaggtggcttcattgagacatggaaccctaacaacaagccattccagtgtgccggtgttgccctctctcgctgcaccctcaaccgcaacgcccttcgcagacctt

SEQ ID NO: 54405 - DNA, 271 bp, Glycine max
acagatttgtgtaaattgtctcttgatgatgttgaaactcctaaaggttccatgttggatcttaaaatttctcagtctaaaattgcactatgcagaatagtatctccaactgtgttccctggaagtgcaattttagactgagaacacagttggaggaactattctgcgtagtgatctattggcaaattttctgacagagggcaattttagagcaagtgttgatttgcagcgcactcatcgtattaaaggaatgattacaatggtggcacag

SEQ ID NO: 54406 - DNA, 267 bp, Glycine max
ataaaattcttccaccaagttacgggcgaaattgtgttgcttcttttctccctcttaggtctctcttctagtatcagcatatcaactcatcgttccatattggaccttgacttaaccaagtttaccacacagaaacaggccacttcactgttccaactatggaagagtgagcatggacgtgtctaccataaccacgaagaagaggcaaagagacttgagattttcaagaataattggaactatatcagggacatgaatgcaacagaa

SEQ ID NO: 54407 - DNA, 265 bp, Glycine max
aggagacgtactagtgattctcctggtgttagttactggacctataatactggcgatgaaccagttgttggcatcagtcttcttgacacctccaacttcaacaatccctttgatcaaaaccccagagtattttaccttgctgggaacccagatatagagcacccagagaccatgcaacaacagccacagcagaagagtcatggtggacgcaagcaggggcaacacagcagcaggaggaagaaggtggcagtgtgctcatggcttc

SEQ ID NO: 54408 - DNA, 267 bp, Glycine max
ctcgagccgcattgtctttgaacactcatcaccatggccaagcttgtgctatccctttgattccttctattcagtggctgcttcgctctgagagagcaggcacagcaaaatgagtgccagatccaaaagctgaatgccctcaaaccggataaccgtatagagtcggaaggtgggttcattgagacctggaaccctaacaacaagccattccagtgtgccggtgttgccctctctcgctgcacccttaaccgcaatgcccttcgtaga

SEQ ID NO: 54409 - DNA, 274 bp, Glycine max
gcagaagggtgcttggtatgttttggatgagtagtgttgctcacagttaacccaatgctccagagccaacactcaccaatgcctcagttgcccagcggcatcaaggccagggtgccacaaaaacacgtgtggcctcatgtccaccaaccccatcacccaacaaaccggtttgggtgaactaggccaagatgtgcttgcaatccacgctactcaaggctccacccaacaacttggtccattggtcacagtccctcagttcctcttttcttgtgca

SEQ ID NO: 54410 - DNA, 255 bp, Glycine max
ggctcgagacttattaacactttccttagtacaatatggggaagccattcttcactctctctctttcatccctttgcttgctactcttgtcgagtgcatgctttgctattacctccagcaagttcaacgagtgccaactcaacaacctcaacgcgttggaacccgaccaacgcgttgagtccgaaggtgggtctaatgaaacaatggactctccaaaacctgagctgcaatgcgccggtgtcactgtttccaaac

SEQ ID NO: 54411 - DNA, 193 bp, Glycine max
gttgttattaagtatgtgccttacgtaggggacagcaacatggtctggatgttcaccaggctcatagtggatggcattgctgttgaccatatcatcaacaatgccatcctctatgagcctggtgaacatccagaccatgtcgtggtgcttaagtatgtgacttacgtaggggacagcaagagagccatggatg

SEQ ID NO: 54412 - DNA, 181 bp, Glycine max
atcacacacaactactacaagtacttccttacaatcaaaaccaacaacaactatggcaagttatcaaaagcactacgatgatcagggtcgcaaggttgacgagtatggcaacgttgagaagcaaaccgacgaatacggcaaaccttgtccatgtgctagtgtccacttatgtagccaccag

SEQ ID NO: 54413 - DNA, 272 bp, Glycine max
ctgatgctgaaatccctaacctaaaattcccctccctgatggctttaccagaggttgggttgagactgctcctttcacccgttacttccaaccttcttctccgcacagcatgtgatattgggttacttgttatagctgttcaatagggcttgcgcttcccgtgtattccacgtttaaagctattgagaacaatgacccatatgagcaacaaaggtgcctattgtattgggcagcttatggatcttttagtgctgcagaaatgtatgctgata

SEQ ID NO: 54414 - DNA, 276 bp, Glycine max
tttgttggctgctcacctcatatcacttgcttcatttgcgcattatagctggtgcaagtagacatgaaggagggctttgcaacttcctgcattccagatatgtctttatgagaatgaagtttgcacttttcttctcttcctctttttctaaggtcggcaagagcagttcatcatccctcaagatccttaataaagaacatattgtgacaactatgtttgttgggaacttcattggcattgtatgtgctcggtcgttgcattatcagttctatttgt

SEQ ID NO: 54415 - DNA, 286 bp, Glycine max
tcgagttcggctctatcttttccaaacaagattgtcaatatggggaagcccttcactctctctctttcttccctttgcttgctactcttgtcgagtgcatgctttgctattagctccagcaagctcaacgagtgccaactcaacaacctcaacgcgttggaacccgaccaccgcgttgagtccgaaggtggtttgattcaaacatggaactctcaacaccctgagctgaaatgcgccggtgtcactgtttccaaactcaccctcaaccgcaatggcctccacttgg

SEQ ID NO: 54416 - DNA, 274 bp, Glycine max
tgcgattatgctagttttgatggtttgattaccaagcaagttatgagcaagatggcagaaatgatcaacagtcttcgtggtggtgatgcaaaactgatgcgtgaaaggacacacctgctgttggctctgttgttcaaggatggcaatttgtaagaaagatgtttggagagctgcatgtggaatcccttctggatttccgctcacagttatttgcaatagcatttttcatgagatgctcattagctatagctatgaaaacttactgcgccaggcc

SEQ ID NO: 54417 - DNA, 263 bp, Glycine max
gtttatggttgtcaacttaacaccaatgacaatatgcacacatattgtttatggttgtcaacttaacaccaatgacaatatgtgtgcatatgggctcaatcctggtatttcaggttctcgtcttttgggcaccattcctcagtctatttcacagctaactgttttggatcaaatggcaatagtgagtactccattgaattttgattctagctagcagtgcttttgtcaatatgctattgaccttctcggtggatgaatcttag

SEQ ID NO: 54418 - DNA, 269 bp, Glycine max
ggcaatctttcactggataaagtgatgactgaatttatgctccgccttgatgccacaccggcttgtataaagaatatgcctctagatgacgatgatccagccagaggactgaccttcgtaatgacaaaacttaaatatgaactgtgttacagtaggggcaagcaaaagtatacttttgaaagtaagcgtgacattcttgatcttgtttaccaaggtcttgatcttcatatgatcaaggctttcctaaataaaaaagaatgtgccagtgt

SEQ ID NO: 54419 - DNA, 267 bp, Glycine max
attttcccctcattccatccttcaaagactcgaccttgtctccgctctatatgtagctgaaagaagaagctatgaaatggttaggatgatattatatataatttaagaaaagaagctacactctaacaagttgtaaggaaagtatcatgcctggtcattctccaacagaaccttccaattatgcatctcaacaagagcctttgctgcacggtaagaaagggctatccggtaatttaaatcccccagccaaattattcgactacacca

SEQ ID NO: 54420 - DNA, 254 bp, Glycine max
ggctcgagctgtaccacttgcagcacaaatgactgatgtgagaagatatcaaaaacttcaaataattgacgaattaagaactgagaggggacgatttgagcttgaggttgagattggtaaatctccacctctttctgatgatgaggtttggtgggaattaaggcataaagcattagagttgagagaagagtggagactggaaaatcgcagagcatttgccaacatatggtcagatacagtttacgggatctctt

SEQ ID NO: 54421 - DNA, 148 bp, Glycine max
cagagattgattgacaagtttgcccagttttataccccaggcgttgtaatcatatcagctcttgtagcggtgattccacttgcgctaaaacaacataaccataaactttggcttcagttttcgctggttgttttagtaagtgcatgtc

SEQ ID NO: 54422 - DNA, 225 bp, Glycine max
  unsure (1)..(225): unsure at all n locations
gtacaccgtattaaagaatttaagatatactatgatgagagcgcggttcccattgctgttgctgggagtcgtgttcctagcatcagtttctgtctcatttggcattgcgtattgggcaaagcagaaccccagtcagaacaagtgtgtccgaagttgtacntagcgagaaagattcctacaggaagcaagcatggcacgctcgtctgcaactcccttaaggtggag

SEQ ID NO: 54423 - DNA, 248 bp, Glycine max
ggcacagattgacgagttccattcgatgcagaggatgatgaatgctcctgatgtaaatgttaatattgatctactgttgagcattgatttgttgggattacaaggagcaggtatagcttttccaaacaagattgttttagatgataaacttgtgctggctaacacacaagacttctttgctggaaattttccagtggatgtcttggttaccaattcttgtgaattgtctttatcgtgtaagtcaatta

SEQ ID NO: 54424 - DNA, 234 bp, Glycine max
ggctcgaggtttagactatatggaaagaactcctcttgccacatcagagggttttcctcatgtgcattcacgcaaaaattgtgacaaaggcaaaaggagatttgtttctggggatggtgaagagatgacattgattccggaaccatgtttgaagaggcttacaacaagctaatagttgaacttgagaaaagtgttcctacattggttggcattgaatgtcccaaggatgagaaa

SEQ ID NO: 54425 - DNA, 216 bp, Glycine max
ttcggtcagtcgcgctcgagccgctagaatggaatttcgatgcccagtcatctcttttaccagtctcttctctcttgctcttgcaggagagagccatgtccatgcatcgctacctgcggaagattattgggaagctgtttggccaaacactcccattcccactgcactgcgagagcttctaaagcctctccctgcaggtgttgaaatcgatgaact

SEQ ID NO: 54426 - DNA, 240 bp, Glycine max
  unsure (1)..(240): unsure at all n locations
cttacaccaagttatgggtatccttgtgttgcttcttatctccactcttagtctnctctctagttccagcatatcaactcatcgtgccatattggaccttgacctaaccaagtttaccacacagaaacaggtgtcttcactgtcccaactatggacagagtgagcatagaccaaatancataaccacgaagaagaggcaaagagacttgagattttcaagaataacttgaactatatcag

SEQ ID NO: 54427 - DNA, 268 bp, Glycine max
tcttacttgagtacaacactacggttgttttgttctgtcatcttaaagcaagatatgagttcatcaggaattagagcatggagtggtggaggccttgaaagaccagggcatatgcaggtggaaccatgctttaagatcagctcaacaccatctcaaaacccattttggctcattctctcaggctaacaggctttctgcttctgctatgctctccacaacactaaaacatgagaagccaaagcaatcagaggagtccttcagaaatgtc

SEQ ID NO: 54428 - DNA, 156 bp, Glycine max
ctcgagccgcaacagtgaaataggtcttgattctaatcccactttggaggatatgccacattcagcttgggaccttttttgctgggacagtgagaagcatttgccaaataatgtttctggagaattactctcttgcaaattggatactgttactgg

SEQ ID NO: 54429 - DNA, 262 bp, Glycine max
ggaatggcaactggatctaccttgtgacaaaattcctagtgtcttgactacaactgatgaaagattggtaggcacagaacatgagggatatgatccttttcttggtggaattcaaaaatatgccactcccatgatgcccctagatgaagaaattctttctaaggttgcacaagatatggttgaggaatggtttgattgtgttgatgaggaggattcctttgaggaagtttctttgagtgcagcactcaatggtgttgagggt

SEQ ID NO: 54430 - DNA, 259 bp, Glycine max
atggagacaaatttgtttaaattgtctcttgatgatgttgaaactcctaaaggttccatgttggatcttaaaatttctcagtctaaaattgcacttcccaagaacacagttggaggaactattctgcgtagtgatctattggcaaattttctgacagagggcaattttagagcaagtgttgatttgcagcgcactcatcgtattaaaggaatgattaaaatggtggccacagttggtattcctgagaatacaggtatat

SEQ ID NO: 54431 - DNA, 265 bp, Glycine max
aatttaagatactatgatgatagcacggttcccattactgttgctgggacttgttttcctggcttcagtttctgtctcatttggcattgcttactgggaaaaagagaaccccaaacacaacaagtgtctccagagttgcaatagcgagagagactcgtacaggaaccaagcatgccacgctcgttgcaacctccttaaggtggagaaagaagaatgtgaagaaggtgaaattccacgaccacgaccatttgcgaaacacccggag

SEQ ID NO: 54432 - DNA, 258 bp, Glycine max
cttggatatcttcctcagtattgtggatatgaacgagggagctcttcttctaccacacttcaattcaaaggcgatagtgatactggtaattaatgaaggagatgcaaacattgaacttgttggcctaaaagaacaacaacaggagcagcaacaggaagagcaacctttggaagtgcggaaatatagagccgaattgtctgaacaagatatatttgtaatcccagcaggttatccagttgtggtcaacgtacctcaaat

SEQ ID NO: 54433 - DNA, 255 bp, Glycine max
tgggttttagaacatggtgggatttccatccattgtaacaaccttcgttttctgccacgggagccatagaagcagcacatgcaatagcaacaggagaccttgttagcctttctgaacaagaactcgtagactgtgtggaagaaagcgaaggttgttacaatggatggcactatcaatcgttcgaatgggttttagaacatggtgggattgccactgatgatgattatccttacagagctaaagagggtagatgca

SEQ ID NO: 54434 - DNA, 255 bp, Glycine max
gctcattagatatagctatgaaaacatacttggacgtttagcctggagcagtaatttcacattgctatatctaatgagcatctcattaaatatagctatgaaaaattactgcgccaggctaaagctccaagtatgtcttaccaaatcttcaaaaattttgtttctttcgtgtgtgtatggtgatgataacttaattagtgttcatgaatgacgtcacgccttacttcagtggttctaaattgaaaagctttctag

SEQ ID NO: 54435 - DNA, 273 bp, Glycine max
tctacgagccgattcggctcgagtatacacacacacacacacactatgaataatggcttctatcctccactactttttagacctctctctttctttctctttccttttcttcttatccgactccgtccccattccccaacaccacactaaccctacaaaacctataaaccttctggttctacccgttcaaaatgatgcttccacagggctccattgggccaacctccaaaaaaggacccctctaatgcaagtaccagtcctggtggcctcaat

SEQ ID NO: 54436 - DNA, 244 bp, Glycine max
tgcagagaaagaaaaccctagctcaccgtttcaagatgcaaatcttcgttaagaccctcactggtaagaccatcactctcgaagtcgagagttcagataccatagacaatgtaaaggccaaaattcaagacaaggaagggattccaccagatcagcaacggctcatttttgctggcaagcagcttgaggatggacgtacccttgctgattataacatccaaaaggagtcaaccctcaacttggt

SEQ ID NO: 54437 - DNA, 255 bp, Glycine max
ctttcttcttggacatcgcttttaattttatctgtttatattttaggttaattattaatattgtggaaattgacagaggatgggtggtgaggaattgtgattgattgagaactcagggaaagggaagaggttgtggaagaaggtgaagtaccagctggtggagtaccactccttgcccggttatttgagagacaacgagtacagtctcggtcactatcgatccgaatggcccatcaggcaggttttgttgagcgc

SEQ ID NO: 54438 - DNA, 258 bp, Glycine max
atccttttatgttaaataggtggatggggaaactgactttaccccagggcacttcccgaaatgttaagagattgcctctttctatagggggaggagctggtgcaaagaatgctattctcatgaatatgccaaatgctgttctttcaatgtggagatattttgttggagatctcgtctttgaagtttctaagatgacttctccctacattaaatgtacagtctccttcttcacagcacttggacatttggctatgtcac

SEQ ID NO: 54439 - DNA, 258 bp, Glycine max
taaaattcttccaccaagttatgggcctccttgtgttgcttcttttctccctcttaggtctctcttctagtaccagcatatcatctcatcgttccatattggaccttgacctaaccaagtttaccacacagaaacaggtctcttcactgttccaactatggaagagtgagcatggacgtgtctaccataaccacgaagaagaggcaaagagacttgagattttcaagaataacttggaactatatcagggcatgaatg

SEQ ID NO: 54440 - DNA, 231 bp, Glycine max
gttcatatcctagtataccttaataaataatttaagatactatgatgagagcacggttcccattactgttgctgggacttgttttcctggcttcagtttctgtctcatttggcattgcttactgggaaaaagagaaccccaaacacaacaagtgtctccagagttgcaatagcgagagagactcgtacaggaaccaagcatgccacgctcgttgcaacctccttaaggtgg

SEQ ID NO: 54441 - DNA, 261 bp, Glycine max
agctcgagccgcgtcaccagaagatctataacttcagagagggtgatttgatcgcagtgcctactggtgttgcatggtggatgtacaacaatgaagacactcctgttgttgccgtttctattattgacaccaacagcttggagaaccagctcgaccagatgcctaggagattctatcttgctgggaaccaagagcaagagtttctaaaatatcagcaagagcaaggaggtcatcaaagccagaaaggaaagcatcagcaag

SEQ ID NO: 54442 - DNA, 265 bp, Glycine max
tctcgagctgctcgagccgctcgagcggtccaaggccgtcggctgctcctccaccggcgatacttcctccggtctctccgcctactgcgcttcctccggaatcccctccatcgtcttcctccccgccaacaagatcttcaccgcgcaactaatccaatcggtttcaaacggctctttagtcttaagcatcaacaccgattttgacggctgcatgaagctgattcgtgaaatcaccgccgaattacccatctatttggcgaattcg

SEQ ID NO: 54443 - DNA, 257 bp, Glycine max
atcaatagcaaaatgaccaagttcacaatcctcctcatctctcttctcttctgcatcgcccacacttgcagcgcctccaaatggcagcaccagcaagatagctgccgcaagcagctccagggggtgaacctcacgccctgcgagaagcacatcatggagaagatccaaggccgcggcgatgacgatgatgatgatgacgacgacaatcacattctcaggaccatgcggggaagaatcaactacataaggaggaacga

SEQ ID NO: 54444 - DNA, 281 bp, Glycine max
ggatggccttcggcgataaaacggattcgatatggggacgagatgattgttggaattcctaccgagtggtctgttgtggaggatctaccagaaggacctgctgttaaaattggtgagaacaaagatgcaatggatggttggtttagacttgagagagtttctgatgatgaattcaataactataagcttgtgttctgtccacagcaagctgaggatgacaaatgtggggatattgggattagtattgatcatgatgatggaaccaggcgtttggtggtgtc

SEQ ID NO: 54445 - DNA, 232 bp, Glycine max
tgctactcttgtcgagtgcatgctttgctattacctccagcaagttcatcgagtgccaactcaacaacctcaacgcgttggaacccgaccaccgcgttgagtccgaaggtggtcttattgaaacatggaactctcaacaccctgagctgcaatgcgccggtgtcactgtttccaaacgcaccctcaactgcaacggcctccacttgccatcttactcaccttatccccaaat

SEQ ID NO: 54446 - DNA, 232 bp, Glycine max
ccgggaaccagtgttgaagaggcttacaacaagctaacagttgaacttgagaaaagtgttcctacattggttggcattgaatgtcccaaggatgaaaaacttcctcgtcgcaaagtttttgataaacctaagacgcgctgcttcactattctccctatggagtttaatcttgtggttcgtcagaagtttttaaattttgtgaggttcattatgaagaaaagggacaagctta

SEQ ID NO: 54447 - DNA, 274 bp, Glycine max
agcgctgcttcactattctccctatggagtttaatcttgtggttcgtcagaagtttttaaattttgtgaggttcattatgaagaaaagggacaagcttagttgtcaagttggaatcaacccatattctatggaatggactggtttggccaatagattactgagtaagggcaacgatattctgtgttgcgattatgctagttttgatggtttgattaccaagcaagttatgagcaagatggcagaaatgatcaacagtctttgtggtggtgatga

SEQ ID NO: 54448 - DNA, 254 bp, Glycine max
ttgacttacaggataaagacaattaccttcagaagctgtcgttgtaaatgttacatgtggtagtggacgtggtggtttacccaccactgcttggattagttctgcagttaacaatcgctcctcagatatcaacaaaaagattcgcacagcacttgggaaaggtaagaaaattgtttttcttaccagagttgatccttgtccagtagctttactggctgttctttttggcgttaagaatgaaattctgagttcta

SEQ ID NO: 54449 - DNA, 257 bp, Glycine max
gattttccaatcaaatatagatatggcaaatatgacaggagtgggaacttttctatagagagtggtccaaatcgagaagtctatgctaactccccaaggaatgaggcgaaatatatttttctttcagatggcatgatgcgggaaataccttggcgtggtgctggtgtagcagtccccatgttttctgttaggtcagaatctgatctgggtgttggggagtttcttgaccttaagttgctagttgactgggctgtagc

SEQ ID NO: 54450 - DNA, 238 bp, Glycine max
cctacattggttggcattgaatgtcccaaggatgagaaacttcctcgtcgcaaaatttttgacaaacctaagacgcgctgcttcactattctccctatggagtttaatcttgtggttcgtcagaagtttttaaattttgtgaggttcattatgaagaaaagggacaagcttagttgtcaagttggaatcaacccataatccatggaatggactggtttggccaatagattactgagta

SEQ ID NO: 54451 - DNA, 234 bp, Glycine max
agttcaatatcctagtataccttaataaataatttaagatactatgatgagagcacggttcccattactgttgctgggacttgttttcctggcttcagtttctgtctcatttggcattgcttactgggaaaaagagaaccccaaacacaacaagtgtctccagagttgcaatagcgagagagactcgtacaggaaccaagcatgccacgctcgttgcaacctccttaaggtgga

SEQ ID NO: 54452 - DNA, 229 bp, Glycine max
tctaaaagtagttagaaacacacttggttcgcaaggttgggatgttcttgttccaggaactgctttagggtaacttgttcaggttgaaaaaattgttcctggttcactaccatcatcagttgaaggacctattatccttgttgttaacaaagcggatggtgatgaagaggtaacagctgctgggaggaacatagtgggagttatacttcagcaagagctgcctcactta

SEQ ID NO: 54453 - DNA, 227 bp, Glycine max
cagagatctatgagtgatgttggtaaaggtaagcatgagattgagtctttgaagccaactcttttcatcatcgtcaggaccaacatcacccagagatctatgagtactattcactacgactcacatgcaacgaagatagcactggtgatcgatggcagagggcatcttcagatatcatgtccacacatgtcatcaaggtcgtcacactcgaagcatgataagagtag

SEQ ID NO: 54454 - DNA, 245 bp, Glycine max
ctatgatgagagtgcggtttcctttgttggtgttgctgggaactgttttcctggcatcagtttgtgtctcattaaaggtgagagaggatgagaataaccctttctacttgagaagctctaacagcttccaaactctctttgagaaccaaacggtcgcattcgtctcctccagagattcaacaaacgctccccacaacttgagaactttcgagactaccggattgtccagtttcagtcaaaaccca

SEQ ID NO: 54455 - DNA, 229 bp, Glycine max
ggctcgagtgcaaaattgatgcgtgaaaggttacacctgctgttgacttgttgttcaaggatggcaatttgtaagaaagatgtttggagagttgaatgtggaatcccttctggatttccgctcacagttattgcaatagcatttttaatgagatgctcattagatatagctatgaaaaattactgcgccaggctagagctccaaagcatgttttacaatgcttcaaaaa

SEQ ID NO: 54456 - DNA, 223 bp, Glycine max
agaggacaagatctaagtgattagaaatagaggcattcctgctgatgtttttcaaattcatgaactcgctttgcaagaacatcagcaggaatgcctctatttctaatcacttccatctgatgttcttgcaaagcgagtcatgaatttgagaaacatgttgctcatgaaagcctcaaggctcaaattcctgatgttgacaagttgtattctactaaggttaata

SEQ ID NO: 54457 - DNA, 230 bp, Glycine max
agcaaaatgaccaagttcacaatcctcctcatctctcttctcttctgcatcgcccacacttgcagcgcctccaaatggcagcaccagcaagatagctgccgcaagcagctccagggggtgaacctcacgccctgcgaaagcacatcatggagaagatccaaggccgcggcgatgacgatgatgatgatgacgacgacaatcacattctcaggaccatgcggggaagaatc

SEQ ID NO: 54458 - DNA, 231 bp, Glycine max
atatcctagtataccttaataaataatttaagatactatgatgagagcacggttcccattactgttgctgggacttgttttcctggcttcagtttctgtctcatttggcattgcttactgggaaaaagagaacccaaacacaacaagtgtctccagagttgcaatagcgagagagactcgtacaggaaccaagcatgccacgctcgttgcaacctccttaaggtggagaaa

SEQ ID NO: 54459 - DNA, 113 bp, Glycine max
tgtcattgctcatgatgatcacggaaaatcaaccctgactgattctcttgtggacactgctggtattattgctcaagacgttgcaggtgatctctgtatgactgatacccgag

SEQ ID NO: 54460 - DNA, 247 bp, Glycine max
accttaataaataatttaagatactgtgatgagagcacggttcccattactgttgctgggacttgttttcctggcttcagtttctgtctcatttggcattgcttactgggaaaaagagaaccccaaacacaacaagtgtctccagagttgcaatagcgagagagactcgtacaggaaccaagcatgccacgctcgttgcaacctccttaaggtggagaaagaagaatgtgaagaaggtgaaattcca

SEQ ID NO: 54461 - DNA, 185 bp, Glycine max
caacaatcctacttgcaaggattcagcaggaacattttagaggcctcctacgataccaaattcgaggagataaacaaggttctgtttagtagagaggaagggcagcagcaaggggagcagaggctgcaagagagcgtgattgtggaaatctcgaaggaacagattcgggcactgagcaaacgtgc

SEQ ID NO: 54462 - DNA, 231 bp, Glycine max
ttcaatatcctagtataccttaataaataatttaagatactatgatgagagcacggttcccattactgttgctggtacttgttttcctggcttcagtttctgtctcatttggcattgcttactgggaaaaaagaaccccaaacacaacaagtgtctccagagttgcaatagcgagagagactcgtacaggaaccaagcatgccacgctcgttgcaacctccttaaggtgga

SEQ ID NO: 54463 - DNA, 238 bp, Glycine max
tcaatgttgaagaggcttacaacaagctaacagttgaacttgagaaaagtgttcctacattggttggcattgaatgtcccaaggatgaaaaacttcctcgtcgcaaagtttttgataaacctaaacgcgctgcttcactattctccctatggagttaaatcttgtggtccgtcagaagtttttaaattttgtgaggttcattatgaagaaaagggacaagcttagttgtcaagttgga

SEQ ID NO: 54464 - DNA, 264 bp, Glycine max
gcatgcacgttcggctcgatcagattttcacaagacgaatttcttacagcttggtcaacccaggtgcgtcgtgcaacaactctgttggctgatcggtcacctatcagaatgctattgtacataatagttcatactctacaataccaggtgattttgtcattggtgttaagttgacaaccataaacaatatgtgtgcatatgggctcaatcctggtatttcaggttctcgtcttttgggcaccttcatcagtccatttcacagca

SEQ ID NO: 54465 - DNA, 242 bp, Glycine max
  unsure (1)..(242): unsure at all n locations
attcaaaccttgctctatactacacagtacacacactagaagaataatggcttccatcctccactactttttagccctctctctttcttgctcttttcttttcttcttatccgactcagtcacccctacaaaaccaataaaccttgttgttctacccgttcaaaatgatggttccacagggctccattggtttaatctcaaaaaaattanncctctaatgcaagtaccagtcctggtggacc

SEQ ID NO: 54466 - DNA, 200 bp, Glycine max
attcccttaggaatccagcttccaaagcttacgaacaggtgtttgcacctcaccatggttgggcaatcaggaaggctgtttccgtgggaatgtatgtccttcctacaaaggaacagcttctgaagaaacttaatgaggatggtaagtgcaggattaagtttgcttgaactttttattgaactttaagtcctgaaaaaaga

SEQ ID NO: 54467 - DNA, 229 bp, Glycine max
atgtccattggtgcttaaacattcatcaggcatcatgatggataatgtagtaagtactctctataatgtgcttttcaactgctgctggtttgatttgagttctagagatgagtctgatgtcaacgagtgccagatccaaaaactcaatgccctcaaaccggataaccgtatagagtcagaaggagggctcattgagacatggaaccctaacaacaagccattcgagtgt

SEQ ID NO: 54468 - DNA, 142 bp, Glycine max
atgtcaccaattatccatattgttaccgtgggatctggcacaacagaatcaatagcaaatgttacagaaattcactatggattaaatttctcttctgataatggtgatgatgaatttggaatttcctctgtcaaattttcaa

SEQ ID NO: 54469 - DNA, 164 bp, Glycine max
gcaaatcaaacttcatggcatttgagtttccttattgagaatcccaaacagtctacagtatcagatatactcttgggaatctctcaagatttggaaatctcgctggtaatactcttatgccagctttttctgtcccacaggctactgccagatcttctgccaat

SEQ ID NO: 54470 - DNA, 250 bp, Glycine max
cattggtccttacagactcatcagtcatcaccatggccaagctagttcattcactttagtttctgattttcagtggctgctgcttcgctttcagttccaaagagcagcctcaggaaaacgagtgccagatccaaaaactcaatgccctcaaaccggataaacgtatagagtcagaaggagggctcattgcgacatgggaccctaacaaaaagacattccagtgtgccgatgatgccctctatcactgcac

SEQ ID NO: 54471 - DNA, 245 bp, Glycine max
tacgagttctttgctaatcgacaacttgtaacaatattttcagcacctaattattgtggggagtttgacaatgctggtgctatgatgagtgttgatgagacgctaatgtgctctttccaaatattaaagccagctgataaaaaagcaaagctcaattttggaagtacaaccactgctaagcctggaaactctccagcaggtgtaaaggttggaagatattagtccttcctggatgcgaagtgtga

SEQ ID NO: 54472 - DNA, 275 bp, Glycine max
ctcgagccgcactcatcaccatggccaagcttgttctttcactacgagtccatcatttcagtggctagttcgttctgagaaagcatgtacagcacaatgagtgccagatccaaaagctgaatgccctcaaaccggataaccgtatagagtcggaaggtgggttcattgagaactggaatcctaacaacaagcaattccagtgtgtcggtgttgacctctctcgctgcacccttaacagtaatgccctacgtagatcttcctacactaacggtccc

SEQ ID NO: 54473 - DNA, 281 bp, Glycine max
caaaagacgagaaactgaaataccaggattgagcccatatgcacaactattggctcaatcctggtatttcaggttctcgtctattgggacacattcatcagtccatttaacagcaaactgtttggaatcaaatggcaacagtgagatgaccattgaattttgattctagcaagcagagcttatgtcaatactctattgatcttcttggtggaggaattttagtggacaaaactggagattggatcacacttatacaaaattctccaattagtaacttgttg

SEQ ID NO: 54474 - DNA, 285 bp, Glycine max
aggaaaggaaagtgaagaagaagaagaagaccaagacgaggatgaggagcaagacaaagagagccaagaaagtgaaggttctgagtctcaaagagaaccacgaagacataagaataagaacccttttcacttcaactctaaaaggttccaaactctcttcaaaaaccaatatggccacgttcgcgtcctccagaggttcaacaaacgctcccaacagcttcagaatctccgagactaccgcattttggagttcaactccaaacccaacacccttcttctccccca

SEQ ID NO: 54475 - DNA, 270 bp, Glycine max
gtattaaagaatttaagatatactatgatgagagcgcggttcccattactgttgctgggagttgttttcctggcatcagtttctgtctcatttggcattgcgtattgggaaaagcagaaccccagtcacaacaagtgcctccgaagttgcaatagcgagaaagactcctacaggaaccaagcatgccacgctcgttgcaacctccttaaggtggaggaagaagaagaatgcgaagaaggtcaaattccacgaccacgaccacaacacccg

SEQ ID NO: 54476 - DNA, 274 bp, Glycine max
tggttaccaatttccgcgacttgtcgttatcctgtaagtcaattagctccagatccttgtgctgtctatgtagaatgttctagtggatcttgtggtttactcacctctgcttggattatttctgcagttaatggtcgctcctcagatatcaactggaatcaacgcacatcccatgggataggctggattattgattagcttactagagttggtcctcgaccagcagctttactggcaggccagtttggcgggaatgattaccttctgagttcta

SEQ ID NO: 54477 - DNA, 218 bp, Glycine max
aatacgacagctcctaactggatcaagatctcaactgaagttgtcgaaggcaatatccgcaatttgcgaagaaaggtctgaccccgtctcagattggtgtcattctcagagattctcacggtaatgctcacgtctatagcgtcactggcatcgagatccttcgcatcctcaaaggtcacggacttgcgcctgatgttcccgaggacctgtaccagttg

SEQ ID NO: 54478 - DNA, 281 bp, Glycine max
caacaacttctgctacttcctactccaaccgcacttctgctccgcaattatcatgggcaaggtcaagatcggaatcaacggatttggaagaattggccgtttggtagccagagtggctctgcagagagacgatgttgaactcgttgccgttaacgaccctttcatcaccaccgattacatgacatacatgtttaaatacgacagtgttcatggacactggaagcatcacgatgtcaccgttaaggacgagaagacccttctcttcggtgacaagccagtca

SEQ ID NO: 54479 - DNA, 277 bp, Glycine max
ctctaccttgattcgcaacacttcctgagttccgtatggggcagcgcttcactctctctctttcttgcctttgcttgctactcttgtcgagtgcatggctttgctattagctccagcaagctcaacgagtgccaactcaacaacctcaacgcgttggaacccgaccaccgcgttgagtccgaaggtggtttgattcaaacatggaactctcaacaccctgagctgaaatgcgccggtgtcactgtttccaaactcaccctcaacagcaatggcctcc

SEQ ID NO: 54480 - DNA, 262 bp, Glycine max
tgacttcttcagaagggagatgcagcacataagtacatgcaaggatctagaaacatgaaaattgacaactggatccttcttgataattatgtacaaggacgggtgctttcctctggttctcaagctagggctttgcaacttcattcaaaacgctctaagaaacacatgtctatgaaacggcataagaaggatggatcattagatcttcctcaagagttccagaaatttgatattttcaagccaatgcacgaaatgtggaaag

SEQ ID NO: 54481 - DNA, 264 bp, Glycine max
tcataatttaagatactatgatgagagcacggttcccattactgttgctgggacttgttttcctggcttcagtttctgtctcatttggcattgcttactgggaaaaagagaaccccaaacacaacaagtgtctccagagttgcactagcgagagagactcgtacaggaaccaagcatgccacgctcgttgcaacctccttaaggtggagaaagacgaatgtgaagaaggtgaaattccacgaccacgaccacgtccacagcacc

SEQ ID NO: 54482 - DNA, 263 bp, Glycine max
gtaaaacttggcattagggttgtgatttgtggaactattggttgttcggccatagtttcatcaattttttgtaacattatatgaaagacttaaatatgtttgtgacccctgatatatatactcgaattttgcgaaaaagaagaatctaagatgacttctccctacattaaatgtacagtctctttcttcatagcatttggaaatttggctgatgacaccatcaattttgaggcttttccccacaagctggtgcagttggagag

SEQ ID NO: 54483 - DNA, 254 bp, Glycine max
gaagaaaaacccaaaaagattgatgccagattgagacaaagaatagatcctcaatacaatgaggttcaggctcagatggaaacaaatttgtttaaattgtctcttgatgatgttgaaactcctaaaggttccatgttggatcttaaaatttctcagtctaaaattgcacttcccaagaacacagttggaggaactattctgcgtagtgatctattggcaaattttctgacagagggcaattttagagcagtgtt

SEQ ID NO: 54484 - DNA, 254 bp, Glycine max
cggctcgagcgattgctagaatggaatttcgatgctcagtcatctcttttaccattctcttctatcttgctcttgcaggagagagccatgtccatgcatcgctacctgaggaagattattgggaagctgtttggccaaacactcccattcccactgcactgcgagagcttctaaagcctctccctgcaggtgttgaaatcgatgaactccctaagcaaattgatgatacacagtacccaaaaacattttctata

SEQ ID NO: 54485 - DNA, 239 bp, Glycine max
  unsure (1)..(239): unsure at all n locations
ggctcgagatgcaaggaatggtatgaagagtagtagtgctagtagtagtgcnattggtccaactagaattatcattagttgccctgagaagggtgaggttgttgggaagcttgttttactacctggaagctttcaagagctagttgagattggagccaagaaatttggtttctatcctaataaggttgtatgcaaagatggaggtgaaattgaagatctggaggtgattagggaggtga

SEQ ID NO: 54486 - DNA, 265 bp, Glycine max
cgattactgtatctaatatctcctgcaggggcccatcatgtagttcaaatacccttaatggcacaagaggaaattctgtcttctagtgcaagtgctttcagacctgcaatggtgcgcagaaatagcacgcctcaagctactgcaatgcagtgggagctatagaaattatcattgatagtttcgcaagtactgcattgccacatcagttggtgcaatgcttttggttgatacttatcataccaatcctgcaaatgccgttcgtagt

SEQ ID NO: 54487 - DNA, 257 bp, Glycine max
gggacgccattcttcactctctctcccacttccctttgcttgctactcttgtcgagtgcatgctttgctattacctccagcaagttcaacgagtgccaactcaacaacctcaacgcgtaggaacccgaccaccgcgttgagtcgacggtggtctcattgaaacatggaactctcaagaccctgagctgcaatgcgccggtgtcactgtttccaaacgcaccctcaccacccacggcctccacttgccatcttactca

SEQ ID NO: 54488 - DNA, 272 bp, Glycine max
ctctccatttgtccttgaatataatactcagcatggctaagcttgttctttccctttgttttctgcttttcagtggctgctgcttcgctttcagtttcagagagcagccacagcaaaacgagtgccagatccaacgcctcaatccctcaaaccggataaccgtatagagtcagaaggtggcttcattgagacatggaaccctaacaacaagccattccagtgtgccggtgttgccctctctcgctgcaccctcaaccgcaacgcccttcgca

SEQ ID NO: 54489 - DNA, 265 bp, Glycine max
atggaaacaaatttgtttaaattgtctcttgatgatgttgaaactcctaaaggttccatgttggatcttaaaatttctcagtctaaaattgcacttcccaagaacacagttggaggaactattctgcgtagtgatctattggcaaattttctgacagagggcaattttagagcaagtgttgatttgcagcgcactcatcgtattaaaggaatgattaaaatggtggccacagttggtattcctgagaatacaggtatatcattgg

SEQ ID NO: 54490 - DNA, 277 bp, Glycine max
attgaatgtcccaaggatgagaaacttcctcgtcgcaaaatttttgacaaacctaagacgcgctgcttcactattctccctatggagtttaatcttgtggttcgtcagaagtttttaaattttgtgaggttcattatgaagaaaagggacaagcttagttgtcaagttggaatcaacccatactccatggaatggactggtttggccaatagattactgagtaagggcaacgatattctgtgttgcgattatgctagttttgatggtttgattacca

SEQ ID NO: 54491 - DNA, 273 bp, Glycine max
tatgaactctatacagggacagttctttttccaggttttactaacaatgacatgctatggctccacatggaattgaagggtatttttccgaaaaagatgcttcgtaagggagcatttattgaacaacattttgatcagtacctgaattttcttgctacagaggaggaccctgtgacgaaaaaggctataaagcggatgattgtaaacataaagccaaaagatattggaacaatcatcagtggctctccaggggaggatccaaagatgttaacc

SEQ ID NO: 54492 - DNA, 270 bp, Glycine max
ctcgagccgctcgagccgattcggctcgagtggagaggattttcagcttaaacttttatgcaggacctccagttagatttaagctgtctcacagggatcattcaaattttgtgaattgtgtaagatattctccggatggcagtaaatttataagtgtaagttctgacaagaagggtatcatattcgatggaaacagtgcagagaagattggtgagttgtcttctgaaggtgggcatactggtagtatttatgctgttagctggagtcctg

SEQ ID NO: 54493 - DNA, 271 bp, Glycine max
gcaaaatgaccaagttcacaatcctcctcatctctcttctcttctgcatcgcccacacttgcagcgcctccaaatggcagcaccagcaagatagctgccgcaagcagctccagggggtgaacctcacgccctgcgagaagcacatcatggagaagatccaaggccgcggcgatgacgatgatgatgatgacgacgacaatcacattctcaggaccatgcggggaagaatcagctacataaggaggaacgaaggaaaagacgaagacgaaga

SEQ ID NO: 54494 - DNA, 263 bp, Glycine max
gattcagatagctcctatgagaatgcagatttgagtcgttctaaaagaaaaaaggccaagaaacgggggaagtcccgttccaaagaaggagatgacagctcagagtgggcttcaaaagagcttttggagtttgttatgcacatgagaaatggagacaaatctgttttatctcagttcgatgtgcatactcttttgctagagtatatcaaaagaaataagcttcgagatcctcgccgaaaaagtcagattatttgtgatgcaag

SEQ ID NO: 54495 - DNA, 263 bp, Glycine max
aattcctggagcattttatatcaagaacttccactcccatcatcccattcaaaattaattttgaatgcagattggcctgctcccaaagttaattttgaatgggatgatgggagtggaattcctggagcattttatatcaagaattttatgcaaactgagtttttccttgtgagtgtgactcttgaagacattccaaaccatggaagcatccactttgtttgcaattcgtggatttacaatgccaaactcttcaaaagtgaccg

SEQ ID NO: 54496 - DNA, 279 bp, Glycine max
cactcgagcgaattcggctcgactccattgtctttgaacactcaccaccatggccaagcactgttctttccctttgtttacatcttttcagtggctgcttcgctctgagagagcaggcacagcaaaatgagtgccagatccaaaagctgaatgccctcaaaccggataaccgtatagagtcggaaggtgggttcattgagacctggaaccctaacaacaagccattccagtgtgccggtgttgccctctctcgctgcacccttaaccgcaatgcccttc

SEQ ID NO: 54497 - DNA, 273 bp, Glycine max
gaggggaaccactctcaaccttcagatttttggactacggtgtgaccatttcattttacagggctccttatttggttgagattgatgtggtccaaggaaagagaattttgaggctggaggaggttgatgggaatggtgacgcatggagaagtgcagatgtgctgtctttcaacactggacattggtgggatcatcaaggctctcttcaagggtgggattatatggaattaggaggcaaatactaccaagatatggatcgtttagcagctttgg

SEQ ID NO: 54498 - DNA, 263 bp, Glycine max
ctgaaaccttgaattcatgtctggttcagcttttgagtaccactaccaatggtgattttgttcaagggaaagatctcgcaatggtcaaagtcaacattagcacatgctacattaactttaaccattgcgagatctttcccttgaactaaatcaccattggttaaagttaatgtagcatgtgctgctgttggcttgacatcaagttacactccaactccattgttggaatctggtttgcaaaaagacagagggttacttgtgga

SEQ ID NO: 54499 - DNA, 273 bp, Glycine max
gccgtttctattattgacaccaacagcttggagaaccagctcgaccagatgcctaggagattctatcttgctgggaaccaagagcaagagtttctaaaatatcagcaagagcaaggaggtcatcaaagccagaggaaaggagatgatttaggatgaaggagatagagtgggaagtgtgctgaaggccttgataggttgcggtgttgaacaacaagagtgcttttgttggaggcactttcaccattttttggatgagaatcagagcttcgtgcg

SEQ ID NO: 54500 - DNA, 269 bp, Glycine max
gaagacgaagatgatgaagatgaacaaattccctctcaccctcctcgccgaccaagccatggaaagcgtgaacaagacgaggacgaggacgaagatgaagataaacctcgtcctagtcgaccaagccaaggaaagcgtgaacaagaccaggaccaggacgaggacgaagatgaagatgaagatcaacctcgcaagagccgcgaatggagatcgaaaaagacacaacccagaagacctagacaagaagaaccacgtgaaagaggatgcga

SEQ ID NO: 54501 - DNA, 253 bp, Glycine max
aattcttccaccaagttatgggtttccttgtgttgcttcttttctccctcttaggtctctcttctagttccagcatatcaactcatcgttccatattggaccttgacctaaccaagtttaccacacagaaacaggtgtcttcactgttccaactatggaagagtgagcatggacgtgtctaccataaccacgaagaagaggcaaagagtcttgagattttcaagaataacttgaactataggcgggatatgaa

SEQ ID NO: 54502 - DNA, 250 bp, Glycine max
agaatacaggtatatcattggcctgtgctatgaatagttcttttagggggcgcgccagttctgatatttacaccatctgctctcaagactgtgaattgtggaatcctgcttgcacaaaagcaatgactatgtcatttaatccaaacccgtgttctgatgcatggagtttggaatttctgaagcgtactggatttcattgcgatatcatttgtgtcactggatggactgccaccccaatgcaggatgttca

SEQ ID NO: 54503 - DNA, 275 bp, Glycine max
tcttgcaactgcacaaagtgttcgagatgctctcattataaactggaatgctacctatgattactatgagaagctgaatgttaagcaggcatattacctttcgatggaatttttgcgggtagagcactattaaatgcaataggaaatctagagttaactggtccccatgctgaggctttgagcaagctcgggcataaattagaaaatgtggcataccaggagccagatgctgcacttggaaatggtggtcttgggcgtcttgcttcatgtttctt

SEQ ID NO: 54504 - DNA, 269 bp, Glycine max
attcatcgcgttgctaacttaacaccaatgacaaaatcacctggtattgtcattggtgttaagttgacaaccataaacaatatgtgtgcatatgggctcaatcctggtatttcaggttctgtcttttgcagttcattcctcagtccatttcacagcaaactgtttggaatcaaatggcaacagtgagaacaccattgaattttgattctagcaagcagagcttttgtcaattctctattgatcttcttggtggaggaatcctagtggac

SEQ ID NO: 54505 - DNA, 281 bp, Glycine max
cggaatttgagtaatattcatatttccggcttattttacgacggcagatacaaattctggactaaacacgagaaaaatcttgctttgacagaagaggaaaagatggaggtgattagaatagaggcattcctgctgatgttcttgcacagcgagctcatgaatttgaaaaacatgttgctcatgaaagcctcaaggatcaaattcctgctgttgacaagttgtattctactaaggttaataagtttgcaaaaattatgaaccttagacaagtgttgttggtg

SEQ ID NO: 54506 - DNA, 272 bp, Glycine max
tacttcactgttgctggactccacaagaaggagcttgtctgagaaggaaacagatagaagctttgggttgagaaatttcaggtacattgagaccatcaaagaagcttggaaaggaatgcccaggagttgtttcctgtgctgatatcctcgttctctctgccagagatggcattgtttcgctaggaggtccccatatccctcttaaaacaggaagaagggatggtagaaggagcagagccgatgtggtagagcagttcctcccagaccacaat

SEQ ID NO: 54507 - DNA, 272 bp, Glycine max
ggcagaggaagaagaagaagaggatgagaagccacagtgcaagggtaaagacaaacactgccaacgcccccgaggaagccaaagcaaaagcagaagaaatggcattgacgagaccaatgcaccatgagacttcgccacaacattggccagacttcatcacctgacatctacaaccctcaagccggtagcgtcacaaccgccaccagccttgacttcccagccctctcgtggctcagactcagtgctgagtttgggatctctcgcaagaatgc

SEQ ID NO: 54508 - DNA, 269 bp, Glycine max
ggcttattttacgacggcagatacaaattctggactacacacgagcaaaatcttgcattgacagaagaggacaagatggaagtgattagaaatagaggcattcctgctgagttcttgcacagcgagctcatgaatttgaaaaacatgttgctcatgaaagcctcaaggatcaaattcctgctgttgacaagttgtattctactaaggttaataagtttgcaaaaattgatgaaccttagacaaagtgttgttggtgatcttaaattctt

SEQ ID NO: 54509 - DNA, 268 bp, Glycine max
cgggcctttacatttccgaataatctcagtagcagtactcaaaagctgaaaccttgaattcatgtctggttcagcttttgagtaccactaccaatggtgattttgtcaaggaaaagatctcgcaatggttaaagttaatgtagcatgtgctgctgttggcttgacatcaagttacactccaactccattgttggaatctggtttgcaaaaagacagagggctaattgtggaatattttggaaggatgtcttacgttgctcataacgtt

SEQ ID NO: 54510 - DNA, 267 bp, Glycine max
ataaagatgcgtttgaagagcccatggtggtgctaacaggtgtgtttgatgcttcttttccttgtgggggttacagctgcacgcatggaactgagcttcttcaaaatgatcagtcatcaagttatgatgctgatgagtattcaaaacgatgctgtgatctctgcaggtgcacacgctcaatgcctcctcaatgcagctgtgcagacattagagcgaattcatgccactcagattgtaagagctgcatgtgcacacgctcacagccag

SEQ ID NO: 54511 - DNA, 309 bp, Glycine max
tctcgagcctggttactgtctgttcaagctatcatctctctctctctttcttagtgcatccttagctaaagttagagatggcccgaagaaactgtgcactattcacctactgagatcagtatcacgaagggagcaccctagacaggatctgtgaccagatctccgatgctgtgctcgatacatgcttggagcaggaccctgagagcaaggttgcctgtgcaacctgcaccaagaccaacatggtgatggttttcggagagatcacaaccaaggccaacgtggactatgagaagattgtgcgggacacat

SEQ ID NO: 54512 - DNA, 299 bp, Glycine max
attgggtatatatattctgcaatatccaaaccccaaacgctcactgaaaagtgaagcacttgacattgaagagcttgctgatcagttacagatagggtcaaagttttatgtgattgatgtctcaatgggatcatatgctacctggagttgtttgaactacatccccaacaggctagcaggtgtgactatgatagctccagtgataaattatcaatggccttccttccctgagggtctgataaaagaggactataggaggaaacttatcaagtggtccatctgacttgcaaactatttac

SEQ ID NO: 54513 - DNA, 279 bp, Glycine max
aagcttaatcgatcatcacttcacttcactaatacatcatggcagacgaatgtacagaacaagtatgagagctctgaggttgaggtccaggatcgtggtgtttttgactttctcggtaagaaaaaggatgaagaagacaagcctcatcctcaggaggaggtcatcgccaccgagtttcaaaaagtcactgtctcagaccaaggagagaacaagcattgcctcttagaaaagcttcaccgatctgacagcagctctagctctgtaagcttcttttccttt

SEQ ID NO: 54514 - DNA, 202 bp, Glycine max
tctcgagccgaatcggctcgagcggctcgagctgaccgaatgatgctcacattctctgtgttcccatcccctaagttttctgacactgttgttgagccttacaatgcaaccctatcagtgcacctgctcgttgagaatgcagatgaatgcatggttttggataacgaagctctctatgacatctgcttccgcacgctttagg

SEQ ID NO: 54515 - DNA, 268 bp, Glycine max
gtcccaaccaaaaaaagttagtgctgccacgtggcggacgcagttgggttgacaaagagaaaattaaaaagaagaagttaaatttagaaaacacggtcggcgtcgtttgggctggatgatgcaattcaaattctggagtacgttgttaacacgagggaggaaaaactcgggaccgcaaatcctgaggtggatgatgagaagaggaggttgggtgagttgttgaaggaagcaggtagagttcggagcagaaaagccaggtcactggaga

SEQ ID NO: 54516 - DNA, 267 bp, Glycine max
ataccttaggtcttccgaattcgaagttaatttgcaagatggctaaggaaaaggctcagatcaacattgtggtggttgctcatgtggaccctgaggaggcaaccaccattaacgagctgaagaagcctgttgtggagaaagaagctccagggcatgccatatgagggcatgcacgtacggcctcggaggcggaacagaaaattatgttaacaaaataatctggaaccctaatgtatcagtgtcatcatcagtgtgtagtttaagcta

SEQ ID NO: 54517 - DNA, 279 bp, Glycine max
aacaccttcaactgctttggcttacctcaatccttcctattgggacgaaaggttctcgaaggaggagcaatacgagtggttctaggattattcctattttcgccacttgattcaaccccatctggaactatggatgtattgttcgtggacagtggtaacccatggaatccaaagcctgaaactatatccaaggtcatggccacgttgaaaggtgttcacggggttttgaaagctggtggcacatttatctcagtaacttttggacagccacatttcagg

SEQ ID NO: 54518 - DNA, 279 bp, Glycine max
taagaaagagaaacgattgtctaatgtgaaggcttgggaagaaagtgaaaaagaaagcagaatatggtgaaaaaaatgaaaaacaaaatagccttagttcacaagcaagcagaggagaagagagcaatggttgaagccaagcgtggtgaagaaattctcaaggcagaggaaatagctgcaaaacaccgtgcaactggaacctctccaaagaaggcctttggatgcttttaaatttttattcctttttttgttgttgtgcttttgtgcctgatgtcatag

SEQ ID NO: 54519 - DNA, 262 bp, Glycine max
ttatcgtcttcttttgttgtttgtgtgtttgtttgttctctcacctgaaaatgtcttgctgcgttaggtactgtggttgcggaacgcctgcagtcgcggcaacttctgcggaggctgcaagatgtacccagacctgagctacaccgagtcaaccatcacgcgagacttggtcatgggagtggcaccagttaaggctcaattcgagagtgctgaaatgggtgttcccgctgagaacgatggctgcaaatgtgaagctaactgc

SEQ ID NO: 54520 - DNA, 271 bp, Glycine max
gggaagtcagagttgaagcatgtggagaatgtgatgtttggatgtggtcattggaatagaggcctatttcatggtgctgctggtcagctaggattggggacaggacaattgtcatttgcttctcaaatgcaatctctctatggtcaatccttttcctattgtcttgtggataggaatagcaatgcaagtgttagcagcaagttgatttttggtgaggacaaggagctcctcagccaccccaatttgaatttcacttcttttggtggtggga

SEQ ID NO: 54521 - DNA, 269 bp, Glycine max
gattgccttcaaatcacacactctcttcaatttctagggttttgctattgctttgcctccgttccccctttctcaccaaaacaacgccttttctcttctccttcgtatctattctttgcatttagttttaggttgattgaaggcattcacagcgtaatttgttgctgcattttaatcgatttatctaaccaggactgaatgacctaatggagtctaaaggtgggaaaaagaagtctagtagtagtagtagtaaatcaattttttacgaa

SEQ ID NO: 54522 - DNA, 218 bp, Glycine max
aatcgaccgattcggctcaggcgaaaatgccttcccacaagacgctcatataccaagaagcagctcgcgaagaagatgacgcagaacagacccatcccttattggatccgcatgagaaccgacaacactatcaggttccgctaccctaatttttgttatagctcgttctacaaacttctaccaaacgctgcgttttgcaaattttgcctctgcctcat

SEQ ID NO: 54523 - DNA, 241 bp, Glycine max
gccagtactatatgaggacgggatcatgcaaatttggtgcgtcctgcaagtaccaccatcctaggcaggtgccaggcactgctacccctgtgccactacattattatggatacccattgcgagtgggtcagaaaagtgttcctattacgtgaaccatggacagtgcaagtttggtgcaacttgtaaattccatcatccacagcctgcaggcgtccaagttctagcaccatcaccagttcct

SEQ ID NO: 54524 - DNA, 248 bp, Glycine max
aggcaggagaaccccattattgagatatggccttcctatgatctctctcactgtccttggttctataggccttgcccaactcttgcaaggcagcaaggatattgcaaaggtgaaagatgatcaggagtgggaaataattgaaacaaaaaaagcattgtctaagactggaccagtgaatgcatacaatccaaaaaagatttccttggaggatgagctaaaggctttgcaacaaaaggtggacattaaca

SEQ ID NO: 54525 - DNA, 235 bp, Glycine max
catggccatgcttcgaacagcactgcctggttgtgatgatgggtcatatagtcgtgtcttcaaggctttaatgcctttggagaaagataaaaaaaagaggataattgaccatatcaacaaaatatcaacaattagaagatgtagcttcttgtcagctgcctctgacatctttagtgcaaagatttctggtacctttaaaaggagtgagcttacccatggaaggaagattttaatg

SEQ ID NO: 54526 - DNA, 179 bp, Glycine max
aactactggaacttgctcgttcattccatccacctccgtggaaacataagtgtctaacctcagtcagcttcacacgtgtgatatgcgtcctgaaattgggccactagcatactattcaattcgtctatggctgcatcttcttatgctatgcaatcaatcatggaaaacccttgatccga

SEQ ID NO: 54527 - DNA, 269 bp, Glycine max
gattgataggggtacattcgatggtgtaccggtagtctatcatgtaattgaagccatgactagcattcttaagctgtacctctgatcatgcattatatgtttcaatactgctaactatcatgcatttcttttcactagtgttgaccctcatgaatcttctgtgctaaaggtgaaactttttataggtgaagttatggtgtgactggcctttctggcctgatgatggcatgtgccggttgcgggactgtagtgtgtgtgaatgccctgaa

SEQ ID NO: 54528 - DNA, 267 bp, Glycine max
aggttggactacctggaaacgtaggatgcactgggactgaagagctaggtttcaggaaccgacgtcgttgcggatggcatggctggtgctgctatgtatgaactcgtgcgtgttggtcatgataatctcattggtgaaattattcgtctcgaaggggatgctgctaccatccaagtttatgaggatactgctggtttgatggttaatgatccggtcttacggacgcacaagcctttggtccgtggagttaggttctggaatattggg

SEQ ID NO: 54529 - DNA, 266 bp, Glycine max
ctcgagccgctttgatcctagtggcaccattttagtgacagcttccattcagggtcataatataaatgttttcaagataatgcctgcaagtgggactttgtcagcttctgttgttggtcgttcttatgtgcatttgtacaggttgcaacgtggctttactaatgcggttatacaagatatcagtttcagtgatgacagcaagtggattatgattagttcttcaaggggaactagccatctatttgccataaatcctcaaggaggac

SEQ ID NO: 54530 - DNA, 255 bp, Glycine max
cggctcgagggaacaacagctacatttgtattggttgatggatggactgtcactgttgcatctgttggggattcccgctgcatatcagatactcagggaggtgtagtttctctcttgacagttgatcacagactggaagagaatgcagaagagagggagcgtgttactgccagcggtggtgaagtaggaagactcaatgtatttggaggcaatgaggttgggcctcttcgctgctggccaggtggatggtgccta

SEQ ID NO: 54531 - DNA, 261 bp, Glycine max
ggaccttgcagtggtcaagcttgcataggaatagactatttgcttgttgaggagaagttctcatctgctgtgataaaactattaaagaagttcataagaagattttatggtgaaaacccagtggagtcaaaggtaatttcaagaataataaacaagcagcactttgagagattatgcaatcttctcaaagaccctcttgttgcggcttccatcgttcatggtggttcagtcgacgaagaaaacttgttcattgagcctaca

SEQ ID NO: 54532 - DNA, 219 bp, Glycine max
ctctcaagtccaacctacccctatgtcttctcccaccaacttcaccgtcttcttcctctatcatgtctcacttcaagggcaagtaccatgatgagcttattggcaatgctgcttacattggcactcctggaaatggtattctttctgcttattagtcagcagggtcaattggcaagcgattggccagcatcagtgtagagaatgttgaatcctacaggc

SEQ ID NO: 54533 - DNA, 266 bp, Glycine max
  unsure (1)..(266): unsure at all n locations
cactcgagccgctcgagccgctcgagcggctcgaggacgcccattctactgatgcttctcaaaacgacatgtaccatgtcataaacaacttgtcacttggaaagaaagtgactcctagggccatgagtgatgtgaagctcttgataccatacataggtagcagccatgacaggctcaacggccggtcattcatcaatactcgtgatttaggtgccaatgttactatagagcattatattcagatagttanaactgaggtagtgact

SEQ ID NO: 54534 - DNA, 191 bp, Glycine max
gaggaccccgttagctgcatggttagagactgcagttgctccctgagataagatgggtggtgttcagtgtctggagcgagagctgttaagatgacaccagctgctaccttgtctgggaatttctccattgcaatggctatgggcagccctccaaggctgtgaccaactagaactaacttctcatataccat

SEQ ID NO: 54535 - DNA, 272 bp, Glycine max
ggttggagcagcttaactcattacaagataagaatggtgaagatgtatcaaatatcaatgttcaagcagaaaaaagcctggttaaagattacttggttgaccataatgcaagatctcagaaaagaattataccagttcccagcccagcatccattgaggatatgagggcaacgatcatagagaactcattaaaattgatccaaacagaaagcaaaatcacacgtctggcagcatctccaaatagaactcctttcgcagacgtgaattcagtc

SEQ ID NO: 54536 - DNA, 183 bp, Glycine max
ctcgagccgggaggaccgagtgcatcccacgctcgggcgtactcatgaccgcatcaggtctacaaggtgaacagacctctggtcgatggaacaatgtaggcgagggaagtcgtgcaagatgtgatccgtaagctcgggaagagggttagctctgagggctgagcacgggggtcccagtcccga

SEQ ID NO: 54537 - DNA, 279 bp, Glycine max
tatcaaggcacttcttgttgctgcaactgactgtgaacctcaatatctaatccgtttgctacagacaaagttgcgaattggctatgctgagaaaactctcttagctgcattgggccaagctgcagtatacactgaagaacactctaaaccacctcctgatattcagtctcctttagaagaggcttcagagattgttaaacaagtctattctgtacttcctgactatgacaaaataatatctgcactgcttacagagggtctatggatgcttccaaagaa

SEQ ID NO: 54538 - DNA, 280 bp, Glycine max
tacaagcaaggccaaactcgtcttgctcaatactacgaatatctcaccctcgaagagcgacgtgccctcgaaggcgaaatcgttcgcaaatgcctcgcccgcaacgaacagcagaatgagctggctattttggaatttatacatctcttggttgaaaccatggatcgtcattttggcaatgtgcaagatattttgcataccttgatctctagcaatacgcaagccctgtaaaactccccataactcagcaacaaaggctatagtgcaactcacttttttt

SEQ ID NO: 54539 - DNA, 274 bp, Glycine max
caagctgaggaccctgctgctcgacgttacattatttcattcaatgcaaacaccactcttgtagttgagggcgtggaatttgtaaagtgtgaggttgtgggacagagcttcatgcttcatcagatacggaagatgattgggctggcagtggcaatcatgagaaattgtgcaccagagtcacttatcgatgaagctttgcagcaggatgttaacattaatgtgcctactgcccctgaggtgggattatatttggacgagtgcttcttcacttcat

SEQ ID NO: 54540 - DNA, 276 bp, Glycine max
cctcgagccgaatcggctcgagatgatggtaaccgtccaacttgtgcatgcctgagaggttaccttcctaagtctccggatcagtggaatatgtcaatttcaccaaacggctgtgttccaaggaataaatctaactgccaaaacagtttacagatggcttcttcaagtacgcacacacgaaaatgccagacacatcttcttcgtggtttaatacaaccatgaaccttgatgaatgtcggaagtcatgtcttaaaaactgttcttgtactgcatatg

SEQ ID NO: 54541 - DNA, 268 bp, Glycine max
tctcgagccggcaaattcttgtgggcatccaagacctgcttgatcaaccaaatcctgctgacactgcccagacggagggttatcatctattcatccaggtagctaacctaaaaatcctacacttttcactgtttattaaaagaacttaaatttgttggctaccttcactttttattttttgaattttattatattattactttacaatgttgggaactcatggggatactcaaacaaggatgggagtcaaaattaccccaagaagagg

SEQ ID NO: 54542 - DNA, 296 bp, Glycine max
tctcgagccgattcggctcgaggctccctgtgaatccttgaaggtacatataagcaatttgagatcgttcatcatggctccgtagttcaacatattcaatatcaccagaaaatgaaaagaactccttaatgtcttgctcagttgcaataactcaggatccagattaccagcttccacctgctgcgttagcgtcatctgtaagagaaactcaaactcctggtggtgctgactctgctttacggaaggcagaggatgtggtctccggcatgctagccaagggctttatcttaggaaaa

SEQ ID NO: 54543 - DNA, 281 bp, Glycine max
ttttctgttttggttttttctttttgtatagataatagttacttttttttttctttcttttctgcagcttaatggcatgagactgtgaggaatatcttatgtgctattattgaatattgtatgcaaatgttcaaataaggtcatttcgttgcctgtctcatcttccttttgtaggcaagcgtggcagaaattgggtgctatgcctcctgaagatgcaatgcagaagtacattgatattgtgaccgagatctatcctacttggcttgatggttcatctttga

SEQ ID NO: 54544 - DNA, 286 bp, Glycine max
ggacaatcggggaaggcgtggaggcaggtcatatgattcaggattcactttctactttaaccctgttgatttattctggtactgggatccatattattataggaggcgaaggctacaagctgatgatgacaagatgaacttcattgaatcggtcttctcctttgtatttggagatggtgatcccaatcaaggaattgaagaagagagatggaagttggtaataattgaggactgaattcagtgattgggcaatacatagcatctaatggtggcgttgttgcagctg

SEQ ID NO: 54545 - DNA, 280 bp, Glycine max
gaaaccctaaaccccgttttcggttagatcgagatcgatcgaacatggatgaggagtacgatgtgatcgtgttgggcacgggtctcaaggagtgcattctcagcggtcttctctccgtcgatggcctcaaggttctgcatatggataggaacgactattacggaggagaatccacttcgctcaatcttattcagtttgaactgcgaaatgatgattttctctgtcctcctcttcagctttggaagagattcaggggagatgacaagcctcctccacattt

SEQ ID NO: 54546 - DNA, 283 bp, Glycine max
ctccggcatgttcattcccaagaacaaggatccaattgtgtctgggatagcatttgggtagagactaaagaaaagaagtgcatcccagacacaatgagtctacatgcaggatgccctgtaattgaaggtgagaaatggtcagcaacaaaatggattcatgtggactcatttgataagatggtggcagatgggggcgattgcaatgataagcaagaaaactgtgatagatgggctacccttggagaatgcactagtaatcccaattatatggttggatcacagg

SEQ ID NO: 54547 - DNA, 249 bp, Glycine max
tatgaggggtttcatgaaataagggtcgatgctttatcgaaaatgagtcaccttaagttgctcaaactttggggtgtgacttcttctggaagcctcaatcatctttctgatgaattaggatatattacttgggataaatatcctttcgtatgtttgcctaaaagttttcagccaaacaaactagttgagttgtgcctggaatacagcaacatcaaacatctatggaaagatagaaagcctccacacaac

SEQ ID NO: 54548 - DNA, 272 bp, Glycine max
  unsure (1)..(272): unsure at all n locations
ttttcgccgtcctccgccacgttccgcttcagcttccacgtcttttcgtatattncacgcgcccagatgctgtctccgagggggagcttcgcctgcactgtggtgccggcccgcgggagcatttatgtggccggtgggggcactttgcatacgatgttcggggcggcggggtcgaggattcagtcggtggagcggtacgaggtgtagagggaccggtgggtgccgatggagaatctccccgggtttcgtgccgggtgcgtggggtttgtcgg

SEQ ID NO: 54549 - DNA, 279 bp, Glycine max
tctcgagccgattcggctcgagatttaacgagggagtgaagcttagatccggtgttaacaagatctctctactgagtgttgacgttggactcccggtttgctctctctctctctctcacatatacatacacaccaaatagatatttcagatgcacccctgcacgtcacactaagctgatttttcagtatcaactgcggattatgatcatgaatcatgactatatttaacatgcagaatgttggtcctcattttgaaacatggaatgctggtgttcttgg

SEQ ID NO: 54550 - DNA, 276 bp, Glycine max
taactccctccctaaatactcatgctcctactcagaatttgggttcgctgaacgatcaaactcttacaatttcaacgggccaatccaaaagggaagtgggttttgtgcagcaaatgatccagagcttaagaggaagaagagaatcaaggcttataacgtgttcactgtggaggagaagcttaaaacaagtgttagaaacgggttcaagtggatcaaggacaagtttggtgacattcacagtggggtgtgaactatgcaacgtttgattagaataaa

SEQ ID NO: 54551 - DNA, 285 bp, Glycine max
ggggagtatttatgtagattgtggtaatcttgatcttgcagaggcatgctatgagaatgcccttgcaattaggcacacaagagctcatcaaggtctagcacgggtttatcatcagaaaaatcaacgaaaagctgcatatgatgagatgaccaagctaattgaaaaggcagagagcaatgcctcagcatatgagaaacgatcagaatactgtgaccgtgagatggcaaaggttgaccttgatgtagcaacccaactggatcctttgaaaacatatccgtatagata

SEQ ID NO: 54552 - DNA, 299 bp, Glycine max
gtcctatcagttctgaagcagaaaggcaaagagtgattcattgtttggaggctgctgttaggagacgaacttctgaggtactactaccacacatgatttggatgctaattcacaattttttaccaaatatttattagtgacactgttattttgtatttgatattgtagggtataaagctagaattatgtggggaagacagggttggccttctgtctgatgtaactcgcatctttagagaaaatggtctttcagtcaaccgtgctgaagttacaaccaggggcagccaagccatgaatgt

SEQ ID NO: 54553 - DNA, 266 bp, Glycine max
aaagctcgaacagcggagctcgagcagcaagtaaggaggaggtgacacttttggaagctactggaagcccatttgtgtgaacggttcatattgccctcaagttgaagggagttcaatacaaatatgtcgaagaaaatttgaggaacaagagtgaactgcttctcaaatcacacccagttcacaagaaggttccagtgtatattcacaatgagaagccatagcagagtcacatgtgattgttgaatacattgatgagacatgggaga

SEQ ID NO: 54554 - DNA, 208 bp, Glycine max
  unsure (1)..(208): unsure at all n locations
aggatagagatttggagagatcagagaanagctatgtaaacatgttggtttaccaggacatacatacaggtgatgagcttatatcaggctcattaagttgcaaggaaattgaggatgggatgatgtgggaagttgaggggaagtgggttgttaaagagcagttgatgtagacattggtgcaacacatctgatgagggtggaggagaag

SEQ ID NO: 54555 - DNA, 270 bp, Glycine max
  unsure (1)..(270): unsure at all n locations
tatggctgtaaaggatgacagtggcataaaacgcatgaacctgattgcccgtgctgctgagtctattgctgatggggatatagtgaatgtacagattcgcagatatcgacagtggcagctctctcaaactagttctgttgctacaagcataattcctgcgtcattgttacaagggcagagggaaatacttgaacagggtatacgnaatttcaaccggtttggtgggtggctggggaagaactcgacaatgggcaaaaacttacggctttt

SEQ ID NO: 54556 - DNA, 255 bp, Glycine max
gaagctacctagagcttgcacctattggtatcttctacaatatcctctcatagtgctcttctactgcgccaggtgcattgatcgcgagggcaagaggtctctccctcctcatgaggcaggaaaagaagctttccactttcccatgattactgagtacagatgggttggtggatctggtatggacctcagaagcaaagccaggactcttcctgggccagtgagtgaccctgcaaagcttccaaagtggaactacga

SEQ ID NO: 54557 - DNA, 256 bp, Glycine max
caggaatacagttgtgttgtcatttgaaccagatttcaataatgattcttgctgctcttctaacttcagttgtaattaaccttggcctatgttttatatttttcaccctctactctgtattgaggaagcagcctggtaatattaccgtctatgcaccacgcttagtttctgaagggaaacgtcaagagggtgatcaatttaacttggaacgtttgttacctgctactactgctggttgggtgagaaaagcatggga

SEQ ID NO: 54558 - DNA, 258 bp, Glycine max
actcgagccgattcggctcgaggagaaattggtggatctgcttgataaggcattatctgcagacacagttaacactgtgaagaatttgagagtgatcatggaaactggtgtcgagccattggctttaatgtcacaacttgctacagtaattactgatatacttgctgggacctatgatttcacaaaagaaaggcgaaggaggaagttcttccggagacaaccattgtccaaagaagacatggagaagctgcgccaagc

SEQ ID NO: 54559 - DNA, 262 bp, Glycine max
cggagtactggaacggcgagtcaacggagaatttaccgttcgagtcagacgaagacgaagaagaagaggaagcgagaaacggaggaggagacaaggaggaacagattccggtggcgctgccggtcaccggcttcgatatcgtcatcgacgcgctgccgtcggggacgatcaacgacctccacgagattgcgaacgaatggtggcaggaggtttcgggaaggagtgctctcacgtgtacagcagctgccggagggagtttctg

SEQ ID NO: 54560 - DNA, 265 bp, Glycine max
tctactctcacaacatcgttcatggatgcttctctagttctccacgccacgatgctccaccagctggtttgctgagtctagttagcgatgactgatctaacatggttgagaatccttgaaaagatgctcaagaagtgcttatatgaagtgactacatgttgtttagcaacagaggccctgaaaaaacttcgtgaaaggaaagaagcatatgacatagtgatcagcgatgtgaacatgcctgacatggatggtttcaaacttctgg

SEQ ID NO: 54561 - DNA, 273 bp, Glycine max
cttctattcagagggaactgataatctccagggcagcagcagtacaaacctcgacccctatggggttgcataccgatgatgcacactccgtgcggcggggcgtgaagatcgtatccacacggattcgatcaacaaaaaagctcccgccccaaagaaagcctccaggggatcgggccgagacaccgacagacccctttggtatccgggcgccaaagcgccgaatatctcgatgggagtcttgtcggagactacgggttcgatccgtttgggcta

SEQ ID NO: 54562 - DNA, 269 bp, Glycine max
ctacagggcactggccaacatatccgcccatggatgttagacttcctcatgaattgaatgtttaccaggatattttcaaagagttctatctaagcaaatacagtggaagacgtctgatgtggcaaaattcactaggtcattgtgtcttgaaggcagagtttcccaaaggaagaaaggagttggctgtgtccctatttcagactgttgttctaatgttattcaatgatgctgagaagctaagtcttcaagatatcaaagatgctactggt

SEQ ID NO: 54563 - DNA, 256 bp, Glycine max
aattgtttctgtggagaatgcaaggatgggaattcggaatagtggctctacgggaatgcttgtcgccggaatggaggctcaagtagttagtgtggatactctgaagcctctccctcctggacagttgggggagatatgggtacggggccctaatatgatgcaaggttatcacaacaatccacaagccacaagattgactatggataaaaaagggtgggtacatacaggagatcttggatattttgatgaggatggg

SEQ ID NO: 54564 - DNA, 286 bp, Glycine max
aatattttgaatggcttccacaagagacacggataaagctgaacatcagagaggctattggagatggagcaaacaagatctcttgcctgaggagtccttccaaagctggagcaactacgtttccgccctttctcaaacacggctaaggttcaaggaccgtctcttagcaagatcagatgatgccactgagacagaggaactcaagaaacaaagtgagcatgacatgaaacgttgcctcaactggtgggacctcatatggttcggttttggcgcagtgataggagca

SEQ ID NO: 54565 - DNA, 227 bp, Glycine max
gaaacaatagagagggtagcaagtgatgatgaaccatttgctggactggcttttaagatcatgagtgatccatttgtaggctcccttacgtttgtcagggtgtatgctgggaagctaagtgctgggtcttacgtactcaatgcaaatgataaaaaaaaaaaaaaaaaaaaaaaaaagaaaaaaaaaaaaaaaaaagggggcgccccccaattgtgtttttccccccc

SEQ ID NO: 54566 - DNA, 283 bp, Glycine max
ctttggagtccatttcttcacttatagtgaacttgaagaggccaacaacttctttgatcctgccagagaactaggagatggaggatttggaactgtgtattttggcaaacttcacgatggacgtgtagttgcagtgaagagaatgtacgagaacagttatagaagagtggagcaattcgtgaatgaagtagagatcctaacaggcctacaccaccaaaacctcgtttcactgtacggatgcacatctcgacacagcagagaacttctgctcgtatacgaatac

SEQ ID NO: 54567 - DNA, 250 bp, Glycine max
ggattcttacaaagaccttggtgcaaacaacttaattccaatggaaattgcattaaaaatagccaataaaatcaaacaacatgagagattttctgtgtatattgtcattcctatgtggcctgaaggtgtacctacaagtacagctactcagaggattctcttttggcagttcaaaacaatgcaaatgatgtatgaaacaatttacaaggccctacaggaggctgggcttgacaataagtatgaaccacag

SEQ ID NO: 54568 - DNA, 247 bp, Glycine max
gctcctaccagctaatcctgatattttagagggtgttgaagatcttatacagctcagttatttaaatgagccctcagttcttcacaatcttcagtctagatactctcaggatatgatttacagtaaatcagggccaattttaattgcactcaatccgttcaaagatgttcagatttatggagacgattatatttcagcttataggcagaaacttatggataagcctcatgtttatgctatggcagat

SEQ ID NO: 54569 - DNA, 245 bp, Glycine max
ctcgagccggcaatgttggcctttgttgggttctggttccaagctatttacactggggaaggacccattgaaaatttgatggcacaccttgctgatcctggtcactgcaacattttctcggctttcacgcgttagtgcaatgtatagtttgaagaaaagaagacggaagacgtgcgtccggaatgaacatagctttatgctgcaccagcaatatccgttatttactttatacatgtactttgctt

SEQ ID NO: 54570 - DNA, 264 bp, Glycine max
  unsure (1)..(264): unsure at all n locations
ccgggcgctggtgctggaaggcagcaatcgacgaaagctgctaaggatcctaacaagccagagagccctccaagcgctttcttcgttttcatgtacggattttcgtttgcttttgataccgaatctgttttcgtatcgtttcgttttgatttntnttttgtgtactggcgattgcagcctntgtgattgtttctttaggtccgagttcagagagcagtttaagaaggagcatcgtaacgacaaatcggtcgctgtagtgagtga

SEQ ID NO: 54571 - DNA, 270 bp, Glycine max
gttcccatctttcagaatcagaacttcagctttctccaaatgtggcatcagggcttccattgccgttgagcaacaaacttcccagactaaggttgctctcctcagaattggtaccagaggaaggtaccctacccttaaaaataacacctttagcttcttatgagcatttcttttaaagaacaagtctgtgaaaatattgagtcctgaatctcttcaaaactttgccctcattttcaaatttagttttcaatgctagttttatgacagaaa

SEQ ID NO: 54572 - DNA, 271 bp, Glycine max
cggaacaatcggaaaggaaaggataaaggtagagaggagagacctattgtggctgtatatgacaagcagcaagacaatactgctgatgagaaaaaagattctaacatggaggaagttcaagctcttgatgaaaagctttatgccctggaaattgtttctgatgtgtctgattctgtggatggggttggtgaagtgcttcagcctgattctgaagacagagatgtgagtcctgtaaattgggatactgatgcatcagaagttcatcctccca

SEQ ID NO: 54573 - DNA, 273 bp, Glycine max
cccctgcacaagtgagcgagacagacggaattaactttctgggagttaaaggtaaatgcttgtggccaattagaatagggtgcttaaatcccaaggaccaaataccaaagtggtcaatgaagacaatacaatgtataacagatgaggattattactttgtatgcgtggagatctttgaaggattaaaaagaattggaaagccgtctatccttctttccatacgcgaaggagtacaagcagtacatataatcatggggatgtagcaggcttgct

SEQ ID NO: 54574 - DNA, 270 bp, Glycine max
tccactgcgccaccgcctcattccatccttgacaatggcattaacgcaaggtcaattcacaatgtccttctcttcaacccatctctctctacctatcaccctgtctagctcctctgttgccttctgttaatgccattgtcaaggaagcaatgaggctgcacccagtggcaccaatgttggttccaagactagccagagaggactgcaatcttggagggtatgacatccccaaacggacacaagtgcttgtgaatgtgtggactattggga

SEQ ID NO: 54575 - DNA, 263 bp, Glycine max
tcgggtaccagctggtggtgtccctgggggacagttgatgactacaactgaagtggagaattttccaggattcccagatggcataagtgcacctgatctgatggataggatgcgacggcaagctgaacgttggggtgcagaattgtatcaggaagatgttgaagttattgatgtgaaaagtagtccttttactgtccaaagtagtgaacgtaaggttaagagccatactgtcatttatgctactggagctactgcaaaacgac

SEQ ID NO: 54576 - DNA, 283 bp, Glycine max
gttatggatcgaatcgaacacaagttcgtcaacgttggagatctcaagctccacgttgctgaaataggaagcggtgagaattactatacaccactgcattttcaataagttaaacactgttctttcttcttcttcttcttttttgtttcttcaggtggaagcgccgttgtattcctgcacggtttcccggagatatggtactcgtggcggcaccagatgatagccctggccgatgccggattcagagctgtctccttcgattacagaggctatggtctttccg

SEQ ID NO: 54577 - DNA, 290 bp, Glycine max
gaaatgttattgatccatataaacagagcattaggaaaacaagaagctttgatcacaaaatatgccaactccttggacactttcattttaacgaatagcaagaaacttcgatcacaaaatactgttttctggcactagaataacagtcaaatttaattatataatacttgggtacactggagatggcttcctttgtatccttcctagtgctgcttcttgcagcccttatcctcatgcctcaagggcttgctacttactacaaaccaattaagaagccaccagtgtacaag

SEQ ID NO: 54578 - DNA, 295 bp, Glycine max
attgttcattgagccaacaattttgttagatcctccgttagattactcagataatgtcagaagagatatttgacccactgcttcctataatcactatggataaaattcaggaaagtattgaatttatcaatgcaaagccaaaacctcttgccatctatgccttcaccaaagatgaaactttcaagagaaatattctatcagaaacatcctcaggaagtgtcgtatttaacgacacaatggttcaatttttatgtgatacactaccatttggaggtgttcgccagagtggttttgg

SEQ ID NO: 54579 - DNA, 247 bp, Glycine max
ctttgattttcttctgcaaccttatctactgcaaagctttgattcactgagtctaacttaccctgccacagtttgccttgtttacctgagctctgtttttaactggtctttgatcaaggatggccataaaggcaattgagttgttgaaaggaagcggaacccatgaagagatattagaagttcttgcaacagtggcagcatctgggggggatataataggatgtgagaacatttgcgggtaaccctt

SEQ ID NO: 54580 - DNA, 177 bp, Glycine max
taggagggagaactagatttatatttaggcggagtatcaatttggcacctcccttatttacatcgacacccgcatcaaaagtcactcaattcccatcagaacacataacacagcatttcccttagcgtaggaaatggaagtcaacatttcagcctgcaagtccgttagctcgccttc

SEQ ID NO: 54581 - DNA, 248 bp, Glycine max
aagcttccttgtatgcattggagagaagcactgagaaattaagtctaatgaaagtggctactgttatagtaagttgtgctggtagtggagctacaatccttgagcttagagggaaattggtggatcagatggagtggttgcctgtgtcaattgggaaattatctgatgtcactgaaatggacctatctgaaaacagactcatggctcttccaacaaccattgtggagaatacggccttaacaaagctt

SEQ ID NO: 54582 - DNA, 265 bp, Glycine max
attagacgtgatcaagacattacatgccggcttgacagctccaaacaggtaattcatgctgtttacaattcaatcttcttggagctttcaagcctgcatgtaatgtcttgatcacgtttaatgatgggaagaaccggaagcaggttccgtttaaaaaagaaaatggtcaaatggtcacagtcccactcttccaaagtcaagaaaacattggtgggaagattacaatagaaccaatgcaagggaagaagattgatcacaatggtgt

SEQ ID NO: 54583 - DNA, 144 bp, Glycine max
gtttaatatctgatatgtggaccattggttcacacgatattaaattacttttttaaaggggagagtccaaaacagtagcttgctactgggcctctcatgtgtcgcccttgcgttgcactatagcgtgggcctggcacaccctac

SEQ ID NO: 54584 - DNA, 251 bp, Glycine max
ggcaacatggaccaagagaagactcaagtctttcagaattccaagtggaattaatccagcttgcatctcagctcaatggtgattatgtactcaattcctatccaaacattggtaaaactatgacagtgaaagaagcaaacaggtacgccgaagacgcggtgaagaggttcctggaagctgcaaaggctgctcttaaagctggggctaatgagtcagccattgtcacaatgaggccttcctgcacaagcaga

SEQ ID NO: 54585 - DNA, 260 bp, Glycine max
  unsure (1)..(260): unsure at all n locations
cgcgggtgtccanttccattcccttgctttttttaaaattatatataaatattttgaatgtgtaaaacaaagcaagggaatggaagtgcacaccctcattccttgatagaatatgtatatattcactcatacatgttatatagcgacattaccatagaacatccatgcctagttactataaaaatataaacaagctgcctggctcagaaatcggtactaggaggaggtgctgaaaaggtttcgtgggtcccagaccctgt

SEQ ID NO: 54586 - DNA, 258 bp, Glycine max
caagagaagagatggtggataaacatgcagctattcggggtacctttggctatcttgaccccgagtatatatcttccggaacattcactaagaaaagtgatgtatacagttttggggtgttgctctttgaaattatagctggcaggaatcctcagcagggtcttatggaatacgttgagcttgtaagatctctttctctcccttcaaaccatattgaggacaatggttgtggttgttacttttgggagatatatagtg

SEQ ID NO: 54587 - DNA, 249 bp, Glycine max
gaacaagttcaacggcacgaatatcatgttgtttggagcgacccgagaaaactctgtaaacatgctggtttaccaggacctccctaacaggtgatgaagcactctccgactccttccgttacaaggaaattgagaatggaatgctgtgggaagttgacgggaagtgggttgttaaaggagcagttgatgtagacattggtgcaaacccttctgctgagggtggaggagaagatgagggagttgatgatg

SEQ ID NO: 54588 - DNA, 170 bp, Glycine max
cgtaatgtggatcttgaggtttaaatttatccgccagacagtactagatgtatgctacccgatggatgttgatcaacccattgatccaaatgaaccgacatactgtgtttgtcatcaggtatcttttggagatatgattgcttgtgacaatgaaaattgccaaggaggtg

SEQ ID NO: 54589 - DNA, 200 bp, Glycine max
attcaagaagcagtgttcctatatggggtggaagacaaagtgttgcagctgcaaactgaattgaggatgatgacgtcttacttgcaagatgcagatagaaagcaagatggtaatgaaaggctaaggaattggatttcagaaatcagagaagctgcttatgattctgatgatgtcattgagtcatatgcactcagaggagc

SEQ ID NO: 54590 - DNA, 264 bp, Glycine max
atgaaatcccttgttgccttctgacccttaccagatagctcaggctagattctgggctgactttgttgacaataaggtacccttctgttcttcaagctttttatgctttgattgttacttgtaattcctttaccattgattttgtattatgcatttagcgtttgatgatgtaatttggttgttttattcccatgttgctccctatttttaactcttacccgtatctagatgtagtatggactatgagatatgtttaatccaagg

SEQ ID NO: 54591 - DNA, 270 bp, Glycine max
tgccaaaaaggcctataaaggtatatatataccttcttttttttctgatcaggattcaaaccctagatcagttttaattagtttcctagttacattcatagtgtgcaagaatgggaaacagcttaaggtgttgtttggcttgtgttcttccatgtggagctctagacttgattcgaatagtccatttgaatggctatgtggaagagattacacgtccaatcacagcaggagaggttctcaaagcaaaccctaaccatgttctaagcaaac

SEQ ID NO: 54592 - DNA, 262 bp, Glycine max
gtcagttagttgcgggtcctctcctttcaataatacatttatacagtgtgtctgaagaaatgagagcaactcctatcaatacgttgaatccacgaagaactgcaatggttgtggctgattttctcaaggtctagttttaactattgtaataaataaaaaatctctcggtttctgttcattatttgaaaaaataacaaatgaaattctgtctaactgtttgttgaattccaacgcaggcaggaattgtatcaagccctgctga

SEQ ID NO: 54593 - DNA, 273 bp, Glycine max
gattatactgctctttgaggcaaatgcttgaggttggttatttccatgccgatcctcatccaggaaaccttgttgcaataaatgatggatctcttgcatattttgactttggaatgatgggggatattccaaggcattaccggattgggcttattcaaatgattgtgcactttgttaatcgtgattctctgagcttatctcatgactatctttctttgggatttattcctgaagggattgacacacattcagctactgatgcgctgcaagcat

SEQ ID NO: 54594 - DNA, 269 bp, Glycine max
aatgacaatcaggttgcagcaacttctgatgaaaaatcactcatgtcaagggtcaattctctctgctgtcttctgcagaaggaccctgttacagttcagaattctcattttactgaagataatactgttgaaggacctgatgatggaaaagatgtcaagcctgctgtggaggaatcaaaggacgcttctggaggcaagcaagcactaggcatgtctaggaaagactcgtttagtgatttgcttctccaccttcctagaatcgcatctct

SEQ ID NO: 54595 - DNA, 261 bp, Glycine max
gttgacgatggcgtttcgggtgcgaaccctgacctccgctctctctttcttctctctctcttgtccatcgcttccgccaatgtcttcttcgaagagcgtttcgatggcattacttttccaggatcaaggtttttacttcgtgtctgagcctcgatctgaaaagcttcgatggttcgatttgtgttttgagttggaaatcgagacgggtgggaaaatcgatgggttaaatcagattggaaaaaagatgagaacgtggctggg

SEQ ID NO: 54596 - DNA, 260 bp, Glycine max
tgtctatcatccgaagcaatctacaatatgctgccttgagtgctctgagaagactccctctggatcctgggaatccagcatttctgcattatgctgtacaagggatttcatttgctgatccagttgctgtgaggcatgcactggaaattgtttctgagatagctacaatggatccttatgctgttgcaatggccttaggaaagcatgtgcagcctggaggggctttacaagatgttctccacttgcatgatgttctcgct

SEQ ID NO: 54597 - DNA, 264 bp, Glycine max
cgtgcttcttactgtaaccattattgggaggaacaatttagaaagatacatgttttggagttttctcgagatcggaaaatgatgagtgtcctttacagccggaaccagatgcatgttttgttctcaaagggtgccccagaaagtataatatctagatgtacaagcattctgtgcaatgatgatggttccattgtgtcacttaccgctgatattcgagcagagctggactcaaggttccacagttttgcgggaaaagaaacatta

SEQ ID NO: 54598 - DNA, 294 bp, Glycine max
agtacgatctcggtgacgagatcggcggcaaaccgggggattgtagtgcggaggctggactggcggaaggctctgtgagcgacgcgcgataactgagagaatgttcagcttaatggacgggtatctgaagaacgatcctctcaatctgcaaaaggatatactgaatcatgttgagtacacacgtgcaaggtcacgctttaactttgacaattttaaagcgtatcaggctttgtcacacagtgtaggatacaggttgattggacgcatgcatgatactcatgtttacgtcaagag

SEQ ID NO: 54599 - DNA, 225 bp, Glycine max
gctggggtatcttagtgtaacttctggggctagtcctgtgtctcgtaagatagggatagatagcactgtgcagggtctggttgacgagtttgaggacgaatgccatgcctgtgaaaggtggatgtgatgtctaagctgcggcagcgattgctgctgtgaatcatgagttgactaggcaaatgattccgcgaacaattgatatagttggacctggtggtgtgttgt

SEQ ID NO: 54600 - DNA, 275 bp, Glycine max
atgggacctgctgtctttgagcagatacaacttaatattggaaatcctgataagtctattatattacggtcttccagctcaagggttgagtttcctggatatcgggcagtttttacggacattgttactgaagctgttcaagataaagacagtgatgaattcagccgtgatcaaacatttggagtactaaattccttgaagacaggggatccattacatgtggttcagactgaacctaatcagcaccatacacaaccaccaccacggtactctga

SEQ ID NO: 54601 - DNA, 271 bp, Glycine max
ctatttctaactaattattgtgcttattattattgttgagaaagaaaagaatggcaaagttaataaaattctttgagttgaacacaggggccaagattccttctgttgggttaggcacttggcaagctgagcctggtgttgtagccaaagctgtcaccacagccattctggttggatacaggcatattgattgtgctcaagcgtataacaatcaagcagagattggttctgctcttaagaagctttttgatgatggtgtggtgaagcgtga

SEQ ID NO: 54602 - DNA, 215 bp, Glycine max
ctcgagcgattcggctcgagcggctcgagctcgacgcttactgcatgcttctgttgattgccaaaagaaacttgtactggactgacttccagctagcaatcttgaaactgcaactgcaaaagggaatcatgatgcttataaggctgcttggaagttattgaagggtgctgatggtgttcttgttcctggagggtttggggatagaggagtgcaag

SEQ ID NO: 54603 - DNA, 273 bp, Glycine max
tagatcttatggattatgtgaaggaaagatgtgagataggtgaagctttggatattggtgaggcttcctttacaactgtgcttaattccatatcaaacactttcttctcaatggatttggcttattacacttctgataagtctcaagagttcaaggacatcgtttggggtatcatggaagaagctgggaggcctaatgttgtggactttttcccaatctttcgcctgcttgatccacaaggtgtgcggagaagaatgaatggttattttggaa

SEQ ID NO: 54604 - DNA, 274 bp, Glycine max
ggcacggatagtttcttctgtattgcaaactgatttatagtcagaacatgttttgatgtcagataaacacaatatagagaatgaacaaaataatcagcttagaaatcaagttgcacaacttttacggttagagcaggatcagacattgcagatacaagagcaagattcaaccatccaaagtttgcaggctaaaattagactcttgaaactcaactcaatgcagatattaaatctagtgaatctaggtcaacattgtctccgagccagatttgct

SEQ ID NO: 54605 - DNA, 280 bp, Glycine max
cttcgttgcttggtgatgtccctttctgttctcttcactcttggtcttgcgagagaaagccatgccagagacgaagatttttggcatgctgtttggccaaacactcccattccaagttcattgcgagatcttctaaagcctggccctgtaagtgttgaaatcgatgatcaccctatgcaaattgaagaaacacagtacccgtaaaccttcttctataaagaagaccttcatccaggcaaaacaatgaaagtacaattcagcaagcctcccttatcaacaa

SEQ ID NO: 54606 - DNA, 288 bp, Glycine max
cttttacatcagatacataaaggaattcctataataggagctggtgctgggacaggtatatctgccaagtttgaagaagctggaggggttgatctaatagtattgtacaattcagggcgcttccgaatggctggaagaggttcattagctggattattaccttttgctgatgctaatgctgttgttctcgacatggccaatgaagttttgccagtggtaaagaaggttccagttcttgctggtgtatgtgcaactgatcccttccgtcgaatggattacttacttaaa

SEQ ID NO: 54607 - DNA, 275 bp, Glycine max
ttaagtgcaggaaactatcaactcatgagaaactggcacttaagaaaaatttaagcagactgaatggtggcaatctcctcaaggcaatgagcataattcatgagattgacccaaccttccaacatgatgctccacaggtcgaccttgaccttgatcgtcagagtgacttcatactgtggaaactaaacctttttaccaaagaagcactggaagatcaagacaaagctgctgctgaggagatggctgttaaccacaacgttaacactgaggaccag

SEQ ID NO: 54608 - DNA, 144 bp, Glycine max
ggccgcccttttttttttgttttaaattggtaaatatggaacaagggcaaaagatttattaaacccggtaagggccaacaacgtaggtacgtggagtgccttgggggacttacccacttaacataaagtgcctttaccaaacat

SEQ ID NO: 54609 - DNA, 268 bp, Glycine max
actggcttctaacgcctcctggtactcctctttttccttctttggaaatggaaagtcgaaagactgttatgagtcagcttggtactccaaccacacgtcctgtagcattaaaatccaggttggcaaatcatcaatcagagcctgctgggaggactaatttagtatctaaacaacctacttcctctcctgggttgagctcttcaagtggtgggactaggaggccttcatcatcagggggtccaggatcacgacctgcaacacctactgg

SEQ ID NO: 54610 - DNA, 267 bp, Glycine max
cttctctttgtgttcctaaaaaacacacagcacaagtagacaaacacaaaggaacaaattgcaagttgagaaaattaacatggaaaacagtgacatttcctctgccccactttctcactcccccactaattcctcttcttcctcaccaacaccaccttcacctcctactgttgtgatgagtccttgtgctgcatgcaagattttgaggagaagatgtgctgagaaatgtgtcttggcaccttattttcctccaactgaacctgccaa

SEQ ID NO: 54611 - DNA, 267 bp, Glycine max
gctgattggtaatatgcagacatatctccaatcaactactgttcgcttagaagagtggagggtgaaaagaactgatacagagcaatggatgcatcacaggcaactacctccagagctaagagaatctgtgcgtaaatatgaccaatacaaatggctggctacacgaggagtagatgaagaagctcttctcaaaggacttcccgtggatcttcgtagagacatcaagcgccacctctgtctcgatctagttcgaggagtgccattatt

SEQ ID NO: 54612 - DNA, 265 bp, Glycine max
cttagtaggtcttatgatgaacatgaggagcaacatggatgacaaaacttgtcgctgcactttgcagcaaactagataatggttctaggagaaagctgtatattgttgatgcacggcctaggaaaaatgcattggctaatggtgccatgggaggtggttcagaatcatcatcaaactattttcaatctgagatagtctttttggggatagacaacatccatgcgatgagagagagctttgttcggctccgagaatacatggacac

SEQ ID NO: 54613 - DNA, 268 bp, Glycine max
gatgtatttaacaagaactatgacttcccaaagcctaatttgaatccacttgtcaagttactagcaactggccttgcaggctatgaaggagaaaagtggagcaagcacagaagaataatcaaccctgctttcaatttagaaaaattgaagatcatgttaccattgttcctccaaagttgcaatgatctggttagcaaatgggaaggaatgttgtcttcagagggatcatgtgaaatggatgcatggcctttccttcagaatctgacta

SEQ ID NO: 54614 - DNA, 261 bp, Glycine max
ggcctctatgggcctcaaagaagggcccattttcttctttgctattgggctggcccactacatagtcatgtatgtgaccctctaccagagacttccaacaaatgagacactcacaaaagaactccatcctgtgttctttctgtttgttgcagcaccaagtgttgcttccatggcttgggccaacattcagggttccttcgattatggatctcggattgcctatttcattgccctctttctttatttctcattggctgtccg

SEQ ID NO: 54615 - DNA, 273 bp, Glycine max
gtttgttggatcaagctggagaagagtatggcttcaaacagcagggaactctagcagtcccttgtcggcctcaagaatgctggattagccaagtagtctaactcaacaacaaaccttttgatttctccatcttttattgcatcaacagcaaaataccctttactaacaacatcttcgggcacaacattcgttgtagtttccacttgattttcattgaagtagttgagtcccttatatatcgaacatggctaagtatcattcaagtgggaaaag

SEQ ID NO: 54616 - DNA, 271 bp, Glycine max
agggtctttgcttgattttggagatgtctctgctctcagatctcatcaaccttaacctctccgataccaccgagaaggtgatcgcagagtacatatggatcggtggatcaggaatggacctgaggagcaaagcaaggactctcccaggaccagttagcgacccttcagagcttcccaagtggaactatgatggttccagcacaggtcaagctcctggtgaagacagtgaagtgattttatacccacaagccattttcagggatccattcag

SEQ ID NO: 54617 - DNA, 266 bp, Glycine max
aaacaagtggttttgccccgtgttcatggattagcacttaaaacaacagttgcgacggttagagtcaatgcgctgttgtgcctaggagacatggttaatcaacttgataaacatgctgtcttggacatcttgcaaactattcaacgctgtactgctgttgaccgctcccctccaacccttatggggtaccctaggggttgcaaattctattttcaagcagcaaaatagaagagaaccgaggagtggctgtgactgattctggaacg

SEQ ID NO: 54618 - DNA, 253 bp, Glycine max
agagagcgcgtcttaataaacgctcttctctgaaaacccccatttcttttcttctttcttcttctctttcgcttcttcgatcttcgatcttcgtcgctgaaaatgagagagtgcatttcaatccacatcggatacgatataaagaaagttggacacgcctgctgggatctttactgccttcgttacggcatgcagcctgatgggcagctgccaagtgatcaggtcgcttgtggatgtgatggtgctttcaaca

SEQ ID NO: 54619 - DNA, 285 bp, Glycine max
cgacggaggtccgtgagaagtggatgcacgccagcgccgtcgtcggggagcggatctacgcgatggcagatcgcggtggcatcgcctacgagcctagcagcggcgcgtgggagagcgtgggggtagaattggaccacgggtggagggggagggcgtgcgtggtggaagggattttgtactgatacgattattaggggaaaatcaaagggttcgatgtggggcgcggggtgtgggaggacttgaaggggttggagaagggtttgcccacgtttctgtgtggggcta

SEQ ID NO: 54620 - DNA, 290 bp, Glycine max
ggtttctcatgtgggaagagagaaattgatgttggctcctggacttataagtgccttggcttccactctagacactggtgagcccatagagcaggagcaagctgcttcttgtctcctaattttgtgtaacaggagtgaggaatgttgtgagatggtcctgcaagaaggggttagacctgcattggtgtcaatatcggtgaatgggacctcgagaggaagagagaaggctcagaagctcttgatggtcttccgagagcagcgacaacaagaccattcacctgttaagactg

SEQ ID NO: 54621 - DNA, 282 bp, Glycine max
tttgcttcttgaggccaacaggctcctgagggcgggtggctactttgtctgggcagcacagcctgtttacaaacatgaagagacccttcaagaacaatggacagaaatggagaacctgacagctagcatttgttgggaacttgtacgaaaggagggctatattgctatatggcggaaacctttggacaatagctgctaccttggtcgagacattgatgcgcatcctccattatgtgagtccaatgatgatcccgataatgtttggtatgttggtcttaaggc

SEQ ID NO: 54622 - DNA, 281 bp, Glycine max
cagatggtcgtaattgtgcattaacaatagatggggtgccaggcaatcagaattctccaacttagagacttcacaagtgtcattagtcttttgtgtgtgcttgccatcatctatctccaacttctgattttcaagctcatcagtaacaaaagattcgttggtttcatctcgagttattacctcttttaccgaaggtataaactcccttccatgcttcggttcagatcaacattgggcatgtggatgagaatggcgtctacaatggccatttctccactttt

SEQ ID NO: 54623 - DNA, 249 bp, Glycine max
ctcgattctgttcaaccatgcgttggtatttggagtgataactgttcatcaaggtctcgcataagatggacgttcattctggcaggatctcgaatgatatatctggctgtgatattaatcggatgttctgctgagaatggatatgtattacgtgatacacatgagtgttactgagcatttaaagggttccgaacaagggctgctcgtgtatgtatacttgggttctctatgcatgaccttgctaacaac

SEQ ID NO: 54624 - DNA, 287 bp, Glycine max
gcagtaccggagcagaacggtgttcgaagacgcgagtcctgagttggtgagggatttcttttgggatgatgagttcaggttgaagtgggatgacatgcttatacatgcttccaccatacaagagttagagctcactggaacaatgatggtgcactgggtgcgcaagtgacagagagtatataattgggaggcgaatttgggacgcaggacgaatttatgactgtgtcactaagggagtaccttgcacctccatgccaaggcataataaatctaaacgagttgattta

SEQ ID NO: 54625 - DNA, 148 bp, Glycine max
gaagatggtgcgctgctgtcggtgcttcgcctgagtctcattccgtttgcgccactatcacaggttgtgctgaggttactggttctgaagaattcagagtttatcaggacaatggtatatggatcacgggtgactctgaagttaatat

SEQ ID NO: 54626 - DNA, 283 bp, Glycine max
gcagatgcttcgggaaatgccccaggccgcatcgaagttggtggtaaacctcctgaagtgaaggaacaattacctatcaaaagatcaaaaggaagtgctagtggtggtaatttgaatatgtggattacagggaacaataatgaacctggtaaaataccaggagaatctgctaatgggattcattccacaagtggtgagagtgcaagtgacggaactagtgaaggaagtgatgagcactcccagaatgattctcacttgaaatcaagggagaggcaggactctt

SEQ ID NO: 54627 - DNA, 146 bp, Glycine max
cagagaaatccttcatgttcaagctggtcaatgtggacaccaaattggatgcaagtgtttggatgagatgtgtgattagcaatggattgatgtcacttgatattacatatgatactagtcattacaatttgtgtgggttaacgtgt

SEQ ID NO: 54628 - DNA, 292 bp, Glycine max
tctccagccgattcggctcgagatcgatcacgccctattttctgatctaacttctgtagataacgcaaacgctctcataacaacgggcctcattagccccaacctttctcataactggcaccactattgtcggtttagttttccaggatggtgtcattcttggttgctgatactacggcaactgaaggacctatagtggctgataaaaactgtgagaaaattcattatatggcacccatcatatattgctgaggagcaggcacagctgctgatacagaggctgtaacagaca

SEQ ID NO: 54629 - DNA, 186 bp, Glycine max
ctgatgaaccacatcgaggaattgaagttcgcgtcgaaatcgctgcagcggcaatcgcgtaagtgcgaggaggaggagaaatcggacaagcagaagatgaagaaggcggtcacgaaaggctgcatggccggaacgcacatctacgcggcgaaagcgatccgtgagcgccacggagcagatgaacta

SEQ ID NO: 54630 - DNA, 291 bp, Glycine max
atggaagctaagactaagccttggctggacctatctcttcttctattggctgcatattgcatgcaacaatgtgtccatggacaatcgcagcaaacaccttgcatgttcatctttggaggctatttatctgacaatggaaataacaacaaccttcgaacatattcaaaatccaattacagaccatatggcatctacttcccagcaggcacaactggtagatttaccaatggactaacgcaagctgacataattgctgagcttttgggatttacggaacgcatcccacccaat

SEQ ID NO: 54631 - DNA, 281 bp, Glycine max
aaggttcagtgttgccaacatcaccttcagggggaagcacagattccttaggtgcaagcagatcaactccttcagtttctggaataaatacctctaattttgcttctcgaagtggctatgctttattggatccaacatgggctgcacaggacaatacctccacagccattgggaatgtggtggccttgcttcattccttcttcagtaaccttccacaagaatggcttgataggaccaatgttattatcaagcaacttcggccagtaacatcagtcagcatg

SEQ ID NO: 54632 - DNA, 289 bp, Glycine max
gaccttagattgttttactgttagcaccattcctaggtaccatctgcaccagcctttctccttcttcttcaatcagtggcagcaacctcaacatcagtcttctactcaaatctccattctctcaaccctcaacctttctcttcctcactctccttcttcagaaatgtccattgcaacctctcattccctacctcttctaaaccctcacgtggagttgttgccatggctggatctggcaagttctttgatggtggcaattggaagtgtaatggcggcagagactccatca

SEQ ID NO: 54633 - DNA, 284 bp, Glycine max
aaaaaattgaatattcacttgagaaaacaaaggattcaagcctacctcccatcataaatgccattgaaatttacagagtaataaacttccagcaatcagatacacacctaggagatgttgacgcgattgcaaccatcaagtcagtttatgggatgacaagagattggcaaggtgatccatgctcccctgtagcctacttgtggaatggtttgaattgtacttaccgcggaaatgagaacccgagaatcacaactttgaatttatcttcaagcgaattgtcagga

SEQ ID NO: 54634 - DNA, 268 bp, Glycine max
caaacttctaaatctcttctgccatggtccgaggatctaaagatcgttggaagatgcatagattccatagcttctaaaactagtgtggacccagcatacatcacttggtcttacacttgtaataggaaattaaccgaacctgataaaattgtagaggacaagatgacatttctagagaaaattgagtctgttcctaaggattggtggggtgaagacatatgtgagctggacattgatctttacaaacgagtaatggttgctgtggaga

SEQ ID NO: 54635 - DNA, 249 bp, Glycine max
gaagctctctatttggctttacagtcatcacagacactaaaggagaggaatattttacatacaaatggaatagccctgaaaaagtgaggtttcagataacttgggatgggtttgagaagaagttcgtgttggatgcagatgggaaacaatggaataggacacagtttgagccttttgatgactgtgagaagtataacttttgtggtagttttgcagtgtgtgatacgggtaattctcctttttgtagtt

SEQ ID NO: 54636 - DNA, 242 bp, Glycine max
tggaacttgaaaccttgcagtgtttacagacactaacagagcacacatctgttgtgatgtctgttctctgctgggaccaattccttttatcttgttcattggataaaacagtgaaggtatggtatgctactgaaagcggcaacttggaagtgacatatactcacaacgaagaaaatgtatttgttaatttaattactttttcccctggatagttgtttctattttaatatgatattgcttgt

SEQ ID NO: 54637 - DNA, 280 bp, Glycine max
tggattcccttagtaacggcgagcgaaccgggaaaagcccaccatgaaaatcggtcgccctcggcgtccgaattgtagtcgggttgtttgggaatgctgccccaatcgggcggtaaattccgtcctcttcggcgccgactggggctcgatcgacctctccatcaacactgaccccaactccgacgaagacgccgtcagcgccgtcaacagtaacgaccacgccaacgccggcaacagcaaacgcaagctcgaggacgacttcgacgccttcacggcgtcg

SEQ ID NO: 54638 - DNA, 267 bp, Glycine max
gcggccgtaagataaataattgaggtcaatagaaataaaatcttgtcgccatctcttctctcttttcgccggggaattgcttacaagctttttgttggagctagcttcttgacactaggattgtccttctacaccacagagaatgcattatcagaggcattctccaattacgggcaagttattgaagccaaaattgtaacagatagggtgtcagacagatctaagggatttgggtttgtcacctttgcttctcaagacgaggctgag

SEQ ID NO: 54639 - DNA, 265 bp, Glycine max
ctttatgcaagatatgcttgaaactgcatcaatattaaagggagctactgacaagtccttgataatcattgatgagttgggacgtgggacatcaacttatgatggatttggtttagcttgggccatttgtgagcatattgttgaagtaatcaaagcacctactttgtttgccacccactttcacgaattgactgcattagcccttgaaaatgtaagcaatgattcacagaagcaaattgttggtgtggcaaactatcatgttagt

SEQ ID NO: 54640 - DNA, 280 bp, Glycine max
ggatcatcgagatttccgacacgcaccgccgcaacccggaggggagaatgccgtccttctcgccggagcaggatgcgctgctgctgatccacgagcggattctcgagagcgacgctgccttcggggtggcggaggaggacgaggagtacggcggaaggggcggcggaagggaccgcatcgcgacgaggctggtggtgtcgcggatgcatgtggggtgtttgttggggaaaggagggaagattattgaacaaatgaggatggaaacaaagacgcaaattag

SEQ ID NO: 54641 - DNA, 285 bp, Glycine max
tatcgagccgaatcggctcgaggaaaatttgccccaagatggttacaccaagagacttcttagaggggacttggacttgagtattaggaaggaggctcttgattggatttggaagaaggcaaaagttggagtatgcaactgttagctgtagcatgtttgtcaattgctgccaaaatggaggagattaaagtgcctccttgtgtagatttacaggtattgtagaatcttactacccaagattgtcaaatatacttttgggttggcatctacattttcctctgattt

SEQ ID NO: 54642 - DNA, 265 bp, Glycine max
ctaaaagagatctttttctgctctttgaagaaagaagggtcattgcttgattttggagatgtctctgctctcagatctcatcaacctcagccaacacgatgcaaccgagagggtgtcgacgagtacatatggatcggaggatcaggaatggacctgaggagcaaagcaaggactcacccaggaccagttagcgacccatcagagcttcccaagtggaactatgatggttccagcacaggtcaagctccaggtgaagacagtgaag

SEQ ID NO: 54643 - DNA, 276 bp, Glycine max
gtttgttaattctctcacctgaaaatgtattgctgcggtggtaactgtggttgcggaagctcctgcacttgaggcaacggctgcggaagctgatagatgtacccagacttaggtacactgagtcaaccaccaccgagaccttggtcatggcagtggcacctgttaaggctcaatttgagggtgctgaaatgggtgtgcccgctgataacgatggctgcaaatgtggaccacactgctcctgcaacccctgcacttgcaagtcaggtgttgggagag

SEQ ID NO: 54644 - DNA, 277 bp, Glycine max
taatctctggagatgcacgtcgtgtttggagatatgcagacgtgcagccgaaatagcagattatcgtgttaagaagctaatttctaatcctgattgtgctactgcaggaaagcggacttgttggaatggtagatgttgaggcagccattcaagaaatgttccaagcacctcatattcagatgatgaaaagctgttccagagttggcaaaattttcctgaccgctatggtgcacgactttataattcaggaatgggggaaacacttttgaaaattggc

SEQ ID NO: 54645 - DNA, 213 bp, Glycine max
agggtttcaaaagatggagaacatgcagagcttctggcaattgggcgatgaactccgtggacactcaaaagcatcggaggatcacaaatggttaatggttgcttcgaaattggcggaacagacaagattgaagggggagcgtgtgaacaaccttgatctttcaaagggccccattgaaacaaggtcaagggataaatttgggttccaggaaga

SEQ ID NO: 54646 - DNA, 293 bp, Glycine max
ctgtagactgtagcaaacaccatgaccaccaaggttccaaaatccgtatacgactttgttgtcaaggatgctaagggagatgttgtagatctctccttttacaagggaaaagtccttctgattgtcaatgttgcttctcaatgatatccttaatctgtgctgtgtttgttacttcttctttttttttccctgattgtgccttctaattaatttaaagccttgatattttcatcttttctattcttttcagtaactactctcacagctaatgttataaatgttgagaaaattta

SEQ ID NO: 54647 - DNA, 229 bp, Glycine max
tgtggagcacaaggttgtggcaaataacaaaatggaaagatactccatagcatatttcctatgtccttcttacagtactgtcataaacggctgcaaaggaccttctgtttataggaagttcacgtttggagaatacagacaccaaattcaagaagatgtcaagaaaataggacacaaaattggactatcgaagtttctactttaagatacatgcgcacattgggataaa

SEQ ID NO: 54648 - DNA, 281 bp, Glycine max
ctcgagcgcacagttactcttgtgaattagcgagatttgaagcgagtgctgagtgcgaatgaagagaatcgaatatttgttggaggtttatcctgggacgttacggagcgtcaactcgagcatgcctttgctcgttacggcaaaattctcgaatgccagttgtagaagcatgggcaacagacgtgccatcttatatactgacaatgcatttgaatgtagctgaattgctcaagaaatgaaagcatgatctccataatggagtgctgtgaatgcctgtcttg

SEQ ID NO: 54649 - DNA, 290 bp, Glycine max
gcccggcactgcaacccatcccaccaagattgtagctctttatatttccccgaagcttgtaatgattgatcttgctaaagatcttctccaagccaatcccaactcctatgcattggtcattagcatggagaatatcacgttgaattggtattttggaaacgatcggtcaaagcttgtctctaattgtttatttcgtatgggaggagctgcagttctgctctccaataaaagctcggatagaagaagatccaaataccgattggtcaccacggttcgcactcataagggtg

SEQ ID NO: 54650 - DNA, 289 bp, Glycine max
agaacctttgctttcttttcctagggccggtgtcagtccagtactgtggttccaattacttaatgctttagatcagcatgggttgcctttgctctctcctgtgaaggttcatttacagactctgcaactagtgttctcgagaattttgctctcccattaactatagaagacatatacgcatacagcatcgattgaaaaagcttgataaggattctgataaaaatagggatcttttaggggcatattgggataagctctccgtagaagaggcaaaggaagttgtgtcatt

SEQ ID NO: 54651 - DNA, 277 bp, Glycine max
gcgatcgcgaatcaatcggagttcaatagaagggcctccaaaatcggctacgggattcaccaaacgtctcagaagctcgccaaactcgccaaattagcgaaaaggacttcggtttttgatgaccctactatggaaatccaagagcttacgggggttattaagcaggatatcactgctctgaactctgctgttgtggatcttcagttggtgtgtagctctaggaatgagactggaaatgtttctgccgatacctctagccattcgagcacggtggtcg

SEQ ID NO: 54652 - DNA, 267 bp, Glycine max
ccaagttcagcttccaatacaaggggacaatggggttgctcaatcgcctcctgttgttcttcctccaagaaattatacaagtaatggttttcttagagtttcctgcaatgggggcttgaatcaaatgcgtgctgcgatttgtgatatggtaacagttgctcggtttttgaatctcacattggttgttccagagcttgataagacatcattctgggcagaccctagcaattttgaggacatttttgatgtgaagcatttcattgattc

SEQ ID NO: 54653 - DNA, 279 bp, Glycine max
  unsure (1)..(279): unsure at all n locations
taggctccatctccctccactcaacataaaatataaaaaaaancttatgcantnaanacnatcgtctgtgtaaatgtaattgacaatagctacattagtgctaatgaccccttgaactgaggtgcggcggcggaggctatggctgggagccacctcgacgaggtcaagcgcatgctagaggagtaccggaggcccgtcgtcaagctcggtggagagaccctgaccatctcgcaggtcgcggcgatcgcggtccacgaccacggggtgaatgtggatctg

SEQ ID NO: 54654 - DNA, 273 bp, Glycine max
ctcgagactgattattgtgcttattattattgttgagaaagaaacgaatggcgaagttaatcaaattctctgagttgaacacaggggccaagattccttctgttgggttaggcacttggcaagctgagcctggtgttgtagccaaagctgtcaccacagccattctggttggataatggcgttttagatgtagtcaagcgtataacaatctagcagagattggttcagctcttaagaagctttttgatgcttgtgtggtgaagcgtgaggact

SEQ ID NO: 54655 - DNA, 273 bp, Glycine max
gcttgctttgaaggtcaatagtgcagctttcaatggggatatgtatcagctaaaaggtttaattcgagcaggagctgatcccaacaaggcagattatgatggaaggtcacctttgcatcttgcagcatctagaggatatgaagatatcacaattttccttattcaagaacgtgtagatgtcaatattatagataacttcgggaacacacccttacttgaagcagttaagaatggacatgatcgggttgcttctttacttgttaaagaaggggc

SEQ ID NO: 54656 - DNA, 272 bp, Glycine max
ggacattttcagacatgagggtacacttatattatacagaggcagaaattataatccgaaaaagaggcctgtaattcctgtcatgttgtggaagccccatgaacctgtatatcccagactgattaagacaacaattgatggcttaagtattaaggaaacaaaagaaatgcggaagagaggactatctgttcctgctttacacaaaacttgccaaaaatggttattatgcttttttggtacccatggtcagagatgatttcctctcctgcgaa

SEQ ID NO: 54657 - DNA, 267 bp, Glycine max
ctcgagccgcagagtttccatatcattgaactcagatgtagacctttatgtttcaagagttgaaagggtgccaaaaagctcactgccactgatatgctttagagatggcagccctcctctgccagatgctttaaacacttctctgaaggattcagctgtcaaaggaataaatggtcttgatgttgagcagtgctttcctatggagaaaaatatcactatgagattgacaaatgagcagatatctccaggtgcttggtacattggtct

SEQ ID NO: 54658 - DNA, 276 bp, Glycine max
acaggctgtggtattgacccaagtaaatgggaatctgtgtttgaaagctttgagcaagctgatccatcaactactagactgcatggaggcactggtcttggtctttgcatcgtccgaaccttggttaataagatgggtggagaaatcaaggttgtcaaaaaggagggctcaggaacactgatgagattatgcttgcgtctcagtgcacctgtggatgccacagaacaacattgtcaagtagattttgctaacaagggcttggtggtgcttcttgca

SEQ ID NO: 54659 - DNA, 265 bp, Glycine max
ctcgagccgattcggctcgaggaggaccccaaccagaggtcaaggcgaaaaaagaatgctgccagtggagagaattcagaatctggagctgcaggccaaggagcaggtgaagggaaaaaggctctgtaccactgcaattattgtaataaagatataacaggaaaaatccgtattaagtgtgccatgtgcccagattttgacttgtgtatagagtgcttttctgttggagctgaggtgacacctcataaaagcagccacccttaca

SEQ ID NO: 54660 - DNA, 259 bp, Glycine max
gccgcttcagacggaggcgctggttggtgatgacgggaagcttcatgtgacggtgaggaagtcggcgagttctcggtcggagattttctctaggcgctctcatgcacccaactcggtgtcgttgactccgaggccttcgaatttgaccaatgcggagatttactcgctgcagagctcgaggaacccgactccgagaggctcgagttttaaccacacggatttttactccatggtgaatggtaagaacaacaacaacaac

SEQ ID NO: 54661 - DNA, 218 bp, Glycine max
atcggtgttcacttgatctcatcataatcgtcagcgtcgattgaaaaagatgccgatcagaaacatcgccgtcggaaggcctgaagaggcgactcaccccgacacgttgaaggcggctttggctgagttcatctcaacctgcatctacgagttcgccggctcaggccccggcatcgactacaacaagctcaccgccaacggcgctgcaacccatgccg

SEQ ID NO: 54662 - DNA, 238 bp, Glycine max
gctccctgaagagagcgtatcgtggcggttgcagaagatgatcgcaagatgaagttcaacatcgcgaatcccaccacgtgacgtcagaagtagctcctaatcgaagacgatctgaaactgccagcattttgggaacagattatctcacaggaggacaccggacaggcactctgtgacgcatttaacggcaatgtcatcataattaccggaggttacgacaaacaaggatcgccaatga

SEQ ID NO: 54663 - DNA, 253 bp, Glycine max
  unsure (1)..(253): unsure at all n locations
ctgaagatgagagggtgctacacatcagcggtattctacgtacatgcgattccatngngcangctancaaaggttccctctccgattgaaaactgtctatggtgagcgttcttcggaggtaaaatgcgcaagttttaggcttgctgtggaagcacacaacatccgatcctttaaaaccattcctgaagagtgcgttgaaccaacaaaggactacattaatggcgaacaatttagatcagactctaaacagtta

SEQ ID NO: 54664 - DNA, 125 bp, Glycine max
gcacgcattcgtgagagaactcaatattcgtcgctcatggcactctcttctcgtctcttttccaaatccaaattgatctgtggcagtcaaatacttctacaaaaggagcatgctattccagttcg

SEQ ID NO: 54665 - DNA, 267 bp, Glycine max
cgtcgagcgaatcggctcgactatatccctgtgataaactggcttctcttggctcttgccctggtgcttgtctgcaatatatctagcattgacgagattggaaatgcctatggcattgctgagcttggggtgatgatgatgaccactattttagcaacccttgtcatgctgcttatatggctggtgcacatcatcattgtgctgagttttgtggtagtcttcttgggattggagttgacttttttttcgtctgtcctgtggagtgtg

SEQ ID NO: 54666 - DNA, 277 bp, Glycine max
  unsure (1)..(277): unsure at all n locations
ctcaaaactgctctcgaggcaatggtttcaagtcacgaagaggttaccctaatgggagtaattgcaagcgcatttgcttgcagggtgaagattgacctcaagttgaagggagtttaatagagatatnaaggtgaaaatttgaggaacaatagtgaactgcttctcaaatccgaaccagttcacaggaagattccagtgtttattcacaatgagaagcccatagcagaatcccttgtgattgttgagtacattgatgagacatggaagaactacccca

SEQ ID NO: 54667 - DNA, 212 bp, Glycine max
taggtacctcccatcataacaattaagttatctactcaggtttactcgaacatgaatgtccaatagctgcctagtctatagcaacgccgtgagtgactggccttaaacgctggagcataaattaaagctggaatgcacgacatcgaactatggtgtcgtccgtcaacagagcagtttgctgcaacatctttcgatgacctcaaacacatacg

SEQ ID NO: 54668 - DNA, 266 bp, Glycine max
ctctgctctttgccttctgtgacacatttggtgccttgtagagcgtgttttggcaggaaggtggtatggcgaaggacgttgaggttgctgagcgtggctccttctctgggaaggactaccaggaccctccaccagcaccactcattgatgctgaggagctcacaaagtggtccttttacagggctctcattgctgaattcattgccactttgctcttcctctacattactgtgctcacagtcatagggtacaatcaccagactgac

SEQ ID NO: 54669 - DNA, 258 bp, Glycine max
cttacaacaaatagggtgcctctatagtcggggaaagctccctagttgaagataggaatagacttcgtcagtgttgaaatcacgagaaattgatggctgctccaccggcaagagctcgtgacggattacgattatctcataaaacttctcttgattggcgatagtggtgttggaaagagttgccttcttctacgattctctgatggttctttcacaactagtttcatcacaaccataggttaggattttaagataaga

SEQ ID NO: 54670 - DNA, 260 bp, Glycine max
cggctcgagggaggtggggagggtaaagctatgtacatagatgctgagggcacatttaggcctcagcgactcttacagatagcagataggtttggattgaatggtgttgatgtattggaaaatgttgcttatgctagagcatacaatactgatcatcaatcacggagtctgcttgaagcagcttcaatgatggtggaaactaggtttgctgtaatgatagtagatagtgctactgccctctataggacagatttttctgg

SEQ ID NO: 54671 - DNA, 264 bp, Glycine max
ctaatttcagaaaatattcttttgtgtttcctcttatcaaccatgcagtctacatcaaagtacattactgggactttgagtctgcacttccggaaaatattgactaaacttatccattctcgctattttgagaacatggtgtattacaaaatatcacatgttgatggtcgtataactaatccggaacaaagaattgccagtgatgtgccaaggttctgttcagagttgagtgagattgtacaggatgatctaactgcggtcact

SEQ ID NO: 54672 - DNA, 259 bp, Glycine max
cgagaatgcccgaaactcctcgcagtgtgactctatgctcattggtgacaatgcagctgcaaatacctatccttacattcagcaagaatcgaacatgaagctagtacgtccaaaattggtgaagatcaattgttttattttcagcaaaggggaatagactatgaaaaagcaatggctgctatgatctctggattttgccgtgatgtctttaatgagctccctgatgaatttggttctgaggtgaaccaactcatgagct

SEQ ID NO: 54673 - DNA, 256 bp, Glycine max
gattggaagaagtaggaaatcatgggtgggatagtttcctcccattttagtctgaatacaggtgatgataggatgagagaaagtacttagtgtcattataatcagagaaaagggttatacactgtcagtgtaaatatttttacatagtcatccaattacaacctatcatggatacagctggccaggaaagatttagaagtcttattccaagctacattagggactcatctgtagctgttattgtatatgatgttgc

SEQ ID NO: 54674 - DNA, 247 bp, Glycine max
cacatttttatatatggtcaatacatatattattgtcccaacagcagatgactattctatgagccttggggccgcgccaacagtttgtgggattgtgattggggcaatggctgttgcacaagtgttttcatcagtgtattttagtgcatggtcaaacaagtcatactttaggcctcttgtattcagtagcatagttctttttcttggaattatcttgaatgcattggcatatgatgttagttcaata

SEQ ID NO: 54675 - DNA, 256 bp, Glycine max
ctcgagccgaaaaaatgaaagaccttaaaaaatacagagaaatgtgggagcatcaaaacgttggtttctacgatggcttcagggagcacaataaaaaagaggacttcaaggcaaatgtgacaaggctagagttggcaagtgtgtgggacgagatcatggaaaagctaagaagttaccaactcccagatgagtttgaaggcaacaaagaatgggtagatcttggatcaaggtttcgacaactaatggagcctctaga

SEQ ID NO: 54676 - DNA, 196 bp, Glycine max
taccactctcagtccaagggactgcgtatttggtgattccgttcaacaggtttagcattattatctgaaatggcatcggtgtctagtcagcaacagttccgttacacgcagccaccgtcaaaggttcttcatttgagaaatttgccgtgggattgtacagaggaggaactaattgagcttgggaagccattttgga

SEQ ID NO: 54677 - DNA, 172 bp, Glycine max
ttggtaggatgctccttcttgaaatgctctctgaactcggacatgaaaacgaagaaagcgcttggaggtctcttcgttttcatgtccgagttcagagcgctgttcaagaaggagcatctaacaacaaatccgtcgctgttgtcggcaaagctggtggtgaaaaatggaaatc

SEQ ID NO: 54678 - DNA, 284 bp, Glycine max
attcgccgccgaagaattcaaagtcccgccccagaccagcgctatcatcaccaatggcaatgtcttccttaaacatggttcagaattgcgcctgattccgcgcgatagggttggtgccttttagatgttacagatgtgtctgactggagttggtgccttttagatgttacagatgtctgactggatattgacccttctcgctagatacatgaactgtagcttcatatgtagtaatcaataaataccattgttactgatttcatatattgatattgagatcaaag

SEQ ID NO: 54679 - DNA, 277 bp, Glycine max
ctttaatgcagtcttgcttgactttgctgactgtgcttttgaggaacactaaaatttctctcacctcagatcaaataagtttattaattcatcttcctatatttcttgatcttgaaaaaaatccatcgttggtggccctgtcacttctaaagggaattgtcagtcgcaagatggtggtacctgaaatatatgatcttgttactacggttgctgaactgatggtgacaagtcaaatggaacccgttcgcaaaaaatgcagtaaaattctgttgcagtt

SEQ ID NO: 54680 - DNA, 144 bp, Glycine max
gggacattgagttcactgataattcatgctggattcgtagtagtaagttccgagtggcggtgagggtggcaccggggactaatcaaggtggtgttcggattcgtgaagccatatctgaggcgtttgctgtcaaggatcaccgtg

SEQ ID NO: 54681 - DNA, 269 bp, Glycine max
gtgtacatggcctagagatggccctggatgaaatatcacatgatttggcagtttcaggtggcagggtttccaatattgatgccacagaagacacttgttgcaagctacctggtactgactttttgagttctaaattctggaagaagacagaaggtcgttattccacatcaaggttctctttaggaagcataccatcaacagatgctgtgcatattgcaaccaataaagatggaaaaagagaaatattaactgcaaataacaatagattg

SEQ ID NO: 54682 - DNA, 286 bp, Glycine max
gaaattgagttaacttctggttgtttccaggaacatgtttagatcctgtagcttcggtttgtagaaggattgatgggggtcctgctgggactagtattctagagcgcatatatgaaggagtgaatgtctactacaattatactggagaagctaaatgttttgaactggatgatgatcctcatggcatgagcggttgggaatggcaggcttgcactgaaatggttatgccaatgtctagcagccaggagtccagcatgtttcccccatatgagtataattacacttc

SEQ ID NO: 54683 - DNA, 280 bp, Glycine max
cgtgaacgtccacatcgcttatggtgcgtgcatcaccatacagttcgtcaccaacgtgatcatccatgggttgcatattcatgactgcaaggtgactgggaacgccatggttcggagctctccttcgcattatggttggaggacccttgctgatggagatgggatctccatctttcgctcgactcatattttgattgatcataacttgctgtcgaattgcgctgatgggcttgtggatgctgttatggggtccactgctattactatttccaacaactac

SEQ ID NO: 54684 - DNA, 281 bp, Glycine max
cgagatggctcggacacagagaaataaagccacagagtatcatcttgggcagctcaaggctaaaatagcaaaattaaggacacaattattggagcctccaaaacatacattcttagaagagagaacaatgacaaatgcctagccagaggcgattggtggctttcctctgtctatgatctcggtttccccagtcttggaattcttttaagaaggttctagtggaggtggagaaggatttgaagttacaaaattcggtcatggacgtgttgcactgattggat

SEQ ID NO: 54685 - DNA, 127 bp, Glycine max
cttacgtgggaagatcgcaaccgtgaggctgccatcgccaccgctgatactccttatcaggccgaccgtgttcttcacatgttaattgtagctgtatgtacggacactccgattccttgtacagtgg

SEQ ID NO: 54686 - DNA, 277 bp, Glycine max
gctccatccggcagtgatccagttgcaattgacttcacggggatgggaaaaggtgaggcttgggtgaatgggcaaagcatcggacgatactggcctacatatgtggcttcagatgctggttgcacggactcatgcaattatagaggaccttacagtgcatccaaatgtcgcaggaattgtggaaagccatcacagacactgtaagtgttggatatcataaaagagaagagctgaaaaatgaagataatcttgagtttatgatgtcactaagacactt

SEQ ID NO: 54687 - DNA, 271 bp, Glycine max
aacgtctcctccgctgccttggtgggagacaacgcttcggccacgaccactttgccaattgactcaggtcgatacaatcctcagtttctaatcttcatttttctcagattttagattttccaatgcgtttgaatcccttttcgatcattttcagatgctagaatcggagaggttaaaagggtcaccaaggagaccaatgtatcagtcaaaataaacttggatggttctggggtggctgatagtagtactggaattcccttcctcgatcata

SEQ ID NO: 54688 - DNA, 272 bp, Glycine max
gaaagatcaaaattcctcctaagataccacatactgttgcagatttgactggagagctaatgcgtttagcaataggtaggatatatcagatggtgaacttgagtttgctgagaagatatgcagatttgtgcgtgatatatatacagggagcttacacttgtagtgccacatctggatgtcagttctgatatgaaaacaaagatggatatgatgctccaaagtgtcatgaaaatagagaatgcttgctttggtgttcatgtgaaagggtcaga

SEQ ID NO: 54689 - DNA, 273 bp, Glycine max
aaaggcgtgcacgtgaagccttcaagaatattcagcttggaattgatcatatattatttaagactccatgtgatggaataaaaatggaagaatcatatgagaagaactcaaagggcctagaaatcttctgcaaaagttggcttccgagtgcatctaagccaaaagcagcagtgtgttactgtcatggatatggagacacttggtcctttttctttgaaggtattgctagaaagctggcatcatctggatatgcagtttttgccatggattatc

SEQ ID NO: 54690 - DNA, 276 bp, Glycine max
ccaggagatcccttcacttcaactggagtacctaaccaactttattgccgaattatctctcttggagtacagtatgttgagttatcctccatcactgatagctgcttctgtaattttccttgccagatttatacttttcccttcaaagaaaccatggaattctacattgcagcattacacgctctaccggccttctgacttgtgtgcatgtgtaaaagatctccatcgtctttgttgcagcagccatgattctaatttacctgcaatcagagataa

SEQ ID NO: 54691 - DNA, 275 bp, Glycine max
gattaagccatgcatgtgtaagtatgaacgattttgaagaacgaggtatgctgtggatgtctacacacgaggttcagggtaatttggttggtgggccttaaaatgtgagagtttggcaggttttttctctcctaataatgatgaatcaaacatgtatgagtgaggggaagccacaatcattcttattgtacccgtctttttttttttcctattcatcttttgtttttcaaacattcagtatacaaattcggttgtcttttcctttgtacagtttg

SEQ ID NO: 54692 - DNA, 268 bp, Glycine max
atttggggtaaggtcaccaggcctcatggtaacagtggtatagttcgtgctaagttcaagtccaatctgccgcccagatcaatgggagcaagggttagagtcttcatgtatccaagcaatatatgagtgatatgaatggaataatcaatggaaataaaagtattatacttcagttatgatggggccgtggtagaaagtgatgaataatgcaggttctcaagactcgtgagtcgtggagtttgtttgtcagggtattgataggaattat

SEQ ID NO: 54693 - DNA, 272 bp, Glycine max
gctttctatttcgcggaccaaatgaaaatcatgggtttgcttcctgatgttttctagatcaatgatcagttgtctcatgttctatgacataggttactttatacaactttctgatttcgacttgtgggaaatgcaagaactcgaattaggctattcagattttggaagagatgaaatgcatggaagtaaagcctaatatacaaacatacatctgcttgctaaatgcttgtgctgctgatggacgcatagaccgagtgtatgcaattgttcgt

SEQ ID NO: 54694 - DNA, 272 bp, Glycine max
agggtccatggtcgccggaagacgacgtcattctgagccgtctggtgagcaagttcggcgcgagaaattggagcctcatcgcgcgcgggaacagcggaagatacggcaagtcgtgccggctccggtggagcaaccagctcgatcccgcagtcaagcgcaaacccgtcaccgatgaggaggaccagatgacagttgctgctcatgcaatccatgggaacaaatgggcagccattgccaggcttctaccaggaagaacagataatgcgattaag

SEQ ID NO: 54695 - DNA, 268 bp, Glycine max
attggccgatggtgtgcaggggttgctccagattggggagcttgctgaggctgtcagtgtttttctggaaggactctgctctgaggggttttcagtccttcattaggtttggtccagtgttgcttctgcttataatgtggagctgctttcttagtctgacttcgatgtattgtctggtttacgtgcttgttagcatgggtgttgctggagtagctgtccaatacttgggttatactcctgggcttttcattgtgggactttttgccat

SEQ ID NO: 54696 - DNA, 256 bp, Glycine max
ctcgagccggttattctggaacagcaattatctcaaggatcaagccactttcagttcgatatggtctaggtataccagatcatgatagtgagggtagacttgtaactgctgagtttgatacattttatttgatatgtggatacgtccctaattctggagatggcttgaaaagattgtcttacagggtgactgaatgggatccatctctcagcaattatttgaaagagctggagaagtcaaaacctgtaattttgac

SEQ ID NO: 54697 - DNA, 259 bp, Glycine max
ctcgagcgctcgagccgatgcacggcccctggttgctcagtgagaaaacacgttgcgcgagctacacatgacatcaaagctgtgatcacaacttatgaagggaaacacaaccatgatgtacctgctgcacgtggtagcggaaactattacatgaacagaaattctctgaacagcagcataccagcacctataagaccctcggcagtgaattgttattctaactcatcaagtttcacaaactctctctataataatacta

SEQ ID NO: 54698 - DNA, 258 bp, Glycine max
atggcgcctcccattcccaaagttctcatggtcgcagagaagcccagcatcgctctctctattgcttctgttctctctcacgctcagatgtttacgagaaggggaagcactgaagttcatgaatttgatggcaagtttcttggatcgcctgcacattttagagtaacatcagttattgggcatgtattcagggttggggcagtttatggtgcaaaccatgctatttggtcttgctgcacgttacttgttacacctgta

SEQ ID NO: 54699 - DNA, 247 bp, Glycine max
tcctatttgtcgtaagctgtcgtactttgtcattccaagtgtcatttggtactcaacaactgaagaaaaacaagaaatcattaacaactacaaggcaaagctcaagtcaattgattgcaagcactttgactttggggaaggaaactgcccttttggaactagttgtttctacaagcatgcatttcaagatggccgtctggagcaggtagttttgcgacatctaggggctgcagagggtgatactgta

SEQ ID NO: 54700 - DNA, 246 bp, Glycine max
tgtggataggatcaatctagaatcctgggatggagcagctaagaattctgcaaagcaagaacctaaccctcttttagctgttttgaaagtttttgttgatgcttttgtgaaattttggtcagggtgaagatattaatgtttgtttctttctcttctgttgtgttgtctatgtatggtgatggtggagttgattttttgtacctaacagaataattttgatttagccttgatcatttaatgagctcg

SEQ ID NO: 54701 - DNA, 246 bp, Glycine max
gccccactcaaccaccacacctctcctcgttcacgctacccctttctgctcttcttctacctttcaagttttaaaagtataaagatggcagagacattcctatttacctcagagtcggtgaacgagggacaccctgacaagctctgcgaccaaatctccgatgctgtcctcgacgcttgcctcgagcaggacccagacagctaagttgcctgcgaaacatgcaccaaaaccaacttggtcatggtc

SEQ ID NO: 54702 - DNA, 245 bp, Glycine max
caagactggtaaagaaggttgggtttctcttggagggatacttctttgtatcactggaactgaagctatgtttgcggatcttggtcatttacttgctttgtcaataaggcttgcgtttgcgtttgttatatacccgtgtttggtggtacagtacatgggtcaagctgctttcttgtctaaaaacctcggctctgttgctaacagtttttataactcaatacctgaccctgtgttttggcctgttt

SEQ ID NO: 54703 - DNA, 278 bp, Glycine max
agaggcagctaagtgttgtgatgacactcctttgttgtgttcattttcatgtccaatgttgtgatgaagttgaagatgcaatcagcagatctgacttcccagaagggttcctcttcggaacgagcacttcctcttaccagattgaaggagcaccttttgaagatggtaggggtttaagcaactgggatgtttttagtcatacaccaggaaagataaaaaatgacgagaatggtgacattgcagatgatcattatcatcgctacttggaagacattgag

SEQ ID NO: 54704 - DNA, 280 bp, Glycine max
gcacttggtggcaatcgtgatgtggcaggaagccagaacagccttgagatcgatggtttagctcgctttgctgttgaagaacacaacaaaaaacaggtttttctttcttttttcccttaaaaaagatgaaagaaaatgttaattatgtgttgtattgcattgtttgcttctcgagaaattcctatgatttgttttgagttgttaatttgtattgggtcaggccgatgatcggttttggccatgttaacgtttcttcggaaatgcacatcttgaattggat

SEQ ID NO: 54705 - DNA, 280 bp, Glycine max
gcctttttggcatgaacatatagcatgtgcgccgtgaggtcaatcactgtcagttcttctttagaaattctcgaacatgatgacgagctcttatcggcttgaggcttcttttcaagctgagtcgaaatttcataagagaagaaagaaagtagaaaggatttggattcgaggcttgctaagtgaagtcaacaagcaaggaaaaaaagctttctccgagaaagcgtctgttcacgtcagggtccggggtaggcttcttcttcgagattggcttggtcttcag

SEQ ID NO: 54706 - DNA, 276 bp, Glycine max
cttcacgaagaaagtactacagaaactgggtcttggtcaactcaggcagcagagtctaagaatgaaaaggagtctcaagaatcctccaagcaggcaactggatacaagtggaagctttgcaatgtcactgctggtcctgattttatcccatgccttgacaactggaaagctattaggagtctccggagtactaaacactatgaacatcgagaaagacactgtcctgaagaacctcctacctgccttgttcctgttcctgaaggatataaacgccca

SEQ ID NO: 54707 - DNA, 284 bp, Glycine max
tggagggtggaagatcatcagtttcaaatgggaatgttgaggttcgttatagagggattagaagaaggccatggggaaagtttgcagcagagattcgtgaccctacaaggaaaggaacaaggatatggcttggaacatttgacactgctgaacaagctgcacgagcttatgatgctgctgcttttcattttcgtggccacagagcaattctcaacttcccaaatgagtatcaatctcataatccaaactcttctttgcctatgcctctagctgtgtcagctcct

SEQ ID NO: 54708 - DNA, 267 bp, Glycine max
tctcgagccgaatcggctcgagccagcacaaccatatccagaaagatttgcattgagttttggaattgttcttttggaactacttactggcagaaagaatcttgatagccatcaccccaaggaagagaggaacttagtcaagtggagccggcctttcctggccgatgattttcgactgtcactgatcatggatcctcaacttaaaggtcactttcctcccaaagcggcaagaacgatggctgacattgcacaaagatgcctccaaaa

SEQ ID NO: 54709 - DNA, 269 bp, Glycine max
gtttgcggctgaggattccgaacgagtgaccttcttcgtttctcgcaaagtttaagtaatcatgggtaaggaaaaggttcacatcaacattgtcgtcattggacatgtcgactctgggaagtcaactaccactggtcacttgatctacaagcttggaggtattgacaagcgtgtgattgagaggttcgagaaggaggctgccgagatgaacaagaggtcattcaagtatgcctgggtgctcgacaagctcaaagctgagcgtgaaagag

SEQ ID NO: 54710 - DNA, 255 bp, Glycine max
ctcgagccgtgaagtctgctatgtgtgcagtggtggttgtagcacttcttcttctggcggacgtggggcccatggctgaggctgtgacatgtaccccaacagagttgagtccgtgtcttccagcaatcacttccggtgctaaaccttccaatgcttgttgcacgaagctgaagcagcaaaaaccatgcttatgtggctacctcaaaaacgctagcttgaagcagtatgttaactctcctaatgcccgaaaaaccg

SEQ ID NO: 54711 - DNA, 270 bp, Glycine max
caaccacctctttcaattctctcctctcttattccaaactcaaattagaggaaaaagggtcaaataataattaagtgtaatatggatacgatcagtgttcaggcgatgagaagcttatcagatagtgactcattatcatctgcaacatatgcaagtgaagaagatatgaaaattaagaaaggtccatggactgaggaagaagattctgttctgatcaactacgtcaacttccaaggcgaaggttcatggaactccctcgctcgctctgca

SEQ ID NO: 54712 - DNA, 264 bp, Glycine max
ctcgagcccttttttgtctcgctctctctggtgttatcagaatccgactagattaactgttggtgcatgtgggtttggttctttggtgctacagtcaatggtggagatgtatcagctgcatcttctctttatcgaaatggtgttggttgtggtgcctgttaccaggtgaggtgtaccaacagtgtatattgctcagaaaatggtgtgactgcagttataaccgaccaaggttcaagtgataacactgatttcattcttagcaaa

SEQ ID NO: 54713 - DNA, 263 bp, Glycine max
ctagagagctgtggtttctctgctaccattggaatggatgttctcaaagataagtgtctgatatctactttggaaggtaaaattgagatgcatgatttaatacaagaaatgggacaagaaattcttcgtcaagaatgttgccataatccaggaaaatgcagtcgattgtggaaggttgaggaaattcatcaagttttaaaagataacaaggggacagatgcagtacagtgtatgtttctagacacaaggaaagtcaatgaagt

SEQ ID NO: 54714 - DNA, 265 bp, Glycine max
atatattagtatcgagacttccatgaaaaaaaaagtataaaaaccagtacataattagataccacaaaacactaaacatcacaacttaacccacactcaatagtcttggaccaggacctctccgaccgtctcgtccccgtcctcgcttcagcagcacaacaagaccaaaccctcgatttccaagacatcctccaacgtttcgcgttcgacaacatctgcaaaatcgcgttcgggtatgacgccgagtacctgacgccgtcaactg

SEQ ID NO: 54715 - DNA, 190 bp, Glycine max
agaggttccaacattgagcttttgctagacattccaaatgacaacctcagaaacctagcatctagccaagacaatgcaaacaaatgggtgcagacaacatcaaaaactatgccacaatgtcagttcagtaggcagggaatgatgaccgaatcattgaatctatgcgatgaaatcaagcatcatggctgac

SEQ ID NO: 54716 - DNA, 278 bp, Glycine max
aaaatcacttgaaatttccagaggaggtcagattgacacccgaagccaaggatctaatatgcaggttgctttccggtgtgccacataggcttggtactagaggagcagaagaaattaaagctcatccttggttcacagatgtcatgtgggacaagctctatgaaatggaggcagcatttaaaccacaagtcaatggagagcttgacactcagaattttatgaaatttgatgaggttgaacaaccaaaatcaactagatctggatctggacccttcaga

SEQ ID NO: 54717 - DNA, 272 bp, Glycine max
atccctttggggaggctctgagactagccaagcctctcgagttagagatgaagaggagtttcctcaagggcagatcttggataatgttgacttgagagcatttactttggcagaattgaaggcagccaccaaaaatttcagagctgagactgtgataggagagggggggtttggtaaagtatacaagggcttgattgatgatagagcagcaaaaaaaagaggtgaggggttgactgttgccatcaagaaattgaattctgaaagcacccaag

SEQ ID NO: 54718 - DNA, 261 bp, Glycine max
agttcccaaaggtattgtttatgggaagcccacaaaccagggagttacccaactgaaatttcagcgaacaagaggtcagttgccgaggagcgagctggacggaagctgggtggacttagggtcctcaattcttactgggtgaatgagcttgtcatggtgtttcaggactctacttataaatactttgaggtgattctggtggatgttgctcatgctgctattagaaatgatcccagaatcaattggctcgccaatccagtg

SEQ ID NO: 54719 - DNA, 257 bp, Glycine max
gtggaagctggtttggctcctcttctgttgaagttgttgtcatcgagtgattcgttgactcaagagaatgctgctgcagcccttctcaacctctcaaaatgtgcaaagagtagaagtgtgatggttgagaaatggggtttggaattgatcattgatgtcttaaggaaggggctgaagattgaagctagccagcatgttgctgctgtgttgttttaccttagtgccgagtatggaaacttgataggtgaagagccaga

SEQ ID NO: 54720 - DNA, 257 bp, Glycine max
aatggcttcagctaaaaggtggcttccgctcgaagctaatcctgacgtcatgaatcagttcctttgggggcttggacttcgagaggatgaggcagaatgctgtgacgtttatggcttagatgaagagcttctggaaatggttccaaagcccgttcttgccgtgctttttctttatcccataaccacccagagtgaagaagagaggttgcagcaggaaaatgaaaaaaagcaaactgtgggtaatgcttgtgggacaa

SEQ ID NO: 54721 - DNA, 256 bp, Glycine max
ggggaggttatgaagatgtcaaatatgttggtcgtgctccctctgcagccacagctactggtttcctcaaggttcaccttaacgagcaggctgagctagttcagaaagccattcaacgtgagccaatcaatttcccttactgaggcatagcatatactttgtttctccagagtgatgaaggcaataattggagggtagcttacaaacacaattcttaatatttgcttttcacctttatgtgttctggttttgacaa

SEQ ID NO: 54722 - DNA, 255 bp, Glycine max
ctcgagccgtgatctcccaccaggttttcgattctacccaacagaagaagaattagttttcttctatctacacaaccagctagaaggccaaatacacgacacaagcagagtcattccagtcattgacatcaatggcgtagagccatggaaccttccatcacttgcaggggagctttgtcgtggagacacggagcaatggtttttcttttcaccgagacaagagagagaggccagaggaggcagacccaacagaac

SEQ ID NO: 54723 - DNA, 250 bp, Glycine max
ctattttcctattgttcctcttctcgttcggatcttccactactccaaccaccagttggagaaaaaaggttcgtgagccatgccagaagtaagttttttactttcacgacattatatacaatggtcacaactcagagaatgcaactgcggccattgtgggtgcacccacatgggccaatagaacaatcttggctgggcagaaccattttggtgactcgccccaagttggacgcgctcagggattttacat

SEQ ID NO: 54724 - DNA, 258 bp, Glycine max
ttctgcaactaagaggaacttgaattataggttggttgctgtaacatgagacgtgctatgacaaatgctgctaggtcactcactaagcccggcttggaggagtcacaggagcaaatccataagattagaatcaccctttcctctaagaacgtcaagaatctcgagaaggtttgtgctgacctggttcgtggtgccaaggacaagcatctcagggtgaagggacctgttaggatgccaactaaagttcttaacatcacc

SEQ ID NO: 54725 - DNA, 256 bp, Glycine max
tgaagtacttaagagagcaatccacacagctgttgctatccttactgccctaatggctgcaacaaaagcaaccaggtcttccaatgttattcttgtaattgtgattggtgctcttggtttgtttattggatggttgatagaaatctcaacaaagtataggtccctttccttttcaattggaatctcatttaatttctctcactgtggctctataatcttgtcaagacacttttgagacggtaccactgggcatttg

SEQ ID NO: 54726 - DNA, 262 bp, Glycine max
ggcacctttaagcatagttatgacatcactgtccactgcttctgcagtttttgtcacgccactcttattactgttgctcattgggaagaaattgcctatagatgtaaaaggaatggtgtataacattacacagattgtggttgtgcctattgcagctggcctgcttctaaatcgattctttcctcgtatttgtaatgttattcgaccatttttgcctccgctatctgtactggtggcatctatctgtgccggagcgccactt

SEQ ID NO: 54727 - DNA, 257 bp, Glycine max
atggaaaaacaaataccatttattgggatattgagcaacaaagctgaggaaaatccagattttttcaattggaatagaataaaaatccgttattgcgacggtgcatcatttagtggggacagtcaaaatgcgggagcagggttatatttcagagggcaacgcatttggcaagctgctatggaagatttaatgtcaaaagggatgcgctatgccaaacaggctcttctatctggatgttctgctggaggtttagctac

SEQ ID NO: 54728 - DNA, 265 bp, Glycine max
atccctcccaatgataccggttttcaaaagaaactcctgtatctggaatccatcggtattgactctttcttgcttattgaaaaccatccaacagtgatcacaacctctcttgctgacataagatccaccgtggagtacattacctccttggatttcactgcaattgagtttcggcgtatggttggcatgtgccccgagattctgaccacccaagtctcagacctcatacctgtcttcaccttccttcatcgtgaggttcatgtgc

SEQ ID NO: 54729 - DNA, 283 bp, Glycine max
ctcgagccgatcgatacgcgctgtctcacttatgttgtcgctgcgtctcgtacgtcgccctgtgctctccactctgcaccatgtccgtctagaaacgatagatacgacccaggatttactcactcacaatctcgtccgagtcatgccgaaacgtacgaagaaatggttcagtgtattaagatagtagcacaacttgatcttagtctgagtgtgtatgacaggatacttctctcagtgggatacgttaatgtgattggttcacgacgggcctcttggcgcgtaa

SEQ ID NO: 54730 - DNA, 266 bp, Glycine max
ctcgagcgctttgaaattaacttttgaagggaaaaatcagttaatctacccagagacatggttttttatgttagttgtggctatatgtgtcatcatgcaaatgaattatcttaataaggctcttgacaccttcaacacagcaattgtatctcctatatactatgtcatgttcacaacacttacaatactagccagtgtaataatgtttaaggattgggatggccaaagtggtggaactattgtgtcagaaatatgtggcttcatcg

SEQ ID NO: 54731 - DNA, 270 bp, Glycine max
ggttattcgcaccgcaaacaaacagtgagccatggccgtcggaaagaacaagcgcatctccaaagggaaaaagggtggcaagaagaaggcagctgatccctttgccaagaaggattggtatgacattaaggccccttctctttttcaagtgaaaaatgttggcaaaaccctcgtctctcgtacgcagggtaccaagattgcttctgaaggacttaaacatagagtgtttgaggtctccttggctgatcttcaaggggatgaggatcatgc

SEQ ID NO: 54732 - DNA, 290 bp, Glycine max
gctggccccctctggtggggtggtgttggcttctcgtgatggaaagattgtgtgcgaaaatactcttgatgcacgacttgatgtagtgttccgtaaaaagcttccagaggggaaggagagagccaggaagggaatgttggattaagggttgccaaacttcttcaattaaaactactgtgaacttggatgtattgctgtcactacaaataagatccgaaagcagctactttggacaagttgttgtttgaagattttgattgtatggtttggttacccctgaaatgtttata

SEQ ID NO: 54733 - DNA, 275 bp, Glycine max
ggatgatacttgtttttttttttgttcacaaaggggtgtttttggtggatatgttgagaggtgctggcaacttttgcttagttcatgtcagccttgttcctgttttgaatgttgttggtgaacagaaaacaaaaccaacccagcatagtgttcgtgcactgcgtggccaagggctgactccacatatcttagcatgccgcagcactatggtcctggatgagaatgcaaagggaaaactctctcaattttgcctaattccggcagaaaacattgtt

SEQ ID NO: 54734 - DNA, 269 bp, Glycine max
tgaagccaaaagggtagaatgtgatgagtcaaattggggaagcaataataataataatgacaacaggttttcaggaaacacaatccaagtgcaaccaatatgtttcagagacatggggactgagatgacaccgattactagccaagagccttcaagaactgggacaccaattagagccacaactcctgctactagaagcccaattacattcagggacttcaactccaatgaggggtcaaaatgggttgcaacaagttgctgagggtggc

SEQ ID NO: 54735 - DNA, 277 bp, Glycine max
cttgatcgtgcacgcacatatcaggttcttcgtgccaatgatgctcagtttgaagtgatatctcacgaaggaacaaatatagttgatatcaggaaccgttgctgtctttgccgtggctggcagctctatggtttgccctgtgcacatgctgtggcagcacttctctcctgcaggcagaatgttcatagattcacagaaagctgtttcactgttgcaacttatcgcaagacgtactcacaaaccatacacccaattcctgataaatctctctggaagg

SEQ ID NO: 54736 - DNA, 267 bp, Glycine max
gcaaaagctagttcaattggagccaaagggattatgtatattagggctttacaatggaattgtcatgcgctatgtcaccgcttcaagtgcctacttgggaaagcaggaggatgctttagaatttgatttcttgtactaccgtagcagagacccaatgactcccaggctttatgaagacattcttgaagaggttgaacaacttgggatttttaaatatggaggactacctacattggggtaagaataggaacttggcatttcaaggag

SEQ ID NO: 54737 - DNA, 273 bp, Glycine max
ctcgagccgcttaaggggatcataaaaggaactgggtatttgtgttcatgtgacaactgcaaccagtcaaaggcacttaatgcatacgagtttgagcgtcatgctggtgccaagacaaaacatcctaacaatcacatatactttgagaatggaaaaaccatctatgctgttgttcaagagctgaaaaacactacctcaggatatgctttttgatgctattcaaaatgtgactggctctaccatcaaccaaaagaactttcgaatatggaaagc

SEQ ID NO: 54738 - DNA, 269 bp, Glycine max
gtgttgtcccctatttcatcttcatcatctacttctccatctgactttaaacttggtgatcacaattctaatgctcatgtcaaataggcaggtttattaaaaactcaaaggccaagcctgaaaggtggcaaagaaatcaagcagcacagatatgcatttcaaacaaggagtcatgttgatatactggatgatgggtaccggtggagaaagtatggggagaagtccgtgaaaaacaataaatttcctaggtttgtcttacttcattaatt

SEQ ID NO: 54739 - DNA, 268 bp, Glycine max
aatcagctatggcaggcattcgaatgatagatatagccgtcaacttcaccgatggcatgtttatgggaatcttccacggcaagcaatgtcacgtctcggatattgcaactgttttgaacagagcttgggctgccggcgtcacccgaattattgtaactggtgggtctctagaagaatcaagggaggcacttgccattgtggaaacagatggaagacttttctgcacagttggagtgctaccaacacgttgcaaggaatttgaggagag

SEQ ID NO: 54740 - DNA, 269 bp, Glycine max
  unsure (1)..(269): unsure at all n locations
tctcgagccgattcggctcgagtgttgatcagttcaaacagcagtattctcatctcgaggaatatggtggtaattgntatccaattatgccacttgaaagaaagcatgcatcacttccaaggtcaacaatggtacattcaaatatggtaccctcgaaagagcaatcaaacattgcttcctgcataaaccggcagacaactggggaatttaataataattccagggatacagaaagtcctgcgccaaggtctattccgggtctgcaaaaa

SEQ ID NO: 54741 - DNA, 256 bp, Glycine max
  unsure (1)..(256): unsure at all n locations
cgctcgagccgaatcggctcgagctgttccacgcactccaaaaccattgcatgagcaggggcncgcgatttccgctccagcagtccaggcgcagggtgtgggatagccagcaatccggccattcaggacgaactcaatggcttctcagcctctaaaggatgacactgatgcagaagccaagtctggatgacgcgatgttgaagtcagcatggaaggcgccccatacgtgacgcatgtggatctgaacagtgatacc

SEQ ID NO: 54742 - DNA, 130 bp, Glycine max
cggcgccctcgaacaattacccgagtcggttgtaaggcctctctttctgtcaaaatgcaagactctggcaagtggatcgtctctggctttgttagagaacataatcacgaactcgttccacacaacatag

SEQ ID NO: 54743 - DNA, 249 bp, Glycine max
tctgaaggggagcaggttcccaatgataagcttgtggatttggtgcatgtgaatcttgggtggcttttatgagcctgtggtcactacttttgctgggctgtatcgataccgcgttggtgacgtgcttcaggtggtaggattttacaacaacgccccacaagtccgtttcatctgcaggagaaacgttgtgatcagcgtcgacaccgagaagaccaacgaggaggacttgcacaggggcgtgacaatggc

SEQ ID NO: 54744 - DNA, 253 bp, Glycine max
acgaaacgcgcttcatcagtcaaaagccaccaaaggtgatgttatcaagtatggaagttgtggcacaatcaatgggatttaagacacatattcgcaactataagatgagaatagagagtatctcaacaaataaggcttcttatttctcagttatactagaagtctttgaaattgctcctacatttttcatggtggatattcagaaagcagctggagatgctggtgaatatctcaagttttacaagaatttttc

SEQ ID NO: 54745 - DNA, 254 bp, Glycine max
gcagctttggtatgctttaggcaagatgagagcagagaaggctgcttggagaatatctgatgaaaggggtttgaagctcactactatttgtccagctctaattacaggtcctgaattttgtaacaggaatccaacagcaacaattgcttatctcaaaggtactacttactattgaccaaaatcagtggtccaatttcttgtactatgtgatattgatataatatgttgtaaagtccacgtggtttgtctcaatt

SEQ ID NO: 54746 - DNA, 259 bp, Glycine max
actgtcttggttgacaacgttgatttcttggaagaactgaagtgaagagcaagctttatatgacataagtagtcctgctgcttttgtatgaataagttgtctcgcattttatcattgtgcgttttgtatcagtaccagtcatcaacttgttttcttgcttttatgggttcttttgttgacttaaaaccgcaattcatccgccaggaagctgaggaaaagccaacgagatctctgtctccgccgaagaggaattcaatat

SEQ ID NO: 54747 - DNA, 257 bp, Glycine max
gttagcttatgtttctcgtgagtcgagggtggttggtgctggagatttggttgaccatccaaagaggattgctcttcattacctaaagggttatttccttattgacttatttgttgtatttcctcttcctcagataatgatattgtttgtcctaccaaattccttggagggagcaaattatgccaagaatcttctccgtgcagcgatcttagtgcatatatccccaagttattcaggtttctgccactgctaattgg

SEQ ID NO: 54748 - DNA, 270 bp, Glycine max
aagaggatatatgatatggtcattgttggacaactttgaatggacaagtggctatgacataagatttgggctatattatgtggacagaggcactcttgaacgaattcctaaactttctgttcaatggttttctagtttcctcaacaacagtagccaccccaacataacagaacacttgagcaagcaacatattgaaagcaaagatgtgagaaatgttggttttgattttatttgaactatcccgtcaaacacggttaacattttcttact

SEQ ID NO: 54749 - DNA, 233 bp, Glycine max
gttgaagccgtttgcaaccaatcattagtgctgtgtatcagagatctggaggagccccaggcggtggtggtgcatcaggcgaagaagacgaggacgattctcacgatgagctctagattagtcggagtctgttaaatttttatgatagctgggaattaagaagttcccctcgcgcttggcgttttttgagtgggcgatcgatgaagagtacttgtgtggaaattgacttggta

SEQ ID NO: 54750 - DNA, 276 bp, Glycine max
cataacctcgaactcgagccgaatcggctcgagctcgagccagatttcacttcaaagtggcagacggcttgcatgtgagtggaacacaatgtgtctatacctttatggggatgagcagcttgcagtggatttgctagctaatcagcttctttttgaggcctaaattactctcatttctgcaagtatgcttgctctgaagaaaatcctgagctcttggacatggggacctcagttgaaggtggatttagtgttgcatttgatccccttgatggctcc

SEQ ID NO: 54751 - DNA, 266 bp, Glycine max
  unsure (1)..(266): unsure at all n locations
ccgccgcataagcctccctcaaaaactacgcatctgnattagctgatgccaaaaagacggctgtaacggctatggctgttgagagcgtcgttgagtccccagtgaagaggcagagagatgatgatgaagaaaatgaggtctctgtttccatggatgtggagggtggcaaagaccctgcttagtaacggtttattctctgtgattcctgggtggttctctgaaattagttcaatgtggcctggagaggctcactccttgaaggtgga

SEQ ID NO: 54752 - DNA, 255 bp, Glycine max
tcttgaatcttcgttatccttctttttgtctccttgaactcgagtattcactatagcagatgaggtggttctggtaggattccgggcaagtccatttggggattagggtcaggtttcaccttgtggaaaggggagtcaattatgattccaagcaggaggctttgaggaccaagagcctttgctcctcagaatgaacccggttcacaagaaaatcccggttctcatccacaatggcagacccatttgtgaatctct

SEQ ID NO: 54753 - DNA, 212 bp, Glycine max
ctcgaagattcactatggcagatgatgtggttctgctagatttatggacaagtccatttggggataagcggtcaggattgcagttgctgaaaagggtatcaaatatgagtccaaagacgaggacttccaggacaagagccctttgctcctcagaatgaacccggttcacaagaaaatcccggttctcatccacaatggcaaacccatttgtg

SEQ ID NO: 54754 - DNA, 276 bp, Glycine max
cttctctctttctctctccttttccctcaagctcagaatctcccgaatcttgttaaaaagaagaaggatgtcaagcggagcaacacactggtgtcatgcatgcagacagccagttgtgcttgatgggagagatgctgtttgcccttactgcgatggaggatttgtacaagaacttgatgagttggaaggaattgcaccccaccataccttttgctcacaatcaggaggagtatatcaaatgcctgacattttcgatgctatacctgcttttatggg

SEQ ID NO: 54755 - DNA, 268 bp, Glycine max
gctttggaagaaaaacagaagcaaaaaccttcatttgagctatctgtaaagcttgcatctgaaacaaatcgagttagaggtgttactttgttattcaatgaacccgcagaggctcgcaaaccagatattaaatggagactttatgttttcaaggctggtgaagtgctaaacgggaaagaagggttgctgatatccctacagatcatccatcttgcagcaagcaacatgctgttattcaattccggcaagtcgaaaaggagcaacctga

SEQ ID NO: 54756 - DNA, 267 bp, Glycine max
gtgacagcaatctacgagcttctctctgcctgcctatcagatttaggtgaaaataacaagaaatactgccggaggagaaagggctacgatgctcgacaacgtgtcactctacgcctgctggcaacttggcttgatatcaagtgggcaaaaatggaggccattgagacaatagttgctagttctgcaatgtctttcattaaagagcaagaggcaagtaaagaagaaactcaatcaaaagaagacaagtgggctaaatggaagaggggt

SEQ ID NO: 54757 - DNA, 268 bp, Glycine max
attgtgttcgatatcaaaccaattgatgaggaggctgggaagtattcggagctatgcaaagcatcttcgcatagatggggtgaagaacactatagccgttgcctctggcaaaggtggtgtgggcaagtccaccactgctgttaatttggctgttgcacttgcaagaaagtgtcagctcaaggttggtttgcttgatgccgatgtgtatggtcccagcattcccacaatgatgaacatcaatacaaagcctgaagtcactcatgataag

SEQ ID NO: 54758 - DNA, 255 bp, Glycine max
atcaccctctacctacacacatcaaggtgtcttaatatctaaaaccttgatacatacatacacatctttggtgcaaccaacataatcaaattcaaaggcaatgaagtttgggaaagaatacacatcccaaatggtgccagaatggcaagaagcatacatggattacaattttctgaaatcccatttgaaagaaatacaacgtttcagacaaagaaccaagcctcctacagccactccaagaggcctaagaagaaa

SEQ ID NO: 54759 - DNA, 239 bp, Glycine max
attttccaggaggatcttgtgaaacgcctagagtctgagatcaaaggagactttgagaaagccgtgtaccgatggatactagaacctgcagatcgtgatgctgttttggccaatgttgccatcaagaatggcaaaaactacaatgtcattgtggaaatcgccactatcctctccccggaagagcttttggccgtgagacgtgcttatctcaaccgctacaagcactccttggaagaaga

SEQ ID NO: 54760 - DNA, 246 bp, Glycine max
ctgcacttgtgtctcttgcattgtttggtgcttatgtgagcagagcaggcatcaaaacagtgaatgtgatgaccccaaaagtttttataggtttgattgtgggagcaatgcttccctactggttttcagccatgacaatgaagagtgtcgggagtgcagctctcaaaatggttgaagaagttcgtaggcaattcaataccattcccggtcttttagaaggaagagcaaaacccgattatgcaaatt

SEQ ID NO: 54761 - DNA, 239 bp, Glycine max
accaagaccacaaaatccgcgtctggaaaacaaccgaccaacccggtaataataataacaaccccaactactacaaatgcgtcgcctcgcttcccacgctccacgaccggttctccaaactcttctcctccgagaactacgtcgagattcgccgccacaagaagcgcacgtgggtgcatcacgtggacaccgtctccgccctcgcactttcccaagacgggtctcttctctactctgcg

SEQ ID NO: 54762 - DNA, 251 bp, Glycine max
ataggcacttatccttacaaacagaaaatggacatcttcaattagagagcaagagaaacataggttgactcctattgtggaagccctgtcctcaagttatctgggtcctgattattctcagtcaagagaatatgctgatatatcattaaaggacatagatcaagttgccaagagctcatttcctttgtgcatgcgtcacctatttgataagctgaaagaggatcatcatttaaagcatggagggaggatgc

SEQ ID NO: 54763 - DNA, 253 bp, Glycine max
ttcaccggttcgatcatatatgaagaatactctacaacaaaagcaagaggaacagggtgaagggtctgggatgtacgtgaaagttagcatggcaggtgcaccttacttaaggaagatagatctaaatgtttacaagagctacccagaacttctcaaggccttgggaaatatgttcaagtgcacatttggtaagaacctagaacaagttttaaataatctcttattattttttttggctttcttaagattaatt

SEQ ID NO: 54764 - DNA, 252 bp, Glycine max
taggcaaaatctaaaatctatcatgcatgattcatgtgtaccatggtaattggtggtggccggcttaggcctcaggaggattcacttaataaccccattgatgtggtagttggtacccctggcagggttcttcaacatattgaggttggtaatatggtatatggtgacatcaaatacttggttttggatgaggcggacacaatgtttgatcggggctttggtcctgatattcgtctatttataggcccatta

SEQ ID NO: 54765 - DNA, 252 bp, Glycine max
gggaactggcctcgcaaactgagaaggttatattggctattggggatttcatcaatatacaagctcatgcatgcgttggaggtaaaagtgtgggagaagacataaggaaacttgagtatggagttcatgtggtgtctggaactcctggccgagtttgtgacatgatcaaagcttttgagttgtgtgtgtcagcattagatccaatctctctctctctctctctcccaattcaaccctaactagccccaaacc

SEQ ID NO: 54766 - DNA, 254 bp, Glycine max
cactgtttgtattggtaatttggatcttaatgtgacggaggaggagcttaagcaagcctttgtgcaatttggtgatattgtgttggtcaaaatttatgcgggcaaaggatatggttatgttcaatttggaactagagcgtctgctgaagatgccattcagaggatgcaagggaaggtaataggtcagcaagtgatccaaatttcttggggcagtaccttgacagctagacaggatgtacccggtggctggggtg

SEQ ID NO: 54767 - DNA, 191 bp, Glycine max
cggctcgagcttgaatttaaggcttctcttgacacaatatgggaagaaagctttttcaagaatgaatgctttcagcaattcaattaaagatgcatttgagtatcttatcaatcttcgtcagaaccgacctgcagagttgattgcccagtttttggatgagaagcttcgtgcaggtaataagggtacttctg

SEQ ID NO: 54768 - DNA, 256 bp, Glycine max
gttatatgactttgtggagcatatggtacaaggtgatggtaattgtcagtttcgtgcgttgtctgatcaattgtataacacacctgatcaccacaaatatgtgagacgacaagttgtgaaccagctgaagtctcatccagagatttatgagggatatgttcccatggaatatgacgaatatttggagaagatgtctaagagtggtgaatggggggatcatgtcacccttcaagcagctgcagattcgtatggtgtg

SEQ ID NO: 54769 - DNA, 255 bp, Glycine max
ctcaggactaagaggatcggagaatatggaaagacatgagtgctcttgtagggcggatgtgttggaaaatagcttctaagaggaaccagactgtcatatgggtcaagcctcttacaaatgactgttacttgaaaagagagcctgatactcaccctccactactgcagtcctactcatgatcctgatgctgtttggggagttaaaatgaaagcttgtatcacacgctattctgatcagatgcacagagcaaaagga

SEQ ID NO: 54770 - DNA, 255 bp, Glycine max
cttcatttcattatataatatgcatgttgcttatttccaacatatacctttgatttcattaatgatatcaatgaaatttaatttattatttcaggtgataagtcgatgattaagaagcgatacatgtacttaaacgaagagatcctgaaggagaatcccagtgtttgtgcatatatggcaccttcgttggatgcaaggcaagacatggtggttatggaggtaccaaagttgggaaaagaggctgcaactaaggca

SEQ ID NO: 54771 - DNA, 252 bp, Glycine max
atcaagcttgccccctccaaccctcagcttggttttggaagggttaccatgacgagaacagcctccaagaatgtgtcttctggacgcccatggtgcggcacagaccgtcttaagtacttgggcccattcctggtgagcccccatcctacctcactggtgaattcccaggtgactatggttgggacactgctgggctttctgctgacccagagacctttgccaagaaccgtgaacttgacgtcatccactcca

SEQ ID NO: 54772 - DNA, 241 bp, Glycine max
  unsure (1)..(241): unsure at all n locations
ataaacgctaacctctgtaccattcttcttcttaaaaatgagagagtgcatttccatccacattgggcactanttcanacangncggaaatgcntgctgggagctttattgcctcgagcatgccattcacgttcatctacgttgatctaacgttctgccattcgcaatatacagtcanaccttggctgatgggcagatgccgagtgataagaccataggtggtggtgacgatgctttcaac

SEQ ID NO: 54773 - DNA, 251 bp, Glycine max
cgatcactcccacgcgctcctatatcctctccttcaccgtcgctctctccaacgatcacaacaacatcgtcatcccatggcaaacgccgcatctggtatggcagtccatgatgactgcaagttaaggttttggagctgaagacaaagaggacacaccgtttcatagtttttaagattgaggagcagcagaagcaggtcattgtggagaagcttggtgagccagcccaaggctatgaagatttcactgccag

SEQ ID NO: 54774 - DNA, 284 bp, Glycine max
  unsure (1)..(284): unsure at all n locations
cgagtcaggaggtcacacggggcacgcggtcgggcgcaacgagttagtccggttgctagggagcaagacaggtatcccggaatagcaaacgtgagacngatcatgacgaaggcgttgccggccgacgcgaagatattcgaagacggcgatggagacggtcaagagtgcgcgtcggggttcatcagcttcataacatgtgaggcttccgataagtgccagaaggaggacaggaagacgatcaacggcgacgatcttctctgggccatgactaccctgggcttcga

SEQ ID NO: 54775 - DNA, 273 bp, Glycine max
caaaaaggccttattactcctggacagactgttctggttgagtatacaagtggtaacaccggcataggattggcattcatagcagcattgaggggctataaacttcaggtgactatgccgtcttatgtgagtcttgaggagaagattttactgccgccatttggagctgaggtagttctttaggaccttgccaaaggtattgatggagtgattcagaaggcagaagagctactagcaaagacacctgatagttttatgcttaaccaatttgaa

SEQ ID NO: 54776 - DNA, 194 bp, Glycine max
  unsure (1)..(194): unsure at all n locations
tcttggtgtctatttgattggtaacatgacagctttgatagtcaagggatcaaagactgaaaagtttagggacaagatgacagaccttatgaaatatatgaacagaaataggctcggtcgggatatccgtgaacagatanaaggtcatgtgggtatacatatgagagtagctacactgaggcttctgtcattca

SEQ ID NO: 54777 - DNA, 280 bp, Glycine max
  unsure (1)..(280): unsure at all n locations
ggaccatagaatccagccaagtaataacgttgggccacaccacacaggtcatgancgggccacttncgnttctgctntcccagcaatngaggtacttnagaaggagaagaagtacataacctcagaggagctgaagggtcacaacaaggagggagatttatggatctcaattcaaggtaaggtgtacaatgtctcagattgggtcaaggagcaccctggtggtgatgttccaatctcaaaccttgctggccaggatgtcactgatgcattcatagcatac

SEQ ID NO: 54778 - DNA, 276 bp, Glycine max
gaaatctctcaatgataataaattcgtttatcatttcatacaacaagatgcctcttctagcctctctggagtttttgatgcgtcttctagtgcctcgttgaaaaatgatttagatttcacacttagaagtggagatcatgtggtttccttttccaagcgtttacgaattcctgggagttcttccactgcacatgatctcagtcagcaggtttggagaattgataaggatgaatatgtgacttcatttgctattatgaggtttaatcttgtacagct

SEQ ID NO: 54779 - DNA, 261 bp, Glycine max
ctcgagcgtttttataataataataataatttgctccactgttagggtttttggcggacgtcgtcgcggtcgtcatcgtcattgaatcagccatgcctcggtactactgtgactactgcgacacctatttgacccacgattctccatctgttagaaagcagcacaatgcaggttacaaacacaaggcaaatgtgaggacttactaccagcaatttgaagaacaacaaacacaaagtttaattgatcaaaggatcaaagaac

SEQ ID NO: 54780 - DNA, 213 bp, Glycine max
attcccgccaagcccgagaaagaattcccgccaccgccaccataacctgtccctaactctttgagtcactcattcactgcactcattcacaacacacatcaatggctccttcccgccgcaacaccaacggtcgatcaccgctcgtcaatcaacagagtcaaatcacttccttcttcaccaaatccgcttccccttcgccctctcccactctct

SEQ ID NO: 54781 - DNA, 257 bp, Glycine max
ctttgacctgcaagaccatcacccttgaggtggaatcctccgacaccattgacaacttaaaagctaagattcaagacaaggaagggatcccacctgaccagcagagacttatctttgcgggtaaacaacttgaggatggtcgcacccttgccgattacaacatccaaaaggaatcaaccctccatctcgtgcttcgcctcaggggtggcatgcaaatctttgtcaagactttgaccgggaagaccatcacccttgag

SEQ ID NO: 54782 - DNA, 261 bp, Glycine max
aagaaactgaaacaactttcggatgagctgcgttctgatgttattttccatgtttctagaactgtcgggtcatttgggatctagccttggtgttgtagaactcactattgcccttcactatgttttcaatgctcctaaggacaaaattttgtgggatgttggtcatcagtcttatcctcataagatactcactggtagaagggataagatgcataccatgaggcagacagatggattggccgggtttacaaaacgatctga

SEQ ID NO: 54783 - DNA, 249 bp, Glycine max
atttgtaatgcagctggagtaactggcagacccaatgtcgattggtgtgaatctcataagacggaaaccattcgcagcaacgttgctgggacttgaacattggctgatgtcagcagagagcatggactcttgatgataaattatgctactgggtgcatatttgagtatgatgcagctcatccagagggttctggcattggctttaaggaggaagacagacccaacttctttggttctttctagtccaaa

SEQ ID NO: 54784 - DNA, 261 bp, Glycine max
acgagccgcaagattccgacgttaatcaatctcatagagtcttcccgcggaattcgaaagagaggaaagctttgcatctatgccatgcacttgatggaactctcagagcgatcttcagcaatcacaatggttcagaaggcacgcaataatggcatgcccttctggaacaagaaaccggatgacaaagatcaaatgatcattgcttttcaggcttatgagaaactaagaagtgtcaatgtgcgccccatgacagccatctct

SEQ ID NO: 54785 - DNA, 241 bp, Glycine max
gttccttttgaaggttagaattgctacaagacaaacaatggcagcgactgaggaagatgtgaagcttttgggtattgtgggaagcccagttgtgtgcagggtccagattgcccttaagttgaagggagttgaatacaaatttttggaagaaaatttgggcaacaagagtgatgtgcttctcaaatacaagcctgttcacaagaaggtgccagtgtgtgttcacaaggagcagcccatagca

SEQ ID NO: 54786 - DNA, 265 bp, Glycine max
atggagggttttatgaccacgtgcccacgcccgcgcgtggggttccgagccctgatgggattgtgggccccgagccttttaacttcacgtttaataggttgggagtgagggatcccaatattgctatctctccttggattgaaaagggtacagttgttcatgggccaaatgggtcaccatctcctacatcagaatatgaacactcatccattccagctacagtgaaaaagctcttcaatttgccttcatttctgaccaatagaga

SEQ ID NO: 54787 - DNA, 269 bp, Glycine max
gttcccttaagtggaaacttgagcaagaacgcaaagttgtgaagtctgaagcgtacgagcttgaaagaaggctagaagggtgtaggcaagaattattgactgctaaggctatcatttcagtcaaggactctgaatttgatgcattgcagaataatttgaaggagctagaagaattgagagaaatgaaagaggatatcgatagaaagaatgaacagacagctgccatactgaaaatacaaggggctcaattagctgaaatggaatcactt

SEQ ID NO: 54788 - DNA, 262 bp, Glycine max
ctcgagccgaaaacttcaagatgataacaaagctttagaccgtctcaccaaatctaaagacgcagcacttattgaagctgagaagactgtacagattgccttggctaaggccaccttcagtctatgcattttgtccaaaattttattttcttcctggcaaatctcaatctgtttaattagctcttgatttttattttggagatcatccaccctttgataggagtgtgctgttccaagtcccatagcagcgatgggaatcgat

SEQ ID NO: 54789 - DNA, 249 bp, Glycine max
ctcgagccgattttgtatcactatgacacggttgtgttcttgtaggtactatttgaaagatgcagtccttgaagggggtattccatttaacaaagcatatggaatgacagcctttgaataccatggtccggatccaaggtttaacaaggttttcaacaaggggatggctgatcactctaccattacaatgaagaaaattcttgagacctacacaggctttgagggacttaaatccctggttgatgttgg

SEQ ID NO: 54790 - DNA, 255 bp, Glycine max
actaccagcagtgctaaagtaaaagcttgggttactgcaatcaatgaagctagtctaagacctcttgagggctggtgttgtcctcatcgctttggttcctttgctcccataagaggtttgactgaagatgggagccaagcccaatggtttgttgatggacaggcagcatttgaagcaattgctacttcaattcaagatgcaaagtcagagatcttcattacgggttggtggttgtgcccagagctatatctgaga

SEQ ID NO: 54791 - DNA, 248 bp, Glycine max
ctcagatcttcgcaaacttgctgtgaatctcattcccttccctcgtctgcactttttcatggtgggttttgccccactcacatctcgtggttcccaacagtacagagctcttactgtacccgaattgacccaacaaatgtgggatgctaagaacatgatgtgtgcagctgatcctcgccatggtcgatacttgacagcttctgcgatgttccgtggtaagatgagcacaaaggaggttgacgaacaga

SEQ ID NO: 54792 - DNA, 271 bp, Glycine max
atcgagccgctcgagccggggatgcacatactattggcttagtaaaataccgagaaccatatccatttactgtggatcccagttggcggggaagtcgttcagagttgccttttctaaactctcacaagatgaagatgtccattctgctgggtgtggtgcacatgaacttgggaattcttttaagttatgtcaatgctcgtttctttggcaattcgctggatataaggtacaagttggtgccccagatgatttcccttaactgtctatttgg

SEQ ID NO: 54793 - DNA, 269 bp, Glycine max
agaagcggctcgccgcgagcatgctcaagtgtggcagaggaaaggttttgattgaccccaatgaagtcaacgaaatctccatggccaattctcttttcataggatctgaacctcttcggtgtttttgagcgtctgcgagaatatatggaaatgcaaacgcgagctattgccaaaacataaggaagctggttaaggatgggtttatcatcaggaagcccaccaagattcactctcgctcacgtgctcgtcgaatgaaggaagccaagagg

SEQ ID NO: 54794 - DNA, 263 bp, Glycine max
ataatgtccgggatcatccacaagattgaggagaccctccaagtgggagggcacaagaaagaggagcacaaaggagaacaccatggtgagcacaaaggtgaacacaaaggagaacaccatggtgagcacaaaggtgaacacttaggagaacaacaccatggggagcacaaggagggacttgtggattaggttcaggacaagatccaaggtggatggcaatgaaaaggttgagaaaaagaggaagaaggccatgatgaagaagg

SEQ ID NO: 54795 - DNA, 259 bp, Glycine max
  unsure (1)..(259): unsure at all n locations
actcgaacacgctcgagcggctcgacggctcgaggctgaagcatattataagcctccacatctctgaaacagttttaacatacaatcttacaagtacacctccccagcttccatttaagacagaaggtgttcctgtgggaatcacttttgttgaaaatgcagtggcaaaaggggctgtttgtttggatgggagtactccagcttaccacttccacaagggatctggcagcanggattaacaactggatagttcactttg

SEQ ID NO: 54796 - DNA, 256 bp, Glycine max
tgtacaagtcctttattaaagagaatcattgatgatgaggctgagcctgatgatagcattctccctctaagagatatgtttggaacttgtctgagtgtagttgctgctctgactaaggattgcattgagggatttcatttgcaggaggttaaaagtttcaaccaacgcaggctaatacatacaaagcttgcattttctcttgaacaaattatatccatttctaaactagctcttgcaagtaaatatgccgaagatt

SEQ ID NO: 54797 - DNA, 256 bp, Glycine max
tgttaccccagcaccacaaaatgtcgaagcgaggacgtggtggttctgctggtaacaagttcaggatgtcactgggtttgccagtggcagctgtggtgaactgtgcgacaacactggggccaagaatctttacatcatatcggtgaaaggaatcaagggtcgcctcaacagattgccatatgcttgtgttggtgacttggtcatggctactgtgaaaaaggggaagcccaatcttaggaagaaggtattgccagca

SEQ ID NO: 54798 - DNA, 256 bp, Glycine max
atttgggagttaggttctgcacgctctgcttccagcgagtgttctttcttcgtttcaacaccttaatttgcatacgctgcttcttctgcttgagaaatggcacaagaaacctttctattcacatctgaatctgtaaacgagggtcaccccgacaagctgtgcgaccagatctctgatgcagtgctcgatgcgtgccttgaacaggaccctgacagcaaggttgcctgtgagacatgcaccaagaccaacatggtca

SEQ ID NO: 54799 - DNA, 252 bp, Glycine max
attccttgtttctcttaatgtcttcttgcatgtgaccttcttcccagggtgatgaaaaaggctagaattcttggttatggtgtttatgagggggtgaacgacttgttttgatttcagaggatgagcatgatgttgtctggttttggctggagaaagacaagccccacgaatgtccagtgtgcgcacagtattttgttgtaagttcataatgacttttagaatagcttctactgttacagtgtttttgtgggg

SEQ ID NO: 54800 - DNA, 256 bp, Glycine max
tgctcacccatgcaatacaaattaacacgaagggatcacaactcaactccaagcaaggaaagacaccagagacagaaacaaagaaggatgagtaaggtgaagattttggttgtgggaggcacaggttacttgggtcagcatctgctacaagcctatgttcatgccaatgccaataatggaactccttttgctttcgatctcgctttcacccatcactcctctcctcctccccaacctctgttggatgccattcctt

SEQ ID NO: 54801 - DNA, 251 bp, Glycine max
gcttaaatcaccttggtcacaaaggaaaagaaaacatgccctttcacctcagcaatggaatagcatgtttgcataaggcggtagattctgtgatggtggaaataagttcctgaaaagagtgcgcagtggaggtgttgatcctagtattagggctgaagtttggccgttcctgcttggagtgtatgacttagacagcaccaaagatgacagagatgttaaaagaactcgttgtagaaagcaatatgagaaac

SEQ ID NO: 54802 - DNA, 252 bp, Glycine max
ctcgagccggtaccattcctatgtacagtgatcgcagtggcatgaacttctcatctcatggagttgaaaagatcaaaaactcagcaggccaaatcatgaaacaagagaaacttgaaagggacaagtctcagcttgaaaaactacaagttcctggaaatcatgattcaccactgtgctcaatagatttaaatgatgtagtcaactatgaggagtttatgagaaacttgacaaatgaagagcagcagcaattac

SEQ ID NO: 54803 - DNA, 246 bp, Glycine max
tctcgagcgaatcggctcagagaaatttggtcaagttaattggtatatgtattgaaaacagcttccgcagccttgtacatgaacttgttccaaatggaagcgtggaatcctatttacatggggttgacaggggaaacagcccacttgattggggtgcccggatgaagatagcacttggtgcagctcgtggcctagcttacctgcatgaagattcaagtccccgtgttatacatagggacttcaagt

SEQ ID NO: 54804 - DNA, 248 bp, Glycine max
ggcggcaagcaactccatccgcaatggtatgtttcgcttcaacggcgtcaccatccctcatccttggagagttgatctgactgagttcttgaacttgattgcagggaatcgatttgaaggcaggaggtaagtccaagaagaccaagcgaaccgcccccaaatccgatgatatctacctcaagcttctcgtcaagctgtaccgttttcttgttcggaggactgggagtaacttcaatgctgttgtcctc

SEQ ID NO: 54805 - DNA, 246 bp, Glycine max
gtgagccatggacgtcggaaagaacaagcgcatctccaaagggaacaagggttcgcaacaagaaggcagctggtccctttgccaagaaggattggtatgacattaaggccccttctctttttcaagtgaaaaatgttggcaagaccctcgtctgtagtacgcagggtaccaagattgcttctgaaggacttaaacatagagtgtctgacgtctccttggctgatcttcaaagggatgaggatcatg

SEQ ID NO: 54806 - DNA, 266 bp, Glycine max
gagagcatgctgagaaattgatggagtatcaggtgtttgacttagacttatttttcgtataaagaatcgagtgatgttgacgctgaattctgattatttgtttgtttatttgttttcagaacaaacgtggtggaaaagtgaagttgcagtcaattgtgatgccgctttctgattttgatcatgcagataagggagatgcgctgcacggttagtgtttctggccttgtaatttccctttttagtgctttcagtttagttcgtgtgtt

SEQ ID NO: 54807 - DNA, 271 bp, Glycine max
cacacacaaggtttgcatgtattctattctcatttttttgatcccaacattaactataagggggagggataacaagaatagaaaaaaggaacaaccaacatgttgcagagagctgcaagcaatgcatattcatggtggtgggctagccacatcagaacaaagcaatcaaaatggatggaacaaaacctccaagatatggaggaaaaggtgcacgctgttttgaagctcctagaggaagagggggattcctttgccaagagagcagaaatgt

SEQ ID NO: 54808 - DNA, 267 bp, Glycine max
gaaaaatcaaacaaacatgagctacaacatttccaaagcatccttctttcatatatacttggaaagaaggaaattaagttagcaagtgagcaacaaggagtttcaatgatacaacatagactccagcgaaagaaggttctcttgattctagatgatgttgacaagctcgagcacttacttccattggctttggaagtaataggttccaacttgtttggaaaaaatacaagaagaaccaaaatctgtcatcaaacaatataaacaaat

SEQ ID NO: 54809 - DNA, 264 bp, Glycine max
gcgggtggctgcattggtcaatgatactgttggaacattagctcttggacattatcatgactcagatactgttgcttctgtaataattggcactggtaccaatgcttgctatttggaacgggttgatgctattatcaagtgtcaaggtcttcctacaacatcaggatatctggtattgctctttttttttgtttgtctttatttttcacttttgtttattgtcttgttttgaacctagtataaatcttctgtttattaggttgt

SEQ ID NO: 54810 - DNA, 121 bp, Glycine max
gaagaagaagatggtgtcaggttctggaatctgcgcaaagcgggtggtggtggacgcgcgccaccacatgctgggtcgtctagcctccatcgtggcgaaggagcttctgaacggccagaaa

SEQ ID NO: 54811 - DNA, 266 bp, Glycine max
gtaccattcaggtcccaaggaagaatacagagaaataaagcacagttgtctaccgtgaaggattcctgtgatctgatatgaagaatgagttccctcatgtgttcttataggcatagatcaacaaggagaattcaactctatctttatctttctgtgcaatcttctcctctaaccacaatctgctatccaagccactcctggtcctgaacatgaacacagcattcccagaagcagggttgaaaaaccagttatgaacatcgcaaagc

SEQ ID NO: 54812 - DNA, 256 bp, Glycine max
ctcctgacttgtacattccattaatggcatttggtacctatgttgttcttgctggcatctcattgggtcttcgtggaaagtaagtataatatttccttaatcttaattctatagtgtagtacaaaggttattatagttattttcctcaaatttaaaagtttgtataaaagtattcccctttttgtacagttgttttattactttttcttttgtgcatcagtaagttgcattgcatatcagggaacttttcagctta

SEQ ID NO: 54813 - DNA, 230 bp, Glycine max
tcgagctggtttcatcaaagaacgcaattccaggatatctaactgatgcttccagccatcagcagagtccttctgttggtgaggatgatggaggggtgacaatgtctgatgagatggatcttcttgtcgagcaagtcaaaatgcttgctggggatattgctttcagtactagcactttgaaccgcttaatagagcagtctgtaaatgatccggaaacccccaaaatacgg

SEQ ID NO: 54814 - DNA, 208 bp, Glycine max
gtgattactccggcaggaaattggcttattggaggagatttggaagtgctaaaacctatcaaatataatgatggcctagataactacaggctctctcccaaacaactccgtgaagaatttgacaagcgtcaagcagatgcagtttttgcctttcagttaagaaaccctgtacacaatggtcaatctttgttaatgaatgatactccgt

SEQ ID NO: 54815 - DNA, 212 bp, Glycine max
atttgtacatcccggcgagaaggcccgccgtcgggaccctcgccggtttcattactctgcaacagtctgtccagagtttcgccgcggtcagtgtgaccgtggcgatgcatgtgagtactctcatggggtgtttgagtgctggttacacccttctaggtatagaaccgaggcttgcaaggatggaaggaattgcaagcgaaaagtttgcttct

SEQ ID NO: 54816 - DNA, 271 bp, Glycine max
ataaaaaatcatccttatctatgccacttccacttggacttccacctcacccactttctctgcgccatggaaacagcataggcaccggttcgtcacgattaatctttgaaacaaggagtctaaggctggatttgtacgttgtctggcatgtgtacttgttcaaggtgacatatgacctaaacaattattagaacttaatctgatcacaaggcagtttttttgagctgatctggatgggaaccggtgaagaaagcacagctaaagttcctaa

SEQ ID NO: 54817 - DNA, 248 bp, Glycine max
gtgaattggaacattcttcactcttgagggaattaagagacaagatatggcaattggtttcatggaggtgcagcttgtcaaagcaaaaggcctgcataacgctgatatctttggtgaaatggacccatatgttctgatacagtacaatgaccaagagcagaggagtagtgtcgctattggtcagggcacaaacccagtatggaatgagaaatttatgttcaaagttgaataccttggatcaggtgata

SEQ ID NO: 54818 - DNA, 232 bp, Glycine max
ctctctctctctctctctcttttctgagtcacaaaatattgtttatgtacaaacattaacaccatggcagatgtcctgagtgaagaacagattggtgagatcaaagaagcctttggcttgtttgacaaagatggagatgggtgcattactgtggaagaattggccactgttattcggtcattggatcagaaccccacagaagaagagctccaagacatgataaacgaggtcg

SEQ ID NO: 54819 - DNA, 231 bp, Glycine max
ggttgcccctttttctgtacaactactccactcaccaactccatggtatctttgaggctaacaataatgaagccaccaagactgctgcagagaagaaattcaaaacactgccaccatcagagtctctgcctaagaatgaaaccattggaggctacatctttgtttgcaacaacgataccatggcagagaatctccaaagacagctctttggtctgcctccacggtacagag

SEQ ID NO: 54820 - DNA, 226 bp, Glycine max
ctcgagccgctcgagccgctaaggtcgtagagtgtgactgccatgcttgctatatacgtgttacttcttctgcgcaaaaaacgcaaacaaaggcgttacaaacgactaacgagagacggaaagagtctgggaaatcatctgttctgttggatgtaaaaccatgggatgatgaaactgatatgaagaagcttgaagaatcagtgagatctgttcagatggaagggtt

SEQ ID NO: 54821 - DNA, 268 bp, Glycine max
tggaccgtgatgagtttctgggtcccttctgaaacacttacgaagccgaagaaaacaaacgagaagcccagaatcagctcgaagcccagcaggcccgcggtggttctggtgcacggctttggcgccgagggaatcatgacatggcagtatcaagttggcgccttgacaaaaaaatacgcagtctacgttcctgacctcctcttcttcgggggctccaccaccgacaaaccccaccggtcgccggcgtttcaggcgcagtgtgtggtgg

SEQ ID NO: 54822 - DNA, 263 bp, Glycine max
gtgctttatgctcaggcaatggtgtgactgtggttataactgaccaaggctcaggtcataacactgacttcattcttagccaacgagcctttgggagaatggctctgaacactgacgcagctgcttctctattagctcttggtgttgttgatattcagtatagacgtgtttcatgcagctacccaaacaaaaacattacagttaagatacatgtctcatgcaacaaccctcactatttggcttttgtcatatggtttcaacaa

SEQ ID NO: 54823 - DNA, 259 bp, Glycine max
ggcgattgaaacgctcgtgctgggcgctggtcaagaagttggcaacagctgcgtggtggtaaccatcaacgccaagcgaatcatgttcgattgcggaatgcacatgggctacttggatcatcgtcgttaccctgatttcacccgcatctcccccagtagagatctcaactctgccctctcttgcatcatcatcactcactttcacttggatcacgttggtgctttagcttacttcactgaagttttggggtataacgga

SEQ ID NO: 54824 - DNA, 256 bp, Glycine max
catttggacacaataatagggcctggagtgatgcttctttatcctctatacgcatcaatgagagcaattgaaagtccttcaaccttggatgatcaacagtggctaacgtattgggttttatactccttcatgaccctctttgagctttccactcataagatccttgcttggtttcccatttggggatacctgaagcttatgttttgcgtctggttggtacttccaatgttcaatggagcggcttacatatatgaga

SEQ ID NO: 54825 - DNA, 282 bp, Glycine max
tggagtaacgtgctgtctccgcttcccagggcagctgatctccgacctccgcaaactcgccgtgaacctcatctccttccctcgcgtccacttcttcatggtcggcttcgcgcccctcacatcccgcggctcccagcagtatcggtccctcacaatcccggaactcacccagcaaatgtgggacgcccggaacatgatgtgcgccgccgatccccgccacggcaggtacctgacggcgtccgccatgttccgcggcaagatgagcaccaaggaagtggacca

SEQ ID NO: 54826 - DNA, 223 bp, Glycine max
tagatttgctcgatctcgagccgctgtctgccgcccttcatatcgtgtggttaatgctggtgatagttgagctggaactgtcgatagcgggggtatcattcggcatggcccgcataaattgttggaaggtttcttgattgctggagtgggaattatggctagtggcgcgtacagctacatcaggggtgaatatgtcaatgatcgtaagaatctcggaaaggct

SEQ ID NO: 54827 - DNA, 293 bp, Glycine max
tactattcgaacattgatccttcaattgacttcactaataactttagtcaagagctgcaactacagattaacacggctgaggatagtggatatggatgtgtggtcagggaattataggagactcagcatgttgaggccttggagatttatcttcaaggactatgtggtgttcagagagaacgattgaggatccatgaaatatgcctcaagagtggtccacatctgggcactgtagcctcagaggttcgactcttgtgtgacctagagcaagctgaaccttcctggactgttaa

SEQ ID NO: 54828 - DNA, 274 bp, Glycine max
aaataggagttgaacacttgcttagagatgtgaaggatacgaccattattgatcttgtcacagagtgtaatgcaagactcacagccgtgaagggtttggatgcaagacttaaagagatcaggggttaccttgaccttgttaagcatcttgttgttaatcaagttgtggagtgcaattacacttctaatgagagatgagaggtatattaccagcatcatatcatttggtttcactgcataagccttgataagatcagcaacattgagatttggta

SEQ ID NO: 54829 - DNA, 255 bp, Glycine max
atcttttttgcacacaatttggaacagaaaatgggtgcaggagattactacaagatacccaagatgaatcgttaattccgcggattgataactcaagatggcatataagaggttggccatgaagtggcacccagataagatccatccacaccaccatcaacaacttacgaatgaagaagctgaggcatagttcaagcaggtttcggaggcttatgatgttctcaggtgccccaagaagcgccagatctatggatt

SEQ ID NO: 54830 - DNA, 293 bp, Glycine max
gatgcaaacttgctgtgaatctcattcccttccctcgtctgcacttgttcatggtgggttttgccccactcacatgtccgtggttcccacgtggttcagagcttttgctgtacccgaataggcccatcaaatgtcggatgctaagaacatgatgtgtgcagctgatcctcgccatggtcgatacttgacagcttctgcgatgttccgtggtaagatgagcacaaagtgggttgacgagcagatgatcgatgttcagaacaagagctcatcatactttgtggaatggatcccca

SEQ ID NO: 54831 - DNA, 261 bp, Glycine max
cgatcttgtgggcaagaatcttcatgttctcagtcagatagaggatgttcgaccatatcatgtacagagatgtggtgctgcccatagtactggagcatatttgtcagccatctgtggacatcaagacagtactgtcccaggtaatggaaaggctttcaaattatgctgcttcaagttcagacgtgttgccagagtttgtacaagtggaagcattttccaaattaagcaatgccattggcaaggtgatagaggcacagcctg

SEQ ID NO: 54832 - DNA, 273 bp, Glycine max
ctcgagccgctcgagccggccgcccttaagcacaggtcaatggacagagtgatcatgtgcgatatagacaccgaggtggtaaatttttgccgaaaatacttgattgtaaataaggaggcgttttctcataagaagctggaccttgtcatcaatgatgccaaggctgaattggagaagagaaaggaaaagtttgatatcattgttggagatttggcagacccacttgaagatgggccatgctatcaactctacaccaaatccttctatgagaag

SEQ ID NO: 54833 - DNA, 259 bp, Glycine max
attataacttggactgagatggtcacagcgtatatggagtttgggttggtcaatttggccttgaaggtgttcgatgaaatgccagacaagaattccgtgtcttataacacggttctggctgggttctgtcgaaacgaacaaggtttagaggccatgaggttgtttgtaagaatggtggaggagggtttggagttgacggattttagtttgactagtgttgttgatgcttgtggattgcttggtgattacaaggtcagca

SEQ ID NO: 54834 - DNA, 266 bp, Glycine max
ctatcaatttgcatggtgtccttcacgttcaagccaccaaagtaggatctgatacagttttgagtcagataattagtttggtggagacagcccagatgtccaaagctcccattcaaaagtttgctgattatgtaccattcttttggcttgcaggttgctagcatatttgttcctacagttgtggtgttggcattattgacactattgtgttggtatgtagctggggctcttggagcatacccagatgaatggctgccaaataatgg

SEQ ID NO: 54835 - DNA, 266 bp, Glycine max
cttcactattgccgtcattagtgttgcctgatatgtcatcaccatcgccgtcgttagtccaccgtagccctatccgtgatggcgattcattttgcagaggggacttcaggtagaagctgatgtcccagtagaaagttttgaattgtcacctgttgaccagatttttgttcgaataaggccaaagtacatttttaattaagctttcaaaaactgcatcaattctgtcatcagctactcataattcattggtggctctggatgagctt

SEQ ID NO: 54836 - DNA, 251 bp, Glycine max
accctcctcgggtcaagctcagtcagcactgcaccgcaaatttttctttgcccctttcgaagagtaacgccacagactccgccggcgagatcccaccggagacgaggtccgccgagagtgacgattaagatcaatgttacgcacggttcctctcaccacgatttaaacctcccggcccaatcaacttatggggatgttaagaaactccttgtcaataaaactggtttagagcctgcagagcaacgactttt

SEQ ID NO: 54837 - DNA, 135 bp, Glycine max
gcaaaacacaagttataaggcatgatctcaatccaatatggaagtcggtgtttgtgaatattcaacaagtgggaagcaaggacagtcctttggcagtagagtgctataacttcaatagcaatggaaaacatgatt

SEQ ID NO: 54838 - DNA, 252 bp, Glycine max
gtgaaggcattgcataccagtggaattacatggttgaaaatcagtatggggatggaggaaggaaagcaggaagttgtccacacagagcagaatcttctcctcttgatgacaagagcaagtccttagtgttggtaaactatttccgctctacgccatttaagcctattgcatgtgaagataactctggaggactcattgacatgctacaaacctgtcatggtgctgctgccaacaggtgggctaattatctgg

SEQ ID NO: 54839 - DNA, 240 bp, Glycine max
cttgcataatccatcaaaatttgaacattttaattattgcctcattgattattgtgtgtttaattcttagatgttgggtgctaacacatgattgggcacaatgaacttgttttgactttgaattgatgtttctttggttacaggattgctaggagtagcagccaacagattggaagtaggctgagtttgagcagaaactatgcggctaaagacattaaatttggtgtggaggctcgggct

SEQ ID NO: 54840 - DNA, 226 bp, Glycine max
agagtctttagttgagatcagcgcgatttactcgtgcagtggaaggctcacgctcatgagctcatgggcggtgcggctcggcgatttgtacgcggaggaagagatggagctcttggtggagttgagaattccggcgtggtctggaactggggcccaccaccacgtgatgacggtacggtgcctgtataaagaccctgctcacgcatgagatcgtatacggtaggga

SEQ ID NO: 54841 - DNA, 245 bp, Glycine max
  unsure (1)..(245): unsure at all n locations
tattccttcattccacagaacttaaaaattaaaaaanattttnnnnaannatggccgatgccgaggatatncaatttctcgttatcgataatggaaccggaatggtcaaggctggttttgctggagatgatgcaccgagggctgtgttccctagcattgtggggcgtccacgtcacactggggtgatggttgggatggggcagaaggatgcgtatgttggggacgaggctcaatccaagaggggt

SEQ ID NO: 54842 - DNA, 251 bp, Glycine max
aaatgcatcttgttacatattggctgaagatgcatcttgtttgttagatacaaaggagaggctcactccttgaaggtggaaaagattttgtttcaaggaaagtcagaataccaaaatgtcatggtcttccagtcatcaacatatgtcaaggttcttgttttggatggagtaattcagctaacagaaagggatgaatgtgcctaccaagaaatgatcactcatcttcctctttgctctattccaaaccctaa

SEQ ID NO: 54843 - DNA, 136 bp, Glycine max
ccaaaagctttgcggtttctaaggtgatcttctctccttagcatcaggaatgcttatgagagaggagtatcgggctcaaaatgccgtaacagcatatgggaaattttgccccttctaacagtctgtttggatgatg

SEQ ID NO: 54844 - DNA, 274 bp, Glycine max
tcacaatggcttgctcctcctccttcctctttctttgtcaatatcaacaccaccagaatcttcccatttcaggaaactcttctctcagccttccttcccggcctttcttttccaaaactcatggaaggttctatccttgaacgtctgattttgggaagatgggatacgggtgcaagcattatagaagaggatgcaggattagagcaccatgttgcaatgagctctacttttgccgccattgtcataacgaggcaacggacgtccacatgttgtt

SEQ ID NO: 54845 - DNA, 183 bp, Glycine max
cagcatgtggtggcctttctggagaaaagggggttctgcattttcatcttcttccactgctgatgaagttacagaatgcatcgatggctgtggcctcactgctattgttactggggctagcagtggtattggtgctgagactactcggtacttgccatgcgtggaatccatgttattatgggt

SEQ ID NO: 54846 - DNA, 264 bp, Glycine max
caacctacccctttttcttctcccaccaacttcaccgtcttcttcctcgatcatgtctcacttcaagggcaagtaccatgatgagcttattgtcaatgctgcttacattggcactcctggaaagggtattcttgctgctgatgagtcaacagggacaattgcaagcgtttggccagcatcagtgtagagaatgttgaatccaacaggcgtgctcttagggagctgcttttcaccgctcccggtgctcttaaatatctcagtggt

SEQ ID NO: 54847 - DNA, 205 bp, Glycine max
caggctgccacgtcttggtattctccgacacgctgaaatccgttcgggagaaggaaatcaagagacagacattgatggagctcgtggatttcatccaatcggggtcggagaagataacggagacttgccaggaagagatgatcaaaatggtgtcggcgaacattattcggtgcctcccgccggcgtcgaacgagaacaccggcca

SEQ ID NO: 54848 - DNA, 263 bp, Glycine max
cgagactgaggattattcatcgtgatcttaaagcaagcaacattctcttggatgctgaaatgaatcctaagatatcggattttggtatggcaagattgtttcttgtggatcaaactcaaggaaacacaagtaaaattgttggaattagtaagtatatcacgatatgaaagggttaattaactgttttcctcagtccttacaaatcaaaatagaggatttttttttccaattgagcttgaggttttacatgtatggtatatggc

SEQ ID NO: 54849 - DNA, 252 bp, Glycine max
agaggccccaaaagctgcacacattgcccttcctgtccaggaatttgagatctagcaactaacaaggcaataatgaagttcttgttccagtgcccttgctgctcttgcttttgcttcatgaagccagagcaagggaaggcaaaggtcaaggaagtcagagaaaccaaggtggaagaaaaaaggatgaagaaaagaagactgacatgtaactcattcaagcttcttggttatatagtatatatagcatgacac

SEQ ID NO: 54850 - DNA, 274 bp, Glycine max
  unsure (1)..(274): unsure at all n locations
gtgaccttcttcgtttctcgcaaagtttaagtaatcatgggtaaggaaaaggttcacatcaacattgtcgtcattggacatgtcgactctgggaagtcaactaccactggtcacttgatctacaagcttggaggtattgacaagcgtgtgattgagaggttcgagaaggaggctgccgagatgaacaagaggtcattcaagtatgcctgggtgctcgacaagctcaaagctgagcgtgaaagnggaattaccattgatatcgctttgtgcgaag

SEQ ID NO: 54851 - DNA, 278 bp, Glycine max
gcaaagtgcaaggcgaaagcaataacagtagcaccccggtagatgagtcacagtttagcttgctaaatgttctaataaatgaagtaggaaagggaaaagcagatgacaactttctgagagacacagcaataaatctccttgcagctgggagagacaccattagttcaggtctcagttggtttttctggctggtggcaacacacccatctgtagaatctaagattcttgaagagatccgaaaaaatttaccagcaagagaaggtaattggaagaattta

SEQ ID NO: 54852 - DNA, 248 bp, Glycine max
atgctattcttagccgttacagcaatctgcaatgctttcattaatagtagtacattgaatgtactcccagaatcactaggaatttccacatattcctccaattctgggattacattcaatgagcaaccattaatgatagcattgcagattgctgaaaaggctagggatgctattcttagcgggaaatttgatcaggtacgggtcaaccttccaaatggtgacatggtggggcatacatatgacattga

SEQ ID NO: 54853 - DNA, 280 bp, Glycine max
ctataaagtacgtgaaacaactgcaagaaagggtaaagactctggaggaacaagctgtggataaaacagttgaatcagcagtttttgtgaagagatctgttgtgtttgccggcgttgatagctcctcctccgacgaaaactccgaccaatcgctccccgaaatggaagcaagaatttctggtaaagaggtactaatcatgattcactgcgacaaaaacagtggaggagctgctgctatactataggaattatagaagcattatctcacagttcagagtag

SEQ ID NO: 54854 - DNA, 285 bp, Glycine max
ctcgagccgcacggcttgcattacatgcaccaaccaccctcttaaaacaggatgcaccaacaccacgtgtggtgtagatccattcaaccccttcggcgagttcttcgtgagtggagacgtgggtgaagacatcttgtcctcgctgcactcaacaagcggtgcacgagcaccttccactttgcacgtgccacgcttcgtttctacatgtgtgtacccagataaatttggggttgagggctttctccagggcctggctaagggcaagaaaggagttttaaggcttgc

SEQ ID NO: 54855 - DNA, 246 bp, Glycine max
gctggattcaagggatgctatacaggtttgggtcctactgtaagtcgagcatttcctgctaatgctgcaacaattgtcgcatgggagctagcattgaaaatgctaggcattaagcatgactgagagtctacctaattgcggataatactacaaagttcaggtgttcattcagttatttctttcattcttgctttcattttggatcgtgctgctcatcatcacagacagtttgcattaatcctcgag

SEQ ID NO: 54856 - DNA, 279 bp, Glycine max
ggataccttgtttagactagtaagtattcatcaacaacaacaacccgatccctccctcaactccacgaccagcagaacctccagcagctccagatcctccagacaaaactactacccttattcttcctatcaagaagaagaagaatgcttcaacttttacatggatgaagaagacttatcctcgtcttcttccaaatactactacccttaccaaccccatcaccaacaacaacaacaacaacaacacaacgtatccaacatttctacaaacaccttcag

SEQ ID NO: 54857 - DNA, 281 bp, Glycine max
gtgctgtgaaccctagggtgaaattcagcgacgaacaaatcaacgcgatccttgatgaggtgttccgaacatacggcgaattcatcgacggcgacaagggtctcacgtacgagggtttgttgcgcacgtacgacgacggctccggcgacgtcgaccgtgacttcgacgcgctcggcctcgacctcgtcgccgctgacgccgcgaaggagcccctcgcggcgttggaggcgtcgtcctcgtcgattgtcgacgagaggatggcggtagagacgcagaagaag

SEQ ID NO: 54858 - DNA, 283 bp, Glycine max
agaaaatcataagtacccctgtgattttcatcaatggcagctaataacattttagaggtgtatttgttcgggatattctagaattcaaggaaagtctgccctcgtgagccattttcaaaattcaagtctgatgaatgaagataagcgatgtcgtcctattctcttccactccgagggttctgaagtttgtgatctggtaattggaaaacattgactagtgcatttgttatattttcttcacaggaaattgaaatttgaaacttgtagattgtacaagaccacc

SEQ ID NO: 54859 - DNA, 278 bp, Glycine max
ggatgaagaagccttctattatcctcacaatcttgattttcgagggcgagcttatcccatgcacccatatttgaatcatcttggttctgatttatgccgaggcatacttgagtttgcagagggacgttcactagggaagtcaggcttgcgctggttaaaaatacatcttgcaaatttgtatgctggtggtgtcgacaagttatcttatgatggccgaatatcatttactgagaaccacctggatgatatatttgattctgcagacaggcctcttgaag

SEQ ID NO: 54860 - DNA, 274 bp, Glycine max
cactgtcggagtaacaccttctgatcctcgaaaatcacttcctcaatggggtcttcatttcctctcctacactcacaggctcaaccagattaagaaaaggtcaagtggggtatatgcatcactatccgagagagagagaggagagtattattcccagagaccgccaactccgctactagacaccgtcaactatcctattcatatgaaaaatctctctaccaattgtttctagaactgggggccatttgggctcaagtcttggtgtggtggaact

SEQ ID NO: 54861 - DNA, 268 bp, Glycine max
aaaaaatctacgaaagatcctaaaagtcagccgtcgcgtgacttcgtttaccttccaagagatgaatcatttggtcacctgaagtcatcggattttcttgtttatatacttaagtctgcatctcaaaatgtcatacccaaattacaatctgcacttaggctacagttcaatcagcctgagtttaatagcttcgatgacgtgcgaggactctatgatggtggaattaagttacctactgatacacttagccagcttagccctataccat

SEQ ID NO: 54862 - DNA, 266 bp, Glycine max
tctcgagccgctcgagccgctcgagcggctcgaggttttaagttacaaagtttttcattgtttacacttaatcaccaatggctgcttcaacaatggctctctcttcatcatcattggctggccaagctatcaagcttgccccctccacccctgagcttggtgttggaagggttagcatgaggaaaacagcctccaaaactgtttcctcaggaagcccatggtacggcccagaccgtgtcaagtacttgggcccattctcaggtgag

SEQ ID NO: 54863 - DNA, 266 bp, Glycine max
gcgaaactggagggatggaacaactaccaacattgtagatcccacattaactgacggtttgcgaaatgaaataatgagatgtatccacattgggttattatgtgttcaagaaaatgtggctgccagaccaaccatggcttctgttgcactcatgcttaatagctattctctaactctaccggtgccttcagaaccagcatttgttggggatggtagaactagaagccttccagacatgcagtcctcatcagagcataattcaaggc

SEQ ID NO: 54864 - DNA, 282 bp, Glycine max
cactcttctctgcagcttttgcctacaactcccttcaccatggctgaacaaaccgagaaagcttttctgaagcaaccaaaagtgtttctcagcacaaagaagactgggaagggaaagagacctggaaaaggtgggaaccgcttttggaagtccattgggcttggatttaagactcccagggaagccatcgaaggaacctatattgacaagaagtgccccttcactggcaatgtttccatccgtggccgtatcttggctggaacatgtcacagtgctaagatg

SEQ ID NO: 54865 - DNA, 254 bp, Glycine max
ctcgagccggtaatcatgggggttcatcctacgaggaaacagactctatagctctatttattgggccaaaaacccatgcctctggccattcatcatccaatcatgacacaattttgcaggttgatattgcaccaacaatagctttacttttgggtgtgccaattccaaaaaataatatgggggtttggatcccccaaatggttgactctctgacagatgaccaaaatttgagggcactgcagttgaactcatgg

SEQ ID NO: 54866 - DNA, 275 bp, Glycine max
attgtggggatgtgaaggcagaagaatggaagcaacaatttgaatttcattcaagtgcaaaatttgaatatagaatctagggagaattctataaaaagagctcttggtgagaattttctcaaatgttatgaatgattttgatttgggtttgatatattgtctaggtccaacacttgatgttgatcagcgcaacaatgtgtcttttgtcacaagttccacagacaatatgatctttgtttgcaaaattggagaaacccgccctataaaaacttttg

SEQ ID NO: 54867 - DNA, 205 bp, Glycine max
acttgctctacctctgccactttctgagtacaatacaacacggccatggctgcctcagtctccactattggagctgtcaacagagctccagagtcgctgagttttggtacacttcaaaaagtgtcaatttcaagaatatgatacatagagggaaaactcttatgatttttaactcctcatttatattgatagtaaactcaatata

SEQ ID NO: 54868 - DNA, 259 bp, Glycine max
ggagtttttctccttggagagaatcggtgggaagaaccatcaagacttgttgcaagggatggagttgataagagcaagaacaaggatatgacaacaaaatgccttcaatgtcgtggggaaggtcgcttgatgtgtacagaatgtgatggatctggcgagccaaatattgaacctcaatttattgaatgggtggaagagggtacaaaatgcccatattgtaaaggcctagggtatactgtatgtgatctatgtggaggga

SEQ ID NO: 54869 - DNA, 266 bp, Glycine max
  unsure (1)..(266): unsure at all n locations
ctcggttatttgctcgatctctatctgggttgttcttttgtncttctacttttttgcttgctgtttcattctcatatggtctcgttctgctacctacacatttggtgattcttgtggtttgaccttttacactgttgcttggtccataggttagctcnttcgggctggttacacacttgctttcaattatagccctggtactcacaatgtggtggccgttaacaaggctggatatgatagctgcaagattccaagatgagccaaag

SEQ ID NO: 54870 - DNA, 257 bp, Glycine max
gttcgcgtttgttctgtttttcctatctgcctcagcagacgacgtcggtgtgctctctgaagataacttcgagaaggatattggtcatgacagaggagctctcgttgagttctatgcttctttgtgtggacactgcaaaaagcttgctccagaatatgaaaagcttggtagcagcttcaagaaagccaaatctgttttaatcggcaaggttgactgtgatgagcacaagagtttgtgcatcaaatatggagtctctg

SEQ ID NO: 54871 - DNA, 287 bp, Glycine max
ttttattacgagcgtatttggctcgatgcgatatgatctctttaccttggataaaaccttgtgcaacataaggcttttacagaaggtggaattctgactagaagggatgtttggctgttgagtttatggagggtcaagctctttgttgaatagtgtttgtgttgcctttatctgcaacttttaatgtgaataatcctaccctttttatgaacatatgataagatcggttttttgtggttcctccactcattgttgttgctgggtctcgcgaaatcaatcaagttttg

SEQ ID NO: 54872 - DNA, 103 bp, Glycine max
ctcgagccgatcacagccttactctcatgtcttctggtctaacgtgttcccttcgcaagtgagagatggcgcaaattctgcttcatgggactctccacacaac

SEQ ID NO: 54873 - DNA, 277 bp, Glycine max
cataaagctggttactgtctgttcaagctaccatctctctctctctttcttagtgcctccttgccagaagttaaaatggctcaagaaactttcctattcacatctgaatcagtgaacgaggggcaccctgacaatctctgtgatcagatctccgatgctgtgctcgatgcatgcttggagcaggaccctgacagcaaggttgcctgtgaaacgtgcaccaagtccaccatggtgatggttttcggagagatcacaatcatggccaacgtggactatg

SEQ ID NO: 54874 - DNA, 128 bp, Glycine max
tctcgagccgattcggctcgagctagaagcttcaaaggacaactcagtattacaaaagccagcgagcgcatatttgcagtcattacataaggggtgaatgtactagaggagctgagtgcccgtataga

SEQ ID NO: 54875 - DNA, 213 bp, Glycine max
aaattggacgatgaggtggtcctgctagatttatggcaaagtccatttgggatgagggtcaggattgaacttgctgaaaagggtatcaaatatgagtacaaagaagaggacttgaggaacaagagtcctcttctcctcaaaatgaacccggttcacaagaagattccggttctcatcaacaatggaaaaccatttgtgaatccatcattgctg

SEQ ID NO: 54876 - DNA, 250 bp, Glycine max
atagttgctgctgctttgcattcctgttagcataagaaagtgaacatattggagttcaagtttttcagataaggcaattcattccggtgcagatcttgaatctgctatttcaaattgtatgggctacaaatctgagggtcagggcttcattgtaggggtgaagataaatccagtgccgggtttgcctactggttttacagaattacttgagtttgtcatggaacacgttgaaagagagaatgttgaacca

SEQ ID NO: 54877 - DNA, 229 bp, Glycine max
ctttgtctgggtgctgaagttggatttaatacaacttctgcttagttcacaaaatataatgctggagttgccttcaataaaccagatttctctgtggcacttatgctggcacttaaaggacagaccctgaaggcatcttacattcattatgttgatcgccctgatggatttacggttgctgctgaaatctcccacaggttttcttccttggagaacagatttactattg

SEQ ID NO: 54878 - DNA, 246 bp, Glycine max
gggatcattcaccgtgaccttaaacctgataacttgatcttgacagaagatcataaaactgttaaacttgctgatttcggtctagccagagaagagtacctaacagagatgatgactgctgagacagggacatatcgatggatggctccagaactttacagcactgttactctgagacaaggggattagcagcattacaaccataaggtgcgcagcctatagctttgctccagtgttgtgggaact

SEQ ID NO: 54879 - DNA, 136 bp, Glycine max
ggctgttccctgaggctgttacaattggtgcagatgtgagtggaatgccagaattctgccttcctacgcaagatggtggggttggctttcattatacacctgctatggccattgcagaccagcagattgtaggttc

SEQ ID NO: 54880 - DNA, 265 bp, Glycine max
gatagatgtcattggggccatcgagcctgtagcttcgaatggtcaccgcttcattcttgtggcaatagacaccttccaccaaatgggtccaagcagatcttataatactgtcacgagaagtgtggtggtcagattcacaaagagggagctgatttgtcgatacggactccctaagaagatcataactgacaatggcacccatctgattcacacaatgcatcaagaaatgtgcgacgatttcaagatccaacatcataattccaca

SEQ ID NO: 54881 - DNA, 226 bp, Glycine max
gtttgagtcttcttgatccttctttttctccttgaactcaaacatggcagatgaggtggttctgctagatttctggtcaagtccatctgggatgagggtcaagattgcacttgctgaaaacggtatcaactatgagtacacagacgaggacttgaggtacaagagtacagttctggtcccactgaacccggttcacaagacgactccggttctcatccaccatggc

SEQ ID NO: 54882 - DNA, 262 bp, Glycine max
ctcgagccgcttggcccctttttgttttgtgttctttgcttatcattataggcaatatttctagcctatgctttgaaactgatggtttcattaattatgcaggagaattagtcataggacacatcatcaaaaccatggccatgttgaaaacgatgaatcttggcaccggatgagttgatttcctttgtccggttcctggtggaaacttggctttggccccaaaaattttgtatctataagggggtcaatttcaaaatgttaa

SEQ ID NO: 54883 - DNA, 281 bp, Glycine max
aagctcaatgaagcaggagaagtggtttaaaacaaggctagactggttgtttaagaatacaatcaacaagtaattgactatgaataaacctttgcaccagtaacaatacttgaagccattagaatactctaagcttatgctggacaccaaacacatcaaactgtaccaaatggatgttaagaatgcctttctaaatggattcataaatgaagaggtgtatgtgaagcaaccactaggatttgaagataaagaaagaccttgtcatgtgtacaagcttatca

SEQ ID NO: 54884 - DNA, 158 bp, Glycine max
gaccatctgggtgacatagacttcaagattgctggaactcgaaaaggagttacggctattcaattggatataaaaccagcagggattcctctggatatcgtatgtgaatgtttagaacctgcacacaaagctcgtccccaaattcttgctcacatgga

SEQ ID NO: 54885 - DNA, 129 bp, Glycine max
  unsure (1)..(129): unsure at all n locations
catcgagccgaatcggctncgaggtggcaaccaagtgtattggtaacacgattgaaacgaggccagattattgtcttgggactcacttgcgccaaatgctttcttatggttgtacacgattggagattg

SEQ ID NO: 54886 - DNA, 272 bp, Glycine max
ggagtgcaaaagtcttggtcaaaggcgaaccaaacatatcttatatctgctctatagtacctagaacagatataagatctgttctaggtactatagagcacctgagcttatatttggtgcaactgagtacaccacggccattgatatctggtcagccggttgtgtacttggtcgtctattgcttggccagcctctattccctagtgagagtggagtagatcagcttgttgaaattatcaaggttttaggaaccccgacaagggaagaaatca

SEQ ID NO: 54887 - DNA, 127 bp, Glycine max
ctcgagccgcacaaccctcttactcctcggatgttgacaatggtatagagaaggatgtagagctatggagaagaaagataataaatataagcgttctagtctgcaacagtagcatgggtgttgatgg

SEQ ID NO: 54888 - DNA, 271 bp, Glycine max
ggagctagagaatgatgatgaagtctgctatgtgtgcagtggtggttgtagcacttcttcttctggcggaggtggggcccatggctgaggctgtgacatgcaccccaacagagttgagtccgtgtcttccagcaatcacttccggtgctaaaccttccaatgcttgttgcacgaagctgaagcagcaaaaaccatgcttatgtggctacctcaaaaacgctagcttgaagcagtatgttaactctcctaatgcccgaaaaaccgttgcttc

SEQ ID NO: 54889 - DNA, 215 bp, Glycine max
ttggtggatatgggtagcctcaacggaacactgttgaattctacgccgatcaaccatccagacactggaagtcaggaatcaggggatccaatgaatcttactaatggagatactataacacttggatcaacatcaaaagtaatggttcatattacatcacaaactcagcatcacattccctttggacttggtatggcatcagatccgttggcttt

SEQ ID NO: 54890 - DNA, 263 bp, Glycine max
ccatgctccacaacaacaacactctacgatgataacaacaaaaccagcactaacactgggttagggtacattttcatggacagtgaccaacatcaccgcaacaacaacaacaatggaagctcctcctcctcttcctcttctgctgtcaaggccaagatcatggctcatcctcactatcaccgtctcttggcagcttacgtcaattgtcagaaggttggagccccaccggaagtggtggcaaggttagaagaagcatgtgcttc

SEQ ID NO: 54891 - DNA, 254 bp, Glycine max
cggctctagatagcaagtagatcttcttgtatagagcgatccgagataaactctgtaaacatgttgggttaccatgacctccttacaggtgatgagcttctctctgactccttccgttaccaggaaattgagaatggaatgctgtgggaagttaaggggcagtgggatgctaaaggagcagttgatgtacacattggtgcaaacccttctgctgagggtggaggagaagatgagggagttgatgatgcagctgt

SEQ ID NO: 54892 - DNA, 185 bp, Glycine max
ctatgcccaccatgggtatttcaaggaggcaattaatctatttaatgaaatgcaagaattaggtgtttgtgctaatgatgtcacctttgttggacttctgacggcttgcattcatactggtttagttgaggaggggtttaaatactttgatgaaattctgaaaaacagatcgatacaactcagag

SEQ ID NO: 54893 - DNA, 276 bp, Glycine max
gcctcacgcttggaattatgatattgttggccatggtaattgtagcgtttaacagatccagccaatcgaagcgattgaggaaaggatccagcagaactgggcaaggtcctccaaaactggttattcttcacatggatatggctatccacaccttggatgatataatgagaagtactgagaatctcaatgagaaatatgtaatagggtatggtgcgtctagcactgtatacaaatgtgttttgaagaattcccgaccaattgcaattaagcgactgt

SEQ ID NO: 54894 - DNA, 273 bp, Glycine max
cccttccttctttttcttttattacatccaattaatgttccattacctgtgtgcactaattatgttcaagtaacatttctgttattgttttcataaagtttgattaaaatttgtgttataggtgtatggccagaatctccgagctttagagatgaggggatgggacctataccatcaaggtggaaaggaacttgtcaacatgatcacaccggcttccgttgtaacaggaagctgataggagttaggtacttcaacaaaggttatatggcccat

SEQ ID NO: 54895 - DNA, 274 bp, Glycine max
tctcgagccgattcggctcgaggttctgtgtttgtgtttgtatttactctcacctgaaaatatcttgctgcggtggtaactgtggttgcggaagctcctgcaagtgcggcaacggctgcggagggtaagattttcgttgtaacattgtttttttcttgggaaaatagagtttttccgggaaaattttctttttggatttttaattgttattatggttacccttttggttcaattgcatgaaaaaactatgctttgtttattttcttgcatgggg

SEQ ID NO: 54896 - DNA, 297 bp, Glycine max
aaaaaactcctaaaacaccaaaaggacctagttctgtagaagacattaaagcaaaaatgcaagcaagtatagaaaaaggtggttctcttcccaaagtggaagccaaattcatcaattatgtgaagaattgcttccggatgactgaccaagaggctattcaagatctctggcagtggaggaagtctctttaagaaaatagtttaaacaatttgttaaaaaattttccgtcttatttcatttctgtaacagttgatatctggctgtcctttttataatgcagagtgagaactttcccta

SEQ ID NO: 54897 - DNA, 298 bp, Glycine max
aagaaattcagccgccatcatggacccaccattactgccaagctctacgggcgggcgccgcagctgcagggaaactctcctgcaggacttcagagtggttgcccagggtgtgggcatccctgaggactccatcttcaccatggctgaccgaggtgaatgtgtccctggggagcaggaaccagagcccatcttaatcccgagagtccggagggctgtgctaccccaagaagaggaaggatcagggggtgggcaactggtgaactgaagtcaccaagaaagaagattcctgccagctggg

SEQ ID NO: 54898 - DNA, 293 bp, Glycine max
attatacctaaatctgggacagggaggtgacagtggaacaggctaccaatcagaactagatgacttttaaggctcctcctattatgagacttcaatttccaaagagaagaactagcagagaaattgtatttcagtaattttaagctaccttctgtcttgtagagtcttgttatagttgtgtaaatcaaaaacacagaataaggaacatatttaactttttttcattataaaatggttagaggaccctaccccctctagattccctgatttccccaggcctgcagcatacagta

SEQ ID NO: 54899 - DNA, 296 bp, Glycine max
aacagcggccagcctcccaactacgagatgctcaaggaggagcaggaagtggctatgctgggggcgcaccacaaccctgctcccccgacgtccaccgtgatccacatccgcagcgagacctccgtgcctgaccatgtcgtctggtccctgttcaacaccctcttcatgaacacctgctgcctgggcttcatagcattcgcctactccgtgaaggtgcgtatggccctggcggaaatccagggggtgccggtgagcctggggctccacctgcccacatgctgcctggggtggggact

SEQ ID NO: 54900 - DNA, 219 bp, Glycine max
gtgcccagggctgcatttgcaaaggggcgtcggacaagtgcagctgctgcgcctgatgctgggacagccccgctcccagatgtaaagaacgcgacttccacaaacctggatgttttatgtacaaccctgaccctgaccgtttgctatattcctttttctatgaaataatgtgaatgataataaaacagctttgacttgaaaaaaaaaaaaagagaaaag

SEQ ID NO: 54901 - DNA, 202 bp, Glycine max
aaaagactggttaatgataacaatgcatcgtaaaaccttcagaaggaaaggagaatgttttgtggaccactttggttttcttttttgcgtgtggcagttttaagttattagtttttaaaatcagtactttttaatggaaacaacttgaccaaaaatttgtcacagaattttgagacccattaaaacagttaaatgcagaaac

SEQ ID NO: 54902 - DNA, 229 bp, Glycine max
tgcccaagtgtgaagactgtcagagcctggtgaagcctgatatcgtcttttttggtgagagcctcccagcgcgtttcttctcttgtatgcagtcagacttcctgaaggtggacctcctcctggtcatgggtacctccttgcaggtgcagccctttgcctccctacatcagcaaggcacccctctccacccctcgcctgctcatcaacaaggagaaagctggccagtcgg

SEQ ID NO: 54903 - DNA, 294 bp, Glycine max
ccggtattgtaagaacaagccgtacccaaagtctcgcttctgccgaggtgtccctgatgccaagattcgcatttttgacctggggcggaaaaaggcaaaagtggatgagtttccgctttgtggccacatggtgtcagatgaatatgagcagctgtcctctgaagccctggaggctgcccgaatttgtgccaataagtacatggtaaaaagttgtggcaaagatggcttccatatccgggtgcggctccaccccttccacgtcatccgcatcaacaagatgttgtcctgtgctgg

SEQ ID NO: 54904 - DNA, 295 bp, Glycine max
caccaatgttgtacatgtatgataatggtgtactgtatactttaacatgccccatactttgtattggagagtacaataatgtaaatcctaaaagcaccactattttagcataataaaagatagtccaaagagctcctatatagactactccagataacttcgcttctaagatacttgtagcttattgtaattttttttaagaaattcaaggtcattattattgtacaaaataagcgctttgtttaacacagctatatagttttgttaatttttaaaaaactgtggagacggtgat

SEQ ID NO: 54905 - DNA, 278 bp, Glycine max
aaatagctctgtgggttttaacatttttataaagatataccaagggccattcagtacatcaggaaagtggcagacagaagcttctctctgcaaccttgaagactattggtttgagaacttctcttcctataccacccaaaatcataatgccattggaaagcaaaaagttgttttatccatttgatttgaattgttttaagccaatattttacggtaaaactcactgaatctaaccatagctgacctttgtagtagaatttacaacttataattacaat

SEQ ID NO: 54906 - DNA, 293 bp, Glycine max
gcgctagaggaagcatcacagcaactggctggacaagaaagggaaaagaatcagggatttgattttgattcctttattgcaggaactattcagcttagttcccagcatgagcctactgatgttgttgataaattaaatgacttgaatagctcagtgtcccaactagaattgaaaagtttgatatcaaagtcagtaagccaagaaaaacaggaaaaaggaatggcaaatctggctcaattagaagccttgtaccagtcttcttgggacagccagtttgtgagtggtggggagga

SEQ ID NO: 54907 - DNA, 298 bp, Glycine max
gacagcgtttaacaaagcttagagaaacctccaggagactgctatcatggcagagaagcccaagctccactacttcaatgcacggggcagaatggagtccacccggtggctcctggctgcagctggagtagagtttgaagagcaatttataaaatctgcagaagatttggacaagttaagaacatgatggatatttgatgttccagcaagtgccaatggttgagcatgatgggatgaagctggtgcagaccagagccattctcaactacattgccagcaaatacaacctcttgggaaa

SEQ ID NO: 54908 - DNA, 292 bp, Glycine max
ggcggccgagctggttggtggcggcggtcgtgcggacgcaaacatgcagatctttgtgaagaccctcactggcaaaaccatcacccttgaggtcgagcccagtgacaccattgagaatgtcaaagccaaaattcaagacaaggagggtatcccacctgaccagcagcgtctgatatttgccggcaaacagctggaggatggccgcactctctcagactacaacatccagaaagagtccaccctgcacctggtgttgcgcctgcgaggtggcattattgagccttctctccgc

SEQ ID NO: 54909 - DNA, 291 bp, Glycine max
ggaaagatgctaaagcacttccagagcctgtccggagctcagaggttcggaagacttatcgaccatggagcgcgcgtcctgcttgttgctgctgctgctgccgctggtgcacgtctctgcgaccacgccagaaccttgtgagctggacgatgaagatttccgctgcgtctgcaacttctccgaacctcagcccgactggtccgaaagctacaagtgtgtgtctgcagtagaggtggagatccatgccgccggtctcaacctagagccgtttctaaagcgcgtcgatgcgga

SEQ ID NO: 54910 - DNA, 282 bp, Glycine max
tcttccttgaagccaactacatgaacctacagagatcctacactgtggccattgctggctatgctctggcccagatgggcaggctgaaggggcctcttcttaacaaatttctgaccacagccaaagataagaaccgctgggaggaccctggtaagcagctctacaacgtggaggccacatctatgccctcttggccctaatgcagctaaaagactttgactttgtgcctccgtcgtgcgttgggctcattgacagagttatacggtggtggctatggctcta

SEQ ID NO: 54911 - DNA, 293 bp, Glycine max
ggcaccaccactgacctgggacagtgaatcgacaatgccgtcttctgtctcgtggggcatcctcctgctggcaggcctgtgctgcctggtccctgtctccctggctgaggatccccagggagatgctgcccagaagacagatacatcccaccatgatcaggatcacccaaccttcaacaagatcacccccaacctggctgagttcgccttcagctctataccgccagctggcacaccagttccacagatcaacgattacgtggagaagtggtatcaagggaaaattgtggatt

SEQ ID NO: 54912 - DNA, 289 bp, Glycine max
gagaggagaacgcagttcacagtacagagccagttgtccaggagaatggggacgaagctggggaggggagagaggctaaagattgtgaccccggctctccaaggaggtgttacatcatcatcatctctggccggaaagaaaagtgtgaggctgccaaggaagctctggaggcattggttcctgtcaccattgaagtagaggtgccctttgaccttcaccgttacgttattgggcagaaaggaagtgggatccgcaagatgatggatgagtttgaggtgaacatacatgt

SEQ ID NO: 54913 - DNA, 292 bp, Glycine max
ccatgccagcccttcctgctgcctccctcctgtctggctcctggggcccatgcttagagcccaggctccagccctgagtgcttccgagctggcggactgcccaggggccatcagaggatggtggtgctgctgctgatccggggaccgctgtcttccctcccatacgcctttcatccctccttctagggcctatggcagttctcccaggatgtgtggcgagacctgggccagcccacagcgttcctagtcaggcagccacaccttggtcctcatcttggtcccttccaatctg

SEQ ID NO: 54914 - DNA, 206 bp, Glycine max
tattctgtgtcatttttcttcatgggagaaacagcccacagagctcaccaacaagtactccaaaactaagtaagagtttaagctttgagatgcaacaagatgagctaatcgaaaagcccatgtctcctatgcagtacgcacgatctggtctgggaacagcagagatgaatggcaaactcatagctgcaggtggctataacagagag

SEQ ID NO: 54915 - DNA, 242 bp, Glycine max
gcctggcctaccgcggcactcccggctgcacgctctgcttggcctcgccatgccggtggacctcagcaagtggtccgggcccttgagcctgcaagaagtggacgagcagccgcagcacccgctgcatgtcacctacgccggggcggcggtggacgagctgggcaaagtgctgacgcccacccaggttaagaattggaccaccagcatttcgtgggatggtcttgattcagggaagctctaca

SEQ ID NO: 54916 - DNA, 291 bp, Glycine max
ccactgctgtgtgtcttgtcaggatgctcacttgttcctactgagatgctggatattgattttgtaacagcacctggtgtttcacggctgtccgagtgagctaacgtggcggtgtggctgcctggacctcctctttcaggttaacgctgacagaatggaggctcaggctgtctgcaagaaaacagttggtttggctgtgcattttgacctcctcttccccactgccatcttcctcagagactttgtagctgcctcctagaagcacattctgagcacatttgagcactctgt

SEQ ID NO: 54917 - DNA, 285 bp, Glycine max
cctgtattgggctctcatttttaactgtacttgtcttctatcttccttcaaatgaaggtgaaaagatttgtctctgcacttcagtacttgtgtctttgactgtcttccttctggttattgaagagatcataccatcatcttcaaaagtcatacctctaattggagagtatctggtatttaccatgatttttgtgacactgtcaattatggtaaccgtcttcgctatcaacattcatcatcgttcttcctcaacacataatgccatggcgcctttggtccgcaaga

SEQ ID NO: 54918 - DNA, 281 bp, Glycine max
ccaagatgccgaaaggaaagaaggccaagggaaagatggtggctccggccccagctgtcgtgaagaagcaggaggctaagaaagtggtgaatcccctgtttgagaaaaggcctaagaattttggcattggacaggacatccagcccaaaagagacctcacccgctttgtgaaatggccccgctatatcaggttgcagcggcagagagccatcctctataagcggctgaaagtgcctcctgcgattaaccagttcacccaggccctggaccgccaaacagct

SEQ ID NO: 54919 - DNA, 291 bp, Glycine max
agcgctcagccaacggtggctccgaatctgacggggaggagaacatcggctggagcacggtgaacctggacgaggagaagcagcagcaggatttctctgcttcctccaccaccatcctggacgaggaaccgatcgtgaatagggggctggcagctgccctgctcctgtgtcagaacaaagggctgctggagaccacagtgcagaaggtggcccgggtgaaggcccccaacaagtcgctgccctcagccgtgtactgcatcgaggataagatggccatcgatgacaagtaca

SEQ ID NO: 54920 - DNA, 284 bp, Glycine max
ggaagctttcgtctcgtgggtgcgaaaggtaaccgaagcggctcaggaaggcagctgtcactgagcccctggaacagagcgagagtatcgtagtgggcagcagtcagtgacaggtgtaacctctgtggatgacagcaacagttactggaggatacgggggaagagtgccacagtgtgtgagaggggaacccccatcaagtgtggccagcccatccggctgacacatgtcaacactggccgaaacctccatagtcaccacttcacttcacctctttctggaaacc

SEQ ID NO: 54921 - DNA, 179 bp, Glycine max
caaacatcatcaagatcttgaggcatgacattggtgccactgtccatgagctttcacgagataagaagaaagacacagtgccctggttcccaagaaccattcaagagctggacagatttgccaatcagattctcagctatggagcggaactggatgctgaccaccctggttataaagat

SEQ ID NO: 54922 - DNA, 196 bp, Glycine max
gccatggactctgtcctgaaggcctgaggttactggaaattaggggattaacccactagctcttgttgagccgtgggcaattgtctgaaaagtgaagacagaaccacagggctattttgtttgcttcatgtgtcccagaagatgactgagggtgagttggcttacctggcccatcagggtaggctggagttaggga

SEQ ID NO: 54923 - DNA, 251 bp, Glycine max
attcccatggctcaaaccacagaaagttcaacactttgttcagtgagttagatgcacaatatggaagcctgttctgtgacatggaagtgaagtggctgagtcgtggtatggtgctaaagtagttttttgaactgttggacgaacttgactttttcatgtcctctaaaggacaatctgtgcctcagctcactagcaaaattgggtcaaagacttagcccttttgattaacttacaacacttctaaatacttg

SEQ ID NO: 54924 - DNA, 122 bp, Glycine max
ggaaaccttaagtaaccagtggctaaacagaaaagccggttgcccaactgcattaatgaactctaattcgggagtctgttcccttttagtgccacgcgttgaatagttccacatactttcag

SEQ ID NO: 54925 - DNA, 287 bp, Glycine max
atcaccaccaagcacatgctacccacggttctgcgcatggctggggacccggttgccaatgtccgcttcaatgtggccaagtctctgcagaagatagggcccatcctggacaacagcaccttgcagagtgaagtcaagcccatcctagagaagctgacccaggaccaggatgtggacgtcaaatactttgcccaggaggctctgactgttctgtctctcgcctgatgctggaagaggagcaaacactggcctctggtgtccaccctccaacccccacaagtccctct

SEQ ID NO: 54926 - DNA, 284 bp, Glycine max
cttgaagataagtttaaaagcaataatttagagagagagcaggagcagcttgaccgcatcgtgaaggaatctggaggaaagctgaccaggcggcttgtgaacagtcagtgcgaatttgaaagaagaaaaccagatggaacaacgacgttgggacttctccatcctgtggatcccattgtaggagagccaggctactgccctgtgagactgggaatgacaactggaagacttcagtctggagtgaatactttgcaggggttcaaagaggataaaaggaacaaagt

SEQ ID NO: 54927 - DNA, 284 bp, Glycine max
gcagtttcatttcaaagacttcaacagggcctttgggttcatgacaagagtgtgcctgcaggctgagaaactggaccaccatcctgaatggtttaacgtgtacaacaaggtccacatcacgctgagcacccatgagtgtgccggcctttcagaacgggacataaacctggccagcttcatcgaacaagtagcagtgtccatgacatagaccctgcccttcctctttgaattcttccgggggaaagggtgactgaactgggagtccagggagggagctgaggagc

SEQ ID NO: 54928 - DNA, 287 bp, Glycine max
gcatactttaacttctatagttttctcctttagagggtcgtcttcagttttagaggtttacttctcccttgcctttgactcattggactagtgcagaggctttaagtagtttaaaatgggcttttgcttttctaggtcattaacgttttttatttagtttctttagccaatagtggctgagtttcgcacttgattttcaatattttatagtaagaaatgacaaactgctttgtttcatttcataaacaaactctgcatttagataactattaaaggttgttaagatg

SEQ ID NO: 54929 - DNA, 288 bp, Glycine max
cactttgttctggtattgacgcaattatattaggaaaaaagttggttgactgtttttgcttaattgacttctaaaatgttcaaattgtctagttctaaaagtttactaaatgcctagtgcagttaaacatactcttgtttaagtgtgtgttgctaaattttttactgtcattactaaataatctgtgtggcaaaatgtgtgtcagcacttttccctccttttttatctcctattttcaggagtcaaatgtagccataaactgtatccttgtctgacactttagctaaa

SEQ ID NO: 54930 - DNA, 284 bp, Glycine max
ctcttgccatggcctccctgcccgcctctctgcagagtatgtgaacatgcaggatcccgagatggacatgaagtcagtgactgaccgggcagcccgcaccctgctgtggactgagctcttccgaggcctgggcatgaccctgagctacctgttccgggaaccgaccaccatcaactacccgttcgagaagggcccgctgagccctggcttccgtggggagcatgcgctgcgccggtacccctccggggaggagcgttgcattgcctgcaagctctgcgaggcca

SEQ ID NO: 54931 - DNA, 283 bp, Glycine max
  unsure (1)..(283): unsure at all n locations
cgnccttcgacacggacgtcaacatactgacccgcttcgtcatggaggagggcaggaaggaccgctgcacgggggagttgacccagctgctcaactcgctctgcacagcagtcaaagccatctcttcggcggtgcgcaaggcgggcatcgcgcacctctatggcattgctggttctaccaacgtgacaggtgatcaagttaagaagctggacgtcctctccaacgcactggttatgaacatgttaaagtcatcctttgccacgtgtgttctcgtgtcagaaga

SEQ ID NO: 54932 - DNA, 268 bp, Glycine max
tatagctccatctctcctgcttctttaacttgataatgcatacttgatttttctatttgttatttcataaaccaattaatacacagataaaatgactgtatatcaaaccatgtttgtatagaaaaaatggattttggatgcctctcatatgtaattagttctattaaacatattaattgtattgtttaatttgtcaggtttttgacagaattttgtttacaagtaataaaaattttatctccaaaagaaaaaaaaatttttttttttg

SEQ ID NO: 54933 - DNA, 278 bp, Glycine max
tgcatatagtgacagtataacctgtctatactacagtagttccagtcctaactttctgaattatttttaaagatcttctctaacaagctatgggaatttggcttcatactctttctttgcaacagcagtgttctgggtgataattttgaattgatacctgttcctttttctgggttttgttggctttttgaaaaattgtctttccttatcattggtgggaggcttgtagcaaagtaccttttttggaaaagaggacgaaaaattgaactaccgcttga

SEQ ID NO: 54934 - DNA, 181 bp, Glycine max
gttggtttcctgaagcgcacccctgtgaataacaggtggcttttcatggatgtctctagtcagagaaaaatgataaaggcttaaattgaggattaacagaagcagattaacctcagaaatcctgtctggctggcagatttcaagtaaaaaaaaaaaaaaggtgggttggggggaccctttt

SEQ ID NO: 54935 - DNA, 283 bp, Glycine max
aggaggtcccccacggcccttcaggatgaaagctgcggtgctgaccttggccgtgctcttcctgacggggagccaggctcggcatttctggcagcaagatgaacccccccagagcccctgggatcgagtgaaggacctggccactgtgtacgtggatgtgctcaaagacagcggcagagactatgtgtcccagtttgaaggctccgccttgggaaaacagctaaacctaaagctccttgacaactgggacagcgtagactccaccttcagcaagctgcgcgaa

SEQ ID NO: 54936 - DNA, 184 bp, Glycine max
tctgcctctccctcccttcctcaggcatcagagcggagacttcagggagaccagagcccagcttgccaggcactgagctagaagccctgccatggcacccctgagaccccttctcatactggccctgctggcatgggttgctctggctgaccaagagtcatgcaaggtgcgctgcactgagggc

SEQ ID NO: 54937 - DNA, 281 bp, Glycine max
ggtgactgtctcagtggagctgggtcatctcaggccttggctccttgaacttttgagcgccatgtgcttacccgaagtcctctctgaggacatgaagaagctgaaggcccgaatgcaccaggccatagaaagattttatgataaaatgcaaaatgcagaatcaggacgtggacaggtgatgtcgagcctggcagagctggaggacgacttcaaagagggctacctggagacagtggcggcttattatgaggagcagcacccagagctcactcctctacttg

SEQ ID NO: 54938 - DNA, 162 bp, Glycine max
ggaaaacaaaatctgatactccatttgattattgtaaatatttgatcttgaatcacttgacagtgtttgtttgaattgtgtttgttttttcctttgatgggcttaaaagaaattatccccagggagaaagagcagttatgccacttcttaaaacagagcaaa

SEQ ID NO: 54939 - DNA, 155 bp, Glycine max
tgccctttgacccccaagatactcatcagtcaaggttctacttgagcaagaaaaagtgggtaatggtgcccatgatgagtttgcatcacctgactataccttacttccgggacgaggagctgtcctgcaccgtggtggagctgaagtacacaggc

SEQ ID NO: 54940 - DNA, 209 bp, Glycine max
aaagagcaactcagtctgctggacaggttcacggaggatgccaagaggctgtatggctccgaggcctttgccactgactttcaggactcagctgcagctaagaagctcatcaacgactacgtgaagaatggagctagggggaaaatcacagatctgatcaaggaccttgactcgcagacaatgatagtcctggtgaattacctcttctt

SEQ ID NO: 54941 - DNA, 220 bp, Glycine max
caaccatcacgcctcaggagatcaatggcaaatgggaccacgtgcggcagctggtgcctcggagggaccaagctctgacggaggagcatgcccgacagcagcacaatgagaggctacgcaagcagtttggagcccaggccaatgtcatcgggccctggatccagaccaagatggaggagatcgggaggatctccattgagatgcatgggaccctggagga

SEQ ID NO: 54942 - DNA, 183 bp, Glycine max
gaaaaaagtataggataaattacattaaaatagcacatgattttattttgttttcttcatttctcttgctcaccaagaagtaacaaaagtatagttttgacagagttggtgttcataatttcagttctagttgattgcgagaattttcaaataaggaagaggggtcttttatccttgtccgta

SEQ ID NO: 54943 - DNA, 250 bp, Glycine max
gctggtcaacgcggtgtcgcgcgtgctcatggccttctcgcccaactacatgtccatgctgctcttccgcctgctgcagggcctggtcagcaagggcaactggatggctggctacaccctaatcacagaatttgttggctcgggctccagaagaacggtggcgatcatgtaccagatggccttcacggtggggctggtggcgattaccgggctggcctacgccctgcctcactggcgctggctgcagctg

SEQ ID NO: 54944 - DNA, 164 bp, Glycine max
ggctcggagctccgggcactcagacatcatgagttggtccttgcacccccggaatttaattctcaacttctatgctctgttatttctctcttcaacatgtgtagcatatgttgctaccagagacaactgctgcatcttagatgaaagattcggtagttattgtc

SEQ ID NO: 54945 - DNA, 134 bp, Glycine max
gctggagaaacagcagcaggacctgaaagcagatcacgatgccctgctcttccatctgaagcacttccccgtggacctgcgcttcgtggcctgccagatggagctcctccacagcaacggctcccagaggacct

SEQ ID NO: 54946 - DNA, 124 bp, Glycine max
tgcaatagtttacctgtactatagggacgcttgtagagctgaataaagccaatgaacttttctatctttctcataaactggtggatttatatcctagtaatcctgtatctaggtttgcagtggg

SEQ ID NO: 54947 - DNA, 150 bp, Glycine max
gccccggcagatcgacgaccagattacaagggcacttggatccacccagaaattgacaaccccgagtattctcccgatcccagtatctatgcctatgataactttggcgtgctgggcctggacctctggcaggtcgcgtctggcaccatc

SEQ ID NO: 54948 - DNA, 157 bp, Glycine max
cgacctacgcacacgagaacatgcctctcgcaaaggatctccttcatccctctccagaagaggagaagaggaaacacaagaagaaacgcctggtgcagagccccaattgccacttcatggatgtgaaatgcccaggatgctataaaatcaccacggt

SEQ ID NO: 54949 - DNA, 168 bp, Glycine max
aagaaagtgaaagaccactgcagcaaacacagcccctgccagaaaggagggacctgtgtgaacatgccaagcggcccccactgtctctgtccacaacacctcactggaaaccactgccagaaagagaagtgctttgagcctcagcttctccggtttttccacacaaca

SEQ ID NO: 54950 - DNA, 248 bp, Glycine max
gtttgtcatgggggactgcctttaaattttaagtgacactacagccaaacacaaaaaggtgatgggttgtgttatgcttgtattgaatgctgtcttgacatctcttggcttgtcctccggtatgttctaaagctgtgtctgagatctggatctgcccatcactttggctagtgacagggctaattaatttgctttatacattttcagtaatctgcctttttcctttctggaggcatcacatgctggtg

SEQ ID NO: 54951 - DNA, 145 bp, Glycine max
ctctccatgctctgtccaatatggagcagccacatttaccaggactgggaaggctgcacaggtgactatccagtcttcagggacatttaccagcaaattccaagtggacaacaacaaccgcctgttactgcagcaggtctcattg

SEQ ID NO: 54952 - DNA, 189 bp, Glycine max
ctctcaaaacatgttctgtgctggacacccatctctaaagcaggacgcctgccagggggatagtgggggcgtttttgcagtaagggacccgaacactgatcgctgggtggccacgggcatcgtgtcctggggcatcgggtgcagcaggggctatggcttctacaccaaagtgctcaactacgtggactg

SEQ ID NO: 54953 - DNA, 241 bp, Glycine max
gtcccagcgaacccgcgtgcaacctgtcccgactctagccgcctcttcagctcatggatcccaactgctcctgcgccgccggtaagaggctggggatgcccagtgtagactgtagcgctagagaagcaatttctgacccctctttctttctctggtcactcaatttcaggacaggagttgctccttcccaaagagttttggggtatctttctctccatcctgggttattcggagccccttt

SEQ ID NO: 54954 - DNA, 161 bp, Glycine max
gcgaggtctgcggtgttcgattcaccaggaacgacaagctgaagatccacatgcggaagcacacgggagagcgcccctactcatgcccgcactgcccagcccgcttcctgcacagctacgaccacaagaaccacatgcacctgcacacaggggtccggccc

SEQ ID NO: 54955 - DNA, 253 bp, Glycine max
gtcctggcacagcatcaaggagggcttctccttccagcccaagctgcgctcacccaggcgcctcaacagtagcccccgggtccccgtcagccccctcaagttctccccttttgaggggtttcggcccagccccagcctgccggagcccacggagctacctctacctccactactgccaccgccgccgccctcgaccaccgcccctctccccatccgtcccccctcagggaccaagaagcccaagaggggccgt

SEQ ID NO: 54956 - DNA, 261 bp, Glycine max
gtcttgggaacggacaaggagaattcaagtgtgaccctcatgaggcaacgtgttatgatgatgggaagacataccacgtaggagaacagtggcagaaggaatatctcggtgccatttgctcctgcacatgctttggaggccagcggggctggcgctgtgacaactgccgcagacctgggggtgaacccagtcccgaaggcactactggccagtcctacaaccagtattctcagagataccatcagagaacaaacatattgt

SEQ ID NO: 54957 - DNA, 232 bp, Glycine max
gagaattaagtattcactgtatattaaggggaagcttttgccaagttgtggtcttcaaatttatgtttactcttcctattggcagaataggtgctatttaagagtaaaccaaaggataagcagagggagtccctataaccaaagatggacagcatagccctggatagccagataaaccactctttgtattaagaaatgtttctttcctagtggttgaagggtgggtaactgg

SEQ ID NO: 54958 - DNA, 224 bp, Glycine max
  unsure (1)..(224): unsure at all n locations
tgactggacccatctgtcttcaaaagaagtggacccgtctacaggtgaactccagtccctacagatgccagaatccgaagggccaagctctctggacccctcccaggagggacccacagggctgaaggaagctgccttgtacccacatctcccgcaanaggctgacccgcggctgattgagtccctctcccagatgctgtccatgggcttctctgatgaaggcg

SEQ ID NO: 54959 - DNA, 155 bp, Glycine max
gcctattacaacctggaggaaagctgtacacggttctaccatccggaaaaggaggatggaaagctgaacaagctctgccgtgatgaactgtgccgctgtgatgaggagaattgcttcatacaaaagtcggatgacaaggtcaccctggaataacg

SEQ ID NO: 54960 - DNA, 205 bp, Glycine max
gcacaaatggggcccaagacgttctcataataataattccagtgacctccatccccataagcatcattcccatgaacagcatccccacggacaccatccccatgcacaccatcctcatgaacatgatacccatagacagcatccccatggacaccacccccaatggaaaccatcctcatggacacaccccccatggacaacatcc

SEQ ID NO: 54961 - DNA, 226 bp, Glycine max
  unsure (1)..(226): unsure at all n locations
gtttcttggagcttcacaaacttaaaaccaagnaacatctattattgctactattgtgtgtttttctagttaagtcccaaggtgtcaacgacaatgaggagggtttcttcagtgcccgtagtcatcgaccccttgacaagaagagagaagaggctcccagcctgaggcctgccccaccgcccatcagtggaggtggctatcgggctcgtccagccaaagcagctgc

SEQ ID NO: 54962 - DNA, 232 bp, Glycine max
gcaaggcagggggcgctgggatctggctgtgcaggaaagggcagcccggagccagtgcacctacagcaaccccgagggcaccgtggtgctcgcctgtgaccaggcccagtgtcgctggctgaacgtccagctctctccttggcagggctccctgggactgcagtacaatgctagtcaggagtgggacctgaggtcgagctgcggttctctgcggctcaaccgtgtctatcga

SEQ ID NO: 54963 - DNA, 189 bp, Glycine max
aagacagaggacacgatctttctcagagagtaccagacccgccagaaccagtgcttctataactccagttacctgaatgtccagcgggagaatgggaccgtctccagatacgagggaggccgagaacatgttgctcacatgctgttccttagggacaccaagaccttgatgtttggttcctacctggac

SEQ ID NO: 54964 - DNA, 128 bp, Glycine max
cgcagcatggctcgtggtcccaagaagcatctgaagcgggtggcagctccaaagcattggatgctggataaattgaccggtgtgtttgctcctcgtccatccaccggtccccacaagttgagagagtg

SEQ ID NO: 54965 - DNA, 259 bp, Glycine max
attgtgatgtgatcgtagctgaggtatgtgcttctcaggcctccaaagcttccacatttttgttggtatcagttattcatgttgggtgtattctcatcccagatttttctcatttagatcataaacataatagaaagggctagaattgcaatcttgtgtaacttaaaaagcagctagtttttatttcctaggttcgttccaccagtcataaaccagatgaaatctatggcatgattgaaagactatctcctggcactcg

SEQ ID NO: 54966 - DNA, 220 bp, Glycine max
attagctgctgattttattgaaagtaaggatgtttgcaaaaactatgctgaggcaaaggatgtcatcctgggcatgtttttgtatgaatatgcaagaaggcatcctgattactctgtcgtgctgctgctgagacttgccaagacatatgaaaccactctagagaagtgctgtgccgctgcagcacctcatgaatgctatgccaaagtgtcgatgatttaa

SEQ ID NO: 54967 - DNA, 244 bp, Glycine max
ggactgggctgggaatgaagcttatgcagaatatcacttccgggtaggctctgaggctgaatgctatgccctccaagtatcctcctatgaaggcactgcgggtgatgctctgattgagggttccgtagaggaaggggcagagtacacctctcacaacaacatgcagttcagcacctttgacagggatgcagaccagtgggaagagaactgtgcagaagtctatgggggaggctggtggtataat

SEQ ID NO: 54968 - DNA, 188 bp, Glycine max
gcacagagactcgcaggccccgagaactgtcgcccttccacgatgtggctccgcaccgttatcctggccactctctctgcttccgcggcttgggggcattacgtctcgccacctgtggtggacaccgtgcatggcaaagtgctggggaagttcgtcagcttagaaggatttgcacatcctgtggccat

SEQ ID NO: 54969 - DNA, 139 bp, Glycine max
gctggcagagtccagtttcagaaaatacgcctggagccagagcagtcgactcgagtgccgacactgcgtcctcactcgcacttgatactgctgggagtcaagtcagctaggaaggtagcaggacatgttctcaaacagc

SEQ ID NO: 54970 - DNA, 217 bp, Glycine max
catcactaaggtcttcagcaatggggctgacctctccggggtcacagaggaggcacccctgaagctctccaaggccgtgcataaggctgtgctgaccatcgacgagaaagggactgaagctgctggggccatgtttttagaggccatacccatgtctatcccccccgaggtcaagttcaacaaaccctttgtgcttcctaaatgattgaccaaaata

SEQ ID NO: 54971 - DNA, 209 bp, Glycine max
caagcatcatcttggggcaggagcaggattccttcggtgggaactttgaaggaagccagtccctggtgggagacattggaaatgtgaacatgtgggactttgtgctgtcaccagatgagattaacaccatctatcttggcgggcccttcagtccgaatgtcctgaactggcgggcactgaagtatgaagtgcaaggcgaagggttcacc

SEQ ID NO: 54972 - DNA, 183 bp, Glycine max
gtgaatgaagaacgaacgctggaagtagaaatagagcctggggtgagagacggcatggagtacccctttattggagaaggtgagcctcacgtggatggggagcctggagatttacggttccgaatcaaagttgtcaagcacccaatatttgaaaggagaggagatgatttgtacacaaatgtg

SEQ ID NO: 54973 - DNA, 287 bp, Glycine max
  unsure (1)..(287): unsure at all n locations
gtgactgaacggacccggtgacaggatcttgctgttggtattaggagatctgcacatcccacaccggtgcaaaaatataacagctanattcaaaaaactcctggtgccatgaaaaattcagcacattctctgcacaggaaacctttgcactaaagagagttatgactatctcaagactctggctggtgatgttcatattgtgagaggagacttcgatgagaatctgaattatccagaacagaaagttgtgactgttggacagttcaaaattggtctgatccatggac

SEQ ID NO: 54974 - DNA, 281 bp, Glycine max
gtttaaatagttctgttgtaacttttaatagttttgtgtatcattcaactttttttcttgcagcaccgaggcacatttgaaaagatggaattgaagtcgttttgtttaacgctgtgtgaatataaagagtagtttgcagctgtgtggtagtggtttaatttgcagccttagctctgtggtgtctggctctagagttacttctttttaccaagcattttcagcctccattttgaaggctgtctacacttaagaagtcttagctgtctaatttttagagaata

SEQ ID NO: 54975 - DNA, 279 bp, Glycine max
gaaaaaatttgcatatggctacatcgaggaccttaagtgccgtgtgctggaactgccttaccaaggcgaggagctcagcatggtcatcctgctgccggatgacattgaggacgagtccacgggcctgaagaagattgaggaacagttgactttggaaaagttgcatgagtggactaaacctgagaatctcgatttcattgaagttaatgtcagcttgcccaggttcaaactggaagagagttacactctcaactccgacctcgcccgcctaggtgtgca

SEQ ID NO: 54976 - DNA, 271 bp, Glycine max
gcggtccaagcgcacacgggcagggaaagcatgaggaataagtgacctagctggagagacatccggcgggtttccgtggcaaccctccggaactatgggatggggaaacagggcaatgagatgccggatccagagggaggcccacgtcctgctggaagcactcaggaagacccaaggccagcctttcgagcccaccttcgtcatcggctgcgcggcctgcaacgtcataggcgacatcctgttccggaagcatattgactagaatcatgag

SEQ ID NO: 54977 - DNA, 279 bp, Glycine max
ggaaggaggcgtccgatgggtgggctttgtggcaagccccttgctgaagcagaagggcgtgaagaaccgggagctcatccacatctctgactggctgccaacactcatgaagctggccaggggacacaccaatggcacaaagcctctggatggcttcgacgtgtggaaaaccatcagtgaaggaagcccatcccccagaattgagctgctgcataatattgacccgaacttcgtggactcttcaccgtgtcccaggaacagcatggctccagcaaagga

SEQ ID NO: 54978 - DNA, 201 bp, Glycine max
gcccaggaaggccttttgcaagaaggagaggaatgggggagaggacgtgagggaccacccccaaccacacagctgccgcagcatctcacaccccgaagggctgaagagaaggaactttgggccaagcttggaaggggccaactggggttactgggcccgcatgagcctcgggcaactctccctcctggcctctgcttgggg

SEQ ID NO: 54979 - DNA, 278 bp, Glycine max
gtgcccatttactctggactccgggtaagtgggctcagcctgcctggggctctgggggcctcacccaggctggggcctgggatcggagaggaggtggtgctttgcagggccaggggccttgggaggcctaaggtcctgcttgggtcttgctttctgcatctggacagacctgtcacgctagaagagccgtctgctgactgcacgtgtgtgtgcacactcgtgtgcatggctgtgaactggaatgtgtgactgtgaccttgtgagtgactggggtccct

SEQ ID NO: 54980 - DNA, 275 bp, Glycine max
ataaatttgaagctctggctgctcatgacgctctggttgagctcagtggagccatgaacactactgcctgcagtctgatgaagatagcaaatgatattcgatttttgggttctggtcctcggtcaggtctgggagaattgatcttgcctgaaaatgaaccaggaagcagtatcatgccaggcaaggtgaaccctactcagtgtgaagcaatgaccatggttgcagcccaagtcatggggaaccatgttgctgtcactgtcggaggcagcaatgga

SEQ ID NO: 54981 - DNA, 279 bp, Glycine max
ggaccccaacagcgaggagaacagcaacgatattgccctggtccacctctccagtcccctgcccctcacagaatacatccagcctgtgtgcctcccagctgccggccaggccctggtggatggcaagatctgtaccgtgacgggctggggcaacacgcagtactatggccaacaggccggggtactccaggaggctcgagtccccataatcagcaatgatgtctgcaatggcgctgacttctatggaaaccagatcaagcccaagatgttctgtgctgg

SEQ ID NO: 54982 - DNA, 139 bp, Glycine max
cctagaggcagctgctccaggaacagaggtgccatgcagccccgggtactccttgttgttgcctccggcgtctggcctctgccgactcaaggcgagtgcctccttctcagtcatgcaggctacatgaccgcacagcgca

SEQ ID NO: 54983 - DNA, 280 bp, Glycine max
cttgggcattaggttctccagcagagctctggccagctgcctctactttaactgggaacacaggctctcacaagatcagaacccccactcacccccaagatcttatctagcaagcctgtagtattcagtttctgttgtaggaagagagcgaggcatccctgaattccacgcatctgctggaaacgagccgtgtcagatcgcacatccctgcgcccccatgcccccatgcccctctgagtcacacaggacagaggaggcagagcttctgcccactgttatt

SEQ ID NO: 54984 - DNA, 283 bp, Glycine max
agcagacacaaccccttcctgcgaccctggagtcccaatcgtgctgccattgtccttctgcccaggactctttcgtcctcagtcaccttggacaaagaagtgtggatcctcagattccatcttttccaactccaaggtgccatggcagagaaggtgctggtaataggtggggctggctacattggcagccacacggtgctggagctgctggaggctggctacttgcctgtggtcatcgataacttccataatgccttccgtggagggggctccctgcctgaga

SEQ ID NO: 54985 - DNA, 280 bp, Glycine max
atggcgtcccgtaaggaaggtaccggctctactgccacctcttccagctccaccgccggcgcagagggaaaggcaaaggcaaaggcggctcgggagattcagccgtgaagcaagtgcagatagatggccttgtggtattaaagataatcaaacattatcaagaagaaggacaaggaactgaagttgttcaaggagtgcttttgggtctggttgtagaagatcggcttgaaattaccaactgctttcctttccctcagcacacagaggatgatgctgactt

SEQ ID NO: 54986 - DNA, 275 bp, Glycine max
ggaagacggggataagcgctgtaagcttctgctggggataggaattctggtgctcctgatcatcgtgattctgggggtgcccttgattatcttcaccatcaaggccaacagcgaggcctgccgggacggccttcgggcagtgatggagtgtcgcaatgtcacccatctcctgcaacaagagctgaccgaggcccagaagggcttccaggatgtggaggcccaggccgccacctgcaaccacactgtgatggccctaatggcttccctggatgcag

SEQ ID NO: 54987 - DNA, 282 bp, Glycine max
cagagccacaggacattgagtgttgtggggccctagaatactacgacaaagcctttgaccgcatcaccacgaggagtgagaagccactgcggagcatcaagcgcatcttccacactgtcaccaaaataaacgaccctgtcatccgcaagctggcaaaaacttaggggaatgtgtttgccactgatgccatcctggccacgctgatgagctgtacccgctcagtgtattcctgggatattgtcgtccagagagttgggtccaaactcttctttgacaagagag

SEQ ID NO: 54988 - DNA, 281 bp, Glycine max
gcgcgccctgcggcccggcctctagtcatcgccctcgcagcggcggccaacatcaccgccactgccacccctcccagactgtggacgggaggatggagtcgatggccgtcgctaccgacggcggggagaggccgggggtcccagcgggctcaggtctgtacggcttcccagcgtcgggcggagctgcgtcggagaaagctgctcatgaactcggaacagcgcatcaaccggatcatgggctttcacaggcccgggagcggcgcggagtgaaaagaagataa

SEQ ID NO: 54989 - DNA, 279 bp, Glycine max
  unsure (1)..(279): unsure at all n locations
gaccaacggacggatgccatgagggctctgctgctcctggggttcctgctggtgagcttggagtcaacactttcgattccaccttgaggaagcaactgaaaaagnataagtacaaagctgaaaagcacacagtcgttctcactgtcaccggggagccctgccacttccccttccagtaccaccggcagctcnaccacaaatgatancaccggngncggtcangccctcagccctggtgtgctaccacccccaactttgatcaggaccagcgatggggat

SEQ ID NO: 54990 - DNA, 277 bp, Glycine max
cttggcagctaatgggctcttaccaagtttaaacacaaaatttatcataacaaaaatactactaatataactactgtttccatgtcccatgatcccctctcttcctccccaccctgaaaaaaatgagttcctattttttctgggagagggggggattgattagaaaaaaatgtagtgtgttccatttaaaattttggcatatggcattttctaacttaggaagccacaatgttcttggcccatcatgacattgggtagcattaactgtaagttttgt

SEQ ID NO: 54991 - DNA, 276 bp, Glycine max
cgcccctggtcgctgccaccccagggatggagacgcaggggagtgggtggtcgggctccccatctaaaagcctgagggctctggggccacagcccatgtcatcccgggggggcctcctgtctaaccactttggcctccagccagacctccctctcccctcccagggcgacagcggtggtccctttgtgtgtgaggacagcatctctcggacgccacgttggcggctgtgtggcattgtgagttggggcactggctgtgccctggcccagaagccag

SEQ ID NO: 54992 - DNA, 276 bp, Glycine max
  unsure (1)..(276): unsure at all n locations
ctttattttgatgtttccttaatgtgtaatttacttattataagcatgatcttttaaaaatatatttggcttttaaagtanaaaaaaaaaaaaaaaaaaagaaaaaaaaaaaaaaggggggccccccaaaaatgaaccccgtcaccccggaaataaatccgggccgggaacctgagggggaaccattttccccaaaagggagccgaataaaacttgggggaaaccagggcaaaaccttttcccggggaaaaatttttacccgcccaaattcccaaa

SEQ ID NO: 54993 - DNA, 273 bp, Glycine max
caggatgtctacaaaattggtggtattggtactgttcctgttggccgagtggagactggtgttctcaaacccggtatggtggtcacctttgctccagtcaacgttacaacggaagtaaaatctgtcgaaatgcaccatgaagctttgagtgaagctcttcctggggacaatgtgggcttcaatgtcaagaatgtgtctgtcaaggatgttcgtcgtggcaacgttgctggtgacagcaaaaatgacccaccaatggaagcagctggcttcact

SEQ ID NO: 54994 - DNA, 276 bp, Glycine max
acaatcttcccatgcacaagatgattaatacagatcttagcagaatcttgaaaagcccagagatccaaagagcccttcgagcaccacgcaagaagatccatcgcagagtcctaaagaagaacccactgaaaaacttgagaatcatgttgaagctaaacccatatgcaaagaccatgcgccggaacaccattcttcgccaggccaggaatcacaagctccgggtggataaggcagctgctgcagcagcggcactacaagccaaatcagatgagaagg

SEQ ID NO: 54995 - DNA, 277 bp, Glycine max
acctgtctacttatcaaaccaaagtagacaaggatctacagtctttggaagacatcttacatcaagttgaaaacaaaacatcagaagtcaaacagctgataaaagcaatccaactcacttataatcctgatgaatcatcaaaaccaaatatgatagacgctgctactttgaagtccaggaaaatgttagaagaaattatgaaatatgaagcatcgattttaacacatgactcaagtattcgatatttgcaggaaatatataattcaaataatcaaaa

SEQ ID NO: 54996 - DNA, 275 bp, Glycine max
gcccttgccagattcacccagggtgaagccttcaaagctttttgctaccaaagcccactcaccctttgagctacagatcactttgctaggagatactcttctgcctcctagacctgttctttccatctttagaaacatcagtttttgtatggaagccaccgggagatttctggatggtggtgcatccgtgaatgcgctgatcgtttcttccagttagagtcttcatctgtccgacaagttcactcgcctcggttgcggacctaggaccatttctc

SEQ ID NO: 54997 - DNA, 273 bp, Glycine max
ctggatttcgccccacggctggggccgccattgcctcccatgaggatgtggacaaagtggcattcacaggctccactgagattggccgcgtaatccaggttgctgacgggagcagcaacctcaagagagtgaccttggagctgggggggaagagccccaacatcatcatgtcagatgccgatatggattgggccgtggaacaggcccacttcgccctgttcttcaaccagggccagtgctgctgtgccggctcccggaccttcgtgcaggagg

SEQ ID NO: 54998 - DNA, 273 bp, Glycine max
tttggttgttactagagagttctaatatgaagggtagtttttcattatttaaaaacacatggaaaaatatgagacatatttctaacatacgaactatagtgcctggatacattcttcagcatttggcagttaatctgctgaaaccaaagtaagaactgaatgacagtgacagttgtgttttatagtaatagaatgtgagagttagaatctttggacaaagttaggctttgtcatttgcctattcagacttttaccaagttgtacctcgagatc

SEQ ID NO: 54999 - DNA, 273 bp, Glycine max
gaaagtatgaaatcgtgtgcttgcaaacttggaagaaaacagttcatgactgcataccttctagttctctagtgttcactggaaattaaagacactaaaagttaacaattcttattaattaatcatattaatgtaattggaatttctagaaatattaggggaagcaactttatacgcaaagcataacagaaaaataaggtgtattttttctttgaaacctatgaaatatactggccaggcacggtggctcatgcttgtaatcccagcactttg

SEQ ID NO: 55000 - DNA, 271 bp, Glycine max
ctaaggcaaaatagacgcttagctgctgatctacagagaacttcttgtaattaaaagatttcaattcatagcaaactggtgttttaaactattgcagtagctggaactttttagtgtaaccagcatttattggagaagtgaatcacaaggaaataaagatgagtaaaagcaaagatgatgctcctcacgaactggagagccagtttatcttacgtctgcctccagaatatgcctctactgtgagaagggcagtacagtctggtcatgtcaa

SEQ ID NO: 55001 - DNA, 274 bp, Glycine max
tgtagctatagttgttatgtgattgttttttaattgctgtaggatcctgttctttcagcaggtgaaaaataaaacgcagttcaaatttcatggttttaattttcaactcagaagcactcaaaaatgcaaaatgtgataatgggcacttgtttaaaagaattagtgtatccagccttcactccagctggttaaaaatgttgcacttatcagcaaccctaccactttcatctgctgaaaggacaaatgtgcttggttttactattatgtaatcaca

SEQ ID NO: 55002 - DNA, 276 bp, Glycine max
ccagcatgaaagtctctgccgcccttctgtgcctgctgctcatagcagccaccttcattccccaagggctcgctcagccagatgcaatcaatgccccagtcacctgctgttataacttcaccaataggaagatctcagtgcagaggctcgcgagctatagaagaatcaccagcagcaagtgtcccaaagaagctgtgatcttcaagaccattgtggccaaggagatctgtgctgaccccaagcagaagtgggttcaggattccatggaccacctgg

SEQ ID NO: 55003 - DNA, 276 bp, Glycine max
cctaaatgcacttgatggtgttgaaatgtccaccttcttaaatttttaagatgaacttagttctaaagaagataacaggccaatcctgaaggtactccctgtttgctgcagaatgtcagatattttggatgttgcataagagtcctatttgccccagttaattcaacttttgtctgcctgttttgtggactggctggctctgttagaactctgtccaaaaagtgcatggaatataacttgtaaagcttcccacaattgacaatatatatgcatgtg

SEQ ID NO: 55004 - DNA, 274 bp, Glycine max
ggactttgaacatgtcggggatcgccctcagcagactcgcccaggagaggaaagcatggaggaaagaccacccatttggtttcgtggctgtcccaacaaaaaatcccgatggcacgatgaacctcatgaactgggagtgcgccattccgggaaagaaagggactccgtgggaaggaggcttgtttaaactacggatgcttttcaaagatgattatccatcttcgccaccaaaataaataacacagggcctaaataagcccgtgtatcctggaag

SEQ ID NO: 55005 - DNA, 270 bp, Glycine max
caagagcaaccaagatgagtgccctgggagctgtcattgccctcctgctctggggacagctttttgcagtggactcaggcgatgatgtcacggatatcgcagatgacggctgcccgaagccccccgagattgcacatggctatgtggagcactcggttcgctaccagtgtaagaactactacaaactgcgcacagaaggcgatggagtatacaccttaaatgataagaagcagtggataaataaggctgttggagatacacttcctgaat

SEQ ID NO: 55006 - DNA, 270 bp, Glycine max
gtaagatcgtctccttgctggcagcgtccgaggctgaggtggagcagctcctgtccgagagatgcccgctcacggggcacagctgctacccagaggccctgctgcacttccggacccactgcttcaactggcactcccccacgtacgagtatgcgttgagacgtttgtacgtgctggtcaacctttgtgagaagccgtatccgcttcacaggataaaattgtccatggaccacgtgtgccttggtcactactgaagagctgcctcctgga

SEQ ID NO: 55007 - DNA, 269 bp, Glycine max
cgataaaattatttttctatgatataatttgtaaatgtaaattattccgatctgacatatctgcattataataataggagaatagaagaactggtagccacagtggtgaaattggaaagagaactttcttcctgaaacctttgtcttaaaaatactcagctttcaatgtatcaaagatacaattaaataaaattttcaagcttctttaaaaaaaaaaaaaaaaaaaaaaaaaaaaaaaaaaaaaaaaaaaaaaaaggtgggggagtatt

SEQ ID NO: 55008 - DNA, 260 bp, Glycine max
cgtgagttggagaaggttgatgctgtaagattaattaatatagtttttgatgaaactggacacttcgtgctgtatggaacaatgctgggcattaaagttataaatgtagagacaaaccggtgtgtgcggattttaggcaaacaagaaaatattagagtgatgcaattggctttgttccaggggatagccaaaaagcatcgtgctgcaactactatagaaatgaaagcttctgaaaatcctgttcttcagaatattcaagc

SEQ ID NO: 55009 - DNA, 258 bp, Glycine max
ggggaaaggaggtctcactgagcaccgtcccagcatccggacaccacagcggcccttcgctccacgcagaaaaccacacttctcaaaccttcactcaacacttccttccccaaagccagaagatgcacaaggaggaacatgaggtggctgtgctgggggcacccccagcaccatccttccaaggtccaccgtgatcaacatccacagcgagacctccgtgcccgaccatgtcgtctggtccctgttcaacaccctctt

SEQ ID NO: 55010 - DNA, 259 bp, Glycine max
ggcagattattccctcagggctgttcgcatgaaaattaggccccttgtgacccaataggctgaagaagtgggaatgggagcactctgtcttctttgctagagaagtggagagaaaatacaaaaggtaaagcagttgagattctctacaacctaaaaaattcctaggtgctattttcttatcctttgtactgtagctaaatgtacctgagacatattagtctttgaaaaataaagttatgtaaggttttttttatcttta

SEQ ID NO: 55011 - DNA, 260 bp, Glycine max
ccacattccatttgtgctagaaaaacctatccactgatgagtctaactgttccaaacgcctcccacctggtgtgcacagctgcctgggtccattgtcacttgggtgcatcaggttgtcctccgatttttagatgagtttcctgtctagagatgtcctagtctgctcactggctggtggcagtagggtaccctgcgtcctcgaaaagccagagggttcacctagtcagacgaaactccagaacagtgcttgtggagggcct

SEQ ID NO: 55012 - DNA, 260 bp, Glycine max
ggcgtgagaagccatgagcagcaaagtctctcgcgacaccctgtacgaggcggtgcgggaagtcctgcacgggaaccagcgcaacgccgcaagttcctggagacggtggagttgcagatcagcttgaagaactatgatccccagaaggacaagcgcttctcgggcaccgtcaggcttaagtccactccccgccctaagttctctgtgtgtgtcctgggggaccagcagcactgtgacgaggctaaggccgtggatatccc

SEQ ID NO: 55013 - DNA, 259 bp, Glycine max
ccaggacagcttgggctcaaaggtcaaggacacctttaatggcaacctgcccttcctcttcaaagtgctctcagttgaaacacccctgtccatccaggcacaccctaacaaggagctggcagagaagctgcacctccaggctccgcagcactaccccgatgccaaccacaagccagagatggccattgccctcacccccttccagggcttgtgtggcttccggccagttgaggagattgtaacctttctaaagaaggtg

SEQ ID NO: 55014 - DNA, 262 bp, Glycine max
cggctcgaggaaaggagaaatgatgttataaaaaactcataaggcaagagctgagaaggaagcgctgatcttctatttaattccccacccatgacccccccaaagcaggagggcattgcccacattcacagggctcttcagtctcagaatcaggacactggccaggtgtctggtttgggtccagagtgctcatcatcatgtcatagaactgctgggcccaggtctcctgaaatgggaagcccagcaataccacgcagtccct

SEQ ID NO: 55015 - DNA, 259 bp, Glycine max
cttggagaaacagcacaaacatgacctcctgactgagccagacctgggggtcaccatcgatctcatcaatcctgacacctaccgcatcgaccccaatgttcttctagatccagctgatgagaaacttttggaagaggagattcaggcccccaccagctccaagagatcccagcagcacgcgaaggtggtgccatggatgcgaaagacagagtacatctccactgagttcaaccgttatggcatctccaatgagaagcct

SEQ ID NO: 55016 - DNA, 259 bp, Glycine max
gcgcaacgaggagaaggcgcacgtgaggccaacaaaaagatcgagaagcagctgcagaaggacaagcaggtctaccgggccacgcaccgcctgctgctgctgggtgctggagaatctggtaaaagcaccattgtgaagcagatgaggatcctgcatgttaatgggtttaatggagatgagaaggcaaccaaagtgcaggacatcaaaaacaacctgaaagaggcgattgaaaccattgtggccgccatgagcaacctgg

SEQ ID NO: 55017 - DNA, 259 bp, Glycine max
ggagcgcggcggcaagatggcagtgcaaatatccaagaagaggaagtttgtcgctgatggcatcttcaaagctgaactgaatgagtttcttactcgggagctggctgaagatggctactctggagttgaggtgcgagttacaccaaccaggacagaaatcattatcttagccaccagaacacagaatgttcttggtgagaagggccggcggattcgggaactgactgctgtagttcagaagaggtttggctttccagag

SEQ ID NO: 55018 - DNA, 259 bp, Glycine max
gcccacgatgctcaggtttggtaacccgggagtgttcccaggtggccttagaaagcaaagcttgtaactggcaagggatgatgtcagattcagcccaaggttcctcctctcctaccaagcaggaggccaggaacttctttggacttggaaggtgtgcggggactggccgaggcccctgcaccctgcgcatcaggactgcttcatcgtcttggctgagaaagggaaaagacacacaagtcgcgtgggttggagaagccat

SEQ ID NO: 55019 - DNA, 259 bp, Glycine max
gtacaattcagattcacccgccctgatgctaaggaaaccctgacgtatgtactagatggcagggcactgggggtcaggctgaaggctgagcaacacctctctgccctccctccctttgtcccatctcccagcgacttccaatattcatgtgtctgagaattgtgtccctcttcaggttccctcttggtgcctaacctggattagtaatgtgcattcaggtgaattttcagctgaggctctgagaactggtactctcagt

SEQ ID NO: 55020 - DNA, 259 bp, Glycine max
cttcgccggggctcagaccagcctccctgccttctccccaggccggctcagccgtgggctttccgaacacaacgccctgctgcagagagaccccctcagccagcccctggcccctggctctcgaattggctctgacccttacctggggcagcgtctggacagtgaggcctctgtccacgccctgcctgaggacacgctcactttcgaggaggctgtggccaccaactcgggccgctcctccaggacttcctacgtgtcc

SEQ ID NO: 55021 - DNA, 259 bp, Glycine max
caggtattcctgatgacagtctgcctctatcttacagagcagcttgttgctatataccattgaaaagccttcagagctgagaggtactactaaccaataacctgcttggctcaaagggccagcaccttctctctaaagcccaagaggagtttgaggaaaactaggtgtctgtgttcactccaggctgaagttacaggtgagtaaacctaaatgtaaggtggactatgctaaaaattcccaatgaagaaactttcacatg

SEQ ID NO: 55022 - DNA, 245 bp, Glycine max
gcttttctcttctgtcaaccccacacgccttttgcacaatgaagtgggtaacctttatttcccttcttttatctctttagctcggcttattccaggggtgtgtttcgtcgagatgcacacaagagtgaggttgctcatcggtttaaagatttgggagaagaaaatttcaaagccttggtgttgattgccttgctcagtatctcagcagtgtccatttgaagatcatgtaaaattagtgatgaagt

SEQ ID NO: 55023 - DNA, 258 bp, Glycine max
gccggtgccccgaaggctccagaccatgaacatggacattctgaagtgctcttggaggatgtggaacatctgaaggtcaagcaggaaccaacagacatacagcttcagcctatggtgacacagctcagatatgaatctttttgcctccaccaatttcaagaacaagatggtgaaagtatacctgagaaccaggagttggcatcaaagcaagaaatcttaaaagaaatggaacatttgggggatagcagactccaaaga

SEQ ID NO: 55024 - DNA, 256 bp, Glycine max
cgaagaacaacccgggttgggtctacattcccccctttgatgaccccctcatctgggaaggccacgcttccatcgtgaaagagctgaaggagacactgtgggaaaagccgggggccatcgcgctgtcagtgggcggcgggggcctgctgtgtggagtggtccaggggctgcaggaggtgggctggggggacgtgcctgtcatcgccatggagacttttggtgcccacagcttccacgctgccaccaccgcaggcaa

SEQ ID NO: 55025 - DNA, 237 bp, Glycine max
gatgagaaagaatacatttaaatagtaacattgtacatagggtgttttcctattaaaaattcagtttcccctgagacttaatgtaaccacttaatgtaatcactatctcattgtttcatctttataaacttgtaaacttcatctatttcaaatattttatgcagtacattatattattctgtacaaaggctttcaaacaaaatttttaaaataataaagtattaatctttctccctg

SEQ ID NO: 55026 - DNA, 257 bp, Glycine max
tgaagagaagatagtcagtctgatcaagaacctgttagttgctcttaaggacttccattctgaatatattgtcagtgcctctaactttacttcccaactctcaagtcaagttgagcaatttctgcacagaaatattcaggaatatcttagcatccttaccgatccagatggaaaagggaaagagaagattgcagagctttctgccactgctcaggaaataattaaaagccaggccattgcgacgaataaaataattt

SEQ ID NO: 55027 - DNA, 255 bp, Glycine max
gtaatgggaagaaataaaagcctacgtgttggtaaatccaacagcaagggagatttttgaatcataataactcataaggtgctatctgttcagtgatgccctcagagctcttgctgttagctggcagctgacgctgctaggatagttagtttggaaatggtacttcataataaactacacaaggaaagtcagccaccgtgtcttatgaggaattggacctaataaattttagtgtgccttccaaacctgagaata

SEQ ID NO: 55028 - DNA, 257 bp, Glycine max
ctcgagtctagagcggccccttttttttttttttttattttgagcgtgacacttctccactagataccaaggaaaagtggtaacaattccacattacacaaaagtactgtaccattgcctttatcttgaaggtttcggaaccctctacagttaataagttaaataaagggcttgagtacataaatatttgtctaggaaccctaccgtatctacaacacggtaagaatctacgggaggccaaacttttaccataccac

SEQ ID NO: 55029 - DNA, 261 bp, Glycine max
gtcaagccggttcccggcccagtcccgtcctgcagcagtctgcctcctctttcaacatgacagatgccgctgtgtccttcgccaaggacttcctggcaggtggagtggccgcagccatctccaagacggcggtagcgcccatcgagcgggtcaagctgctgctgcaggtgcagcatgccagcaagcagatcactgcagataagcaatacaaaggcattatagactgcgtggtccgtattcccaaggagcagggagttctgt

SEQ ID NO: 55030 - DNA, 257 bp, Glycine max
gatagcccaggctctgggaacgcgaggcctaacaacccagactggggcacatttgaagaggtgtcaggaaatgtaagtccagggacaaggagagagtaccacacagaaaaactggtcacttctaaaggagataaagagctcaggactggtaaagagaaggtcacctctggtagcacaaccaccacgcgtcgttcatgctctaaaaccgttactaagactgttattggtcctgatggtcacaaagaagttaccaaaga

SEQ ID NO: 55031 - DNA, 258 bp, Glycine max
gagaaatgcagcattcactctccctgtcttttccccttccctcagcagaaacgtgtttatcagcaagtcgtgagtcaaactgctgccttttaaaaaacccacaaaatgctgattcagttcaaaattaatgcaaatgtttcaaaactgggtttctgatatttgtaaatgtgtttctttattagataagagtgtattaccattaaagtcattagtataatattgctttcaaaaagaaatggtagacaaaactataatcca

SEQ ID NO: 55032 - DNA, 255 bp, Glycine max
ctgtggcagaatgtcgtgtgctgcagaagctgggagcagacgctgttggcatgagtacagtaccagaagttatcgttgcacggcactgtggacttcgagtcttggcttctcactcatcactaacaaggtcatcatggattatgaaagcctggagaaggccaaccatgaagaagtcttagcagctggcaaacaagctgcacagaaattggaacagtttgtctccattcttatggccagcattccactccctgacaa

SEQ ID NO: 55033 - DNA, 260 bp, Glycine max
agcattttgtgatctggtttggtcagatcctgaagatgtggatacctgggctatcagtccccgaggagcaggttggctttttggagcaaaggtcacaaatgagtttgttcatatcaacaacttaaaactcatctgcagagcacatcaactagtgcacgaaggctataaatttatgtttgatgagaagctggtgacagtatggtctgctcctaattactgctatcgttgtggaaatattgcttcgatcatggtcttcaaag

SEQ ID NO: 55034 - DNA, 256 bp, Glycine max
gagcgagctgagtggttgtgtggtcgcgtctcggaaaccggtagcgcttgcagcatggctgaccaactgactgaagagcagattgcagaattcaaagaagctttttcactatttgacaaagatggtgatggaactataacaacaaaggaattgggaactgtaatgagatctcttgggcagaatcccacagaagcagagttacaggacatgattaatgaagtagatgctgatggtaatggcacaattgacttccctg

SEQ ID NO: 55035 - DNA, 257 bp, Glycine max
gaaatctcaaacagaaatgttcatactgaaagagtaaatcatacctgccaggagtgaagaaagctttgggcaaatatggtcctgccgatgtggaagacactacaggaagtggagctacagatagtaaagatgatgatgacattgacctctttggatctgatgatgaggaggaaagtgaagaagcaaagaggctaagggaagaacgtcttgcacaatatgaatcaaagaaagccaaaaaacctgcacttgttgccaag

SEQ ID NO: 55036 - DNA, 243 bp, Glycine max
atctgacaagatagttatttaagaaacatgggaattgcagaaatgactgcagtgcagcagtaattatggtgcactttttcgctatttaagttggatatttctctacattcctgaaacaatttttaggttttttttgtactagaaaatgcaggcagtgttttcacaaaagtaaatgtacagtgatttgaaatacaataaatgaaggcaatgcatggccttccaataaaaaatatttgaagactg

SEQ ID NO: 55037 - DNA, 258 bp, Glycine max
ctgatggaaggaatgctgttagcctgagactcaggaagacaacttctgcagggtcactccctggcttctggaggaaagagaaggagggcagtgctccagtggtacagaagtgagacataatggaatcaggcttcacctccaaggacacctatctaagccattttaaccctcgggattacctagaaaaatattacaagtttggttctaggcactctgcagaaagccagattcttaagcaccttctgaaaaatcttttca

SEQ ID NO: 55038 - DNA, 141 bp, Glycine max
ggccgtttcagcatcaggcaagtggctggatggtattcgaaaatggtattacaatgctgcaggattcaataaactggggttaatgcgagatgatacaatatacgaggatgaagatgtaaaagaagccatagaagacttcct

SEQ ID NO: 55039 - DNA, 255 bp, Glycine max
gggttttgctgtcagtagctcaaagtatggtgtagaaatggcctcctccctccatcctgggaagtcccagtcccatcctggtgtgagaatcaaccaggctttcctgctctacctgagataaccaactccctcccgtaatcaggaagccaaatgtcaccttcccaaagaaattttattttcacgtagctgaagtgcaaaacatagatgaccatttttaataagcacaatcaaatttttaaccacagaatgtctaca

SEQ ID NO: 55040 - DNA, 255 bp, Glycine max
aggagcgggaacagatgagtgaagcagaggtgggggtgtttgtccagcgactccggggcctgatgaatgacatcgcagccttccctgcacccaccattgcggctatggatgggtttgccttgggcggaggcctagagcttgccctggcctgtgacctccgagtggcagcttcctcggcagtcatgggactgattgagaccacgcgagggctcctcccgggggcaagagggactcagaggctgccccgttgtctgg

SEQ ID NO: 55041 - DNA, 255 bp, Glycine max
gtctgaggggggtgcagatgactctgctgaggagggggacctactggatgatgatgataatgaagatcggggggatgaccagctggagttgatcaaggatgatgaaaaagaggctgaggaaggagaggatgacagagacagcgccaatggcgaggatgactcttaagcacatagtggggtttagaaatcttatcccattatttctttacctaggcgcttgtctaagatcaaatttttcaccagatcctctcccct

SEQ ID NO: 55042 - DNA, 253 bp, Glycine max
cccaaccttgtcgggactgtggaacaatccaagagaattcggtgtgtctctcttgctatcaggtctactgtcgtcgttacatcaatggccacatgctccaacaccatggaaattctggacacccgctggtcctcagctacttcgacctgtcagcctggtgttactactgtcaggcctatgtccaccaccaggctctcctagatgtgaagaacatcgcccaccagaacaagtttggggaggatatgccccaccc

SEQ ID NO: 55043 - DNA, 260 bp, Glycine max
cttacctgccttggacagtcaggagggagacgagctccttgtggcgaagttagaggctgtggtccctcctcttcttgccctctctctgcctctgtgctcagtgtgagggtctgagtggatggtaggagtgagtgattcctccccctccccctctgggtgctgttcatccagcctaggggtgcccagcctgtctgaatggggcagtgcccaggcagggtcagtgttttcactcctccttccttggcctttctgggctcctc

SEQ ID NO: 55044 - DNA, 247 bp, Glycine max
ctttgaaggtgactctttatcctggaaacgtgttatcacttaaaatgtcaaagccgcatgggtttagctacaaaagtggacaatacatgtttgtgaactgtgctgctgtgtctccatttgaatggtatgcatttgaagaaacatattctaaatgaaatgtttgcatgtaaataccttcataacaccctgaggtgctttgtttacgcattcataggcatccattttccataacttccgcccctgatga

SEQ ID NO: 55045 - DNA, 253 bp, Glycine max
cggctcgagcggctcgagcggctcgaggattaaagcagcatttagcccgagtttctggtgaagtaacatacggtgaaaaagctcctgatgaagtctacctgaaaatgaaagagaatcttgaaggctgccgttcccataagagacaaaaacaagttgacacacaagcatatatgaattttcactctaatgatgatgaagatgaagaagagcaagttgggtgtagaagcaaagggaagcaattgatggatgatcg

SEQ ID NO: 55046 - DNA, 259 bp, Glycine max
gtgtacgtcaaggctcagaaatcaaaagcctacttcaagagatatcaagtcaagttcaagagaagaagagagggaaaaaccgattaccgtgccaggattcggttgattaatcaggacaagaacaaatataacactccgaaataccgatttgttgttcgctttagcaacaaggacattgttgcacaaataatatctgctagcattgctggcgatattgttcttgctgcagcatatgcacatgagctgccacgatatggtc

SEQ ID NO: 55047 - DNA, 296 bp, Glycine max
ctggcactcatgtcaaagcctctttcaaggttccactggatgcatacattcaatggactttgtattctctgagagtgaacatggtggagtttttgataacaaatttggaatggattatcacataccagtttttggaagtattgcaaaggaaccacctttgcatatcatccatattgctgtggagatggccccaattgcaaaagttggaggccttggtgacgttgttactagtctatcccgggctgttcaggatttaaatcacaatgtggacatcattcttccaaagtatgactgct

SEQ ID NO: 55048 - DNA, 281 bp, Glycine max
gtttggatgatatgaatattgcggggtggaatgcaatgatggctggttatgcacagcatggggattatcaatctgcttttgaactgtttgagtctttggaaggttttggacttgtgcctgatgagtatacttttttggcgatattgactgctttgtgtaatgctgggatgtttctggagatttatcggtggtttacgaggatgagagtggattatggtttggaaccgagtttggagcattatacgtgtttggtgggtgcaatggcacgtgctggagaattg

SEQ ID NO: 55049 - DNA, 233 bp, Glycine max
cacgcttgagaatctgagttcagacttggaacctttcgttgttcctaatctgccacaccatatcgaaattacgaggtctcaggttcctatttttctgagaagcccgtctccgtttcctgataggatgaggcagttagaggagaagagtttcggcattgttaccaacagcttctatgacttggaaccggattatgctgatttcttaaaaaagggaaggaaggcatagtttatag

SEQ ID NO: 55050 - DNA, 285 bp, Glycine max
ggcatcccttcttcaatgatctgcgggacccaaatgcatgcttgcctaatgggcgacctctacctcctttgttcaacttcacatctcaaggtaagatgatttgaacttacattttggttaagtgatacatttcttgccttaggcattgctcatgtaagaaaacaatgcagaactggctaatgcacctgaagagttgcgccaacgcctcattcctgagcatgcaaggagttgaatcaatttgaaagttgaaacatctctagggcattgtaaatgggttttgaatga

SEQ ID NO: 55051 - DNA, 275 bp, Glycine max
cttatgtaacaaagtacagacgagttgtttctgctcaaactcaccgtgaagaaatcatccaagatctttataatacacatgaagatcctgtgaggggaaagacacattcgggaattatcaggtactggggacacgggattgatgtggtatttctgctcagactcaccgtgaagaaatcatccaattgcttttcttgcctctgttttttcagggaattacttcgtgctttccgtttatcaactaagactaagccagagaggattatattctacagg

SEQ ID NO: 55052 - DNA, 228 bp, Glycine max
gagggtttctaatgaagaggctaagaaagtagagatttccaaacttcaaaagatgttagaagctctgaatcttgaattggatgcagctaaattggcaaaaattaatgagtgcaacaagaatgctgttctgcaaaatcaatttgaattgtcagtaaaggaaaagtctgctttaaaaagagagctagttgcagtggatgaattacgtcaggaaaatgccaattaaaggtt

SEQ ID NO: 55053 - DNA, 280 bp, Glycine max
tgtttgttgtgagctataagctagtttatcgtgacgacaatatgaagttgtttgttttctttgttgctgcagtagttttggtagcatggccatgccatggcgcacgctaccgaatgttccctctccgaatgaaaactggctatggtgagcgttcttcggacgtaaaatgcgcaagttttaggcttgctgtggaagcgcacgacatccgagcctttaagaccgttcctgaacagtgcgttcaaccgacaaaggactacgttaatggcgaacaatttagatc

SEQ ID NO: 55054 - DNA, 287 bp, Glycine max
  unsure (1)..(287): unsure at all n locations
tcggagttcgggcgggcgctcgacgctcggtgtgcttgttgtgggacttgttggcggtgttgcggaagctcgtggtggtttgtctgtgtttgctggtgttggacagcgagcccgacacggtggtgacttgtgcgnacaaatggttgagggtggtgtcgttgagcttgatgatgagcagactgaaagcgagtgtgctcttgtgtgtggtcgagtgagtgagccccctggtgcccgtgcccgtgttggtcttgctgggcttgctgtggctgagcgcttccgtgatgctg

SEQ ID NO: 55055 - DNA, 277 bp, Glycine max
cgtttgtcgtgacgacaatgtgaagttgtttgttttctttgttgctgcagtagttttggtagcgtggccatgccatggcgcacgctaccaaaggttccctctccgaatgagaactggctatggtgagcgttcttcggaggtaaaatgcgcaagttttaggcttgctgtggaagcacacgacgtccgagcgtttgagaccgttcctgaagagtgcgttgaaccaacaaaggactacgttaatggcgaacggtttagatcagactctggaacagttaac

SEQ ID NO: 55056 - DNA, 281 bp, Glycine max
cgctacagtttcactgcacatgattcggtgtctggcgttacatgaggcacatcggatgctggatatgggttttgagccacggatgaccaacattgtacaccaaatggacgtgcctccaccacgtgccacacagactatgttgttcggtgcgacgtttccaggagagatacagagattggcttctgatttcctttcaggttatattttccttgctgttggaacagtgggttcaagtactgatttgattgtccaaagagttgagtgtgttcaagagtctgaca

SEQ ID NO: 55057 - DNA, 198 bp, Glycine max
cacggtgtctgcttcctgtggttgttgatcgttgcgttttcgtccgttggtcttgctgttgctgtgccaggacagcgacagcaacatcgaatcttggcgctcccggggcggccacgtgtggcattctctcggttctccggttatgtcgctgtgaacgatcaacgtggccgggcgctcttctactggctcactgagtcc

SEQ ID NO: 55058 - DNA, 281 bp, Glycine max
  unsure (1)..(281): unsure at all n locations
tgcgtacgacaacacggtttcgttccgtttcggtggggagcgaacagcacaacggcgagttctgcctgcgttgctgcgtcggtcgcganggcaagtttggtcgcgagttcctggagttcgagttccgcccagacggcgagctccgctgcgccgacgactccgactgcggagacgacgccgtcgtccgcgaggaggtttgcctgacccccgccgttctccgcgagtgccgtcgcgtcgtcgccgacagcgagattgtgaaggaagatgatgacggctggccc

SEQ ID NO: 55059 - DNA, 280 bp, Glycine max
tatacggaaactttggcaggtgtcagcccgtgtaccatccagtgcgtcaaggagtggcccttgagaactaaattacatccccagatctatggtccacccgaatcagctatcgctaaacaagtcattgaaccgcaaatgattggctattgcacagttgaacaggccattaaggacaacaagttgtttatgttacactaccatgatttgttcttaccatatgtaacaaaagtgacacaaatcaagggaaccacgttatatggatcacgaactctgttctttc

SEQ ID NO: 55060 - DNA, 267 bp, Glycine max
gcactcgaccccatggagaacaaaaccttgtcacatgggcacgtccactgttcagtgaccgcagaagtttccaaagttagcagatccaagaagactaccccaaaactatatacgtcagacttcacagtcagctgtccagtcgtagcgtattctggggcacagtaaccgtaagttcccgtgacacgggtggaaacgtgtgatttgtcaccgactggaccgagctttgcaagaccaaagtctgaaagctttggatgataaccttcgtca

SEQ ID NO: 55061 - DNA, 270 bp, Glycine max
gggagtagcggcattaaaaatgcagatcttcgtgaaaactctgacagggaagactataaccctcgaggtcgagagcagcgacaccatcgacaatgtcaaggccaagattcaagacaaggaaggcattcctccggatcagcagcgtttgattttcgccggaaagcagcttgaagatggaaggaccctggccgattacaacatccagaaggaatcaacccttcatctcgtcctcaggcttcgtggtggcatcattgagccttccctcatggc

SEQ ID NO: 55062 - DNA, 272 bp, Glycine max
actccacccacacgtaccttggtaggccttggaaaccctattctaggacaatattcatgcgatcttacattagtgatgtgttgaggccagaagggtggttggagtggaatggtgattttgctttggacgctttgtactatgctgagtgcgtgaattatgggcctggtgctggagtggctaatagggttaaatggcaagggtaccatgtgatgaatgattctagtcaggctagtaatttcacggtgtcgcagtttattgaggggaatctttgg

SEQ ID NO: 55063 - DNA, 275 bp, Glycine max
tcgctcgtctctacgagccgacatcgtgctcgagcggtctcgagcatcagtccatggcaacccccaaccctaacagattctcccttgccatagagagaaccgggcaatgggttttctccccagaaatcccagccgatgttattgttgcagttggagaatccactttttctctccataagtttattctggcggctaagagtaactacatcagaaaagtgataatggaatcagaggagagtgacctaacaagaatagagatttccaacatacctgga

SEQ ID NO: 55064 - DNA, 263 bp, Glycine max
gcgaccaccgagccggagcaccgccgcgacgaaaacgacgacgacagcgtgacggcggaggatgacgacaccggagcgcaggtcgctccgatcgtgaagctcgaataggtcgccgtcacaatcggcgacgaggacgaggatcccatccttgcacctgaaggcgaactgctatcggtttgacaaggagaggaaccagtggacggagcgtggctgcgggaacgttaagctgctgaaacataaggtcaccgagaaggtgagactag

SEQ ID NO: 55065 - DNA, 267 bp, Glycine max
gcgagctttgcattgcttggcagatttgcgaacaaggagcgaagagattcgagcccactggttcttaccatatttcataacagccgctttcaggatttcatcttcggtgtttttccaaacaccgcccttaatcataatcctcatcttcgcttcaactacagacagcaacaaaacaattcaaacaaagatgattagatgtgaaaaataggggaaaagaaaaataaagagaaatcagggtttaggttagggaatcagagacgcaccaca

SEQ ID NO: 55066 - DNA, 262 bp, Glycine max
ctttagaactcctcaagatacactttggagagagcagcctacagaaatgtgagattatgctcaatgatctaattggctcaaagagaatcaacagtaacattaaagctaccataaatcagccatctcagaccagtgttgaattgggagacagtgcaatatccatggatgtaatttctgctactatcatatcttctaatttctggcctccaatacaggatgagccccttaacctgcctgagcctgttgaccctcctatctgatt

SEQ ID NO: 55067 - DNA, 257 bp, Glycine max
tctcgagcgaatcggctcagtcttacgtctgttttctctgttctctctttctctaatggagttcctcagtttactttatggtgctatggcattgtacttctgtttcctgatctggaaattgtttgatcagagaagggaccaagagtgctacgtattggactaccaactttacaagccaagcgatgaaagaaagcttggaactgaacgctgtgggaagatcatagggaggaacaagcacttggctgaatgagtacaag

SEQ ID NO: 55068 - DNA, 257 bp, Glycine max
gctttctctcatccatcatgaaaggaggaaagtccaagaccgaatctaagagagccgatgccaaacttgctgtgaataagaagggcgccgccaccaagactaggaaacccgccggaaaggggaaggcagcgaaagatcctaacaagccaaagaggcctccaagtgctttcttcgttttcatggaggaattcaggaaggtgttcaacaaggaacatcccgacaacaaagcagtgtctgctgtgggcagctgctggagc

SEQ ID NO: 55069 - DNA, 286 bp, Glycine max
atctgtcgtcatgctaaggtgagtcttctccccaatcagttaccatccgatgcccgtatatcaagctttaggctgaaggtgccatcccctgagcttgaaaggtcattaaaaatcaaggaaagacttgagaattctctgactctgaagaagactctactatttttcgttcttgctggtacttctatggttattgctaatggtgttgttacaccagcgatgtcagtactgtcatctgttgtggtttaaaagttggggtagatgcaatcaagaaagatgaagtggtgat

SEQ ID NO: 55070 - DNA, 270 bp, Glycine max
gattactatgggatacgttctaatacagaggctgttaagcagggaccttctgtaggaacagctgcaattgggggtccatttcaccttgtcaaccatcacggaaaacatgtaactgaaaaggatttcttgggaaagtggactttgttatattttggctttactcactgcccagatatctgtccagaggaactacagaagttagcagctgctgttgataaaataaaggagaaagctggaattgaaactgtaccggtttttatctctgttgat

SEQ ID NO: 55071 - DNA, 270 bp, Glycine max
atcttcactgcacttgttgctcaattgttcctcatgtcactttgccacctcaaatttgggatcttcttgctctttgcttccttaattatcttcatgagcttctttgtcttcttccttttgcccgaaaccaagaaagttccaattgaggagatttatcttctttttgagaatcattggttctggaggagatttgtaactgaccaagacccagagacatcaaaggggactgcttaaaattctcaacaaaatagattgaacaagtgtaggttt

SEQ ID NO: 55072 - DNA, 251 bp, Glycine max
ggctcgagaaaaataagaccataatactagtaacccaccaagtggacttcttgcataatgttgactgtataatggtaatgcgagaagggaaaatcgtgcaaagtggcaagtatgatgaacttctcaaagcaggcttggattttggtgcacttgtggctgctcacgaatcctctatggagattgcagagtctagtgatagagttggtgaagattctgctgagtctcaaaacttgctcggatcccttcaaaag

SEQ ID NO: 55073 - DNA, 201 bp, Glycine max
agaaccatacaaagaacagttgcacgattaaatctgtgaatggagatccaattggtttggtgaacaaaatccagagggcttgcaccgctttgggtgaccacggcgaagcaagtgccttaccaactctctgggactctctccctgctatcgccgtcgtcggtggccagagctctggaaagtcctcggtgttggaaagtgttg

SEQ ID NO: 55074 - DNA, 282 bp, Glycine max
ggacatacaaaaactcacactctctctctctcttcaaatcaaaacccctcacaaaattcacaacaacatacccacaaatcccaaatcctgtcttctcatataaaagaacccttctttcgaatccttcccgctctctctctctcttactctttttccctatccgattcaattcgcgcgcagttccaaaccctaatccctctctccgaggtctgatttcacaccccaaaccccccaattcttgttttcttaaacaaaatttttaaagacataagagggtttcgt

SEQ ID NO: 55075 - DNA, 264 bp, Glycine max
tctcgagccgaatcggctcgagcggctcgaggcgacggggtattgtctgtggcagagtggcattgctgccacgatccactgaccttttttatcatgttcatttttctttggctactaatctgatgattagacaggaattttctatttggtcacagctcatacatttttaatgctggatcctggatatttacaaatgctggctatgtgctgatcattgcaactttatcttatattgtgaatgtgctttcagctttggttttctta

SEQ ID NO: 55076 - DNA, 234 bp, Glycine max
attttccaattagcactagtaatacagtacaataaactagaagagcaaccaaaattttccaattgaaaaagaaattacaacgagaacaaaatcttatcgtgagatcgaataactgaaaaaaaaggaaagaagaacaaaatatgataacgtggaaagacctatacacggtcctgaccgcagtggtcccactctacgtggcgatgatcctggcgtacggctcggtccggtggtgga

SEQ ID NO: 55077 - DNA, 272 bp, Glycine max
ctaagatcaagtgtagtatctgttcttatcagtttaatatctgatatgtgggtcaggggaggattcttcacagtagcttgctgctggaatcatcatttagtgtcgctcaagtgttgcactacaccttcggcctgccacaccccaccatttcagttctaaccttagtaagtttcaggagccgtgtgtgcttcaactcttgccagaaatggggtttctgttactctctttgagtcagctagaggccctggtggacgcatgtcccaaagaagaga

SEQ ID NO: 55078 - DNA, 286 bp, Glycine max
tctttgtgaagcttgtttcttggtacgacaacgagtggggatatctctcacgtgtcattgatcttcttgatttcgttgccaagaagtctctttaaggtgttacttcaaagtagcttgtcttcacattattaccgtatgtttatgtttagctgcgatttactgtcttgctcgagcaaaaaatgagaggtctgaataaatcggtttctgaaaccagtggtgttacttgttggaggagcattagctcttttttggacttttgatgttgtctcttgtggagggggatcga

SEQ ID NO: 55079 - DNA, 178 bp, Glycine max
gctacttcctactccaaccgcacttctgctccgcaattatcatgggcaaggtcaagatcgggatcaacggctttcgcagaattggccgcttggtagccagattggctctgcagggtcacgatgttgaacccgttgccgttaacgagtctttcatcaccaccgagtacatgacatatgt

SEQ ID NO: 55080 - DNA, 268 bp, Glycine max
taagtcgatctgggtcgggtggagcagcgagttcaattaatcattcagatgttttggaggctctttctcgggctttaaagaagactgaggagtcttatctcgatgtggcggataagatggtgatggagaatcctgaattggctttgatgggatcgtgtgttcttgtgatgttgatgaagggggaggatgtttatgtgatgaatgtaggggatagtcgagctgtgctggctcagaaggctgagcctgattactggcttggcaagatcag

SEQ ID NO: 55081 - DNA, 272 bp, Glycine max
gttttcctaatgctctggatgctagaaatgttattgatccatataaacagagcatgtctttcaaattaaagcagaatttatgcatgaggcatttgagttgagcaaaatatgccaactccttggacactttcattttaacgaatagcaagaaacttcgatcacaaaatactgttttctggcactagaataacagtcaaatttaattatataatacttgggtacactggtcccgtttgttttctttgttgctgcagtagttatggtagcatggc

SEQ ID NO: 55082 - DNA, 273 bp, Glycine max
  unsure (1)..(273): unsure at all n locations
ggctcgaactcgagccgattcggctcgagcggctcgagggaagctctagctacggtaggtattccnactggcgagaggattaaagaagcatctgaagaggctaaatgccccaaagcattggatgcttgacaaactgggtggtgcatttgctcctaagccctcatctggaccacacaaatcgagggaatgcctgccactcatactcattttgcgacaccggctgaagtatgctctaacataccgtgaagtcattgctattctgatgaagcgaca

SEQ ID NO: 55083 - DNA, 266 bp, Glycine max
ggtgtacgtcaaggctcagaaatcaaaagcctacttcaagatatatcaagtcaagttcaagagaagaagagagggaaaaaccgattaccgtgccaggattcggttgattaatcaggacaagaacaaatataacactccgaaataccgatttgttgttcgctttagcaacaaggacattgttgcacaaataatatctgctagcattgctggcgatattgttcttgctgcagcatatgcacatgagctgccacgatatggtcttgaag

SEQ ID NO: 55084 - DNA, 256 bp, Glycine max
cttggaaactcttcaatgaagccccttctttggttgaagaaggtgtggttgtatttgtcacccagcaaactgctttggtggtacggctgagccctacgttgcaagtttatgctcagctctctaggccagatggagttcgggaggcttccatgccagagactgcatggaaatacatgacacaaatatgtagttctactgaaaatatgtctgcagaagctgttgaaagagtttcattgcttgcaattgcttgggaacg

SEQ ID NO: 55085 - DNA, 248 bp, Glycine max
cggctcgagctccgcaccagtttcaccgcacgaatatcttgttgtttggagcgatccgagaaacactctgtaaacatgttggtttaccaggacctccttacaggtgatgagcttctctctgactccttccgttacaaggaaattgagaatggaatgctgtgggaagttgaggggaagtgggttgttaaaggagcagttgatgtagacattggtgcaaacccttctgctgaggggtgagagaagatgag

SEQ ID NO: 55086 - DNA, 257 bp, Glycine max
cggggcgtgcgttcaaaacgtgctcgattccctggtaaccgcattgctggcagataagaatcgcaagttcatagatgttgaagaggcatttttccagcgatggtggagggagcaaagtgatgagatccagaagagagtcaaggagctggtcaactctggtcaattggagttcagaaatggtggtttttgtatgcatgatgaggctgctactcatgacattgacatgattgatcagacaactcttggacatcaattta

SEQ ID NO: 55087 - DNA, 258 bp, Glycine max
aaaaaaagaagagaaaaaaaaatgattttctgtggcaacagcactgaagagagtgaactgcatcatgctcaaattcatttgtagcaaacacgtagacaactttgtgagttccatggctcttaagtctgctatggaattaggcatagcagacgtaatccatagccacggaaaacccatgactatttccgagttatcctcagctctcaaattgcacccttcaaaagtgagtgtcctccaacgctttctccgccttttaac

SEQ ID NO: 55088 - DNA, 253 bp, Glycine max
ccctaatgtcaagacgagttcacttagaagtttgattgaccgctccattattgagagttttggggagaaagggagaatttgtattaccagtagagtttatccctcgttggctattgacaaagatgcacatcttgatgttttcaagaatggaagccagagtgtggtgatctctgaactgaatgcttggagcatgaaggaagcagaatttagttaagaagaaagcacaattaagctgtaactaaaaagatttgga

SEQ ID NO: 55089 - DNA, 259 bp, Glycine max
tgcgagcgaagccagcgctgagatgtcggaggacttgtcgggtaggagagatagggcgagcccttgagtgacgtggccgctcacggcggcgtcggctacttcaaccgatccaggttgctcagaatcatggccgctgaggccatggagtcgttgggcaagagtcagaaagggaagaagctcgacagtgtgctcagcagcaggcagggcctaatacgaggcgagaatatggatgctggacgggatgtctgacacggggggt

SEQ ID NO: 55090 - DNA, 248 bp, Glycine max
cacagtggatcgactacaccaaatccctcttcctcgagagatcagaatggcgttgacttcaaaaaagttgatgctcatgtgcaccagttaaagggtagcagttcaagcataggtgcacaaagggtgaaaaatgcctgcattgctttccgcaacttctgtgaggagcagaacacagatgcgtgcgtcagatgtctgcaacaagtgaaacaagagtactgccttgtcaagaataagcttgaaacaatgtt

SEQ ID NO: 55091 - DNA, 243 bp, Glycine max
aaacaggatgatgaagtaattgtaaaacttgaagattcagctagtgaacactcaaaatctgttgattcagcagttctaggtaaatacaacatttggaggaaagaaaatgagaatgaaaatgctgattctacagtacggttgattcgagaccaaatcattatggctaaggtttacttgagtattgcaaagatgaagaacaagcttcaactgtaccaagaactggaatctcagcttaaagaaagt

SEQ ID NO: 55092 - DNA, 274 bp, Glycine max
ggctcgagatcatcttctctctatctttgttgcaaacttaccaacacagtactgagtttaagtactcaccaaaaaaaacaatggatgatgatattgtaggactcggttttcgtccaacagaacaagagcttgtcaacttttacctcaaacacaagttgctcggcgatgatccccgtgtccacgtcatccctgtcattgatctttgcgatgtggaaccttggaatgtaccagccctgttgatttcaagtacttgaaaagcaaaaggtttaacagg

SEQ ID NO: 55093 - DNA, 272 bp, Glycine max
ggtcccaagggtttaacctttctggctgtgttaatatgcgtttcagcactgtcactgagtccttctgttgcgggggaagggcaaaataatggccttgttatgaacttctacaaggaatcatgccctcaggctgaagacatcatcacagaacaagtcaagcttctctacaagcgccagaagaacactgctttctcctggctcagggacatcttccatgactgtgctgttcacagattgtgatgcgtgactgttgctggactccagacgaagga

SEQ ID NO: 55094 - DNA, 289 bp, Glycine max
cggaattcggctcgagctcgagccgcaactggaaggtattttctgactgatgaattataaggcaacacagatagatagcgggagatcatagaccattatatttctgaggtttgacattatacatctgttttatttcaagcggattcacaccagaaaattagataggattatcttagctactataacatgcaacgttaattcttgataaagtcctccaaggcaacaccatatgcccctgtctcctgtcggtcccatcattatctcgttgccttccccccacaataattca

SEQ ID NO: 55095 - DNA, 260 bp, Glycine max
gaaattttaaaaagactgggataaacttaagaattcaataattgaaatggaataggtaaccaatttaattggattggtcgaatggtatcaaaaaaatggagtactaactcgcatttcttatgtattattgaattaaccggtcaacttgcgttgttaacgaacatttctttttgatttcaaaaattttccggaaaaaatttgaatctatttttatatgcgaatcaatcctactacttctggtcctgaggtatctgcgcttg

SEQ ID NO: 55096 - DNA, 278 bp, Glycine max
  unsure (1)..(278): unsure at all n locations
tagtcacttgtcgctngagttgcgtcgtctctccaaccaaaactaacgaaccaaaaaaaatgatttctgcgatttccgtggtggccaaagggggttcgaagtcggaacttgtcgtggctgaacctcctcccgaagaggaaattcaagagataatatcattattccagcatttccactctgcacagcttggctcgattgcccccttaaagggaggagaagagggaacttcatagctgttggttcaatggaaccatccagtagaatttggggacttgatg

SEQ ID NO: 55097 - DNA, 335 bp, Glycine max
  unsure (1)..(335): unsure at all n locations
agaaacctaagcttagaattagaaacaaagataagaagaaaggaaagaattgatcgttgaaaatgcagggaggaaagaaagcgggagagtccattaaggaaacagctacaaacattggtgcttctgccaaggctggcatggagaagaccaaggcactgtccaagagaaggcaganagaatgacagcacgtgatccggtgcnaaaggagttggcaaccannagatagaggcaagatgaacaggcggactggacaaagcagcgcgcgtcagcataacacggcggcaacagtcgccacacggctggcacatgggcatggcaccacacacggaacggga

SEQ ID NO: 55098 - DNA, 323 bp, Glycine max
  unsure (1)..(323): unsure at all n locations
cgctaacttcaacacctttaattttctanaagtaattcagcggctgaataccaagcggagaagatgagtcaggagcagccacggcgtcccaaaggccanaaccccatcanatacggcgacgtttttgtcgtctccggcgaccttgcacagaagctcgtcgcaccggaagatgctgccatgatgcaaagcgcggaaactcgagtgctcggacaaaccaaaccggcggacagcttcgtcatgcatctgcagccacagatgacagctggctgtcagatacggagcacgacgtacgcgacgtgggtacatcacgaactaagtcctgg

SEQ ID NO: 55099 - DNA, 342 bp, Glycine max
attcttaaagtagggcagcatgacaagaccatgggtgcaacaggtgacactaacgtcttagctcagatgatcgatgaagcggaaggcctggaaaagatcgagaacctacagagccacgataacaatgaaatctatgaaaaggctgtgaagcttcttgagacatactggatggaggaggaagatgacgcaatggctactgccggggaagctgctcctgctgtttttgactttaaccaaggtggcaaccctcctggtgctggtggtctgaacttcaactgatacagtctttgatcagaatggtgttaattccttcagtgatgggcttggcattggcttgtcgtg

SEQ ID NO: 55100 - DNA, 313 bp, Glycine max
aaataattgatctttgaaaatgcagggaggaaagaaagctggagagtccatcaaggaaacagctgcaaacattggtgcttctgccaaggctggcatggagaaaaccaaggccactgtccaggagaaggcagaaagaatgacggcacgtgatccgatgcaaaaggagttggcaacccagaagaaagaggcaaagatgagccaggcagactggacaacaggcggcgcgtcacataacacggcgcgaacaggctgccaggcaggcacatgggcaaccatgggaccatcagacgcactatccggcatgaacggcagc

SEQ ID NO: 55101 - DNA, 192 bp, Glycine max
atttgagaaggtgttgagtgccagtgacgcatgtcgaattggccgtcttgttctcccaaaagcctgtgctgaggcatattttcctcctatttcacaatctgaaggtgttcctttgcgaatgcaagatgtgaaggggaatgagtggacatttcagttcagattttgggctaataacaacagcaagatgtatgt

SEQ ID NO: 55102 - DNA, 248 bp, Glycine max
gacattgaagaggtacatggctctcttgaacgagatgatgaggatgtctattttgatgatgaatctgcagaagttgttatatctactcagcggttgggagatgaccatgcaagtgggtctctattcacaaattccaactggtttgctttccaagaggatagagatcgggttgccaatgaacgctcaacaggttcccttgcttctccatcacctaatgctgatgaggtttttgtaaaagccagtgggga

SEQ ID NO: 55103 - DNA, 233 bp, Glycine max
  unsure (1)..(233): unsure at all n locations
gtgcaaacatctagagaagagagatgcttccgaatgtggatcaatagtcttggaatttccacacaacatacgatacacnananagctgtcanaactggatggatacttttagaagtgttaccctcgatatttcctggatcagttaactggacacatgcaacaagtaccccaattagaatgccattcagaaaagtagagaactgcaatcaggtcataaaaattggtaaacaact

SEQ ID NO: 55104 - DNA, 258 bp, Glycine max
catagtcatgacagttctctctacggcgtcccaaagttctcacgtggcggtagtcacgatagtgctgggaatacatgctaagcacattatgctacatgtccaaggttaggaaccaagaaggggtcgcaaattgagatgagatccttgcgaatgcagatgcagtcatcgcggcacgtggtgacctgagactggccatgccagtagtgtcgatatcactcgcacaggacgtgatgattcgcaaggtcgacatcgatggga

SEQ ID NO: 55105 - DNA, 263 bp, Glycine max
tagggctggaccatctgaggttagggtgattcctccatccagggttgtatctgttgctggaaaggtcataattgcttactgtggttgattttgctgctgaggttgaggaggtctattgtaaatatttgcagcataagctttaggctgctcaattgctccaggttgctgcatggaaaggcaaaggtctgtatggtggtcagcagaggagcacaaaccacaaacccttgcgacaggtacagatttctgattcaaggccagctggg

SEQ ID NO: 55106 - DNA, 244 bp, Glycine max
tggaagcatcccagcaagtttgggcagttccccagcctcagtgataaacttagccaacaacaagttaagtggaagcatcccagcaagtttgggcttcatgggttctaaaataaaggagattctgttcctcaataaccagttaactggatgcattcctgagggagttggactattcacagagatgcaagttctggatgtgagcttcaactcactcatgggtcatttgccagaccactatcatgcc

SEQ ID NO: 55107 - DNA, 242 bp, Glycine max
gatccccgtcgtgatcgagaagacgggccggggcgagcgcgcctacgacatctactcgcgcctcctcgaggaccggatcgtcttcatcggcacgccgatcgacgaccacgtcgcgaacgtcgtgatcgcccagctcctgttcctccagaaggagaacaagcaccaggacatcaacctgtacatcaactcgccgggcgggcatgtcacggcgggcctcgcgatctacgacagatgcagttcgt

SEQ ID NO: 55108 - DNA, 249 bp, Glycine max
cataattccaaatggcttcgtctactctcatctgtgacactcagcaatggaaggagttaaaggctcatgctgaggatgtagaaaagactcatttacgtgatttattgagcgatgatgagagatcccagtcaatggtggttgaatttgatggaattctattggactcatcaaggcagcaagccactcttgaaacaagggaaaaactcttcaaattggcagaggttacatccctcaagcaaaagataaacc

SEQ ID NO: 55109 - DNA, 243 bp, Glycine max
gtgtgagtttaatggcttcattagggctggagattctggcatttccatgtaatcaatttggtgaggaggaacccggaagcaatgatcaaattcaggagtttgtctgcactcgctttaaatctgaatttcccatctttgataagatatgtgacacgcaccaattacaagtttgtccctctgttattgtgctcgattgaagtgaatggagacagtgcttgtcctttgtataagttcttaaagtca

SEQ ID NO: 55110 - DNA, 221 bp, Glycine max
ggacacccactattgtgtttgtttggtcagggctaatttcaattactatctcacttctttgggttgctattgaccctccctctggtagtagcctaattggagggtcattccaattcccttgatttttatggtgctcacttttcagggtagcacttgtaagtaattcagactggccttgtgggttgatgagattttgtagttaccattcattgttcgacaag

SEQ ID NO: 55111 - DNA, 227 bp, Glycine max
ctttgatgcaatgggagtgtttgagaactccacactctctctgtgatatcatagcaatcagcactgcttgcaattggccaaagaacatatggtaagtgtgagggcgacagcttcgttcttgttgggtttaatcagtgtcattgtttgggttgttgctgagatacctcaaatactcacaaactatagaacaaagtctgctgagggtctctctgtcactttcttgatca

SEQ ID NO: 55112 - DNA, 218 bp, Glycine max
cggctcgagcggctcgagcaaagaaggcgtcttcataaacgcctttcttctccgtttccgtatcctcgttcgaaattcgctttttgatctgcgaaaatgagagagtgcatctcgatccacattggtcaggctggtatccaggtcggaaatgcttgctgggagctctactgcctcgagcacggcatcgggccctctgggcaaatgccaagtgacaagac

SEQ ID NO: 55113 - DNA, 215 bp, Glycine max
  unsure (1)..(215): unsure at all n locations
atttctgaactatgaggagttacctcttgctcctgaagctgcctgtgtaggactagaaatcagagttgttggtaatgatagtggtgaaaaggtttccattttggctggtactcttgctcgattggttagggatgctcctcattataagaaggatgggtataatgacttccacacaacatacaagacaaaaaancagccaaaatggaaaccttttc

SEQ ID NO: 55114 - DNA, 220 bp, Glycine max
caacttctgctacccactctcttcttccaagtccaaccacgcttttctctacagtcatgggcaaggtcaagatcggaatcaacggatttggaagaattggccgtttgcgttgccagagtcgctctgcaaagagacgatgtggagctcgttgccgttaacgaccctttcattaccaccgattacatgacatacatgtttaaatacgacagtgttcacggac

SEQ ID NO: 55115 - DNA, 145 bp, Glycine max
tctgtatgtatgcttgacatatacaagtgggaaatccaatgaaatgtgtggtcctaaaaatggtgcaagattagcaactctctatggagattggcggggtggagttgttttaaactgttttatgggaatacttgccactgattat

SEQ ID NO: 55116 - DNA, 233 bp, Glycine max
cttatacttactggcaaccctgtatgtgctgacactgacgcttccatcggcagcagcagtgtattgggcatttggagacatgcttctaaatcactccaatgcttttgctctccttccaaaatcacccttccgtgacatggctgtcattttaatgctcatccaccagtttataacattcgggtttgcatgcaccccattatacttcgtgtgggagaaagcaatagggatgcacg

SEQ ID NO: 55117 - DNA, 134 bp, Glycine max
gctttccatgaatgatcttctcgccttcaaaagcccattgatttaccaactcaagatctttctccccaaatgagagccgtccatgatgggtgacatggaaagagacagagtcagtataagccaacaaggctgcc

SEQ ID NO: 55118 - DNA, 229 bp, Glycine max
aacatcacgtggttcacaacaatatcgtgcattaactgtaccagaacttacacaacaaattttcgatgctaagaacatgatgtgtgcatctgatcctcgtcatgggcgttatcttacagctgcagctatgttccgtggtcgtatgtccacaaaggaagtggatgaacaaatgctcaacgtacaaaacaaaaactcctcctacttcgtagaatggattccaaacaacatc

SEQ ID NO: 55119 - DNA, 234 bp, Glycine max
gtttcacagcagcaatggtttacgtcaaggctcagaaatcaaaagcctacttcaagagatatcaattcaagttcaagagaagaagagcaggaaaaaccgattaccgtgccaagattcggttgattaatcaggacaagaacaaatataacactccgaaataccgatttgttgttcgctttagcaacaaggacattgttgcacaaataatatctgctagcattgctggcgatattg

SEQ ID NO: 55120 - DNA, 223 bp, Glycine max
atctcggaagtgcacgaaaaaaatatttatagagcagtcccggttgaccagttctttcacggaggaaaatcttgaattccagcggaagattcttgtgagatctggccttggggagaacacttaccttcctgaggcctcctcaacattcctcccaacccttcatctgaagaagctagaaaagaagccgagaccgtgatgtttggtgccattgatgagcttttag

SEQ ID NO: 55121 - DNA, 263 bp, Glycine max
cttaacaagtgagtgcagcaaatatcaaattagaggggatattgcgattggaaccattgacatatatggcatatatgctcccccttgtgattcagctgcaacaaaagctggtgccagtcctgccactaactctgatagcaattacgacccttgttctgacgattataccaattcctacttaaatctcgcggaagtacaagaggctctacatgctaaagcttcagtatggtatccttgcagaggggtgggatggacagatagcc

SEQ ID NO: 55122 - DNA, 245 bp, Glycine max
gcaagaatggcacttcgttgcttggtgatgtccctttctgttctcttcactcttggtcttgcgagagaaagccatgccagagacgaagatttttggcatgctgtttggccaaacactcccattccagttcattgcgagatccttctaaagcctggccctgcaagagttgaactcgatgatcaccctatgcaaattgaagaaacacagtacccgaaaaccttcttctataaagaagaccttcatcc

SEQ ID NO: 55123 - DNA, 237 bp, Glycine max
cacccactcactgcaccactcctcgctgccatcattgcgtattatcaatggcgaccatcgagccggagcaccgccgcgacgaaaacgacgacgacagcgtgacggcggaggatgaggacacggagcgcaggtcgctccgatcgtgaagctcgaagaggtcgccgtcaccaccggcgaggaggacgaggatcccatccttgacctgaaggcgaactgtatcggtttgacaaggagggg

SEQ ID NO: 55124 - DNA, 220 bp, Glycine max
  unsure (1)..(220): unsure at all n locations
ctcggatctccgnagnaantctggagctaatacgcggatcaaaccttgacttttggaagggatgcatttattagactaaaggtgaacacaggttctggccttcgctttgatgattcatgataatcgtcggatcgcactgcctgtgtgccggcggcgtatgatttaggtttctggactagaaggttccgatcttccgatagtggggtggcatggtggtgac

SEQ ID NO: 55125 - DNA, 224 bp, Glycine max
gcaggattatttcttgatgcgattgatgtctccaggggacataccatctagtcattattcagtggtgttgtaaggctacagggagtgcaaaagaatctgccgcacttttgtactaatcaccttgtcccacttcgtgcttcttccctcagaatttgattgtcggtattagaaccccactattcattcttaatacagcctttgactcatggcaggtccacacaagc

SEQ ID NO: 55126 - DNA, 239 bp, Glycine max
ggagcatacccagatgaatggctgccaaaaaatggaaatcactttgtttttgaatgggagacagcccagatgtccaaagctcccattcaaaagtttgctgattatgttgcaagcatattgttcctacagttgtggtgttggcattattgacactattgtgttggtatgtagctggggctcttggagcatacccagatgaatggctgccaaaaaatggaaatcactttgtttttgctctt

SEQ ID NO: 55127 - DNA, 212 bp, Glycine max
tgaaacttgaaagacacaagagtgagagaaggaaaaatagcagaagaagatcatggctgattgggggccagtttttgtgtctgtggtgctcttcattctcttgactccagggttgctgatccagattcctggtaaaggcaagatggtagagtttggcaactttcagacaagtggagtgtcgatattggttcactccatcctctactttgctc

SEQ ID NO: 55128 - DNA, 212 bp, Glycine max
gatgctataaaactctttcctccgtggctgagaagaaccactcgtttgactcagcgaggaggttgatactcaagtttcaagaggtaagtccctggaccacgttcggacatgtggcctccaacggggcgcttttggaggccttggaaggcgagccaaagctccacatcatcgacctcagcagcaccctttgcacgcattgccaacactccttg

SEQ ID NO: 55129 - DNA, 210 bp, Glycine max
ccgatgcaccagcttcaggcaaagactatacaaccaaacaggaaatggaaaagcagacttcactcttgatcaagtgtatgctgctgaattgcgcactaggtgtccaagatctggtggggaccagaatctctttgtcctagactttgttaccccaattaaatttgacaacttctattacaagaacttgttggccaacaagggtctcttaag

SEQ ID NO: 55130 - DNA, 247 bp, Glycine max
gctcagagcaccaacttccctcagttcaaacctgaggaaataactgccatcaataatgactttaatgagcctggatcacttgctccaactggattgtatatcggtggcaccaaatacatggtcatccagggtgagcctggtgctgtcattcgagggaagaagggtcctggtggtgttactgtgaagaagaccggtgcggccttgatcattggcatttatgatgaaccaatgactccaggtcaatgca

SEQ ID NO: 55131 - DNA, 241 bp, Glycine max
aaacacgacagcaagactcctactaatactaaagaagcagtggcgtattgtgctgtgtcggtggcattgttgttggagtgagcgaagaatatgtattctagagattcatggggtggaccgttggagataaacgcgacggactcggcgacggaggacgagcggagccggaacctgcaggacgttgacagggcagcgctgtcgcgtcccttggatgagacgcagcagagctggctccttggcc

SEQ ID NO: 55132 - DNA, 211 bp, Glycine max
tattggtgttttttcattgtttggattggtgtcaacctgggatgggattggagctttattgtatgcacattaacaattctattcgcaattgtgttcatatgcatgggcaactcgttgtaccgaaacaatgtcccaaagggaagccctctagttcgaatcattcaggtgtttgtggcagcctttagaaacagaaaacttctgattccacaca

SEQ ID NO: 55133 - DNA, 253 bp, Glycine max
ggggctacccgctgagtttaagcatagcaaataagcggaagaaacacagagcctgacaaaaaaagaaaccctgctcaggatataaattgaaagagatgactggaagtggtatattttcgggtaattctgaagataccacatcagaagaaaattctgcaaattcaagaaacagaacaagcatacgcgtatatcagcaagcaatgaatggaatcagtcagatatcattcagcactgaaggaaacatttctccaaa

SEQ ID NO: 55134 - DNA, 249 bp, Glycine max
gggtgaggaagaggaagagagaaatgtccaatttgagatcaacacatatgatttcaagattgattctggtcccgtcagcttggtagttaatgcttgtgcaagcagggatcttcaagataacattgtgggagtttgttttgtggcacaaggtataactgctcagaaaacaatgatggaaaaattcccccgaattgaaggtgactacaaggcaactgtacagaacccaaacccattgatccctccattatt

SEQ ID NO: 55135 - DNA, 235 bp, Glycine max
gagtttaattcgaaactttctgactttggtttagctaaggcgggtcctactggcgatagaactcatgtgtccacacaagtaatgggtactcaaggatatgcagcacctgaatatgttgcaactggtaggctttagcttcacctaaatcatgagttggtggtttaatttcggctcatcatactgataactggtgtctgggttttcatgattttccttatgagttttagtcctcatt

SEQ ID NO: 55136 - DNA, 242 bp, Glycine max
aaacgagttgtggctaatcatgcaaggagttactgccagtcagaggttactttctgtccaagtcctcagagtagtttctattcagccactgtctattcggaagcgaaacaaagtttcaccaacactgaggtcagtgagtgtgctagtgttgacaagtcttgtgtaagtggagaaatggcaaattcctgtgattttaatgagagcaggaagaccagcatctgtagagcaatactggcagtgat

SEQ ID NO: 55137 - DNA, 247 bp, Glycine max
ttccagggaggcatcactcaccaagattttgctgggcacaagggtacaataagagctggtgatgttcaggtatgagtaacactattagttaatgttactgaaaagagaagattaattaggttgttagaatatattatttttgctcgtgcagtggatgaccgcaggaaggggaataattcactctgaaatgccagcagaagcaaacaacaacaagggattgcaactgtggatcaatttatcatccagg

SEQ ID NO: 55138 - DNA, 246 bp, Glycine max
ctcactttctcgctccccaaacgcccctctctctcctccaatggccgaccagctcaccgacgaccagatcgccgagttcaaggaggccttcagcctcttcgacaaggacggcgatggttgcattactaccaaggaacttgggactgttatgaggtcacttggtcaaaacccaactgaggcagaactgcaggatatgataaacgaggttgatgctgatggcaacggaaccatcgatttcccagagtt

SEQ ID NO: 55139 - DNA, 253 bp, Glycine max
ggatcgagccgctcgagccgctcgagcggctcgagtgctgcataactaaaacctagcactcacccacgtgcgacacgaagcagatcagccgtgaaaaccctaacgggtaagacgatcacccttgaggtggagtcttctgacaccatcgacaacgtgaaggccaagatccaggacaaggaaggcatccctccggaccagcagcgcctcatcttcgccggaaagcagctggaggacggccgcaccctcgccgact

SEQ ID NO: 55140 - DNA, 253 bp, Glycine max
  unsure (1)..(253): unsure at all n locations
atatggtctgcatttggccacttaataccatttttcaaactttccatagccttagctaaatctggttttcatgtctccttcatatccactcaaaataagatttgaagtgtttagtgaattcnttgaaatttagntnatttggttnattttgtgaaattttctttgntatcattagataaagagtacttgtcagaaggtgctgaggccactgtagacattccatctgaagaaattgagttcttaaagttggtat

SEQ ID NO: 55141 - DNA, 250 bp, Glycine max
ttctcaaaaccattgactttggattatctgtcttctttaagccaggtgatatatttaatgatgtggtgggcagcccatactatgttgccccggatgttttgcgaaagcgttatggtcctgaggcagatgtttggagtgctggtgttatcctttacattcttttgagtggagtacctccattttgggctgaaaacgaacaaggaatatttgaacaagttctgcgtggtgatcttgacttttcttctgatcc

SEQ ID NO: 55142 - DNA, 249 bp, Glycine max
attccacacactatactacgcaacaaaatagctgcaacctttctgaaacagagcatcactcctctcacattctcactcttcttcatccttatctcttacatttcttcatcatcagaagcgtgatcaatcggaataaactatggaagaattgcgaacgacctacctacaccggcgaaagtggtggagcttcttaagagtcaggggctgaaccgtgtgaagctctacgacaccgacgccaccgtcttaacc

SEQ ID NO: 55143 - DNA, 244 bp, Glycine max
gggagatgctgtcaagtatgtgaaacaactacaagaacgtgtgcaaactctggaggagcaagcagcgaagagaacacttggatcgggagtgctggtgaaaagatctattatcttcgctgatgatgaaacttctgacagccactgtgagcattcactccccgaagtcgaagtcagggtttctgggaaagacgtactcatcagaactcaatgcgacaaacacagtggacatgctgcaatgatactc

SEQ ID NO: 55144 - DNA, 243 bp, Glycine max
  unsure (1)..(243): unsure at all n locations
cctcactctaacacacgcgtcccagaataattacaattataccaataaataaatagttaaatattattaaattaaataaccttcctttttttcctcttcttcctctccgaactttgaaaacgtgcaagcaaaccccacacctccacacaacatacgattaaanggtnctggtggtgttactgtgatgaagaccggtgcggccttgatcattggcatttatgatgaaccaatgactccaggtca

SEQ ID NO: 55145 - DNA, 242 bp, Glycine max
ctcttcctcaccgattgctagactggaatttcgatgctcagtcatctcttttaccattctcttctctcttgctcttgcaggagagagccatgtccatgcatcgctacctgaggaagattattgggaagctgtttggccaaacactcccattcccactgcactgcgagagcttctaaagcctctccctgcaggtgttgaaatcgatgaactccctaagcaaattgatgatacacagtacccaa

SEQ ID NO: 55146 - DNA, 240 bp, Glycine max
ctcgagccggaactgctttatgaagacaaaggtaacacacaaatatctgggaattgtgatgcagattgggctggctgtcccatggataggagatccacatcaggatactgtgtctctattggaggaaatgttatctcttggaaaagtaagaagcaagttgttgttgctcgatctagtgcagaggctgaatacagatctatgactatggttacatgtgaacttatgtgggttaaacaaatt

SEQ ID NO: 55147 - DNA, 247 bp, Glycine max
tgcacaccctacaaattaattttttgacaaactatattgttcttgatacagggattgattagcatcacggtatcagctatactgccacaatttcgtcccccaccatgcccaacacaagctaattgccaagaagccacatcctcacaactgtggatactctacatctccctcctcctcacatctgttggatcaggtggcattagaccatgtgttgtgcccttttcagcagaccaaattgacatgacca

SEQ ID NO: 55148 - DNA, 127 bp, Glycine max
gaattcagctcgagctttataccgctacaccatactgtgaaacatcttatctccatcgtatacagacacaaatggtacttgacaacctgaacgactatgcagtaagagcccttgtgaatgctgttgc

SEQ ID NO: 55149 - DNA, 129 bp, Glycine max
gccgacctcaacgatgccgccctcctccgcaagctcttcgacgtcgtccccgtcaggcacgtcatgcagctcgccgttcaggtcggcgtccgctacgccatgcaataccctcaatcctatatccacagt

SEQ ID NO: 55150 - DNA, 233 bp, Glycine max
aagcaagcaacattttgttggatgaaagcatgaatccaaaaatttcagactttggcttggccagaatatttgggggaaaccaaaatgaagccaacagaaacagagtggttggtacatatggttatatgtccccagaatatgcaatggaaggtctgttttcaattaaatctgacgtctatagttttggcgtattgctacttgagattatgagtggccgcaagaacactagcttt

SEQ ID NO: 55151 - DNA, 210 bp, Glycine max
actgtaaagaaaatatttattgttgataagaacgtaaaacaaagggcattaattgggcagggggttggaaggatcatttgcggggaaaaccataccatattagtgctttgtatgttgttgacctgaagaagttcagagagactgcatccggagataatctcagagttttctatgaaacccttagcaaggatccaaatagtctagccaact

SEQ ID NO: 55152 - DNA, 222 bp, Glycine max
tgctgaaggggtgttctctaatactggctggtatgctactaatcagtttgctgttgatgtgatatttggcaaccggatgaagcagtatgagtgcttgacaaatgattcctccattgctgctgcggtttttgtgcccttttatgctggatttgacatagcacgttatctttggggttataatatttcaatgagggatgctgcttctcttgatctggttcactg

SEQ ID NO: 55153 - DNA, 225 bp, Glycine max
agataccactaccacctttacgccttcaacagtatcaaccaccagcaaatagatggaattcgtagcggccgtatggattcaatgcatctacggcaacaactacactttatcaaactactccgacgccctcaaatcactcatgcacctctatcagctccgaatcgacaacctctccgtcgctagaggcgttggcaacgcctttagacttctagcgggcatggcctc

SEQ ID NO: 55154 - DNA, 244 bp, Glycine max
agtgtttgtaggtctgcctccacgatacagagattcagtaagaacaataactccagggttgcccatttttctgtacaactactccactcaccaactcacatggtatctttgaggtatgtgtgcgtatattttcttttttttagtctgttgttgcatcactttaatttgatgaaaatgcttttgtttttggacatcaagctatggattaggccatctcttttacctttagcagctatggtctaat

SEQ ID NO: 55155 - DNA, 235 bp, Glycine max
caagaatggcacttcgttgcttggtgatgtccctttctgttctcttcactcttggtcttgcgagagaaagccatgccagagacgaagatttttggcatgctgtttggccaaacactcccattccaagttcattgcgagatcttctaaagcctggccctgcaagtgttgaaatcgatgatcaccctatgcaaattgaagaaacacagtacccgaaaaccttcttctataaagaaga

SEQ ID NO: 55156 - DNA, 240 bp, Glycine max
ctgggtgatgcaccagtaccatctgggtcagtacgaggaagagagagaaggagagcttgtggtgtcaaagatattctaccagacacaaccgaggcaatgcaattggtcagatagaagtgccacaaccggtgaaggaagtggagaacaacaatctaacaacaacaacaacaataatggaagaagagacagtggaagtgggacttgttcttcttctaaggaaattaatgttactcacagaga

SEQ ID NO: 55157 - DNA, 232 bp, Glycine max
tttatttgtaacacttaattttcattgattgagtgtgtgttgctacaacaatggcctcaagccagggttggactccgaagcagaacaagagatttgagaatgcccttgccatcttcgacaaggacaccccagataggtggcacacggtggccagggccgtcggaggaaaaacggtggaggaagtgaaaaggcattatgagaagctcgtggaagatgtgaagaagatagagga

SEQ ID NO: 55158 - DNA, 235 bp, Glycine max
ctcgagccgcaaatgggctaataagcttttattcaagatttgatgagatattagctgctttatctttgttttttgacaggagtgaaaaaccgttgatcacttggaattctatgatatctggctgcgttcaggctggaaaatcaagtgatgccatggagttgttctgccaaatgaacatgtgtggacaaaaaccagatgcaattactatcgctagtctactatccgggtgttgcca

SEQ ID NO: 55159 - DNA, 254 bp, Glycine max
taaaacaatggtctgtcactccagcagacaagtaaacaatcattctcttctcgaaatttgtatttattactatatctctgcaacagattctttggctctaacctcccattgtagctcaaaggtaccttttcaaaaccagccatttcaagtcttcgaatccatttctcgagtttctcatgtctctcctttctatcaacaccctcacaagcaatgatgttctttatctgctctccaagaagcttgctctcaagttt

SEQ ID NO: 55160 - DNA, 246 bp, Glycine max
ctctaggaggcaaaacttgctataggagtaagctatgacgcatttgaggctctgtgagaattgagaactggccaaagatgttgagggtcaacagcaaggaggagagtactctgccagagactaccatgacactcgtccagcaggctttgatgcgatacagcggagctcacagagtggtcagtctatagagcgctcatcgctgagttgatagcaacccgtctgcaccgatatgtcactgtgctcacc

SEQ ID NO: 55161 - DNA, 240 bp, Glycine max
tgaatacacatgaccctggtgtgctccatgcggttttggtagcaggtttgtatccaagggttgggagatttctaacaaataaaggtggaaaaagggttatagttgaaacaacaagtggagataaagttcgcctgcacaatcattccacaaattttaagttgtcattcaagaaaaatttaggtaacactttaattgtgtacgatgagattactcgcggtgacgggggtatgaacataagga

SEQ ID NO: 55162 - DNA, 262 bp, Glycine max
agaacattcatagagaagcttgcagtttgagtatttaatggagatgttcatcaagcagcattccgtgtcctagcagattttagaaaaggtaagtttggttggactgcactggagaggcctcctaggtgaagagccaatgtttgcttttaaaagcagaactctgtgaagcttgaattggaaattacgctagagacctcttggaacttactgcagaagacaactccacatggtgttagatgaatgtggatattgtcattataga

SEQ ID NO: 55163 - DNA, 255 bp, Glycine max
gaaagagaatccgaggcgaagagaagagaaaaattaagatggaggggaaggagcaggatgtgtcgctgggagcgaacaagttcccggagagacagccgattgggacggcggcgcagagccaagacgacgcaaggactaccaggagccggcgccggcgccactggttgacccgacggagtttacgtcatggtccttttacagagcagggatagcagagtttgtggccacttttctgtttctatacatcactgtctt

SEQ ID NO: 55164 - DNA, 261 bp, Glycine max
gggaaggataacatgggatttcaggagactatctgaggaagaatcggattggggcaataagcttctgtttttaccagcagcaaagaatatgtcaatgcttgtggttgagtccagcccttggaatgcaaatgatttggaattccgtatcctacatacttccaccctgcaaaggatgctgatgtgttcatgtggcaagatagaatgaggcaactagataggaagtggcttttctcctttgctggtgctccccgtcctggcaac

SEQ ID NO: 55165 - DNA, 254 bp, Glycine max
gaattttgagggagaatacaaattattggaagtaaaaaagataaattcaacagaacagagagttggaggattttgtccactgactccaaaggaggtgggcatttttcttcatgctcttgggtatccccatctacaccaatatacattgcagcaggagagatctatggtggtaatactcatctttcggagctctcatcccgctaccctaatctaatctttaaggaatcccttgcaactcctgaagagctgaaaga

SEQ ID NO: 55166 - DNA, 247 bp, Glycine max
gaaacacgtagacatcagtttcaagttagtttgtgcaatatttattcattgacctgatatttttctatgtatgtttcacttttgaagatggtctcaaatagcggcgcgtttgcctgggcgaaccgacaatgaaataaaaaacttttggaattcaacgataaagaaaagactcaagaacatgtcgtccacgacgaccacaacctcaacctcaccaaatgcaagcgagacctcaatatccgagcctagt

SEQ ID NO: 55167 - DNA, 235 bp, Glycine max
ctcgagccgaatcggctcgagggaatttcgatgctcagtcatctagtttaccattctcttagctcttgctcttgcaggagacgagccatgtccatgcatcgctacctgaggaagattattgggaagctgtttggccaaacactcccattcccactgcactgcgagagcttctaaagcctctccctgcaggtgttgaaatcgatgaactccctaagcaaattgatgatacacagta

SEQ ID NO: 55168 - DNA, 271 bp, Glycine max
cggctcgagtgttattgttgttaagggtgatttaaagaacttgaaggggaaggtagagaaagttgatgaagataatgttcatataagaccagaaatggaggatcttccaaaaactattgctgtaaatgaaaaggaactttgtaaatattttgaacctggaaaccacgttaaggtagtttctggtgctcaagagggggctacaggcatggttgtgaaggtcgagcagcatgtgttgatcttaatatctgatacaacaaaagagcatatccgt

SEQ ID NO: 55169 - DNA, 263 bp, Glycine max
gattttattaggatatgaagatggctttacgttctggatccgatctgtgaatctcttatatattacttgctcttacagtagctgctgcctgctgattcattggcatcaaacatgagcggactggagctgttcttgttgctgtggctgctgctatcggcaacttgctgcaaggatgggataatgccaccattgcaggatctattttgtacataaagagggagtttaatcttcaaagtgaacccacaatagaaggtctaattgtg

SEQ ID NO: 55170 - DNA, 265 bp, Glycine max
aaaccacacaagggaagctaatccgagaactgaagggacatgggcattgggttaactctttagcattgagcaccgagtatgttcttcgcactggagcttttgatcatactggaaaaaagtattcatctccagaggaaatgaagaaggttgctcttgaaaggtatcaattaatgagaggcaatgcccctgaaaggttggtctctggatctgatgatttcactatgttcctttgggaacctttcatcaacaagcaccccaaaactcg

SEQ ID NO: 55171 - DNA, 262 bp, Glycine max
ggtggtcccgccatgattagagctgctgcaaagaaccacaaggatgttttggtagtggttgatacagaagactaccctgcccttctggaatttcttaaaagaaaccaggatgatcaaaagttcaggctaaagctcgcatggaaagcttttcaacatgttgcttcctatgattctgcagtatctgagtggttgtggaagcagagtgtgggagataaattcccacctagcttgacagtgcctctttcactcaaaagttctctcc

SEQ ID NO: 55172 - DNA, 264 bp, Glycine max
gaggaagtgaaggccaaatatccaaaagtttcatatgccgacctttaccagctagctggtgttgttccagtagaggtcactgggggtccaactatggactttgttccagggagaaaagattcattggaatctccagtagaagggtgtcttccggatgccgaacaagagaattactgagaggggagtcaaaagatttactgaagcttcccacagacaaggctctagttgaagatcctaatttccgcaagtatgttgaactatatg

SEQ ID NO: 55173 - DNA, 258 bp, Glycine max
tatcaatctgtcatacagccataccagaagttgatgaagacacaggaaatgtctcatatgaaactgaatctccagatgaagcagcatttgtgattgcagcgagagaaattggttttgaattctataaaaggactcagactagtttatcaatgtatgaattggatccagtttctggtgacaaaattgaaaggatgtacaagcttcttaatgttttagaattcaatagctcaaggaagcgaatgtcagtgatagtgaaag

SEQ ID NO: 55174 - DNA, 248 bp, Glycine max
tgatcaagtgtagtatctgttcttatcagtttaatatctgatatgtgggccattggtccacacgatattagatggaatttttaatggggagagaccaacacagtagcttgctattgggtctctcgcgtgtcgtccatgcgttgcactttagcttgggcctggcacaccctacgtttagtcaaactttttcagttagtttgggttttctaatctcgtatgtggtgggagtgccacggtatgggttgcta

SEQ ID NO: 55175 - DNA, 255 bp, Glycine max
ctcgagccgattcggctcgaggatttaagaaaggatagagtgaaaaattgttgatagtacgtgatagtattggcaattttgtcatgaggaaaatttatatgatttgattgacagaatatggagtttgaggtgaagattccgactgagagcttctagctggaatcaggaaagaagtagaagctggatctctgcctgctaatgttgctgcaggaatggaagaagtgtacaataactataaaaatgcagttatccgaa

SEQ ID NO: 55176 - DNA, 253 bp, Glycine max
gttctgcggagtaagggatgcggacatgagttatcgtttcggaggatttgctcaaggcttcggcggacagactggcggatgggtataatcgggaactacgtataaggcagtgatgggatcggggttcatagttactgtgccgaggttaacagatgcaaggtaccctggcttggaagagttcagtgctcacattcaaatccttgggacgctcacccaccctaacctcggccctctcagggcttatttccaggct

SEQ ID NO: 55177 - DNA, 252 bp, Glycine max
agcaattccacattctgagtgattcaggacgcagagagccctaaaaaggagaacttgaaggcaaggccaaggcagagtcaatcagctactgttacaaggagcaggattgagttgagacaatattttatagtatttgagatggaggaagtgataggacccagattgtacggttgctctaattgtagaaaccatgttgcccttcacgatgatgtgatttcaaaggccttccagggaaaaagtggacgagctttt

SEQ ID NO: 55178 - DNA, 248 bp, Glycine max
attcattggcatggggtgtttcagctgtttagtgcatgggcagatggtcctgaatatgtaactcaatgcacaattagtccgggaactaagtagacttataaattcaatgtgacacaacaagacggaaccttatggtggcatgctcatgcatctgttttacgtgccactgttcatggtgctttcatcattcaccctcgttcagggcaatttccctttcctaaacctttcaagcaagttcccattatatt

SEQ ID NO: 55179 - DNA, 247 bp, Glycine max
cttcaatcgcaacttttccttcttcagctgaaatagtatctgaaccactgggggttgtgttagtcatctctgcatggaactacccattcttgttgtcacttgatccagtcattggagctattgcagctggtaatgctgttgttttaaaaccatcagaaattgctcctgccacatcatcactgctggcaaaactgctcggagactacttggataactcatgtattaaagttgttgagggagcagttga

SEQ ID NO: 55180 - DNA, 237 bp, Glycine max
gttcacagagagaatggctgcggaaaacgttgttgagttcacagacttacccgtcaagaggccaagagaagaagaagaaggaaccaatggcgtctccaacgacgccgtttcagcgctccccaatgaccctcaataccctggcatctctgcggttattcccggggaggcacattccttgaagatggaaaagattttgtttcaagggaagtctgactatcagaatgtcatgtcttccag

SEQ ID NO: 55181 - DNA, 242 bp, Glycine max
gaaaagagaaccaaaattagaagagaaaggtgcacaaggggttttgtgtttgaacccatcatcatcatcatgatcatagagaaattccatgaccgtgggcaagtaccaaattgttaactccaacgagggtcagcctcttcccgattcccacagagtcaccgtcagggtgacttcgtcttatgggaacaactatcactacggggatcgcgttcagacggggcattttgcgtttgcggcagtgg

SEQ ID NO: 55182 - DNA, 240 bp, Glycine max
tttgataccaaatagtaagtagatcacaccaattaccaatatatattgcagagtggttctagtaactcagtgctgctagaagatggaaactagtgaatggcatatcgagcgaagatctagcttcggctctgaatcccccttagcaagagaggcaggaaatgtgcctgaaactgggtcactctctattgtggtgcttggtgcttctggtgatcttgctaagaagaagacatttcctgcact

SEQ ID NO: 55183 - DNA, 242 bp, Glycine max
gtttcatctaagacaactatgtcggaaaaaaacatgtcatggaatttaaagccttatgcacggagggacgatgtagatgcaatgattcgtgtgagagaatggtcagtgaaagcagtaaatgttagccagaaagctccccaatgcacccaatatcacaacattccggctgtattattttctaccggagggtatgctggtaaccacttccatgaattcactgacattgttattccactgttttt

SEQ ID NO: 55184 - DNA, 238 bp, Glycine max
caaagacaaggtgaattaaatgaggaattgaagagagctagagctgatattgaagagttaagggagaagatgatggacaaggaatctcagttgcagggtttatcagatgagaatgagatgctcgtgtcaaggatcaagcaaaaccagcctagtgaaagagattctgaacctgtggtggcgctcaaaaaattagatgctgacataactgagttgaagaaaagattattggacagagaga

SEQ ID NO: 55185 - DNA, 237 bp, Glycine max
gaaaggcaacgttcaaaagaacatagggtgtttgacactatgcactgctttactctctctcatcacaatcttcattattcccttttgtgagtccttcaactacggccaagccctgtcccagagcctcctctattttgagtcacaacgttcaggtcgcttaccctacaatcaaagggtcacttggcgacaccattctgccctcactgatggcctagaacaaggggtggacttggtggg

SEQ ID NO: 55186 - DNA, 233 bp, Glycine max
gtgaggaaaaaggaatttctggacgcactaacagtaaacctggatactcgtttcttcggggtggaaatttaatggatgaaaatactacttgctatattacactctcggagttgaaagaagctactgacaatttttcaaagaaaattggcaaaggaagctttggatctgtctattatgggaaaatgagagatggaaaagaaatagcagttaaaagtatgaatgaatcatcttgt

SEQ ID NO: 55187 - DNA, 235 bp, Glycine max
gttggtgcaggtcaaaaggcactggttttcttacatggattcccagaaatatggtatacatggaggcaccagatgattgctgcagcaaatgctggctaccgggctattgcctttgatttcagaggctatggactttctgagcatcctgcggagccagaaaaagcaaacttacttgaccttgttgatgatgtcgtgggtctgttggattcattaagcattaccaaggctgtgcttg

SEQ ID NO: 55188 - DNA, 237 bp, Glycine max
ctcgagccgaatcggctcgagggcgggaagccctcttttgtttgaatcaggcgaaggcatgtggttcttgttacgagatcgaagtgcactgggaattatgcatgctcaggcaattctgtaagggtagtcatcactgatagctgtcctgggtgtggttcagatgctcaatatcattttgatttgagtggcactgctttggtgcgatggcaatttcaggccaagacgagaagctacgca

SEQ ID NO: 55189 - DNA, 203 bp, Glycine max
tgggagttaggttctgcacgctctgcttccagcgagtgttctttcttcgtttcaacaccttaatttgcacacgctgcttcttcagcttgaggaatggcacaagaaacctttctattcacatctgaatctgtaaacgacggtcaccccgacaagctgtgcgaccagatctctgatgcagtgctcatgcgtgccttgaacaggac

SEQ ID NO: 55190 - DNA, 262 bp, Glycine max
gatttgacttactctccggcgctgccattctttctttctatcttcaatcaatttcaagatcgtaacactggtattatatggcctccttcagagcattctggaacagtccagttggtcccaaaacaactcacttttggggacctattgccaactggggatttgtggcagctggattggctgacttgaacaaacctccagaaatgatctctggcaacatgacaggagcaatgtgtgtctattcagcattgttcatgagatttgc

SEQ ID NO: 55191 - DNA, 213 bp, Glycine max
atcatcgcgtgatacagtaggtacatgacgctgcagagggtagtgacggtaccgcatataatcttggagatggctgatattccaccagatgattactcttggagaaagtattgacataaacccattaaaggagcacctcatccaatgggtcactacgagtgcagtcgtgtgacagggtgtccagcgcgcaaacatgtggaacgagctttgggt

SEQ ID NO: 55192 - DNA, 237 bp, Glycine max
actttgttttgcttgtgttgatgctgaggaattccgattggctcagatttgtggtctcaatgtcatcattcaggtggatgatttggaagaggttagtgagttttaccagaacagaggatgctttaatgaactgatatctctaatggagagtggacttggactggagcgtgcccatatgggtatctttactgagttgggagttctttatgcaagatatcgtcctgagaagttaatgga

SEQ ID NO: 55193 - DNA, 239 bp, Glycine max
ctgattgtggtctggccaagatgttgatgaagccagaagaacttgctaccatgtcagcggtggcaggcacattcggctatattgctccagaatatgctcaaacgactagagtcaatgagaagatagatgtctatagctttggagttgtcctattggaactgacaactggctaagaagccaatcgtggagatgaatattcatgtctcgcggaatgggcgtggcgccacattcagataggg

SEQ ID NO: 55194 - DNA, 236 bp, Glycine max
ggcgaagaaggattgtagtcacaggaggtgcaggacgtgttgcaagagtaggggttttgattgctccacgcacgtgaagagcacgtgggtgccggcgtcacggcggagggagaggcagctcaagggggtggcggcggccggtgcggcggttgggtccaatggggccacttccggtgccaagaaacctaggcttgttgctactcaaactacttcgcatacttcaacgtctaataata

SEQ ID NO: 55195 - DNA, 233 bp, Glycine max
cttgggagaagaggtcgagtttcacagcagcaatggtgtacgtcaaggctcagaaatcaaaagcctacttcaagagatatcaagtcaagttcaagagaagaagagagggaaaaaccgattaccgtgccaggattcggttgattaatcaggacaagaacaaatataacactccgaaataccgatttgttgttcgctttagcaacaaggacattgttgcacaaataatatctgct

SEQ ID NO: 55196 - DNA, 240 bp, Glycine max
ggaaaacttgttggttataatacagattgtgaggctgcaattactgcaattgaggatgcactcattgatagagcaaaatctcttgcttgtgctgtatttggtgaagctcagcctttcaaagagttggtcaactttcagccagagaaaggggcaattcttgcgaatgcaacacctgtaggaatgcatcccaatacagacagaattcctgtggcagaggctactttggaagactaccggtta

SEQ ID NO: 55197 - DNA, 258 bp, Glycine max
ggttgattgtcgaatatatttatggaaatggaacgctcgtatagtgatctcagatgtggatggtacaattacaaggtcagatgttcttggtcagttcatgcctttggttggtattgactggtcacagacaggtgttgcacatttattctccgctatcaaggaaaatggttatcaactgctttttctcagtgctcgttcaatttctcaggcctatattacacggcaattcttactaaaccttaaacaggatggaaaagt

SEQ ID NO: 55198 - DNA, 230 bp, Glycine max
gccgaggagagaaacatacggtgctcttgatttgggagggtcttcattgcacgtcacgtttgaggggaatagcaataaagagccgcaacatttgttcaatagtgagactagtttgtatgttaggattgggtctgtgaaccatcatttgacggcttattcactcgcggggtatggcctcaatgaggcatttgataagtctgttgctcatgtctttaaggagtttgggtatg

SEQ ID NO: 55199 - DNA, 225 bp, Glycine max
atggcgcaatctcttgtctgctggtgcagcccattgtagggtacagtagcgaccgatgtagatctcgtttcggtcgctgcattcccttcatcttagccggggccattgctgttgccatcgccgtcttcctaattggctatgcagccgatataggacacgctgctggcgacgactcgcaatgttgacccgcccacgggctgttgctatcttcgtggtcggcttctg

SEQ ID NO: 55200 - DNA, 271 bp, Glycine max
  unsure (1)..(271): unsure at all n locations
gaaattttgataaaccgcgatcacaggttgccgcaccttaaaaccggaaacaaaagcaatcgttacttgatttcaagaatcttccaatttcttcctacttcttggtgtacgatttcttaagggaaagaaaatcactctctgtcctggccacagacttcgtgaatcattttcttttccactcttagtatattcggngaacactctcctatttgatataggacttcgtgtcagatttaaactttttctgtttctttctcagttctctgcttaa

SEQ ID NO: 55201 - DNA, 231 bp, Glycine max
tgaggactgagtttcttgcaaggaataattgattccttcaactccatcttcacacatgataacaactgcaattatcacaacaccaattctccttcttcttcttcctcaacgaatcgaatggaagcttctcctactcttcggtttcgaacgagcgcgttgcatacaagctcaaaggctacttcgatttagcaacgcaagagatcgcgaagggcgttatggcagaggaatggg

SEQ ID NO: 55202 - DNA, 248 bp, Glycine max
tattgttctacctcaggatcgtcatttacgtgatgcatctctgtagcaactatgtcgaactctaaggatttccactacatgttcatcgtcggtcaatcagctggccgcattcgtgatggagctttacgccgacgtcactctccgcattgtcgagaaccttcgcttgctttgcaccggcgataatgtcgtaggtctgtttggcaagctccgtcattataatggcacgtccgtccaccgcgagagcccga

SEQ ID NO: 55203 - DNA, 249 bp, Glycine max
ggaatatgcggaattaacacattagctacatatcctgtcaagaccaagcctaatcctcctatccctcctcccccaggtcctgtaagatgtaatttgtttatcactgttcagaaggagaaacatgttgctgtgccaagagctttcttggaatatgcttttcttggaaatgctgtgggttaacttctgccgtgtgctgcaaagacaagcgccactgttgcccccaagattatccgatttgtgatacaagaa

SEQ ID NO: 55204 - DNA, 248 bp, Glycine max
gaagattttgacttaaagaaagtagaggaacaagcagcagagttggagaaggatttgattgtcaaggaacttgaaacgcttgacgtgcttgaagaattagggctaccaagaggattgtggaggacttgaagcagcagttacaaaaggaggctatgaaatgtttagcaactcgagatgtaaattcatatgaagaagctggaactcctgttattaaggagaatgatgaggacaattgtggaaatattgtc

SEQ ID NO: 55205 - DNA, 243 bp, Glycine max
ccggagaagacgccaaacaatcagcagaagatgggccacatcaccagggcgatgtggtggggcggcgcccgcgggggcgtccggcggggtccaagaacaaccgaagccgccggtcatcataacgcgggagagcgccaacacgctcagcgcccacatcctcgaagtcgccaacggctgcgacgtcttcgaaagcgtaccagctacgcacgccgccgccagcgcgggatctgtattctcagcggc

SEQ ID NO: 55206 - DNA, 246 bp, Glycine max
gctggtcgatatatgacctcctatcttgttgatatgcatacaaagtgggggtatgcattatataggactgctgattctgagactgtcagggatatcaagagaattatgctatattagttatgactacagacgagatatcaattgcgggcttgataccactatacttgttaagaattatactcttctagatgtcagggtcattaaagtaggcactgaaagtatcgaggctcccgatgctcttttcat

SEQ ID NO: 55207 - DNA, 263 bp, Glycine max
gctaggggaagtagaaaatgctcagcagtgttttaataagtgcatggaatcaggtaatgctgtttgtttggatcggagggttatagttgaagcagctgaaggtttacagaaggctcaggaagtggtcaagtgtataaataatgctgctgaacttttaaaagagaggacttctgatgcagctgttactgctttagaactagcttctaaggcattgtcaataagtttatactcagaaaaattgcttcaaatgaaggcagaggctc

SEQ ID NO: 55208 - DNA, 230 bp, Glycine max
gtgcttctggatgactattgtgaggctgttgttggagattttggccttgcaaagctccttgaccatgctgattcccatgtcacaactgctgtccgtggcactgttggacacattgcaccagagtacctctccaccggccaatcatctgagaaaacagatgtctttggatttggcattctcttgttagagctcataactggaatgacagcactcgagtttgggaaaacagt

SEQ ID NO: 55209 - DNA, 248 bp, Glycine max
gcaaagcattgctcggactagattgtttttcaagctcatggaggaatgcttgcgtttatttgagcacaaaagacatgctgatggcatgttacttggctccagctctcgcaacccagtaggggaggcacctgcttccccaaagtactctgacagactttctcctgcaatcaacaattatctgtctgaggcctcaaggcaggaagtcaggcctcagggaacaccagataatggttatttatggcagagag

SEQ ID NO: 55210 - DNA, 241 bp, Glycine max
ctctatccgtttctctctctctctctgtctctttctttcaatctgcgtgtgtatggaaaagactatggcatgtttggttcgtgccattgtgatcctgtggtgctgcataagccatgtcacatctgattcatcgtatcaccgttacatgaaaggagattccgttcccttttatgccaacaaggtgggaccctttcacaatcccagtgagagataccgatatttcgatcttcccttttgctcg

SEQ ID NO: 55211 - DNA, 253 bp, Glycine max
gtctcttattccaggccctcaaatatgttagtttccctgttcagactcttgcaaagtgtgctaaaatgataccagttatggtaaggctagatttaatactgtgttcgataatataaatttcttttatattgatatttatgattactggctgattgcgatattcattacattcattattggtatgtattcatatatttattagtagtgttttattcatcttcttagctattgttgcttctgttgatgaagagtg

SEQ ID NO: 55212 - DNA, 250 bp, Glycine max
ggctcgagccgaatcggctcagcggctcgagcggctcgagcgctctacaagagctcaaccgcgcgaaggaaatcattgactcacagaattttgcatcgcctttgaaccaggtgcacagcagaatatggctgatgcattggagtctgttcatcttttttaatcatgacaatgggagaacacaaataattgatctgttcaatcaggacaagtatctaaatgctatccaaactagtgctccacaccttttgcg

SEQ ID NO: 55213 - DNA, 267 bp, Glycine max
tcctcgagccgaatcggctcgagcttttttcctttctctctctctctctctctctccctctatctttcattatatggaaacacaattctaaatgtcgtcgtttaaaaggttatagtgttgagtgcctcagcaaataagctaggaaatctcaaagtgcatgctgatgcgtatgcatctttgataatggaagagcttgaccctgatcataatggatatatagagatgtggcagctagaaactcttctgaaggaaatggctagtgcggaa

SEQ ID NO: 55214 - DNA, 266 bp, Glycine max
ctttggtcttctattcagagggaaggatagtcttggtgaagaagttgtgaaaccatatactcctacaacattggatactgatgttggatactttgaattggttgtgaagatgtatccacaaggacggatgtctcatcactttagggagatacgtgaaggtgattacatggctgtgaagggaccaaaggaagagctggatgcctttgccattaagttccctaatcaattcaaagtttactatgttctaaatcagccaccagaaatat

SEQ ID NO: 55215 - DNA, 264 bp, Glycine max
ggccaggcaagccccactcaaccaccacacctctcctcgttcacgctacccctttctgctcttcttctacctttcaagttttaaaagtataaagatggcagagacattcctatttacctcagagtcggtgaacgagggacaccctgacaagctctgcgaccaaatctccgatgctgtcctcgacgcttgcctcgagcaggacccagacagcaaagttgcctgcgaaacatgcaccataaccaacttggtcatggtcttcggaga

SEQ ID NO: 55216 - DNA, 258 bp, Glycine max
acacaatcagcctcaagaaacactataatgcctggagcatttacttctaggcttaacggattagtagaccatttcaagatggccttggattgcttctttgcagtttggtttgtagtaggaaatgtttggatctttggaggtcacacttctccttctgatgctccacaattgtacaggttttgtattgtgtttcttacctttagctgtatcggatatgcaatgccatttatactttgtgcaactatttgtcgctgcctg

SEQ ID NO: 55217 - DNA, 262 bp, Glycine max
actcgagccgaatcggctcgagttggaacctagttaccaacctccgctaacatttgttgtgactcaaaagcgacatcacacacgactcttctcaaacaatcatgacgacagaaatagcactgataagagtgggaatatcttacctggtattttttttttaacttctgtcattttctatcattagtgcattcaccaaccaaaggatatctgtgaaaatctaagaggaaatatgcctagatagcttgtcaaagggtcatctcag

SEQ ID NO: 55218 - DNA, 253 bp, Glycine max
catgaatctcatacatgcaaatttagaagatcgagtttctctatgtaataataaaagatatatgaaacattaattaatattccgggaagaattacaggtgtaagaaaagatgggcaaatccgccacttctttcacaggccatctaaagcatacacaacaggaacaaggaaaagaagaaaggtcacaccgacgaagaaggaagcgagacaaggtggcacaaaacaggaaaaactagacccgtttttgttggtgg

SEQ ID NO: 55219 - DNA, 248 bp, Glycine max
gaaaatcaggtgaaatatagagtgaagaagacgaaatagatggttttggtgtctgaatcgtgaaaatgttcagaaaccagtacgacacggacgtgacgatcatggatgcccggcggggagcgctcgttccaggtggagtacgcgatggaggcggtgaagcagggctcggcggcgatatggctccgatccaatacccacgtggtcctcgcatgcgtcttcaaggctaactccgaactctcatcgtacca

SEQ ID NO: 55220 - DNA, 240 bp, Glycine max
gctagttctgagtattctgatcgctccctgagagagctcgtcgcggcggttgcagaagaagattgcaagatgaagttcaacatcgcgaatcccaccactggatgccagaagaagctcgagatcgacgacgatctgaaactgcgagcattttgggacaagaggatctcacaggaggtcatcggagatgcactcggtgaggaatttaagggctatgtcttcaaaattaccggaggttgtgac

SEQ ID NO: 55221 - DNA, 241 bp, Glycine max
gttataaaattgcacattgagaagaaagtatgcagtgaagttaatgaatggatggtcgagataaggagttctgctaaaaatattggggaaacagcaattggtcatgctgtgacagttcgtcaaagggacaaggaaatgctagaacagcagaggaaggctgaggagcaaagtatttcaggactaggggatctagcttatactttggaagctgaagaacttgaagaagattcagttttacagt

SEQ ID NO: 55222 - DNA, 132 bp, Glycine max
ggaatgacagaggaaaagaaaacctcaaggcgaaaggcccttgccaagtggctgaaggagagcattctgagattaggtcctacatttatcaaagttggtcagcaattctccacaagagtggacattcttcca

SEQ ID NO: 55223 - DNA, 221 bp, Glycine max
tattattggtcttgatggtagtttcttaaaaacaccttttagtggtatattgttaggggcgatgggtcgagatcctaatgaccagtactatccttttgttgtggttgatgcttaaagcaagaacaaagactcttagaagtggtttctacaaaacttgttaaatgatattggtcatgagcagaagtgggtcttcatttcagatcaacaaaagggattagtcc

SEQ ID NO: 55224 - DNA, 254 bp, Glycine max
gggagattcagctgggatcccgagtcaaaaactccaaccattgatgaaatagagttcaatgtcaagaggggaatgaaggtggcagtttgtggatctgtaggttctggaaagtctagtttgctatcaggaattttgggagaaatatataaacaatctgggacagtgaagaccagtggaacaaaggcttatgtgccacaagcagcatggatcctgactggcaacataagggacaacattacctttggaaaagagta

SEQ ID NO: 55225 - DNA, 246 bp, Glycine max
  unsure (1)..(246): unsure at all n locations
gtatcccgatcatagatcttcaagaggttaacaaaagttcatctctgcatgcttaagtggttgaccaaattggaagtgcatgcagaaagtggggtttttttcaggtgatgaatcatggtgttggtgttgatgttttggatgagatgatatgtggaatccgtaggtttcatgaacaagatgncaaggtaaggaaaaccttttactccagagatagcaataagagagtcagatatttttccaatggtg

SEQ ID NO: 55226 - DNA, 236 bp, Glycine max
cttgctgatacattacattggtcagatatgcatcatgctatgtgccgaccatggtccttgtgtctctggtgctcacaatactattgtgacagcaagggcagggaaagacctagtttccagtctcgtatcaggtaaatacatgcctctaatctgtcaactactggtgtaggtattgtatctgatggggtgaccaaaactttttatgctaataatgccataaaatggttagtaacgag

SEQ ID NO: 55227 - DNA, 203 bp, Glycine max
atagaaagtgaaagacaaagagagctgcagggcttgttggagcaccgagctgtttctgattttgctcatcgcaaccgtattcagtcactgctcagaggtagattcctccgaaatgaaagaactgttgaagatgagaggccaccgtctatggctgcaagtgaattagctcagctaagacaacggcacacggtctctggtttaag

SEQ ID NO: 55228 - DNA, 148 bp, Glycine max
agcagcaattccaacaaatagttgaagttcaagagtcagctaggattctaatggatatttccaatggaaataaactctctggaaattcggtggttggtgtgcaaggaaacctttatgctgatctcaaggacatccttgagacgtggag

SEQ ID NO: 55229 - DNA, 147 bp, Glycine max
ctcgacgattcggctcgagttattgcggctcctgatgactagcttttgatgcgtgatttcatctccaatggcaatttggccactgcccttagagggagaaatggtcaaccatccccgaatctttcatggtcaaccaggctgaaaatc

SEQ ID NO: 55230 - DNA, 147 bp, Glycine max
ggcagttgcagtagagcatggcattccatgggaaaggctaagagcaccacctgttgatactcctccacatgatcttcatatttctgattgtctatatgatttgcatcccggtgatcacgtagagattcagtggagaagaaacaaaga

SEQ ID NO: 55231 - DNA, 250 bp, Glycine max
ggaacacgcttcttgttccaaggttaccaacttgcacgagttactgacgtgtctaacaagcgctatagtgtgtaggactgctttgggaagaacgtacgaaggggaagggattgagacaagcatgttccatggcctgcttaaagaagcacaggatttgatatcttccactttctacactgattatattccatttgttgggggagtgattgataaactcaccggattgatgggtcgtcttgagaattgttca

SEQ ID NO: 55232 - DNA, 237 bp, Glycine max
ctcgagccgcgcactttgcgattactgcgtcatctccaattccccggcaaatggcaacccagtggagcatgaagaaaaattcgtagctgatggagtggtcttcgctgaactgaacgaaggtctgaccagggaattaaccgaaggccgatactccggcgtggcagttaaggttacgccgatgcgcaccgaaatcatgatcagaggcaacaaaacccaagccgttctcggtgagaaggg

SEQ ID NO: 55233 - DNA, 238 bp, Glycine max
caaaatccaaagctcattagtggcatagctccactagttttaactctaagcaacaagtgcttcttcaagaagggtacgtgtgctgacttgtggtaataagttcaggatcagaaaagaacttgaccctcacattcagcatgtccttctctaggtctgcttctcagcctcggttcttccaacacaagaaagaggcattttggttctataggtttctatctattgtgtatgattatgtcac

SEQ ID NO: 55234 - DNA, 234 bp, Glycine max
gtcatctagttacaatgaccaccactaaacagtttgaggttgtcggccgtaagaagcccaccgaaaccgataagaaccccaaggtttaccgcatgaagttgtttgcccccaaccatgtggttgctaagagcagattctggtattacttgtctttcctgaaaaaggttaagcgaaccaccggtgaaattttggaggttcacgaaatctttgaaaagaatcccaaccatgtcaaga

SEQ ID NO: 55235 - DNA, 237 bp, Glycine max
taaggcaagcaacatatgcagtgctaaatcatttaattgaatatgttgaaaaccttgagaaggctgggatattggaagagaaagagatgctacaactccatgatgctgttcagactgatttaaagaaactactaagaaatcctcctttggttaagcttcctaaaataagtagtatccatccaatgttgggtgctctcccatcttcagttcgtgaatcacttgcaagttgtaccaagg

SEQ ID NO: 55236 - DNA, 220 bp, Glycine max
acacttcagatctcatcttggtccaattgaaggtctagctgttagtattgatggtctgctttgctgtacaatatcaaatgaccgctctgtgaaaatatatgacgtcataactttgacatgatggtcatgattcgcttgccatatattcctggtgctgttgactgggtttacaaacaaggggatgtcaaagctaggcttgccattagtgataggaactcat

SEQ ID NO: 55237 - DNA, 169 bp, Glycine max
ctcctcctcaccgactgctagcatggatatctgatgctcagtcatatcttcaatcattctcatctctcatgctctagcacgatagagctatgtccacgcatcgctacctgaggaagattatcgggaagctgtttggccaaacactcccattcccactgcactgcgagag

SEQ ID NO: 55238 - DNA, 234 bp, Glycine max
ctctaggaatgatggaaaacgggtatgtctggataacaactacttttctgtctacttggctggatataggtagtcccctatcttcagatgcaacggatgacatgcaaggagttattatacttcgaatgtatataccagattcagagcgcaaaagatggtttttttctaggtggaaaaacttgactactggaaagactgctaatggttcccagggtttgagtacttatggtatct

SEQ ID NO: 55239 - DNA, 243 bp, Glycine max
gaccaatgtaaatataatgttcacctgcttccgggagacctttcatatgctgattatatccagcatcgctgggactcgtttggtaggctagtgcagccacttgctagtgctagaccatggatggtaacacaaggaaaccatgaagtagagagcatacctttgttaaaggatgggcttttgtcctataattccagatggaaaatgccatttgaggaaagcggatcaaattcaaatctctattat

SEQ ID NO: 55240 - DNA, 243 bp, Glycine max
cggctcgagctcgaccgaatcggctcgacggctcgagtaaaaactggagacggcattaactaagagctgccttagtgggtttattgctactgacgttcctcctccaaagggtccattgtggattcttggcgatgttttcatgagggcatatcacaccgtctttgactacggaaatctacaagttggttttgccgaagctgtctaattaggctttctggaggattttctttgaaaaattgttaa

SEQ ID NO: 55241 - DNA, 248 bp, Glycine max
attcaggaagctgttccacatcttcttgcatagaataataatgatggaggaactgcttttcgtggttggtcaagaatgggtgtgccaatcaaagaattcaaaatcactgaagttaaacaacctaacattggagaagtcaaaccatcatccgtgactgcagaagttacttatagtgtttccagttatagagcacatattagatcagaatgggatgcactcaaagagcatgatgtattgtttttactatc

SEQ ID NO: 55242 - DNA, 237 bp, Glycine max
aagggttcaagcaaaggtcgtctaaagatagaggatatacagttatcagaggaagagatggacatgttcatagatctacatccatttactaatgcttctccttatactgttgtggagacaatgtcactgggaaaggcccttacacttttccgagagctaggtttaaggcatctgctagtggtacccaagttctccggtagatcacctgtggtgggtatactcacacgacacgatttc

SEQ ID NO: 55243 - DNA, 235 bp, Glycine max
cggctcgagaggggatgagcttttggctgttgctggtgctccctatgacacgctcgaggaagtattagggaaaagggactctggtggactgggttccctccaagattttggggtgaagtaccgagaagtgccacttgccgaggatggtggacttgactggaatgcactcatgagttctgtcaaacccaaaacaaaatgtgcactcatacagcggtcttgtggttattcatggcgt

SEQ ID NO: 55244 - DNA, 241 bp, Glycine max
attttgttccatagaactgcaaaattcaccattctgtggttgggctgcgatcttgcatatcagaaggtgcaattattgaagacacgttattaatgggggcagattattacgaggtaataatgtggttaaacaacttggccagttacgcctagtatttccaagttttaatagccaagttttcacgtgtgaaagtggttgaaacacttggatattcaattcatcgattataagtttgcaattg

SEQ ID NO: 55245 - DNA, 241 bp, Glycine max
ggacagttgacaggctataagttggtacctggctcaaactgcttaccattggcaggttctgaggccaagtttctaagaagagctgctttcttgaggcataatctttgggtaacaccctattcacacgatcaaatgtttcctgggggagaatttcctaatcaaaatccacgtgtcagccaaggactagctacatgggttaagcaaaaccgatcattggaagaaactgatatagttctttggt

SEQ ID NO: 55246 - DNA, 240 bp, Glycine max
ctttttactggtcttcaaagccgcaaggctagatcctggcgttatagctcaggttggctacgaggattcatagctgattatggagtcccactaatggtcctcatatggactgccgtgtcttacataccagtcaatgaggttccaaggggaatccctaggcgacttttcagtccaaacccatggtctcctggtgcatactcaaattggactgttgtcaaggaaatgttgaatggcccccct

SEQ ID NO: 55247 - DNA, 240 bp, Glycine max
atagattgctagctatatatcaaagaaaaagcttgctttgtgtggaggctgcagagaaaattcaaggtggtgttcatggccatgatgtggattagagtcatacttatactagcggcttgcatgcttcccctttcagtggaagccatggttcgccactacaagttcaacgtggtggtgaagaatgtcacaagattgtgttcaacaaagcccatagtaaccgtaaatggaagttcccgggcc

SEQ ID NO: 55248 - DNA, 236 bp, Glycine max
ctcgagccgcaggattattctatgcaacctcctgctcaagaactcgtcgccagggatttgcacgacaccgtttggacattccgccacatttaccgtggacaaccaaaacgtcatttgcttaccactggatggagtctatttgttagtggaaagaggctcttggccggagactctgttttgtttattagagatgaaaagcagcatcttcttttgggtatcagacgagtaacaggcaa

SEQ ID NO: 55249 - DNA, 262 bp, Glycine max
taaaaatactgaaacaactggtccctgcgtgatccatgttgtcactgaacaaggccacggatacccttatgcagaaagagcagcagccaagtaccatgtggtatctaagtttgatccagcaactggagaacaattcaaggccaaggccaccaccaagtcatattcaacatactttgcagaggctttgattgcagaagcagaagctgacaaagacattattggaattcatgctgcgatgggaggtggactggcatgaatcact

SEQ ID NO: 55250 - DNA, 260 bp, Glycine max
gcaagaatggcacttcgttgcttggtgatgtccctttctgttctcttcactcttggtcttgcgagagaaagccatgccagagacgaagatttttggcatgctgtttggccaaacactcccattccaagttcattgcgagatcttctaaagcctggccctgcaagtgttgaaatcgatgatcaccctatgcaaattgaagaaacacagtacccgaaaaccttcttctataaagaagaccttcatccaggcaaaacaatgaa

SEQ ID NO: 55251 - DNA, 259 bp, Glycine max
tctcgagccgctcgagccgctcgagcggctcgaggccttctcctcattcttctatccattgtatcattccatcttccaaattttaaggtgacaggaacataggaacttgaggtgatgaaagcaacagaatgttaaaggaagctttgatgtgaggtgaggtgaggaaatcagaagaggagtttgaaaatgagtacagcaagattcatcaagtgtgttactgtcggcgatggagccgtgggaaagacctgtatgctcatct

SEQ ID NO: 55252 - DNA, 263 bp, Glycine max
caagtgtaaaatgatggagaagatttttagcacagaaggaaatagtgcagacaaggtgtgtataggagtaaataaggaaagagagagagagaaagacccttacccttctctatcgctcgctttcctttgacgcttctgacccttgctttgtctgcgtctttcttctttctttctttctttctctgtgtgtcgtaatggctctcccagactcttcttcccgtcgcaactccctgatcccctccttcatctactcctcttcctcc

SEQ ID NO: 55253 - DNA, 258 bp, Glycine max
cgaatatctccttattctctctcttcccaatctcaatcccagtgagtgctttctttctgtaactaaccccaatcatcaactcagtcagccgcaatccacggcggtcttcaatcaggacaccctccagcaccgcctccaggccttaatcgagggcgcccgagagacctggacctacgccatcttctggcagtcctcttacgactattccggctccactctcctcggttggggcgacggttactacaaaggcgacgacga

SEQ ID NO: 55254 - DNA, 235 bp, Glycine max
cagagttcctttctttctcctaaggagatagtttcttttcttcataagctgtcacaagttgataaacaaaacttcatacccgttgctctcgaagagtgggacaggaaatatcttgaacttctttatgggatttgtgcagattcaaataaatatcctttacccttgcgtcaagaggttttccagaaggtggaaaggctatttatgcttgtttacgagccagagatcctgaagttag

SEQ ID NO: 55255 - DNA, 269 bp, Glycine max
cgcgccgagcaccggagacgtgcaactaacttcccccgcctccggcgaagattccgacgacctcgaagacgttcgcctcctcgactcctacgacaaaaacgacgtcgttcacgatgaaacgaaaagaattcaggtcagaatcaccggcatgacctgcgccgcgtgctccaactccgtcgaaacggctctccggtccgttcacggctcaccgaagcctccgtcgctcttcttcaaaacaaagccgacgtcgttttcgtccccggcctcgt

SEQ ID NO: 55256 - DNA, 100 bp, Glycine max
gagaaatggagcttggatcttatgcagaaactgcttccacgccatattgagatgatagaaatgattgacgaggagctggttcggaccataattgcagaat

SEQ ID NO: 55257 - DNA, 134 bp, Glycine max
tatacctataaattcaatgttatacaacaagaaggtacattgtggtggcatgctcactcaggagttttacgtgccacggttcatggtgctttcatcattcaccctcgttcgggtctgtttccttttccaaaacc

SEQ ID NO: 55258 - DNA, 165 bp, Glycine max
gaactcggaccttttagagttaacagtgatggaagaacactttacacaaatcaatatgcatggaacaatgtggcaaacgtgattttcctagagtctccagcaggagttggtttttcatattcaaacacttcttctgactacactaaaactggtgacaagagcaca

SEQ ID NO: 55259 - DNA, 99 bp, Glycine max
gaactcggaccttttagagttaacagtgatggaagaacactttacacaaatcaatatgcatggaacaatgtggcaaacgtgattttcctagagtctcca

SEQ ID NO: 55260 - DNA, 99 bp, Glycine max
ctcagaacacttttgtaccagggctgattgatcttgccatcgcgaggaacactttgattggtggagatgacttcaagagtggtcagaccaaaatgaaat

SEQ ID NO: 55261 - DNA, 100 bp, Glycine max
ctttcgtaaagaagctggatctcatggtcgagacactctaggaatattccgagtccaccaatttgagaaagtggagcagttttgcctcactagcccaaat

SEQ ID NO: 55262 - DNA, 100 bp, Glycine max
gaactcggaccttttagagttaacagtgatggaagaacactttacacaaatcaatatgcatggaacaatgtggcaaacgtgattttcctagagtctccag

SEQ ID NO: 55263 - DNA, 257 bp, Glycine max
gcaacttacgcaaagctgcagctcaggaagttgttgacaaagttcggcagcatagtggtgtactagtggatcaggcgcaacttgtatcgaaggaactgatcagagttgctattctttggcatgaaatgtggcatgaagcactggaagaagctagccgtttgtatattggtgagcataatattgaagggatgctaaatgtgttggagccattgcatgaaatgcttgaagaaggagcaatgaaaaacaatgtcaccata

SEQ ID NO: 55264 - DNA, 252 bp, Glycine max
cgagccatggcgtaaaagaatacttgacccgggtagcgagattgtgttgaaatggaaccgggtcttcatagtttcatgcttggtggctctttttgttgatccattgtacttttatttgcctagtgtgatagaaaatacagggtcttcatgtgtaaggacagacctaacattgcgcattgtcgtgacctttcttcgcactattgctgaccttttttatctgttgcacctgataattaagtttaggacagcata

SEQ ID NO: 55265 - DNA, 250 bp, Glycine max
aaaagttgctgcacttaataagctgaagaaaaggggcacgcactctgaagcattggagaaagcaaaagcagttgtcagtcatttgcatacaagatacattgtagatatgcaatccttggattcaacagtctccgagattaaccgattacgtgatgaacagttgtatccaagacttattcagcttgttgatgggatggccactatgtggaaaaccatgctagagcaccatgtgaagcaatcagatactgtg

SEQ ID NO: 55266 - DNA, 251 bp, Glycine max
atcttgtccatctatccaaatttccccatcccgcaactaatttatttatttatttttcctttatttatcttctttctctggctcgagcatccaaaagggttgttttttttttttataagaagaagaggagagggaagatgatgatgatgacaatggaggggatgatggacaagggggtgttggatgatgtgataagaaggcttctggaagggaaaggagggaaacaggtgcaactctctgagtcggagatc

SEQ ID NO: 55267 - DNA, 245 bp, Glycine max
ttgaaaaatacgactatgacgggaagattggactccagttctgtagaagttttttccagagttcaagaaattctagtaaattgcaaagagctgaaaacttgtcagaatgacagttggggggagagaccagagttatgcccaaaatggttagcattgctgactatggagaaggcttgtctgtctgccatttctcttgatgaaaccagtggtgctgtacggaaggctggtggaaatttcaaggaaaa

SEQ ID NO: 55268 - DNA, 244 bp, Glycine max
ggaggatcaactgcagtgactgcaattcttattgataatcagaagttatgggtagcaaatgttggagactcacgagcagttttgtcgagaaaaggggtggccgaacagatgactattgatcatgagcccaatactgagaggggcatcattgagaacaaaggcggctttgtctcaaacatgccaggagacgttgcaagagtaaatgggcagcttgcagtttctcgagcatttggagacaaaaatt

SEQ ID NO: 55269 - DNA, 249 bp, Glycine max
ctcgagccgctcgagccggaagttggagacactgttggatccaaatttgcttggaaatcgttatatagagtgaagtagaggagttaatccaagtggccttaatatgcacacaaaaatctccttatgagagaccaaagatgtctgaggtggtgagaatgctggagggtgaaggtttggaagaaaagtgggatgaatggttgaatatgacagaggatatacaaaatttcaccttcaacctctgcactccta

SEQ ID NO: 55270 - DNA, 243 bp, Glycine max
tcttaacgcattgtggtgctaattcggtggtggaggcgatttgtgaaggggtgcctttgatcaccatgcctaggtttggtgaccattttttgtgtgagaagcaagcgactgaggtgcttgggcttggggtggagttgggtgtgtctgagtggagcatgtctccttatgatgcgaggaaggaggtggtgggttgggaacgaattgagaatgctgtgaggaaggtgatgaaggatgaaggaggct

SEQ ID NO: 55271 - DNA, 240 bp, Glycine max
gttatgaggacgtcttgaatcgtgtagtaacttatgcttctggccttccattggctttggaagtcataggttccaacttgtttggaaagactgtagcagaatgggaatctgctatggaacattataaaagaattcccagtgatgaaatcctagagattctaaaagtaagctttgatgctttgggggaagaacaaaagaatgtttttcttgacattgcttgttgcttcagagggtataaat

SEQ ID NO: 55272 - DNA, 249 bp, Glycine max
agaaacttagaggagggaagctttatatgcctgattgtttctatttaatggggactgtagatcccactggacacttaaaaaagaatcaagtttgtattattcatgagaatagccaaattgttggggatgttctggtttatagaaatcctggtttacatttcggagacattcacaaaatggatgccacatatgtgaaggagttagagtcatatgttggacatagcaagtatggaatttttttcccacgtg

SEQ ID NO: 55273 - DNA, 255 bp, Glycine max
cccgcgtcgagcgagtgccaaggttgagatccaaaccaaacattacataaagttaaccatccaatccaaactcagctcctcctagggttttttcaattccaaatcttccttccctctgcaatcagactcagtcgctcaggccaaatgccagaaccgaggttcgccgcaaccgttacaaggtcgccgttgacgccgacgagggccgccggagaagagatgccacaatggtcgagatccgcaagagcaagcgcgaag

SEQ ID NO: 55274 - DNA, 252 bp, Glycine max
ggccaggcaagccccactcaaccaccacacctctcctcgttcacgctacccctttctgctcttcttctacctttcaagttttaaaagtataaagatggcagagacattcctatttacctcagagtcggtgaacgagggacaccctgacaagctctgcgaccaaatctccgatgctgtcctacgacgcttgcctcgagcaggacccagacagcaaagttgcctgcgaaacatgcaccagcaccaacttggtca

SEQ ID NO: 55275 - DNA, 233 bp, Glycine max
ggctcgtggtgcagcctggtaatacgctgttatgcacgagggttaaggcccaattaaatgaggtaaacactctacttcccttcacttctacattgaatctaaaacaaaaaaatttgttcttaaatgtgaatttggtgaagagggcaacttagagggaaaattgtggatttataatcattgattggaaaattaacaattgagactttgatacatttggactctgtttggataaa

SEQ ID NO: 55276 - DNA, 244 bp, Glycine max
accgattgctagaatggaatttcgatgctcagtcatctcttttaccattctcttctctgtaagtgctttggtgctcagaagcctttagatattctatttttcgtgtctttatgagctcttgctaactagtttttcataagtgttcagaaacttaaacaacaattattaataaatgattctccatttcacatactaaaagctatccatcctatatataatgaggctctattaatgtttaatatca

SEQ ID NO: 55277 - DNA, 242 bp, Glycine max
tctggatccttgaatgatgcaataaccaaatggacaaacctcaggtatttgtctcttgctcagaacaagttcagtggaaatctgcctagttggttgttcacatttaacgcaatagaaatgatggatttctcgcataacaagtttactggcttcatacctgatattaattttaagggtagcttaatatttaacaccaggaatgtcactgttaaagagccattggttgcagcaagaaaggttca

SEQ ID NO: 55278 - DNA, 254 bp, Glycine max
taatccctctttcttcctcttcctcagtagtgcgattttcgattctcttctctgcaactatgcctaaccctaaggtcttcttcgacatgaccatcggcggtcaacctgccggccgcatcgtgatggagctctacgccgacgtgactccgagcaccgccgagaacttccgcgcgctctgcaccggcgagaagggcgccgggcggagcggcaagcccctccactacaaaggctcgtccttccaccgcgtgatcccg

SEQ ID NO: 55279 - DNA, 248 bp, Glycine max
gtagccgtgtccatggccttgcatgtccacagcttcttctatttttggttcgtcgtcatgatcttcgtcgtcgtatttttcacggcaccgtcggtgtctcagccgcaagccaccgggtcctgcaacgggatactcctgtcgtacgcgtataccggcggcttgcagctgcctccgaatgtctcggacccggcggagcagccgtaccggttctcctcgacattgacggtgctgaacaacgggctggagga

SEQ ID NO: 55280 - DNA, 263 bp, Glycine max
gtttgtttgatgatggcagggttcaaactgctagcagagtaatgaagagtatggtggagaagggggtgaaggagaatatggacttggtttcgaaggtattggaggcccttctcatgaggggccatgtggaagaagctctgggacgaattgatttgcttatgcttaatgggtgtgagcctgattttgaccatcttttatctgttctttgtgagaaagaaaaaacaattgctgctctcaaactgttagattttgttcttgaaaga

SEQ ID NO: 55281 - DNA, 254 bp, Glycine max
actagatgatgcttggaaattcatccaggatatgcctgtcaaaccaggaattactgtcttaggtgcaatgctaggtgcttgcagaatccataaaaatgtagaattgggtgagaagactgcagacgaactatttgacttggacccagatgatggtggctatcatgtattgcttgccaacatgtatgcatctgcttcaatgtgggacaaagttgctcgggtgaggacggccatggagaagaaaggggatcagaaaa

SEQ ID NO: 55282 - DNA, 185 bp, Glycine max
cgtaaacgaaaaagaacagagctttctccctctgattggttccctctcgtcatctctgcattccaacaattgcaccttccattctgcattttaggtcatggctacgaggaaagttatagctatatgtcaatcaggaggtgagtttgtaactgataaggatggatcattgtcatacagtgggggag

SEQ ID NO: 55283 - DNA, 236 bp, Glycine max
ctcgagcgtttcaaccaaaatggagaagcgattaatctccgtagaccgttgggcagagggaagcgaacgaacttcctcacccacctccactccgaccacacccacggcctcaccccctcctggcaccacgcccccctcttctgctccgccgtcaccgccaaactcctccccttcaagttccccggtttcgacctctccctcctccgcgatctccaccccggcaccacccacaccgt

SEQ ID NO: 55284 - DNA, 258 bp, Glycine max
tctcgagccgaatcggctcgagcggctcgagcttggtggtagtagcaaaaacaggaaatgaggctgccaccagaatcttagctcgtcaacttgttaggttacgtcaacagataaccaatttgcagggaagtcgtgctcagatcaggggtgtagcaactcacacacaggcattatatgcaagcacttcaatctctacaggaatgaagggtgcaactaaagcaatggtgacaatgaataagcaaatggcaccggcaaaac

SEQ ID NO: 55285 - DNA, 255 bp, Glycine max
  unsure (1)..(255): unsure at all n locations
tctcgagccgctcgagccgctcgagccgctcgagccgctcgagccgattcggctcgagntttaccaagctgtacactcgagtacagacctacattagcactatgccactgagaatggatgagggatggaatcaaatccagtttaacctggtagatttcaccaagagagcttatggtactaattatgtggagacactgcgagtacaggtccatgcaaactgtcgcctgagaaggatatacttctctgatcgcctgt

SEQ ID NO: 55286 - DNA, 248 bp, Glycine max
tgcaattgcagcattgtgtccactttactactactctcagaagcatcccgtcaattacttgcttctagcagttttcaccgtgtctcttggttttgtcgttggattgagttgcgcctttactagcggtaagattcatcgtctgtgtcctctttttttctttgtggtaatttagaatttgtttgttagtgtttttttttttaaagaaaaaatagaactgaaataaattatggtttatgttgttttagttg

SEQ ID NO: 55287 - DNA, 248 bp, Glycine max
ccggaggtcaggcacagtaattttccccagatccttatattctcataattggccgtgttttggttggtttgggtgtgggtatagcttctgttactgctcctgtgtatattgcagaatcatcaccatcagaaataaggggagcattagtaggcataaatgtgcttatgataactggtggacaatttctttcctatctcataaatcttgctttcacacaggttcctgggacgtggcggtggatgttggga

SEQ ID NO: 55288 - DNA, 248 bp, Glycine max
gttaatttgtgtagcgtttccattaaaacggcgtcgtaatcatacgttggtattcagacagcatgaaaactccgatttcaggtttctacagaaaccccgtgaagttcagaatgccaactgcggagaacttggttcccattcgattggacatcgaaatcgaggggcagagatacaaggacgcgttcacttggaacccttctggtaatttcaaactaaacctgttcttgtttattcattacctttgattc

SEQ ID NO: 55289 - DNA, 244 bp, Glycine max
ctcgagccgcaccactctgttcgtatgctggtgaaaacctggaacctatatgtcgaggaagaacatttcatgcaccttgtgagatctcattttagttccaccctgtttctgcagcttttttgagggagatctcagtcccatacatgttgccagattaatttgtgtatcccataattcacatgtatcaatgtatattatcttctccaatctgtttctgattggcttttggtttttggtttttctt

SEQ ID NO: 55290 - DNA, 234 bp, Glycine max
aaagacggcgtcttcataaacgcctttcttctccgtttccgtttcctcgttcaaattcgctttttgatctgcgaaaatgagagagtgcatctcgatccacattggtcaggctggtatccaggtcggaaatgcttgctgggagctctactgcctcgagcacggcatcgggcccgatgggcaaatgccaagtgacaagacagttggcggtggtgatgatgctttcaatactttctt

SEQ ID NO: 55291 - DNA, 255 bp, Glycine max
ggaaagtttctcaaagccaaggaccagaagtcgctctacgaagctctccagaagatcaaagaaggtttctttttctttctttctttgcactgagccttcaaatcaaattcatgatctgttggctgcactggcagagctgatgcttctgggcttcatttccctgcttctcacggttacacaaaacggcattaccaaaatctgcgttcgtcccagtttgacgcgccacatgctcccttgtaatctcgacgccggtga

SEQ ID NO: 55292 - DNA, 240 bp, Glycine max
ccattttgcgtggaagttttggacactttggtgcttctaaggttcaaacatttctttttcatatggcccccactgttgcttttagtgtgtggctacaagcaactgggagttctctggtctttgttccttggtttcttcactctccgagagcgatttgtgcactactgggttgaaaatgtatttggtggagagcaaaggaggtgccataactcgcatgtccttggctcttttcttcttggg

SEQ ID NO: 55293 - DNA, 214 bp, Glycine max
ttttgaaaaaagggaagcttcacttgtatggagttacagacatgcaggtattgatttgtttttagggagactattatttgttttgcctgcttgagtttggaagattgcaagcgagggacatgctgcagcatctctggacgggtccaatttctaatgctactcaattgaaaggatttaaatcaaagcttgcgccatgttattattgatttatttg

SEQ ID NO: 55294 - DNA, 238 bp, Glycine max
tgctcgagccgaatcggctcgagctcgacgctttgtgtgatagagagcctcattctcatggacattaccggcgatattttcaggcagagcataacggaaatgcttgcggagtccccttccggtgcgccagaacttcacgttctcgccgtcgatgacagcctcgttgatcgcaaggtgatcgaacggttgctgaagatttcttcctgcaaagtgacggttgtggagagtggaacgcgcg

SEQ ID NO: 55295 - DNA, 248 bp, Glycine max
ctcagacccctcttatttacagagctgttccaagctggtttgttagagtggagtcgttgaaagagaaattgttggaaaacaataagaagacctactgggtccctgattttgtcaaggataagcgatttcacaattggctggaaaatgcaagagattgggcaattagtcgtagtacattttgggggacccctctccctatatggattagtgaggatgaggaggaagtagttgtcatagatttgttgcaa

SEQ ID NO: 55296 - DNA, 253 bp, Glycine max
cgctcctaagtcctaatacctgtttcatgctaatgtcattgtgttagtggctttcgggtttgattagcaatcttaggtttccacaggaaaaggccatcattttctgtgacaatctgagtgcaatctgtttagccaaggatcaagtccatcatgagaggactaagcacattgacattagataccacttcatccattttgagaaaagggtcaaagtccagaaagttgatacgagggagaatcaacagatatgttc

SEQ ID NO: 55297 - DNA, 246 bp, Glycine max
tctcgagccgattcggctcgagatccttacctgtggatgagcataccacaggaaaatgggacggcatgtgttgattgatgactgtgcattgggaccaaaagacatggacagctttggcctctctctctttcaaccagactttctcatctgttctttctacaaggtctttcgagaaaatccatcagggtttggatgcctttttgtcaagaaatctgctatcaccactcttgaatctcatcttgtgca

SEQ ID NO: 55298 - DNA, 247 bp, Glycine max
attttgttctaccatcaaaaaagtacgctgacgtgatcattcctcgtggaggtgataatcatgttgccattgatttgattgtgcaacatatccgtacaaagctcggccaacatgatctatgcaaaatatatccaaatgcctatgttattcagtctacattccaggtatctttaaacttagtttgccaattttattattttattttattttccaccttttatgatttaaaatttgggaagatccagtg

SEQ ID NO: 55299 - DNA, 235 bp, Glycine max
ggagttggcatcaaattggtggaagatataaagaaaggtgcccaagaactcttaaacctttcaatagaagagaagaaaaagctttggcagaaaccaggagagacggaggggtttggtcaaatgtttggttataaagaggggccatctgattgggtagatttcttttacattttcacacttccatcccatttaaggaatccccacctattccctaatataccactgccttcaggga

SEQ ID NO: 55300 - DNA, 239 bp, Glycine max
gttacttttgaagttgggaggggagcaaatatatgctggtccattaggccgccactgttcccatctgattcagtactttgaggctattcaaggagttcctaagatcaaagaaggttataatcctgcaacctggatgttggaagttacatcagcaggcacagacgcatctattaaggtcaacttcaccaatgtgtacagaaactcagaactatacgggagaaacaaacattgatccaaga

SEQ ID NO: 55301 - DNA, 251 bp, Glycine max
gcagcacctgaagcacatcctcttctggttgctaaagaggaaactaacgcgctaaaacaagaaatccaaacattgcaaaagggtatcagttatttgtttgaaggaggaaataagactatggcaattgatgaatacaactgctagagaagaatctcgaaacttggatatatcatattcgttcaatgaagatgaacattatgttacaagaaattcaagctttgaaagataaggagggaacactcaaagcggca

SEQ ID NO: 55302 - DNA, 247 bp, Glycine max
gcctgttgggagtttcacgaggaggacctggagtcagtgatattgcgaacagtctggagaaaagagggatcaacatgctttttgtattgggtggaaatggcacacatgctggtgccaatgcaattcaccacgagtgccgcaaaagacggctgaaggtatctgtaattggcgtgcccaaaactatagacaatgatattttattgatggacaaaattttggctttgatactgctgttgaagaagcacaa

SEQ ID NO: 55303 - DNA, 253 bp, Glycine max
gcaagaatggcacttcgttgcttggtgatgtccctttctgttctcttcactcttggtcttgcgagagaaagccatgccagagacgaagatttttggcatgctgtttggccaaacactcccattccaagttcatgcgagatcttctaaagcctggccctgcaagtgttgaaatcgatgatcaccctatgcaaattgaagaaacacagtacccgaaaaccttcttctataaagaagacttcatccaggcaaaaca

SEQ ID NO: 55304 - DNA, 252 bp, Glycine max
ttgtttacaatcaacagatactcatgcttgagaagttgcgagtacgacaaagcaagctcgataagaaggtaaaacaaatccatacctggaggaaggtctcaagtgtgatatttgcggctacagttgctgcttgttgatctgctcagttgtggctgcagcaattgctactccacatgttgcagctgctctagctgctgttactgcaatcccaataggttcaatgggaaagtggattgactccttgttgaagaa

SEQ ID NO: 55305 - DNA, 246 bp, Glycine max
tctcgagccgaatcggctcgagcgtgctcgagctcaaactcactctttctaagttttttctatactcttctctctctctgtctaccatggttatctccaaaaccacctccgaatccgacgtctctgtccatcaaccttcgcttctcgatatgtcagaacttcgcttcccaggtttaagatgccggaggagtcgataccaaaggaggcagcgtatcaaataataaacgatgagttgatgttggatgg

SEQ ID NO: 55306 - DNA, 272 bp, Glycine max
tttgaattgatatgctatcatggttcagtgtccttttgaattgatatgctatcatggtgtatcctgtgtggaagtggtttgagaaacaagatgggattcgatctctgcagaagaatagtaatgatcctcaccagagttctataacatctaccttgaaaggccaaagggtgacgcttatgggtacgacttagttgtcgttgatgccatgcataaggctaactatgccagtcggatatgtcattcatgccgaccgaattgtgaagcaaaagtta

SEQ ID NO: 55307 - DNA, 267 bp, Glycine max
cgcaaagcgagtggtgtgctaccataacctggcggtgagcttcgtgatccccactgacggcccaccttcaaaagcccaaaaggcagttctggaggcccttccggactcaatttcccacaccttccgccggacaccaaaatcgaaaccctgatctcccacaccgtcctccgctcccttccttccctccgccaagcattccactccctctccgccacaaacaccctctccgccgtcgtcgtagacctcttctccaccgacgccttcgac

SEQ ID NO: 55308 - DNA, 268 bp, Glycine max
ggccaggcaagccccactcaaccaccacacctctcctcgttcacgctacccctttctgctcttcttctacctttcaagttttaaaagtataaagatggcagagacattcctatttacctcagagcggtgaacgagggacaccctgacaagctctgcgaccaaatctccgatgctgtcctcgacgcttgcctcgagcaggacccagacagcaaagttgcctgcgaaacatgcaccacaaccaacttggtcatggtcttcggagaaatca

SEQ ID NO: 55309 - DNA, 249 bp, Glycine max
gaaaaacacatacaaatagtagtgtagtgctaactctctctctctctctctctctcacacacacacacacactctccccgaggtttgagagggtactggcatccaaaaaatggttctaaaactaatgcttcgggccatagagcacgaaggccgctgtcaatatttgctgtgcttggtctttgctgtttcttttatcttttgggagcatggcaaagaagtggatctgggaagggagataaccttgcattg

SEQ ID NO: 55310 - DNA, 235 bp, Glycine max
aaagattccatttccagaagtagcactgcactagtactctcttttgtttagaaaaaaaaaaatggttcaacaggaagtgcgtaaaggtccttggacagaacaggaagacttcaaattggtgcctttgttggcttgtttggggaccgtagatgggactttatagctaaggtatcaggtttgaatagaacaggtaagagttgcagattacggtgggttaattacctacatcctggcc

SEQ ID NO: 55311 - DNA, 254 bp, Glycine max
tgtagattaccttccatatgattcgtttgtcaggaagagtgtggggtatttgttcgcgattcagcacggtgctaagcagatttttgatgctgatgatagaggggaggtgatagatggtgatttggggaagcattctgatgtggagttggtatgggaagctgctaggcaagaggttctgttgcagtatagtcatgataaccctaatcgaacagttgtgaacccttatgtgcattttgggcagcgttcggtttggc

SEQ ID NO: 55312 - DNA, 259 bp, Glycine max
cgaaggatgcttgaaaatgttgttgatgtgagcaatgatgagaagactttcatgcatatgtggaactcatttgttcggaagcatcgtgtgattgcagatggtcacatttcatgggcatgtgaggctttctcaaaattgcatgcacctgagtttgttcaatctccctcactggcagggtgttggagaatatttatggtcaaattatacaatcatggtcttctagatgctcggaccatgaatgactgtaatattattcttg

SEQ ID NO: 55313 - DNA, 253 bp, Glycine max
gagaggaaaaaaggatgggaaataacatggcaacatacaacaaatacaaaagtttcttgttctttatcagaaagttacaggtcaccgagccagtttcacctcaggaccttgaggaggcgttttcaaagttcaccggaggaggttcccacatgtctgcggactatctccaccgtttcctggtggagcaccagggtgaagaagactacacgttattgaattcggagaaagttgttgagaaggttctgaaagagag

SEQ ID NO: 55314 - DNA, 257 bp, Glycine max
acaagattgcaccttcgttcgagaaactctaagcgacatatccaaggaccattgtcctgatttacggcgtcatagtagatggatctatattggattggtaatggtctcttttgctgtcatgttctccttgatcttctggatcgtgtatgggagagagaggagacatcgtctgcatagaaaagagtcaaaggatttgattcctgcacatgcaccagcaccaggacatgcattagcattggtccagatccctgaaggat

SEQ ID NO: 55315 - DNA, 253 bp, Glycine max
ccaaggggcactacacggagggcgccgagctcatcgactccgtccttgacgtcgtgcgcaaggaggccgagaactgcgactgcctccaggggttccaggtctgccactcgctcggcggaggaaccggctccgggatggggacgcttttgatttccaagatcagagaggagtaccctgacagaatgatgctcaccttctccgtttttccttcccccaaggtctctgatactgtggttgagccttataacgctac

SEQ ID NO: 55316 - DNA, 251 bp, Glycine max
ttcaaaattcaacactcttgaattttggactagtactgggcgcgcttcagtcttgagttgtggaatcaagagatttgccgcaaaagttctactattgcttttggtggggcctcagaaatttgagttctcttggtcagagccttgcaacaagtacctgtgtttggactatctgctatgcaatttgcatatcaattgctggatttgtgttatttgcattcctcataggaaatattcagacatatttgtattca

SEQ ID NO: 55317 - DNA, 239 bp, Glycine max
ggacaaactcccaaagtggcgaacaagacaagaagaagaagccacgcggacgtgctcacaagagaatgcaatacaaccgccgattcgtcaccgccgtggtgggattcggaaagaagcgtggaccaaactcgtcggagaagtgagggaggcgtttggaagatgatggtttttcttagtttgagttcatcaatcaaataaaaagaggtgatacatttcgcaaactaagaaaaaccatcatc

SEQ ID NO: 55318 - DNA, 262 bp, Glycine max
gttgaattaagtggcagtggaatctattcgacaaataaatgatgctcaagctgcagcaaagcacttgatagaagaggcagtttccaggaaaagcaaggatgatatatcttgcatagttgtaaggttctaatgacatgtttttatggataagcagaggaatcctttcccaaaccaagattgaaggccctggtggacatttagaattttagatgatcagatgaacttcatcatgttctttcttagctaaaatgcctgcagaaat

SEQ ID NO: 55319 - DNA, 227 bp, Glycine max
gcataggcaaggttggagttcacggtcatcctgtcacaggtggttttgaacttgagcagcaaaagtctgatgaacgtaccagaaatgttgttccatacaagcgcactcgaacttctatggttgatgtaaggatggatgtgcggactaattctctcgtcaggccatcagggacagttgacagagattaggtcaagctacggattgccaacaatggtgtcgttcagagt

SEQ ID NO: 55320 - DNA, 268 bp, Glycine max
gttccggtgtttcttctaacacctctgtttcgcctgcattgagtaggccagcggatcagatatttgagattgtgaacctggcaaatgaacttctgcctccattgcctcaaggaaccatttctcttcctgtcagctccaacttgtttgtgaaagagtctgttgtgaaaaaatctcctccttctgggaatcccgggatacaagaagacacaaatggaaatgttcatgaaatatcagctcgtgcaaaattattaaatgataagcctgagtt

SEQ ID NO: 55321 - DNA, 277 bp, Glycine max
gtttatttcacacatttatgcctcacttcactactggaggcttggcttctacttgggaggcataaatgtgtgaaataaacagaatggaagaaatcaagaacaaaggataagccaagcccccagtagtgaagggactgtaatattctttctattccaaaacatgccccaagcttgagtccattgtgaggaaacatctcaagaaggtgttcaaggatgacaatagccaagctcctgccttactccgcattttcttccatgattgttttgttcagggatg

SEQ ID NO: 55322 - DNA, 262 bp, Glycine max
ctcagcagaggatttgggaggtgctactgtgcactgcaagacgtcaggtgtttctgattattttgctcaagatgaactccatgctcttgcgcttgggaggaatataattaagaatttgcatatggctgggaaagatgtcttggcaaatggattgcaaaatataaattatgaatataaagagccactgtatgatatcaatgaacttcgttctattgcccccactgatcttaggcaacagtttgatatccgatcagttattgat

SEQ ID NO: 55323 - DNA, 168 bp, Glycine max
gtgagattcgacatcgaggcggacgaagaagacggcggagagccggttattccggggcttacaggcgagttggcagcgccgactgagggcgagggcgatgattgggacagcgatagtgaggatgatttgaagatagtgttgaatgagaacaaccacatggccatggaa

SEQ ID NO: 55324 - DNA, 215 bp, Glycine max
ataaaaaaagactgcaattatgaatcaggagataaattaattatcctatacattttttcctagtacatgaaaatatagtacctaaatccaaactcaaaccaaaagcaaaatacaacttcgatacacgacgcacgcgcttcgtaaaaaaaaaaaaaaaaaaaaaaaaaaaaaaaaaaaaaaaaaaaaaaaaaaaaaaaaaaaaaaaaaaaggggcg

SEQ ID NO: 55325 - DNA, 362 bp, Glycine max
ccatcgcaaaagcaaatgtaaaattctattttttgcaggtctaaaatctattcaagaacaatgttaccgaggcatagtggtcatggtacagccatccctataaacataaggaacgagtgtagctaccagacaacggacaacataaaaataattttacaggaaaaacgggtggaaaaaatggggtacaaaacggggagaaaatggttgaagatagctccgattagttaagaggggggatcaccctcaggagcaacaaggtcatccttcggcagatcggattcaattttttgctcctcaagtgtaactttatctgaactatcatctgttgtatcaatagattcttccgatttactgttgtcatc

SEQ ID NO: 55326 - DNA, 356 bp, Glycine max
attgaatataaaaaaattgtgtaggttatactcatttaaaaaaccttccaacaattttgtagttttcaataacttttaacttacatataagtgttgctaatactccacgttataaaatgaatttgagatgaaacatttgacgctaccaatgatttaaaccagagatgatagactaaagcattgatttatagacaaatgaatagataaacttatggtacacctatttatccctaatgcaactatttgtacaagtataggagcttctcggtacctctgttacatcatcctcaaccctattcgactttcctacaaaactgtgtgcaattctaaagtttcgaaaattagatggactgatg

SEQ ID NO: 55327 - DNA, 373 bp, Glycine max
  unsure (1)..(373): unsure at all n locations
gaggataacccttttagtaatgcaagaacggcagttaggacaaaacaagtcatgcgtctcttgttttgccaatactgcctcaacatcgaattcttccagttgctcatcaatctcttctatcaggataggagcttcctttgtacttgtttcttcaggaaaatttgtaatagctgtagcttgtatgtcagatgaattatgtaaatgggatatttctgtagtggaagggagcttgttgtccacggttttcatacattgatcactgatttcactgcatagactattttgaaaaactagctgatctgcttgtacatcaaattctctctcccctagatttgtnagatggacagacacagaagcatcaacattttgaact

SEQ ID NO: 55328 - DNA, 300 bp, Glycine max
ggatgaatgtgtcaaatgatcatgaaaaacaagttacaactcacctttaaacaaagcttcaacattcagactctcaaactcataaacactgcatcccgataaaaatattataataaagaatatgaactttctttaaaataaaacaaatttcacctagtctaagagagaagaaaacattaaagaaaaaaatgaataagaaaaaagaacaatataacttcaagtaaacccctgcaatatcaacaacacatcaaaacaaaaccttcccttaagcaaaaaaaaacctggcctttccttcctttc

SEQ ID NO: 55329 - DNA, 303 bp, Glycine max
aaaaaaaggaaaagttactatcttaacatatacagataataaaaatcttcaaaagcactgcccgtcttttacttacaacgtagatgtgctcgatatgaattgaagctaaaaagataaaaaaaaaaaaaaaaaacaaaacaaaacaaggaaatgtttctaatactcatatttagttattagtattactaccagtgtggtgtcccctcccaaatgaaaattcagataaagcaatgttgatttcaagttgagttcgaataggattgagtccactaggaggcaattccgctgttggagctgggcgct

SEQ ID NO: 55330 - DNA, 345 bp, Glycine max
tttgagagcaaaatgatgatattgtatatggtggttcctaccaacttttgtaattttatgagacaaaagaatgttagggtccgggtatctgtctatcgtacaaggaagagcacaaaattcccactgtacatgcgccagggtttgctgcagctgatactttgaacactgcatgaaggttacaagcaacacaaatccaactacagagatctttcatgcaatgaaattaacaggcagaaagttacactttcctacttaaaccaaaaaatttctcacacatccaatggaacacaaactcaatcaagcttcggggaagacacagtgaaaactcatgaattaactggaatg

SEQ ID NO: 55331 - DNA, 393 bp, Glycine max
tttagcgtgcaaaaaatggaacttcatagaatatgcattcatgatgcaatccaaaaaataatctagacatacatcctaaataaaaacgcaatatatactacacctacaacctatccatttacgtttaattttacatttcagaacaaagaaaattttataacaaagcgatggagcacgtaggtcataaaaaaagaattacagggcaaaaggcatctcatagaggataacttaaaaatagagaaagtcatcatacctacaattgttgcaggtggaagcgcatattgaagcataagaacaaattgatataacgaatacgattcaatgaatccccaataatatgctgctttaacaatcaaaattaccaagataggtgaaattatgaaccgcactacc

SEQ ID NO: 55332 - DNA, 288 bp, Glycine max
tttttttttttttttttttttttttttttttttttttttttttttttttttttttttttttttttttttttttttttttttttttttttttttttttttttttttttttttttttttttttttttttttttttaaaaaaaggggagggaaatttataggaatttagaaaaaaaaaataaaaagttataaagggtaaaaataaaaagggtaaaaaagtgggaaaagaaaaatttttttaaaaaagtggaaatttaaaaaaaaaatttttataaaaaaaaaagaagctag

SEQ ID NO: 55333 - DNA, 59 bp, Glycine max
aacccagaaaaaagacccataacatttaaaaccccaaaaaagtaaagactctgaaacag

SEQ ID NO: 55334 - DNA, 371 bp, Glycine max
  unsure (1)..(371): unsure at all n locations
atccggtccaaggaaaaaaacaaattataggaaagggttttagattctggtttagctcaaattctaggtattatgtcaagcttatctgtgcaacaagactagtaaaggttagtttggtaggtgaagtctccaagggaaaataaagaggggaaattgttagattgggttttttcttatgacttaattaacataaaatgcaaggttaatcgttctgggtttacgaaagttgcctgcttcattgattacagacctgaagagttttcanacanaggacgagggaaaaaacaacctccatggcgggtgttttctttgaaggaattacactccgctacaaataatttcaactatgataacaagctcggcgaaagggg

SEQ ID NO: 55335 - DNA, 273 bp, Glycine max
tccaaaaaaaaaaaattttttttttttttaaaaaaagaggaaataaaccaaaaaagggttaccttagtatggctgtttggtgtttattgggtacccttgccttcataggaagtgagaaactaggctagttagtcccaattggaatttttttttttgtggctgaagaaggtgaaaagggggcaagtttcactcttcaaggagtttgaagggtgtcaacttgtgttttgagactctgaggttgaagctgcattttttttaagggtggggatgggt

SEQ ID NO: 55336 - DNA, 425 bp, Glycine max
ctcgagccgagaatacatatctttcagctcttgttggtcatcaaaatttatgcagctttcagttcttggttttttttcatggtctaatgtatgttttactgtgccagtgtgtctatataagtgaatctgttcttgtgctggctttctactttctagtgtatatattggttagtgttccatacagcagtttgctaaccatagtgacggttagatgtggacattgtgccaatttgctatcagttaacatgggagcgtcacttcaagcatttcgccctcaagaacctcagtcacagaaacagcttctaagctttgaagaaccaagcagctgcaaggaactgggatcatcatcttcagaatgtaacaaaatagcgccattttacgatggagtagagcatgaacaacctaagattcctcccaatcgtcct

SEQ ID NO: 55337 - DNA, 118 bp, Glycine max
gctgtctttgatgagttaaatatgttccaaggcttaatattaatatcattgttatgtgtggtaattgttaaagccagtgggaagaaacatgtacatattgaatagaacagaattgaat

SEQ ID NO: 55338 - DNA, 376 bp, Glycine max
tagcattcaggaatcactccagacaaagctgccaatgctgccgaattaaacaatgatgttcctaaacaggaccccttgcatgagttgattaagacccttgttgagatttacgacaagcctgtggagtttgtgtgggatcttactaaatttgggattccaaatgtaaattcattgttgttcttaacgtatactaatgtcagtgaaataacatcaggtgaaaaatgcttgaacatagccatacttcaattttggaccatgtatatgaatgagtggagtaatggcttgggtcatcgatcggtgtatggattccttggaccctcatcctttacacattgcaaaggataaacttggccattgtgaagaatatattgaaaat

SEQ ID NO: 55339 - DNA, 192 bp, Glycine max
caacataaaaccaaaatttaaagcctctcccccaaattccatcaccataaacgtagatttcctctccccattttcacgtgattcccaatctcacacgggtctcagaccttcaaccgattcaacgcaacagagtgataaactgtggatccggtaagatgagccacagtatcttccaacagactgtgctttgtc

SEQ ID NO: 55340 - DNA, 301 bp, Glycine max
  unsure (1)..(301): unsure at all n locations
cgagataactagaaacagtgtgatgaaaatgaaggtccttgttttcttcgttgctacaattttggtagcatggcaatgccatgcgtacgatatgttccctctccgaatgaacactggctatggtgcccgtactccggaggtgaaatgcgcaagttggaggcttgctgtggaagcacacaacatctttggctttgagaccattcctgaagagtgcgttgaagcaacaaaggaatacatccatggcgaacaatatagatcagactccanaacagttaaccaacaagcttacttttatgccaga

SEQ ID NO: 55341 - DNA, 335 bp, Glycine max
atttaagagatgagtcatcattccatatccacctaccataaatacagtagtagtgtcaccataccagcgcgaaatagtatagatcaaatgactggtgaacatggtacagcttgcttacacgatcattcaacatgcgttaaacttacatagacgtgagtggttcccacagatataagcactctgatggactgattttggatatgtcaacagatgaacttatcgccaactaaggcgtctacctcgaagcgtgcctctgaacgtgccatgtgacatctcatgtggctttaacgttaaatgtcatgtgcgtgacaacattgctatcccctgacctacgt

SEQ ID NO: 55342 - DNA, 441 bp, Glycine max
cgctctgtttctgtctctgtgtttgcggctgaggattccgaacgagcgaccttcttcgtttctcgcaaagtttaagtcatcatgggtaaggaaaagactcacatcaacattgtcgtcattggacatgtcgactctgggaagtcaactaccactggtcatttgatctacaagcttggaggtattgacaagcgtgtgattgagaggttcgagaaggaggctgctgagatgaacaagaggtcattcaagtatgcctgggtgcttgacaagctcaaggctgagcgcgaaagaggaattaccattgatattgctttgtggaagtttgaaaccaccaagtactactgcacagtcatcgatgcccccggacatcgtgactttatcaagaacatgattactggtacctcccaggctgattgtgctgtccttatcattgactccaccact

SEQ ID NO: 55343 - DNA, 110 bp, Glycine max
ctccaatttcaacggctttcaatcccagggacctcttcttctttcattaacaatcctttccattccacaccaaggttccaccttttctggactattatggggttcgagtc

SEQ ID NO: 55344 - DNA, 341 bp, Glycine max
  unsure (1)..(341): unsure at all n locations
cacaaaatccccttcaaaagcaaaaacaaaaagcttcttcactcgaattgcaggaaatggcaacaatgtccgcatcttcaatgaaccttaacatgattgactctaacttcgaagtcgacaagctcacctacgaaatcttttccattttggagaacaatttccttttcggctacggccacaccgaaaatcgcaccaatttggttaattttccgctgaaagacgcgaaaccggtgaaacacgccgccggcaaggtccgcatcctctgcattgacggcgccggcgccaccgacggcatcctcgccgcgaagtcnctcgcgcacctcgaggcttgcctcggccgc

SEQ ID NO: 55345 - DNA, 289 bp, Glycine max
atctaaccaagcacacgcaatgccagtggcattgcatattgccagaatgcttcttgtggtacatcccacacacaatttgacatatctgtgagggatttttcatcagcatagacactagtactttgttcttcctcttcgccacactcacagtccctccagaagcctcctacgaatcgacgaacggtagatgcaatgttgccgttgcttagcaatgtctacgctcaattttcgcaatttcatcaacctctccgatattaagatacgcatcttcatcaggcttcgcgcaagt

SEQ ID NO: 55346 - DNA, 325 bp, Glycine max
  unsure (1)..(325): unsure at all n locations
tcggttctcgttcttcccttgcggctagggttttaccgcagcttcttctaaatttaaggaagatgggtaaggaaaaggttcacatcagtattgtggtcattggccatgtcgactctgggaaatccactaccactggtcacctgatttacaagcttggaggcattgacaagcgtgttattgagaggtttgagaaggaagctgctgagatgaacaagaggtctttcaagtatgcctgggtgctggacaaacttaaggctgancgtgaaagaggaatcaccattgatattgctttgtggaagtttgaaacaacaaagttatattgcac

SEQ ID NO: 55347 - DNA, 335 bp, Glycine max
gttcgaagtctcaacagcgatggcccttgcagcgtcaaaatccggcacgccacccattgccaagaggagatccatatctctccagctaaccaaggatctgtcaacatcgcaggcatggatagaaggaatttcatggcatgcggctgagactagtacaacgcagataggtgtcaagcccgccacgatgctgatcatattcacggatcagtatggttacaataacgcaggttcttcagaaatggaatgtagtatctgtgaaacgcaaacgcaagtgggaccatgacagtggaaacacaaacgtagagaacatgcacccaggggttgttgtaggagca

SEQ ID NO: 55348 - DNA, 321 bp, Glycine max
gcgcaagttggaggcttgctgtggaagcacacaacatctttggctttgagaccattcctgaagagtgcgttgaagcaacagaggaatacatggatggggaacaatatagatcagactccaaaacagttaaccaacaagcttacttttatgccagagacctcgaagtccatcccaaggacacatttgtgttcagtatagatggcaccgtactctctaatattccatactacaaaaaacatggatatggggtggagaaatttaactcgaccttgtatgatgaatgggttaacaagggcaatgcaccggcactgcccgagactc

SEQ ID NO: 55349 - DNA, 249 bp, Glycine max
ctcataactcctgagtgtcgcctgtgattacgatttctgcacaaacaaattactaagtatatccaagtcattcaagtcagattctattaggggaacgctgacacggggtttacaaattctgcagaggatcgtcggcaatgcattgcaatctccaggtaccaatctaaatatggtgatcttagtgatcatgatgctttgccaagtgcgcgatcagggcacaatcgaaatgtgaccaggttgtagattcac

SEQ ID NO: 55350 - DNA, 87 bp, Glycine max
gttcgaagaaacgagaacggaagtcatcaattcttaccactaagttgacttcagttctcgctactccgacctacacattgcactacc

SEQ ID NO: 55351 - DNA, 241 bp, Glycine max
actgatatggccaaatgaaattgcaaaagaaggtggtgttatcagtgcaatactaaccagggtgctttctgctccttccattcctcattctggatcggggtctgctgcctctgttttgggcattattctaggttttagttctgaatactacttggaagttcctgttgctgttttggttacgctgcttctatctggcttagatagcactgttgttgcttcattaactgctcttcctgtgttg

SEQ ID NO: 55352 - DNA, 59 bp, Glycine max
aacatggatcaagttcaaagttaatataaagattttatacgcccgtttaagacaatgtt

SEQ ID NO: 55353 - DNA, 305 bp, Glycine max
ggaatcatctcaccagattaagatatctcttacctcctgccttagaactcacatcttgtgacagacagcatctcgaaacctctccagtaagagagtcggttgagttctctgctcaatccgaagatcaagggagacctaaggcagttgacatcactggacacgtcgggcacagcgtccacggaatcatactaagatgggtacagcggaactctctaatgcagaggacaacgacgctctcatggtggctacagtcgacacagtcgctaccgcggctgtagttcgcaccgatggatctctcgtcatcg

SEQ ID NO: 55354 - DNA, 425 bp, Glycine max
gcaagccttcgttaactccgaattccgctccaagtgagaaagaacctcactctctcatttgtttcggtttggtcgtgcccactgtcctgtttgtttcggtttctgttttcctttgaaagcagaggaatcaggtcaaatcaatccttcaccgttcgttcattcgttcaattcagttgaattcctttccttcggtttttcttttttttttcccctcaaaaataaaaaatcggaactttgctttaaacgtggaaccccaccctgagatttcgcccccagaatcttgatccctttatccagaagggtccttgttggtttttttcacattggggttcttgttgttgtggttcattgctcgtggaaaagaaatggcgacgagtatagggataatggatagcgcttactttgtcagcagaaacgagattctc

SEQ ID NO: 55355 - DNA, 400 bp, Glycine max
attggatggtccaaaccatgatcttcctcgtgtcaatcttttgtctatgaaagtaaaagcatagctaaaatgttgagtacattaaaaaaaatatatagtcaactaaattaactaatattgagtttaaaactatctggaccttattttgaatacggcagatagagtagggcggttctttttttatgatttaaagtttgtttcaaactaagatggttacgtgaaactataaaatttatgaatgctttttcattaaaaacaaaatttaaattttgcaaattgatttctctattgctcatttcccgctattacgttgcgacgattgacgattctctatttttatttattcacttatttatttattattatggcaaacagccttggatttttatattgagcttac

SEQ ID NO: 55356 - DNA, 393 bp, Glycine max
gtcttccatagccccccaaaaatgaagagcaccatcttctttgctctctttctcttttgtgccttcaccacctcatacctaccttcagccatcgctgatttcgtgctcgataatgaaggtaaccctcttgaaaatggtggcacatattatatcttgtcagacataacagcatttggtggaataagagcagccccaacgggaaatgaaagatgccctctcactgtggtgcaatctcgcaatgagctcgacaaagggattggaacaatcatctcgtccccatatcgaatccgttttatcgccgaaggccatcctttgagccttaagttcgattcatttgcagttataatgctgtgtgttggaatccctacgagtggtctgttgtggaggatctac

SEQ ID NO: 55357 - DNA, 418 bp, Glycine max
  unsure (1)..(418): unsure at all n locations
gtgattgttgtgactcgttcttcttcgtcgttatcttcttcttttgttgtttgtgtgtttgttttttctctcacctgaaaatgtcttgctgcggtggtaactgtggttgcggaagcgcctgcaagtgcggcaacggctgcggaggctgcaagatgtacccagacttgagctacaccgagtcaaccaccaccgagaccttggtcatgggagtggcaccagttaaggctcaattcgagagtgctgaaatgggtgttcccgctgagaacgatggctgcaaatgtggagctaactgcacctgcaacccctgcacttgcaagtgaggtgttggagagctaaagcttcaagcagaaatggcccttagaaataatgataaaaactatatgtagtttcaaaacttcanaattatgtagtatgtatt

SEQ ID NO: 55358 - DNA, 373 bp, Glycine max
gtgattgttgtgactcgttcttcttcgtcgttatcttcttcttttgttgtttgtgtgtttgttttttctctcacctgaaaatgtcttgctgcggtggtaactgtggttgcggaagcgcctgcaagtgcggcaacggctgcggaggctgcaagatgtacccagacttgagctacaccgagtcaaccaccaccgagaccttggtcatgggagtggcaccagttaaggctcaattcgagagtgctgaaatgggtgttcccgctgagaacgatggctgcaaatgtggagctaactgcacctgcaacccctgcacttgcaagtgaggtgttggagagctaaagcttcagcaaaattggccctaaaaaataatgataaa

SEQ ID NO: 55359 - DNA, 403 bp, Glycine max
gtgattgttgtgactcgttcttcttcgtcgttatcttcttcttttgttgtttgtgtgtttgttttttctctcacctgaaaatgtcttgctgcggtggtaactgtggttgcggaagcgcctgcaagtgcggcaacggctgcggaggctgcaagatgtacccagacttgagctacaccgagtcaaccaccaccgagaccttggtcatgggagtggcaccagttaaggctcaattcgagagtgctgaaatgggtgttcccgctgagaacgatggctgcaaatgtggagctaactgcacctgcaacccctgcacttgcaagtgaggtgttggagagctaaagcttcaagcagaaatggcccttagaaataatgataaaaactatatgttagttcaaaacttcaaaat

SEQ ID NO: 55360 - DNA, 373 bp, Glycine max
tcggggaattccaattccacattttcaagaaataaggaggcaaaaatgttcatatatgaattggaattatttgttttcttattaggcctatcctgaagccagaggaaatgagatcggaattcctcggggaattccaattccacattttcaagaaataaggaggcaaaaatgttcatatatgaattggaattatttgttttcttattaggcctatcctgaagccaaaggaaatgagatcggaattcctcggggaattccaattccacattttcaagaaataaggaggcaaaaatgttcatatatgaattggaattatttgttttcttattaggcctatcctgaagccaaaggaaatgagatcggaattcctcgg

SEQ ID NO: 55361 - DNA, 201 bp, Glycine max
gcatgataaataagagaactgatgtcacattcaagagagtggggggtgcatgcatattatacctagggagaaactccattttgcattcaatttgcaacacttgtaaaagtattacaagagaagtaaaattgttcccaccattaaaagaatttctacaaccaactaaggagtactaaattttaagaatatgtcagaaatttg

SEQ ID NO: 55362 - DNA, 405 bp, Glycine max
gattgtttgttgttgtaactcgttcttcttcttttgttgttctgtgtttgtgtttgttttttctctcacctgaaaatgtcttgctgcggtggtaactgtggttgcggaagctcctgcaagtgcggcaacggctgcggaggctgcaagatgtacccagacttgagctacactgagtcaaccaccaccgagaccttggtcatgggagtggcacctgttaaggctcaatttgagggtgctgaaatgggtgtgcccgctgagaacgatggctgcaaatgtggaccaaactgctcctgcaacccctgcacttgcaagtgaggtgttgggagagcaagcttcaagcagagatagcccttaattaggaataatgataaactattaatgtgtagctaaaaacttatgtattat

SEQ ID NO: 55363 - DNA, 377 bp, Glycine max
gtgactcgttcttcttcgtcgttatcttcttcttttgttgtttgtgtgtttgttttttctctcacctgaaaatgtcttgctgcggtggtaactgtggttgcggaagcgcctgcaagtgcggcaacggctgcggaggctgcaagatgtacccagacttgagctacaccgagtcaaccaccaccgagaccttggtcatgggagtggcaccagttaaggctcaattcgagagtgctgaaatgggtgttcccgctgagaacgatggctgcaaatgtggagctaactgcacctgcaacccctgcacttgcaagtgaggtgttggagagctaaagcttcaagcagaaatggcccttagaaataatgataaaaactatatgtag

SEQ ID NO: 55364 - DNA, 371 bp, Glycine max
  unsure (1)..(371): unsure at all n locations
gcccagtgtcatgtgctactgcctgatgctagctctttacgccaagaatgacaggttaaatgatgcctataatttgattgatgagatgatcacgatgagggtgtcggatattcatcaaggaattggacaaatgatcaagggagattttgatgatgagtctaattggcagattgtggagtatgtctttgacaaactcaattctgaagggtgtggattgggaatgaggttctacaatgcactgttagaagctctttggtggatgttccagagagaaagggctgctanagtgctcaatgaagcatcaaagcgagggctgttccctgaactttttcgtaaaagtaaacttgtgtggtctgtggatgtacacaaga

SEQ ID NO: 55365 - DNA, 268 bp, Glycine max
  unsure (1)..(268): unsure at all n locations
cagtgaagcagccgtcccagttataacccttataatgggagcaaacctccttaaaggcaataattaattcttatatagccatgctttttttttaaaaaaaattttatactcctctttggcagcttatgaataatttttctttcttggattaatggaccacaggtttgaagggagcaaatacttcgttttggacaattcttggaattatagtagttcgatatattttcctgccaattttgggtattctagttattanagggagcaacac

SEQ ID NO: 55366 - DNA, 345 bp, Glycine max
ggacgtggctttcgtggtcgtggaaggggagggtacaatgggccccatgttgacatgcaagatggaggatacaaccaagatgtacctcaaggccgtggtacttgatccttattacttttgttcatttctgtggtagatacatgtgtgcaaggctatcagtgttaggcaatcagcttttgcagttgatattctgggaagtgtttgaactgtttgttttaagtaatggatgttacctcttgatattttggaagtaattaagctggttgtgggtccttactgtctagactctggagcaatttcatatattaccttaactttgtcatctatattaatcatagtacattt

SEQ ID NO: 55367 - DNA, 379 bp, Glycine max
tttttttttttttttttttttttttttttttttttttttttttttttttttttttttttttttttttttttttaaggcaaaagagaaaaaaaaaacaaaaacatccccctaataatgcaaacaattaaacaaggggcaaatttgcattaaaaaacctaaaccaaaatttaacacaggatttaccacccccaagtcattgaaaaattcggggaaaaaaatgaaaacaaaaattaccaaccggcccctttaaaatgtaaatgggcttgtcaaaattggccaatccggtttctttaaaagccccccccattgttggatttgcaaggaaaaaacgtgcaatgtccccactaaatccaacaaactgtacagcaaatgccgcttc

SEQ ID NO: 55368 - DNA, 356 bp, Glycine max
tgggccaacattcaaaaaaatcataaatttcaaccatgagatgaataaatacaatacactggggaaatttattgtcaggggtttgagcaaccgttaaatacacttcaacactagccattccagtcaacattctatgtatgtgaaggatttggttgccgggtgatatgaatttattgaaacacagaagacaggcttgcagcatcactaagctaagctatgtagttattgcattaatatgaagtctgaagggtaatttttaggtacgatataagagagaaagatgagtttaaattacatgatctcattaactcaataaatttcattttacaatgtactcaaggaataacatatcaaag

SEQ ID NO: 55369 - DNA, 234 bp, Glycine max
cggcatcaaacaatatttatttattaaaaaatgacaggatggaacaaactcagtacaaatcccgtaactaatttgcataaattatagtagtactttaatttctccgtttctaaatatctatatcaaagggagagagggctatgtcaaatccccctgctataaaagcattggacgaacctgctaaatagttggaccccccccccacttgccaaagattcggaagttcatataatt

SEQ ID NO: 55370 - DNA, 322 bp, Glycine max
ggaaagatgaaagaaaatcaaccaaatctagataggtccaagttgaacaaaagtattgctactaggtgcagggttttacaaccatgtgatgagttatatactttaataatatacaattattactcacaaacgtagaccgtgcatctactccatttacaagcaaaactgagggaagggcacacctagaactcaatcgttagttttctttgatttgagctgtaacccaagtagaacaagtcccaccgaggtaaatgcaaacaagaaccttgaggaatagaatatagcaagcaatgctccctttaaagacttagcaagcagcaaa

SEQ ID NO: 55371 - DNA, 375 bp, Glycine max
gacagaaaaacattttgaattagaatgaaccagaatacaataatgtgatgtgcacaacaggggccagtcatgtgtacaattagaaaacaagtaatggtagatccttcagcctatattgttgggggagggaaatgtagtctacgatattaacaatgagactccaatgtccgctacttgcttggcgcggttgtacaatttgactgctgatcttgatcttcttccatttcaattgatctgaactccaagaaaagggcattttaattccaactgtcaaataagccgtgcctttttaaggtcagaaacaactccacgatcttcagtacccctatcattgtatataaccttatctatgatgccatactcaacagcttcact

SEQ ID NO: 55372 - DNA, 202 bp, Glycine max
gaaaggaagcatatgaaatacataaaacattaaagtaaaactttacatgttaccacggcgtatatcaaattccatcaggggaactgggttcctgaacataataaattcaatacacaaacaaaccaaaattacaaattaaacaattaatattcaaaatccaagataaattgtccaaatgttccaagaactcaaacacatcaca

SEQ ID NO: 55373 - DNA, 367 bp, Glycine max
atccagaatcaggaaatcaaatacacaggtgaaaaatattggtgacgacagacaactgttcagatacggtgataatatatatatataccaaaattttggcgatctgaaagccagcgcccacttgggaatatttcgtggaagtgtaacaaataagccccaatcttaatttcaaaaagaccaaaacaaggcatgggaaagtgatgaatgtaaattctatactttctaatctgatctaaattgcactcgttaaaaactctgttcttgtactatcggttctagaatcaacatcattagctttaccactttgcacatcaaatttggatgttataactcctgcaatactcagtggggtattacttaaagatac

SEQ ID NO: 55374 - DNA, 337 bp, Glycine max
taatgtttgagtaaccacatatattctatttcatccatttgaggaagtttgtataaaactacagatagtgtaggcagtgtcctacggctggctgaaaagagatacttataaggcaaaatttaaaaataaataaataataaccatagatagcaatgaatacaaaattaagccacaagccacatgaagtaagttgtccaaaaagtgactgcaactgaggccaaagcatatgtccatagcatgataacagaacattcaccttcaccagctccaaacaattgcgcgattgtgcctgcagaaagcgaatgtttgaatatatagttatatcaaaataagttta

SEQ ID NO: 55375 - DNA, 262 bp, Glycine max
ggaagacaaaggggttgcagtcagaaagactaagaaaagcaaagcgaagccgaaacaacctcaagaagttgccggagcctagatacccatttttgacattttccccttttctgatttgtaaaactaattcttttgctaatttatgtacacaaatatttagatacatgcatatgcaagaaggtatgtatgagcacgaggcatatgtgcgtatataaattttgaatggaaaaattgtatttcttattttggaaaaaaaaaatta

SEQ ID NO: 55376 - DNA, 302 bp, Glycine max
taaaagaacaaataacaatcaagaaaaactcaagttatctataaccaataaatgcgacaaataaaaaggctttacaaaatataacataccacaagcgtggggaaagtaacaactccaattcaatccataaatagaataaacatcaaacgcaggggccctccccatctcataaccccattccccggacaattatttccccccgtttttcctggccttcaaaaatttccccaggatttccctctttaagaccttggaattcaaccagctaaaatctttccccgggaaaaaattttttcccccca

SEQ ID NO: 55377 - DNA, 349 bp, Glycine max
gctagtttatcgtgaggagaatatgaagttgtttgttttctttgttgctgcagtagttttggtagcatggccatgccatggcgcaggctaccaaaggttccctctccgaatgaaaactggctatggtgagcgttcttcggaggtaaaatgcgcaagttttaggcttgctgtggaagcacacaacatccgagcctttaaaaccattcctgaagagtgcgttgaaccaacaaaggactacattaatggcgaacaatttagatcagactctaaaacagttaaccaacaagctttcttttatgctagtgaacgcgaagtccatcacaacgacatatttatattcggcatagat

SEQ ID NO: 55378 - DNA, 297 bp, Glycine max
cagaaataagtttcgactactagctcacattaaggatcatatcctaatgagttcagttgtatattcttgatgtgtggtctccaaaaatatggtgtgagaatacagttcatcacgttgagggcctttttctctagtgttagttttatttgtcagggaagtgatatcaattatacatccaaggagacacatcagaagtttccagaataactaccaaatagttacaagttgacttacacatgtccttccttggcatgtaaactgctaacgtgtgtcagtgtgatgatgcgtgtgatcatt

SEQ ID NO: 55379 - DNA, 306 bp, Glycine max
cacacttccttccttccttccttcggattctaaactcaactccaacacactcaaatccagacaccaaacagaaccaaattctctgttctcttctttctcaagatttcaatgctcaattaatccctcaaatctttcttccttttttctctttcgaacgcccactcctttctctcttaattattattattattatcattctttctttcatttttcattccaaacaaacaatttgtttttttttttcaattcgatttgcttcagcgtcgaggagccatagtcgatttgtgtcacttctgtctgatcttc

SEQ ID NO: 55380 - DNA, 260 bp, Glycine max
ccgacatattgaagagaattacagttccaaaactcggcagcacctcaagaggctctgataattcctttcgggtgtactgacaaggaaaatacattaccttctggcaattttgtttacattaccttcctgtggatggtttggagtgttaaaatttcatttataatattgttactccatacggaaatgcttataatgtgaataatgcctatttatattttactattaagctgtgataagctcatttattgaaaaaaatcaat

SEQ ID NO: 55381 - DNA, 320 bp, Glycine max
agttagtgggcttgacagaagctggcgaaaacccccgggtgtggctgctaaactcatagattgtaaatcatctgatgggatttattacatcgagtattcgctgcaaaatcccggtgagagtcgcaggtatttatattcagctatcgggatggcatcaaatggttggtataacagactgtatacggtgacaggacagtatgtggaaggggaaacagacaagtatgcttcaaaagttcagaaggtagttgcatcatttaggttcatatgatgaacatggtcatgacgaggaagaaattttctcacagccctttctcatcctt

SEQ ID NO: 55382 - DNA, 393 bp, Glycine max
gtgactcgttcttcttcgtcgttatcttcttcttttgttgtttgtgtgtttgttttttctctcacctgaaaatgtcttgctgcggtggtaactgtggttgcggaagcgcctgcaagtgcggcaacggctgcggaggctgcaagatgtacccagacttgagctacaccgagtcaaccaccaccgagaccttggtcatgggagtggcaccagttaaggctcaattcgagagtgctgaaatgggtgttcccgctgagaacgatggctgcaaatgtggagctaactgcacctgcaacccctgcacttgcaagtgaggtgttggagagctaaagcttcaagcagaaatggcccttagaaataatgataaaaactatatgtagtttcaaaacttcaaaa

SEQ ID NO: 55383 - DNA, 239 bp, Glycine max
ggtggcccctttctctgtctcttctccctctgctcctgagtttaagactacgcagctttcatacacttcaatccctttttatgtgggcagctttcgcggcttcagagtgccacgacttcgttatccaagacgaagtcgcgtttctcttttcgggtttcggaatcaatcagtgtcgtgtttttagatactaggagctgcgttagcgacccttctcatagacttggtgatggtgtagcaag

SEQ ID NO: 55384 - DNA, 65 bp, Glycine max
ttgtggaaattttaaccgatcctccgacaacaatagatatcaataaaagagcaatacaatacaac

SEQ ID NO: 55385 - DNA, 173 bp, Glycine max
cctacacaaactgtgtttgggtacagtttggaacaggaggaattttgacattcccaaaacctcatttccaacaacgttacttaagcaaccagctcacaaaatattaccacaaaaactacgcagcaattgatgacacaagcaattcaccaccctattacctcaacacaatcaat

SEQ ID NO: 55386 - DNA, 257 bp, Glycine max
ctcatgtctgctataagtttatattgggagtcggaagaaggaaataatttattgtttgtaatcctggacataaagctcgtaattaatcatcaatttcaatatattaaccctaaaaaaaaaaaaatcagaaatccaaaaaaatggcagaaaataaattaaaagggaaaaaacaaaaggggaaaacaaagaaatgggtgcaaaaataaaatgaaaaacagaaaaaaaaaaagaaattaaaaaggggggcgccccaaaaa

SEQ ID NO: 55387 - DNA, 278 bp, Glycine max
gtcctgcttcatcgatcttagctactgctgttgatgtttgtcagtatgttttttctctcacgtaagaaagttctgctgccgtgataatcgtaggtgctgcaccgccagaaacatgctgaatcaggtgcaggagcagcatgactgttcaaatacatattctacactgtggtcaaacaatagcgtcaacttgggcaaggtagtgacatcagttaacgctcaattcgacagtgctcaaattggtgttcacactgagaaagatggctgcaagtatagaacta

SEQ ID NO: 55388 - DNA, 180 bp, Glycine max
atccattagaatttgcaaacagtgaatattgggaggtttttttttccaaaacaatgtgttacattgaagttttatttgcccgttttacgcaaattcccggattctctacatttgcaagcagttacttttattggcattaactacggaaggaagcaatgttatgttccaaaaaaaaaaaca

SEQ ID NO: 55389 - DNA, 152 bp, Glycine max
ccgccacttctgaatctattgaatcaacaatcatgtcggacgaagagcaccatttcgagtccaaggccgacgccggagcctccaaaacctaccctcagcaagccggtaccatccgcaagaacggctacatcgtcatcaaaagccgcccctgc

SEQ ID NO: 55390 - DNA, 251 bp, Glycine max
aaaaaaataaagggaaaaaagaaaaaaaagggaaaaaaaaaaaaaaaatggaaaaaagaaagggaaaaggaaaaagtgggaaaggggaaaaaaaagaaaaaaaaacccaaaaaaaaaaagggaaagaaaaaattaaaaaacccgggcaaaaaaaaccaatccacccaaatttaaaaggcaagggcccttttgaacccaggggggaaaaaatgggggaaaactttaaaggccagggaaaaatttgaaaaggg

SEQ ID NO: 55391 - DNA, 258 bp, Glycine max
ggaaaaaattgcaccacgcaaaaacattccaaaaattttgacagtggaaattgtacccaacccttttggcgtggcatgcatgcaacaaaatcaaacataaccacccccaagaaatgttttttttcccttcaaaattgtcaaaacccctaaaggcagggcaaattccgtggcaacacaaagtttggaaaatttcaacttgcaatttttcaaacggggaaattaaatttggtgggaccaaattaaccccccctccaaatt

SEQ ID NO: 55392 - DNA, 263 bp, Glycine max
gggccccggaaaaagggggaaaaaattaaaaaggaaaaaaaaagggggggccccttccccggtttttaggggcgaaaaagggggttaaaaatcccccagccaaaaccgaaagggggggaaaaaaatccaatcggggcagggggggaaaaacggatttagttcaagaccgaaacaccaaaagatggcaaaaagggggaaacccaaaaattgcccttgggggaacacccaaatttcaggggaccacgtccggaaacgggggaaaa

SEQ ID NO: 55393 - DNA, 365 bp, Glycine max
  unsure (1)..(365): unsure at all n locations
gaaaaatctgaaatccaatctattcatgagtctcatgatatgaccactgaccagtcaaagtgtcactatatgcggtagcccaataaattaaaaactgtataactttgaaggacaatacgtgcagaatgattacaagttacaatcttgcctcaattggatgaataacagccaattttccttctttcgtattatatccacacatgacacaactatttttcaacataggaaaaccaaaaccaataaacaagccaggaataaaattacaacaacgctgacaaaagaatgatagcatcaactaacaatgacaaactcaggaaaaataaaccaaaanagaacaaataataacaaagggtagagagaacacg

SEQ ID NO: 55394 - DNA, 248 bp, Glycine max
ccaaaccaaagtgacattaaataaaaaagcggggcggtcaaaaaaaggggaaaaaaaccacacatgtagttacaaaaagatttaaaccccaaacaaatttatggaaaaaaaattgggcgtgaaaatacgattcacccaacacattagttgaaagcaacaaaaacttggaaagtgttcccgaaagggggagcccctaaattaatttattgaaagcaaaaacaagggggggcaaacttcccaaccccaaa

SEQ ID NO: 55395 - DNA, 135 bp, Glycine max
ggggaaaaaaatttttttggggcccaccaaaagaaaagaaggggtccggaaaaaacccacacgggtcccaaaaaaagggggggaaatcccaagggagctgcagaaaagaaaaggcgggagtgattaagggggagg

SEQ ID NO: 55396 - DNA, 387 bp, Glycine max
tttacacttaaaatttctcttatctttctaaaaatatattttacatcaaattcaagttctttcctcacaaacttgacatacacccctttgcttttggaacatagccccaaacaatagggaaacgctgcaaacaatagaaaatccttcctcactccgtcactcggcataacagtgcttgatgcaactattctgcattttagtcataacattgacgagatttggtacgcaatacgacacgtgttatcttcggcgatattaatgcgacttcccaaaacctccattttaagatataaactccaaaattaagaattgaagcatgtgaactgcaaagcgaactccacgcaagaaaaagacacctatgctgcaacaaagcaatcaaaccacctg

SEQ ID NO: 55397 - DNA, 247 bp, Glycine max
aaaacaaaaaaattcaaaagccccccaaaataaacccaaaaaatgggaaaggggaagaaaaaaggatttttcaaccaacaaaaaagaaagtttaaattaccaaaaaaacggaccaacaaaggaccctgaaaaatcagcttaaaccaaaccggaacctaaaaaaaggggcaaaaagccatgaaaaaaacttagggaggggattcccacgcaaaaaaaactaggccccaaaaaaaaagggggtgagggg

SEQ ID NO: 55398 - DNA, 357 bp, Glycine max
gaattcgaaacttaaactgttattcatgaagcaaatgactaaagtcattctcaacttccgatcatagatttgttgcatatgtacacaagctaaaagaaaatgaaatcccgaaagtgctaataagtcaccccattacatattatgttgctaacaccattaaaaacataaaagaaaaaaagttccttatagtagggtttttttttcaatgtgtttatttttttttaataataattgtaattattccaatcgatatttaatcacccttaaattttctcattcatctcccccaatatattttaaaaactcatggttgaatgcatgcttgtgagtccccccaaggagcccaattggcctcac

SEQ ID NO: 55399 - DNA, 279 bp, Glycine max
gaataacagcccggtagactgtagtattttttattgaaattataactatgaaaaaatgtaaatactagaactcaaaggtagctcctggtatttacagcatcccgccgtacatatagatctctctcgctctctctctcatttcgtgaactaaaatgttctacattgacaatggcatcaaaactcaatagaaaaagaagaaaaaagcgaacgaagtatgctcaacaacttgtgtctgatctgggtgtttcattgtattgtaaaagaaaaatctggcgctgc

SEQ ID NO: 55400 - DNA, 148 bp, Glycine max
tttctaaataaaaagtaaattttcaaaattaaatatttaatgttgaaaatttactttttatttagaaaaaaaaagtaaattttcaacattaaatatttaattttttaaaattccataatcagtgtgcaaaaacatatgcacacaaaac

SEQ ID NO: 55401 - DNA, 254 bp, Glycine max
gggggtaaattaaaaaagcgtaaaatttcaaatgcattgaacgggtacagccatgtgaacttgcaattcaggtccaaagctcaaaaatccattgagagtgaattaaaataaagtaacgaaaatcaaataattaaaaaagcaattggacatgatcaaacacttccaccgatcagattaatgaaacttagcaacaagtcatcagacaggttatatacaacaaagcaacttaggggggcatcgggatgtaaaaccca

SEQ ID NO: 55402 - DNA, 240 bp, Glycine max
ccctcgctcgttttcacttttttcaacctggaacattccttttgatactgatattaacagacacaatggtcagaaaacacggggtacattttttacttgatcatctaaaaggttacaactcaaaggcacgagaaacacaatatgacggacgaccactacacaaaaacacagagcagcggacgtggaaacttatgcacaagagacattatcacggcaaccctaaaaaactccagcacattg

SEQ ID NO: 55403 - DNA, 360 bp, Glycine max
aatgtagtcccttaaattaacaagggaaccaaattggtttattcccgttccaacttaatggttgccccccggtcaaccggcaacggtccggtaactccggccacctagtgttatttttctccagcgggttggtgcgccttgtcaagcacagtcgaacccaagtgttttggatctagattttgacccagtaatgaagagtgggttctcttttttcttctcttgtcattttcttttctttgtcagatctacttttcttcggtaggcctttgttgtcaccaatgccaccattgtactcgtctccctttagcaagtctaacctagtggtcagttgctattgcctttgccagagccgtcacaccg

SEQ ID NO: 55404 - DNA, 143 bp, Glycine max
  unsure (1)..(143): unsure at all n locations
gtgctttgttggtgccaaaataggtattattaggcaccaaatccctacaataagtgatatgatgaatttgttgagtgttgcaaccctcttttgtaaaatcagttatgcacccaacgtcttcatgattcatgtacatanggact

SEQ ID NO: 55405 - DNA, 394 bp, Glycine max
gggtttaggatgtgctgaactcgtgagctacaatcacaattttaacaacattgatgtgtacggctcagaaatttggaatacactattaaaattttgttttcctatttgtcctctcagatgatctatgttgcttgcttcacatgtggcatattcttctacataaatcaatcttagtttttcttatcatgtctccaattttgttatggtattgatagttacctttatgtttgaaaaaatagaagggatgttttggtaaaaaaattataataaaagtatttttgttaattttttagttaaaaataagggttttgggtttaagtgtatcatatttataaataggaaggattttgtgtatatcttataaatagaagggattttgtgtaagataagaatt

SEQ ID NO: 55406 - DNA, 401 bp, Glycine max
ctgcaactgcaacttcaaacttctacttcaacttcaaccactgcaagctctgaaagaagaagaaaaaaaaaatatccccatttggtttggttggtgaaagttgcaaccttttttcacgggctcaagctgaagtaactttttaacttggcagtctctttttttcagcatcgaccatcgttttgttttgcaaagatctgatctgggtcgtggatatttcaatgtgaaagttaaggttttttttgttggggtgttggtgtttttgttgcataatagtataatagaaagaaaaaaaaggtgggatttttaaaaggggtggtggatatggatcgttctgctatgactgttgggccaggaatggatatgccgattatgcatgacagtgacaagtatgagctggtccg

SEQ ID NO: 55407 - DNA, 91 bp, Glycine max
ggacaattttgccattgtgtgtgcagtctccatgttaactcccacagctgcacttactatgggagttaaggggcatactgcagagactggg

SEQ ID NO: 55408 - DNA, 361 bp, Glycine max
ctcgagccgctctttttcttctctctcaacaacttcaccttcttcctcctcgatcatgtctcacttcaagggcaagtaccatgatgagcttatcgccaatgctgcgtacattggcactcctggaaagggtattcttgctgctgatgagtcaacagggacaattggcaagcgtttggccagcatcagtgtatagaacattgaatccaacaggcgagctcttagggagctgcttttcactgctcctggtgttcttcaatatctcagtggtgtcatcctctttgaggaaaccctctaccagagcacagctgcaggcaagccctttgtgaatgtcttgaaggaagctggtgtgcttcctggcatc

SEQ ID NO: 55409 - DNA, 424 bp, Glycine max
ccaaaaaaaatgtccgggaacaaaacctgccggcccgggtttggagaattaagaacgtgcttacaataatatgggtcctgttcaacaactaacaaaactagaagaaggtaatgaataccgtacacttcctactggggaacaaagtacaaaagaaccgcgggctcctaatcccaacaagttgactcaacgtttaaaaaggagcaaaaacaaccttgaaggttgggaaggctcttttgggttttagagcacttgtgctgcctcctgtggaaatgttaaacctggctcaaattcgcctctctttgcagaaaaagtgggcgcattagtcaagcaaaatctacattagttaaacttctacagtatgaccctgaaaagtctcctgaaaatgttcgataccatggccctcctcaagtaatgctagcatact

SEQ ID NO: 55410 - DNA, 372 bp, Glycine max
  unsure (1)..(372): unsure at all n locations
cggaggaagaagaaagcggagtatcgatacaactggaattccccgaaggtcgggtgaagaagattatggcgctggacaaagacgtgaagagggtgagctcagaagcgttgtttctggtgtcgcgctccacggaattattcctccaattcctggctgaaaaatcggcgcaggttgcgattgaaaagaaacggaagaccgtgaatctggaacatataagagaggccgtgaagaggcaccagccaacccgggattttctcctcgacgagcttccgccgccatctcagcccaccaagcccgataggcccactcagcctgccggtcggcccaaattggatcctcctncccgtggtactcgccgcatcgatctaattt

SEQ ID NO: 55411 - DNA, 337 bp, Glycine max
gtcaagccggtgccaaatgcactagcaggcagtttgtatggctgtaggtgccacactgtggctagtcacacgctgttctagatgattcaatgtttcaccaggagtcacctatagtagtgttcaggtctgtcatctaataactactgtaaacaggtgatccatctaaatgctaatcaattcacatatagttatccatagttttatagacatctagatatatatttatgcaatatttctcagaatcttcaatcgaatcaatttcatgatgtgacttaagatggtttccacccgtcacacataatcagttttgtacgagattcctcaatcagtttcaaca

SEQ ID NO: 55412 - DNA, 261 bp, Glycine max
gaaactgaatagatcagatgaaagatacacttgtgacttgcacgactcatttacaatcgcgttcgagttctcttattatgcatctctctctatgctgttcttcgatccttaatacctcaggattcccactgatggtactccctcactccatccctgacttatccactacaatcatactctcctcgccacatatgattgcccaggacgttaatacctttcccattttcactaagacggagaatgatttttaccgagaaaatg

SEQ ID NO: 55413 - DNA, 253 bp, Glycine max
gtttaattttaagtgatttgggatgttatttgtttttgctttagtataaaagctgggttcgtaaatgtttaaataccatattgctcccatattgatatgggttctcaatgaatatagatacaacgattagcagcaatatatcaaatgcagagtaacagccaaggctcaggcaaaaaaaggtgatgatgaacttcttgtatttatagaattaaaaatgcttgggactgtaaatttaataaatttattctggaac

SEQ ID NO: 55414 - DNA, 359 bp, Glycine max
atttgattttttttctatattgtattgcatatgcaaaatgttaccagcagcagttaatttttgaagtttaatcattaataaaaaaaatgttaaacacctcaatttttgtttccatgtttataaccagagctacacacaagacacagttttgttctgtgcagcatattctatagttttcaacagaattgggctagtttcaaaatctagtcattagccaatgaatgtagtgccaaacctaagaaagtgacttaaatataaaacttttctataacttgaggcaaaggagtcaggaatgcatttgctctggtcctatacttgtatctatttttaagttgactcattggcctggcatgttgtgc

SEQ ID NO: 55415 - DNA, 175 bp, Glycine max
gggtcgacccacgcgtccgagcacattcaaaagctagcagaatgcaagaaataactaaaatcagagcagaactgaaggaaatagagacacaaaaaacccttcaaaaaattaatgaatccaggagctggtcttttgaaaagatcaacaaaattgaaagaccattagcaagactaat

SEQ ID NO: 55416 - DNA, 444 bp, Glycine max
gggtcgacccacgcgtccgtatacctgtgccgctgatctctagacctgccatgagtgtgaaagaggcttcgttttttagtgacactttacccaaccaattttcactcaagaatcttcatattctattgtctcacaatcagaataaattggcattttcctcactcagtctactaggtgctttaattgtgtttagaaatagccttttgattcttttggatttgttttttgccctaagagtcttgatttccgtactaaattacctgacaaaactcactctctccaacatcaattaaagggatttaaaaaatataattacacttaaaacactagaaagagtcaagtttttagcatatgttatggcttgccagtacgagaaaagtgacttaacatccaaataaagaaaaatagttagccaatccattcattatgttgatatgatcaggt

SEQ ID NO: 55417 - DNA, 344 bp, Glycine max
gaacagtaatatacccatttaatcttttgattcatgcaaaccacaactaaaagagaaaatgatcaagagcgccataggaatcacataaaccttaacaatcttcaaaatagcgaaagacttcgctcgcaacagtatcaaaatagttaaagactaagcacatgtaaaggcataagcaaaatgcctttttacatgtacaataatcctttcctactaccaatggcgcccatagtcaacggttcaaacaaaaaaacgatcctatgaagtcttataaacagcactgttatcagttatcactatccctagaactgcaacagatccttcaacaaaagaacattgagctcgaa

SEQ ID NO: 55418 - DNA, 388 bp, Glycine max
aaaaatatattttctaggtaaggaaagcataatcaatacacaacagtgacaagtgacagcattacatcaaaaaatttagggaattaatattttcccaactccagcggcacagcttgaacttcgactatagtgatattacaacaatttatagtataaatttaaacttcaaagatgtttatttgatctacatgcttgagcttaatccttatgatatgatggtgattgattgttattattgataacaatttatgccttgattaagggcttggagttgatgggctttggtccaccaaataatcaaaaccagaagaagggtttggcgggctgctccagtaaaataaaaaagcacgcctcagccgttggtttatttgtgagcttagaactgaac

SEQ ID NO: 55419 - DNA, 349 bp, Glycine max
ccagaaacaaaaaagcgaggtttgatcatttaaaaataaaaatccgttactcacagtattaattaacttccctctttctgtgttttctcacatttatattccttcaactcatgttgtacattttagatcaaaagttttgtgtatcctaacatgtaaaggtgcaaacattatctatatgagcttgtattcgatcttcagtacttttcttccaatcatggagctgcaaagtaacaccaaggaacatctccaagaatcacccagtctccttccttgtcatcatacctgagcataaagtcacaagaaacatccagcaattttgaacgcccatctgttccaacttcagtaccat

SEQ ID NO: 55420 - DNA, 184 bp, Glycine max
aattcccgcgccgatcaactaacacaatcggcggcggccgttcttttttttttttttttggacgtgaattgaaaacatctctatacaacttcaggttcaaactcgtttttttacaggaacaaatcacctcacaagaggaatgattgggaacccattatcagtttcaaactgccatttcaaggga

SEQ ID NO: 55421 - DNA, 448 bp, Glycine max
gggtcgacccacgcgtccgaagaagttaacctttttgcattaggccagtttacgttaggcaaaatgctaagaaaattaatctgtacaataccaaaggcattattatattccaaatcccaaaagtctttcttgcttcttgtagcaaggtgcattagctgactaacagtatttccaggtagaaaaatggaaaggaaaatgctgagcctgttatagagaagagcttaatagactcgtgtgcatacattagccttctgactctggattgatttgcagagtgccactgccaactccatctcagggagtccatcattaacacttccactgacccctccagccctgccaccctgccccaaattattttgcaagttttccaaattgatactttaacttaatatttccttaaagatgagaaagtttaagcagattcaagactagtagaattgatgtc

SEQ ID NO: 55422 - DNA, 404 bp, Glycine max
gcgtccgattcaattggctcgatgctgtctcagcacctcatttagggtacaatatgctgaggaactgaccaaaggtccctgaacagtgagagatagggaagagcagaaatccgttcctgtaccaagtgtctaacacttaatataggtgagagctggcgtgagattatctgtgctgtggaaaaatgaggacctatcgatacctctaagtatataatcactgccgtgtcacattttaattagctccttgaggctatagaaagaagttcgcttcttatcctccaaattaagcatcacttttacaaacaatcaatgttccattttcaaaaccccaagtagagcaatgtttgattttcattactttccagctttgaaaatgtttcatttttagcaatatgttataggaa

SEQ ID NO: 55423 - DNA, 462 bp, Glycine max
ggtcctaaattaccgggtcgacccacgcgtccgatcatttattaggagaaaacttacaagcagccagcaaacatataaaaaatgctcaacattactaattaaaaccacaaaattccaccttacactagtcagaatgactaggaataaaaattaaaaaaaaataaataaaaaataaaaaataataaaaataacagatactggtgaggctgcagagaaaagaaaatgcttatacatttctggtgggaatgtaaatttccagccaccatggaaagcagtttagagattctcaaagatcttaaaattaccatttgatccagcaatcccattactgggtatatacccaaaggaaaataaaccatgctacgaaaaagacatgtacttatatgtttatcacagcactattcacaatggcaaagacatggaatcaacctaggtggccatcgatggtggataaagaaaatg

SEQ ID NO: 55424 - DNA, 249 bp, Glycine max
gttatcttatttttgttctttgttcatattttcggtattgtctttccaacaaaaaggggaaactaacctctttacatagcttcacacaaaagggggtgaaatagaaaccaaaagttgttggataaaaaagcaaaaaaaggaaaaataatgggggggcactacaacaatatatgtccagtaaaagggcaatgtttataagacattgctagccactaaacccccaattccgggcatcccaggttcaaaagg

SEQ ID NO: 55425 - DNA, 422 bp, Glycine max
gggtcgacccacgcgtccgaaacaatgagaacacatggacacattaatgggaacatcacacaccagggactgttgtggggtgcggggatgggggaaggataccattaggagatatacctaatgctaaatgactagttaatgggtgcagcacaccaccatggcacatgtacacatatgtaacaaacctgcagattgtgcacatgtaccctaaaacttacagtataattataataccatacaatccacagtactcatagatgacacatatccatggaaacacattccatgttcatggattggtagaatcaatattgtgaaaatgaccatactgcccatagcaatctaaagattcagtgcatttactatccctatagcaatattatttttcatacaattatacaatattatcctagtattcatat

SEQ ID NO: 55426 - DNA, 382 bp, Glycine max
tttggcagagtaaatcaaagactcaatattttgaccgggtcaataaccatacatcactacaatttaatgttacatagagacagatcagtgagagtgaatgatatatggtctctagtcattgttcaaactgaaacttggaatttatcaatctgttcgtagaacaaagcatgaaagtgtatatcattagactgtttctttgattgcatttacaagtatcagaaataatgtacatataagcagcagtaaccctgtacttccaatgtcagtatgaacatactatcctttccttaattcttttgatatatgaagattgcaatgcatgaattgtttcaatactcagccacaaaatcttttgcagcctgaccactttgacaagcatccc

SEQ ID NO: 55427 - DNA, 188 bp, Glycine max
tttgttatttttttttttttttcttttatttgattgggtcattattcatacatcactacaatttaattgtttacaaagagacagggcagtgagagtgaacgataggcgggctctagccatggtacaaacagaaacatggcaatcatcgatctgttcgtagaacaaaccatgaaaatgtataggcagaa

SEQ ID NO: 55428 - DNA, 458 bp, Glycine max
ggtcctaaattaccgggtcgacccacgcgtccgatattttctgacctgtttgctgaagtgatttgcgaattgactttcctagggtgttgcctgagtcctttgaaatctccttctgacatctttcccttctgttgtgaaatatgttaagccacaggccaaactgctataagatcgaagtttgtttttttctcacctaataatagagaggtaatcagatggtctagggcagatttaactctacaaggttatcaggaactttgtttccttctgtcttattcagccattcccagtatgttttcttacccataagatcaaagcagactcatcagctccatatctgcattccactggggaaagagagagagaaaagagcagatttttaaaaaaagatatgactgagcattgctcagatcactgtggccaaactttgctgaaagagatgctgggacatagaacct

SEQ ID NO: 55429 - DNA, 295 bp, Glycine max
aatgtatccaccttggtatttaatcaattaccttgcgatactattctaagtaattactaataccatcgaattcttcatatattttttttaaaaaaagattcaagtaatgttctaaatcaaatgcacgtcttttaccaacgggtttaaaaaaaacgagggcgcagttaaacacaggtaaggaaacatcttgagactaaatcattcaaaattttcaaaggcggatatttcattgactcaataaaaggccggtaaactttggcaaaaaccacttttacgactcggaatccccccaaaa

SEQ ID NO: 55430 - DNA, 361 bp, Glycine max
aatgtaaccaccttggcatttagtcaataacttgcgaaactaatctaggtaaaaactaagaacaaaaaattcgacagaaagtccacataagtacaacattcaagtactacgccaagtcatgtatgcttcaagcaacactaaatacaaatggaaccatagcaaatagatgcagaggtatggaagcagcaacatattacagcagtccatgtaaccactaccaaagatttcattgactcaataatagggtggtgcgccttggtacattccaccaggatgtctcgccaacggaacccgcggatgcagctgatgccccgacgaaggatggaagccatactgccagccatcatggtaaccccaacat

SEQ ID NO: 55431 - DNA, 383 bp, Glycine max
ttgcataattagcatcttatcattctttcaacaaataaaccatcagagattgccaattaacacatgataggtgggaaagggaaaataaagcctttgaaacgaacaaaatgccaaaattccatagggtaccaatcaaggtggaagaagcttttgttcattcggtcaagttatcctcttcatcgtcatgctcactcagatcaagatcagccaacaactcctccaagggaacataagattcatgaccatcagctggctagtacactttatttcggtaaaatgctatgttgaacctcatttcatggttttcttccagatcttgaatgaattgttcataatcagatacgacttgatccacagcaactcttcacttagcatcaacctcc

SEQ ID NO: 55432 - DNA, 361 bp, Glycine max
  unsure (1)..(361): unsure at all n locations
taatccacaacagctattgtctcatctgatatcaaacatcgggtcaaaaaatgccttctcacaactatgacccagttccatgtccatatgtccatcttgtatggatgttaactgaacatatattacaacacactctccctaatggaaagatgatatttacaaagacccagttaaaatgtgtcaggagacaaatgactgtacatatacacaaattagagatgctaataggtgaaagagggaacggggggcaaaatggttggatccatggcaagttttcactatgtacagattatatacaaaatttactgctcccttgagattttacaganagggcaccaccctacgtagttttggcacaaat

SEQ ID NO: 55433 - DNA, 129 bp, Glycine max
gggtcgagccacgcgtccaaacatacatgctgatccttgtcttaattttgcagttgtactctccctcctcaattgacaatcaatattaagtgcctatttattgagactattctgggtactggggacagt

SEQ ID NO: 55434 - DNA, 394 bp, Glycine max
agaattagtataacctgtttgctttttccttctttcaaattttgatgcagtcccctttttttccagaataaaaacaaaagtgatctgaatgaagaaatctaacgcattaaaatttacattccataaggggactcgagacaaagggtaaaaaaaatcaattacaggtaaaaaaaaaaatggggcttgtttgtgtcaaaaacaagcagtcaaagtatccatatctaccatagcacttggccttcctgctctctatctctccacttcatcagtttgtgtccaaaatcactgaaaagaaatacagtaaccccctttgaaaggaattgagagccgctttgtctactgagtactggcatgtacaatgaacactttccagttccaaataccaaaaagaaga

SEQ ID NO: 55435 - DNA, 317 bp, Glycine max
ttttaaagaagtgcattcgatccaagttcaactaaatgacattccacatttgatgacgcatctggtaaatgacacatcagattctcgaaccaactaattccccacggaacctgcaccttggctgatgcagaaattactcaaatggggcatcacactggcaacaccgacgattgctcaaactaccctacaaccatggggcatgtggccgcaaaaagtatgtgagatgaatgtgaacactgcgtgtgacatcacacaggttaccagtagccagacaagaatttaagaaagccaaagtgtcttcatccccgcatcacttt

SEQ ID NO: 55436 - DNA, 368 bp, Glycine max
ttttaatgcttcgcatatctaggcattaattattaaccaagctggaattgatccaactcattcatttacagtaccagtaacagtatgacggtgtgacttggtgattatgcatgaaccgaaccattcaacaacgggaacaatatagatatttacacgaattttgaattgcacatgttaatcgtattggtaatagaaaaatcattcttataggcaacctgcccgtggatcattgtccaattgccgtaaggaaacggtatactaaaatttgtatgatggaaatttatggggcactaaagggaattcagggaccctgtgcgaagggttccaaggtgtcttgaggggtacattctgaatcatctgcaagtttc

SEQ ID NO: 55437 - DNA, 440 bp, Glycine max
gggtcgacccacgcgtccgagagaagtggcattggttttcattttgaagatctctttaatagacttttttgttttggaaaatttgtttttccacgaaagtattatttctgttaccatataatgggttattctttttaaataaattttccaaaacaaaaaagtctattagagaagtggcattggttttcattttgaagatctctttaatgtcttggcttaatcacagagctggattcgtttatgtgcttctgcattcagtctgtcgcactattacaggtcacagaacgctggaaactgcagtgtccactcctgaaagaatgaatgaaaaagctaaataaagtcttaatattgttatgaaaaatctttatgaccttgtggaccccgcgaaagggtctcaagaactgcactaggggttctcagaccccacttagaaccattac

SEQ ID NO: 55438 - DNA, 438 bp, Glycine max
gggtcgacgcacgcgtccgatatttataacccaaatattcatcaactggatgaatggataagtaaattgtggtatactcctattactcagttattaaaaagaataaggaagacttatgtaagattgcccaagatttgatgttcagtgaaaacaagaaaatcagagaataatgcataatcatattctaaaataaaaaatgtacatatttatgtggtgtagaggttatagaaaaagagaactgtgattgtagtggggcaagttatagcaaatgggtttgtgggcaccttatctataccataattcaatgcaaacataaatgttcttaaaatgctggcatgtcttcataacctaaagactctggggtactatttctaaatgtatgtctagtaatgctgaaattaagagtgctgaatttaaaagcagtgccttttatagata

SEQ ID NO: 55439 - DNA, 439 bp, Glycine max
gggtcgagcacgcgtccggaacaatgccctttttctttctaatacagaaatgaaagagtaaaagaaataggaggagaagagattatgtccaagcagtctaaggaaaggagtagcaaattcaaactcttcacaagctttgatgttgatgatgtttattctctaagcaagataatacgtgttaaagtctttcccagtgctggcttatactgagcgctgaaaaacaacctgtttgaatttaaatctcttaacaattctttgtcttgcaccagtattaataaataaatatttctgaagaggcaaatatttctgtttaaaacaactgacatacacttaaaagtgtgtctcccttctgaaaaaaatgtttgtttaaaaagaaaatatgtcaatgcctgtttctactaaattaaagaaaataaatagtaggaaaaaaatgtttcag

SEQ ID NO: 55440 - DNA, 434 bp, Glycine max
cacgcgtccgagattctacattttacatcaccagtgatgcctcctcatggtttaaccatttcttccacattctgcctaaagggaaaactgtgtcagcaattgcttttggtttttaaagttataggttgctactacatggatgtgactaagaaaatacatagattatcttaaaatgggcatgatgtaaaagactcaatcagtagggtaactaaaaactttgtagtactctagctttggaaatctgagaggcctatatagttcatttgagtgtttgatcaaattcttattgagattacagcctgtgcaaaatatttgtgatgcatttttaagtttacttaagtacactttgaaattctttaaaaattttaaaatctttaaaaggacacaagagtgtaccacattgagattaaaatgtgtttattattaatttgtac

SEQ ID NO: 55441 - DNA, 326 bp, Glycine max
aggcaatagttatcaattcctttaagatcaacttaccattatgacagcatggttctaggctgaacatatcacccatccaaatatctatgatctgcctaaagtacagcaagttcaatcaatccacacagctaatctctgtctgtaaccacttggcatttacaactgtaacctcattaaaaaccgtatgtaaaactcaaccacgagtgaaaacaaaggattaacacagttttcgggatatttcaacaatcacatactctttttaatagcaaaattcaaggggccctggccaatggactttaactgactcctaacactcagattgtctt

SEQ ID NO: 55442 - DNA, 332 bp, Glycine max
aaagaaaaaaataaatagaaagtattattccacgtggtcatccaagagttggccacattcaacataagtatcttgaacataattacatgtcctctataggactagttttcttagttcttaaaaaaatgaaaaaaaaacaaataactaggagctagaaatatagcattttaaccgagtgatttcagagatggtcatatcccacggtaaagctaaactacgagagaatcataagatttaagccaacatacaattagaaacaaacacagaaaagaaatgacttataaattaacttttggcacctagtcctcgcgactttggtagcctaacagcac

SEQ ID NO: 55443 - DNA, 371 bp, Glycine max
caggaacggacctagccatgttttattgagcacgtaccaccacggaacagaagaaagcggcatgggacgtctgttttatgtcgcaaagcaacaaacacaatttagttacatatttttctcaaaccacaaaaatccacaccgagggaaatttacaagccactaaagggtcatgaactgcccaacctgtgacggcatttggaagtaaaagtgacactacgcaggtttcacaggttccgtttctcgctgtagaggctccaggtccacaaacgtaaagggggcggttgggtccacaccgggtttggaacgcatgcactgccagcacatcttgaaaggtcctggaccagtcctgacagggttcccctcaatccaag

SEQ ID NO: 55444 - DNA, 342 bp, Glycine max
cgcgtcgttaatggcgccattgccttggtgtttgtcgtcgttgcattggaggtcagggtcgtcttccattcctttgctaggtacattcaggtccctccgcccctcaattttgttcttgtcactatcaccatgcttggaggggcttctgccaccgccgcttatgccatgggtatggtttctgatgccctcagctctgttgctttcactacttccgctattgtggtcagtgctgctggagcactagttgtgggctttcccttactttctgccaaaagatgtctaatgctggtaatggcaactggtctactttttaatttaatgcaagcaactcctcctgtgtca

SEQ ID NO: 55445 - DNA, 217 bp, Glycine max
gccgtgtgcaagtcatggcgctctccaatcagcaacgaatccttcatctccctccagcgccgccactccccttcctttctcctccttggcgtcagcagcaagctcctcctcccccaacgccgccatcaccaatgatcctcgctcagccgctcctaaagcctcctccgccttcactccttccgcgatctcgagttccacgtccattccttctgtaatg

SEQ ID NO: 55446 - DNA, 148 bp, Glycine max
caatcatttaataatccaattggatagctggaaatattaaatggcaactgaagaccccagtgtattgggtcacgatactgatcgagtcagtaatcagcatctgtgctagaagaggcatgtagatctaattcattcggggatgaatcag

SEQ ID NO: 55447 - DNA, 134 bp, Glycine max
gagaaatactcaagcctggaaattgtggaggagaacccaaactcgggtggggtccttcctaacctaaatcctccgttacgaacggaagctctctcgcgcgaattcttcaacgagttcccgaaagctctggacgc

SEQ ID NO: 55448 - DNA, 416 bp, Glycine max
caaacacaaacacaatcgtcaattaaaacaacaacaatatcgaagctgcacaaattaatatccaacactctcaagctttcgagtttcaaactctgggcgctgaatttggttcatttttctaagcattgagtgacggccaggagcaatacagcccaggagaaatcctctctggtgtcagctcttcactggaaaccaaccattatatgtataatagatcaatctccactttggacagtttcccattatattctgatcggaactctcttctacagaatgcgagttctaatcagaaaatccaacatgctttgctggagctagaaactgctttgatggccccggatgacgatcaagttaccacaccgaatacattggccgagagacacaggtcctggaacaatgagaaccatgtgtcacaa

SEQ ID NO: 55449 - DNA, 353 bp, Glycine max
accctaagttaaccccggaatccggcccaaggtgaaaatgtgaacaataacccaaattaaagaaccaaacatacttaaatttaagttcattccatttaacaaaccggaaagaatacaaaaattggctcccccttgtaacccaaaataaggccaaaaattaacctcctttaattttttggactactcaagagatcaacttcttattctttagaaatcatatttcacactgacatgttagataattaattaagcactcgtatatcttcatgctgaacacattcttttttatttgtttaagttatttactatattgcattattgttgctacgccttcagaacatgggcatcaatat

SEQ ID NO: 55450 - DNA, 114 bp, Glycine max
aaaaaaaaaaaaaaaaaaaaaaaaaaaaaaaaaaaacataaaaaaaaaaaaaaaaattaaaattaaaattataaaaataaaaaacattaaaatggggcgtccgcagtttatttt

SEQ ID NO: 55451 - DNA, 350 bp, Glycine max
ctcccaaaccctcttccctctctccctaaccaaaagactccaagaccattcacattcacattcaatccaaaaccttcaacttcctttcctcccaattctcaaaataccaaattccaataaaaaatggcaccttcctttcggaaatccctccccctccttaaaaccccccctctcctcgtcctcctcctctccgtctccgcccacagcgggcaccgcgacgacgacgacgacgacgacgcggacgccggaggcgacgccaccccaaactccgtgctcggtctttgattctcgcaaacgtgtggtgtttgatcgttattttttttgctactttgtatcgggcgtttccccct

SEQ ID NO: 55452 - DNA, 263 bp, Glycine max
gataaggaaggggttttagaatataactccacatttttaagatttgatttgtttttctcttctcttcgcatcatcaatggcgatcctcattcctcaccctcctccccctcctcctcctcttgacgtcgtggccgaacccaatgtcgaatacttgtacctcccatgtccaattcccttctaagagctccatcgcgaagctatgatgtccatgaagccagatctttttgaaggcatgcgttttgatttcaccatgatgctcaatc

SEQ ID NO: 55453 - DNA, 332 bp, Glycine max
tagttgagaataatgttagcacacgtgtgcttgtctcagtgttgtatatgtaccatattaccaagaaaacactgcgcacttattcaagagtcaaataaaataaattcaacactcaaagccagatagcaaaattgaaggttgtgtgagccatcccagagttgcccatgatttggagtctagccgacaagatgtagcaatcaaggttgttggatggtaatataccagatccactttcataacagaatagctagtccaaatgttactagtttattttcgcacattctcacataacactttgagttccttaaaatcactcaaggaatttaagaaaa

SEQ ID NO: 55454 - DNA, 387 bp, Glycine max
gtaaaagacttttgtcagccccttctttgagcgaatttgataaacctgatcaaatacacattaccagagcatataacacaaaattattatcaagcaaccaaatataacaagggaaaaaaatctctccttttgtgaccaaataataagtctttgaacaaccaagtttggattaattcaacagcttcaatgaaataacttcattggtgctacttataaaacctaataaatgtaggaagaaatgaagccttatcaattacaaagagcaaactgacacaaagaatatcaaacctaacttatctaactgacttagtttaaataaatggatttcataccttaatttgtttgatgtctgaaatgtcagcaacatgagagttgatgcgaggatta

SEQ ID NO: 55455 - DNA, 135 bp, Glycine max
gtattgaaaaaaaacgaattttttggtataaatgaaaaaatctacgaaaaacaaagcaggtttaaaaaaataatgtgaaacataaagtaataggggatctgatttaaataaaaaaggttttgggaaaatgccaaa

SEQ ID NO: 55456 - DNA, 109 bp, Glycine max
ctatgctataactcaactgttcacggaacttacacaagttgttagaatacacaggaaattcaaacacgtcgaaacgaatacggcaccaggatgacaaacagcacataca

SEQ ID NO: 55457 - DNA, 378 bp, Glycine max
gtgaccaacggctatttgggcatccatagttaagtaaaaatacgatcgccagcaaaatagaaacagtataaaattcaacatgcaactaatctagatacactttcccctcccatgtcagcatggatcaaaagtaaaacttgcttttctctccactcaacagaagcagtaaagtcaagaagctctctaaaaattcctatttgtaactgtatatataaaaaagatccacctaactgcctgtttctgttggcattttccgtctctgtgacctctttcttttcctacgtctcttcactgtgttgtctccatctgtttccttcaaagggccaatattttgtttttcacttttcctcatcttgcatgaaagtgggttcgggccct

SEQ ID NO: 55458 - DNA, 377 bp, Glycine max
ttttacatgtaacaagttattaacatatatattgcatatgtatcagattgggatgacattaccactttaataagacactacaccacttgcattgttcagtaaaactaagctctcagcataataaccagaataaacaaactctgtgtctacttcaatttgaagttccgtaaagcttgtcctctccatgtccagtgaatacaggcatctccttcctgccacatccacgagcaacaacacctctccgctgtgtgtaacacacagagctgccggtggaactgcaacttcaatgattgtcatctccaaagatggtattaccaaacaaaatgcgttcatactaaaagaaaagaccttattccaagactccaccacaccatact

SEQ ID NO: 55459 - DNA, 278 bp, Glycine max
ttttatattttttatgttatttttatttattttgcatttgttttccaacagaaaagctcacaatatatacctacaaagttaaaacatctgcaagaaacccgataaacatgtaccaaaaagcagaacgagtcatacaagctgatggccctcccagcatcagattgtcaaaatctggagggcaatcttcataaagaaaccagctctacagcaccactacaagtggtgctcactccaacaacataagtaggagattttattaaaaagcttacaaaaggaaa

SEQ ID NO: 55460 - DNA, 275 bp, Glycine max
gccataaacaaaattattgcatcattatatattacataaactataaaaaattataaataggttgacatgttaggctaataagccttcttaaaaacctaaccccgggctcaataataagtaaggcagaccaaatttggggtcaactaatttctactataaatacaagtattttgtttcacatttagtcactgaccataccaacaatatgattttctagcttgcaggggaaaaaaattatgcagcagacaaatttcatcagttactacttccacacc

SEQ ID NO: 55461 - DNA, 352 bp, Glycine max
tgaagggaaaaaagagttcggtaatacattcatatatatatttttttaccaaaacgtgaaaaactacggttattattagacaaaaatgtaattaaccactgacattgggcgtggtagattcactttcccgtttctcagtcaaggacattggcgaagctggtaacttattctttgaaattccagcttgaccccaatccggtgaagctggtggtggttgaagtacgtgtacttgttcggtggaggaagtggaagaggtaacaccaccaccaccaacatcatctcctttctctagattctcagactcataattcccactttgaattttcctgagtgcttccagaacttcaaccat

SEQ ID NO: 55462 - DNA, 371 bp, Glycine max
gtaatgcaaggatattttatatggaagcactttttgaaaattcccttgattcttactaattgtaaaaatacccgcagagaggcctggcatgaaattttcacatttaacttactaacacaaaactgagatattaaaaggcagagcacaagtcacatagatagacacttaagagttctatttacaacctgtaagaaaagcaaaaactagagtaattatctagtcacacgtgcgagggatcgaccccaacggacttgagggtctcgacacgatgggtataagtataggcatctccgtgaatgggactaatgatttggtggtgatcatggtagctacgctcttgcacgtgcgccagcttcctgaagaacgatttc

SEQ ID NO: 55463 - DNA, 237 bp, Glycine max
gaccaaatgtcatcatgtattaatatgaaaaattaagaaaaacagctacccaaaaacagacaaagcaccagctatgagggaacatattaaaaacaacacagccattcagtactgcccaaaggacaaagacgtttcttcaaaaccctgttccccactttaaagcttccacgggaagcctccaaaaaggccatgggaaaaacccccctaaaaaatttttcccaacaaacttttttccaa

SEQ ID NO: 55464 - DNA, 381 bp, Glycine max
gaaggctgaagcatattcattaaacttgtggcatctgatttatcagacgccagaggcacaaatccagtacaaaaatcccatcacatattcacaccaacaagttgtgtatgttaacataattaaatctcttcaccaaaaaaacagatacaactgggccacactcactatcctctatatgactctatctttccactccaccgcagatgacagtccatgcagaaaccaaaacatcatttatttttcagttttcttaagcttcatagtgaactttaattgagttctcaactactctctccctcgctttagttgcctctttgtgccaatctgttagtgctgttacaatagcaagaataatgacttgtgtaagagagcctgatagag

SEQ ID NO: 55465 - DNA, 282 bp, Glycine max
  unsure (1)..(282): unsure at all n locations
aacaaacaatgttacgacttcataaagtgaagcatttcccactaatatcaaatgttcaccatttgattacacgccaaagaggcaaagacctcacccagtataaatgtattatagatatagggaatggactgaatttataattactaagggaatnttagtgccattgctttaatacagaggaaagggaacaagcaacaggtaccaatcgcaaggtttatggcccaataggcatgatggaagtcatcggttcatcatccataacatccatgtcagttatgaaag

SEQ ID NO: 55466 - DNA, 167 bp, Glycine max
gtactggtgaacgacagcaacatttcaaaaaagaaccagggtacgccgaaaccatcaaaagcgacgaaaaacaactgggaaaggaccacaagccgtggcaacccccccccaacatgataggatctcaagaacgaagcgctcacagttttagcaatgccagccgggac

SEQ ID NO: 55467 - DNA, 117 bp, Glycine max
gaatgggcttgggtattaaaaaacacaacggaaagtaaataacaaactaagaaaaaaagaacaagcatagaaataaaggaacaaaaggaaccaaacacgaacaaaaaaaacaaacca

SEQ ID NO: 55468 - DNA, 327 bp, Glycine max
ataattctcttgtatttatcatacttacatctgccttgaatacaattgcaattaaacggcaaagaaacattatcacagtctaagagagtttaaattcaagggacaatcacttacaatcctccaaaaaagagggaaatgtatgcaagctaggagtcatacacaatgctgacaaacgtcaccagtcaatatcccaggacaagtcacatgtatttgttcaaacaatgccacagtccacaagcacttacactggaagacacagtcaattggaccaacacttcacaaatcacactatatagaaattgggtatccaaaatttttccacctttc

SEQ ID NO: 55469 - DNA, 339 bp, Glycine max
aattcataatgattgtagatatcattgatcataggaaacatgggaacacttaacagctatcttgtttattattttgtttaaaacgctgcttgatgcaaattgtaaatctgctcactcaccacaagactttggtcaatgcaggccaataaagaagaacaaaaaacacaagaagacaagttaaacagcttcatcttctttgtagttcacggcttggtcccaataatgaggaacaccagcatccacaaaaacttttcgggcagctgcttcggtgatgcaatcatggacactgaacctataaaagctgggtttggaaaaattccttgccacaccagaacacac

SEQ ID NO: 55470 - DNA, 348 bp, Glycine max
aaacaattcacaccatgattcactatagttgtaatataagtgaacaaacattaaatccacagtacaacagtaaaagggtacacatttaagcaaacattgacttgtggagaaggtttcataattcacacggtatctaacaaactagaaacagctgcctagactaagagaaggctagagttttccactctcctagcaagtcattttctagtagtaaccaaatgctttccctttgagaaaattaaagactgactactcaaataccaaaatacttccatcccatgagcatgaagcaataacattaggtataacagggtggaaggcaacatctatgcatgcctggtcatgggc

SEQ ID NO: 55471 - DNA, 239 bp, Glycine max
tcttttttttctattttttttattttttattatttttgttattttttggttttaatattatatctataggaaaagggtaagtgggcacatattgatgcagacactgaattgtggataaagtttcatagttcatatggaatcaaacaaacaacaaacagatagaaagaaaacaagaacgttatacatatccagctccgagcaagacatattaactagataacaacagacgtatattctga

SEQ ID NO: 55472 - DNA, 352 bp, Glycine max
ttatgataaaattaaatcaaactaaattgtgcaatatcaataaaaacaaagaaagaaagaaaaatacccgaagaataaggtgttatgataaaagccaaaaaagaaaccaaaacggcgtgcgtgcgaatgaatcaatgagtcgtaactttggacctcttcttggcctcactgtaaagcaccacccccattatggtgattccgaacccggccattcccataaccgtcaccggattcctgaagatcaaaaccgaaaccaccgccgccaccgccgccttggcattccccaacacctgcagcgtcaaagcactcgtgtgcttcgtcaccaagaaattcgtcaagttcaccaaataag

SEQ ID NO: 55473 - DNA, 343 bp, Glycine max
atgaaaataagaaaattaaccatacaaactatatatgaatgaccaaaattgttttaaataattctaatcttaaccataaattgaaattatatgattaaattcactcctctcatgctttcatctaacctgaataataaactagatctgaggataaaaaaaatgtgtcttaatcagattattgaataatctttttcctcatagcaaatcaaacacattaactttgcttgactcttagaagtataaatgatacatagagtttttgtccctcgtcatataaattcaatacatgaaaaatgaatctcatcccaggttttcagcaacacaacatcatgttggggctttg

SEQ ID NO: 55474 - DNA, 293 bp, Glycine max
caactgaaaaagttcacccttaaattagtaaattacatcctccgtggctataaatgtgactctggaagaattaacttacgaatcaagataaatgtatcttgaaccaccaaactacatccaacattgaaccctaataccctatgacaaattgcaaaaagcaattcatgttcctcagaatatttatagaaaagattcagggattcacttcgttaagggagtatgccttcacaaacttcagaaggttattatatgattaaactctgccgggcgataaacttgttaaaaccacattt

SEQ ID NO: 55475 - DNA, 342 bp, Glycine max
aatagtaataaccaaagcatgtttaaataaacaaaagggtatctagatggtagacacagaaatttacgagttttcttttcttcaataacaaccatcttataataagtaccccaaaaagagaacaaccactttcctctattaggcctaatcgatcaacatcttttctataccttaatttcatccatcaatacaattaaccgcataaaagtcatctcccctaaatctaagtggaaaaatgtttgtgttgatcctgcagctgttgtttgtgttgaagacccatcaattcaaaatccttctggggaatgagcaaaaccaatctcgcattctcaaacctcctgcgtt

SEQ ID NO: 55476 - DNA, 365 bp, Glycine max
tttttatatgaataaatatcacatctaacacgttttcacaaatgaaacaaattgttttttaaagactaaaaacaaactttaccaggacatcaaataaattgggatatattatcgcttagacggaacaactacagatcatttgagatatattatcacataaattgggaaagttgacacaatgatcctatatttacaacaaaccactgaactgtgtctggaagtgcacaagtccagggtacggtgatcaacaggttagttagtcaaccaggctagaaccaacaggatgagcttgccaggacatcaacttcacttttcttcaacaaagaaaacatccctttcacctgtttcccaaattgacgaaccct

SEQ ID NO: 55477 - DNA, 405 bp, Glycine max
taatcaccaaaaattatgttgatgctgaaagaaaacttgtaacaagttaacactatcactgtaatatttgacattcacaaaatccagcattcttccccattgtattaaacaattgtcctgaaaaaaaaaggtgaggggttgattgctggtatataacattaatgaatttagatgacctgataggttactatgtccacagtaaaaaattttaaggtatgattcaaattcactaaaattttcctctaatcaagatctccttttgagaccttggaattggccagctgagactacaaatcttcattgcactcgcagaagttatcatatacgtgtttggatatggatgccgatatattagacagtgactaactgctgcaaggatcatagatttcttggataaatttcaac

SEQ ID NO: 55478 - DNA, 73 bp, Glycine max
ccttactatagttagcaacatgtcaagagtattaatgaaatgttggtaactatagtaaggaacaataggctgt

SEQ ID NO: 55479 - DNA, 386 bp, Glycine max
ggtagtaaccgaaatggtggtctcggtttgtctgacataatcactcagattcaagcttcgaaagattctgccaagttatcctatcgtagtaatgttggtattgagcctttatcatcatattcgagtaaaagggcatctgaaagacaagaaagaagttctctcgatgataaccatgatatgagggagactaggcgatatatgaaccccaacactgatagacagtatttggatgccccttatagagatggaaactttagggaatctcataatagttatgtgcctaatttccagagaccactattgagaaagaatgtggctggacgcatgtctgctggcaagaggagttttgatgataatcagctatctcttggagagatgtccaattt

SEQ ID NO: 55480 - DNA, 363 bp, Glycine max
acaggcttggccaggatccttgctctgcgccgtgatttgctgaggggggtgcctcatgaaccactgcttgttgtaggaccaaggcagcttaagagatatttagatgcataccaaagactggaagatttagatatgctatttctcgattgcaagcacaccacagcagcttcattggaagcttttgaggatgattttccaggaaattcagttaattctcggaatctgaacaataataatggggacttaattgcatcaaaagttgattctactttatttgctagaggatctcgcatgcaaaactattttagaagaccacgtagtcctgttgacaaagatgtagtttctcctatcctaaagaaattt

SEQ ID NO: 55481 - DNA, 51 bp, Glycine max
aaaaaaaaaaaaaaaaaaaaaaaaaaaaaaaaaaaaaaaaaaaaaaaaaaa

SEQ ID NO: 55482 - DNA, 195 bp, Glycine max
tattgatgtccacttggcgtcctcaatgcttctccacaacacgactcgcactcaccatttcttaacttttaccaacgacctatttccgacatacgcaacgcagtggcaaagactgacttcgacgtgagtgttgagagcaagaacaaagtcctcacgcagctgcgatatgtcacgattgctgctactcacaccttt

SEQ ID NO: 55483 - DNA, 338 bp, Glycine max
gaaaaggggaaagtgaggattaaaatcaaagctaagaatattaaaagaagtcaattataaaggcattattctaagttctagagttggttctaaatcactaaaatgggagattgaagaaaagtaataataacataagagacttacaaatgcaatgaattcatggtctttgctcctctttgaagagttatttcataagtgcggtcacaaagatcttgcaaaaatagttctagagctttagctgtaatgcattcaagagcaatgtcaacaacatgtatatgacaaacaaacaaccagcagcctgaagttaacaacagaattagtcaaagcaactcacaaac

SEQ ID NO: 55484 - DNA, 322 bp, Glycine max
cacgagccgcgccctttttttttttttttttttttttttttttttttttttttttttttttgtatattttttattttttttttttattttaaattattaatttgtatatttatattttatatttatattatttatatttatatatgctttgtattcaagtttattttccgcataggagatatacataaaaaatgaagacaataaaatggggggtgactcgttcaatagccttagacagtcatgaaaaaagaatataggcaaaatcatgtgggaaacaatcttccaatcagcagcctgaaataaataacagattaaatcaaag

SEQ ID NO: 55485 - DNA, 281 bp, Glycine max
catcacttcacttcactaatacatcatggcagacgagacccagaacaagtatgagagctctgaggttgaggtccaggatcgtggtgtttttgactttctcggtaagaaaaaggatgaagaagacaagcctcatcctcaggaggaggtcatcgccaccgagtttcaaaaagtcactgtctcagaccaaggagagaacaagcacagcctcttagaaaagcttcaccgatctgacagcagctctagctcttcaagtgaggaggaaggagaagatggagagaaaa

SEQ ID NO: 55486 - DNA, 314 bp, Glycine max
cagtccgatcgactgggtacttatccatttaaaatgacactgtggatacccatagtctcatagtgtcatactgcaacacataacaatgggatcccttaaggcaaggttggactcgaaccacatttatccgcaatcagcgacactttagaagcatcgctcactcatcaatgattagattgatgacgactggaaattaaatgataagatccatgaagaacaccttaaagctatttccaacttgtcacagatcacacaggctaacataagcacagaacctgataagaacttgcaaaagtcagtgaccatgcctgtga

SEQ ID NO: 55487 - DNA, 107 bp, Glycine max
gtttatgtatcatcctaatcttctttcgcggcactcatagtcaagttactctataatttgttaaaaaaactcacttgatttacgttaataatgccagtaccatcaaa

SEQ ID NO: 55488 - DNA, 406 bp, Glycine max
  unsure (1)..(406): unsure at all n locations
tcttgcggctagggttttagcgcagcttcttctagatttaaggaagatgggtaaggaaaaggttcacatcagtattgtggtcattggccatgtcgactctgggaaatccactaccactggtcacctgatttacaagcttggaggcattgacaagcgtgttattgagaggtttgagaaggaagctgctgagatgaacaagaggtctttcaagtatgcctgggtgctggacaaacttaaggctgagcgtgaaagaggaatcaccattgatattgctttgtggaagtttgaaacaacaaagtattattgcacagttattgatgcgcctggacatanggatttcattaagaatatgattactgggacatcncaagctgactgtgctgttcttatcattgattcgaccact

SEQ ID NO: 55489 - DNA, 309 bp, Glycine max
ttcttctccatgcaatgagaagaagaccaatgcagacccatcaggccgtagttgatgatgacaatggagctcttgtcataatggacttattcatcaacttcatgtctaacacaatggacggatctattaaaggttatgctgaactaagacacacactagacatttctgtgcgacgaaatagaaaatttgtacgttcggcattgcattctatccatgacaacttacaagcagttttcgatttcacctccaatcatttcctcatttctcatgactgaagttaacttataactttgggttgtcacgattgga

SEQ ID NO: 55490 - DNA, 224 bp, Glycine max
  unsure (1)..(224): unsure at all n locations
gtctatccgaagtctttgggaatagtgctgcaatggcttcaagtcaggangaggtatcccatttgggaactaccgctaccacaattatgtgcacggtgcatactgctctcagattgttgggaggtcaactgacgtatatcgcagcccggttcatgcccctaatggcactgcttcacacatcaaacctatttcacgctacgattccaatgcttattcacaatatg

SEQ ID NO: 55491 - DNA, 391 bp, Glycine max
cagagggtttgggttgccacccccagcaaaattcagaagtgggcatcttcctgctaatgcaatccctgtgtcaacagtcatgccgggtgagactggcgacagcggttcaaattctgataatgacgacagcatcgaatcggaggaggaggtttatggtggcaggtattcattggattcgtcaccgcaagaccgaagagtcccccccaatggtgctgctaggagatatgggaacctcactcgaccccggtatgcaagtgattatacatattccgaggtcagttcttccagggaaacactggttggcaaacctggtactgtgagggatccattgatgaggggggcggcaaatgtaggacaaagtggcttcaacagagatgattcatcggattct

SEQ ID NO: 55492 - DNA, 150 bp, Glycine max
ccaccatatgaggcctgggttttgtaaaaaaaaagacaacaaaaaaagaaaaaaccatacaacaaaaaaaataaatcaacaaaaaacagagagccgaaccaaaaaaacctaaaacagaaaaaaaaagacacaccaaagaaacacccaaaa

SEQ ID NO: 55493 - DNA, 383 bp, Glycine max
aagcaaaactctctgcaatttggggaaattgtttctgtcaaaattcagcctggcaagggatttggttttgttcaatttgggaccagatatggagagggcgatcaccactcaccagagacttgttttcacatatattgttgttccaaacccatttgataaaggtggcaacttttgcagttgaactggacaaggatatgacattagcttccttataacaaattaccactgtgaggatatgacattagcttcctttttaaaattttagtttaggaaattagcttcaagttcaagccaaggctgaaggaatacaaatcagtgaccatttaactttttaggtgagaagagagaagataagtgaaaggaccaaagtgtaccttcaatat

SEQ ID NO: 55494 - DNA, 158 bp, Glycine max
cttgtacaatgtcacttaccctcgcgtgcagtatgtgatagcctagcgttgtggccaaaactcgcctcctggtcgctaaggcgactcagtctggaaagaagactactgcgtcgatccagacgctgctaagcgttggttcaaatatcctgatcccgtac

SEQ ID NO: 55495 - DNA, 51 bp, Glycine max
gttaacaaacatgtcaagagtattaatgaaatgttgctaactatagtaagg

SEQ ID NO: 55496 - DNA, 224 bp, Glycine max
tgcttatcatgtttgcaaccaccaatatgtatcacaatttttaggactaagcattatctcataggcaaacaaatggatgcagcagtctttatgagcattatccgcaacatttacataaatcctcacgtccagatggattctacatggattctttacatagtcttgccatgccttaacaagcttaaagttaagtctattcagatccaccacattgcctaaaatgt

SEQ ID NO: 55497 - DNA, 261 bp, Glycine max
cgctcgtcaaaaattagaattttatcataaagcagataccaaaaaatgatcaatgtacaatgcaaagcaaaattgcagccaatatatataagacaaaagtcaaatcaaacattaaaagtccacatagatactccatcatcatcaaaacaaattaatcagacggaagtgcttgttctccggcttcttctccaacttgggcacggtgaccttcaacaacccgtctttgaacgtgcagctaatatggatgcggttggcatcctt

SEQ ID NO: 55498 - DNA, 290 bp, Glycine max
tttaaagcacctcgcaaacgtttaagtgcagaaatggatcccacgactctaatacgaatcttcaaatccataaacataaacatgttctgtaaagacgcactgcataacgtatacatcatacatcaagcaaagatacaattacataaattgagtcaatctctgcatcagatgctacatttcatttcatatcttgcagtgctccacattgaggaaaccctcttcatcatcgagatgtcacatatcttcgaatgtctgtccctcaatctgatgcgcagatttcaatgtttcca

SEQ ID NO: 55499 - DNA, 354 bp, Glycine max
gaaacaaatacaaaaggaacaaaattatatttcacaattccatacactattttttttatctttgatctgttgaggtcatctttcctcgtggggcgtttccttgtttaatttaatacaatgaacaaatgagttgtactactcagctaagcaggtggtcttgtcctttgttgtatcacaccagttccataatcctgagacggtgtccactgtcaactcccttggcatttaaaacaaaacaaaacaaaacaaaacctgctatcattatcaagtgagccaaccacatttaatcatgcatcaccaagtttggagttggggactttaaaaaaaactgaaaagaagatgttaaaggaaagg

SEQ ID NO: 55500 - DNA, 75 bp, Glycine max
atgtaaacccaaaaatgccctcccaaattatttacaaccccaaaaagcggggaaaagttcccaaaacggcccaac

SEQ ID NO: 55501 - DNA, 225 bp, Glycine max
gtatattattatattattttatattttttattttttattttctttgagtatattatattattttattttattgataaaaaaaaaacacaacaaaaaaaaaaaaaacagcaaaacttaacaagaacccagcttccacaaaaggaaaaaatgctggagatggagcatccttaacatcgcgaaaagcaataagagcggcaaaaaaagaaaaaaacctcaacacccaaa

SEQ ID NO: 55502 - DNA, 190 bp, Glycine max
attatattgtttcatttttatttccattattgtaggggcttgttaatatttaaaggcaaggaaaattccgaaaagggcaccaacaggtgaacactaacacatccaaaggaaaaaccgttgaccaaacccggaggtacaccaggttcccaacaaggtttcacgcgatgcagaggaatcagggaccccggaa

SEQ ID NO: 55503 - DNA, 107 bp, Glycine max
tttgctggtactggcattattaacataaatcaagtgagtttttttaacaaattatagagtaacttgactatgagttccgcgaaagaagattaggatgatacataaac

SEQ ID NO: 55504 - DNA, 268 bp, Glycine max
gaaactaaatcattcacataattattacttaaatttacagaaaagaaaaaaaaaaactaataccacatacagtttgccaatgtcgctgggaaaaattgtcaatttccaagctttaggacagctaaactagacatacaacacataggattattctattacatactttatgccagcttctgcttttgcctgatgtgaatgatgcacaaacttttggtacagcagcatctagatactactgtctgcagcaaatgattcttctaactgaact

SEQ ID NO: 55505 - DNA, 225 bp, Glycine max
  unsure (1)..(225): unsure at all n locations
tcgcgatctagataaaaatatgcaacagagtcagagacagggtgcatgatatttacaagaaaatatcttttatatatataaatgattcaatcaagttacttgatgaggattatgagtgaaaatgagaggacagtcatagaaactttatcctacattccttctattttcacttctgtcanatattcctttcaacctagctaagaaagacaagaaatcgaaactcca

SEQ ID NO: 55506 - DNA, 244 bp, Glycine max
gcggtcaataaaataatgtactttatcatcaagattgaaggtctgttacattgaatcgcatctcttatttcaaggatactgcatacattacaagtctacaataaacaccaatacaacgtatatagtgctaataaataaccctactttttgctttgtgacagacaaagctgttaaaacaccatattataggacagcataccatagtaactagtcatattcgtagcatattgggcaaaataccata

SEQ ID NO: 55507 - DNA, 155 bp, Glycine max
ctttaagatatatatatatatatatatatatatatcacaattatcatgtacatatttatgaccattgctgtcattcagctaaaatccttaccaaaatattgaagtgccttcaaaagtatccttcaccttaatgctctcattgcaatggagaagac

SEQ ID NO: 55508 - DNA, 332 bp, Glycine max
aaagaaaacccaatagcatcatgtgattgatataaccaaccacacttgatgggataggagccattattttggagcaaaaatatttaaattaggtgaaaacatacacttcagaccaaatgggaaaatcaaggccccatgaaaaccacctatgtatagatatgggacgaggaatggcatttcaaactatgctactactacatccaaacaaaattactttgaagccagataaaaatggccatgaaattttggcatttaatcgcacaacacaataattatgggatcaaaatttggcatgacctccaagcatgtgagggccaaaagtccaaaactga

SEQ ID NO: 55509 - DNA, 224 bp, Glycine max
gttttggaacaacatcaatgcattaaaaatgattcattgttcaaccatgttgtcaataacactcatggtatatgtctttgatatggagaccttcgagattacgacttacaagcatcagttatacagcaaagttcatatacaacaacattattcatagacagtctaagtctcaatacactacatgcaatctattttgaagtatcaacgtgttcatatgtacccct

SEQ ID NO: 55510 - DNA, 307 bp, Glycine max
gccacaaaaaagtcgaattcctattctttgtattaggcaaaggcgtgactcgtgaaggctcaagggcataataatcttcatgcatatcgaatcatccgttgttgattccctttttaaatcctcaatcaaaattctgggcgacagaaagaaagatcttatcaacaattcaaagttcctgaacaaaaactagaattaagcatcatttaagcactaacaagtgcggaattctgggaaggatttcaaaaaaaaaccttaaacccaaggggaaactttttgctgcaaaaatggttttacaccaagggatccc

SEQ ID NO: 55511 - DNA, 204 bp, Glycine max
cccgaagttcaaaatgagattatgaagccattctcaccaagggcaaatcacatattacaaacaaggggtaggaaaaaatatttttgcaagaacattaatcgggaattgatcgaccagggaacaactgaaggaagtcagcatctcgaaagtttaccaccccctaaggggtggcatcaaaagcacccatatggggatttcaattgg

SEQ ID NO: 55512 - DNA, 54 bp, Glycine max
ctgttatctcttgctgaaaacactggcacaatgaggcagccgggcatttaattg

SEQ ID NO: 55513 - DNA, 328 bp, Glycine max
tttcgaattttttttttcgatttttttttttttttactctttagcctttgagaaacatcattaaagaaaactgcgaaatttccgaattagaaattaacaaaggtaagcactggattatttgcactcttcaagtccataacgaaaatccggattaagcccaatgtttcattaattcctgaaattagattaactgcatcaatttatctaaatgagcccaaatcataaaactgcctagttaattgacggttaagaccaatcaataattagaatggtgcacaaagggtttagaacatagactaaagcgatcgcacatcaaatgcccccatac

SEQ ID NO: 55514 - DNA, 245 bp, Glycine max
aacaccatgaaaaacatacattaatgcaatcatggtacatcaatccccctaaaattaattggtgaaaaaaatacaaaatatcaaacaagggtttttctgcacaaactgccataggttaagagttctcacacctaaggagtcatcaatacttggaattagtcatccatcttgtgattctatctaaaactgccttgatgaatccctcacaaattactattatcatcctaaatcagcaactgaataat

SEQ ID NO: 55515 - DNA, 189 bp, Glycine max
gaaattgaagccttgtgatcataaccaattctggaaactacaacttacacattgtgttgacaacaatcttgatgcaaattgacattattccataatacatgaactgacatggacactgcacaaactacaatgaattaaacattcgatgatcctaacattcaatacactaaggaatgtgccataaaattc

SEQ ID NO: 55516 - DNA, 248 bp, Glycine max
acactaacacaaattaaatatacacttgattacaaggagtggcaaacactaatgaataacaaaaccagctatatgcgctgctgaaagctgaaagagacaatctacagattgaaaaagtatttgcaaaaatatcaaacacatgacatgataaaaacagaagagacatacagaaaacaagtgattactagaaagaaaaggctttggtagagtatttggtttaccaaaaattgcgaaatccttgagccaaa

SEQ ID NO: 55517 - DNA, 324 bp, Glycine max
atcagggaggaaccgcactcatattttaacattatatataatcacatttccttaaggggaaatctttaggcgtcatattttatcagcctgtaatgaacctcatgccattttaatgacatgtgaacaccaccggaggcctaagtgttatcaacttcaggtcatattcacgatcagttacgttactgaatgtctcaagattcactgtaatttctcggaatccgtgataaacatgtactgcaaacggcacaaggtcagcgtcacagctttgtaatcaagtgttctctccaacctgtcacgaattggagtccagacaatctaatgcac

SEQ ID NO: 55518 - DNA, 151 bp, Glycine max
cacaagaaggaggaggagcataagggtgagcaccatgctggagaatacaaaagggagcaccatggtgaacacagtattgagtacaaaggagagcatcatggtgaacacaaagctggagaataccatggtgagcacaagccagagcacaaag

SEQ ID NO: 55519 - DNA, 229 bp, Glycine max
cggctcgagggcgacgtgagcggttcgctgcccgcgacgttgtgagaagtccactgaaccttatcatttagaaggaagcagaagtgaaagaagagaagaaggaaggggaagtgacggaagagaagaaggaagttgaagtgacggaagagaagaaggaagcggaagtgatagtagaagagaagaaggaagttgaagtgacggaagagaagaaggaagtggaagtgaccga

SEQ ID NO: 55520 - DNA, 287 bp, Glycine max
aagaatcaatgttgtttgtccaaattggtgcaggtgaatttccaaatgacacagcacttgtttgttcccgaagctcaaacagtgcattaaagttcctatccacatgcaaattagcaaacttaaccgtgagggccgagcttggttgttgcttgctacatagaaagggaaggctaaccatagatggatgcatacttcaatgtgagtctaatcctctggattatctctcatgtcccattgtgagtacagccagtagcagtgtggtgcttccctctcaaaccaagagtaat

SEQ ID NO: 55521 - DNA, 333 bp, Glycine max
gtaaaccaccattccacatcaacaataaaaaaatcaattcagtaggttcaattgatgcagaagctacttcacattgcttctggtaaacatcgagagagggtgatgatgcacgttgcacatttggttcggaccatgcacttagtttctcacccaagctaaaattaacttgtgtacttcagcttttggaaaagttagataagagagtttctatgaaaattaagtgcattagttgattttagcttaccagaaaagctcaattcattttacctttttttattttcttttgctatcagtacttttggagaactttatctaaatagagcataagcatgt

SEQ ID NO: 55522 - DNA, 275 bp, Glycine max
  unsure (1)..(275): unsure at all n locations
aaaattcttccaccaagttatgggtttccttgtgttgcttcttttctcnctcttatgtctctcttctagttccagcatatcaactcatcgttccatattggaccttgacctaaccaagtttaccacacagaaacaggtgtcttcactgttccaactatggaagagtgagcatggacgtgtctaccatgaccacgaagaagaagcaaagagacttgagattttcaagaataacttgaactatatcaaggacatgaatgcaaacagaaaatcaaccc

SEQ ID NO: 55523 - DNA, 227 bp, Glycine max
ggaagcacgagaacatcactcaccaaaaggaaacgtcactcccactgccaacgcgtcaacaggttggcacagcactctcaattgcgacacaagaattccatcattacgctcatcgatcagatcattccgcaattcctgctttccatcagtaagttcttaacgtcaaattggtcaacatcagcaattcactctgccatgaccagatgtgcatattcgtggatgcggca

SEQ ID NO: 55524 - DNA, 356 bp, Glycine max
tgccctgcttgtcaaatgtccttattatttgtgaataaaaaatttctctctaaaatgtcacgcagttgcttttaaggacgtagcaggtgacattttagagagaaattttttattcaccgataatatttgccctgcttgtcaaatgtccttattacttgtgtttaataatggttcatccgtgtcaattgctaaagctaatcttgatgaaagttttgtctatttatgcatgtcgttttgctgacttattagaaattgtgaacaaattttttttgttgagtttccttagacaagtggcttaggaccagtccaaacagtattaacatatatgtgcctgttaattgttactacaaaatttt

SEQ ID NO: 55525 - DNA, 325 bp, Glycine max
aagggccaggaaaaatgaccgatcgaggtttaaaattgaagcatcaccggattacgcggatcgaacattttctaatagatatcatccaaatattattcagggattgaatacacaatacaatagacaacatcggccgttataacccacgactgatatttttcagccaatattgcgcaattgtttttacaaaccacgccgataatattttttactgtagaggatgctttttttcggttttgccgtaaatattttcaatttacgtcgtctaagttttttcgtttgagctcaaccgaagttgtgtttcggccgacaacggcatgttttc

SEQ ID NO: 55526 - DNA, 145 bp, Glycine max
ccttacttaaccccggaatccggtccaagaataatccaaaaccaagggttaagcacaatcccccaagaacaaaggttagccggaaaaaaaaactaaccggcaatccggaaccggaaaagaatcaaccaaacaattttggcctggg

SEQ ID NO: 55527 - DNA, 67 bp, Glycine max
tgtaggagtaccacatattactttcctcggctatagagagccaaattataccgtatccttaatttta

SEQ ID NO: 55528 - DNA, 303 bp, Glycine max
ctctcaccatggaggcgcaacctccatccccctcgaccgccccgccgcctccgtcgcattacctcaactaccccgactccgtgggatcctcgccacgctctcgcatcaccgactcctgggacgatcccttcgcgccggtgtcgacgaagcaccgcctcatgtgcagaatcgtggtcaaatcgtccctcgcccccatgataagtgcctctgctatgtcggtggtaacacgcgcatcatcgtctccgcatgcgccacctcagtcgcagatctctccacgcgcgtctcgaaaacattcctgaatgg

SEQ ID NO: 55529 - DNA, 340 bp, Glycine max
gaactcccatcggcagcatgggagttccactgtttctcactaatgtttcttaggtcggttgactcgggagatgcctcctaagaaacattagtgagaaacatgttgcaactgcagaatccgtcgcagggtcgaaagtccttctagtgaacagaagggtccactacacctcaaaggtttcctctaaccgtgccacgtggtctaatgttctcgcagtttctgccgctgtattggtctcagcaatactccttgttaatatatgggcatatgtcagatcttaaactgcttacatgtagtggaagatcatttcctttgtgcgaaatttgcctccattgcttttttg

SEQ ID NO: 55530 - DNA, 68 bp, Glycine max
caagaaagaacttccttataaccaaaaccaacaacaactatggcaagttatcagaagcactacgatga

SEQ ID NO: 55531 - DNA, 84 bp, Glycine max
caaagaggaaggtcacgattttcaggaggctaaagccaagacatcacaaactgcgaacaaggccatggaaactggtaaaaatgg

SEQ ID NO: 55532 - DNA, 333 bp, Glycine max
gggtagtataatgtactgtgttgatcactcaaggctcttctggctattctttggggtcttctcccacgtttaccacgagaggaagcctcggatttaggactcttcaaccttgtttctgtttttttggtttggttttgttctttccttttcaactctttctgcacaagagttgtgctgtaagctatagtgtttgaagtttcggtgatagttggttttgttacttagttggagtgtactatagttaagaattcaacatgtattccaataaaaggtgtaaggacgatggcaaagctgagcctcgttacatcgaaaccgacccaactggtagatatg

SEQ ID NO: 55533 - DNA, 145 bp, Glycine max
agtaggtggattcctctcacattcacctacctaagcccacatacggtaactctcactcacaccatcacagacagttaagacttacatgaacctatgatggtcacaactctggttgctcaaatagaaactcactaagcggacacac

SEQ ID NO: 55534 - DNA, 351 bp, Glycine max
agttcctgtaacaccaccgagtctcagtatctgaattcattaacactatataactctggactagaacaacagaatagacgccatcctttgttcctgaaccctcttgttgttcacatggaaaatctccaaccggagaaaccaaggggttttattgatgcttggtctaacgctgaaagcaatgccaacatcaacaccaccaacaagaactctgctgcatcaattggtaaattagccctttcctctcctgattcagcaatggggggtgctgctgtgaaagaagatgtgggtaatgttaacaagggtttgggcctaatggagcctaatggaaaaacgcacactggtactaaaatt

SEQ ID NO: 55535 - DNA, 368 bp, Glycine max
cttcttcgcgataacattcccaccctcttaagccaaacttttcctctcctcttttcttcattcatattcttcgctacgttatcgaaaacagaattaatcatgcggatccagtggtggctaaacacatgctcctcgggcaactgcgccaccgccacccaccattcaacaatctcactccccagacagacttgaacatgtatgtgatgattccatcagctactcctccatttccgaagcaactgcatccttcaaaacctccaacaagagcagtttcgcactcgaaaggaagctctccaataaagacctcccaaccggttcaactcttcaaaagtctcctccacaaaaatttaactttctcggtttccaac

SEQ ID NO: 55536 - DNA, 288 bp, Glycine max
ccgaaatgcagcaagctttattttagcatacagtgatccgaatccaattgagcgaattcaaacttaagggaaaaaagaacaccactatgttgtacatattagtggtgtctgcaggaacataaaaaatgaaagttatcaagagatgatgcacagctttaattaatttcccaatcactagcacttcaaccccgcgaggtttttgttgatcatctctctcaggacaaagctatccacagatgtttgagtttgtacgttgtaaaaatggatgaaatttccttcaattcaagg

SEQ ID NO: 55537 - DNA, 220 bp, Glycine max
acataaatagggggtttccacacaatttatttaaaatcaaactattaattgcgactaaatcaggtaaacagttggattcaccatgttcaaataagaatgcttcccttttttgttttttggcatttttataagaacaatcagctacgcccaccaacacggacacactcacgggcattcactcagtcccgtgcctccaagcaatgcagcaggcacgtcaaca

SEQ ID NO: 55538 - DNA, 344 bp, Glycine max
tcattaagagaatttatcatctaccattgagaattagcctaaagatttacttgtagtcttaccctgccatcataggataatgatgcaaagatccatggttcacgagaactccatgtgagccctgtaacatgaataaaatatttgtgaagaaaagtttgtgtgtgtgtttgaaatgatgttttgtatgtatgttagagcttaaaaccatgtcaaagttggcaaaagaagcaaaagctaaacaaaactaaagatggattgaaaaacttgaacctcttttacataaatgctgtcttcataatcactgtacgtattaagcaatggatcaacccatcgggcagatgaat

SEQ ID NO: 55539 - DNA, 373 bp, Glycine max
  unsure (1)..(373): unsure at all n locations
agaaaaaaaaatcatcattttatttatcatcacaagatgtaataacaattttgtgcatttttgcctgtacgtattttccagtcctccccaacgcgaaaaccaacaacactataccccaagaaggttttcaaaaacagtccacgatcgcaatttttaagaaaccacaattcaaaaccttgctctaccgaaaatcaaatatcttctctaacagactaactctcctcagcagcacctccatgagttgatgaagaatcatcatcatttgaatcaccagcaacagcttgagcttgatcaagatcttggcctctcctactactcctattaaaaggaaaactaacccaaacttcagcancaccaccacttctcctctctc

SEQ ID NO: 55540 - DNA, 192 bp, Glycine max
aattcacatatatagagacaagtccaaagacaaaccaacggcatttatatgatacagatcaacaaattgcatgcatcgatgcaggggtacaccactggaaatgcaagacacggatagattcgttcaaattgcacaaacatcagaaccataacgtacacttagcaagatcgaaactctaacaatcaccctggg

SEQ ID NO: 55541 - DNA, 362 bp, Glycine max
caacacaaattgccatgttatgctccattgatgtttatggaagttttactaacctaacgttcacattcccaagtccacagcacaaaattacatcttaaacttaaaagcagtactaatttccttcgaactttgggtcacccatgacatgatgatgcccgatcacaactacattgatgacaacgccaataagattggcagataaacccagatctctgatcatccatcatcagccacatcatcagtcaagatgcatcaacacatgttcaacacctggattgggatatcaaacaatgacttcaccacaggaaccacacctctaacaatttatcctattacccaccaaattttgagtccgtcatgac

SEQ ID NO: 55542 - DNA, 292 bp, Glycine max
gcccagttccaacgggaaaatattagttttcaaatttgcaaaataacatcaacaaacaaaagcataacctgtgcaaatgccttcaacaaagtaattacggttcaaatatgtacaaacttaacattaaaagacccttcccaattgacacaatctaattttacccataacccaagtatttttgacaaatttgaaatacagtgcacagggtccgcctcaagaaaagttatggggaccaaaaagaaagtttaacaaaaattaaggctgaaccgaattgtccaaaaaatttgcaaaa

SEQ ID NO: 55543 - DNA, 67 bp, Glycine max
taaaattaaggatacggtataatttggctctctatagccgaggaaagtaatatgtggtactcctaca

SEQ ID NO: 55544 - DNA, 82 bp, Glycine max
tattttttttgtttttattttttattttgttttttttattttttttatttttatttcttgttttttttattttatatttttt

SEQ ID NO: 55545 - DNA, 233 bp, Glycine max
attggtatattctattgttgtatattttgagagaaaagggtgaaacgaaagaagagaacatagagcatatgtaaacacaaaaacgagaacggaagagaagcatgaacagaagtaagcagagagcaaagcacgaaaacagaatgaaaacaacagcatgaagagagagattgaaaacagggcaaacgcaaaggcgacacggagagagacaaaatgagtaaaacgcgggggaaaac

SEQ ID NO: 55546 - DNA, 269 bp, Glycine max
gatagaacctaaatcattataatcagtgaaatagcacaatatctgcatatagggtaacatacgtcacttggatagtcctattcccatctacaaaataagctacatggtatcaacacatgctcatcaatatttccagtcatctccattgtgaactctgcaaagctaaatgggaatcaacaagttactttcagtgatttggaaggcttgaatcacatgaaagcagtataaacttatttcaagcttacctcagctattagtaactccatcat

SEQ ID NO: 55547 - DNA, 146 bp, Glycine max
tttattttttggttcaacttgagcgtcaatattgcccaaccatttcaatagcataacaggttacatgtgaagatagctgcagaagggcgaagatccacatcggaaaaaaaaacattcaaacatacacgtgaagatttcactgtcca

SEQ ID NO: 55548 - DNA, 346 bp, Glycine max
tttcttgagtaaatttgcttagagcatgcattcaagctcaacaacaacatccatgaaatccgatcactcatcaaacggagaaaaatccaaacttcaggactcacaaccccaccaacaacaatttcaaattatagcactagcaagccactactacaacataaaaaagaccgatgagttacttttttattggtgtaatttaagttacagttttgatggtggattggttatctagtcaaggaaaaacagtgccaaccattgagacattgaactgaatcatattgcagcaaaatcagcttaaagttaaaacattgtagaaaaaggttcaacatcttccgaaaaaacaaat

SEQ ID NO: 55549 - DNA, 123 bp, Glycine max
aaagcaccaaattttcctgggattccccactttgtaatgcacacccaccgtaatcaattatcacaccaaagtcacaaagagggctcaaacatttcccaaaatcaggagggaaatattttaccc

SEQ ID NO: 55550 - DNA, 274 bp, Glycine max
gaaagacaaaaaaaaagtattaggggaaaattggattgtgtttttaaagctggcaaagtgccacacgaaaatcatgacaaaaatatcatctttgtatagtacaaattttcattccactttttcccttttagtttaccatcaattttcaaggaattaaattcccgatcacgattctttacggactcgtgataaaaacctgccaaaccttgatccctccaacaagaaaaccactgaaaaccgggaacccacatttaggggaaatttgatcaaaccc

SEQ ID NO: 55551 - DNA, 304 bp, Glycine max
gggtcgaacttatatttggattccaaatatgtattctttgataatgatagaaagaatttgaaaacagacttcattacaaaccatgttacttacaatagtaatatatttatcaaagcaggagaagattacatctgctgggaagaatataaaagaatgaaattggtatgtctataaaattgtcaatttctaaacaattgtgtttacagtgaatttactgctcagacaaataaattcatccttatcatcatcggcttcaacaggaaatatctgggataatacaactccaatgttgatgagaaacaca

SEQ ID NO: 55552 - DNA, 223 bp, Glycine max
agggggaataacataagaatcaaaattcaaggtatttgaccacacaatcatcataagatcaagggaggtttagatactaaacaacccagaccatataggataatttcaaggcgtcctggccatctaaattgcccaacccatcggcacctaaatatccaagatctaattcaaatccgaccgaaaaaagaaacaccatacacattctacacatcaaaactccgct

SEQ ID NO: 55553 - DNA, 328 bp, Glycine max
cccaaatgagagttgctatttgttaagaaagtgttaacaaaagagaggcaaggaacgaaatttgtttccgacgaaaaatacaaaaatatcgaccttttgacaataataatgtcaaggtacggatgcccatcgtcactcccccaaatgaaagttgttgcggccttttgtactccattggctaaaaaagaatctattcaaagtgttcatacagatacaggggaaaggggaaccagatcactatcttattgtttcctatgctgcaattgctgtcatgtacctccagctttcacgactaagtcctgacaagtgaaccttcaaattcaaattc

SEQ ID NO: 55554 - DNA, 330 bp, Glycine max
gatttgaacatcacccagagcataattatattggcagatagaacacagagccataactaggacacatgatactcttttaaattactattatacgataacatgttcctctcataccaaccaacataaagacgcatacatattaaactcgtggaacaacctcctaagtcctaatatcataaccaaaacccacaacacacgaactatgattaaagacaatttttcaactcagataacagataactaaggggcatgcattgcatgtgctcagcacttgagttccttcaatccataggcaaagtagataaaagttggatcagttacaccttcctt

SEQ ID NO: 55555 - DNA, 348 bp, Glycine max
ttgaaattaagacattcatattttaattgaaagataataaccattaaaggagcaacactgttcaacccaaccaaaacaattacatcagtaaaacaaagttcatgtccacatgttatgtaattacaactttgtacattggatggttctaagtttcaaaaagtaagctacccattttttacgtaatgttgtgatcgcctccgggtctagtgccgagccatcaccgaaccacacactccaatcactcttcaactctgcgccaattatgttccacatccaatgcatcacataatacccacactcatagcctccgcgttgaatgtgagtcttcagttcaagccactggggtcc

SEQ ID NO: 55556 - DNA, 104 bp, Glycine max
ctattcaatatgtacatgtttcttcccatggctttaacaattaccacacataacaatgatattaatattaagccttggaacatatttaactcatcaaagacagc

SEQ ID NO: 55557 - DNA, 259 bp, Glycine max
ttatctttatcatgcttgccaaattaagatcaatcacccactaatttggagatccataactgatcgttcatgtcgcacacatttacaccattatctgactaacttgttcctaaactgaacgtacttttactaataacactcgtaatttttttcccaaacattatcgtgactatgcgaaatatatatcatatttacagcggtatagtgaaagactcactacgattctactagcttgtggtgatctccctcagcaactcag

SEQ ID NO: 55558 - DNA, 171 bp, Glycine max
ggataatgtgatatcttattagtgatagcatactctctttttttattgtggtagaatcaaaaacacaccaaaaaatataaacgggaaattaaccaagatgaaaaagagttgaaaaagaaaaaatgtacctttaaatgaagactcaaaaaagacctcgaaatgggaaatttg

SEQ ID NO: 55559 - DNA, 296 bp, Glycine max
tttttttttttttttttttttttttttttttttttttttttttttttttttttttttttttttttttttttccgcaaacaaacaaaccattatttgtaaaccaacaggtacaaacatccaaaataggcaaatgaatgacccccaaaatgttttgttcggccccaataccaagcaatcataacctactaaattggtaagatttgtaattttagcaaggtgccgaaaaaaaaacccatttatacatttccaccctaaagggaaagccaaccacaacttataaaaacacttccttgact

SEQ ID NO: 55560 - DNA, 260 bp, Glycine max
atatcacaccgcgtatttattcacacatgtcaatctttattcgctcaattgcgagtgattattgttcatgatcagggagatcgaagcacgctgcagcaacaaggaccacaacacaccgacacatgtgttaggtaccccattgtcccccaccaccggtcaagtagctcgcatctctcactgtagcattgaccagcgtcgcctgcaatgcatccataatttctatcccaaggaaaccctccacatgaaagaccggcatcagc

SEQ ID NO: 55561 - DNA, 214 bp, Glycine max
caatcataagcatttggctaaagtttactatcgaacttcgaacccatggctatactacatagacactaatttatgatgattttacagttaagatgccgacaaacacaactgattccacatttagtaattcaaacatatgagcggtgttacatcttgtgaggaatcctaaattgcaaagttgtagcacccgttttatgttagcaagtctccgatc

SEQ ID NO: 55562 - DNA, 300 bp, Glycine max
gaacatagatgtaactttttttcacttggcaaatgggcaatgagtgtgggaaagtaccaaagacaccgcatatttgcaggggaagggactagagtggggtccagcaggtaagaaaaactgaataaaggagtcagggttacggtgctgacactgcaaataattgcacgcacgaataagccaccgacacacacacccccaaacctgctctctgcatctgcatctgttcccccaaaccataaataaataacactttccctcagtcaccacaatttcattttctttgtaaacatacccaccacc

SEQ ID NO: 55563 - DNA, 361 bp, Glycine max
aagtccagcaaccaaatatccacttccaaagtatagtcagtatcaatagtctactgcagataagctcattttcaatgaccactctgcactaacaacatacacccactgatgacatttacataaaaaaaaaaaacctgcataacatctagtctacctgctttttctaaactttccattgaaacatggaaaagttggacagaagagggttttccctctttgccgtgttcttttttaccccccaatttgtcagcattatcacctgcattttacaaaagaatcatagacatagagataccagtgtgacaacatatatcagattctctgcctgacccttctaccattcgtgtcaccaccatctgaa

SEQ ID NO: 55564 - DNA, 51 bp, Glycine max
tgtgaacataatatgcacaatatttttcttttaatatactggcatgtaaat

SEQ ID NO: 55565 - DNA, 381 bp, Glycine max
ttatttttttttgataagtcccgagttaaactctactcacgtgctttaagtataataattggtggtcaaagtcaacattgtcagttccgaatgaggcacaccactatcatcaaaacatcgtccaagtcagcatgtttcatttcccccttcccgaatcagttttaatcaatttctgatgctgccataataaactttatcgggtaatctaacatctgcgtgtctgcatttcaacacaaaataagggaacccttcacagcacaatcacggggtctaaatcacatgagcactatctccacaacatacaagcagaagacacatggaaaaagggaaaggagatttctatacaatgaggccgtgcaaaaatatacatgcacaagccac

SEQ ID NO: 55566 - DNA, 317 bp, Glycine max
ttaataattttaaaagaattttataaattaaaattgaccgtgtttttcactggcattataaataagggatcctgaagcattgtatccaagacatgctcaagcagattccgatgccaatttaaaaatgctaatgccatttctaacatagtcgataaactcaatacagagataacaacagaagacccaaatggtcaaataagaaactaactaaacaacctgagcaattaaatccatacatgcttacacacacactttattccgagaaaactatcaacatgacagtgtgcatttgaccaaaaacatacagcatatactac

SEQ ID NO: 55567 - DNA, 366 bp, Glycine max
ttataattctttttatgcagacatcgccaataactcatctaatcaatttcaacttcacaatatatatatgtcattgatacaatggttacatggatcactcagcatcctgcttctaactgcacattccatatcatgatttctagacatacacattagccataaggatattttacatatagtacatgcctattctctagaggaatcagctgaaaataccgcaataaaccacacatacagtgaaacacatcggttttgcaacatacatacatatcacgcatgatatctcttcaagcctgtagaatatctggattgattcccatttgtaatcatgttttactaatgtacacacctctacacgtgatgaat

SEQ ID NO: 55568 - DNA, 344 bp, Glycine max
aatcaaacgcttaaccgataaaattgaataaataggccccaaaacaaccacagaaccaaaataaagcttagcaacaagccaaaaaagtcatcaactaaaggttaaacaacaaagcaacttaaccggtcaccggtatataatacccaataccatttggaaatgtacattatttcaaaccaagggaactttcgcaagtcaaaattacatttagcgcttagcccattccaaccacaaagtacatcacgcaaaaacaacaccttgttgcgttaagttgtaatagacttcgagacccatgccgtcaaggatcccctaacccttgaaaagcaatggatccctggaaaagg

SEQ ID NO: 55569 - DNA, 306 bp, Glycine max
ttttattttttttttatttttttattttattatttttatggattttaaattattgtttaagagccaaaaagtggattcccgtgcaataaatgccagtcaaatgcaaaaaatcaaagagacggcgtatgaacccaatatatgcaacccatcaacgggaacaacaaaaatggcttcatgacaacagaatatagacaagtaaaaatgagaattatacgataaaacaatgtgaaggacacatacttggaatcaaattgcaaaagaggatcactcaggaaagtggatactggcactcaagaaaccaaaaga

SEQ ID NO: 55570 - DNA, 360 bp, Glycine max
taagttacaatctaatatagatttacatcggatcgtgttttctcccctactacatttgcaaaaattggccctagaaagttgaagctcactgcacatatccctataacacatccaccacaaaaattggggaggaaaaaaagtaaaacctgtatagggcgaatattggcgccctctatcaataagttaatataactattataagtaaaaaatgataagaggatcaaccccccaacccagaatcctctgcagaatgaaaaatgaactgtaagaggttgagaaggaaaggtaaaaagagaattactgctggtgaatgttacacataagcaacaattaccatgctctaagcccgaaaagcctact

SEQ ID NO: 55571 - DNA, 354 bp, Glycine max
ccagaaaccgtttgatcagttatagtatttacagtatcagaatccaatcgaatacttaacagactaaaaacattacaaaaaaaaatgcatttcctctaaaaattcaaacgaatacttagcaaactaaaaacatcacaaaaatcgaaaaatcccactgtggtaaaaaaaagttgcagtctcgtcattgtttccgaatacaacagaaaaattgcagacaaatgcagctgatgtgacgtcaattgcaatcacgttttttcttaaaaccttactgcgaatctgcgattgcggtctcatcaccgcagcctttgatatcgtagaaaattgcagaaaaatgttgaggacagcgcagcatca

SEQ ID NO: 55572 - DNA, 219 bp, Glycine max
tttatttttaaaccaaaaaatggctggatttttgaattacaacagggttaacagaaaaatttacccaaacttcaagcttaaaaggcatgacaggtgaaacaaccacttaaggaacccatctgacgggctcaactaaaaaatatacccttgtgaggatttctggaaacatgatgaggctgtttggcaaacgctgaacttcacatttccagattttttttc

SEQ ID NO: 55573 - DNA, 73 bp, Glycine max
aaaccacaaaccggatagaggtgttgctgcaaacttaacattgtgcgattacgcataatgtatatggttaaaa

SEQ ID NO: 55574 - DNA, 327 bp, Glycine max
  unsure (1)..(327): unsure at all n locations
cacaccatcaccaagagtgaattagcataaactaggaaaaaaaaatgtaattaggtaatgagatactgaatcactggtagaaaagaaaatcttcagttgtcaatatgcggtaaaagaaaatttaagtgattctacactactcgacgtgccatgaagctaattgaacgaattaaaaaaatggtgtgggatataaatttaacagtcaagagagaggagcaccaagatcctcgtctaccttaccctcttgaaatctcttgagaaggtgtanctgatgtctcaagtgcaaaacctcttcctgaagcaaagtaggaagattttcaattgaaa

SEQ ID NO: 55575 - DNA, 296 bp, Glycine max
aaaatctccttatttaatttttgtgttctaaatatatctcacgattagtcaaagggtagtgggtaagaaatcccccagctgcggtttgaaaatttttttttttccaaaaaaactccggaggagaaaacaaagagtattctttagaaaaaaacgcaataagaaatgataccaacggtttttttacaaaactggcagagataaagatagatcaaaacagcagaaacgtaaatccctaaatatgtaaaactccgagaaaactgtgaggatccagctactccaaaggaatatgtattatg

SEQ ID NO: 55576 - DNA, 78 bp, Glycine max
actccgtctaattgaaacttcgattaccatatgcaatccattcaatcaaattttgttttggcatgtttcccaatcaaa

SEQ ID NO: 55577 - DNA, 92 bp, Glycine max
gtgtattattttattttttttcttttttttttttttgaaaaaaaccacgactaaaaaacaccaggggaaaaacccaaagtgctccaaaaaca

SEQ ID NO: 55578 - DNA, 263 bp, Glycine max
ccagaattagtgttctgcattcagtcacaacactatttaactatgatgttcttaccgaacagtacaattctctctcacaaatcaagcacagctctaaccttaagaaaaaatcatgccgtgacaataaccttatacacaaatcactatcattacatacatgtaatatataccaaaaaaaactaaagaaaaataatgcaatatcaaaatataatgtaagtagtaatactagtagtagtacttaaggattcggctctgcacagctc

SEQ ID NO: 55579 - DNA, 361 bp, Glycine max
acctgaaaataatgacaattttatcacatttatgcagccataatgtcttgtcattttcataacccacatctaacatacatcctgcagtgaaccagtttttcatcaattcttcaagcaagcattgacaaatacagtgtgttaccctttcttttacaaattcaagcggcactctacaccatgtagcatttataatacgggagtctaatgattcaatcgctagcctgtgacggagtcacctgattcaatcgctaccccgctcatttgcaatacatgttgaaccacatcgcaatgtgaaagtcgccttcaaggtcaggattgtggcctttcaattccatgaacagcatttggaagaacaatgact

SEQ ID NO: 55580 - DNA, 82 bp, Glycine max
ggagagaaaaaaaaataagatacattaattgcactgtacggatttgcattaatacaaagtttcggaagggatcttcaactaa

SEQ ID NO: 55581 - DNA, 228 bp, Glycine max
tcctgacagaaagctcaatttattcccatcattactgctttgcaatcaatacaaagactattttaccattaagtacttactaggcaatgatactcacactcatcctttcttcatacatctttacgcaaaaaaaaatcatgccgtgacaaaattcttatttccaaggctcaaactttaaacccatgtgtgagaaggcactgcatgatgctttatcatgttgcgattggc

SEQ ID NO: 55582 - DNA, 316 bp, Glycine max
  unsure (1)..(316): unsure at all n locations
tggtagcggaaaattttgcacagcttaaataatgtggattatttattagtagaaatttcacttagaatacaaacgactttagtgaggctgcgacaaggaagaccaagaagcctttaaagtttcagcgcatcacaacagtaatagtaaccaagtatgaacgacatgttcgttggctaattggcacgtgccgggcacanatactgatctacacagaatgatgatgaatgacgatttatacaataggaagctacacattacaggtgtttgatttaataacagacgaatcccttgggaaacacctttccacagtagttta

SEQ ID NO: 55583 - DNA, 92 bp, Glycine max
tttttataatgtcatctgccctttcattcatgtatttctctttactgcatagtaccaattgttgaacaaaccctaaatcttgaaacttacgc

SEQ ID NO: 55584 - DNA, 316 bp, Glycine max
gtaaaattgtaacatgtatacgcattcggtataataggaaaattatcttatagtcatggtgcactgaaaatttgttacccattggaaattacctctccaattacaaaggtaatcatcgaaatctaaatgcttgaagaacgaacaacaggttacatcaaggggcgaacattacgatcagcacacccttgctaagagaatatccaaaacaatcattggggtcaggtttaaaaaacatgaggggctaaaatcacgacagtactcattaggtgcctctgattttgacccagagaacccaatagcttagcgctcaaactga

SEQ ID NO: 55585 - DNA, 310 bp, Glycine max
gcgttgcgagatataatcaaactggatataacgttaatcgcacatctacacatcgtccacagtcaatgtgaaagggcatcacgtaccgaagcactttctcattgaaactgcaaccagatttaaacacttgcttctcatgtcagcgaatttcgtaactggagtctcctcgaacaggtacaacatgtgccgacattgtcatggtttggcaagcatatgcattgccggatgtttcgatgagaaccacacgcgcgagttaaatgacacactggtatgtttttacattcatgcaagcttcatggtcagcattatg

SEQ ID NO: 55586 - DNA, 395 bp, Glycine max
aactcaggagtcggccgttgctctttttttttttttaccacatgtcacaagatactttatacaatcaaaataaatgtaggtacactcaaccaaagtacacacagctaattgcactctttatgtcccgacagatatcaaataaaaaagagaatgctagttgcactattttttttatgtatttatgactggtgaatatatgagacatttaaaaataaaataggaagatcatggtctcgaattcttcacggaccattttagttaatagaaaaatttcttaaccaaatcaagtcagtcagcctcgatagatgctagaggtgctgactttacttgcatctgcttctccttgaccttcttaatctacaagtaattgcagttggatcaagacaaatccgata

SEQ ID NO: 55587 - DNA, 320 bp, Glycine max
ttaatggaaacgtgatttatttatttttctcttaaattgctatgcatggggatatgaatttagactcatttgcatgttggcaacacctacccaagcaggcaataattaagtagtattttgccagtgacatattttcactcctccttctcaaactctagcttgatgctcagagttgtgctggttagattctcaaatggtggtactaatgtcaccagattacgatcatcattttcggcatccatctcctccaacaaatccgttattcgcagtgtcaaactaggtttgatcttcatgaccatgttcatgtgtgaatggcaatg

SEQ ID NO: 55588 - DNA, 374 bp, Glycine max
atttaagaatagattacaaatactaaaattaaagtattattatttttatattaggcattgtgaatattactaaagaagaaagagccctagtcaaaaatcaaaacaaaatagataaaagaatacaatgcatagtttccaaggctagcctttagcaacaagttaaatcccaatttccgataatggatcatactcctttattgttcgtccgtcacggtcacggaattgcctccctctaaccgattcagcgtgatgctgttgttcattcgttttccttcgcacatagcaattatttcttcgtctataatttgaagcttacacccaagattagattgactaggataggacatttaattccctgaatttgtggtgttaat

SEQ ID NO: 55589 - DNA, 141 bp, Glycine max
tgttagactttcagtaaatttactaataaccaaatttacattcaatgggacaaagatatatcatacacctcaacatgagcgggtttccatgtacagaacatgcaaatcaaggtatatccccctaaaacatagttacggtaa

SEQ ID NO: 55590 - DNA, 218 bp, Glycine max
agaaattaaaaccattcaaatattagactatatttgttttcctcgtttgttcgtgttactcggtgaaacgcatgcctatgactcaaacttacatcacatttcatttcactaagttcataccaatatctacaaacagtaaaaaaagctcaatggtgcatcaactaaacaatcaggattttcatgtgcacattcacaatgccaattgcactcacatgttc

SEQ ID NO: 55591 - DNA, 373 bp, Glycine max
taatgaataaaaattaaatttaaataaagaaatacaaccatcattccattcaactgttagaaaagaatttgactgcaaaaccgtatcctttgtaatttttaccgttattgactccttttgtaatttttacacgaataactatgtttttacaaatacatgcggcggtaaaaaaaatgtaaatactaatcacccctaaaattttgtgaaattacacaaacagataaagttcaaatacccctaacattttcagtgaacgcatgcgccattcaacgaccaggcatataaatttgattgcaaaactgtattaaaagaagttccggacctacttaaaagaagaaaaaaatcacggacctaatttaaactttttttttta

SEQ ID NO: 55592 - DNA, 236 bp, Glycine max
atttcattatagtaaccacatttactattgctggagtaatgatcacgtgaaatcacattagttttatggactacgtgcacttacgatccaacatgtaaatagcatacaagttacacacacaatcaaatactgcacagacttaagcaagaaataggcagtaaaccaacgtataggccagtgttggtcataaatattgcatcccatacgaaaatcaacacccgtttcaaatgcaacca

SEQ ID NO: 55593 - DNA, 400 bp, Glycine max
ttatcacagaacgtatttattcacataagtcattttttattcgttacaaatcgagtgattataattattgttaataaaaatgataacatgctatgctaacaatgacgacaacacactgaaacttgtgtttggtacaacgttgaccctaagcaccgatcatgtaaatgaaatctttcactaaagcaatgagttgcttcgctttcagtggatcgaaaatttctatcccatggaacccttcttcttcaaagtccttcatcacttgcacccccttttcttccatcaaccgtgccagctcctttccacgatccaccaatgggtctccaccattgccactcaccaatatcctccaccaatgctccctcatcttatccaataatttctcaaccccattctctgccgt

SEQ ID NO: 55594 - DNA, 283 bp, Glycine max
ccgaaaagcgagacccagaaaaaaaaaaaaacccctaaggaaaaaaaaacaaaaaccaaaacaaaaaacaaggagtaaaaaccaggaaaagggaaaccacggaggccagttgtaaacccaccacgctaacaaaaaacacttaaaaaaaaaaaacttaaaccaccattaattaaaggggggaaaaaaaaaactccttaaaaaaaaaaacccaaaaaggggccaggaaaccccaactacacgggaaggaaaccaaccttggaggtacccccaaatctaaaaataa

SEQ ID NO: 55595 - DNA, 344 bp, Glycine max
tatatgaataataaatacacctctagttgtctgattaaagttgtcaacacaactgatacatcttaaaattacagggggaacagactcttaccaccaggatccgaaacaatcatataactgaatccacaagaatatgctaaagattagagctatagcactaatatcctacgaatccaaacaaatactttcatctccatcatgaatgatctacaacccttccagactacctaatataggatattgctgatatgaaccttgccatggaaacgtgtcgttacctccattggtccttggcgcaatctgacttataaatgccatggactcacgtgatttacgtggagttt

SEQ ID NO: 55596 - DNA, 385 bp, Glycine max
aacacaaacaaggttatgtcttctattcgacaattgtttcgataattccaaagtatcaacttatttgtcagctttgtaaaattaaattgagaaactttgtgaactcacaaaagatataaaacaaaactttagtaatttgaatgtgaagcctatgtggttcaactatcaggcgagtgcgccaaaacaaactaatacagtcgaacagggatcagctagaactccatagccaaattttcaactgaacctgtacctcatcttccacggatgaataactgaacatacatgtttaaatatcagctagagagcaaaagccttaaaaacaaaagctgagctctcagggtttcctccctgaatacacagaatcaccttaaactcaggcaacctg

SEQ ID NO: 55597 - DNA, 174 bp, Glycine max
attggtttattccattgttggttccatactgcagttatatatttgtaattgtccaactttcattcgaggggagccgaagtcattcatcatcggtgccaggtcacattcaacttaatgctacggtatgttgacctggcgcaagaactgctacgaatgaaggaatgaaatacatgt

SEQ ID NO: 55598 - DNA, 305 bp, Glycine max
gccacagaccaatgtactattactcaattaaacaaaagatcattcattactcggactaagatacgaccacagatgtattgccctgttgcatttaaatgatatgcatactatggaattcgaaaagaagatctaacttaaagttacaaccttttttttatggatccacacataaatttacccctgacaattcattattcaagcaacggcacggtgcaaaacagttggcccaaatcatcttcaaaaacttgccatacaattgcccagtctttaccaggaagttccttttttcatcaatttccgcaggg

SEQ ID NO: 55599 - DNA, 389 bp, Glycine max
tttttgcaagcaactaaaaatctaaatttacatttagtcagttcaaattcattacaaaaccaaagatgaagaaaaaaaaaggaccatatatgtaaaaaaaaaaaaaaaacttgatggtttctacctcagctatcaacttctgtgatggtagttctagcccccagtcatctcaaattaaatctgaatctgaatattatgattgcacagctttattttgtttgatacaagccggtgccttcaactcctggcatttgcatgttgttgtagcctcaattgggatcacgctatcagtggatggctccattggaaacaaagggatgttaccaacagcatgattgccaccagtgttcatctcagtcaatggagcacttctagctctcagaccttcc

SEQ ID NO: 55600 - DNA, 345 bp, Glycine max
gacaatataacagcaaatctctgttgggttacaagtgtaagatgaagtttcacatcggacaaaagtggaaaagttaaacatcatagtgaggagaaaacccatatacctaagccttaaggttttggtaagaatcaaaatcacatacaaactatttgatacacagaacaagaccatacagaagaacaatacaagttaaatgtaagacattaacaaataagttggtcatgtgagctttcagagagacaataaacttgacaaaacctcaaatttcgaattcaaagcactcagatcacataactcttaatcagttatggctgatgagacttttagaaccaaagctgattt

SEQ ID NO: 55601 - DNA, 156 bp, Glycine max
gctcaatgacaatgattttgcattgctctctataatattgccatttacagttacttacacgtctcatgcttactttgactaagctctataaaaatacataccggaataccactacacagacatatcgtataaatacaatatgctcataatcacatt

SEQ ID NO: 55602 - DNA, 358 bp, Glycine max
tttttattattttttattacaatttaaattctaaatgatttagtaaaaaacataagtccttatcgatcacttatacagttaataacattaatcaaccaggcacataacatttgagacgagatcaccacatataatatgtcagaaattaaaccatttgcaacaagcaaaaactttgattatgttacttagtaagataccaaggttactacgaccaaagcatgtccctcactcacagggagttagccggtagctagtcaggggcaaatgcagattcatacttcagaaactgaacgacttaaggggtggttccaaacaacagcaaggcgctgaatcccttaacaatggtacgaatcccaag

SEQ ID NO: 55603 - DNA, 333 bp, Glycine max
aacaacatcaagctttcaaggattcgggaaccatgacatggatcaaatcaacccttcactccattccataatacactattaactaattacctacatatgaaattctctctaacgccaaatccctttcactaggccctaaaaggcaagctccgttaaactgaactatttctccacagattatacagcatctgccacaacattaaataccacattttacctgatgattaatgacaacgtgaacggagatcatcaaaagggacaagggaaatggtgttagccagtagatccgggcgcatgtaaacacctttacacatgacttgattgaccgcaatt

SEQ ID NO: 55604 - DNA, 298 bp, Glycine max
ttgatataaaactttatttatggggataatcatccataagatccgataatcgaactatgctcatatgcattaataaaaaggatcagtaaggatcttcaactgtcatcaggtcatacatgagtatggcatatgaccggtcacagtcatcatttcatgatactatcctttattgacgatgaacaaccatccatctagattgtacaagtaatcggaatcaggcttcagttggtattcaccgctatgcttccgcttcaactatatcatcatcgttaatcatgacaacacaaatgaaatcttc

SEQ ID NO: 55605 - DNA, 351 bp, Glycine max
tggaaacttaacatacgagaactactctttgatgtaatgttaaaaatttattggctacacgttgatagcagaagcgaatccaaatataatagtgttatacaacaagaaaactgagtaaaaggcacaccgttctcatcttctttggtttctttgttctttcctccatttcccctttcgttcgaatcactgtcttcgtaccgttaggcccattttcttcccgcttgtgctttctggtctggggctgatactctgattgttcattttaataaccatatgaatcaattttttctgttctgttgggctgcatcatcatactgctctgcaagtttctttactttctcgccttccttt

SEQ ID NO: 55606 - DNA, 194 bp, Glycine max
accaaaaaccaaaactaaagctagaaacatcttgaattcttgatacataaattccaaaatattaatcaaataataataataaaaaaaagtgcctctgatctgtgacttaatttacaagaccacagaaaatatacagaacaaacaacaacaataaggtaacatctgggatcatgttatttacagcaacataagat

SEQ ID NO: 55607 - DNA, 275 bp, Glycine max
ggtatttttttttatttgtttattttttactgatatctattatttattattggtttttttgatttttacttcattttcgatatagttgctgacagaatgaatagcttgacaactcattggttcattgcatcgcacgacaacacatactgatctattaaaaggaagaacgatggatctctgaaatatgacacacagaagtacagagacagcctaacgatcacagaaagatactgatcgccaacagaagcagcatcaacaggagttggcagggacaa

SEQ ID NO: 55608 - DNA, 122 bp, Glycine max
tttcttttttttaccattttccacaacttgggctacaaatatcttcaattctctgggacatctattcgaagattataatcaaattataccacataataaaatggctctgatctgtgacttaa

SEQ ID NO: 55609 - DNA, 347 bp, Glycine max
gtagctaagacaaattcactaacaacttttcatacactgtcatagaatattattgacaagtaattcaaggcagaggagagagaggagaaaattatgaacaaaaagatttaaacaaaaaaatatcctacatctcaaaatgcagggttaatctttacccaaatcatccacatgactgtagcaaaataggaccaactgataaactaagcatgtcactgagagcaacctggacatcctttgacccatgttcacaacgtaccaagctagagatgagagggaagaaatgagacaagttcttctcaaaagaagtatctcccagactacagatagcctgcagagtagccacaatg

SEQ ID NO: 55610 - DNA, 213 bp, Glycine max
gtaaaaaaaaaaaaaaaaaaaaaaccaaggggttttattaaaaaagaaaaaaaaaagaaaaaaaaacaggataaaaaaaaaaaaaaaactaaaaaaataaaaattttttttttttttcagaaaaagaaaaaaaaaagaaaaggaagaggtcaacaaaaaaattctaaaacaaataccaggggtcctgcggaaaaaaagaaaacccaaccaaaa

SEQ ID NO: 55611 - DNA, 295 bp, Glycine max
ggactcaaattctttggattgattacacctgataaacaaaactgcaatacgaaaaaatactgagataattacaactaaatgcaataatgagcacacacaataacaattgtacataatgcacacgatggttccccaccactcaatgaaccccccaaaaagccgatgcctcaaatgcaagctactcgaggcatatagtgtaaatttcatgaacatctttccatttgaaaggtcatgttctcacatctttcagtgcaccccctttttcaagctcactgaccatatctttaagtgatgt

SEQ ID NO: 55612 - DNA, 283 bp, Glycine max
gatataaggaatgttaaatacttcattctgaagtgaacggaggagacaaacattaaatcctataaaactgagtaactgacactgaatttgttttcctaacagaagtttacatgttctttctatggatggttccagttcatcttgtaacagataaatcaaaatataaaagaacttgtattgtatgtgacatcagtctattagctgcacagctgcaatagcaggtatcttatctctcagcttctgtgttaaggcaacacgaactgttgtaaccccagctgcaagt

SEQ ID NO: 55613 - DNA, 384 bp, Glycine max
tttttttttttttttttttttttttttttttttttttttttttttttttttttttttttttttttttttttttttttttttttttttttttttttttttttttttttttttttttttttttaaaaaaaaaaaaaatttttttctccccccaaaaaagaaaattttttaaaacccaaaaaaagggaaaaaaaaaaagggaaaaaaaaccaaaaaaaaaaaccaaaaaaaaaaccaaaccccaaagaaccccaattttcgcaaaaatttaagaaaaaaaaaaaaggttaaataagtaacaaaaacccgggtattttattaccaaaaaacaaagggagaaaaaaaaaggtcggtataaacgcgaaaaataacgaaaaattattaccc

SEQ ID NO: 55614 - DNA, 329 bp, Glycine max
gcacattaacttgataccattaagtatatcatataatatgtgctacaagttgatcatgttggtcccggttcaaatagaaaccgaagagatgaaacaccgcacattactgcagtgataaggccatcaggtttcagacggacaacacgtacacagaagattagttgtagcaaactcagacacagaacagaaatacggccgtacctgatgcatgagacatctaatggctacagcagcggcctcactaacacggattgtcgcagatgccatcagagcagcgaactcggtgagaatctcatcgtcaaccctgtagcctacatccccactaaggt

SEQ ID NO: 55615 - DNA, 194 bp, Glycine max
aaaaaaaaaaatattaaaaaaatcccaaaagggcccttgaaaaaaaaaggaaacaaaaaaaccagtacccccaaaaaacaaaaaaacaatttaggggaaacacaacaaggggacaaaccaaacagggaaacccaaatttcgggaaaaaaaacacccaaaaattttccaaattccatcccaggtccccgggaaaa

SEQ ID NO: 55616 - DNA, 104 bp, Glycine max
tttttttttttttttttttttttttttttttttttttttttttttttatttttttttttatatatttattttttttttttatttatttatatatttataatatt

SEQ ID NO: 55617 - DNA, 305 bp, Glycine max
cagagataatcacccagctactttcaaccttgttggaccactctaaattagtttaataatacaacactttgtacagaataatactattaggaagggggatatgcttgagctggttgtaaaaaaattttgacagtaaatcttagataacagttcaaaaagttacaagtaaacaaaagtgccatactttcaaccgcattagacatgacctgaaggaggtataccttctgaaagagtgatgaatcattcatttgggaaagtgaaattagtgatacccagcaagagtttgtttgaactccaaataatga

SEQ ID NO: 55618 - DNA, 348 bp, Glycine max
ttattaaatgatataaccaattaattttctgttttgaaataataacccgcgtaccactagtgtacactatgtactccccctttatcacactcacaaaattaaatatacgcattcatgcaatattccgttaccacaagtcacaactatcttacagaaagtaatctttcactatggttactataagataatcacgtacatgccttgctccaatgcaaagaaaaacgttatcttagcaaagggcaaaatgatacttcacactacacttaaaagaccatatcatttgtgaattcttcaaccaaatcatcagtgattagacatgccatctccctttccaatgtatcaatatga

SEQ ID NO: 55619 - DNA, 293 bp, Glycine max
ttttaatgacgaaaatataccctattaaattatgaattttgttaaataaccgtgcgcgaaaggatgctgacactacgccacggctgtttcttgaactgttactgggactatgcctacgtgaatcatcctacgaagcacaaaaaattgaacaagttatgtctttacatgaaaaattatttaatggttccaggaccatggtgtttctggtcaatcttcacatgacatataatcaacttttattaacttttttctggtaaattaaaaaaactcagctacatgaacttactcctggt

SEQ ID NO: 55620 - DNA, 323 bp, Glycine max
gacaaaaattcaaagtcatgaatttttttattatttcatacctaaaaatagtaaaataatttatgacttacctcatttgaaaattaattaaaaaatatccccatttaataaaattccaaatgaaattaccccttttgttggaaacctccattaatagcctttaaaccaccatacatatagcaagcaactatgaattaaaatttaatgagttaacttccccgacttgcaaatcacacataattggaatatctaataagttgatcggttgaagcctaatcaattctacttggaagtgatatggaggagtcaagccatggtccccc

SEQ ID NO: 55621 - DNA, 281 bp, Glycine max
actgattagcaaaattcaattgatctctcactttatgcagacttcattctcaattgatccaacttttccatacacgaataatgccatccaactagagggacagtaatcaaattcaatcactggagcctgtcgaaagtagtttaaccttaacagttctttcaacatcgtgatcctttagcatacgtatgttgtgagtggtagagaagactccgctaccgcgagcagcctaaacagatctaccagaattacacgtgaactgctcacgcttcgatgaaacatct

SEQ ID NO: 55622 - DNA, 265 bp, Glycine max
ccaaaacacgggggggtctttcaaaaaaacaaagttaaatccccttcccggttgcaaaggtttgaccaaatacacggaattacaaaaattgacaaaaaaggaacactaggaaaacaaaaagcaaaattccaaacgattatccggggaaaagtcaacccacaataatacttatcaacaaaaaattcggttgttgtacccaaaataccgattccaaaccccactagtcccttcaaacaacaccaacttcgattgatcagtaccggta

SEQ ID NO: 55623 - DNA, 357 bp, Glycine max
aaaaccatacaaacatcctggtagatttacaggagaactttaatcacagaacattccttttactacttaaaaaccatagtacacatacgtagaagtacatgggaacactatttatgagacaccttattataacttatgaaacatacagaacatgctagttgtattttttagagatgaaggcccagttgccaagtttctccatgtagagtccttctctagaaatacacgcatgtcatatttaatcatatacaggccttgacgaacgtactttatagcaacgcaaactcgtggaacagtataagtcaaatatccgatgcaccgttcccagcgtgtgagagcaacacacacctctactcc

SEQ ID NO: 55624 - DNA, 228 bp, Glycine max
atattaatgttatttattagtaaataaatataaatttaaatgttaaaatgtactttgtgataaatctaaaaataaaaagaagaaaaaaaaaaaaaaacaagaagatatacttcaaaaaaaaagagaaataagaagaaaaaaaaacaagtgaaaagccacggaaaacaacaaaacatgtaacataataaaaaaaaacaataaaaagaacaaaaattagcaatgcacaga

SEQ ID NO: 55625 - DNA, 318 bp, Glycine max
aaccgagcaatgcaaagctttaatcggtcaaaacattgtgttatttacagtacatgcaaaaacctgggggaataatacagtttctagtcagagtagtaatagtaaccatacatcatcttcaaaactagtctaataaaccaaaccatattctaatcacagttatcagataacttacaactccgtaagtaaacaaagaaaaacaatcttccgaaaacatggaaccccttgtttgaaaactagttacaaaattcaaaattaaagttgggctttaaaagctttgcactgccagcacctgcaactgatccagaaaaacttcca

SEQ ID NO: 55626 - DNA, 307 bp, Glycine max
atgttataatatttgtctagagttacaagtgcaacacagcaccaacacgtaaaaatagcaagctaaggtaaagaacaaaaatgatcaggaagactccaaaggatttaaggcaaactaactcagcccgtcagtcacagtttgacgctcttaatcacaaccccacccccaagatcaacacccaccagcacggggaacaaacattccaaatcgttgtacagagtaagaggaattcttggtcgaaacgattttcatttcgagccagctggctttgatatagtcttctctggtgcacacgggcactctagga

SEQ ID NO: 55627 - DNA, 318 bp, Glycine max
cttttcttcttcttctcgtgcccagcagacaagactttgaaacctacatgctgaataagcaagatcacatcaacacttgttactccataatttgaggacaaaagtcatacaaaggtcacttgggaatcaagcggtaaaatgactaccagattgaccctgtccttatcccgcatcatgtgctaacttaaaaccagcgaaatgacaagtgtgccagtgccaaacaaaattgatgagagtggtaacgagcacgattaccagaacgaatattacatcgctccagacgagtagggaatgactacggctagaaagatttcaagc

SEQ ID NO: 55628 - DNA, 377 bp, Glycine max
tttgaacaaagaagggcagacataaatatatttatagaacacaaagtagtacacaactacaaatccgatgaaaactatgtacacatactcaaaagaacacccaaaaaacacagtatttccagaaggaaacatgacaagtagtacacgtcttttcattttttcaatacaaacaaacaactagagctaatttcctagaacattatgtggttcaaagttctccttgttggaaattttgaaaacggaatccttgtcacttgtcttggcaggagaaaactcaaaagtttcatcagacctcttttttgtaggttgtactggggttccaatgtgctgggagagctctctttggttgccacacagagtgaatatattttgaattc

SEQ ID NO: 55629 - DNA, 368 bp, Glycine max
aatatattaaaatagaaaatattattataaatatcatgtgaaaacataaaaaattaacattaatttacattagcctaataaaatcaatatcaatatatattacaatgattcagacataaacatgaaaatcatccaaattcctgcaacaaagaagctgagtgcgcgcacacatcatcaatcctgaccatcagacaattttgatatgaaaaatttcactaaaataacttcttcccactttatttctaaggttcgaacccttacttatgttttattaaataggcgatgagttggtacagctagcaagtgcttacttcttggtaatgaaaggccaaaattctcagtcatatctatgtcatcaggagacatgc

SEQ ID NO: 55630 - DNA, 323 bp, Glycine max
tttttttttttttttttttttttttttttttttttttttttttttttttttttttttttttttatttttttttttatttttttttttattttttttttttttttttttttggggaaaaaaaaaccaaataaaaaaggaaaaaaatttccccaaaaaaaaaaccaagggaaacttccaaaattaaaacaaaaaaaaaaacggtaaaaatttcaaaaaaaaaaaaaccaacggcaaaatttggaaaaaaatttaaaaaccaaaaaacaagcaaaggaaaaaaaaggaaaaatacaaaaaaaaattaacaaagggaattcccaagg

SEQ ID NO: 55631 - DNA, 376 bp, Glycine max
agaccattaatccttattttgcatataaatctcttaatatatagtaagtggatggattcggttacattcatagatagatgaattgaatggataccaatggattcatgtacatcgttttagcaccccctaagtatgtacatgtacataacgttacagctgaaagtaaagagtaaaaatgcacggcatttcaacaaagccttcttaatattcattcatacataaaaaagcatacaaattattatacttgttcctggtgtagtgtgggtggtcctggtgctattgcaaactgtaaacctctagctgaccagattgtagaacaaaagcaacttgggttgccgctagtgctgcagcctcttgtctttgtcgccgacgctgc

SEQ ID NO: 55632 - DNA, 374 bp, Glycine max
tttttttttttttttttttttttttttttttttttttttttttttttttttttttttttttttttttttttttttttttttttttttttttttttttttttttttatttttttttttttttttatttttttttttaaaaaaaaaaaaaaaaaaaaaaaaaaaaaaaaaagcaaaaaaaaaaaaaaaaaaaaaaaaaaaaaaaaaaaaaaaaaaaaaaaaaaaaaaaaaaaaaaaatctttaaaaaaaaaaaccccaaaaaaaagacccaaacacattaaaaaaaaaaattttaaaaaaaaaaaaattgggggcaaatggcggaaaaaaaaaccaaaaaaaaaaaagacccaaataaaggaaaaatgtggggaac

SEQ ID NO: 55633 - DNA, 396 bp, Glycine max
  unsure (1)..(396): unsure at all n locations
ttttaagaaattgtaattatttccatggaaagatttaaaaaaaaaattgtaatgacttatgcatcaacttagttgatggttgaatcaatgttacatatttcaattcctacatcaacgttcctgtggatgacagcatctctctcctaggaaagttatttcttgcatgaaagataaatgcccgatataatggccacgccggctacggcaacaccaatagacgtaacgattcttgttgcagagacagctggtttgggagatggaactgtcattagattcctcatcaagacaggttgcntccaatgcttccttattccctgtagatggccctttccaacaacagcaacaactgagctattctcactcgccacttttaataatgtggaggacatgtactga

SEQ ID NO: 55634 - DNA, 215 bp, Glycine max
caaaattaaaccacccaagaaaggttccccaggggaaaaataggccaaaagttatgggacctaaaataccagtaaaaacacaccaaataaaaaagcggaaatgcaaaaagcacatgaaatactatatgaaaaagacctatttccacaaagaaaaatagaaccacaaatgcctaaagcaacagtttcaaaaacagtatcggaaggcttgttttcag

SEQ ID NO: 55635 - DNA, 322 bp, Glycine max
gccaaaagtaaaccaagtccactattttagaggtccttacacttactgatggcaatgcttcataagatcccctgccaaaggggttttacaatgggaaggattacacaggaaagcatacagaaaatgatttgatattgagacaaaatgattagtgaaggaacctaggcttaatcagacaaaaccaagccaaatggtatggttaaactttaatagactgcatatataattttgctatatacaaatggcttggaacctgaaaatcaaaagtaaaagataactagattgaaaagatctacacatacatacatatatagattgcaaa

SEQ ID NO: 55636 - DNA, 308 bp, Glycine max
ggccgctttactgggatttttcaagatgctccgcactgctgactttaatcacacgaatggattctcaaatcagaggtggataaacacggtggactatcaagatagcaggcttttccccgtggaagttcgctagtgcgctcacgtggtcctagcttggtgcatagctgtcattggtgttcctgtctctcttcttgaaactaggtgcattctcacatttgatccagtatgaatctcatgtaggtgttcgtcattaggacaaagctgagctgtgtgaattaacactccgttcagtgtgatagcagagactt

SEQ ID NO: 55637 - DNA, 58 bp, Glycine max
taatgagtcactcaagtacctatgcgggaaaagcataaataaaagaagaaattccaat

SEQ ID NO: 55638 - DNA, 385 bp, Glycine max
aagatgagtttgaagaacaacatggtggtgctaaaggtgtgtttgttgcttcttttccttgtgggggttacagctgcacgcatggaactgagcttcttcaaaagtgatcagtcatcaagttatgatgatgatgagtattcaaaaccatgctgtgatctctgcatgtgcacacgctcaatgcctcctcaatgcagctgtgaagatattaggctgaattcatgccactcagattgtaagagctgtatgtgcacacgctcacagccaggacagtgtcgttgtcttgacaccaacgacttctgctacaaaccttgcaagtccagagatgactagaaaaactaatagctctctcaaatggacgaagcccctttaggctttgtttgttatg

SEQ ID NO: 55639 - DNA, 388 bp, Glycine max
aagaaagtcttccatagccccccaaaaatgaagagcaccatcttctttgctctctttctcttttgtgccttcaccacctcatacctaccttcagccatcgctgatttcgtgctcgataatgaaggtaaccctcttgaaaatggtggcacatattatatcttgtcagacataacagcatttggtggaataagagcagccccaacgggaaatgaaagatgccctctcactgtggtgcaatctcgcaatgagctcgacaaagggattggaacaatcatctcgtccccatatcgaatccgttttatcgccgaaggccatcctttgagccttaagttcgattcatttgcagttataatgctgtgtgttggaattcctaccgagtggtctgttg

SEQ ID NO: 55640 - DNA, 379 bp, Glycine max
ctggagattggatcacacttatacaaaattctccaattagtaacttgttgagagttgctgcttggaagaaaggctgtttaatggtcaagattgtgatgtctgggaatgcagcagtcaaaaggagtgattgggcctcattggtacaagtgtttttaacaaacagcaacagtacagagcattttgatgcatgtaagtggacaaaatcagaaccacattcctgggaattgatcttcccaatagaggtatgtggtcctaataatggttttgaaatgtggagttctgagtgggcaaatcaaacttcatggcatttgagtttccttattgacaatcccaaacagtctacagtttttgatattctcttgggaatctctcaagattt

SEQ ID NO: 55641 - DNA, 388 bp, Glycine max
aatggctgcaaaaagctgatgtgcctaccatagcacagattgaagagttccattcgatgcagaggatgatgaatgctcctgattcaaatgataatattgatctactgttgagcattgatttgttgggtttacaaggagcaggcaaagcttttccaaacaagattgtttttgatgataagcttgtgttggctaacacacaagaattctttgatggaaattttccagtggattcttggttaccaatttttgtgaattgtctttatcctgtaagtcaattaccttcagaagctgtcgttgtaaatgtcacatgtggtagtggacgtggtggtttacccaccactgcttggattagttctgcagttaacaatcgctcctcagatatcaacaa

SEQ ID NO: 55642 - DNA, 399 bp, Glycine max
attgttgtgactcgttcttcttcgtcgttatcttcttcttttgttgtttgtgtgtttgttttttctctcaactgaaaatgtcttgctgcggtggtaactgtggttgcggaagcgcctgcaaatgcggcaacggctgcagaggctgcaagatgtacccagacttgagctacaccgagtcaaccaccaccgagaccttggtcatgggagtggcaccagttaaggctcaattcgagagtgctgaaatgggtgttcccgctgagaacgatggctgcaaatgtggagctaactgcacctgcaacccctgcacttgcaagtgaggtgttggagagctaaagcttcaagcagaaatggcccttagaaataatgataaaaactatatgtagtttcaaaacttcaaaa

SEQ ID NO: 55643 - DNA, 85 bp, Glycine max
atttatatgtcacgaatctagtttaaggagaacaatgtgatatattactactacaatttatatgttacactaaattacttaaaaa

SEQ ID NO: 55644 - DNA, 378 bp, Glycine max
  unsure (1)..(378): unsure at all n locations
tgccattttaggataattttcatttgggggttttgttgactttttttttgtattttaaaaaatattaattttgtgggttaattggaaggtttttacttttaaaaaaaattattgttgttggtttgagttttgatttgaattggttgttctgtgttgcagggtttgaatcaaaggtcaaagactaaagttcctgtggttggaactgcagctttgaatctagctgattttgcatctgtggttgatcaaaaggattttgatttgaacattccactcacagtttctggtggctctgtggagtcttctccttcacttagtatatcgattagtttggtggagttaagagcggttcangagagcacagagttaattcataataaa

SEQ ID NO: 55645 - DNA, 379 bp, Glycine max
ggggaattcaaattcaaaattttcaaaaattaaggaggcaaaaatgttcaaatatgaattggaattatttgttttcttattaggcctatcctgaagccaaaggaaatgagatcggaattcctcggggaattccaattccacattttcaagaaataaggaggcaaaaatgttcatatatgaattggaattatttgttttcttattaggcctatcctgaagctaaaggaaatgagatcggaattcctcggggaattccaattccacattttcaagaaataaggaggcaaaaatgttcatatatgaattggaattatttgttttcttattaggcctatcctgaagccaaaggaaatgagatcggcattcctcgggggtaccg

SEQ ID NO: 55646 - DNA, 360 bp, Glycine max
gaaagtcttccatagccccccaaaaatgaagagcaccatcttctttgctctctttctcttttgtgccttcaccacctcatacctaccttcagccatcgctgatttcgtgctcgataatgaaggtaaccctcttgaaaatggtggcacatattatatcttgtcagacataacagcatttggtggaataagagcagccccaacgggaaatgaaagatgccctctcactgtggtgcaatctcgcaatgagctcgacaaagggattggaacaatcatctcgtccccatatcgaatccgttttatcgccgaaggccatcctttgagccttaagttcgattcatttgcagttataatgctgtgtgt

SEQ ID NO: 55647 - DNA, 384 bp, Glycine max
tgaaaaattactgcgccaggctagagctccaagtatgtttttacaatccttcaaaaattttgtttctttgtgtgtgtatggtgatgataacttaattagtgttcatgaatatgtcaagccttactttagtggttctaaattgaaaagctttctagctggtcataatatcaccattactgatggtattgacaaaactagtgcaactttgcaatttagaaagttagcagattgtgattttctcaagagaaactttaagcagatgtctaatgttttgtgggtggctcctgaggacaaggcgagtttatggtcacaacttcattatgtttcgtgtaataatctggaaatgcaagaagcttatcttgtcaatctcgtaaatgtgttacg

SEQ ID NO: 55648 - DNA, 359 bp, Glycine max
  unsure (1)..(359): unsure at all n locations
gaaagtcttccatagccccccaaaaatgaagagcaccatcttctttgctctctttctcttttgtgccttcaccacctcatacctaccttcagccatcgctgatttcgtgctcgataatgaaggtaaccctcttgaaaatggtggcacatattatatcttgtcagacataacagcatttggtggaataagagcagccccaacgggaaatgaaagatgccctctcactgtggtgcaatctcgcaatgagctcgacaaagggattggaacaatcatctcgtcnccatatcgaatccgttttatcgccgaaggccatcctttgagccttaagttcgattcatttgcagttataatgctgtgtg

SEQ ID NO: 55649 - DNA, 394 bp, Glycine max
ggactggcttgatatgtttaggctatgctatatgttagatatagtgcataaggaagacactcattcaggagcataattaaaaagaaactgaaacttcatgcctgcatttgaatttccaatgaagcataacaataatattatggtatatgaacattttgataccaaaatgacttctttttcaggcataccttgctttctttgtcatcaatgacctacaaatggcccaatcagccaaagctttggtaatctacaaattttgtccattttaagttcattgtagttcatttagcttcaaataatttgaagtttgaatgatggcatggctgattacactgcctgatgatgttttacataggttcctgctctcatatacatctgcagctttgttgtgtcc

SEQ ID NO: 55650 - DNA, 53 bp, Glycine max
aaaaaaaaaaaaaaaaaaaaaaaaaaaaaaaaaaaaaaaaaaaaaaaaaaaaa

SEQ ID NO: 55651 - DNA, 80 bp, Glycine max
caattatcctgaattgttaccgggttaaccttaaataccatatatggatcgtatcttcattttatggaaagatattgtag

SEQ ID NO: 55652 - DNA, 395 bp, Glycine max
  unsure (1)..(395): unsure at all n locations
ttttgatgcatgtaagtggacaaaatcggaaccacattcctgggaattgatcttcccaatagaggtatgcggtcctaataatggttttgaaatgtggagttctgagtgggcaaatcaaacttcatggcatttgagtttccttattgacaatcccaaacagtctacagtttttgacattctcttgggaatttctcaagattttgaaattgctggtaatactcttatgccagctttttctgttccacaggctactgccagatcttctgaaaatgcggaatcctctgcatgatctggaatttgtgttttctttcatttgtccgtttgtttaattcaataaaggaaattaggcatgaccctcttgttgagtatgctctgcctatttganaatttcacac

SEQ ID NO: 55653 - DNA, 393 bp, Glycine max
  unsure (1)..(393): unsure at all n locations
aacttaattagtgttcatgaatatgtcaagccttattttagtggttctaaattgaaaagctttctagctggtcataatatcaccattactgatggtattgacaaaactagtgcaactttgcaatttagaaagttagcagattgtgattttctcaagagaaactttaagcagatgtccaatgttttgtgggtggctcctgaggacaaggcgagtttatggtcacaacttcattatgtttcgtgtaataatctggaaatgcaagaagcttatcttgtcaatctcgtaaatgtgttacgagaattgtatttgcacagtccagaggaagctcgccaattgagaaggaaagctctctctcgtattgaatggctgcanaaagctgatgtgcctaacata

SEQ ID NO: 55654 - DNA, 398 bp, Glycine max
gttcttcttcgtcgttatcttcttcttttgttgtttgtgtgtttgtttttttctctcacctgaaaatgtcttgctgcggtggtaactgtggttgcggaagcgcctgcaagtgcggcaacggctgcggaggctgcaagatgtacccagacttgagctacaccgagtcaaccaccaccgagaccttggtcatgggagtggcaccagttaaggctcaattcgagagtgctgaaatgggtgttcccgctgagaacgatggctgcaaatgtggagctaactgcacctgcaacccctgcacttgcaagtgaggtgttggagagctaaagcttcaagcagaaatggcccttagaaataatgataaaaactatatgtagtttcaaaacttcaaaattatgtagtat

SEQ ID NO: 55655 - DNA, 215 bp, Glycine max
ttggacacaggaatatttggcattttgcaagaacaataaatagttgtatatatagctttagaacgtgtgtcaagtatcatggttgtagaattatcgtcactactcattcttgttcgatcatctgtgtcggctgcgaggctttctaaaagtgccatttatactggtgattatgactctgtatcatcatcattatttttttttctggtttacatatc

SEQ ID NO: 55656 - DNA, 54 bp, Glycine max
aaaaaaaaaaaaaaaaaaaaaaaaaaaataaaaaaaacaaaaaaaaaaaaaaaa

SEQ ID NO: 55657 - DNA, 179 bp, Glycine max
aaagattttctgcctaagtttatggtaggtgctgtgctaggtgtgcatatctcatccaacctagagatctttaacaacggaccgagtggaagagatctctaggttggatgattttttatttaccactagaaatttagaatctgtaagtactgtactaaatttatttatttactttgaaa

SEQ ID NO: 55658 - DNA, 56 bp, Glycine max
aaaaaaaaaaaaaaaaaaaaaaaaaaaaaaaaaaaaaaaaaaaaaaaaaaaaaaaa

SEQ ID NO: 55659 - DNA, 390 bp, Glycine max
ggaattttagtggacaaaactggagattggatcacacttatacaaaattctccaattagtaacttgttgagagttgctgcttggaagaaaggctgtttaatggttaagattgtgatgtctgggaatgcagcagtcaaaaggagtgattgggcctcattggtacaagtgtttttaacaaacagcaacagtacagagcattttgatgcatgtaagtggacaaaatcggaaccacattcctgggaattgatcttcccaatagaggtatgtggtcctaataatggttttgaaatgtggagttctgagtgggcaaatcaaacttcatggcatttgagtttccttattgacaatcccaaacagtctacagtttttgatattctcttgggaatttct

SEQ ID NO: 55660 - DNA, 437 bp, Glycine max
aggtccactctaaaggatcacctcggggaattccaattccacattttcaagaaataaggaggcaaaaatgttcatatatgaattggaattatttgttttcttattaggcctatcctgaagccaaaggaaatgagatcggaattcctcggggaattccaattccacattttcaagaaataaggaggcaaaaatgttcatatatgaattggaattatttgttttcttattaggcctatcctgaagccaaaggaaatgagatcggaattcctcggggaattccaattccacattttcaagaaataaggaggcaaaaatgttcatatatgaattggaattatttgttttcttattaggcctatcctgaagccaaaggaaatgagatcggaattcctcggggaattccaattccacattttcaagaaataaggaggcaaaaa

SEQ ID NO: 55661 - DNA, 150 bp, Glycine max
cttgaatataatactcagcatggctaagcttgttctttccctttgttttctgcttttcagtggctgctgcttcgctttcagtttcagagagcagccacagcaaaacgagtgccagttccaaggcctcatggccctcaaacgggataaccg

SEQ ID NO: 55662 - DNA, 381 bp, Glycine max
  unsure (1)..(381): unsure at all n locations
gccagttctgatatttacaccatctgctctcaagactgtgaattgtggaatcctgcttgcacaaaagcaatgactatgtcatttaatccaaacccgtgttctgatgcatggagtttggaatttctgaagcgtactggatttcattgcgatatcatttgtgtcactggatggactgccaccccaatgcaggatgttcaggttacaattgattggtttatttcctctcaggaatgtgttcccaggacctattgtgttttaaatccacaaaatccttttgtgttaaataggtggatgggaaaattgactttcccccagggcacttcccgaagtgttaagagaatgcctctttctatanggggaagagctggtgcaaagaatgct

SEQ ID NO: 55663 - DNA, 121 bp, Glycine max
cgtttgtttaattcaataaaggaaattaggcatgaccctcttgttgagtatgctctgcctatttgaaaatttccacacctcttttaattgtcgtaatgatgtgtgaagtgtgtgttatttt

SEQ ID NO: 55664 - DNA, 128 bp, Glycine max
agtccttactgcaaacgatgtgaccagtacgccaacactgtgacatgtaacgtcaagaggtcgcgtaaccgacgatttgcgtcatgtacttccacgccgagatgcaccacactgaatccacggtcatt

SEQ ID NO: 55665 - DNA, 161 bp, Glycine max
tcggggaattccaattccacattttcaagatataaggaggcaaaaatgttcatatatgaattggcattatttgttttcttactacgcctatcctgaagccaaaggaaatgagatcgggactcctcggggaattctaagtccacattttcaacacctaaaga

SEQ ID NO: 55666 - DNA, 440 bp, Glycine max
  unsure (1)..(440): unsure at all n locations
ctctcgggctgcaattctcaagttcacaaagtgttccatcaacaatatgggagtgtcatgaatctgctcccattactatgctaacatgcgatagctagctctggttgtatcgatagtgcactgtgctcatacctcaaagcctcacccgganataaagatcttggaatccgcgtcggacattccattgtccacattttcagataaatagatgaggaatcacatgttcagagatggatctgtgcaataagtgttttctgatgcacgctatcgagaatcactctgaaatgacatcaggattctacgtcagaatgccacctcaacatgtgcaactggttgggacgcagaattgttcattggtcatatagactaatgagcatgcttatgaggccaatgttaaacctgttcgacatgcaatgtgcattcatctcaggtaaccatct

SEQ ID NO: 55667 - DNA, 398 bp, Glycine max
tgttgttgtaacacgttcttcatcttttgttgttctgtgtttgtgtttgttttttctctcacctgaaaatgtcttgctgcggtggtaactgtggatgcggaagctcctgcaagtgcggcaacggctgcggatgctgcaagatgtacccagacttgagctacactgagtcaaccaccaccgagaccttggtcatgggagtggcacctgttaaggctcaatttgagggtgctgaaatgggtgtgcccgctgagaacgatggctgcaaatgtggaccaaactgctcctgcaacccttgcacttgcaagtgaggtgttgggagagcaagcttcaagcagagatagcccttaattaagaataatgataaactattaatgtgtagctaaaaacttatgtattat

SEQ ID NO: 55668 - DNA, 367 bp, Glycine max
cttggaaggaaggtgaggagtaaagacacggattcctgtaacagatctgcaattgtggtactaattctcaattgatactgctcaaataatgtaagtgtttttttttccactgcaaaacttaggttgcttgcaatgtgtttgatgaaattgtcttatttcttctttgctttagtttgagcacttcatctaattttcatttcactgttagttttgctctaaattttgaatggcaaggtgcaatccaatagcttgttgccttgattccatgcttataaaacaatcacatagcacacaaaaagtttttctaatgttgcaagcttaaaattgtcctcattcattgtgaaattgatcaaatatcaatttttgt

SEQ ID NO: 55669 - DNA, 370 bp, Glycine max
cacgtctacgctagctcatcatgccgctgtaattctacattcacgaatttgcaaagctctgcagttagctgaatctgttcatagtatcagggtagaagtagtttgcgttctgagagcgcttacgcttcctcgactcagtgatgcgctgcgcactcgtcttcggtagcgaccaccagttccatatcatgcatcggcggaaattcggttacatataatatcaggggctagtgtaggattgttcatgtcacaaaattgcaaacaacatgccagcaagcgtcataaagtcgtgttgctggggtgtttcaataagtgcggtaactcagattagcagcatagcgctcaatgctcactttacaggtgggaaaactgt

SEQ ID NO: 55670 - DNA, 404 bp, Glycine max
gttgcaacctccttaaggtggagaaagaagaatgtgagaaggtgaaattccacgaccacgaccacgaccacaacacccggagagggaacctcagcaacccggtgagaaggaggaagacgacgatgagcaaccacgtccaatcccattcccacgcccacaacctcgtcaagaagaagagcacgagcagagagaggaacaggaatggcctcgcaaggaggaaaaacgcggagaaaagggaagtgaagaggaagatgaggatgaggatgaggaacaagatgaacgtcaattcccattcccacgcccacctcatcagaaggaagagcgaaagcaagaggaagatgaggatgaggagcagcagcgagagagcgaagaaagtgaagattctgagttacgaagacataaga

SEQ ID NO: 55671 - DNA, 411 bp, Glycine max
ggtcgactctaaaggatcccctcggggaattccaattccacattttcaagaaataaggaggcaaaaatgttcatatatgaattggaattatttgttttcttattaggcctatcctgaagccaaaggaaatgagatcggaattcctcggggaattccaattccacattttcaagaaataaggaggcaaaaatgttcatatatgaattggaattatttgttttcttattaggcctatcctgaagccaaaggaaatgagatcggaattcctcggggaattccaattccacattttcaagaaataaggaggcaaaaatgttcatatatgaattggaattatttgttttcttattaggcctatcctgaagccaaaggaaatgagatcggaattcctcggggggtacgagctcgaat

SEQ ID NO: 55672 - DNA, 347 bp, Glycine max
cggctcgagggacaggaaacgaagatcacaagaagggtttggtaatttgtttgattagctacgggttgttatgatttccaaccatgtaattccccacaaccaggctcaccgaagttgcaatttcaatccattttcatttgccggtacacaataagtcatgattccctcccgcatttacccttgtttgtgtaaagtactaccagaatgagactaggtatcatcgatgggagggtacatgggcgatgacgagtaagattacctcctcatgctggatctcatcggagattccggtgtcggtaagtcgaacctgctttcgcgcttcacgagggaggagttccacttggggt

SEQ ID NO: 55673 - DNA, 131 bp, Glycine max
ttcccccgggaagcacctcgtgagctctcctgatctgagacgccgcttaccggatatgtgtatgaatttctcacttcgggaagcgtggagctttcacagagctcactcaggatgtatctcagttccgtatc

SEQ ID NO: 55674 - DNA, 414 bp, Glycine max
  unsure (1)..(414): unsure at all n locations
agtttctccggctcaaacccttccccccttccaaacagttaccaattaaaattcccctttttccccggggaattccctaaaaaacccccatttccccggaatcggccgattcacggttcgatcccggggtttcgtctttttttcntcttcaaccccttcgtccatttcctcttccttcttcttcttcatcttcccccacccgccccgcctccgccgagcccttttttccttttcaattttcaattttttattcgaaaaaagataagagactacagcataataggatcaatgaacgatcatctggtgctgttcgtggaccatctggtgcggcccgtgccggtggtcgagccgctggcccaacaaacccccgagcccgtgacgcccgttaatgaggtccctgtggcgggtccctcc

SEQ ID NO: 55675 - DNA, 233 bp, Glycine max
gttggagatgcatgattgtggtgtgccttggtttcatttcatcataatgacagccttgtgggtttctttggtgtttcttgatgcatacttaatttacattaatattgtgtagttatctcttccatttacaacaagaaaagtttgtgtaggtttccttctttgaagtaaaaagaaattaaatatgtactgaaaatggaataatagtgtgttttagttgtgtttacaatacagtg

SEQ ID NO: 55676 - DNA, 169 bp, Glycine max
  unsure (1)..(169): unsure at all n locations
gacttcacatgacagattgtcccgtgaacaatacaagaatctcttgcaatctaagtgcacggttgaatttttggattgctgatatgtgatcatggatatcaagagtgtggagttctggtgcttgcaagctataaatatgtatnagcacatatacgatgaatcccgttgt

SEQ ID NO: 55677 - DNA, 261 bp, Glycine max
tcaacatgtgaacaattagccatcagaacgctaggaagtgtcgcaaggccattttgctggggtttttccaaaggctccacgccgctgagtaggatcatcaacatcagaactcaagtcacacgttggtgagcccgacattgtactatacagataccatttggtttcggcccttgaagcggcctcagtgcgcgctcctgttccgaccatgatgcatagtgtatacgtgtcttgttttctcacttcggtaagagtgtcgctttc

SEQ ID NO: 55678 - DNA, 391 bp, Glycine max
gccaggagagatgactgttgagataagtggtactgcttcacaaatacaggctgcccaacagctagtgcagaatttcatggctgaagctgcaagtgcggcacaggatcatatggggggttcaattaaccaaggttacaattcctatcctacaaatcctgtctatgcatctccgccctcaagtgctgctggtcatgcgggccatgcaccttctgcagattatggttccgtttacggcaccaattatggctattgagaacattactttacattcaattttaaatgaggagccctacgttttgtaaacattgagagttcaatttcagttctagttctcgtgggtattgcaaccgggcctctgcgtgtcctgtcttatatcccctatattttcgct

SEQ ID NO: 55679 - DNA, 93 bp, Glycine max
aaaaaaaaaaaaaaaaaaaaaaaaaaaaaaaaaaaaaaaaaaaaaaaaaaaaaaaaaaaaaaaaaaaaaaaaaaaaaaaaaaaaaaaaaaaaa

SEQ ID NO: 55680 - DNA, 398 bp, Glycine max
gtgattttctcaagagaaactttaagcagatgtctaatgttttgtgggtagctcctgaggacaaggcgagtttatggtcacaacttcattatgtttcgtgtaataatctggaaatgcaagaagcttatcttgtcaatctcgtaaatgtgttacgagaattgtatttgcacagtccagaggaagctcgccaattgagaaggaaagctctctctcgtattgaatggctgcaaaaagctgatgtgcctaccatagcacagattgaagagttccattcgatgcagaggatgatgaatgctcctgattcaaatgataatattgatctactgttgagcattgatttgttgggtttacaaggagcaggtaaagcttttccaaacaagattgtttttgatgataaa

SEQ ID NO: 55681 - DNA, 79 bp, Glycine max
gttgtataactgtaagtggtgctgcaacatgttgtttctttcttttaagcttgtgagatatgttactacttttctggta

SEQ ID NO: 55682 - DNA, 358 bp, Glycine max
  unsure (1)..(358): unsure at all n locations
ggagttctgagtgggcaaatcaaacttcatggcatttgagtttccttattgataatcccaaacagtctacagtttttgatattctcttgggaatttctcaagattttgaaattgctggtaacactcttatgccagctttttctgttccacaggctactgccagatcttctgaaaatgcggaatcctctgcatgatctggaatttgtgttttcttttgcttgttcgtttgtttaattcaataaaggaaattaggcatgaccctcttgttgagtatgctctgcctatttgaaaatttccacacctcttttaattgtcgtaatgatgtgtgaagtgtgtgttantttaaaaaaaacaaaaa

SEQ ID NO: 55683 - DNA, 289 bp, Glycine max
cccaaacagtctacagtttttgacattctcttgggaatttctcaagattttgaaattgctggtaatactcttatgccagctttttctgttccacaggctactgccagatcttctgaaaatgcggaatcctctgcatgatctggaatttgtgttttctttcatttgtccgtttgtttaattcaataaaggaaattaggcatgaccctcttgttgagtatgctctgcctatttgaaaatttccacacctcttttaattgtcgtaatgatgtgtgaagtgtgtgttatttta

SEQ ID NO: 55684 - DNA, 357 bp, Glycine max
tagcaagcagagcttttgtcagttttctattgaccttctcggtggaggaatcttagtggacaaaactggagattggatcacacttatacaaaattctccaattagtaacttgttgagagttgctgcttggcagaaaggctgtttaatggtcaagattgtgatgtctgggaatgcagcagtcaaaaggagtgattgggcctcattggtacaagtgtttttaacaaacagcaacagtacagagcattttgatgcatgtaagtggacaaaatcagaaccacattcctgggaattgatcttcccaatagaggtatgtggtcctaataatggttttgaaatgtggagttctgagtgggcaaa

SEQ ID NO: 55685 - DNA, 358 bp, Glycine max
tcggggaattccaattccacattttcaagaaataaggaggcaaaaatgttcatatatgaattggaattatttgttttcttattaggcctatcctgaagccaaaggaaatgagatcggaattcctcggggaattccaattccacattttcaagaaataaggaggcaaaaatgttcatatatgaattggaattatttgttttcttattaggcctatcctgaagccaaaggaaatgagatcggaattcctcggggaattccaattccacattttcaagaaataaggaggcaaaaatgttcatatatgaattggaattatttgttttcttattaggcctatcctgaagccaaaggaaatgag

SEQ ID NO: 55686 - DNA, 405 bp, Glycine max
tgcgtccaggtcgactctagatgatccctcggggaattccaattccacattttcaagaaataaggatgcaaaaatgttcatatatgaattggaattatttgttttcttattaggcctatcctgaagccaaaggaaatgagatcggaattcctcggggaattccaattccacattttcaagatataaggaggcaaaaatgttcatatatgaattggaattatttgttttcttattaggcctatcctgaagccaaaggaaatgagatcggaattcctcggggaattccaattccacattttcaagaaataaggaggcaaaaatgttcatatatgaattggaattatttgttttcttattaggcctatcctgaagccaaaggaaatgagatcggaattcctcgggggt

SEQ ID NO: 55687 - DNA, 371 bp, Glycine max
cacaatcctgaacccaacattcgcgtacaatgggctcgcgctcaaagcatgagacacaacgagcaatggcttcaccaaagtcccactgagatgctggtgtcgtccagtccggggctgtttctcgatttcatagcattgcgggacattgaagaacgggaagaagtctttattgactacgggccaaaatgggaattggcatggcaggcacacgtcgagtactggacgacaagcaactacagtcacagctatcagtcggcgcgggtgtacagtaaagctaatgcgaataaaccctttcggtcacaaagtgagcaagaggtggatccatatccttcttactacgaattccgctgcttagacgtggcttggtacaa

SEQ ID NO: 55688 - DNA, 395 bp, Glycine max
tcggggaattccaattccacattttcaagaaataaggaggcaaaaatgttcatatatgaattggaattatttgttttcttattaggcctatcctgaagccaaaggaaatgagatcggaattcctcggggaattccaattccacattttcaagaaataaggaggcaaaaatgttcatatatgaattggaattatttgttttcttattaggcctatcctgaagccaaaggaaatgagatcggaattcctcggggaattccaattccacattttcaagaaataaggaggcaaaaatgttcatatatgaattggaattatttgttttcttagtaagcctatcctgaagccaaaggaaatgagatcggaattcctcgggggtaccgagctcgaattccct

SEQ ID NO: 55689 - DNA, 378 bp, Glycine max
agaccagcttgaatgcgtccaggcctactctagatgatccctcggggaattccaattccacattttcaagaaataatgaggcacaaatgttcatatatgaattggaattatttgttttcttaataagcctatcctgaagccaaaggaaatgagatcggcattcctcggggaattccaattccacattttcaagaaataaggaggcaaaaatgttcatatatgaattggcattatttgttttcctattacgcctatcctgaagccaaaggaaatgagatcggcattcctcggggaattccaattccacattttcaagaaataacgacgcaaaaatgttcatatatgaactcggattacttgttttcttattaggcctat

SEQ ID NO: 55690 - DNA, 245 bp, Glycine max
aatcataagtctgctgcaaggattattgagataatcaggtacaaatgtagctaacctctacactggactcttggaattagtcgcacgcttactcagaaaagtggagaggccgagtgacgacacatgagaacgcctaagggaaatacaattccagatctgcagacagcatacgacgcaacagtgttcatatacactatggggaaatgaggctcctcagggggccaaagctgaatcctgtggaaagt

SEQ ID NO: 55691 - DNA, 330 bp, Glycine max
gcaaatcaaacttcatggcatttgagtttccttattgacaatcccaaacagtctacagtttttgatattctcttgggaatttctcaagattttgaaattgctggtaatactcttatgccagctttttctgttccacaggctactgccagatcttctgaaaatgcggaatcctctgcatgatctggaatttgtgttttctttcgcttgttcgtatgtttaattcaataaaggaaattacgcatgaccctcttgttgagtatgctctgcctatttgaaaatttccacacctcttttaagtgtcgtaatgatgtgtgaactgtgtgataattt

SEQ ID NO: 55692 - DNA, 343 bp, Glycine max
cagtactgcgctgcgttgttgcgacagtgttaacgacccctacgtcactgtacacgctggagatcatcgattgatcaagacctccgttatgacgaataggttgaaccctcaatggaaggaaagttttgttgtaccgatcagccaccatgtggaagcactcgaattcagagtaaaggactcggacttcaacggtgcgatgaaccttctcgggaagacatttctctctataagtgatatacttaaactcaataaagagggaatacctcgcaggacagggattcacaaagtcgttcatttggatggaaaacctcgacatgggtcgtttgcatacattgtggagtac

SEQ ID NO: 55693 - DNA, 409 bp, Glycine max
caaatggataaatatgacttccaagcatcaaatatctttgtagtgccaatgcttgccctcatcactatcaacatatcttgcttctttggaggagtctacagagtgttattggtgggtgattgtgacaaaatgtttgtgcagcttttcctagcagtttttataattacggtcaactaccccatcattgaagggctgatgataaggaatgacaagggacgaatttctaagttagttgctatacctgttatcttggctactgttgttcttttggcattttttaaactactaagaatgcatagtatgctctactagtaatttgagtttaatttttgtgcactgatgggagacttttatatggtcaaccaatcagaagttatgacagatatgacctttaaccaaattttcgtaa

SEQ ID NO: 55694 - DNA, 372 bp, Glycine max
tctaaatgatcccctcggggaattccaattccacattttcaagaaataaggaggcaaaaatgttcatatatgaattggaattatttgttttcttattaggcctatcctgaagccaaaggaaatgagatcggaattcctcggggaattccaattccacattttcaagaaataaggaggcaaaaatgttcatatatgaattggaattatttgttttcttattaggcctatcctgaagccaaaggaaatgagatcggaattcctcggggaattccaattccacattttcaagaaataaggaggcaaaaatgttcatatatgaattggaattatttgttttcttattaggcctatcctgaagccaaaggaaatgag

SEQ ID NO: 55695 - DNA, 359 bp, Glycine max
tcgacgagtgattgggcctcattggtacaagtgtttttaacaaacagcaacagtacagagcattttgatgcatgtaagtggacaaaatcggaaccacattcctgcgaattgatcttcccaatagaggtatgtggtcctaataatggttttgaaatgtggagttctgagtgggcaaatcaaacttcatggcagttgagtttccttattgacaatcccaaagagtctacagtttttgatattctcttgggaaattctcaagattttgagattgctggtaatactcttatgccagctttttctgttccacaggctactgccagatcttctgaaaatgccgaatcctctgcatgatctggaat

SEQ ID NO: 55696 - DNA, 370 bp, Glycine max
gccctgcaatctgtgattaattcactgtagtgagtttccagggtaattacttttcaaaactgcactcatcttaaaattgggttattacatcataatagtagcatcatgtctaaatatagaactggctcacaccatggtcgtacatataagacactagttcttctcgtttaacatcttataatcattaattgatctatctctcaatctatatatagctctcaatgaccactgacgcttcgctaacttggttcagtgaacattcatattgacacgtcacttgtcttttgtacgctgatatcgttttttccgacatggttgttatcctgtgcaactatctgtcaggtaattactaattactcctcacgtaccg

SEQ ID NO: 55697 - DNA, 425 bp, Glycine max
aggtcgactctaaaggatcccctcggggaattccaattccacattttcaagaaataaggaggcaaaaatgttcatatatgaattggaattatttgttttcttattaggcctatcctgaagccaaaggaaatgagatcggaattcctcggggaattccaattccacattttcaagaaataaggaggcaaaaatgttcatatatgaattggaattatttgttttcttattaggcctatcctgaagccaaaggaaatgagatcggaattcctcggggaattccaattccacattttcaagaaataaggaggcaaaaatgttcatatatgaattggaattatttgttttcttattaggcctatcctgaagccaaaggaaatgagatcgggattcctcgggggtaccgagctcgaattccctaaaatgag

SEQ ID NO: 55698 - DNA, 389 bp, Glycine max
aaattcataatatccatttgtattacagatctccaaaattttggtcaaagaatttgccacaaatccaaaggtccaaatatgggatggtgaaggttcaaatccacatatgggacatctggcctgggctgatgcctttgttatcactgctgattcagttagtatgttgagtgaggcctgcagtactgggaagcctgtgtatgtaattggagcagaacggtgtacatggaagtttgctgacttccaaaattctttgcagaagcaaggggttgctcgaccattcactgggaatgagaatatgactgctgaaagctggagttatcctccactgaatgacaccgcagaagctgccagtcaagtggttgctgctcctgctcagcgacgatggacta

SEQ ID NO: 55699 - DNA, 367 bp, Glycine max
aaaagcaatgactatgtcatttaatccaaacccgtgttctgatgcatggagtttggaatttctgaagcgtactggatttcattgcgatatcatttgtgtcactggatggactgccaccccaatgcaggatgttcaggttacaattgattggtttatttcctctcaggaatgtgttcccaggacctattgtgttttaaatccacaaaatccttttgtgttaaataggtggatgggaaaattgactttcccccagggcacttcccgaagtgttaagagaatgcctctttctatagggggaggagctggtgcaaagaatgctattctcatgaatatgccaaatgctgttctttcaatgtggaaatatttg

SEQ ID NO: 55700 - DNA, 208 bp, Glycine max
atgccatcaaccgtaacaatgccactttgctgtcgtctttccacatgttccgctgccctgactatgatcatacagatccactcttgcgtctaatttcgattatcactttatatgactatatcgataccattcgtgtttcaatatattctcgttctagctcactcgtgtacatactctcacgcatttgatctgagtgtctattgttctc

SEQ ID NO: 55701 - DNA, 355 bp, Glycine max
ccaacctcatcaagaggaagagcacgagcagaaggaggaacacgaatggcatcgcaaggaggaaaaacacggaggaaagggaagtgaagaggaacaagatgaacgtgaacacccacgcccacaccaacctcatcaaaaggaagaggaaaagcacgaatggcaacacaagcaggaaaagcaccaaggaaaggaaagtgaagaagaagaagaagaccaagacgaggatgaggagcaagacaaagagagccaagaaagtgaaggttctgagtctcaaagagaaccacgaagacataagaataagaacccttttcacttcaactctaaaaggttccaaactctcttcaaaaaccaatat

SEQ ID NO: 55702 - DNA, 181 bp, Glycine max
ggctcgatattatattcagattgtggccgtggcaaccagcaacaatatgtctaaactcgagtgatggtctcagcgttagctacgacactcgctccatttcggggggggcttcatatgcagcaccataacatgtcactctcacttctaattggttccgcaactctcaatctgatgtaaggga

SEQ ID NO: 55703 - DNA, 384 bp, Glycine max
ctaagaaggagaagcaaatggcttcctcaatgatctcttccccagctgttaccactgtcaaccgtgccggtgccggcatggttgctccattcactggcctcaagtccatggctggcttccccaccagaaagaccaacaatgacattacctccattgctagcaacggtggaagagtgcaatgcatgcaggtgtggccaccagttggcaagaagaagtttgagactctttcctacctgccagaccttgatgatgcacaattggcaaaggaagtagaataccttcttaggaagggatggattccttgcttggaattcgagttggagcacggtttcgtgtaccgtgagcacaacaggtcaccaggatactacgatggacgctactgga

SEQ ID NO: 55704 - DNA, 391 bp, Glycine max
atcctggtatttcaggttctcgtcttttgggcaccattcctcagtccatttcacagcaaactgtttggaatcaaatggcaacagtgagaacaccattgaattttgattctagcaagcagagcttttgtcaattttctattgaccttctcggtggaggaattttagtggacaaaactggagattggatcacacttatacaaaattctccaattagtaacttgttgagagttgctgcttggaagaaaggctgtttaatggttaagattgtgatgtctgggaatgcagcagtcaaaaggagtgattgggcctcattggtacaagtgtttttaacaaacagcaacagtacagagcattttgatgcatgtaagtggacaaaatcggaaccacattc

SEQ ID NO: 55705 - DNA, 216 bp, Glycine max
gcgatcaacattatgaaagtcgcgttgctggcctttttcgaaacgctccgcactcctgattagcatcataatgtatcgacgctcaattcaaaagttgcgaaaaccattgggattagattcataccagcagtttcttcgtgaaatttccatcgtgcgtccccgtggtcggactctgctgcgtaacgagtgagcagtcggctcatactctacttcggg

SEQ ID NO: 55706 - DNA, 413 bp, Glycine max
ttgcaatttagaaagttaccaaattgtgatttccccaagagaaactttaggcaaatgtcaaaggttttgtgggtggctcctgaggacaaggcgagtttatggtcacaacttcattatgtttcatgtaataatctggaaatgcaagaagcttatcttgtcaatctcgtaaatgtgttacgagaattgtatttgcacagtccagaggaagctcgccaattgagaaggaaagctctctctcgtattgaatggctgcaaaaagctgatgtgcctaccatagcacagattgaagagttccattcgatgcagaggatgatgaatgctcctgattcaaatgataatatcgatctactgttgagcaatgatttgttgggtttacaaggagcaggtaaagcttttcaaacaagattgttttt

SEQ ID NO: 55707 - DNA, 378 bp, Glycine max
aaaagctgatgtgcctaccatagcacagattgaagagttccattcgatgcagaggatgatgaatgctcctgattcaaatgataatattgatctactgttgagcattgatttgttgggtttacaaggagcaggcaaagcttttccaaacaagattgtttttgatgataagcttgtgttggctaacacacaagaattctttgatggaaattttccagtggattcttggttaccaatttttgtgaattgtctttatcctgtaagtcaattaccttcagaagctgtcgttgtaaatgtcacatgtggtagtggacgtggtggtttacccaccactgcttggattagttctgcagttaacaatcgctcctcagatatcaacaa

SEQ ID NO: 55708 - DNA, 161 bp, Glycine max
gcggaatcctctgcatgatctggaatttgtgttttctttcgcttgttcgtttgtttaattcaataaaggaaattaggcatgaccctcttggtgagtatgctctgcctatttgcaaagttcgacatctcttttaattgtcgtaatgatttgtcaagtgtgtg

SEQ ID NO: 55709 - DNA, 409 bp, Glycine max
aaaagctgatgtgcctaccatagcacagattgaagagttccattcgatgcataggatgatgaatgctcctgattcaaatgataatattgatctactgttgagcattgatttgttgggtttacaaggagcaggcaaagcttttccaaacaagattgtttttgatgataagcttgtgttggctaacacacaagaattctttgatggaaattttccagtggattcttggttaccaatttttgtgaattgtctttatcctgtaagtcaattaccttcagaagctgtcgttgtaaatgtcacatgtggtagtggacgtggtggtttacccaccactgcttggattagttctgcagttaacaatcgctcgtcagattagagcacagggattcgcagagcacttgggaaaggttag

SEQ ID NO: 55710 - DNA, 349 bp, Glycine max
ggcaatgtcacaatttctgagacttatcaatcattgattgtacgcaaatatgtgctcagataagctcgagctcacatgttctctgattaagcacatccatgacttcatctgaaatcatatctgacttccacatttgagtgaataactacattttcatgagtgtgtgatgcaacccgttggagataacaactccaatcacatgacttgctactatcatgacctcgacaccgctggaaccttgatatgaaacattctcgcagccctctttattgataaccttgacatcatgatcatggtgactgatcttcttgccgcacttgatttttggctaatgaagcctgtcagtagg

SEQ ID NO: 55711 - DNA, 168 bp, Glycine max
gcggaatcctctgcatgatctggaatttgtgttttctttcgcttgttcgtttgtttaattcaataaaggaaattaggcatgaccctcttgttgagtatgctctgcctatttgaaaatttccacacctcttttaattgtcgtaatgatgtgtgaagtgtgtgttatttt

SEQ ID NO: 55712 - DNA, 133 bp, Glycine max
gtttgtttaattcaataaaggaaattaggcatgaccctcttgttgagtatgctctgcggatttgaaaatttccacacctcttgtaattgtcgtaaggatgtgtggagtgtgtgttatgttaaaaaaaagaccc

SEQ ID NO: 55713 - DNA, 321 bp, Glycine max
cctttctcttctttttccttattgttctctcaaccttcacttaaacgaataacctagaagacaagttaaaaaaaaaaaatctaaaaccttcgatctttgtcgttgttgttgttgtttttgaatttcgaccaacgcgtgcgccaccgtgcgcggcctgcgatgttgccggcgccaccgggagctacaacaacaaacgtcgtggtgagaatctcgcgctacagatcgcgcggcgagcattgataaagaagaaaaacaccacgtgggtcccacaccgatggaagctcagaagaagacccaaacccaaaccaatctcacccgaac

SEQ ID NO: 55714 - DNA, 343 bp, Glycine max
aaggggtgtttcagaatccttcctagttgagaacaacaatggttcctccattgctggaaggagacttgagatcacagcacgaactgctggggcttcaaagacaattgaggtggaggttgacaagccacttggcctctccttaggccaaaagtctggtggtggtgttgtcatcactgtgagtatctagcacccgtctattcaattgaatgatttcctatttgtgaatgaggattgtttatgcaatgcgtgttgtcttctataggctgttgatggtggtgggaatgcagcaggagcagggttaaagggacgggaccaagtccgttacacgagcagtttctttggg

SEQ ID NO: 55715 - DNA, 231 bp, Glycine max
cacgagttctacattcgccttggtgactcatcgcaacattggcaccttcatgggccaaccggttgctagaatgatttcctacgcagctgtcacggcactgacgatggcgacttctgcagacagatccctcagcagccaccgactgcggctttctcttccaaacgctagcacgatcaagccttcctcgcagtccatcaaatctctaccatgctctgcgacagcgccgttttg

SEQ ID NO: 55716 - DNA, 248 bp, Glycine max
caccacttctgaatcaaataatccaacatcacatatccgtgtaacaacagtatttctattcaaacgtcgactcaggttcactccaaaacataaacttagcaccgtcgatgaatcagcacaattggctacatcgtaatcacaggacgatcatgcaccgtttttcaagtatctacttcatgatcagaaggacaacgacaatcaagatgacaattagtatgaattgaaagattcagtgcacaatactctaa

SEQ ID NO: 55717 - DNA, 263 bp, Glycine max
tccactctaaaggatcacctcggggaattccaattccacattttcaagaaataaggaggcaaaaatgttcatatatgaattggaagtatttgttttcttattaggcctatcctgaagccaaaggaaatgagatcggaattcctcggggaattccaattccacattttcaagaaataaggatgcaaaaatgttcatatatgaattggaattatttgttttcttattaggcctatcttgaagccaaaagaaatgagatctgaatt

SEQ ID NO: 55718 - DNA, 227 bp, Glycine max
aaataatttaagatactatgatgagagcacggttcccattactgttgctgggacttgttttcctggcttcagtttctgtctcatttggcattgcttacggggaaagagagaaccccaaacacaacaagtgtctccagagttgcaatagcgagagagactcgtacaggaaccaagcatgccacgctcgttgcaacctccttaaggtggagaaagaagaatgtgaagaa

SEQ ID NO: 55719 - DNA, 245 bp, Glycine max
gcaccagtttcaccgcacgactatcttgttgtttggagcgatgcgagaaaaactctgtaaacatgttggtttaccaggacctccttacaggtgatgagcttctctctgactccttccgttataaggaaattgagaatggaatgctgtgggaagttgaggggaagtgggttgttaaaggagcagttgatgtagacattggtgcagacccttctgctgagggtggaggagaagatgagggagttgat

SEQ ID NO: 55720 - DNA, 84 bp, Glycine max
ggagctcttcttctaccacacttccgttcatacgccatcgtcataccggtacttaatgaaggacatgcattcattgatcttgtt

SEQ ID NO: 55721 - DNA, 244 bp, Glycine max
ggaaataattgatctttgaaaatgcagggaggaaagaaagctggagagtccatcaaggaaacagctgcaaacattggtgcttctgccaaggctggcatggagaaaaccaaggccactgtccaggagaaggcagaaagaatgacggcacgtgatccgatgcaaaaggagttggcaacccaggcggcgcgtcagcataacacggcggcgaagcaggctgccacggcaaggcacatgggacaaccca

SEQ ID NO: 55722 - DNA, 284 bp, Glycine max
gccttatatcttttttctttcgttcctgtttgacagatagttcttcttcttcccactcactctcactctctgtgttggtgagatgggtatgtcatggctgtgctgctgagaatggctcaccctcacaatggcaacaccaacaacacttccatccagtatttggtactccatgactttctgggtatcaggctcacatccgattcctcgaactcagtggatgtcttgtaatcggaaccttcggccttcgagtcgtctaccggaggacgctgccccttctcggacac

SEQ ID NO: 55723 - DNA, 337 bp, Glycine max
ctggcgcatcttgttccacattttcaagatcattaggatgcaaaaatgttcatatatgaattggaattagttgttttctctatcaggcctatcctgaagccaaaggaaatgagatcggaattcctcggggaattccaattccacattttcaagaaataaggaggcaaaaatgttcatatatgaattggaattatttgttttcttattaggcctatcctgaagccaaaggaaatgagatcggaattcctcggggaattccaattccacattttcaagaaataaggaggcaaaaatgttcatatatgaattggaattatttgttttcttattaggccta

SEQ ID NO: 55724 - DNA, 341 bp, Glycine max
tctgctctcaagactgtgaattatggaatcctgcttgcacaaaagcaatgactatgtcatttaatccaaacccgtgttctgatgcatggagtttggaatttctgaagcgtaccggatttcattgtgatatcatttgtgtcactggatggactgccaccccaatgcaggatgttcaggttacaattgattggtttatttcctctcaggaatgtgttcccaggacctattgtgttttaaatccacaaaatccttttgtgttaaataggtggatgggaaaaactgactttccctcagggcacttcccgaagttgtaaagagaatgcctctttctaaagggggag

SEQ ID NO: 55725 - DNA, 360 bp, Glycine max
gattatgctagttttgatggtttgattaccaagcaagttatgagcaagatggcagaaatgataaacagtctttgtggtggtgatgaaaaattgatgcgtgaaaggacgcacctgctgttggcttgttgttcaaggatggcaatttgtaagaaagatgtttggagagttgaatgtggaatcccttctggatttccgctcacagttatttgcaatagcatttttaatgagatgctcattagatatagctatgaaaaattactgcgccaggctaaagctccaagtatgtttttacaatccttcacaaattttgtttctttgtgtgtgtatggtgatgataacttaattagtgttcaagaatat

SEQ ID NO: 55726 - DNA, 214 bp, Glycine max
cttcataaaatatatgtatgtatgtttaggtagcaagataccttggatatgcctgtatatagcaaaaatatctcacaaaacatatatatgtatgtttagatagcaagataccttggacacgcatgtatatagcaaaatacctcacaaaaatatacgtatgtttaggtagcaaaatacctcatggaaaaaaagagagcaaaaagagcgagcatcg

SEQ ID NO: 55727 - DNA, 261 bp, Glycine max
ccatttcggtaataacacaatcgcaatccgttactcactctcttccatggcgacagggtgactgaagatggcggcgcatcgtgtcccctcctcgccggcgttcaagctggccattctccgggcccacgcgtcggaggcacaggccccacgactataacgatacgaggcgtttcaccctggaagcacacccttcacactcacggttggaaccccgagaacacctcatagccctagctcattgactaccagattaacctaaag

SEQ ID NO: 55728 - DNA, 55 bp, Glycine max
gtgcagggaaaggtgtagctgggatccgagttaaattaatggatgtttttagatc

SEQ ID NO: 55729 - DNA, 394 bp, Glycine max
cttgcatgcgtccaggtcgaatctaaaggatcccctcggggaattccaattccacattttcaagaaataaggaggcaaaaatgttcatatatgaattggaattatttgttttcttattaggcctatcctgaagccaaaggaaatgagatcggaattcctcggggaattccaattccacattttcaagaaataaggaggcaaaaatgttcatatatgaattggaattatttgttttcttattaggcctatcctgaagccaaaggaaatgagatcggaattcctcggggaattccaattccacattttcaagaaataaggaggcaaaaatgttcatatatgaattggaattatttgttttcttattaggcctatcctgaagccaaaggaaatgaga

SEQ ID NO: 55730 - DNA, 381 bp, Glycine max
aacaaacagcaacagtacagagcattttgatgcatgtaagtggacaaaatcagaaccacattcctgggaattaatcttcccaatagaggtatgtggtcctaataatggttttgaaatgtggagttctgagtgggcaaatcaaacttcatggcatttgagtttccttattgacaatcccaaacagtctacagtttttgatattctcttgggaatctctcaagattttgaaattgctggtaatactcttatgccagctttttctgttccacaggctactgccagatcttctgaaaatgcggaatcctctgcatgatctggaattcgtgttttctttcgcttgtttgtttgtttaattcaataaaggaaatttggcatgaacct

SEQ ID NO: 55731 - DNA, 390 bp, Glycine max
ttgcacgcgtccaggtcgaatctaaaggatcccctcggggaattccaattccacattttcaagaaataaggaggcaaaaatgttcatatatgaattggaattatttgttttcttattaggcctatcctgaagccaaaggaaatgagatcggaattcctcggggaattccaattccacattttcaagaaataaggaggcaaaaatgttcatatatgaattggaattatttgttttcttattaggcctatcctgaagccaaaggaaatgagatcggaattcctcggggaattccaattccacattttcaagaaataaggaggcaaaaatgttcatatatgaattggaattatttgttttcttattaggcctatcctgaagccaaaggaaatg

SEQ ID NO: 55732 - DNA, 380 bp, Glycine max
aggtccactctaaaggatcacctcggggaattccaattccacattttcaagaaataatgaggcaaaaatgttcatatatgaattggaattaattgttttcttagtaagcctatcctgaagccaaaggaaatgagatcggaattcctcggggaattccaattccacattttcaagaaataaggaggcaaaaatgttcatatatgaattggaattatttgttttcttaataggcctatcctgaagccaaaggaaatgagatcggaattcctcggggaattccaattccacattttcaagaaataaggaggcaaaaatgttcatatatgaattggaattatttgttttcctagtaggcctatcctgaagccaaaggaaatgag

SEQ ID NO: 55733 - DNA, 360 bp, Glycine max
cttcgggaagtgccctggggaggagctggtgcaaagaatgctattctcatgaatatgccaaatgctgttctttcaatgtggagatattttgttggagatctcgtctttgaagtttctaagatgacttctccctacattaaatgtacagtctctttcttcatagcatttggaaatttggctgatgacaccatcaattttgaggcttttccccacaagctggtgcaatttggagagattcaggaaaaagttgtattgaaattttcacaagaggaatttcttacagcttggtcaactcaggtgcgtcctacaacaactctgttggctgatgggtggtcatatttgtatgctatggtgcatgat

SEQ ID NO: 55734 - DNA, 210 bp, Glycine max
gaggtcgttgaaccaggcattcactcaggagctctgcgagcaagtctaccatcttgtcctagagtcattcctctaacaggctggagtgatcatggttacatgtgatacatgtgtaaaattgttatcggcacagacttccacacaactatagaagacggtcacatatgatgtcgagactgaggtgcctaacaactgcacgaacacagattt

SEQ ID NO: 55735 - DNA, 55 bp, Glycine max
tattccgcgagatgtagattgcctatttggcaccaaagctggttttcctttcacc

SEQ ID NO: 55736 - DNA, 102 bp, Glycine max
ctcaaatatctggttgatgagtgtccttttgcatttgtgaactagtatgtaatattttattcacttaaataaagcgcattactatgtgcaatgagtgtgttt

SEQ ID NO: 55737 - DNA, 343 bp, Glycine max
gaattctccagagagaagaagaaacttaatcgatcatcacttcacttcactaatacatcatggcagacgagacccagaacaagtatgagagctctgaggttgaggtccaggatcgtggtgtttttgactttctcggtaagaaaaaggatgaagaagacaagcctcatcctcaggaggaggtcatcgccaccgagtttcaaaaagtcactgtctcagaccaaggagagaacaagcacagcctcttagaaaagcttcaccgatctgacagcagctctagctcttcaagtgaggaggaaggagaagatggagagaaaggaagaagaagaagaaggaaaagaaaggg

SEQ ID NO: 55738 - DNA, 345 bp, Glycine max
attacatctaagcaactagatgttgacagatcactttcctagtagctggaagaatacagttttctttccatatcagattataacgctatgtatgtatatagataaatatattttaaagaagctatttttgcttgagaagtagggaaaaattgcactcttaaccaaaaaaataaggaaaaagatgatttccaccacatacctttgtatacctaaaatcttacacttagctcagtcataaaaagcttgcgcacagtttaaaacaacccatacaaagaaaagagagtaactcacatcctttgcggctctaagcacaaagcatcaacttgggaatgattctaatgatgg

SEQ ID NO: 55739 - DNA, 348 bp, Glycine max
tcggggaattccaattccacattttcaagaaataaggaggcaaaaatgttcatatatgaattggaattatttgttttcttattaggcctatcctgaagccaaaggaaatgagatcggaattcctcggggaattccaattccacattttcaagaaataaggaggcaaaaatgttcatatatgaattggaattatttgttttcttattaggcctatcctgaagccaaaggaaatgagatcgggattcctccgggaattccaattccacattttcaagaaataaggaggcaaaaatgttcataaatgaattggaattagttgttttcttattacgcctatcctgaagccaa

SEQ ID NO: 55740 - DNA, 343 bp, Glycine max
aaaatagtttacgtgttatccttcatcatagcctcttagacttgaaaacggataagaacaaaagtgagtggcccttccaataggcaaaatttgttgtgctttcacaatcatgctacccgtaaatatgtaaactacaaatttcttgaaccttcgtattaattcacctgttatccccccacttcatcaacttctttccctaaagaaacaaacataacttcccctgtctctgctctgctacagattcctcaagtactgttgtgttcactgttgaggcctaatctggacaactattctctcacattttttataataaatttatgtttgaatgcttatcccccaatgt

SEQ ID NO: 55741 - DNA, 339 bp, Glycine max
ggtccttaaacactcatcagtcatcaccatggccaagctagttttttccctttgttttctgcttttcagtggctgctgcttcgctttcagttccagagagcagcctcagcaaaacgagtgccagatccaaaaactcaatgccctcaaaccggataaccgtatagagtcagaaggagggctcattgagacatggaaccctaacaacaagccattccagtgtgccggtgttgccctctctcgctgcaccctcaaccgcaacgcccttcgtagaccttcctacaccaacggtccccaggaaatctacatccaacaaggtaagggtatttttggcatgatata

SEQ ID NO: 55742 - DNA, 53 bp, Glycine max
tgcggctgaggattccgatcgaattaccttcttcgtttctcgcaaagtttaag

SEQ ID NO: 55743 - DNA, 326 bp, Glycine max
agtactctctataatgagtcacgaaacttttgcgggaataaaaggagaaattccaatgaaaaaaaaaaaaaaaaaaaaaaaaaaaaaaaaaaaaaaaaaaaaaaaaaaaaaaaaaaaaaaaaaaaaaaaaaaaaaaaaaaaaaaaaaaaaaaaaaaaaaaaaaaaaaaaaaaaaaaagggggggcccccaaaaaggaaccccgtcaaccgggaaataaattcgggacgggaaccggaaggggaaaaagtttcccaaaaagggagccaaaaaaaacctgggggaaacaagggcaaaaagggttcccgggggaaaatggtaaccggcc

SEQ ID NO: 55744 - DNA, 358 bp, Glycine max
aacctcggggaattccaattccacattttcaagaaataaggaggcaaaaatgttcatatatgaattggaattatttgttttcttattaggcctatcctgaagccaaaggaaatgagatcggaattcctcggggaattccaattccacattttcaagaaataaggaggcaaaaatgttcatatatgaattggaattatttgttttcttattaggcctatcctgaagccaaaggaaatgagatcggaattcctcggggaattccaattccacattttcaagaaataaggaggcaaaaatgttcatatatgaattggaattatttgttttcttattaggcctatcctgaagccaaaggaaa

SEQ ID NO: 55745 - DNA, 345 bp, Glycine max
gttaaataggtggatggggaaactgactttcccccagggcacttcccgaagtgttaaaagaatgcctctttcaatagggggaggagctggtgcaaagaatgctattctcataaatatgccaaatgctgttctttcaatgtggagatattttgttggagacctcgtctttgaagtttctaagatgacttctccctacattaaatgtacagtctctttcttcatagcatttggaaatttggctgatgacaccattaattttgaggcttttccccacaagctggtgcagtttggagagattcaggaaaaagttgtattgaaattttcacaagaggaatttcttacagc

SEQ ID NO: 55746 - DNA, 287 bp, Glycine max
cattctgggcaacattcaaacgccggttgatagcatcagacagggaacttcaacacggagtttgcctcaagcaaggtccacggtgaccctcaacaatgggcagcatggcccttgcgttcggttcctcgctacggtatcactttagtcaaccgcgggaagagagataaccacatgtttacgggacttttgctgaatgatcatgtaattattttgccattcaagtgctggaaacataatggagcctcttttctagtatatgtcaaggtggtcagcatacctgactcaca

SEQ ID NO: 55747 - DNA, 62 bp, Glycine max
aaaataaaaaaaaaaaaaaaaaaaaaaaaaaaaaaaaaaaaaaaaaaaaaaaaaaaaaaaaa

SEQ ID NO: 55748 - DNA, 412 bp, Glycine max
aggtccactctaaaggatccactcggggaattccaattccacattttcaagaaataaggaggcaaaaatgttcatatatgaattggaattatttgttttcttattaggcctatcctgaagccaaaggaaatgagatcggaattcctcggggaattccaattccacattttcaagaaataaggaggcaaaaatgttcatatatgaattggaattatttgttttcttattaggcctatcctgaagccaaaggaaatgagatcggaattcctcggggaattccaattccacattttcaagaaataaggaggcaaaaatgttcatatatgaattggaattatttgttttcttattaggcctatcctgaagccaaaggaaatgagatcggaattcctcgggggtaccgagctcgaat

SEQ ID NO: 55749 - DNA, 304 bp, Glycine max
atccgttcaaggttcatctgtgcataattaacgagattattttttgaattgtatgataagatcgatgtgcctccattcctgcacctaacgtatgtactgtttgggacatccagtttggtacattgcatgcctgcaaaacatgttgtccagacagttgatgtaccacacagtttcaaatctaatgcaactatgacatgtcagctacactgttgtcacgcaaatttcgaattacttaaggagaacttaatttttagcaggatgagtatcagagtatgcaatctgtactatcagcaatatcccctca

SEQ ID NO: 55750 - DNA, 327 bp, Glycine max
tgctcatctagaatgtaaatggtgctacatgtgatgaggcatgagctttttatattattttaaaataaaaacagtttttgattaaatcaaacacacccttaatgtttggtcctatgtttcaaaaggtttcacatagcaaataacttataacatgtacggcatatacagatattcggatgacaccctttatctcagtatgatataaagatgccttaagttttaagtgaggtattaaatcaaaagggtaaagtattttaagaataaaatcaagttatggtaatgctagtttaatttattgatgtatgatgtgcagaggctggtcaatac

SEQ ID NO: 55751 - DNA, 280 bp, Glycine max
aagtcaaatatctacattttcacaccatgatggttggggagacgcaccgcccagatctagccgtacacgtgccaccgtgggcgccggcgatcttctcaccgtacaccggtagtgccgcttaggcgccgtactccacgcaagatgcacttagtgcacgttcggcactacgactccatcgatgctgagtcagactcggatcgttccgtcgcgggacccggaagtcccggtggtcgcatacgcctgccaccatttccgcatgttccagttctacgttcggtga

SEQ ID NO: 55752 - DNA, 323 bp, Glycine max
agtgtttttaacaaacagcaacagtacagagcattttgatgcatgtaagtggacaaaatcggaaccacattcctgggaattgatcttcccaatagaggtatgcggtcctaataatggttttgaaatgtggagttctgagtgggcaaatcaaacttcatggcatttgagtttccttattgacaatcccaaacagtctacagtttttgacattctcttgggaatttctcaagattttgaaattgctggtaatactcttatgccagcttttttctgttccacaagctactgccagatcttctgaaaatgcggaatcctctgcatga

SEQ ID NO: 55753 - DNA, 119 bp, Glycine max
  unsure (1)..(119): unsure at all n locations
ccaaaaccctcgtctccttggtcgcgccctctactccacccccatccacatttgggacanagaaaccggtancgttgccagcttcgccgcttccttcaacttcaccttctatgcccctg

SEQ ID NO: 55754 - DNA, 322 bp, Glycine max
ggggaattccaattccacattttcaaaaattactgatgcataaatgtttcagatatgaattggaattatttgttttcttattaggctcatcctgaagccaaaggaaatgagatcggaattcctcggggaattcaaattccacattttcaagaaataaggaggcaaaattgttcatatatgaattggaattatctgttttcttattaggcctatcctgaacccaaaggaaatgagatcggaattcctcggggaattccaattcaacattttcaagaaataaggaggcaaaaatgttcatatatgaattggaattatttgtttt

SEQ ID NO: 55755 - DNA, 140 bp, Glycine max
tactcttatgccagctttttctgttccacaagctactgccagatcttctgaaaatgcggaatcctctgcatgatctggaattcgtgttttctttcgcttgttcgtttgtttaattcaataaaggtcagcatgaatgaatc

SEQ ID NO: 55756 - DNA, 331 bp, Glycine max
ctttctccgagaacaaaaaaaaaaacgtgattcgctcttctcttcgaataaaccacaaaaccaacaaacgagaagaggagtgagagaagatggggttgtcgttcacgaagctgttcagcaggttgtttgcgaagaaggaaatgaggattctgatggtaggtctcgatgctgctggtaagacaaccatcttgtacaagctcaagcttggagaaatcgtcaccaccatccccaccatcggatttaatgttgagactgtggagtacaagaacatcagcttcactgtgtgggatgttggtggtcaggacaagatccgtcctctgtggaggcatta

SEQ ID NO: 55757 - DNA, 329 bp, Glycine max
  unsure (1)..(329): unsure at all n locations
tcttcttctcttacagctanggttttagcgcagcttcttctatatttaaggaagatgggtaaggaaaaggttcacatcagtattgtggtcattggccatgtcgactctgggaaatccactaccactggtcacctgatttacaagcttggaggcattgacaagcgtgttattgagaggtttgagaatgaagctgctgagatgaacaagaggtctttcaagtatgcctgggtgctggacaaacttaaggctgagcgtgaaataggaatcaccattgatattgctttgtggaagtttgaaacaacacagtattattgcacagttattgatgc

SEQ ID NO: 55758 - DNA, 126 bp, Glycine max
caggcttcaacgccgcttcgtccaacaaccaaaacaacaagccgggaaccaatttgttcggaccaaaattaaacccccgcaacaatttgcaacggcccttgcagggccaaccgggaggtggcaacc

SEQ ID NO: 55759 - DNA, 68 bp, Glycine max
aaaaaaaaaaaaaaaaaaaaaaaaaaaaaaaaaaaaaaaaaaaaaaaaaaaaaaaaaaaaaaaaaaac

SEQ ID NO: 55760 - DNA, 364 bp, Glycine max
tctgcctcgaccccgcttactgccacgatgcacacgagtcattcggctaccagtatctgtgcaccacattcaatcgccgtaatacttgtgtaacagcacgtcaagggataacgcatgagtggaaatgtcaatcaacagccagcgtatggccaccaattgttgtaccgccccgttgctaacgtttttcaacacgctcagcgccccttacaagtattccagcgttctacgctcaacttagatgtgccgaatcacgacacgacgaaacggacagcaagcatattcccctatacgctgccacattcgctcacctgttccgattcagctgcatcaccgagaactgtccccctttctcgcttcaggaagc

SEQ ID NO: 55761 - DNA, 70 bp, Glycine max
aacaacgaaaacaacaagccgggaaccaatttattcggcccaaaattaaacccccccaaaaatttccaac

SEQ ID NO: 55762 - DNA, 57 bp, Glycine max
ggaccggtacttgcaggcttacaacctttcccaaaattgagtcgtattaaagcttgg

SEQ ID NO: 55763 - DNA, 322 bp, Glycine max
cggggaattccaattccacattttcaagaaataaggaggcaaaaatgttcatatatgaattggaattatttgttttcttattaggcctatcctgaagccaaaggaaatgagatcggaattcctcggggaattccaattccacattttcaagaaataaggaggcaaaaatgttcatatatgaattggaattatttgttttcttattaggcctatcctgaagccaaaggaaatgagatcggaattcctcggggaattccaattccacattttcaagaaataaggaggcaaaaatgttcatatatgaattggaattatttgtttt

SEQ ID NO: 55764 - DNA, 257 bp, Glycine max
  unsure (1)..(257): unsure at all n locations
tcaacttcatcctaaccttttacacatcatatttttcggcttagaaacaaacataagcaaatttcaaattgtcntgtccttttcgggtaatgggctgtaanaggaaaaactcctgttttgtgcgcatattgataatggnatagtctttcttctgaacccatttttgcaaaaaggaanaaagagaaagagagagagagagagaagagagagatattcactgccaagaaagaagacatgaaaattcagtgcgatgtgtg

SEQ ID NO: 55765 - DNA, 317 bp, Glycine max
ggaattttagtggacaaaactggagattggatcacacttatacaaaattctccaattagtaacttgttgagagttgctgcttggaataaaggctgtttaatggttaagattgtgatgtctgggaatgcagcagtcaaaaggagtgattgggcctcattggtacaagtgtttttaacaaacagcaacagtacagagcattttgatgcatgtaagtggacaaaattcgaaccacattcctgggaattgatcttcccaatagaggtatgtggtcccaataatggttttgaaatgtggatttctgagtgggcaaatcaaac

SEQ ID NO: 55766 - DNA, 230 bp, Glycine max
gtaatactcttatgccagctttttctgttccacaggctactgccagatcttctgaaaatgcggaatcctctgcatgatctggaatttgtgttttctttcatttgtccgtttgtttaattcaataaaggaaattaggcatgaccctcttgttgagtatgctctgcctatttgaaaatttccacacctcttttaattgtcgtaatgatgtgtgaagtgtgtgttattttaaa

SEQ ID NO: 55767 - DNA, 221 bp, Glycine max
gcttcaaaaaaaaaaaaaaaataaaaaaaaataaaataaaaaaaaaaaaaaaaaaaaataaaaaaaaaaaaattaaaaaaaaaattaaaaaaaaaaaaaaaaaaataaaaaaaaaagggggggctcccaataattaacttctttaacccggaatttatttctgaactgttacttaaatgtttacaatttttccctatattaattcatattaaatcttggtt

SEQ ID NO: 55768 - DNA, 378 bp, Glycine max
  unsure (1)..(378): unsure at all n locations
attcgatgcagaggatgatgaatgctcctgattcaaatgataatattgatctactgttgagcattgatttgttgggtttacaaggagcaagtaaagcttttccaaacaagattgtttttgatgataagcttgtgttggctaatacacaagaattctttgatggaaattttccagtggattcttggttaccaatttttgtgaattgtctttatcctgtaagtcaattaccttcagaagctgtcgttgtaaatgttacatgtggtagtggacgtggtggtttacccaccactgcttggattagttctgcagttaacaatcgctcctcagatatcaacanaaagattcgcacagcacttgggaaaggtaagaaaattgttt

SEQ ID NO: 55769 - DNA, 93 bp, Glycine max
gccttccggaccgctacctgcgggcgtatccgctttcccgatagtcggtcgtcttagagcttggcgtacgggtggtcatagctgtatcggggt

SEQ ID NO: 55770 - DNA, 304 bp, Glycine max
gctctggagctttataaaacatctccgtgcaatgggtgaaaaaaagctctttaacaaatgaacaatatcccaaagagggacacagcgttaacaactgcagcgaattatgaatcaatgttttctgcagaatgacggacctgtacttgcaacattccagcgttatataacatgtaccggcgtggaccagaacatccgtctcaacagaaagcaaaaagaatgggattaaccacgatagccttcaacgatattcaggaacaagttggaaaccaaaaatgagtgtccttccccatatttttcactctgc

SEQ ID NO: 55771 - DNA, 218 bp, Glycine max
ttcacaattttcaacatctaatgtggcaccaatcgttcatactcgtcaattcggcactaactgtattcctactatgcctatcctgaatctaaacgatatgaaatctgcattcctcggggaactctaagtccacatcttcaagaggtaccgtcgcatgcatgttcaaatcctgattgacatcatttgtattcacatgtgggctaaccgtaagccaaacg

SEQ ID NO: 55772 - DNA, 271 bp, Glycine max
agcatttggaaatttggctgatgataccatcaattttgaggcttttccccacaagctggtgcagtttggagagattcaggaaaaagttgtattgaaattttcacaagaggaatttcttacagcttggtcaactcaggtgcgtcctgcaacaactctgttggctgatgggtgtccatatttgtatgcaatggtgcatgataattcagtgtctacaataccaggtgattttgtcattggtgtcaagttgacaaccataaacaatatgtgtgca

SEQ ID NO: 55773 - DNA, 345 bp, Glycine max
aaaaaaaaaaaaaaaaaaaaaaaaaaaaaaaaaaaaaaaaaaaaaaaaaaaaaaaaaaaaaaaaaaaaaaaaaaaaagttatggtggaggccgaaaattattttacttgaccctggaagttagtccgggatcccgtgccccttggcggtatacatttagggggggggccccccttttttgcctttccccccggggtattctttccggtcccgtttctcgagggtttccccttttccccatcggcgttctatttaaagctggggctttcccgggcacaacgtttttccccttgtaatttttttacccctcaaaatttccctggccctgtcggcccggttccctatt

SEQ ID NO: 55774 - DNA, 189 bp, Glycine max
ggttgggccaccaaccatggctgtaattgcctcgatctcaggacacttcaaggcaattacagccatggttgggccagcaacatatctgtaattgccttcaagtgtcctggcatcgatgtgatcgttgaggacattgcgacatcccgactcagcgcgtgttagactcatcaactcacgatatgtgcacct

SEQ ID NO: 55775 - DNA, 279 bp, Glycine max
gtcgtcggctcgcgtgcggcgtttggctgttttgtcggtcctgggattcgggttgcgcctttcagcctagtgatggtccgggaggccggttattttgatgctgcaggaaattttgttgaatatataagagagaacgagattaaggagccttacaggatgcatggcttgataatgttgaagttgatccaaagtatgctgcattaagctctgttgcaacagatgacgaaggattacgtgcccccaaacctttcctcaaaagatattggaatcatgaggagg

SEQ ID NO: 55776 - DNA, 345 bp, Glycine max
cacttcccgaagtgttaaaagaatgcctctttctatagggggaggagctggtgcaaagaatgctattctcatgaatatgccaaatgctgttctttcaatgtggagatattttgttggagatctcgtctttgaagtttctaagatgacttctccttacattaaatgtacagtctctttcttcatagcatttggaaatttggctgatgacaccatcaattttgaggcttttcctcacaagctggtgcagtttggagagattcaggaaaaagttgtattgaaattttcacaagaggaatttcttacagcttggtcaactcaggtgcgtcctacaacaactctgttggc

SEQ ID NO: 55777 - DNA, 332 bp, Glycine max
ggaaaaagttgtattgaaattttcacaagaggaatttcttacagcttggtcaactcaggtgcgtcctgcaacaactctgttggctgatgggtgcccatatttgtatgctatggtgcatgatagttcagtgtctacaataccaagtgattttgtcattggtgttaagttgacaaccataaacaatatgtgtgcatatgggctcaatcctggtatttcaggttctcgtcttttgggcaccattcctcagtccatttcacagcaaactgtttggaatcaaatggcaacagtgagaacaccattgaattttgattctagcaagcagagcttttgtc

SEQ ID NO: 55778 - DNA, 137 bp, Glycine max
ttttctttcgcttgttcgtttgtttaattcaataaaggaaattaggcatgaccctcttgttgagtatgctctgcctatttgaaaatttccacacctcttttaattgtcgtaatgatgtgtgaagtgtgtgttatttt

SEQ ID NO: 55779 - DNA, 156 bp, Glycine max
ttttctttcgcttgttcgtttgtttaattcactaaaggaaattaggcatgaccctcttgttgagtatgctctgcctatttgaaaatttccacacctcttttaattgtcgtaatgatgtgtgcactgtgtgttattttagcagccggggcggcggag

SEQ ID NO: 55780 - DNA, 397 bp, Glycine max
aggtcaactctaaaggatcccctcggggaattccaattccacattttcaagaaataaggaggcaaaaatgttcatatatgaattggaattatttgttttcttattaggcctatcctgaagccaaaggaaatgagatcggaattcctcggggaattccaattccacattttcaagaaataaggaggcaaaaatgttcatatatgaattggaattatttgttttcttattaggcctatcctgaagccaaaggaaatgagatcggaattcctcggggaattccaattccacattttcaagaaataaggaggcaaaaatgttcatatatgaattggaattatttgttttcttattaggcctatcctgaagccaaaggaaatgagattgggattcctccggg

SEQ ID NO: 55781 - DNA, 360 bp, Glycine max
cggctcgagcacagcaaactgtttggtatttcaggttctcgtcttttgggcaccattcctcagtccatttcacagcaaactgtttggaatcaaatggcaacagtgagaacaccattgaattttgattctagcaagcagagcttttgtcaattctctattgatcttcttggtggaggaattttagtggacaaaactggagattggatcacacttatacaaaattctccaattagtaacttgttgagagttgctgcttggaagaaaggctgtttaatggttaagattgtgatgtctgggaatgcagcagtcaaaaggagtgattgggcctcattggtacaagtgtttttaacaaacagcaac

SEQ ID NO: 55782 - DNA, 100 bp, Glycine max
aaattaggcatgaccctcttgttgagtatgctctgcctatttgaaaatttccacacctcttttaattgtcgtaatgatgtgtgaagtgtgtgttatttta

SEQ ID NO: 55783 - DNA, 91 bp, Glycine max
acggatttgcgcgctctgcaggaaaaaatctgccaagccgctgggagaggcggtttagctttcccgagattgactcgtattagagacttgg

SEQ ID NO: 55784 - DNA, 101 bp, Glycine max
gctcgtcgccactcctccatttaagcgttcattttcgaatctgtctgtctcggctatgccatcactcgggaaatggtctgtcaggacaaagcaggataatc

SEQ ID NO: 55785 - DNA, 66 bp, Glycine max
gggtgctctgcactagtgcatctgactccgcgccgggagacgcggtatgcatattgtccgcggatc

SEQ ID NO: 55786 - DNA, 220 bp, Glycine max
cagagcttttgtcaattctctattgatcttcttggtggaggaattttagtggacaaaactggagattggatcacacttatacaaaattctccaattagtaacttgttgagagttgctgcttggaagaaaggctgtttaatggttaagattgtgatgtctgggaatgcagcagtcaaaaggagtgattgggcctcattggtacaagtgtttttaacaaaca

SEQ ID NO: 55787 - DNA, 318 bp, Glycine max
  unsure (1)..(318): unsure at all n locations
gagcttaattattaacacttccttagttcaatatggggaagcncttcactctctctctttcttcnctttgcttgctactcttgtcgagtgcatgctttgctattagctccagcaagctcaacgagtgccaactcaacaacctcaacgcgttggaacccgaccaccgcgttgagtccgaaggtggtttgattcaaacatggaactctcaacaccctgagctgaaatgcgccggtgtcactgtttctaaactcaccctcaaccgcaatggcctccacttgccatcttactcaccttatccccggatgatcatcatcgccc

SEQ ID NO: 55788 - DNA, 275 bp, Glycine max
gatccttaataacgcatcagtcatcgacaaggacaatcgaacttgttcgcattaagttccacctttcaatggctgaacacgaacatcaacctttacaaatgcggacttagcataccgaattgtacatacagcagataattggcatctgaccaggtataccagttgatggccgacgctggctcatatacgcatttcaccgcaattggaatccattccaatatcaacgagtggaacttccttgcaggttccacatccactgtgaccttcgagaaacc

SEQ ID NO: 55789 - DNA, 150 bp, Glycine max
ttttttttttttttttttttttttaataaaaatgaccagtaattgtcatgggcacgtataaaaactaaagtctaggccctcgtgtatgcgattatgattgtaacattagttgaatataatttatttatttttactttttttctgcccgtc

SEQ ID NO: 55790 - DNA, 78 bp, Glycine max
gtttgtttgtaaaaaaacagtgaaattcttttattcataacttgaagtacaaaataaaagaatttcactgttttttgt

SEQ ID NO: 55791 - DNA, 191 bp, Glycine max
gagattaattgttttcataatatgccaatcgcgatgccaggggaaatgagatcgtggattcctcggggaactccaaatctatgttttccagattgtatgctgcacaagtgttgcatatataaatggtattcattggtttcctaataaggccaaccctaatcccaagggaattggattcggaattccccggg

SEQ ID NO: 55792 - DNA, 358 bp, Glycine max
  unsure (1)..(358): unsure at all n locations
gattgggcctcattggtacaagtgtttttaacaaacagcaacagtacagagcattttgatgcatgtaagtggacaaaatcagaaccacattcctgggaattgatcttcccaatagaggtatgtggtcctaataatggttttgaaatgtggagttctgagtgggcaaatcaaacttcatggcatttgagtttccttattgacaatcccaaacagtctacagtttttgatattctcttgggaatctctcaagattttgaaattgctggtaatactcttatgccagctttttctgttccacaggctactgccaaatcntctgaaaatgcggaatcctctgcatgatctggaatttgtgttt

SEQ ID NO: 55793 - DNA, 339 bp, Glycine max
actcctttggatattctgcagcgactggtctccacattggaccgttgtgcatcacgcacatgctcattacctgttgagactgtagagcttatgcctcctcactgcagcagattttccttgacttgtttacagaagttattttctttgtgcagttattctaatgaagtcaattggaatatgacaagatctgaagtcagcaaaatctcaattacagtgctcatgaccagatgtgaatacatcttgagcaggtttctgacagatgaaaatggcttaggtgactgtccattaccaaaagcaagacttgatgaaattatttatgttctccaagaactggcacat

SEQ ID NO: 55794 - DNA, 338 bp, Glycine max
cttggcagaaccggcccaattgaacacttccaaggaaataagcatcggaacgtcccaacctgaagaaagtgcttccgcttcatctcaccctataagacccaaacaaggcaacaccaccatccaagagataaaaaagcacattgcaaaggaaacgcgaccaaaaccaaaccccaattcacccgagccaattgaaaacaaacctttgtctaacgaaaacttaaccaaagttgaaataatgggaaagcctccaaagcctctctctcacacctcttagtcgctccctccaatgccctatgtgtctacaagaggggacaatgggagaacggttaatgggtttc

SEQ ID NO: 55795 - DNA, 297 bp, Glycine max
gtgcaacgaataaaagaaagcgatagaaaaggaagaagaagcgcttcgcgatgcacgaaagagaagaattggaagcaaagtttcggcgttttgtcttttataaaaaaaatgttaaatcattataattttctatgatagggattggtttcttgtcttttttcttttgtttatgaatatcggtgtattttaacagttgtaaagcactgcgccctcgctgcatgatcatgtagttttcaaccagctgcgtttgcaggggttgtaaaactaataacatatataattaaataaattatattc

SEQ ID NO: 55796 - DNA, 57 bp, Glycine max
aaaaaaaaaaaaaaaaaaaaaaaaaaaaaaaaaaaaaaaaaaaaaaaaaaaaaaaaa

SEQ ID NO: 55797 - DNA, 344 bp, Glycine max
  unsure (1)..(344): unsure at all n locations
cggctcgagatcaattttgaggcttttccccacaagctggtgcagtttggagagattcaggaaaaagttgtattgaaattttcacaagaggaatttcttacagcttggtcaactcaggtgcgtcctgcaacaactctgttggctgatgggtgtccatatttgtatgcaatggtgcatgatagttcagtgtctacaataccaggtgattttgtcattggtgtcaagttgacaaccataaacaatatgtgtgcatatgggctcaatcctggtatttcaggttctcgtcttttgggcaccattcctcagtccatttcacagcanactgtttggaatcaaatggcaac

SEQ ID NO: 55798 - DNA, 234 bp, Glycine max
cggctcgagatcaattttgaggcttttccccacaagctggtgcagtttggagagattcaggaaaaagttgtggtgaaattttcacaagaggaagttcgtacagcttggtcaactcacgtgcgtcctgcaggaactctgttggctgatgggtgtccagatttgtatgcaatggctcatgagagttcagtgtctacaatagcagatgattttggcactggtgtcaagttgacaacc

SEQ ID NO: 55799 - DNA, 113 bp, Glycine max
cgcgttagttcactcggaattccgctctagcgtctccatataagctatgaggcttttctccaaacactggttcagtttggagatattcgcgaataacttgtgttgacattttc

SEQ ID NO: 55800 - DNA, 116 bp, Glycine max
ttccgctcgaggactgacgtgactcgttcttcttcgtagctatcttcgtcctttgtcgttcgtgtgtttgctttttctctcacctcaaactgtcctgccgcggtgggacatgtagt

SEQ ID NO: 55801 - DNA, 384 bp, Glycine max
gctagaagcaataagatgaaaatgaaagtgcttgttttgtttgttgctacagttttggtagcatatgaatgccatggctcagactaccagaagttccctctccaaatgaaaactgggtttggtgggcaatacagcaatgaggtggcatgtgccagttggaggcttggcgtggaagcaaacaacgtagtcaagtggcaaactgttcctgcagcttgcggagagtacatagctgactacgttctaggagaccaatatagatcagattccaaaacagttaaccaacaagcttatttctatgctaaatccctcaaactcaccaacaaagatgtctttgtcttggacgttgacgacactactctctctaatctccagtattttgctaac

SEQ ID NO: 55802 - DNA, 454 bp, Glycine max
  unsure (1)..(454): unsure at all n locations
gacgtagcatgcacgcgtccgtaagctcggaaatcggctcgagttcagtgaatangaggctctctgatgtcatgagcatgttgtcatcaagacaacctagctgtccacagttatacatgtatagctctgctgacagggttattcctgctgattcagtggaatcgtttgtagaggctcagcgtagggctggacatgatgtgagggcatgcaattttgtctcctcaccccatgttgaccactttaggaatgacccaaaattgtatacatctcagctcagtcagtttttggaggagtgtgttgttagtcgttgtaaatcttactaattctttacattccttggcttactcatacaccatatagttcatccattttgatttttgaaagcagccattccattaatggatggtgcgatggtgctatggtggttaggactatatcaaaagtcaaccacctc

SEQ ID NO: 55803 - DNA, 400 bp, Glycine max
gattgttgtgactcgttcttcttcgtcgttatcttcttcttttgttgtttgtgtgtttgttttttctctcacctgaaaatgtcttgctgcggtggtaactgtggttgcggaagcgcctgcaagtgcggcaacggctgcggaggctgcaagatgtacccagacttgagctacaccgagtcaaccaccaccgagaccttggtcatgggagtggcaccagttaaggctcaattcgagagtgctgaaatgggtgttcccgctgagaacgatggctgcaaatgtggagctaactgcacctgcaacccctgcacttgcaagtgaggtgttggagagctaaagcttcaagcagaaatggcccttagaaataatgataaaaactatatgtagtttcaaaacttcaaaa

SEQ ID NO: 55804 - DNA, 130 bp, Glycine max
caaatgtaatcttgggcgggccggttgaaaaaacgtattgtgtttcgaattttttttcccctgccctgcaaatgcttctgtttgtatactagtaaataacaacttgttatactattttttcaattaagct

SEQ ID NO: 55805 - DNA, 162 bp, Glycine max
gagagagttacgcgttatcttgtgtgcggtggtgctacttttcttcaattcaagttaattaataattatattcatgagagagatctttttgcttgaaatatttgcttcatatatctcataaattatgagttgttaaatgattaaatcaatttgattagtatt

SEQ ID NO: 55806 - DNA, 403 bp, Glycine max
gtttttctctattataatatagagaataactgcaattactctaagaatcctagcctcttgtgcaagaacaaacaacctagaaaacacaaaaaaaaaacaaaaaaaaaaccctaaaaatggcacgtcaacttgtgcttgcactgatttctgttgccataattggcatggccatggctaatgaggccccatctgcatccccaaaatcatctccatcaccaaaggcttcatcttcaccaaaatcagccgagtctcctctatcgtctcctcctgcccctaccccatcagatgagagtgatatctcagccgcacctgccccggcaagcgaccccatcgagctctatgctccggaacctgaacctttcgaggaccccttcaccaccccggaggagactgacccgggcga

SEQ ID NO: 55807 - DNA, 417 bp, Glycine max
ggctgtagcttgttcgttaatgcagtctcattaaattgtgggatgtatattctatatatgcagagacaacgaggaggaggactgcagtatagggaagcacaaaactagtgaaagaatacaagtctcgttctatttttaatttttttcgtttctgatcagttaaaatgaaacgaggaaaaataattgtgcagctattccttgggggtttttggacctaaacatacacaatggtatgctccaattggttggttaatcatcaccccactttccttcaacttttttttcatatgtatatgtttttcgtatgtggaaatgtctctccgaggtctattcttgtagacaaattttagccacaggtacataccacagcatatacggatttgtcttactttgcattgaatcaaataaaatgttctt

SEQ ID NO: 55808 - DNA, 421 bp, Glycine max
gattgttgtgactcgttcttcttcgtcgttatcttcttcttttgttgtttgtgtgtttgttttttctctcacctgaaaatgtcttgctgcggtggtaactgtggttgcggaagcgcctgcaagtgcggcaacggctgcggaggctgcaagatgtacccagacttgagctacaccgagtcaaccaccaccgagaccttggtcatgggagtggcaccagttaaggctcaattcgagagtgctgaaatgggtgttcccgctgagaacgatggctgcaaatgtggagctaactgcacctgcaacccctgcacttgcaagtgaggtgttggagagctaaagcttcaagcagaaatggcccttagaaataatgataaaaactatatgtagtttcaaaacttcaaaattatgtagtatgtattatgtt

SEQ ID NO: 55809 - DNA, 378 bp, Glycine max
cactcataacacaaagcacaaagcaaagctcatccttgagttaaaaaatggcagcagcttcttccatggctctctcatccccatccttggctggcaaggccgtgaagctgggcccatcagccccagaagtgggaagggtgagcatgaggaagaccgtcaccaagcaggtctcctcaggaagcccatggtacggcccagaccgagtcaagtacttgggcccattctctggcgagcccccgtcctacctaaccggtgagttcccaggcgactacggctgggacactgctgggctttccgcagacccagaaaccttcgccaagaaccgtgaactcgaagtgatccactccaggtgggccatgctcggagccttgggctgcg

SEQ ID NO: 55810 - DNA, 141 bp, Glycine max
  unsure (1)..(141): unsure at all n locations
catcaacaaaaaacaagctgtgattgatgatttaaaaggttccaaagtgtaagggtangcaacctgataaaggatgataattgtctaccatgtaaacataacatttttattatcaataaagggtatatctgtaattctaat

SEQ ID NO: 55811 - DNA, 390 bp, Glycine max
  unsure (1)..(390): unsure at all n locations
cataacacaaagcacaaagcaaagctcatccttgagttaaaaaatggcagcagcttcttccatggctctctcatccccatccttggctggcaaggccgtgaagctgggcccatcagccccagaagtgggaagggtgagcatgaggaagaccgtcaccaagcaggtctcctcaggaagcccatggtacggcccagaccgagtcaagtacttgggcccattctctggcgagcccccgtcctacctaaccggtgagttcccaggcgactacggctgggacactgctgggctttccgcagacccagaaaccttcgccaagaaccgtgaactcgaagtgatccactccaggtgggccatgctcggagccttgggctgcgtcttcncggagttgct

SEQ ID NO: 55812 - DNA, 223 bp, Glycine max
gctcagaaatattaatggatacgattttttgaattatggaaataatcatctgtcaaatcaaatgtctctagttttataagttattgcatcaaagttgatcagtttctgagtgtatgtttattttctccaatgtcatactccgtgatgagtccaagattgtcaactaatttgtgatgtcttagatatcctgcacactagtaagatgaaattccaattactttca

SEQ ID NO: 55813 - DNA, 84 bp, Glycine max
ctctagatctccttgaagcataaggtggttgttgctttgcttttttggagttattgtgaattctaattgtcaaatttgtttttc

SEQ ID NO: 55814 - DNA, 402 bp, Glycine max
cacaccatgaggatgaggaagacgacagtgatgaagaagactctgtagcagaggaatttcggaagtttggagcagctgatacatttagaatcccagatgaggttgatgtttctcatcttagttaggtccttcattattaagccattctagtgttatgcagctgagatttcctatactaattagtagttaaccccttcaaatatttgtggcttctatcaatgtgacaaccaatttgttcatttctagcagcattatggccgcaaacgtgataattgatacaataattgcagttgaaatacatagatttcaagtagactcgatgtatgaggactagtttggcgtgagattgtgaaagacttgagtagaaagattgttgattagaagtaaattcaatctcttctc

SEQ ID NO: 55815 - DNA, 417 bp, Glycine max
aaaaacatgaacgtaggatgagaaagatggtcggaaattgaggaagtagtaaaatgattcccaagatttctccgatgaacgaggatgggaagaacagaggaatcggaatagccaccgaaaacccttattatggaacctttcaaggcgtcgctaaccactatcctcctcaacaccaacaaccacccgttccctacgctaattattaccaacgacaaggataccacgtcgttccagtttatgccgttgctgaaggaaggcctgtgagagaacgtcgtcttccttgctgtggacttagtctgggttggttcttgtttataatgggttggtttcttggtggtgttccctggtacgttggcactttcattctaatgtttgtacatatggattgccgagaaaagcctggattgattgcatgcg

SEQ ID NO: 55816 - DNA, 407 bp, Glycine max
aaatctgcttcttatttgattctctctcataaacaaattaaaacccttgtataaagactcttaggaaatatctctcttctttctaagcatatataggaggaggagagaaaatattttgctagcaagacttgatttgagatttgatcaacatcaattgttgtttgttgtcgtcgtcaaaatatgccaatggctaagggaatcagaaagctaagttcctggatcgaggttgccccagcacctatcatttacccaaagaaaccttctaacacacccactttggaaacaatcaccgaagaagaagaagctgccgccgagggattcgaaaatggcgatggtcaactataataaacgaccttctccaatttgatgtaacttattgttataagttgtttatgcatggtttgtga

SEQ ID NO: 55817 - DNA, 408 bp, Glycine max
ctgccatggaagcacattttcacctgcggagtttgtgcagcatgcagggggcactgacaccacgcaccctctaaggcacatcactgttattccttctgcatttgggtgatcttaattccctttttttgtgtgtaattaggcctattctcggttctgcgtcgtatagcgtgtttggaaatacgttgagatgtaagaaatcacgttgagacgtaaaaaatcatcaattctgggatgtggaagttataactattaggtgaaacctagcactctataagatagagcagcggaagaatttgattcaggtgtctacgttatgtgatatctttaatttaggcagggtatatattttacaggagttttttgttaactacgctaactgcattaacaaacaatctccaattgagattg

SEQ ID NO: 55818 - DNA, 346 bp, Glycine max
tttcatttcagagccattaggtatatggaatctaccagatctatactcactcctctagtgctcctcgtcctcttctctctagccaaagggcttcacaatcccgcatgtgatgctgcctatctacatgaccatgatggcgcaaccctccaagtgttccatgtgattcagccattgttccccattcatgccctctaaaccaatgtcatgggaagagattgtcctatagctacaagccaaggaccaagccatgatgcagtaactttctaaattagttgctacaagatcgcctgtctaactgcctcagggagacatatcagtcagattcctacatatatagtgagggcca

SEQ ID NO: 55819 - DNA, 66 bp, Glycine max
cataggaattgttaattcagaacattgctgcacaatctcgtggaaccaaaacatttcttaactttc

SEQ ID NO: 55820 - DNA, 293 bp, Glycine max
atctctttatgtacggtccggtcgttgaagggtcagagatagagcggggttcccatcaatataccaaacttcatcgtcatcgttaaatacttcaacaactacagcgacgtcgtcagtatgtatcgagtgaaagatcacaacgtcttctcgagaatggtactgtactacagcggccatgtggcaaagtcgacgttgcaggcgcatgaaaatacgtggtttcaacgatgggatgcgcccacggatgattccgacaacttccgatggttcgggtctagcacgaattgcgatccata

SEQ ID NO: 55821 - DNA, 393 bp, Glycine max
aaatcttcatttgcatacttctacgtttatgttattttccacttaaaaggttagatctatgttctatagtttacatgggtctgtatattttctttcacttacaggttctggtaggttttatttctgttaatgttcattaagtctttttatcgatgtgaagatctttcatatttatgttttgtaattgtaatatactttgagtttgaaaacgtgggtatttggttgataagcttgagcagattagtcatgcaatgtggttggatttgttttttgacttttcaagtttttactcatttctgatctttttccatatatgagtcagtttctgccatagcatttgtggcctaacatgctctttataaatatgttagctataatgacatttaattacta

SEQ ID NO: 55822 - DNA, 402 bp, Glycine max
caaattgtgattttccctgaatcttatacaatctttggaaataaagtgacttggatgtaatcacatgtaaacattagaatgaagataaaatattgttctctccaactaaaaagctctactgttactattgtctgaatttatacatgagtgatgtaacatataaacattaaagatgaaaacaaaaatgttctcttcaaaccaaagtgctctaatccttgccagtattgtcagaagttattcgagaatgatgtgttaaatcttagcttgcttactgaaaatgggaacaccaaggatgacctgaagttacctacagatgagagtctgcttactcaggtttgtacaaaccaactgtttttgtgtgtcgcaattgcagcctggaagtttatgatcttggatacattg

SEQ ID NO: 55823 - DNA, 147 bp, Glycine max
cccggattaagggtttcgctgctcccaaaaaggcaggcctgaaactttccaaaccaaatggaagttgcaacccaaagaatgccacctgcccaaaattgaatccaaggagaattttgaaaaactgccggaaaagccactagtttttgt

SEQ ID NO: 55824 - DNA, 124 bp, Glycine max
agaatcacgaaaaaggaataatccacaaccatggcatggaaaatgacgaacgcagcatcgaagattttaagccgaaaccgcgtcctttaccgattcgttgcctccacacgtcccctccgcaccg

SEQ ID NO: 55825 - DNA, 400 bp, Glycine max
gttaagtcagagatactgaggattatgaaggaagcttctcacagtctgaagcagagtttgccactgttagcacggagaagaacgagaaacatttttccttctatgtaattttaactctaatttctttcttttttttagttttatcacttgagagttcttttaatgtatattttttgtatgtatttttaggccgttctacctccagggattgacccttttgtgtatgctagggaatacaacgttcatcctgacataataagcgtacatcctgacataataagcattgggtttgcattcctctattcctcagttgtttttgcaattttatcatagataaggaactggttagaggaaattatcatatggtgaattatcgtgtgtattttctagcaaggttata

SEQ ID NO: 55826 - DNA, 135 bp, Glycine max
gatgtatttgcgttttttagttctaattggcaactcttggtgtttattatggtgttggtttcctgtgttgattgtttgcaatgctgaaaccttggatatggaattgatcgtgatatatatagtatcatttatttt

SEQ ID NO: 55827 - DNA, 352 bp, Glycine max
ggcagtgctggtcaccggagttccatagccggttcattaaagctttagatgtccctcgatgttctcaaacatctactcagaacgaaattaaggaactcatgacggtggattagctgacaacttcagaagtccagactcatttacaaaacaagcgacttcatacatagcgagttccagttgctacaactccaagttttagtcagtcagctgtatatctagcatgcttgtgcacgcacactgaatccattaagggtggcagttctgatactcctcacagtccactccatcaatccacacactcgggggaatcaccatcgaccacataaggtgaccacatgatggatcatgatga

SEQ ID NO: 55828 - DNA, 309 bp, Glycine max
aaaaaatctttatgcattcggcacaatcgattatgcttaatgttgtggtcaccgattcatcacatcgagttacgcatatctcacacgcacgaaatctagtactaacatcaacaaatccgtcttgctatacaaattgctgcgaaactgtggtggcatggatctcatctatgattgtgctgatccttatcctgattgtcgagtcttgtatgcatttgcatctatcagcatttaagactcattcatgtttgagtgtaaggaaacaactgctcatctgagctacgctctatcttttgtagggatatatgtatc

SEQ ID NO: 55829 - DNA, 287 bp, Glycine max
aaagagagcaagagcagtacgtgaactggttgaagaaaggtgaagcagcatttgtggcaaaagaaaagtcattgacggaatcatcagagacacattcttgatcaatgtttactcatattttagtcaatgtttttgagagttcggaaaatgattaggttctccgataagtaaactgattagtacaatgtagaataatgtttcttactttcttttgtaaatgatatgcacctcaaattttgtagaagctatataagagaacttctataaaagttaagtgcataagttga

SEQ ID NO: 55830 - DNA, 407 bp, Glycine max
attctttcatgtacaagcaagaacagatcatagaagcagatgataatactttgagcatcatgcttgcagaacaacaattggtgcagcttcctcatctagaaagtcattctttgccagaagcaaagaagcaaagctcagtagtgtccccagatatcagacgagattaataacaacgaagatgatgatagtcctcaggagggtttatccaacactacagagaaggtgagcactgattggagagctcttgacaagttcagtggcttctcagttgagccatgaatagaggcatgaaatagaatgggtgtcaagccttgcaactcatcagactactactagctcggacatggcattgctgctactgcagaataatagtacggaaaatgacaggaacaacaagttcaacccgt

SEQ ID NO: 55831 - DNA, 323 bp, Glycine max
tcggggaattccaattccacattttcaagaaataaggaggcaaaaatgttcatatatgaattggaattatttgttttcttattaggcctatcctgaagccaaaggaaatgagatcggaattcctcggggaattccaattccacattttcaagaaataaggaggcaaaaatgttcatatatgaattggaattatttgttttcttattaggcctatcctgaagccaaaggaaatgagatcggaattcctcggggaattccaattccacattttcaagaaataaggaggcaaaaatgttcatatatgaattggaattatttgtttt

SEQ ID NO: 55832 - DNA, 393 bp, Glycine max
gtttcttacaaggctctactctactgcttcaccttctgctctagaaaattcagtggtgatacatggcttcggctactctctctgtagccaaaccagcccttcaggcaaatgggaaaggcttctctgaattctctggcctccgcagctcatcaggcttccttcccttttctagaaaatcttcagaggatttccattctgtcattgccttccagacctatgcagttggaagcagtggaggatacaagaagggtgtgacagaagcaaaactgaaggttgccataaacggatttggaaggattggaaggaacttcttgaggtgctggcacggtcgcaaagactcccctcttgatgtcattgccatcaacgacaccggtggcgtgaaaaaagcctctc

SEQ ID NO: 55833 - DNA, 331 bp, Glycine max
tctgcaccgtagtttttggggatattaaataaaaagagcttctataaaagttgattttaactcatgtgagaaactaaattcattttaccttttttttccttctcttatagaagcctacggagaagtttattcaaatggggctatagtgtggaaatttatgaactgtggaatctttgcagctagtgctttgaaatgcctctttgttcataataacattacattccagctgcacaaaagtattttttttttaccatgattcttctgtatgctatgttgtgtagttgtttcttatatgaaccataatatgtattcatgctgtcctgaattgaag

SEQ ID NO: 55834 - DNA, 163 bp, Glycine max
caaagagcataaaagcaatattttagaaacagtgcatgtaattgtttgtctctgttttatatcatgcttttgaggatgcctgtagactctttgatttgtttttgcctgacctttttgttcccaagcgtttgatagcatggaaataagagcgcttgactttgtt

SEQ ID NO: 55835 - DNA, 405 bp, Glycine max
gacctttggaaccgctgctattcttgttacgaacgtgatgcgcacaagaataagggaaatggaaacactcatgaacgccgaacaacaacagcaacaacaacagcacgatgtcgcaaccactgactcgtcttttatttcagacaataaagattgatttgcatttagtttttttttttatttccgtttcggtcctggagtttgtgatgctttgtaaactcgtggaatgcaaagggcacgcaacgtgtttgttgaatgtcctgactgaaaaataaggctgggacaaccagcggaatatggaaacccatttgcgattatgagatttttaatattttatctcatcattttggtgtgttaaaaaaaaaaaacaaaacaaaacccaaaaaaaccaaaaaaccaaccacacac

SEQ ID NO: 55836 - DNA, 328 bp, Glycine max
ggtttgggattggagggattgacgctgcgtctcttcctcttctctttcgatccatccctcattcctaatcctccaatccaaccacctcagcctcacactcacatatacacatatctgaacgcgtatcgtccctcctatggcttcaaagcgcatcctcaaggagctcaaggacttgcagaaagacccaccaacttcttgcagcgctggtccagtagctgaggacatgttccattggcaagcaacaataatgggtcctgctgatagtccttatgctggaggtgtattcctagtcactattcacttccctccggattatcctttcaagcct

SEQ ID NO: 55837 - DNA, 261 bp, Glycine max
agccaacaatacagatcatgcagaatcccaatgcaactcctttacaagaagttcaagtcatataaaattgaagaatctgtaggttcaagtgtggaggagaaaaaccattttcatcttcatatagactttttaatatctcttgatctctcacaaatctatatgaagatgaaaagatattaaaaagtctatcgtactccatcaaaacgaaagtagagaatatctagatttgtatcttcgtttatataaatgactagtgttctt

SEQ ID NO: 55838 - DNA, 408 bp, Glycine max
gccaagtgaaagtgagaaaaaataaaaatcaaagagcataatgtcagggatcattcacaagattggggagacccttcatgtgggagggcacaagaaggaggaggagcataagggtgagcaccatgctggagaatacaaaggggagcaccatggtgaacacagtagtgagtacaaaggagagcatcatggtgaacacaaagctggagagtaccatggtgagcacaagccagagcacaaagaggggttcctagacaaagtcaaggacaagatccatggtgagggcggcgccgccgagggcgagaagaagaagaaggagaagaagaagaaggagcatggccatgagcatggccatgacagcagcagcagcagtgacagtgattaaactgctgcatcacctatatatttaaa

SEQ ID NO: 55839 - DNA, 399 bp, Glycine max
aatatattccattctctctgtgtatttccctacctctcccttcaagatgcagatcttcgtcaagaccctcaccggcaagaccatcacccttgaggtggaaagctctgacaccatcgacaacgtcaaggccaagatccaggacaaggaaggaatccccccggaccagcaacgtctcattttcgccggaaagcaacttgaggacggccgtacccttgctgactacaacattcagaaggagagtactcttcacctcgtcctccgtctccgtggtggcatgcagatcttcgttaagacactcaccggcaagaccataaccctagaggttgaaagctccgacaccatcgataacgtcaaggccaagatccaggacaaggagggtatccccccggaccagcaacg

SEQ ID NO: 55840 - DNA, 401 bp, Glycine max
cctgatcatggtggcggttaccctgtccgtagtggtggacactgtatgcatggatgttgcggtggccggacatataacggacgttgcaggacgtgctgctataaagctggcaaagctgttgctgcaaaaactcaatataagactcatgattaacacgatgcaatgctacgtaattagtacttttgataatttattttcagtgaaatagaatagcttgtgactggacaagcatggattctcatcaagcaagaatcaatgatatttcacacgactatacatatttcacaattacagattaatagtgttgttgaatgtataataatacacatcatcgtgactgtgatgatcagtttaagagaaaattgacatacattggtgatcaaaaaaaatgtgttcaccgg

SEQ ID NO: 55841 - DNA, 78 bp, Glycine max
gacgacgcgaccacgcctacgtaaagctcggattcggctcgagcagaaagaaccccaaaagacctttctggcgatgcc

SEQ ID NO: 55842 - DNA, 178 bp, Glycine max
tgcggcggatgatcaattgtgctaccacaacaagattgacagccacaaaggacccttactgaatccttcctcaagttattcctatagatcagctcaactatttctatctattcatacgggtttcaggatacctattgccactgtgctggcgtcacgatcaccttatttccattcgttt

SEQ ID NO: 55843 - DNA, 401 bp, Glycine max
gaatagtgagcaactaataatgacatatgttacattaatcatcctattgaggaaacttcataatggaattcaaggtcacatgattgttacatggatagccgtgagttgcaagggaaagcgtctgtacacacatgatagatatcgacgtctaatcgtctgagacaatctaaggatgcacacagtgatcatttgaacgtgtcagaagcagtgacagtagagaaatgtgtaacatacaggatactaccctcacaatcatagaggatcctatggtgagcgatagcccacttcaagctccaacttttgattgtcaccatctaatttagtgactcaggctaatgagagactcacatacggataaaattgatgtagagtctaagcagtatctggatgccatgatatct

SEQ ID NO: 55844 - DNA, 80 bp, Glycine max
ggttgtgaagtctgagtctgaatgccaatgttccagtactcgacgagttcatactttgcttctgtcagaagtcatatcct

SEQ ID NO: 55845 - DNA, 297 bp, Glycine max
ggatcacattgttaagacttagtggcttaattacaggatcatggatctcatttactgaaggaattctattaatatagcttattctttcattcacactcattttttttaacaagttctgtaaatccatgttcatttgccccattactgtaaaatagttacctcagttgtattgaaactggaagagtgccgcctatttctggtacactctcagattgtgcttcaattttctagtttcattactgatattatgtacttcttctacaatcaatgacaaaaattatgcttctgtttgttcct

SEQ ID NO: 55846 - DNA, 221 bp, Glycine max
ctcaactctgaactcggcactaggaacaagataactgtaagtgcacagcagaagatttgtggacaatctctgaagaacgtgtacagaggaatcatgcaaaggccgtggggcaacgtgagcctcggaaactactggacccacatacaggcttccgcttctggctcagcaccctcaccatcacctaagaaaccccaccaacgtagaatcacacggcaaatcgc

SEQ ID NO: 55847 - DNA, 178 bp, Glycine max
acgcttccgcgtcctcgctcattgatgcgctgcgcacggtcattcggctgcagtcagctgtaggagctcatccacaggcggtaataaggttatgtagaggtccaggggataacgcaagtggcaatatcgtaagacatggccatcgaagcgttattagtcgtaaattcgacgcgttgct

SEQ ID NO: 55848 - DNA, 411 bp, Glycine max
atgacacaaaaactgattatcagaccagagtttctttcaagtacgctgcttcgagaggggtgtatggaacgccttctttctatgtcaatggattcttgttgcctgatactggagctaccgctgactacaagacttggaggaaggtcattgatccattggttggtgtgaagaagagtatccagaatgaagagtcccttcgtttcttcttgtaaaaattgtgggaatgtaaagcccagttgcattagcactttatcattgaaggaatccaaataaagagtgtctcgtagctgctagtgtcgagaatgcaataatggaatcaactgttataaaacattccttagtccttgcatatacatatgtggcatgggttggaaattcgtatatatgatccacggggtgatgatgctaaaa

SEQ ID NO: 55849 - DNA, 441 bp, Glycine max
ggaattgaagttaaccaataataaggtttgcacttaaaattacgggtggtgctggtggtggtgctggtggtggtgcaggatatgttcccagaaatagtaactcttccggactttcttcttcaactcaagacatgagtgaagtgtctggcttctctggatatgaaagccgctcaagcacatcatcgctggggagaatatgatggaagtgtagagttattgttttacctttcctttcgagtaatttctttgggaggcagaaggggtatcaattaaactttggttggtttggatatcatccacaacactcgatcgcccacatgcatctttgatgaataattgtaatcctttaatgtatttcacaacttcaataggaatctatgatgagttttgtcattaaatccaacacaatttgatgtgcagaacaatcacaatcttccacac

SEQ ID NO: 55850 - DNA, 197 bp, Glycine max
tctcagatcgaggaggttctcaacatcaagaactatggctattggctcatggggaaccacaggttttgaccaacgagaccatgcactggccgttctgcatacagcatgtccaccacctctttgcgcaagaaatctaaccgaactcgtgtcccaaatgttccatgtgccactctcagagactttcattcaaatttgca

SEQ ID NO: 55851 - DNA, 98 bp, Glycine max
gtgggagtacatcttacttctactgtcattaattataagacttaatttattaatttaacatttattaaaaaaaattgattaatttagttattactatt

SEQ ID NO: 55852 - DNA, 371 bp, Glycine max
cctctctctctttctctttctctctcatccagatcttgcagaaaaaaaaaaacacaatggcagcgagcgctcccactccacgcgaagagttcgtgtacatggcgaagctggcggagcaggccgagcgctacgaggagatggtggagttcatggagaaggtctccgcctccgccgagagcgaggagctgaccgtggaggagcgcaacctcctctccgtcgcctacaagaacgtaatcggcgctcgccgcgcctcctggcgcatcatctcctccattgagcagaaggaggagagccgcggcaacgaggaccacgtcgccgtcatccgtgactaccgctccaagatcgaggccgagctctccaacatctgcgac

SEQ ID NO: 55853 - DNA, 114 bp, Glycine max
catttttcattacctttgtaaccttcgagaaatgtcacttgcatcatgaaaaaaacacaagattggaaaaaggaatgtaatatgtttgaagtttttctttctagatcttaaaat

SEQ ID NO: 55854 - DNA, 348 bp, Glycine max
tattgaagaaggtcccaactttgaattggcatttacgcatttccactggactgatgagtgtactacccttatcagacagatcatttcggccttcagagaacatagtataagcagaagcccccatagcccatttcaatccttcagctgtagcagcagcgactaatagtctgtcaacatatggaattggttcggcatccggttactgatcatattctgagaagtggaacaacgagaaaagaacttccacatcatcgattgggaatccttcatcccaagattgttcatagcatcatgcatgcattgattagctgcataacagtaactgccacatcgccaattcataccagg

SEQ ID NO: 55855 - DNA, 130 bp, Glycine max
attcgttttaattattttctattttttcacctttgtaaaatattacgtgtaaacatgtatcatacatctaattcaagttcttatgatgttaataatacgtggctgggccacagatttccttttagataaa

SEQ ID NO: 55856 - DNA, 189 bp, Glycine max
tagaaagcaatttcttgattgctcattttggggggctgctttatgatggctaatataagttcggtgagcatcctagcagcccaaatcaaatttgagtttttacaatgttgatggttaattcaaaactttagtagatttctcatttgtgaaaatacggttggttcatttttaaatatgaactttttcatg

SEQ ID NO: 55857 - DNA, 414 bp, Glycine max
ttcggttcaaggttctaaaaggaaaaattataaccctggttaccctgcaaaggaacgttattaaggttggtaataaaacccctaaagctattggaaataccggaaccccaacccggacccttaggaataataacaggacccccattaataaagatgatgacaacaaccttcgctcaaattcaccttaaaaacagcacttcctgataaaataaggtaaggatgtgacccaatttgtaaccggctttgtttaaaaaattgcactccagcttaattatgtgacaattgtctctgaaaacagttttaagtatcctaatttttcagattcttgctggtcaagcagcatgtatggcttacctataatatggagtgcatgaatttgtttcaaatgttggcataatttaaatcaatataaac

SEQ ID NO: 55858 - DNA, 390 bp, Glycine max
gattcctcctaattggttgtttttggacacccttcctttagcgcgggaactaatgaagtccggaggaacaacactttcttcatcatccctagctgcccttcgtgacctctacggaattaaggtggatggatcagctcacagggctatggtagatgtgaacacattgtccttgattctttccaggttgacctctgatctgaaattgaccctatctgaccttgtcgacaaatcattcacagaatcagatattatcaactctaagaagaagaagaagaattagactagttttctgactgtattttgcattgatgttgtgacaaatgaattattttgtaaccaacaatcgaactctaaatttggagtttaagtagaaaagaaacgttgtttggt

SEQ ID NO: 55859 - DNA, 153 bp, Glycine max
atcgatgccctggtagttcccctgaaccttttttaatttgtgcgaaatttggaaggggtaaatttccccctaacttgagtacccaattactttgtgtggtcagtccaagctggggtttcgttgggaccacgttgttcgcttgaactaatggtg

SEQ ID NO: 55860 - DNA, 149 bp, Glycine max
ccctaattgcgttcttgattatactctgcaaattaatttttgggttccagagtcttatattataaatggcctttgccgcattcatagtgttcaggaaattggggctattagccagaggttgtggagaaaaatcgcttgtacctgtagat

SEQ ID NO: 55861 - DNA, 235 bp, Glycine max
  unsure (1)..(235): unsure at all n locations
tacgtaagatcggaaattcggtccaaccaaggaacccatgggaaaccccttcaagaaaatcaccaaccgggttaaggcaccaaaaattaaaaccagcccggaaccaaaaaattacaaggcggcaacggtaccttcccggaacaaggttccttgccaaaacttggtaaaggtgattaattccttgctttccntgtgtaaaaaaaaaaaannnaaaaccacaaaaacaaaaaaggac

SEQ ID NO: 55862 - DNA, 208 bp, Glycine max
tattccttcaacggcacagctgatatctagcttattctgttcaacagtcaatttactgtcatagatgtcatcgatgtgtgtctaaaactaaggcgccactgcagggcagccgcagactactgaactcgtcgacccaggaaataaatccgggagcggtatctgcacgcctatgcagcgttcactagaatcagtcctattacagcttgcg

SEQ ID NO: 55863 - DNA, 313 bp, Glycine max
ggaataatcaattagaaaaaataaaagttcattcaaattatgctgggatttatgcaattaggttaatttaattccctgcaagaggaaaaatgtggaggaaaagaaggtgatttggtatctagtaagaaggtcttgcattcaatccgttgagcatgttgatcaaatttggttcctaactttgtgtatgaaaaatgcactgttaggagatctattcacttgctagacaaaacatcatcctaaaatagtacgaggtgttttactccatgtaatctttgaaattgaagagaaaggaaattgtcatgttataaggctt

SEQ ID NO: 55864 - DNA, 425 bp, Glycine max
ctaaaaccaattgtcaaatgtcaatattgaaaaacaagttgtgcagattcaaaaacctataaaggaaatgtttcattcagttgctatattcggtttgatgttcagttattggagcaaatgttctgtgacaccattttatttgtctagcagccaatcaagtaatcttttattaccctcaatggtcatctttgcctaaattggtttttcaggaaaagagaacagagcatgtatggttaagatcagaagttaaagtcatgcgacgttttctagtgatcatttgtcctttaagttctaattttaagcattcatataatctccaacggtcaatatttgatcctttcacttatcatgaaaacgcattgctataacttgctatattcgccacatgtttgtgtatgtgatattatgctattatgactgcttca

SEQ ID NO: 55865 - DNA, 413 bp, Glycine max
attccattctctctgtgtatttccctacctctcccttcaagatgcagatcttcgtcaagaccctcaccggcaagaccatcacccttgaggtggaaagctctgacaccatcgacaacgtcaaggccaagatccaggacaaggaaggaatccccccggaccagcaacgtctcattttcgccggaaagcaacttgaggacggccgtacccttgctgactacaacattcagaacgagagtactcttcacctcgtcctccgtctccgtggtggcatgcagatcttcgttaagacactcaccggcaagaccataaccctagaggttgaaagctccgacaccatcgataacgtcaaggccaagatccaggacaaggagggtatccccccggaccagcaacgtctcatcttcgccggaaag

SEQ ID NO: 55866 - DNA, 103 bp, Glycine max
ttttgttatcaaaacggtcctttaaataacatcaaatttacccttgaacgacaaaaaaaaaaaaaaaaaataaacaacaaaaaaaaaagaaacaacaacagaa

SEQ ID NO: 55867 - DNA, 86 bp, Glycine max
ggtccatacaaagtcattgcgttggtatgggatggatgcttcgctcacgacatatttgttcgtgctagggcatgtcctgtcacctt

SEQ ID NO: 55868 - DNA, 417 bp, Glycine max
gcattggattacttgaaggagaaacaactgagaatagaagcaccattgttaggacagaatcaattaaaccagctgtggctgagaaagtttctcaagattatggattgccatctaactactttgctgcttcaaaactggaccaaaccactgaagataataaagacactaaaactagttgcaaacaactggacttgaatggattcagttggaactgatgagaagagaaagcacaatggaagcacacagaaagcaaagttactccaatttctggcaggaaacaatgtatttactgtaaacaatgtatcagcttctgtttctttcagctcatggtggtcatgactagccaaatatgagttacttttagtagaatgcaaagttgcaactaacaaatttgtaagcagtaattataatggatat

SEQ ID NO: 55869 - DNA, 282 bp, Glycine max
cgcgtaaatacggtcggaattcggctcgatctctttgttatatttgttacttatattttcttcgttcagcatggactctccgaagcggcaggggcagaagtttctggtggcggtgacggcggtggctgcggtggtggtaaagctgcttaggcggctgcatcggacgctggtggtgagggagcactggaggatgtatctgcagtcgccgaataatcttctgagcatcataggcagcatccagctgccgtttaggaagaataacatgggtgaggaggattgcgg

SEQ ID NO: 55870 - DNA, 364 bp, Glycine max
ctctttgttatatttgttacttatattttcttcgttcagcatggactcgccgaagcggcaggggcagaagtttctggtggcggtgacggcggtggcggcggtggtggtaaagcgggtgagccggctgcagcggaggctggcggtgagggagcagtggaggatggagctgcggtcgccgaagaagcttctgagcaacataagcagcaaaacgctgccgtttaggaagaagaagaggggtgaggaggattgggggaaggtggggtgtggcagacggcgatcctgatgggggacacgtgtgaaccgttggatttcccaggcgtcatttattaccatagtaacgggaagcacgtgaactagatgcccc

SEQ ID NO: 55871 - DNA, 303 bp, Glycine max
acgcgtacgtaagctcggaattcagccccatctcggcgctatcattctaacctacaaaatgttctgccaccatcgacgctctcaacctgcatgcggcatactttccggtcgcagtgacagccgtggcagcagtggtggcaacaccgctcagccagatgcagcttacgtagtcggtcacggaccacttcctgacgcagctactctctgcgcacagtcttctcagcagcagtaacagcaaaccgctgccgtttaggaagaagaacaggggtcaggacgatcgggggaatggtcaggaaagaacac

SEQ ID NO: 55872 - DNA, 422 bp, Glycine max
gttgggtttgttagtagtgtatgtatggcgtgtgtattgctttgcttctctttctctaagtctttgttcacgctctcttcttttctttgtcttggtctaacatccaacaacacccatacccaacaacaacattgaagggtgtcggcttcattttaagtaatttttgtggcaacaatcaaaccccatctgacgatttcgccccccaaacccagtgagttgaattccctccccagatccacatcggtacgtagaatcctgctgtggtgaggtgcggtgtattcattggacaagattggaatgcaaaggttgattgattaatactaacaaataatcatcttagccacaagagatggtgtcaagccagctggtgaaagtgaagagagatacgctacgaccatgcatgacatgccctctctgccata

SEQ ID NO: 55873 - DNA, 355 bp, Glycine max
gaataaacatcttcagaccttcgaaactcggctgcagacagcagagccgaagtgcctataaatgtaaccacacaacaaaatgcaagagagacagtgaatcaaggggtgttactgaatacaaatagaaacactcgagtacagaataatcctacaacgtggctgagaaatgcagctgaagattccacagcagagtcttcaagtagtactaggagagaaagggatgggggtgtagttccagtatggtcccccccagcttctaatttctcagaacaatttgtagatgatgaaccggttcctataccattttcatcatccactaattgtatacgaaccggttcatcttacttgcaaaggc

SEQ ID NO: 55874 - DNA, 78 bp, Glycine max
ttgggaagctgtttggccaggcactcccattctcactggattgcgagagcgtctacagcctctccctgcaggtgttga

SEQ ID NO: 55875 - DNA, 286 bp, Glycine max
gtggtgttgccgttgcaaattgcacaactcattccacatggcgtgacggcatgacaattcgcagcttagatacaactaagctcgcacgtcacgttcatgcatccacgagtacctgcatacgatgatcattccccaatacgcatggtctgcaacccatagtcgcacataatctgatagagagagactcacaagtgagtgaagaatctgcagccatcatcgcaggagttctaagcagcaggctcaactgctatgagtcgtcaccagctccggtgccaggggtcccccc

SEQ ID NO: 55876 - DNA, 400 bp, Glycine max
tggctaacccacccccagttcgtccatggtttcgcttagcctcaattcgctctagcccacccgcacttcaccttgggcaactgcccctgcccagaagttaccctgccaacatttacaactggttagctagatcatctgcacagattcagccaagtcaagcatctccccagcctcacaaggaaccttcttctcaacataacagattctcctcgtcttcactcgctacttctccagagaatcacaacattacccgtattcccttgccaagtacctctcactcgccaaaaagttcaactcccccgtctcagcttgtcctcatagctccacgatagcaaaatccctcgccaggctggtctttcgggttctagcgggatcctgtgtgctgcgttgaactgtttgt

SEQ ID NO: 55877 - DNA, 398 bp, Glycine max
gtgagctataagctagtttatcgtgaggagaatatgaagttgtttgttttctttgttgctgcagtagttttggtagcatggccatgccatggcgcaggctaccaaaggttccctctccgaatgaaaactggctatggtgagcgttcttcggaggtaaaatgcgcaagttttaggcttgctgtggaagcacacaacatccgagcctttaaaaccattcctgaagagtgcgttgaaccaacaaaggactacattaatggcgaacaatttagatcagactctaaaacagttaaccaacaagctttcttttatgctagtgaacgcgaagtccatcacaacgacatatttatattcggcatagataacaccgtactctctaatatcccatactatgaaaaaca

SEQ ID NO: 55878 - DNA, 117 bp, Glycine max
ttttttttttttttttttttttttgttatgagtggcagaaatattattattaacatggtatattcgggtaagattttattatgttttgatgcagtcatgattcatgtgtttggtaat

SEQ ID NO: 55879 - DNA, 414 bp, Glycine max
acgatcaaagcaataatcaggagaaagaatacatgggaaaatggaggctcacgtgtacaatgatgatattgaaattactgccacgcttttggatgcaatgaatatcaaggtgatagcattggctggggcactccaaactgtcaatgatcaccaaagcacatcaaaatgaagcatgccacttacatgtgttgaaactttatgcatatacaatgaacaacagtataaacaacaaccccaaatcacaatcacaatatggataagtcaagaaattattctgatgtgtacatggctttctcgatactaaatctgacaagtgttgccttcaaacttaattgatctgtcaacttgcattacacttcatgatcatctgtaattacaaccattgtaacatgcatatattattcactccttgga

SEQ ID NO: 55880 - DNA, 405 bp, Glycine max
ctcccagaaagaaagaaagcactctcgctcgcggccattgtgaaaattccgtacaattcgctctccaccccactgaagcaccaaacgacgccgttttcagcaagcacagtttccaaaccctagctcgttcttcctccaatgtcctccgaagacatcactctcgtccccgaccagaggatcgagaacggtctcaattcccctctcgtcttccaagacgaccctctccgcttcaattgccccaccccgcaccaccgccgggtcggagacccgcctccgaaaacccgcgaacttggctccttcatcgacgacaacaagatgttcatcgaccgcgaccgcttcttcgccgccgcccacaaccccgaattccgccgctacgctgactgctccgcccgccgcgaaccgcgc

SEQ ID NO: 55881 - DNA, 375 bp, Glycine max
ttgttgttcctttttcatctattatagtttccagtactctttcctttattgctccagtcttccttactcttaacagtagtactttcctagtctaatatcatgcaccaggcaatatagatatcttttgcattttcctggtctgggttgccacatttatagtcgtgtctgatctctaagttctgtcttctgattgcagttggaaaggatgaaaaacgagaatatgcttccttcagtagacggtcaaagccacgagtcaagttttccaggtctacaaagagaactgatgcaattacacgaggccaatcaagagttaggaaacatattccctgttttcgataaattctctatcagcggtaatgcattagaaagggtgct

SEQ ID NO: 55882 - DNA, 394 bp, Glycine max
gtaactgatgatttgcctgagtttagaataggccatagagttgttaaagtgcacaatattgagagactttttctttttttctttctagaagtgttaatatgaagttgcattatatatttgtgggaaaaactattgactttcagaaaacagaagaaggttgtttagaaatggcattgctgttttgacagtaactttttaggtaagggaatggaatattttgaagatgttgattaatcactagaaaatgcaaagaaattgtgtttttgcttttgccatttcaactgatgcctggtgaaaatttgctcacatttgctagctaccttaaaaattttgtgttgctgttctatagcatgccgtgaaagtttaaatggaatcttcattttatatgcttttt

SEQ ID NO: 55883 - DNA, 378 bp, Glycine max
cttgtcttcatgatgaagttcttgcagctgcagtagatgctacagcaagtctatctccaaagcaaaatgaaagaaagggagcatcttctatctttgttaatatagctaagaactttaaagcggggaatgcggatcagaatgcaaatcaatcagttcatactaatagactggaaaatttaaaacaattattctccagtcctcctttcttaaagtcttcctcgagcacagtagataagcaagatccttttgcgattgacatagatgacattcaaattgatgaacctgtagtcttctcatctcctcagaaaatcgatattgacaagagagataaagggaaaggaacagacagacagaaattacttgaagaagcaagcacag

SEQ ID NO: 55884 - DNA, 384 bp, Glycine max
aaaacactcataacacaaagcacaaagcaaagctcatccttgagttaaaaaatggcaacagcttcttccatggctctctcatccccatccttggctggcaaggccgtgaagctgggcccatcagccccagaagtgggaagggtgagcatgaggaagaccgtcaccaagcaggtctcctcaggaagcccatggtacggcccagaccgagtcaagtacttgggcccattctctggcgagcccccgtcctacctaaccggtgagttcccaggcgactacggctgggacactgctgggctttccgcagacccagaaaactttcgccaagaaaccgtgaactcgaagtgattcactccaggtgggccatgctcggagccttgggctgcg

SEQ ID NO: 55885 - DNA, 376 bp, Glycine max
attcggctcaaggccagaaagatttggattcaaggaattgcaaattgggtcaattctgaaaaatgtgtcatacacaacaaggataatctttttggttcaaagtttaagtttttgggagatatgtatgataagaagattccttccatttttctcctttgccatggaagtccggaacaagccctccattgatgattatgtcaatctttggaatgattgggagagttcagtggaacaattgtcatatgacaagtgctataagttctggatgtttatgttgaaacatttcagcacagaaactaagaaactttccaattgcttggtgaagctaccggcaacatcaggcaacaatgaaatagttttgttagataaaaacgat

SEQ ID NO: 55886 - DNA, 166 bp, Glycine max
ctcgagccggctcgagctacttcagcttcaactaacgtattgctttttatagataaatgtctgtgactttgtgtaaagtgttgtgccagtggatatagatttggcttaggctttaggaacacatggatggatcgtgcaaatgcgatgaagtgatttgttttaagaa

SEQ ID NO: 55887 - DNA, 245 bp, Glycine max
gaatgagtaactgtcatttgttgtgtatcaagtcaggcatatagaatcttctgctccttttcgcctttgacttttttggcagggctcgtccttcatgactagatcaatgcattattcgagcaacacgagatataatgatgaaggacgaacacttatatcaatagctgtcgatggatagagtcaattggtaaaaaagcgtgactgtactaaaagtgaagcataacataacattcgtcgacacgtaa

SEQ ID NO: 55888 - DNA, 382 bp, Glycine max
tgaactttgtacttattattctttataaatcttttacgttttcttaacatttttcgggaatgcgagctgaaatgtcaatcatcatgacatgagattggtcctctctatattgatcgcacaatgtatcacagggttgcatccaaaaagaaaaatgtggcagatgaagctggtgttattttgcaggcaaaattgaagcaactagagtcttcatcctaaaagtagttggtatagaatttaataatgtttttcttccaatgcattgtaccatagaaaattataaccaatggtgttaaggtcagtgatgttatatgctatttaaactttttatttgtaaactccccttttgttggcaccttcaaaatttgctttcgaactaaagaat

SEQ ID NO: 55889 - DNA, 391 bp, Glycine max
tttatcatctccgttaactcatcatatgtcaaagcatttggatgtgtatgtgcatgcttgttaaaggcaaatagagagcctaaagatttctcaggaaggtaggttttgtcaaatctttgacatgaaatcacatttttttcattgtatgttaactaaaatttaatatatattttttactaattgataatattttgtaacgatgatgcacaggattggtagtgtggttgaatggaaaattctttacaaacttgctaaagataagagtggattactgcagaaagaaacaatccgaggtgtttacgatggaagtttatttgaacaactgaaaaaacaacactcttcaggcaaagagaagtagtaatatttttcagacacgtatgtgaaaagaaga

SEQ ID NO: 55890 - DNA, 407 bp, Glycine max
tcctcctcagctcctctgataatataaccatgtaacgttcaaattctacgccaatctctgtcgcattctctttcctctttcttttttccttttccttagaagaatcgaaaacatcttcgaaaagcaagccattattaatggctgtcgactcctccttccagaaagaacatcaaattcgggagtttgtggacgggagtggaaacgtagctgtcggtttgaagttgcataataaaccaagtagtgatgaccttaaccgacagtttcctttaggctcaagatgtttatagtatttcagtgttgcctgaggaaaatgaaaatgcaaattgtgcttcaccactagctttcttgagcatcttagaggttcctaatcaagttaaaaacacaatgtgcttagatgctcacataaa

SEQ ID NO: 55891 - DNA, 371 bp, Glycine max
cttctctgtctttcttttccacccggttccgtttcagctacccaattcaattccatcactgcattgatccgtttccttcaaattcatcaatggacgagttcggcgttttgaccgaaaggttcggtctcaaaccacaaggaaaatccgctccaatggctagggcaaagcgacctccgaatgtcgctgattcccaaacacgccccaattccaaatccccccttaacggatccccgtctcaccaaaactccaccttcgatttcgattacggctttttcagcagcagcaacaacagcaacaccgacaacaaaacgcagcgtttcgacgacatccttggcgtaaacgccaaatccaatggcgcttcgttcgactac

SEQ ID NO: 55892 - DNA, 67 bp, Glycine max
ctttctttccgctatcagacggatgattactatgattatttatttgtttatttaaacaagtggccat

SEQ ID NO: 55893 - DNA, 95 bp, Glycine max
cactgatagctggcatggcaaagtgcaaactataataaatcatcatcttatgtaaacgatttccattacagcaagggttgtccttaaaatttcac

SEQ ID NO: 55894 - DNA, 166 bp, Glycine max
  unsure (1)..(166): unsure at all n locations
actcgtacctaaactcggttccacgctcaatcaccctcgcaactccataatcgggacgggcttcatttgtacatgaaacaattaaggtcggtttgcatggccaaaaaacttttaggccggtaaagttggttaaaatgtgatcatcaatcccttagtcccccntaat

SEQ ID NO: 55895 - DNA, 289 bp, Glycine max
ggagaaggtacagccatggattccaggtgtccgtgtccgtcactagctagataaacggcgactagatgatgattatgatctatgaccacaccatgtcattgcgagcttcgattatcacgacgcactcagatatgtgcacccacctgcatgcatcactgatctggtggatactacacctggagattggagagagaggaaatagagcctcgcttctcttgacatcaattaatagggtgtgtctgaagtgtgtgttttagcgtaatgtccttatggagcttctaaggttgtt

SEQ ID NO: 55896 - DNA, 343 bp, Glycine max
gtattcaagtcgatgtactagtgggataatcaaaggataaggtcagaattgctccttcaattccttttaatttgatggtttaagctcatatgacttttcaatttcgttcattagaattaattggtgaaagaaaagtaaaaaaaaatgaaaaaataatgaagtgttgaatcatgtgatttgtatcaatgatatgaaattgtacctattcattcatgtattgtaagattcaaagtcatttgagatttgttttatgatacaaaccaatgtagccgaatcataggattcaaatcatgaataagattttaataattgtgtgtcagcatgttacgcctgaaatgctttt

SEQ ID NO: 55897 - DNA, 188 bp, Glycine max
cgtcgaatgcccgcgtaggcaagctaggaattcagctcgaggtgacaattgtttctgaaaacagttttatgtatcctatttttcagattcttgctggtcaagcagcatgtatggcttacctagaatatggagtgcatgaatttgtttcaaatgttggcataatttaaatcaatatgaactattgtgag

SEQ ID NO: 55898 - DNA, 150 bp, Glycine max
ggctggcaaggccgtgaagctgggcccatcagccccagatgtgggaagggtgagcatgaggaagaccgtcaccaagcaggtctcctcaggaagcccatggtacggcccagaccgagtcaagtacttgggcccattctctggcgagccccc

SEQ ID NO: 55899 - DNA, 224 bp, Glycine max
gtattccattcgctcccaaaatcttttcgaagttgttcataactcaagagttctcagcatgggctccttgattgttgtaggtgaacatgatcataaacgatggcttgtattctcttccctttgtatgatttagtcatctcattctcgtactaggacatactaggctctttgcgactcatggtgttgatgtcactataatctacaccacatccactgtcgcaatt

SEQ ID NO: 55900 - DNA, 364 bp, Glycine max
  unsure (1)..(364): unsure at all n locations
gctaaggattcaactccaggagaagaagaaacttaatcgattatcacttcacttcaccaatacatcatgggacacttacaccaaaacaagtttgaaaactctgacgtttaaggccaaggatcgtggtgttttttgactttcccgcgggtaaaaaaacgatgaacaagacattcctcatcctcangaggatgtcatcaccaccgagttttataaagtcactgtctcagaccatggagagaactatcacacccgcttaaattagcctcaccgttttgacatcagctcaaactcttcaagtgaggatgaatgagaagatggagagaaaaggaagaacaacaagaaggaaaagaaatggctgaaagac

SEQ ID NO: 55901 - DNA, 320 bp, Glycine max
  unsure (1)..(320): unsure at all n locations
gcgtgcgcaagctaggaattcagctcganngtattgagaactaagaaggacaagcaaatggcttcctcaatgatctcttccccacctgttaccactgtcaaccgtgccggtgccggcatggttgctccattcactggcctcaagtccatggctggcttccccaccaggaagaccatcaatgacattacctccattgctagcaacggtggaagagtgcaatgcatgcaggtgtggccaccagttggcaagaagaagtttgagactctttcctacctgccagaccttgatgatgcacaattggcacaggaagtanaatacct

SEQ ID NO: 55902 - DNA, 336 bp, Glycine max
gttcatggtttttacggcctagccaacagtggcaatttagcttgatgctacagagatataatcaacagcagtatcagtaggagtagcagcagcagcttataaatcggaattcaagcaattatcagtcacagcagcgtcggttatattgtagttaaagagtcaggatataagtctgctgtggtactgttgacctaatcgggataattacgacttgagtatatggtaaggctaatatgtctgcatcgaagatagctgtgttgaatagatttgttattagtctttcaagtgcaagtgacttaccctaggttggttgcatttgagtgtgcataatttccc

SEQ ID NO: 55903 - DNA, 174 bp, Glycine max
aaaaaaagtcctttccaaaatttcattgtcatccatcttcatagctgcccttaagcctgtgtaatgcagttctagtagtaacagcactttgcctgtgatgatttgtatcttcttgatgatggatgacacaggcttaagggcagctatgaagatgttccaaaaaaaatgttgatg

SEQ ID NO: 55904 - DNA, 461 bp, Glycine max
cgtcgcatgcccgcgtaggtaagctaggaattcgactcgagtttgacatttctattgaaggcacgcaaatatattctctgaaaccgggttggaacaagcagaatgatcaagtatttgttgaggcgctagtgtttcttacaaatgattcagtatcaatctgtttccacagcactggtcatggggatccagcaatcctttctattgagattcagcaaattgatgacaaggcttattattttggcccctggtggagtcaagggataatacttagaacagttaaaagactgagttgtggttttgggcagtcaaagtttgatgtagattatggaggggattccaggggaggggaccgattttggcaacggattaaaacttttggcgatgaatctgatcaacctagatcagttgaaacaagaatcaaacaagcttcacatccaccaaacttctatccagaaaccctt

SEQ ID NO: 55905 - DNA, 108 bp, Glycine max
taagcaagggcctccgatcgaggttatcaagatgtgaattaattccggtccggtaccagcatgcatacaatctttcgctaaactgagtcattatagaacgtggattgt

SEQ ID NO: 55906 - DNA, 135 bp, Glycine max
gtccgtctcaatgagagaaactctctctccaaaaaccccaatgcacgttttgcaatccaactcgacaatgggcaacagcaacctccctcgaagaatcatcaagggaacgcaacgtttgctcaatgagccaacacc

SEQ ID NO: 55907 - DNA, 327 bp, Glycine max
aaactcaaaatcttctagctgtgtgcaagagggaaagcatggctgagtatccatcacctgaaaaggatgataataattgtaagcacatggatgactacccttcacctcaaacagataatccaaagcctttctctcaaatatacaaacgaaggcgtcataacttgaactccaacaactctaatgtttctggagattcagtccgaaccagccagtatccgtgctcctctacaagaactatcgctgcaactgcactcccaaccgcaactgttgctggcacggccaccaacactgcaccgaaaaaacattttctgtctgcactggtggagt

SEQ ID NO: 55908 - DNA, 185 bp, Glycine max
attaaattccgatacagagatgcattgtaatcaatcccatttccaggcttataatattattatgaagtgcctatataagggtctacaaccaatgaaataaaatcagacatatccccaaattacaagaattagcaccaacctaacggtgagtttggccaaaaccagattggaaaggacccatttcc

SEQ ID NO: 55909 - DNA, 326 bp, Glycine max
ctctttcttaacttctacgtcagaatgcacgtggttcacaagaggaggaaagttagggatgttgtcgttgctcctgcactgtcttaagaagcgcgtgagtgcaaaaatgttcaagttcaattgtaaaaatataatagaagacacgaggtggttgctgcaatttggggtcgcaagtgtgttccctttttaatgttcatcatttttagcatggaacatgtgaatagatattatagtataggattgctggaaagcaataattatagactgattctgattttgttgtaatatatgattagttaattagttcatttctatactacataaaa

SEQ ID NO: 55910 - DNA, 97 bp, Glycine max
attagtcatttcaaaattttcctatttcgtgtatcaaatttgttcatatgggagaaaacaatggaaagtgtggcactttaactttcaccttatttca

SEQ ID NO: 55911 - DNA, 294 bp, Glycine max
  unsure (1)..(294): unsure at all n locations
cacggttcctcccccgctgccgctgactctcacatccatattcatcccgccngtcaatcataagactcaacgaaggtgatcccattctgattcatctgaagcacagatcacctagtggaactggaatcctttcagctgctggcctaaccaggtgggcatgctgcaacaccaaacccaaggaccgtgagtcatgctcccgcagcaattggcgctgggaaaatcaggtctcctcgtcaacccccaccaaatgctaccattgctgctccgactgcttccaccggttgcgctacaggt

SEQ ID NO: 55912 - DNA, 70 bp, Glycine max
gcaaccataggaaatgtttttccttttttgttttttctttcccttatctaaggaattctcacataatgtg

SEQ ID NO: 55913 - DNA, 402 bp, Glycine max
  unsure (1)..(402): unsure at all n locations
cgtcgatgcacgcgtgcctaagctaggaattcagctcgagaacccttcttcctcagaacaacanagacggatacccctttccccaaaacccaaaaaccgcaaaaacagttctcaaccgtcccaaagcaaatgccaaaaaattcctttcatccgaaacaccgttgaccagaaacacccgagtttttatccataaaagtaccgtcttttgattcctgggcccctttttttctccttctcttttattgggcagaggaatgttgggtactggggtgaacttcgggcgcgctcgcggcgaagattgaatcgattctccggcgaaggctcgccggtcgcttcacaccatggagaatgacaagcctcgtaaggtccacagcgatgtcgccgcgtctcgctccgtcagag

SEQ ID NO: 55914 - DNA, 389 bp, Glycine max
aattagttcattctctttgcgcagttccctacctctcctttcaagatgcagatcttcgtcaagaccctcaccggaaagaccatcacccttgaggtggaaagctctgacaccatcgacaacgtcaaggccaagatccaggacaaggaaggaattcccccggatcagcaacgtctcatcttcgccggaaagcagctcgaggacggccgtaccctcgccgactacaacatccagaaggagtcaacccttcaccttgtccttcgtctccgtggtggcatgcagatcttcgtcaagactctcactggcaaaaccataaccctagaggtcgaaagctctgacaccattgacaacgtcaaggccaagatccaggaccaagagggaatccccccaga

SEQ ID NO: 55915 - DNA, 112 bp, Glycine max
ttttacgtgatcaactaaaaacatgtactctctgtttgtatgtatgccctaccaatgtgtctcttaatatcaatatcaaaaagagagtgttcaagttaatgtttggattcca

SEQ ID NO: 55916 - DNA, 387 bp, Glycine max
gcgtgcctaagctaggaattcagctcgaggaagagtgttgaagaaactgttataagacttgaaaagttgcttcaagagttgcatgtatcaagctctaattctggaaaagagcatttgaaagcagcctgttctgacttggagaaaatacggaaactttggaaagaagctgaattcctgaaggcatcgtttagagcaaaagctgattctctgcaagagggggttgacagtggtcggacctacacaccagttggtgaagaggacgagtatataaaagggaaaagcagagaagaatgctaatgtaagggtggacaggagcacaagaaatgttggaaaatcacgtggattctggagcatcattggacgtcctgtcaccaaaaagcctggctt

SEQ ID NO: 55917 - DNA, 352 bp, Glycine max
ccaatatattccattctctctgtgtatttccctacctctcccttcaagatgcagatcttcgtcaagaccctcaccggcaagaccatcacccttgaggtggaaagctctgacaccatcgacaacgtcaaggccaagatccaggacaaggaaggaatccccccggaccagcaacgtctcattttcgccggaaagcaacttgaggacggccgtacccttgctgactacaacattcagaaggagagtactcttcacctcgtcctccgtctccgtggtggcatgcagatcttcgttaagacactcaccggcaagaccataaccctagaggttgaaagctccgacaccatcgataacg

SEQ ID NO: 55918 - DNA, 164 bp, Glycine max
gcgtgcctaagctaggaattcaggctcgagatttcaacgataaaaggtaggttttagctctaccaggtttcatgccatcaaccccctttccattttttttttctgtttttcttttcggcctgtctgtgcatatttgttaatttggtcggacaaaaatttttatc

SEQ ID NO: 55919 - DNA, 350 bp, Glycine max
tctgatttggaaataacagatgacggggaagagattctaagtacttgtcaagccaatgtggtactgttacacaggataaaaacaaaggattagatattcattgaatagtcagaaatactaactgcgattcctgcatcaatcgcaacgtcagtctcgtctggctaatcttttgaaccggtaaattcatccagtcaccattttaacgtgattctaagtcatgctagcaagctacaaaggtcatatggtcctccagtttataatcaattcgtgcattcataacctgaacctctcttcgattgctctctaacatgatgacccataggtatagtctccgaaaatgctcctcaggg

SEQ ID NO: 55920 - DNA, 359 bp, Glycine max
ctcgagccgaatcggctcgaggccggttgttgttacttctgtggagaagaatgagaagaagatgaagaggaagtatcagaagaagagggttttggccgaggatgagcctaagcccgatccttattggctggatacgttttttgggtttgcacccgaagaggcggagagggtacccaattgggggcattgtggggtgcttagtccgcttttggccaatgtttgcttggatgagttggataggtggatggaggggaagattaacgagttttatgttccttccaagagtgatgttatatggaatagtcccgacgaggatcaagggaacacgtcgtgggcggagttcgtgcccaagagtgggc

SEQ ID NO: 55921 - DNA, 356 bp, Glycine max
ctacctctttttcttctctctcaacaacttcaccttcttcctcctcgatcatgtctcacttcaagggcaagtaccatgatgagcttatcgccaatgctgcgtacattggcactcctggaaagggtattcttgctgctgatgagtcaacagggacaattggcaagcgtttggccagcatcagtgtagagaacattgaatccaacaggcgagctcttagggagctgcttttcactgctcctggtgttcttcaatatctcagtggtgtcatcctctttgaggaaaccctctaccagagcacagctgcaggcaagccctttgtgaatgtcttgaaggaagctggtgtgcttcctggcatc

SEQ ID NO: 55922 - DNA, 175 bp, Glycine max
cgtcgactgcccgcgtgcctaagctaggaattcagctcgagaaatgctactagtcccttttggtggcattctatgatattatgtttttatgtattttggtgtatcactccttgggccttgtttgcctttaatgagagtggcttattaatatcaatatatcacctaccaaactaaa

SEQ ID NO: 55923 - DNA, 364 bp, Glycine max
ccataacacaaggcagaaagcaagctcatcctagagttttaaaaatggcagcagcctcctccatggctctctcttccccatccttggctggcaaggccgtgaagctgggcccatcagcccccgaagtcgggagggtcagcatgaggaagaccgtcaccaagcaggcctcctccggaagcccatggtacggcccagaccgcgtcaagtacttgggcccattctctggcgagcccccgtcctacctcactggcgagttcccaggtgactacggctgggacactgctgggctttcggccgacccagaaaccttcgccagaaaccgtgagctcgaagtgatccactccaggtgggccatgctcggggc

SEQ ID NO: 55924 - DNA, 228 bp, Glycine max
cttctcttgaggtaaattgcatgctgcttcaccttgctattttgtttacattcgctgcagtgttttatcttggaatctccagtgaaacgtcgtgcggttcatgtgcgctactattattagacgtgcaatgaatcactaagtgcggtgctccttctgccgaggttcgcaatatcacatttcagtgtttgaatattgttgacagtgctggatttggtactgcaggaattg

SEQ ID NO: 55925 - DNA, 216 bp, Glycine max
agcagacgagcttctcgagaatccagccttccaattcttaaacgagtagacacgggaagcttagtagtatgcttctatatttgtcttctcaaggctgacaacaaaattagttattggtccttgccattggtggttgtaattgtaaatgcagtcttatatttattttctgtacatctttaaaggggggaagaaaaaaaaacttagatattttttgcc

SEQ ID NO: 55926 - DNA, 249 bp, Glycine max
caaaaagcaaagtagcagacctgcgtttactctgtttctcaatctgcacttaatgacagattcaccgcttgaggccatgcacgagccctaactcttgtcagccgtcgcagttcgcagttcgcacttctcacgcccggtcgcgctgttcatccacggggctactccgattattcacacagacgttctgaagtcgttcgttatggctggcaccacgttttctgctgcacgctagattgctgtgacgacttc

SEQ ID NO: 55927 - DNA, 235 bp, Glycine max
cctctacattgcttccatttgctacggacgcacagtttcttgaccccgtaaacgtggctgctgagaagcacgatccgccgaaatatttcaagtccaggccccaagaaattttgatgacaaaagttttaatattttgtatgtagcagaatgaatgtctatactgaaacaaactaaaataaccgaagtgccattcgtgtgcaatttgttttatgttaatgattagtttaagttatac

SEQ ID NO: 55928 - DNA, 386 bp, Glycine max
gatcgagataactagaaacagtgtgatgaaaatgaaggtccttgttttcttcgttgctacaattttggtagcatggcaatgccatgcgtacgatatgttccctctccgaatgaacactggctatggtgcccgtactccggaggtgaaatgcgcaagttggaggcttgctgtggaagcacacaacatctttggctttgagaccattcctgaagagtgcgttgaagcaacaaaggaatacatccatggcgaacaatatagatcagactccaaaacagttaaccaacaagcttacttttatgccagagacctcgaagtccatcccaaggacacatttgtgttcagtatagatggcaccgtactctctaatattccatactaacaaaaac

SEQ ID NO: 55929 - DNA, 386 bp, Glycine max
gtctaacttttgaagaattctttaaccaccctttccttgctcagaagcaaacagaacgggatgagtcattgaggaataaaagttcttcaaggatggatggtgggttttgttctacagtgtctgatttgagaagaaccgaggaaaattatcaagaagattgtttgcctttcatgttagatgacgactctagtggccccgaggggagttcatccttttcaaggaagaagtcctcaatgaagtcgacctatggatttgatctaaatgctaaactagataaagcagagtcatcatctcctatttcaggatttggtagtatgacacaaagatctgaaaacactactaaaagattggacaaccatacaatttcaagaaatctcactgaatct

SEQ ID NO: 55930 - DNA, 331 bp, Glycine max
tcccctcggggaattccaattccacattttcaagaaataaggacgcaaaaatgttcatatatgaattggaattatttgttttcttattaagccgatcctgaagccaaaggaaatgagatcggaattcctcggggaattccaattccacattttcaagaaataaggaggcaaaaatgttcatagatgaattggaattatttgttttcatactaggcctatcctgaaaccaaaggaaatgagatcggaattcctcggggaattccaattccacattttcaagaaataaggaggcaaaaatgttcatatatgaattggaattacttgttttctt

SEQ ID NO: 55931 - DNA, 82 bp, Glycine max
attacatttttgttaagcgcagcgagtttcaggactttgctgcgttgtgttgctttggtttattaaatgtcaactttctatt

SEQ ID NO: 55932 - DNA, 137 bp, Glycine max
tgcattctaacaactatgaaagagtttacaaacctacacgatagccacactggtcaatttgtatcatgcaatgaattgtcgatgactttgatctgtacaatacttgcattaattgatgatatcaatgcaatttcata

SEQ ID NO: 55933 - DNA, 385 bp, Glycine max
ctcaaattgaattcctatctagtacttaacataatgcagtgagattcacactcccaacgcttccactttctcccttaaatatcttcattcatctcaacaccaccaccacttccccacttttgttactcagtatgcttggagcccttctcctcaacgctaacttcaagattcatttctcactcatatcatgctaagcccgtgtccccttacccgtcatgcccgcatcgctcagaatgccctctccccaatactcccactgggcctccttgcaggccgacattgaagcccacctcaaacaaaccattcccctcaaagaacccctcgaggtcttcgagcccatgctccacctcgccttctccggcccccggaccaccgttccgggcct

SEQ ID NO: 55934 - DNA, 350 bp, Glycine max
ttcagggtcagctccagctccgggttcagggccaccaccaggtaagacgcctctcaacatccccaaatttaatcaagcttcatttatgcagtgatagatcatagtaacagagatttcatttgatagactttcatcacctgtccaaaatctcatgaataacatttccaataatctgactaaagaatgttttattattttttcagataagtttatttaatttcttttaataatttttcgaagaattttagtctattacaaaaaaaataaaaaattcaaggttaaatttcagaacaaaattttcatatcatatgcttccattaaattaaaagtatctctattttattgaaaat

SEQ ID NO: 55935 - DNA, 349 bp, Glycine max
attcgttccaagtatgtggagaaaagatgggcttcaaaaggtggactacagccagcttcaaagtcagctgaaataatctttaactcgaatgaatcaccagctgctagggccaagagtgccactcagaggaataggagattgtctcttgaggaaagcattcttgtgaaacatgtggcacaaattcggcctccagtcacgagatatcatgagggctcctcagattttcaaaagaattcaccaccaccaccattaaggaagccatctgcatcatttgattttgactacactaggggaaagaacaatggtattgttgatcattttgacttgttttccatccatgatgataaac

SEQ ID NO: 55936 - DNA, 292 bp, Glycine max
gtcgcactggacgcgtacgtaagctaggtattccgctcaatggcacatgggaatcggtcattcagcaacttgaagctatatgagaccactggaaagacgatcacttggaatgctgacgtgttagatagtcctgaagagccctttgttgtggaaaacgttcttgttcagcctccatcatagtaatgagaggtgtcgatagcatggatctctttacacattgcacgttgtcacatgaatattatcgcatggtcaagcctcaactaagctcaacgtgcatatcctcggatttttg

SEQ ID NO: 55937 - DNA, 298 bp, Glycine max
tttctcccctgaatctcaccactctccgatctttcattctcccctcttttctagctcccgtggagtctggaagcgttctcgagccttctcgctttccacgtgttttgctttgttcaagttcgctctcggcagtggggtttagaactgtgcgttcagggacattatcgcgttccacttctctgtcaaagtgtggcttgcgacagatggtgcgctgggaggtcttcatagacatcggctgcgctgcaaaagcgcgcatcgttgtagaggctggtacctgggcagtcatggcccttgagcg

SEQ ID NO: 55938 - DNA, 359 bp, Glycine max
aatgaaacaaaagtacacaaccctagtactaaatgtgagtgagtaaatcccaatcttaatggttgttgtccaaggctccaaggtccatctcccacacccttcctccctctctccctctccccaccctctcccaacaacctccatcctctttgaaccctcctccctttctcttgccctcacccactctgactcctccctctctctctacccttccttctccccccaaaccctaaccctagccctaaccatcccctcctcttccaaaaccacccataccctacctgctcttcctcctctgtgggtcccaccgtcatatttatagtctcctccccacatagagccggcatcctccttcgcct

SEQ ID NO: 55939 - DNA, 375 bp, Glycine max
caattcaaaaaaaataaaaaaaaataaagtgtttggtaccggcaactaacccaggaatagttgtttttcaattagaattagagtttccttacctccgtaaaattccaattctaattagagaaagcaccgacaatactgcgtttgtacaatatgacaatgacaattaattcaaattgccacagatctcgttttgggtctgtcctaataaaatagtagacacttgtagtttgcactttgcactcactatatatagtccagcaacatcgtcaatttcgactttgcacattttaatcttaatcaatccagcatggcctgattataacctagggctgccaatggagccgctaagatctctatttgtctactgcactacag

SEQ ID NO: 55940 - DNA, 69 bp, Glycine max
ataatgcatgatgtaaaatcattttgtattctaatggtgtgaggttgtagagtttcttattataactaa

SEQ ID NO: 55941 - DNA, 319 bp, Glycine max
taagccggaaggaaaaaaacccgtttcaaaacttggacgaacaaaccccttccgtccaaaccaaaaacgaagccccccttaaacccttttccgtttccgggaaccaaaaccaagaaaccaaggaaaaccaaaccgcaagccaattgcacttctcctcctcctcctcctcctcctccttgggaaacccaaaaccccttaaacaatgacaaaggataccaccgtaagggttccttcttcaaacgaaacctccgcggccaacaaggcttccaaaacccggcagaaaaggaagaaaaagtgggatcaaccggcggagtcattg

SEQ ID NO: 55942 - DNA, 362 bp, Glycine max
cagcattgcaattattttttattcaaataatgtgtaaccggcctctaaaacatatgaatatgaatatctaacaccagctgttgtataagtaatgctatttatggatttatctcttttagttatgatgtggtttagttaagaagcgcagatatggggtcatgtacgaatttgtgtttaactgtattaactagaacaaatgtgtaaatgtcattcttcatgttgtatattctagtgctttctagtttagtctttcttatataattattttagcatgttgatcatcaaaaagagtaaattacacttttaaaatacatgagtggtatatttatttatcttgccatgcatcataacagtcctagagc

SEQ ID NO: 55943 - DNA, 361 bp, Glycine max
gcactaccactgtacttgatcatgaagtctagacttccgactcagagaaaatgttcagatctctggtttaattgcattactagcagctgttgatgcactttctcatttggatggtcttggtgaccttagtaaacagcttgtttttgcagttttcactggagaggcatggggttaccttggaagtaggagatttttggtagaacttgacatgcactcagatgctgttcatggccttaatcagacattaattgaaacggtcattgaaattggttctgttggaaacggtctcagtcaatgtgttaaaaacttttttgctcatacaaaatgggattcttctgccacatatcagacagttgctgcc

SEQ ID NO: 55944 - DNA, 303 bp, Glycine max
tcggctcgaggaaatcctcttattcatgaatttggatacactgttgatatagaaaagtaagatataccattggccaaggaatatacggcgttttctatggtgttcattgttagcaacattatactgcctgtcagttcatcatttgccaaaactgctactcatcgctcactgattccaaatccatcacgttcccctgaagtcgactatttcaacctcaccgtagttgctcaatgttgctgggtcattttcatccttccttgggtatcttgagtcgatcaatctgatttacactttccataaccc

SEQ ID NO: 55945 - DNA, 367 bp, Glycine max
ttgtttgttgttgtaacacgttcttcttcttttgttgttctgtgtttgtgtttgttttttctctcacctgaaaatgtcttgctgcggtggtaactgtggttgcggaagctcctgcaagtgcggcaacggctgcggaggctgcaagatgtacccagacttgagctacactgagtcaaccaccaccgagaccttggtcatgggagtggcacctgttaaggctcaatttgagggtgctgaaatgggtatgcccgctgagaacgatggctgcaaatgtggaccaaactgctcctgcaacccctgcacttgcaagtgaggtgttgggagagcaagcttcaagcagagatagcgcttaattaggaatcatgat

SEQ ID NO: 55946 - DNA, 325 bp, Glycine max
ataagcttatttatattatttaaaaatcctaaaaaaatattacaagaaattcttttataaaaaaattcttttaaaatccttctaaaattctaatccagtacatcccattaaacttttattgctttcacagatatgtcaagacatcctaataatggagtggaaactaaggaaaccgctgctccgatctgaggccatggctgggtctgggagttccatgctgtattcctttcttctcttcacagtcattctctcacttcaagaaatgtaccgagggaaactagcatcatcagaattatacactatacttggagggtttgttagctct

SEQ ID NO: 55947 - DNA, 206 bp, Glycine max
gcttaacggttttgaggaatatgtatgggatgaaaatggtgatcaagtttcctaacagagtttaggcttaagatttcctgtcccctaaagttgttagtggaaattgtacagagtacatgatcatatgaatgtaacttgtaaattgctttactcaatataatttcgttgccatgtcatgtatggtatttaaaaaacaagaaaacagt

SEQ ID NO: 55948 - DNA, 240 bp, Glycine max
gcaagtgacagtgatcaagtgcattttttgtctggtcaattactgataatctttcagtaaattatatatttggggatatagggtaacgacgatcattttgataacgaacccttgcatctgtaacaaatttaattgatgctgaattgaggcaaattcaatgcataatctatcctgtagaattttttgctgcaatttttgtatgacattattatcattaataaaatgttggtattgtctgtt

SEQ ID NO: 55949 - DNA, 375 bp, Glycine max
aggatatgctacaagaaaggagatggaagagcacactgaacgacaaaaggtagcattgagtcaaatgcttcaggcattgagggaagatctaactcttccaccgaagaccgagaaagatgggagcaatcagaagccgttcgtagcacagaggaagaaatttggattcattcaaatatcactccccttggcaaagccaaataagaaaaggggatgagatttcaatccttaatccctatgcatggatgaatagccactactcatgcatcttcatgtcttcccatgccattctttattggttcatgtgttcactttcatttatatatgtagatgtttgtgagtgtctgattccgtaaaatatgttgtgtttgaatgatt

SEQ ID NO: 55950 - DNA, 341 bp, Glycine max
gtgagctataagctagtttatcgtgaggagaatatgaagttgtttgttttctttgttgctgcagtagttttggtagcatggccatgccatggcgcaggctaccaaaggttccctctccgaatgaaaactggctatggtgagcgttcttcggaggtaaaatgcgcaagttttaggcttgctgtggaagcacacaacatccgagcctttaaaaccattcctgaagagtgcgttgaaccaacaaaggactacattaatggcgaacaatttagatcagactctaaaacagttaaccaacaagctttcttttatgccagtgaacgcgaagtccatcacaacgacat

SEQ ID NO: 55951 - DNA, 415 bp, Glycine max
gtttgttgttgtaactcgttcttcttcttttgttgttctgtgtttgtgtttgttttttctctcacctgaaaatgtcttgctgcggtggtaactgtggttgcggaagctcctgcaagtgcggcaacggctgcggaggctgcaagatgtacccagacttgagctacactgagtcaaccaccaccgagaccttggtcatgggagtggcacctgttaaggctcaatttgagggtgctgaaatgggtgtgcccgctgagaacgatggctgcaaatgtggaccaaactgctcctgcaacccctgcacttgcaagtgaggtgttgggagagcaagcttcaagcagagatagcccttaattaggaataatgataaactattaatgtgtacctaaaaacttaggttttaggtctgtgatggttt

SEQ ID NO: 55952 - DNA, 199 bp, Glycine max
agaatttgacattttatctttcgcatgggttacctagtttagtcgggcaatgactgagacatttgtcaccacatgaagcatctcgttgggatgggagttgttatcttactgttcaggatgcagggtgttccgttctgagacccacagaatctcagagcgaatctccttttagtttttcacttttcatgtcactatcaga

SEQ ID NO: 55953 - DNA, 376 bp, Glycine max
ctgttcgccttttcgtgactttctcaaactccatacaacacactgcttctgcttttattttcctttctttctcctttcctttcctttcctttctctccattttccccgtaccaccattaaaaccactcccaaacacactcacacagacactcaaacgaaaccctcgtcgcaatggcggaggaggaaaaacacgagcagctccaagaagagcaagaccctcacaagctcttccgctcctacataggcctgagcttctccatgttcctcgcaatgctggccaacaactccgtcccggcgctgcagggcaaggtacgctcactctccctgcgcgcggcggatgcggccgaggagctccggcagatgaagtcgcggcggc

SEQ ID NO: 55954 - DNA, 337 bp, Glycine max
cagagaggcatgatgtacaaccaaaactaccccacctaccctcagttcaagaacttgcacatagataacaccaaagggggtagcaaggacaataagtctcagaatcacaagggtggtgctcagaaaggtggtggtcaactagcacacttccaaagtgctaatggagggtcaaaagtaccccccaagaatcagaaatctgtcgacttcaacttatctgaagatgaacttgatgagagtgattttgatgaatttgatgatgactatgatgagtttgaagatgattttgatgaagaggatgaagaggaagagtatggtcaaggtcatggtcatggccatg

SEQ ID NO: 55955 - DNA, 220 bp, Glycine max
acgcgtaaataactcggaattcggctctaggttaacaccaatgacactgataccgttctgacccggatacccatctacgctccgccattgccttcttcttccagttccagggctgtgggggcatcggacggtcagtccttcccgatatgcgggaatttggcactttggagcactctcttgggtttcgtgttcagcatagtagtcgtcgttcgttaattct

SEQ ID NO: 55956 - DNA, 71 bp, Glycine max
caacaatttcagatttgccctaacaatgttgctaacaaggaaaaatgcaatataatcagagtaaagatcat

SEQ ID NO: 55957 - DNA, 357 bp, Glycine max
tccaaccccaatcttaagaagaatttcaagccaattccttgaaccaactttaaccacaaaaggttaaaaaatacgaaaattccaacccaacttcttcttcctcttccggaaaaattccatcacaaccctcctaaaccccttcaagttcctccaaccctccattgcctcactctccggtgcgcacgccatcaccaatgctaactcctcctgtgaagcctttgaagcaaccaaagcctaaggccaaggaccctaacaagagggacatgagtcttgaatagaaacacaagttggggttagggttgcagagtttgccgcctgagaaaatggaacatgtgctgcacattattatgatgagaa

SEQ ID NO: 55958 - DNA, 383 bp, Glycine max
gttgtgggtacttatacatctcttgtagatatagttcataatttgtaagtgttagtggattggatagtgcatttggaagaagctgctataacctgaaatcttcaagtagcacactgatggcattactaagtgtctcaacttcaattttaatgccatcagtgtgctacttgaagatttcaggagcttacaagagatttgggtctgaaatgatcatcaattattcaataataataatgggggttactattgctgttgtgggtacttatacatctcttgtagatatagttcataatttgtaagtgttagtggattggatagtgcatttggaagaagctgctataacctgaaacttttgaacatgcatgtacttaaatgtgcaaaga

SEQ ID NO: 55959 - DNA, 85 bp, Glycine max
aaatattgtaccattggtttggttgggctcaaaatgtcatttctagtcttcctccaaaaatgaagtttattttctagtctttaaa

SEQ ID NO: 55960 - DNA, 385 bp, Glycine max
cttggatagaaaaaattacttgtatcgtaacctggacttggagaactcaatggcctgcatctctctcccaagagaatcctctttttgcatagttctctgtcttcatcttcagctctctgttcaaactgctttggcgctttctttataatcaggcactttatcatcttcaacttgaggcgaaggaccagtattttagagggaaccctaaccaagcggcgtaaacttgccttcctcttcacttgtccgaacttggtaacaacattactgccatcaccatgcacaccactactaaatctagccctcatgaaattgttccatcctctcttctttttcagaaagctcatcaaaggaagattcattttcacacgttgcctatcctttctgt

SEQ ID NO: 55961 - DNA, 332 bp, Glycine max
aatgaaatgactatgctaccattttttatgtcattataattcttgtttccaaaaggcaacatagagtagcacaattttcctcctcaacacctcaatgctaagctgaagacaaaaatacctataaggtttgtacaggacagctttccccttattgggtcattcaccttaaataatccacaatcacatgtttgatcccaaaggagttaattctaagtaaaattgattgactttaaaacaattatcaagtaacttgtgtgttagataaacaaatttattccgaattttacttcctttaaaataaaggaaatctaaattccaatcacttcaaattc

SEQ ID NO: 55962 - DNA, 378 bp, Glycine max
agagaatggctcccaagggtttaacctttctggctgtgttaatatgcgtttcagcactgtcactgagtccttctgttgcgggggaagggcaaaataatggccttgttatgaacttctacaaggaatcatgccctcaggctgaagacatcatcacagaacaagtcaagcttctctacaagcgccacaagaacactgctttctcctggctcaggaacatcttccatgactgtgctgttcagagttgtgatgcttcactgttgctggactccacaagaaggagcttgtctgagaaggaaacagatagaagctttgggttgagaaatttcaggtacattgagaccatcaaagaagctttggaaagagaatgccctggagttg

SEQ ID NO: 55963 - DNA, 68 bp, Glycine max
gtcgactcgctctcagcgggacacctatgctgggtgtgtttgtgtgcctctgatctcggtgtcccctt

SEQ ID NO: 55964 - DNA, 182 bp, Glycine max
cacagtactgtcatatgcgcttcgcttctcgggagcacttatgcctaatcgcacagtcatcctctacactaggatctgcggtcactctgatcgctacaacctcattgagctctagtccgacgtctctccccgcaacgccgagatcttccgcgcgctttgctctggccaaaagggcgtagggc

SEQ ID NO: 55965 - DNA, 267 bp, Glycine max
ggaagtttgaaattttgcattctgtctggtttgtcaggtgtgtaaagattttttttttctttcttgaatgtgtgtatagatctatactatcagaaagttgataccgcatttgcatttgtgtaataccacatgaaaaattttgatgacctgaacatgtgctgccaaagatagagtacatttacattttagcaggaacaacataatttatatctatataaaaattatctagccgtcaaaaacccgaaacagaccaccagagcggggatc

SEQ ID NO: 55966 - DNA, 403 bp, Glycine max
aggtcgacactagaggatcccctcggggaattccaattccacattttcaagaaataaggaggcaaaaatgttcatatatgaattggaattatttgttttcttattaggcctatcctgaagccaaaggaaatgagatcggaattcctcggggaattccaattccacattttcaagaaataaggaggcaaaaatgttcatatatgaattggaattatttgttttcttattaggcctatcctgaagccaaaggaaatgagatcggaattcctcggggaattccaattccacattttcaagaaataaggaggcaaaaatgttcatatatgaattggaattatttgttttcttattaggcctatcctgaagccaaaggaaatgagatcggaattcgtcgggggtaccg

SEQ ID NO: 55967 - DNA, 329 bp, Glycine max
atcactgcgtctgatgagagagagcggaagagataggaaggaagagcacagcagtgatcagctccgtcatacgagggggagaaattttgtaggtcttggagttcgtgtatcgcatgttgccacattgctatcactcaaagcttgtcccgagtgcaatttgaatggatcggtagtcaatgcgtcgcggtctgcatctagaggatgattcccttcaattagattgtggcattggacgcacaggtcgtgacatctactcgattctcaccacacttctgcgtttatggtggactcattagatgcatgagcacttcgtgtatactatggctcac

SEQ ID NO: 55968 - DNA, 192 bp, Glycine max
tggttttttttttgttgtttttgttttttgtttttgttgtttttttgtgttttttgttgtttttgttgtttgttttgttttttttgtttttttttttttttttttgggggtgttttttttttgttttgttttgttttttgtgttgtttttgttttttttttttttgttttttttttgtttttttgttttttt

SEQ ID NO: 55969 - DNA, 361 bp, Glycine max
taactcaggattccggtccaaaaaataatttccattaattgaccgaaaacaaaagttttccccaaaggctttctccaaaatggtccaatgcatgagaataatttaatcaacgtttcagaacactataaaattattctcatgaaagtgacacacaagtgttgcctaataccttaagttaccttcctgtgtaaattaatgcaactaaaactgttaatactgttggtttgtgctttgttgaagaacagctctaatgtttcttgtgaaagatcaatctttcgttaaatcatttgcaactggcagtgtatatgttctgaaattggtaagtattttcattaataaaattgttggaattttattaaaa

SEQ ID NO: 55970 - DNA, 339 bp, Glycine max
ttagatttaacttttttcattaataaaaattaacaaataatatttgtgaataaaaaagtaaaagactatgcaaagcacgttgtaactgtacgtcatcgccaactttgaacaacagcaaacactcttgccccaactagcaagcacaatcaaatcaaaataattcccttacaaaactacccacatgcacaacattcctttagccaactactttgttgctgactaaattaattaatttaactcctaattaaaagacacctgtacacacccaaccactaatcacaaattaacatgaacatactttcatcacgcactctctacatatctatctacctttccatg

SEQ ID NO: 55971 - DNA, 265 bp, Glycine max
tttgccttctgctctccctgcccccgcggttccccgtcttggtgtgtcgctctccgcggagctgtgtttgccttgccctcgtcttgttcggtgggtccgtttttggcgactcccgtgactcgccgggtgctctccccggcgcgtcgcttgctcggtgtgggctctctggggctgatttcatcgctgaccattccccgccgctattgcgattctcaatcgcatgtcctccactttcttgctcgtcccttgcccctcccgtgacttg

SEQ ID NO: 55972 - DNA, 384 bp, Glycine max
gaatccggtccaatcccccccaacctttcccaatcccaaaaaccctttgaatttttaaaaggaaaccaacatggttattaaggccaacaacccaaaatccatggcaaaggttctggtcaacccaaccccttcctggccttcaccggtattaaaagttatatggagcctaccgccacccacctatgtaccaaagacccccttttggaaattacccaaaggcggcattgcatttcccggtaatgcccaaattcaaagctaccatggatttgtccgcaactgcaaaatctgccacaccgtctttgttgctgctccagcagaaaaaggccattttcttttaaactttctcatgggaagtgtttcagcagctgtctccaaaactgctgc

SEQ ID NO: 55973 - DNA, 186 bp, Glycine max
ttcatttcaacatcaccattcgacacagtctgacagacacatcgagggaattgattgatcagtatgcctacgaacagcaatgagatcttgacagacagagagttcctactgcttctggttgtaatcattgcaagagttattatcggtctcatattctcaactacgcagttgtcgacgttttgtacg

SEQ ID NO: 55974 - DNA, 105 bp, Glycine max
attcggctcgtgcttctatctggcggcgtctcctctttcgctagtttctctcttctctctctcttttttctcttgttgtgcgcgctctttcctgtttttggttgt

SEQ ID NO: 55975 - DNA, 292 bp, Glycine max
ctcgagccgattcggctcgagttggcatcttgtgttgtgtccctcttttaagctatttccttctcttaacacaattggttgtgccaattgccatagtcaccaaccaattaacaaaggtatatatatcatcatatcatcaccaaatgaaaaatattgggttgttttttcttgtggtggtggctacttttgtggtggcagccacagctggtagcttttaccaagactttgaaataacgtggggtggtgagcgtgccaaaatctatgagaatggaaaccttctcacactctccct

SEQ ID NO: 55976 - DNA, 205 bp, Glycine max
  unsure (1)..(205): unsure at all n locations
aaatattacttgcttgcaaaaatatatttgctttaataaagattgatgaacaactgatgtggcatgtgatgtatcttagtgagcaaataagacaaatgacaattaaatgctcacatgaaagttgcaattgtattagatttattgggaaattttactttgggagtaaatagtataaatcgcaaaacnggatgtatagctgcatatt

SEQ ID NO: 55977 - DNA, 354 bp, Glycine max
gtagtttcgttttcatcatccattgaagagaagctgaatgcatttagagaaccatgtctgcaactagcacatcgactactttgtcaccgtcattctcttgcagtaaaacatcagcactctctctgccgtcgaaatacagattctggaatttggttccaatgacacaagcttcatctccggagcacttggccttagcctgacacgatccatgtagaggacttgacgtgtcctgtggcccaacagcaccacatgcttcacaaacatcatcaattcaggggggtgaatctatgttcaggggtgtgttggaaagtatgcaatccgtttacttgcacagaaatcgtactgccaaggcca

SEQ ID NO: 55978 - DNA, 369 bp, Glycine max
tgacgctggaagcgtgcacgcacgctgcgcacaatgagaagcttccgctgcgcacggtggttcaggttcagtgcttcgagcagcttcagctacgacacgccatcgccggaacgctgatggcggctgacgcagccgcagaacctgcgcggcagtctgcggcactggaacgggaaacggagggcggccgacgagaaggattagggttatgacttacagcacgtgtaggaatagaacggcatgtggaacgtgccagtaagggagaatcacgtactgcccttggagattgatcgcatgatgacgcgagtacatctcatggaacacgaatgttcatctatggttagattcatcggcaagtttgataagtccgac

SEQ ID NO: 55979 - DNA, 372 bp, Glycine max
agaaatttaaattcggaactaaaaaataatgcgttgttctgcattgtgtgcaatggatagttgtatcagttctacatcttgcaggagtggggcgaatagctgaagctgggacatgcatccaagcaatttagtgtcgttgactttaatgattcatgtcgcgggctataccgtctcattgctgtatgctcgagcactaattcgctaaaaagtagccgaatgtcaccatcttcaaagtgcaagtttgtgacattaagacagttcccatagagtgcggaattgagtggcttcttgtctgattgtccttgaaacatggcaagcaggtaaacattgttataagtaccgtgtgagatgaacatctattgacagttaccc

SEQ ID NO: 55980 - DNA, 297 bp, Glycine max
cggatcggctctaattaatgatatgcggctacactagccacatggcagctgtctatacagggttgattcatggcccgtctgtagattacctagatgtattaacacgctctgtgagcaattgactcttcattatcccctctcacattattatgactaattcctgtgttccctaatgaaggttgtagctttgcagctttgccgcagacgatatgtgataaactacaagggcagtgggacatgtggcggtcacatacaactgagctcgtcgaccccggaattaaatctggaccggatact

SEQ ID NO: 55981 - DNA, 410 bp, Glycine max
gattgattactatgtttataggtatatattataacttatgttggatttataatccttagaatagctgctgtcccaatatttgctatagtgcttttgggactagcttctctgctgctatccaagattgataactgtggtaatagaaaagggaatttgcattatttcacctacaggtgcataatcagccaactgatatgacattttctgtggaatggacagaatcattattatcatggtgatgttaatcagtagatcattttccatgtggcttccagatgttaatctcttaatagaatttttcattgcctagtattgagaataaaacagagtagagatttaaggttctgtatgcaatacaatgaattgtttattagcattgtctatttcttgatgccgatggttgtcattcc

SEQ ID NO: 55982 - DNA, 371 bp, Glycine max
atgaagtaccacgtactatgcctggttatttcagttgagatgcttcttctagcatgaatattcaggatcacggtaaatactacactgaatcatcctttaccattgatcaaatatctgcctggaatgcacatgcagaatcagattccgtctgtctacaatcacaccacatacttattaggcaagatcagggctaaagaaacataattgagtacatgaactgtacattgatgtctacatgtagaactcgggagcatgtctagagggcagagttgctggcttgcctagtcggaaagttcacggcagagatttcactaatgaagcatggggatatcatgttgggttgctaggagaaatattgcaaatctacacag

SEQ ID NO: 55983 - DNA, 354 bp, Glycine max
taagattaatggacaagagtgttcgacggaccttgagaagatcaagcaagtggggttgtatgatcccatatccttcactctatcagacatatgccgtcggtactatcataaggaaacaggtcttgatgtagtcatgattatggccattacatcatagcgctcactgcttccttcaagattcagtgcatgcatggctgtggctgtcagagtacgaaggagtcgcagacagaccgatgatgacttctttattgcaaccgcacacctcaaagacgaaccaatggcacatattgtagcactttatatctagatgtcatcatgacagtactagtgtgtagacactaatcctcatatcag

SEQ ID NO: 55984 - DNA, 414 bp, Glycine max
ggaggaagaagagaggagaaggagaatgaaagatgcgcaagtctttcaaggattcactcaaagctcttgaagctgacatccagtttgccaacacactagcttctgagtatccaagtgctggtgcttgcttccaaatgagattgtcctacagcccagctgctcaattcttcctttttctggttaagtggactgactgtcaccttgctggagctttaggattgctcagaattcttatatacaaggcatatgaagatgggaagacaaccatatccatttatgaaaaaaaagccagtctgaaggaattctatggtgtggtgtttccctctttattgcaacttcacagaggaatcactgatgttgatgaccggaaacaagaacatctatgtgctactaagtataagcattaagattgac

SEQ ID NO: 55985 - DNA, 340 bp, Glycine max
aatgtagcctactcagaagggccctcacagatgaacgaggatctaaaaggtataaacaacggattccttatccttcctagttttgaacattttgccgccgtgagagcatgaggcagattacctttgtaaattgagatttttggtcattttatgcaaaccgtgagttatggcgtcgaagttttgtgactggaaggcaaaagccttctgatgaggaaggaatcaagggccctaagctgatcaatatttacgtcattgctgattgcgtagaaagatgctaatcctcactttgtataattgtctgtgtatatgtaatccttgcactaagattttgcatgcaatt

SEQ ID NO: 55986 - DNA, 296 bp, Glycine max
ggatacggagacatactgacagtgacttggattgcatcgctctctgtgtgttggaataggggaatcgtcaatatgagctccttcattcgttctaatacgcttgtgatgtgagctacttcgccgaacccaaacatggggattgtgggaagcgtttccacattggctacgcacccttttttttcacgcatgaaattgacttatccctcagaagacttcagtatgctgggaatacatgacttggtaatgtagttgctactggtggatatcatgaggacatgattccatctgttggattc

SEQ ID NO: 55987 - DNA, 327 bp, Glycine max
gtgtgtacaccacaagtgccatctctacgcagcgctcgcataattgttgttgatacagaatttgtatcattgataattcgagtgttcgcctcttcaagaacttaggtaactgtacatcatcatacatctgtacgttgttatgatggtctcctaggtgaattctgatcacacaacatactaagactggcacaccatagtcgctacgctcacacacctggtcctacgactatatattagtcctacaggttcttgttagccatgttacctacttacgacatttcatcaacacacttcgacaagagtaggatcaaacgtgcttaaaggact

SEQ ID NO: 55988 - DNA, 361 bp, Glycine max
ggcagagaggaggggttgtggttgctgtgcatgaggatttggggttgcttagtcagaggttgaagaatcatgtctttgctcagagtgttagcattcgaggaaccgccgatgaagagcatcgtacagggtatacgcgtgtctctagtcgccatcttggtgtgagagacggtatcaggcatttcacgtcggcgtaccacatcatcactcaagcactcgatggcactcaaattcctgagcgagacttctgaagagcatatgcatgtcaatgtggatctacatcgggcacctacagttcagcgcttatcctcgcacaccttggacttcatcactctacccgttgtgtcaggcgccccttgcctgg

SEQ ID NO: 55989 - DNA, 332 bp, Glycine max
gtacgtaaactcgagaatcggctccaagctttccaatcccaacaaaaaattttccctcggcaggaggcgtcacgtgcaacctcccgctgcacggaaaagcaacttgccaattgcaaacaagtttgcatggcttttgccgcaaatggtgacgatagtgaagtcagcaactaagggaacgttcaacataaaacactagaaggtgtttacaacattggtcgttgaacaaatggggttggtgcggtggccgcactgagtaagaataatcataggctttgggctaatttcataaaaggcaatctaaattggccctaggctttcaaaactattgttgt

SEQ ID NO: 55990 - DNA, 232 bp, Glycine max
cttggactgagcattgatgaatatgctggtgaagcaaatgctgaaatgcctcctcttgaggacgctgatgcacatgcttatggtagcatgatggaagaagttgattacatctgacttaagtgcctgtttcctgtttagaattggtgaatggagaaacagtccttttacaatgttggaagtcttttgaaatttcgaaattttggaacgtatgtgacctaggtgccgtatgtac

SEQ ID NO: 55991 - DNA, 359 bp, Glycine max
gatacagggacctatacagcctaaatattgctcaagacggaatggtaacgtggctgaatggcaaactctctacaaacctgctacagattcaagtcgactatcgccgaacgaagtaaaccgaggtgtttacgagggacgtgagttgaccaactcgacagacaccacgcgtcacgcattcagaactagtagtatttttcagacacgtacgtgaaaagaagaagttacttgtcgatctcatcaaacttgagaacttttatgaatctacatgcgagaaagtcatgcacgatatgcaaaatgtccgtcaagttcaatgtccaacacaaaggtacatgtcaagtctgacataggtgtcatctatc

SEQ ID NO: 55992 - DNA, 412 bp, Glycine max
attgaattctccagagagaagaagaaacttaatcgatcatcacttcacttcactaatacatcatggcagacgagacccagaacaagtatgagagctctgaggttgaggtccaggatcgtggtgtttttgactttctcggtaagaaaaaggatgaagaagacaagcctcatcctcaggaggaggtcatcgccaccgagtttcaaaaagtcactgtctcagaccaaggagagaacaagcacagcctcttagaaaagcttcaccgatctgacagcagctctagctcttcaagtgaggaggaaggagaagatggagagaaaaggaagaagaagaagaaggaaaagaaagggctgaaagagaagatcgaggagaaaatagagggtgatcatcatcatcacaaggatgaagacacaag

SEQ ID NO: 55993 - DNA, 251 bp, Glycine max
gatcatgggtcgtccacccagtactgggggcccagcccttcgcttcaaccagccagaggtatcagaagtggcagctattcgtcacgagcataggaacgctatgccgtcacgtgatgttcttaaaggtcttgcagagaaattcagtgaagcacaagatcgtaaaggcaggatttcagtgcaaatgaagcaagtttggcactggtttcacaataagcgatatgcgagacgagcacaatcaagtaagactcctg

SEQ ID NO: 55994 - DNA, 62 bp, Glycine max
ctactagaagcaagggtttgtggaacattagcaatgcagtttcattgtgctttcaccaattt

SEQ ID NO: 55995 - DNA, 371 bp, Glycine max
cgttgaggacattaccgacacgcacgccatacaaagtcgtcacgtcttaaacagtcacacggaatgtacggtttctcataccacacaacacttcacggttcaactcgctcgagtcaaaactacagtcagtttcgttagtccggttcaggaggaatttagcaagtgtgcactaggaaccaatcataagatagaagaaatagctgccgtcaaagcggttagtactcgtgggaaacggttcacagttcatcccgatcaacgcaagagtggcgtacatacagaatgtaatagagaagagattgcaatccaacaggaatgcacaatacatgaggctgtggtcgaaccggtttcggttcacaacgaagtcaatggtg

SEQ ID NO: 55996 - DNA, 228 bp, Glycine max
caacatgattctctttactttgctgatgggtcagtattagtcttagagatgctataaggactatcattgtatcaagttatactctttgcgttttagtttactttcttagtttgttatgactcttttgtgaatgttcatgggtttatgggaaatggaactatcaaagaggttggtaagagcaagtcaaattaaagaccttttttttagtaagtaatgaaaagaaaaggg

SEQ ID NO: 55997 - DNA, 88 bp, Glycine max
gcaatagtgtagtacctacccttttaagttgtaaggcacagatttgcattttccatgttttatatcattgcattagctttccacttca

SEQ ID NO: 55998 - DNA, 392 bp, Glycine max
atagtctgcaaatcaatgaaagtggttttcttttctttgtaacatcaatttaatcgttgtttgttttgttaattaaggccttaatgctgctgagaaacagatcaagagctgtgacgaagccaagtttgatgggtgatcacagctcctcccagccatgtccaaatcagagttacaaaagaaccatcattccttctctattttcaccaaaattccgagacttcactgccaagtgtctctcagctggagctgaggctttgagaagtcccacatcgattcttgacaccagagccttatcatccccatttgggagtcctttgtcacatgaagcagcagcctcagaaaacacaacctcttgggactccaaatgcattggccttgctcctgttggtgca

SEQ ID NO: 55999 - DNA, 357 bp, Glycine max
ctgcaagagtgagaatcatcttctgattaacctccataatatcctcaggtaacaaaaatatagaacaaccgactgaagacacggattcatttccttcacctgtcaacactgctactaccaccacgcccgaggcatccccggcaccttcggtgtgtggtgaagatgaaagttcctccattggcggtgaattctccaacttgagtgttgacgatgccacctctgacaccacagccacttcttcacagcccgagtctgacagtgtttctgctggagatgagctgttatgagtcatctagttggcataagatgagtgctaaatgttttttgttaaagggagaatataatgagtaatgacat

SEQ ID NO: 56000 - DNA, 138 bp, Glycine max
cggctcgaggcgatcggccgctcacgatggagaggctctctctgataccgaactgtgtctcttcattagttatcgtctgccttcacacccgatgatgaaggacgtgacggttgagacagaaggaggagcatcaccatt

SEQ ID NO: 56001 - DNA, 189 bp, Glycine max
ctcgagccgattcggctcgagtgaacatgatgttggaggtttggctggggacgcggattctccagcggacgagcatgtttaggacgttgatggtgctggagatgtgccgcaggattttgagtgtgggccgaaccagggatccgagattcattccacgggaaatgggctgggagggtggtcgggatggcc

SEQ ID NO: 56002 - DNA, 120 bp, Glycine max
gttaattgagttgcgacggtgacggctcgttgtgtagcgtcctgtcgagcgccgctcctctgttacccgtctgtgagagtagatggtgcgctgaatgcgctacgtaaccatgtcaagtaa

SEQ ID NO: 56003 - DNA, 219 bp, Glycine max
ttcatgcatggttggggcttgctttgtaacatggaataagatgatcgccctttacaggaaagaaaacatgggcgtctgaattgatttcaataatgttgaataacagttttgagaatgaggcagtaggcgtttgcttgcttagaaaagtgtaaccctttcttgggatgaaacaatttaacgggagaattcattttttcaaggaatttaaaatgattcatg

SEQ ID NO: 56004 - DNA, 235 bp, Glycine max
gaaatccggttcaaaattaattggaacttttgggaacttggttcaagaatatgctaaaaccggcaaataagctgaaaaggttgtggttaatccttccggtctgcaattggtgaaactttttacaggatcaaaggccttggttcacaatcaacagctgggacaaaagtgtctaaatggttagccacagcaacaagggataacatatgcaattgcggatctgcttgatgcaaggttg

SEQ ID NO: 56005 - DNA, 208 bp, Glycine max
tgactcgctaacttttcattctccaagtcaccacgcgcttcatatgcaggcacagttgttaagacaaacttgacacaagcgcaccatataatcaacatcttgaagagcttgctgtgtggttcctgtgggcccccttcaacgaaactgtactaattagataagatttgtgagttgctgttcagattaaaatctccatggaaggtcgaca

SEQ ID NO: 56006 - DNA, 98 bp, Glycine max
cttctgcatgatgttaagttttattgttgttaagaagttgttgtagtgctgcttcttcttgttatgttcaaattaaatacacataatgaatgtttttg

SEQ ID NO: 56007 - DNA, 246 bp, Glycine max
gttgaagatcgtgcagtaaacaggacgttggcaaaggacaagttgcgtaagcataacagattagagaatttaacgccatgtattgctggcgtaataatatttgaagggctttcaccacgcagaacaggagaatcataacatcggcagcgagaatgctccaggacctgatgacagccttaacatgtcaatcactggtattgccgcaggcattcagcatacacgttagtatgctcacgtgttggtgta

SEQ ID NO: 56008 - DNA, 150 bp, Glycine max
caacattaacaagtcctcaattttgttaacacactatgaaccccagatcctaaggttcatttcaaggtggcaatcggtgtcaagttttgctccttgtgaccattctgactttagtcgtgtgaggcgtgggaaccactgtgtctggggttg

SEQ ID NO: 56009 - DNA, 219 bp, Glycine max
ggatgccccgggctacacgaagtcggcacgagcgatcctccgggcagcagttttcggtgtgctccttgtggttgccagcgcccacaggaccatcgtcacggtcgtggaagagggggagagggagggaggatgcaaacagcaaatccggagtgccgagaacttaaaagactgccactccttcctcggtgacgcatccgagcccaaagaatctcagcacta

SEQ ID NO: 56010 - DNA, 138 bp, Glycine max
cacgcgtaaatcgaaatccggtccaaggggaaaccataattacaacggcaatggtgccgggaaccttaattggaggggcttcaaatgccaaaacaagttcaaagcacgcacaaattggccggatgaaaacaactgcgg

SEQ ID NO: 56011 - DNA, 399 bp, Glycine max
ctccggctaacgcattcatggctggtagtggtacgcaattcttccctcacacaagatcttgaaaaaggaaaaaaaaaaacaaagaaaacggggattgcgtgttggttgtgtctcactctctcacagttcttctctttcacaccaactttgtgtttctagtagcatttgatgatgatattgttgttgttgatgagaatgaggccttgtggtaaatttgacactcatattttgaagtgggagaggaaaaagaaaagacaggagagaaaaatatatatatatggatggatgtttatttttattttttttgtgcaaattattaatgcttagttcaaagatagatcattcttctccatgttgaaaaactagctctaaagtttacttgtttcttagctttgtacg

SEQ ID NO: 56012 - DNA, 245 bp, Glycine max
ggagcaggatatggaagaaaaattgcattaagttgctggggttgagattctgtcttcgtgactagttagagatgaaaaaaactggtcacacttctctttccaaacacaatcagagccttttcgatcttcctactcccaagagcatttcttcatgtggcaagtaatattcttttttttttttgtggttatatatttaacaattgtaagattttattgagaaagaaaagatttattatacttttaaa

SEQ ID NO: 56013 - DNA, 376 bp, Glycine max
tcggggaattccaattccacattttcaagaaataaggaggcaaaaatgttcatatatgaattggaattatttgttttcttattaggcctatcctgaagccaaaggaaatgagatcggaattcctcggggaattccaattccacattttcaagaaataaggaggcaaaaatgttcatatatgaattggaattatttgttttcttattaggcctatcctgaagccaaaggaaatgagatcggaattcctcggggaattccaattccacattttcaagaaataaggaggcaaaaatgttcatatatgaattggaattatttgttttcttattaggcctatcctgaagccaaagggaatgagattgggaattcttcgggg

SEQ ID NO: 56014 - DNA, 402 bp, Glycine max
gatagctagaagcaataagatgaaaatgaaagtgcttgttttgtttgttgctacagttttggtagcatatgaatgccatggctcagactaccagaagttccctctccaaatgaaaactgggtttggtgggcaatacagcaatgaggtggcatgtgccagttggaggcttggcgtggaagcaaacaacgtagtcaagtggcaaactgttcctgcagcttgcggagagtacatagctgactacgttctaggagaccaatatagatcagattccaaaacagttaaccaacaagcttatttctatgctaaatccctcaaactcaccaacaaagatgtctttgtcttggacgttgacgacactactctctctaatctccagtattttgctaaccatggatttggtgt

SEQ ID NO: 56015 - DNA, 363 bp, Glycine max
atttaccagctatacttgttccttttgaaggttagaagtgctacaatacaaacaatggcagctactcaggaagatgtgaagcttttgggtattgtgggaagcccatttgtgtgcagggtccagattgcccttaagttgaagggagttgaatacaaatttttggaagaaaatttgggcaacaagagtgatttgcttctcaaatacaaccctgttcacaagaaggttccagtgtttgttcacaatgagcagcccatagcagagtctcttgtgattgttgaatacattgatgagacatggaagaacaaccccatcttaccttcggatccttaccaaagagccttgggtcgtttccgggccaaattc

SEQ ID NO: 56016 - DNA, 98 bp, Glycine max
cagtagtagtacattatacacaggttctcactcgttatagcactacaaaattgaattcctataacgagtgagaacctgtgtataatgaactactactg

SEQ ID NO: 56017 - DNA, 400 bp, Glycine max
tttcaagtgcctaacaaaattgtattgtggaacctaactaccggggatttcaaggtcattcctccaacctagttgaatttgtaccacctaacgaggaccctcacattgttcttgatggatttggttatatgcgtggtagagatgactataaggtgattattaggcaagtacattttatccaaaatgagatcggtaccctgcaatgactccttatgggagatatatataacctaagaaataactcttgaaagaaacttgatgtccatatgctatatcattgtgttgataatgactgattatacttggatggaatgtgtcattggttgggtgaaaataatgaagataaggatgaagaatgcttggtgtcgtttgacttgagcaatgaggtgttctttccaac

SEQ ID NO: 56018 - DNA, 98 bp, Glycine max
cagtagtagtacattatacacaggttctcactcgttatagcactacaaaattgaattgctataacgagtgagaacctgtgtataatgtactactactg

SEQ ID NO: 56019 - DNA, 362 bp, Glycine max
cttcaaaacactcataacacaaagcacaaagcaaagctcatccttgagttaaaaaatggcagcagcttcttccatggctctctcatccccatccttggctggcaaggccgtgaagctgggcccatcagccccagaagtgggaagggtgagcatgaggaagaccgtcaccaagcaggtctcctcaggaagcccatggtacggcccagaccgagtcaagtacttgggcccattctctggcgagcccccgtcctacctaaccggtgagttcccaggcgactacggctgggacactgctgggctttccgcagacccagaaaccttcgccaagaaccgtgaactcgaagtgatccactccaagtggg

SEQ ID NO: 56020 - DNA, 375 bp, Glycine max
ctatgatctaaggcttcttccacattttgtttgagagaaagagagaatcagaggccatccttcctgaggattaaaccacattgctttctaaagtataaaatctcaactcgttaatattccttaggaattgggtttggaggcaccccaattccaacgccaaaaggtttgaactttgggcgcctctgaatctctcaatcgtgggactcacaatctaagttgtaagttcatttggtccttgttaaacagcagagtttccacggtttgtgttggtgggggttcaaaatgttgggggttttcattaatcgaatccttattctcgttctggggtatgcataccctggattcgaatgctataaaacagttgggaaaaataag

SEQ ID NO: 56021 - DNA, 376 bp, Glycine max
atttagtggaaaagaagatgcagatgttgtcacaaaacagaggaaatcagggtatcttacaacattcttgctgtgtaagagaacattttttgggccaaaagggtaggaaatcatgatagatggtaacatgtgaatcatactgccgaccaattagatgggtgcttggttgaattcattgaattttattctgtagaaatagtcgtttgagaaagtgattattttgcataattaatttgatacgcaagacccacggaaatatgaacggattgttcaacactccaacctggtagaaaatgaatccttgtaagtccaaaatgtgtgtttgacttttgtaaactcccaacctaaaattggtgattgttaattgtgtttgttt

SEQ ID NO: 56022 - DNA, 375 bp, Glycine max
gaaacagtgtgatgaaaatgaaggtccttgttttcttcgttgctacaattttggtagcatggcaatgccatgcgtacgatatgttccctctccgaatgaacactggctatggtgcccgtactccggaggtgaaatgcgcaagttggaggcttgctgtggaagcacacaacatctttggctttgagaccattcctgaagagtgcgttgaagcaacaaaggaatacatccatggcgaacaatatagatcagactccaaaacagttaaccaacaagcttacttttatgccagagacctcgaagtccatcccaaggacacatttgtgttcagtatagatggcaccgtactctctaatattccatactacaaaaaacatg

SEQ ID NO: 56023 - DNA, 374 bp, Glycine max
gttgtaactccgttcttcttcttttgttgttctgtgtctgtgtttgttttttctctcacctgaaaatgtcttgctgcggtggtaactgtggttgcggaagctcctgcaagtgcggcaacggctgctgaggctgcaagatgtacccagacttgagctacactgagtcaaccagcaccgagaccttggtcatgggagtggcacctgttaacgctcaatttgagggtgctgaaatgggtgtgcccgctgagaacgatggctgcaaatgtggaccaaactgctcctgcaacccctgcacttgcaagtgatgtgttgggagagcaagcttcaagcatagatagcccttaattatgaataatgataaactattaatgtgt

SEQ ID NO: 56024 - DNA, 224 bp, Glycine max
actcataatgtagtttgtatatctctatatgcgaatgctcgcagagcgattggataattaggtggtaatgccatccattcgattctgcagctttgatcttcgttttccttgtgaccgtgtaaccctctgtgacagtatagagttgtgccctagttaagtcgtttttttttttcgaattttggggattcacgttgtaagggaatgcattgttgaaaggaattctt

SEQ ID NO: 56025 - DNA, 369 bp, Glycine max
gagaagttgtgggatggaactcagaagccgtcaaatatttcagttaatttggcactccagcacctgtatgattggaaacaaattcattgtaaagaatcatcttcatctgcgcagacaatacatggactccaccagcagcttcttttatgaagtgtagtattgaagcagtcttattccaagacaccggctctttggtgtttcagcttgcatcaggcactctcgtgggaattttattgctgccagaacacaatgctatcagggagatctttcacctcaggaagcagaggaaatagcattgcttacagtggtgagttggtatcatttctgcatttggatatataatgtcatttttgaaattgattgttaatc

SEQ ID NO: 56026 - DNA, 324 bp, Glycine max
tcggggaattccaattccacattttcaagaaataaggaggcaaaaatgttcatatatgaattgggattatttgttttcttaataaggctatcctgaaaccaaaggaaatgagattgggaatcctccgggaaatccaattccacattttcaagaaataaggaggcaaaaatgttcatatatgaattgggattaattggtttcctaataagcctatcctgaagccaaaggaaatgagatctggattcctcggggaattccaattccacattttcaagaaataaggaggcaaaaatgttcatatatgaattgggattatttggtttc

SEQ ID NO: 56027 - DNA, 344 bp, Glycine max
ccaatatattccattctctctgtgtatttccctacctctcccttcaagatgcagatcttcgtcaagaccctcaccggcaagaccatcacccttgaggtggaaagctctgacaccatcgacaacgtcaaggccaagatccaggacaaggaaggaatccccccggaccagcaacgtctcattttcgccggaaagcaacttgaggacggccgtacccttgctgactacaacattcagaaggagagtactcttcacctcgtcctccgtctccgtggtggcatgcagatcttcgttaagacactcaccggcaagaccataaccctagaggttgaaaactccgacaccat

SEQ ID NO: 56028 - DNA, 337 bp, Glycine max
ctgaacaagggtttctctttctctttctctgtctgcttcttcactttctctcgtttcaatcgaaaaaaatcatgggcagaaaattcttcgtcggtggcaactggaaatgcaatgggaccactgaggaggtgaagaagattgttactactttaaatgaagctaaagtccctggagaagatgttgtagaagttgttgtgagccctccttttgtgttccttccttttgtaaaaagtttgctgcgccctgatttccatgtctcggcccaaaattgttgggttcgcaaaggtggtgcttatactggagaggttagtgctgaaatgcttgttaattttggaat

SEQ ID NO: 56029 - DNA, 376 bp, Glycine max
gtgatttcagtgagtgatcggtgttcacttgatctcatcataatcgtcagcgtcaattgaagaagatgccgatcagaaacatcgccgtcggaaggcgtgaagaggcgactcaccccgacacgttgaaggcggctttggctgagttcatctcaaccttcatcttcgtgttcgccggctcaggctccggcatcgcctacaacaagctcaccgacaacggcgctgccacccctgccggcctcatctccgcctccatcgcccatgcattcgccctcttcgtcgccgtctccgtcggcgccaacatctccggcggccacgtcaaccccgccgtcaccttcggcgccttcgtcggcggcaacatcaccttcctccgcggcat

SEQ ID NO: 56030 - DNA, 151 bp, Glycine max
acattttgttgccttttctacccttctcaataataaatatttatctatgctttcgcgaatcagcttgtagtttgtggatgaagctcagctgctttctgtttcttgcttcctttcttttgttttaaaaaagaattcgctttctgtttggcaa

SEQ ID NO: 56031 - DNA, 78 bp, Glycine max
aaaaaaagaattttgaacctgcctctgttaaagtttgcattttttttgggtgggttgcaagtactgtgcaagctttgg

SEQ ID NO: 56032 - DNA, 202 bp, Glycine max
tgcacatggatctcggttatcttcaccgtccataattcatcacaatcgagtgagatatgttctccatatgaatgatgatagaagcctattactgagagtttccgaataacagtgctctctaattcattggctcattgtaactagtgcccatgatgacagtgtgacaacattcacatgggaccagttccaactgccaatcatt

SEQ ID NO: 56033 - DNA, 372 bp, Glycine max
tggaacttgacatagtaccatttgattcatgttccaaagagtaccaaaatctttatgaagagtggttcaattatgcagatgcagatggggatggtcgttttacgggaaatgaagccatcaaattctttgccatgtcaaacttatctcgacaagaacttaagcaggtatgggccattgcagattcaaaacgagaaggatatcttggtttcaaagaatttgtcattgctatgcagcttgtttctttaggacaatgtggatactcaataacacacgatttgctaactagtgatgctatgagacatgcaaaaccacccacaatggatggtttggatgtattgcttacaaagaaaaaacgtaaacaaaaagataaag

SEQ ID NO: 56034 - DNA, 233 bp, Glycine max
gaaatcattattccactcacttattggagaccatcagttgtattagatgtccaacatctaggacagctctgaggctagttgtggcactgtgaatcccatggacaatttttgctgtttcagtcacggtactatctaaagcatgttgatgtgactgtgtctcacactatcatttcatatctgaagcacatgctcctctttgcgacattttgtttctgttcctgactaggttttgc

SEQ ID NO: 56035 - DNA, 370 bp, Glycine max
aatagatatttacaacacactcacttttcactctcccttcatttagtttatatatagtttcatttcctcttctaaaacaacaatagttcatatagtccatttcacttcactaaggttatttcttagattgcttccatgggagacaatgttgtagtgtccaatatggagctagagaggttgcttagcatgaaaggaggcaaaggtgagggaagctatgccaacaattcccaagcacaggccatacatgccaagtccatgcatcaccttctcaaagaagccctagatggagttcaacttcaggcccctaacataccttttgtggttgtggatttggggtgttcatgtggcaacaacaccatcaatgtggtgg

SEQ ID NO: 56036 - DNA, 269 bp, Glycine max
attagattcatacatttaactaagaactttattatccttatctagctttatctatgatatgaagcattcgcgctatacactgtattttcggaagtgagactgcacgattgtttttgtgaatactccatttgccatcgtagtctggattcacgtttgtttgatcactcagtctcacaactcgaatatgaggactctctcaagttcgtatcgcagtggcagcgatgtcgcatcatctgccggtgacattcactgggtttcaacttaagcag

SEQ ID NO: 56037 - DNA, 317 bp, Glycine max
aaacaccttagataatttgattcccgagtctacaacttcaactaatccaatcaccactaaagcggtccaaaggacatacttgcacgttcatacgtctcatgatatctgggatattttctcgatacgacattttaactcactgttacgcatcatacatcagatctaacatgaccaatgtccatcagtctccccagttggatcaacgccgattttccagttggatttattgattgcatcagtcttgtcaggttcatcataatttctgggagagccatgtcaagctctcacgtcggtggggggaatcgcaattctaacag

SEQ ID NO: 56038 - DNA, 357 bp, Glycine max
agtttccatcctctatatttcttcaatcttctctcccttctacttctagggtttcgcttctgcaacggacgaccttcttcaactcatcaaagttgactttgtgagccaattcaatcaggcttgagaaggtatcctagtgttgtttgttcaccttcatctccatgatggaatactgtaaagatgtcctcagctgtcttgattcggatacgtctcttaagatattcatgtgtctggatgatctggctgatcttgttcgggttacttgtgtctcgcgatcttggagacactttggtgagttatactagttcaaacaaagcatttgtttctcaaccgatgcctcagtttcatgaaaattca

SEQ ID NO: 56039 - DNA, 377 bp, Glycine max
aagaaagggagcaattaaaaaaatcagaaaacaatcaagttggtttttatggaagctcttgtcgtttttatggttaccttttgactaagtgcagggttgcgtgaaatcgggactggggttttgctgtccgttggaggtgctattttcatcaatgtgtttctcagtcagagtactcgtcccgtaactctctttatccccataaaaactctcttttttttttttttttacattagtaatttgtctgttttaatatgagtgatttctcctcttttttttcaattaatctaacttttattggtttctggcgtacatagtagcatataatatatttttaacaaatggaaatagtatgttctttagattttcctttaaaaata

SEQ ID NO: 56040 - DNA, 390 bp, Glycine max
gtgcgagagagacagtggaaagaaaggaaagggatgacgctgggtctgatcaatgcgaatcctgtggttcacgccaagaaagagcgaatcgctcgttctgatgatcctcacgccgatgacgccgttgatcctctcgacatctatgatatccttttttttttttcagtttctcttctcccactcccaactcaactaactgttgagatccttgacttggctttgacaaatttcgtgagggatattcgggattccgaacatccttagtccctggaacagctcagtgttctctccgaggaatctatctccgttgacgacaaattaggccgaattctgataacttttacgccgaccgtacagcactgtagcatggccacggttattggactttgt

SEQ ID NO: 56041 - DNA, 370 bp, Glycine max
gcacatttgaacatacgtaatgatgagaaagagagacagaaagagaaagagaaagataatcgttaatctgaatgggttacatccaccatggaagaaccggtctcaggtacatacacagattcagatccgataccggtgtagactcaaactctggcagatcgcattcgcgcgctgcattcgcctcccattccactatccacggcaacatgctttttttctcaaaaagcgagttctatctcaaccaaattatcgtacaggtggtacgcgacatgcgcagggagcaaaacgagcgtttgcgcctctgtctcgacaccgccaacatctacaaggagtcggtgcaggactacattggcgttgggtccctcatcgc

SEQ ID NO: 56042 - DNA, 386 bp, Glycine max
gggttttagcgcagcttcttctagatttaaggaagatgggtaaggaaaaggttcacatcagtattgtggtcattggccatgtcgactctgggaaatccactaccactggtcacctgatttacaagcttggaggcattgacaagcgtgttattgagaggtttgagaaggaagctgctgagatgaacaagaggtcgttcaagtatgcctgggtgctggacaaacttaaggctgagcgtgaaagaggaatcaccattgatattgctttgtgggagtttggaacaacacagtattattgcacagttattgatgcgcctggacatagggatttcattacgaatatgattactgggacatctcaagctgactgtgctgttcttatcattgat

SEQ ID NO: 56043 - DNA, 378 bp, Glycine max
agcaagcacagcaacaacaacagtgatgaaggagccaagagcttctcttcttcatctgattgtgacaatgacggtgaattggttccggaaataaaccagaaccaccaccactccaccactggtaagccgccaataatccacaacacccggcacaaggggttggttcaagtgagaaccagtctccaacaacaattgggggtgcacaggaaagggtgaaatttaaaagggcacacaaagaaactgcaaagataaaagagtcaaaggagaaagcaagagcaagagcaagggaaaggactacgtacaagattattatgtgcaatgttaacaccaacaacaacaacacaggaaggaaggtgcaacaacaagacttgaagaaaa

SEQ ID NO: 56044 - DNA, 105 bp, Glycine max
cacaacgcaactaccaacgttgtccccttctacgttcccttcctagtcggcacatgacgatgccttctacagatgcttcctctcagcacaaaggcgtccacgggg

SEQ ID NO: 56045 - DNA, 177 bp, Glycine max
ggcacatgtaacttgtctacttagccttgtgtgtgttttgctcatgtctcagactattttgcgaagatgcgttggcgttttctttttcaaaagccacatacatacttgatttgcgagggatagaatattacatggttgacaatctaggcaaagactggccaccgaggtctatttttg

SEQ ID NO: 56046 - DNA, 362 bp, Glycine max
ggaaagtatagtcaaagcttgtgcttgttttggtcaaaaaaaaaaaaaaaaaaaaaaaaaaaaaaaaaaaaaaaaaaaaaaaaaaaaaaaaaaaaaaaaaaaaaaaaaaaaaaaacaaaaaaaaaaaaaaaaaaaaaaaaaaaaaaaaaaaaaaaaaaagggggggccccccataaataaccccgccaacccggaaattaattccggcccggtacttgcaggggtacaagttttcccaaaaggaatcctaataaaaccttggggcaaacagggcaaaaccggttccctgtggaaaattgttacccgcacaaatttcaacacaacataagacccggaaccaaaaattttaaaccctgggggcc

SEQ ID NO: 56047 - DNA, 90 bp, Glycine max
cacgcgtacgtcagctcgagaattcccggctaggtttcacattgttactacatgccaactcatacctctctacttatccattagtctggt

SEQ ID NO: 56048 - DNA, 299 bp, Glycine max
ctacaacagatccggaaatgagtccttctgaaaatggcgtcactcaacctagtctaacatgacttgtgatcacaatacctgtgcctgggactcaataccacatgatcactgcgccaacgccagatcctgtgacacctaaccttgttaccgggcttgatgatctacctcagccgtggactcgataactacgataatccacactggaacgtgttgtggctgaccggcattacagatcttcagattctgcccagcctgatagctcaatccgagacttctctcagtacgcaaccacagatcct

SEQ ID NO: 56049 - DNA, 385 bp, Glycine max
tcggggaattccaattccacattttcaagaaataaggaggcaaaaatgttcatatatgaattggaattatttgttttcttattaggcctatcctgaagccaaaggaaatgagatcggaattcctcggggaattccaattccacattttcaagaaataaggaggcaaaaatgttcatatatgaattggaattatttgttttcttattaggcctatcctgaagccaaaggaaatgagatcggaattcctcggggaattccaattccacattttcaagaaataaggaggcaaaaatgttcatatatgaattggaattatttgttttcttattaggcctatcctgaagccaaaggaaatgagatcggaattcctcgggggtaccgagct

SEQ ID NO: 56050 - DNA, 102 bp, Glycine max
atttataatgtaaaagaaagagagatataaaaaaaaaaatgagagatgtttgtgaaatgttttcaatgaaaagtgatttatggattattactctttagtaaa

SEQ ID NO: 56051 - DNA, 192 bp, Glycine max
ctttggaccccgagatatgtcattgccagaactaataccatcgaatccattgctaccgggaacaactgaggtacatcaacgcaggaaatgtgttactgtgttggggaacatgaatcacgagacctggcctgtatgatctacgcttccgtagtagggatcaagctcaatggggcccgtggcatctcgaactgg

SEQ ID NO: 56052 - DNA, 57 bp, Glycine max
cacgcgtacgtaaactcggaattcggctctaggactgctgcgaggtctactcgcctt

SEQ ID NO: 56053 - DNA, 396 bp, Glycine max
attaagtcaattgtttcagaagaacaaacaagtctacaacttgctctagtggggactttttttcctatccccccttttttaatgaattcgtaaataccattgttaatagttcttcgtaggagtattagcatacaactggttaagttatatgctgtatcaaattaataagaaccttggaagaatcacaccagaaaagctagcagttgtagttggaggagccaaagttcttataaatccctcactagaatcgcatacttcctatatgggattcaagtctcataccttgctattggattctagcacacatattatgtcaatgattgtattggattttgatgctgtcttcttttgctatctaaatttggtagtgttgctaattctatctgcaacattttt

SEQ ID NO: 56054 - DNA, 407 bp, Glycine max
  unsure (1)..(407): unsure at all n locations
cacaagccaagtgaaagtgagaaaaaataaaaatcaaagagcataatgtcagggatcattcacaagattggggagacccttcatgtgggagggcacaagaaggaggaggagcataagggtgagcaccatgctggagaatacaaaggggagcaccatggtgaacacagtagtgagtacaaaggagagcatcatggtgaacacaaagctggagagtaccatggtgagcacaagccagagcacaaagaggggttcctagacaaagtcaaggacaagatccatggtganggctgcgccgccgaaggcgagaagaagaagaaagagaagaagaagaaagagcatggccatgagcatggccatgacagcagcagcagcagtgacagtgattaaactgctgcatcacctatata

SEQ ID NO: 56055 - DNA, 400 bp, Glycine max
acaaggcagaaagcaagctcatcctagagttttaaaaatggcagcagcctcctccatggctctctcttccccatccttggctggcaaggccgtgaagctgggcccatcagcccccgaagtcgggagggtcagcatgaggaagaccgtcaccaagcaggcctcctccggaagcccatggtacggcccagaccgcgtcaagtacttgggcccattctctggcgagcccccgtcctacctcactggcgagttcccaagtgactacggctgggacactgctgggctttcggccgacccagaaaccttcgccagaaaccgtgagctcgaagtgatccactccaggtgggccatgctcggggccttgggctgcgtcttccccgaactgttgtcccgcaacggggtc

SEQ ID NO: 56056 - DNA, 321 bp, Glycine max
ctcatcttggttcttcttgtgttaaccctaaaagatagtgtcacttgtcaggcgcggcagccttgctctccaccacgattccacgacctccacgccaccacggtcccagtcggcgccggtgcattgcggagtcgcgacttcgctcccgtcgtcactcacattcgctggcgatttgggttgggttgggttgtgagaaggggtaaagtgggggcaggtgtggtgggcgcagctcttgtgtcgcaactataccacatttacaagagttttcatgtgtgagagatttccccaaggggaacccccaggagcaggtattggaaacat

SEQ ID NO: 56057 - DNA, 317 bp, Glycine max
tgtaaatgttggaaatcgcttctgatatgtgtaactctgttgctatcttggcagatctagtcactttttaagagatcttttactaatgttggttctttgtgcgtaatttttataatcccagttattagttatacacacacacacacaacacaacagaacagtgtcatagtttgttgttgtaagctatatatgcattcatggcttctgctaattgtcctgctgctctgtttatcgcctttgcattgtcctgtcctgtgatcttgcaactggctatcaggcaatatttaacaacattactggagtgtgactcatgccac

SEQ ID NO: 56058 - DNA, 184 bp, Glycine max
gagccaaattccattttccaattcaaaaccctaactccgttcgaagcaccaaatcgtgatggcaccaaaggcagataagaagccaccagagaagaagcctgtggaggagaagaaatcgacggtgggagacaaggctccggcggataagaagccaaaaggcggaaagaagcttccgaaagaagga

SEQ ID NO: 56059 - DNA, 299 bp, Glycine max
aaacccgaaattcggcccaagcaaaatccctatccagtaaattaactataaagccaacccaacaattatccctttccttccggccccgctttgctttcctggccctttcaaaaaatgttgaacaatttgtggacaaaattggaaacccaattttcccaggtggcacatattacattaggccacaaccttggggggctgccggtgttgaattgaaactaggccggaaaggaaaaccaaatggcccatttaaggttttgcaaaataagccacaaacttcccttggaaaacaattcaaatca

SEQ ID NO: 56060 - DNA, 395 bp, Glycine max
tgacaaccttagcttgaaggatgcttccattgctaagcagaagctgtggagagcgtgttaaaggatctaattcaaatatgtttgggttacaccgaacgaagctcttgcttttctctacatgtgttgcacgaggcttcacaaattttccaaatggtcatgaatttggcagtgagtttgctatgatgagcagagatcaagtccaactcggaagaatcccagtgtctgacaagctcgtttattggtttgtcacaaggccacggacttctaaagattcaacaatttggaaagacccagttcttattagacagtcattaatagaatcaatgaaaggtttcccagaaggggcggtggagataatacgaaattgcaagttgagcttcttgcatctgactgag

SEQ ID NO: 56061 - DNA, 446 bp, Glycine max
  unsure (1)..(446): unsure at all n locations
tgacaactcatgtacgacctacgtaatctcggaattcggctctcagaacgatgtgcatcgatggcaatgggaaagacagtgcgatactttagcaacttcttcgataacgactatgcaacatcaatttactgtcagctgaggaccttggtgtatccaaggaagagaggcaacttgtggactccctgtaggaaacttgcttcaacgatccgtcatcgcgtcgagagaaacgtcttctaatgcttccgggggatgacgtgcgccctccagatgttgctatcacatactttgagactcctcgtacatcttcaaatgcanatctatcatccaagaacgaacgagacaagaatgagatccctttgcgttaatggtcaggaccttctcctacatacactatcaaccacagttcacatatcggagatgctacttcatatacagatgctaatata

SEQ ID NO: 56062 - DNA, 93 bp, Glycine max
ctttctccttactcctcgtccgaacctctcactacttcttcagtcctttaattcaaccctctcaccgacaccaacatcaacctcggttccttc

SEQ ID NO: 56063 - DNA, 401 bp, Glycine max
ctcagagaaccaaaagcaagtttgtctttgctggaccttctaaatcagctgagacccttttgagatacattgctgcggagcaacttccggtcaagtatgggggactaagcaaagatggcgagttcggaatttccgatgctgttacagaaattacagtgaggccagcagcaaaacatacggtagagtttccagttactgaggtgggtttggtcttttcctttgtgtttttttgtcggaattgattgatctcgattgaggtagaattcaatgaatgcagcatagaaatgcggagtctttcctaggattcctctgtcctcaagattttaatattatccttttcgttctttacttatttctcccgtttcatgcgacaaattagggcaaacccatgccccgagatg

SEQ ID NO: 56064 - DNA, 221 bp, Glycine max
gtacgtaaactcagagttccgctccaggcatacttcaatatggtctgaaaccatgaagatcaatagattcctagatgatcttctcgaacgtagggaccaatgagccgaggacatagataacgagcatttatccatcgaagtccgaaaaaaccctcttctgtgctcactctgtcgccaaacgaataacgaacccacattataacatcgggaagcgtatcact

SEQ ID NO: 56065 - DNA, 99 bp, Glycine max
gaacattgttttaggggagggtattgatgttccaactaacacaaagacatgcgcaatgtaccaaaacaaaaaaagagaaacaagagtttttttttgtcc

SEQ ID NO: 56066 - DNA, 286 bp, Glycine max
ggtgcatactacagctactgcaaggacattagaatttctctaaacaaaggcatacactactttgtagtatttgtaagtacttctgtaagtgatcattgagccttgaggcttgccctgaccctggtgagcccttgggacccaatcacataaacttttcattatcaaaaaaaaaaaaatgatggatggtctgattgttctacacataacacattgatagttttcatcaaaaaaaaaaaaaaaaaaaaaaaaaaaaaaaaaaaaaaaaaaaaatacaaaaaaaaataaa

SEQ ID NO: 56067 - DNA, 333 bp, Glycine max
gcagtgtgacatgttgaagacattttcacatgtagaaccaaatactaaaaatcaaatctgtattgaaaagcttacacccaatttgcagcacctgacactcggtgaaaatgaactgaagatgattccgcatggagaatttccaggaaacgtcttgcacaatttaaaagctcttattttgctgaacttcagcgttgagtcctatgaatttgcatatggatttctacaacaggtgcccaatattgagaagcttgaggtgtaatgtacttccttcaaggagattttctgcgttcaaagtcctaatgtggatgatactggactcctatcacagctgaa

SEQ ID NO: 56068 - DNA, 341 bp, Glycine max
tgaggcaccgggtggaaaggggaatgattttcctggtcaaacagagagaaggaaagtgcagtggacagatacttgtggtagtgagcttgttgaaatacgggaatttgagcccagcgaagtggatgatgagtcagttgatgaatttgacaatgggaatctcaaaacttgttcctgtgctattatgtaaattggcattccaaaggatgacacagatccatttatgaggcgccaagttgttgattgctaacatattccatcactcagcttgaggaaaaggagcagatatttttcagtctagtggagatttatacaccatttcttgcctgagcgataatttgtgt

SEQ ID NO: 56069 - DNA, 222 bp, Glycine max
gtaatatgatcgtgtttacgtgtaagttgcaacatgatatgaaattgtaaatatattaagaaaatattagaaccttgatctccttttgctcggtataattattcaaatgttgttattgtatgattcatagttgcatacaagattctggatcattgataggatctctttaccattaaaaattgaaatattgtttgtcaagatctagttaatgccttaatggtc

SEQ ID NO: 56070 - DNA, 375 bp, Glycine max
gttgagaactaagaaggagaagcaaatggcttcctcaatgatctcttccccagctgttaccactgtcaaccgtgccggtgccggcatggttgctccattcactggcctcaagtccatggctggcttccccaccaggaagaccaacaatgacattacctccattgctagcaacggtggaagagtgcaatgcatgcaggtgtggccaccagttggcaagaagaagtttgagactctttcctacctgccagaccttgatgatgcacaattggcaaaggaagtagaataccttcttacgaagggatggattccttgcttggaattcgagttggagcacggtttcgtgtaacgtgagcacaacaggtcaccaagatacta

SEQ ID NO: 56071 - DNA, 347 bp, Glycine max
attcaggattaaacaggagaagctcttctaggaatgggtgtggtaggggtaggcggcgatcacaggcacaggttaccccaactcctccccctcctcctgtggcaactgttgaaacaagcaccccacttattcagcagcttagtaacattgaagtggtgggattggaggatagaagcctagcaggttggggcaagacaaccagaaggccccgtaggcaaaggttcccggcaggtaatcctccgtcaatccggttaatctgatcactgtaagaggcttaaatttgtagatgagaatttatagagggtaagcacaaagtgggtccatttcaatattgatggaaaacacga

SEQ ID NO: 56072 - DNA, 165 bp, Glycine max
caaattcactcagattctcccttcccctttttgatttttcttagaaaactcccaaattcgaatcaatatgaagaaagtggtgctaaacgtggaactccatgatgacctcatcaggaattagggcatgaaggcagtatccggtatttcacgggtagagtcagtccc

SEQ ID NO: 56073 - DNA, 360 bp, Glycine max
gttcttcttctccttgtggccttcttccctctaacattccctgtggtttctctgaacatatttatataaaggttgtgctatagccttagaggctcatttggtttaatttgcctatgtcatatcatatgtactccttttttcatttcctctctcatttttggagtatttgatttgatgtgcatatatatacacacacattacaggtatatatatgcttagataatcaaaaaatatataccaagttttgtgtttggtttatatatatagttctctctttctctctctttcattcgtattcgtcttcttcatcttcatcgtttcatcttcttgtcacagtgtgttgattaattggtgtgactc

SEQ ID NO: 56074 - DNA, 304 bp, Glycine max
aaagaacctgtgccgctgactcacccgattcgaagcaactcgtcaggtttaggagtcagaaattattttcatgcctcgctggttaatttacgtacaaggtgcatcctctgtacgtatgactgtgatatatatatatatatatcgtgtatgttgcaattgtaattaaagacactggtgtggcaacaattcagctaaatttgtgctcgatgtacgtttcatgtgttgattagatattaattaatgaaaaataatgttatttttgtgtgtttaaaacaatattttcttttggaagtggtagcccccc

SEQ ID NO: 56075 - DNA, 85 bp, Glycine max
ttcaatgccagtgtatccatcaatatatttatgcttattacatcccaaagaaataaatattttatatgatttgagtgctagcaaa

SEQ ID NO: 56076 - DNA, 346 bp, Glycine max
atcataaaattgccatccaaaagctcaataatactgaataattataattataatatgtattatacaagcgaaatagatgacatgctccctacagtagaagcctcaatatctccacaaattatcgtgttcaaggtttaaatagttttaaaataaccattaaaagtcaaacaaatggggaaggatgtacagtaaccacaagttatatgctgcaccaagaataagtgagaaatctggatgcaagtggattctcatgaaaatgccatatatatatctcataataaatccgtgttccattaatgtcaaactgcgatgggagaccttgtcctggtttaaaaaaaaagaaaaa

SEQ ID NO: 56077 - DNA, 100 bp, Glycine max
aaaaaacttatcttcattggtttgtgtttatgtagatttttgtatgcaagactagagcatataatcgtgtgatcaagctattttgtctctcttatgtatc

SEQ ID NO: 56078 - DNA, 352 bp, Glycine max
tcacttcctaaatagcgagcggacgctctctctctattattttacaacctttttcgcacctttgcgctcaattcaattgaattagtctaattgtaacaagtatggattcacaagtttgtgagacattgaccttcaaatagagtgatcaagggttgaaaatcataggcggtccacggatgacatcatttatcgataagccatcaccatctgatcaaagtggaaaggattgaattggacacaatgtttaagtcccttcaggcagaaattagaggaaccgagatgggtgattatccaggatcatgccccatatggtccgcaatattgatcagtgttccaattatggaagactgtg

SEQ ID NO: 56079 - DNA, 374 bp, Glycine max
gttgtcttgtttatatggtgatggtaagccatacatggagctgagaaaaattgctggagggtttgatggtggttctctagttgccacgcttgattccaaaatcggtgaacagttgatgaagcaaaggccaatcttcagtgagatcaaagaggtaaacaatgctgtttctaaccttcttgttgcttctgatgaagtgagacatgatgcagccaaggaattgcagacaaagctgagtgtgttggagaagctatctgatgatataaggaaggaggtggataatctgtttgccaatgtaatgactcagagattcgaattaattgatggctttcggctacagaaacagccacaaaaataaagtgtctgaccatatatat

SEQ ID NO: 56080 - DNA, 340 bp, Glycine max
aagaaatccaatgggtcctctgaatccgaatcacgtatttcgaatgccatgtctcctcctcaaatagataaggaaacttcaacccatcctcagatcagtagtaacttggagcagaatgagtcacctcggtttaataagctggaccaggaatccgcctcacctcctcggtgtgatgtgcaagagcttaaaactacgttacctcctcaacttgataagccggattctactagtttggtttgctttgaggacaagctacctgaatcgaagttacaagccgcaaaaagaaactcttccagaaaatattctccaattcactatagggatgcttcagttgaagatg

SEQ ID NO: 56081 - DNA, 75 bp, Glycine max
gtttgattgtcctagctttgaccacggtcatggtgatctccattcccgttgtgacacgcttttcttgtggttttc

SEQ ID NO: 56082 - DNA, 137 bp, Glycine max
cgaggttgcgttcaatgttcagggggtttctgtcgactgcttcattggggtggctgagttgcgaacagggtcagtgtgtggagcgtgcgaatgtgcttgagatgaaagagtagcagatctcactggcagtgcatcgg

SEQ ID NO: 56083 - DNA, 294 bp, Glycine max
  unsure (1)..(294): unsure at all n locations
gggattatactggtttggggtatgctagatatcatgcaagagatgtaaatggagactttcganggtgcgtggcagagaatggagtgctccataatgccgtaaggtcatgtgtaaaggattctgatttcaagacaacaatctagcggtgggngttaagttcaatgaggttgagagcaaagtctaagtcgagggctgaggagaggcggagagcgagagaaccatcagctgctcaagggcatggtgcgagaggggagcttaggggtggcagtagcatatatgcagagttggtggttg

SEQ ID NO: 56084 - DNA, 162 bp, Glycine max
  unsure (1)..(162): unsure at all n locations
cccacctggtttttatcacgacattccttaaaatcattgcaatttaatttgtggcatatcatatatcgaaggcctcaaagaatagacagcacagaaatatcagcaaaacccgtttcttttgacaacacagtctaanaaaagacagcacaccaaagatataat

SEQ ID NO: 56085 - DNA, 218 bp, Glycine max
atcggcttaatgcgtagtttccctcgccggggatcggtcgaggacggggcggcttcgcggcggcgacgctccatcggcgcgcgaggcgggcatttggggatctgtggacgccgacgactttgcggacgtctttggtgggcggggggcaactctccttgcgtggagggggcgcgagtccggggcggggggcaggggggtgtggggggggcgcggagttt

SEQ ID NO: 56086 - DNA, 160 bp, Glycine max
gtcgaagttctctgtttcctttcggtctcaggtcaatgggaaggtgggggggcagggtcccatcatggggtttgtgggtgtggacgagagatcacagtacgggtttgccagtctaatgaaaaaagttggagtttttgattggggggggtacctggttcca

SEQ ID NO: 56087 - DNA, 229 bp, Glycine max
tgggaagaagattttgattcagaagtatcgtctgcatggcggagttgagtgatggactgtgagaagagactgttttattggagcggagtgtagtaatgattgaatgggctcccgtatattcaagagagacatttcctgcaagtgtggggaatttttagttttaaggtggaagatttcgtaaggtaggaggtttggagggagcggcgggcggtttgaaaacgggtgtcac

SEQ ID NO: 56088 - DNA, 161 bp, Glycine max
cccaattcacctgaaccctgcgcactacggcagtgggattattagagatggcagagaaaagggcacggcttgctttaagtggcgggggcatgagcaatgtgagatgacgggtttggatcctgagtagaatacgttgttcaaggggggcgtggtgtgcactg

SEQ ID NO: 56089 - DNA, 135 bp, Glycine max
ctcgagccgaagcggctcgagaaggaacaaagcttctagttcattggcgtgcgcaccgtttcgccctcggccgtttgggcggtcgcatgccgactgttcggtaaccccccaacaaaactcaaagccttttttgtt

SEQ ID NO: 56090 - DNA, 53 bp, Glycine max
acgcgtacgtaaactcggaattcggctcgcgtcttcaaccccttttctttctc

SEQ ID NO: 56091 - DNA, 424 bp, Glycine max
agagaaatgacgtcgcacgcacgcgtacgtaaactcggaattcggctcggttttagtagctctcacagttcaaattttctacatttcacccatagatccagttttgctggatataaaacctgctccttcaaccaaagacaatcaattacagaatatcattaagcttggagaaggacttttgaaggaaccagaagatgttgttgtagataaagaagggactctctatacagctactcgagatggttggattaaaagattgcgcaggaataatggaaaatgggagaattggaagcatatagatagtcatactttgctaggaatcgcaacagcaaaagaaggtggtctcattgtttgtgatacttccaagggtttgctcaaggttacagaagaagatggttttagtgttcttgtttcacacgtaaat

SEQ ID NO: 56092 - DNA, 163 bp, Glycine max
tggtgttgctctcacgactaatggaagtgctcaagagaagcctgggagggctctgtctaggaggaaactgggaattcagggagggggagcagtaccagcccgctgaactctttgaagcaacaatggggcaagtgagagaaggcgcagggtctttcacatctct

SEQ ID NO: 56093 - DNA, 136 bp, Glycine max
tttatattcacgacaacagagtttcgacagagatcataatgaattcgtagtgcatgatcaattgccaccttttaattgtgaggaacttgtaaatcgtagaaacaattttcactcatccatcgaactatgcaaggga

SEQ ID NO: 56094 - DNA, 67 bp, Glycine max
ctttcgggacacccaaataagtgaactttttttgtgcaaaaaaaaaaaataaaaaaaaaaacaaaaa

SEQ ID NO: 56095 - DNA, 354 bp, Glycine max
agtcggacgcacgcgtacgtaaactcgggattcggatcgagatcaaccatgctggatccgcatcttcactcatagacagtggctgtggatctgcccctacagtgcgcactaacactaattggtgcagatcacgtgatgcactgtgacctgagtacataccatctctcacacacaaaagttttcatcatacgaatttgtagcagagatgtacaagactgggcgtcaagagtagtgatgtttacagattaaatgagatgtgctgagtgtacgcttcacatcacgtaaatatgtccatcaatgtgcattggatctgccgacgtctcttcgtgacatgctgtgtgcgtatccacctcc

SEQ ID NO: 56096 - DNA, 179 bp, Glycine max
tagaggactcatttggaatttcggatggtctcaaggaaaacgggtcgagagaacgtgtgaggtcatcggattccagggcaggtggagagaaaatgcgaagggatcgactcaatgacaggtttatggaactgtggtctagcgggggccctggaatgcctctggaagggggcaaggctgtg

SEQ ID NO: 56097 - DNA, 52 bp, Glycine max
aatgaatgtgttcctcaaatgtcgtctttgcagaatggcaagctctggagtg

SEQ ID NO: 56098 - DNA, 431 bp, Glycine max
cccttagttaaatccggaattcggtccaaaaaaaaactgttttaagccgtaaaacttttgatcaaaggttgtaagtaatttttttttaaaagtaaaaacataacggtttagttccttttaacattaaaaacataaaaaatgatgaattcttagaaatgaactaaatttacacaatttttaaaaaattgcgttcaactttatcaatatgaaagtataacaactttgactgcgtttgaccaaaggtacagaaactaaaacaacatttttaatattaaaaaaaaatgattacatttcacataatttgaatagttttatctcattattttccgttgagtcatgctcgagtcacttgacattctttttaataattgaatttcaatactacgaaagtatgctttgtttgtgttttgatatatcaattcatcactact

SEQ ID NO: 56099 - DNA, 311 bp, Glycine max
  unsure (1)..(311): unsure at all n locations
aattcggtccaaggttctaaccattattggttattgcaaaaatgaactttcttgtaagttgtatgacaaatatagacaaatctggcagcattccacggggaaggatgaanggaacagtgatttagaatatcttgtgaatagtttctcagcgcttgaagcgaaggtccttgaacaatatacgtttgcaaaggcaaacttgatcagatctgctggcatgaattatctgctgcattctggcattcagtgtggagcagcacctgcagttaaaggtgttccggatgcagcagtagagttgctgcacacattggtag

SEQ ID NO: 56100 - DNA, 378 bp, Glycine max
tacaccggttagcaactgaggcgggatttgaactgaatttcttgtcccattttggtgggaaggtctttcccaatgagaaaactgaggacctagagtttttgattggtttggcccataagaaattattgaaagctttctgtgaagaaagcatcacttcaaagaagcaaaattttcagcaaaagatagcttggccacattgggactttttacatatcttggaagaaggactagaatatttttgtcagcaatgggcattaaggatcttgacggagtaattatgaacttcctcaggttgatctctttgcttgtttgttacattttaaccattccaattttcaagataccgatcctgaagattcaatgctttgattttagtta

SEQ ID NO: 56101 - DNA, 271 bp, Glycine max
cggctcgagcttaaaaatccgttttttatttcccgtgcatggctttttctgaaattaattcttacccagatgaataagtgctttggaatttgtttctaagaaccccttgttttgtgggtaacttcctactttgtggtggaattggggtaatcgatctggggaagtgaagatgtcgactccggcgtaggagggacggaggagggattttaaaagattgcaacaagatcctccggctggcatcagtggggctccccaagagaagaagattatg

SEQ ID NO: 56102 - DNA, 157 bp, Glycine max
tgtctaacatctctccgtatccagtctattatcaaacatactcacaaatgaccattattatctctatttcagttcttacatggcaccagagtgtacttttatttatttatttttagatcaagagaagtcaacttccagtgaggagggggggggcgag

SEQ ID NO: 56103 - DNA, 388 bp, Glycine max
ctatactggaataaggaaacatatctttaggaaagctgtctatgttgcatagaatactcccaatttttaatcttaggtaaaaattgatctttaaaggaggcattctatcggaagaaagcttaggtctattattgtgcagattgataccaagcgaatgtaaacttcttttgattttttgtttttgcaatctttgaaatttattctctgccaatgtgttagggtctgggacacgctgttctggcttcaattctctggtttcatgccaaatctgtagatttgaaaagcaaagcttcgataacatccttctatatgtttatttggaagctattttatgcagaatacttactcattccttttgttagatgaggatgcagcggcaatattgact

SEQ ID NO: 56104 - DNA, 127 bp, Glycine max
atccggtccaaaaggccaatttaaaatggaggataaccaaggacaatttctgcacctgtgttgcaaaaaagacatgatgacaaaggttgatgtagcaaggggacctaatatgtttcactagtacttc

SEQ ID NO: 56105 - DNA, 313 bp, Glycine max
  unsure (1)..(313): unsure at all n locations
atttaaccgaacaatccgatatttgcttcctaatggaatcaagtattaacccttttccctccgaatactccccaaacacanggaatgggctccaatcgtcgtttcaaatttaattttaaggttcttcgttacgcgttgtgtggcgttgtgcgtgagaaagtgcgcgtggtgaaaaggcatggcttcgcagctcctgagaggagccttcggaagtcgtttccttgcaaaccctagggccttctcctccggtgcttccagtcggatccgcgccactctcttccccggcgacggcatcggccccgagatcnccgat

SEQ ID NO: 56106 - DNA, 131 bp, Glycine max
tttaaatggaaaagctccatacttccgtcctcgcccttgtaatccttcgtgccatactatctcaagaatgattactcacaagtatgaacactaatcacggatcacataaatgttgaaatttcctagttaca

SEQ ID NO: 56107 - DNA, 409 bp, Glycine max
acgtctactctaaatgatgactctcggggcaattccaattccacattttcaagaaataaggaggcaaaaatgttcatatatgaattggaattatttgttttcttagtaggcctatcctgatgccaaaggaaatgagatcggaattcctcggggaattccaattccacattttcaagaaataaggaggcaaaaatgttcatatatgaattggaattatttgttttcttattaggcctatcctgaagccaaaggaaatgagatcggaattcctcggggaattccaattccacattttcaagaaataaggaggcacaaatgttcatatatgaattggaattatttgttttcttattaggcctatcctgaagccaaaggaaatgagatcggaattcctcgggggtaccgagct

SEQ ID NO: 56108 - DNA, 398 bp, Glycine max
atgcgtccacgtctactctagatgatcccctcggggaattccaattccacattttcaagaaataaggaggcaaaaatgttcatatatgaattggaattatttgttttcttattaggcctatcctgaatccaaaggaaatgagatcggaattcctcggggaattccaattccacattttcaagaaataaggaggcaaaaatgttcatatatgaattggaattatttgttttcttagtaggcctatcctgaagccaaaggaaatgagatcggaattcctcggggaattccaattccacattttcacgaaataaggaggcaaaaatgttcatatatgaattggaattatttgttttcttagtaagcctatcctgaagccaaaagaaatgagatctgaattc

SEQ ID NO: 56109 - DNA, 110 bp, Glycine max
tgcagatgtttttttcgtttctactgccaactcatatgggagactcttatatgaggctgttgcacttgtattttattttatataaataaatataaatataattatattat

SEQ ID NO: 56110 - DNA, 371 bp, Glycine max
ccactcttaatttctctctgccttgcccatttacacacctctccaacctttcactttcagctttatttgaatccctctctctcctttccaaatggccaacgttgaggttgcacatcaaacaccaacaacagttccagaaaatgaaacaaccgaggtaatcaagacccatgaaacaaccccgggaccagtaacaaccactgaaggtcctgcaacagaacaagcagcaactgaaggtcctgctcaagaagaacaacaagcaactgaagttcctgccccagaatcaatcaccgaagcaccaaaggaagaaaccaccgaagcaccaacaacagaaacagtagaaacaacaactacagaagaagccaagccagagg

SEQ ID NO: 56111 - DNA, 115 bp, Glycine max
gcagatacacgagttagacaaccggtggatattagacatttaatgctttcagaacttcattttgtaattattgttatattgtggaatatatcacttcatagattttttttcaaaa

SEQ ID NO: 56112 - DNA, 363 bp, Glycine max
gcagcagtatgtcacatactcacagattcaccatccttctcagtccatggctcccaattctgctgcccctggccaattatgcctttggctatgccggttctgctcatgctcgtgtatagtactctcaacctatggcacccacaatgccttcacagtaccacactatgatgaatgcacgaagggtcagcgcagcatccctcagacaccgttgagcagcaccaggtacgaacctcacaaccattataagccagtccttaagggtcgcagagccaattttgctaaaaatgggtttgtttccctttaagtttttatatgcaattcttgtggtcatgtttgataaaactgtttgtgggaagtatttgg

SEQ ID NO: 56113 - DNA, 371 bp, Glycine max
actcataacacaaagcacaaagcaaagctcatccttgagttaaaaaatggcagcagcttcttccatggctctctcatccccatccttggctggcaaggccgtgaagctgggcccatcagccccagaagtgggaagggtgagcatgaggaagaccgtcaccaagcaggtctcctcaggaagcccatggtacggcccagaccgagtcaagtacttgggcccattctctggcgagcccccgtcctacctaaccggtgagttcccaggcgactacggctgggacactgctgggctttccgcagacccagaaaccttcgccaagaaccgtgaactcgaagtgatccactccaggtgggccatgctcggagccttgg

SEQ ID NO: 56114 - DNA, 191 bp, Glycine max
agaagacagtaacgtcggacgcacgcgtacgtaaactcggaattcggctcgtgatgacactgatgatgatactgttatctcatagtcatacaggtgatagttttgaactatgttatagtaaatggaggtggcatactgccatgatgaatgctaattttttagtcattaaattctctttatttttctttgat

SEQ ID NO: 56115 - DNA, 283 bp, Glycine max
agaacacaagaaattatatcacaatcagatccatataactatgacattgctgctgtacactctaccatcgctcatacctaactatgaatagtccacacctcaaactggaacagtccctggtcaagattaccactaagtgcgtcccccagaatcttcaccatctacggatgaaggatacaactttacatacaaagctcctaatacttcaagtcacatacacagatggatttaagcctaacattgacatcgattttagatgagggtttctcatgggaagataact

SEQ ID NO: 56116 - DNA, 358 bp, Glycine max
tcggggaattccaattccacattttcaagaaataaggaggcaaaaatgttcatatatgaattggaattatttgttttcttattaggcctatcctgaagccaaaggaaatgagatcggaattcctcggggaattccaattccacattttcaagaaataaggaggcaaaaatgttcatatatgaattggaattatttgttttcttattaggcctatcctgaagccaaaggaaatgagatcggaattcctcggggaattccaattccacattttcaagaaataaagaggcaaaaatgttcatatatgaattgggattatttgttttcttattatgcctatcctgaagccaaaggaaatgag

SEQ ID NO: 56117 - DNA, 233 bp, Glycine max
acgcgtacataaactcggaattcggcgctaggtttgattgggattcgcactttgaggaggggaaatcgcaagggaatctagattccagaatggacgctcaaccacagcttagcggtgatgattctcagtgagtgggtgagacatgtgcgacactaaggtggaggtgattcactcgtggtctgatccatcatccctcactccgagtctcatgtattcattttcttattcggatg

SEQ ID NO: 56118 - DNA, 240 bp, Glycine max
ggaaggggagtagtagtaagaaaatagtaaaaaaatattatattgagaagtttggattcatatattgaggtgcacaaatatacagcaaaccaaagtatatagttttcttttttctttcttttttggaaaattaatggttgaacaggcaaggagaatttttgtcgttactttctgtcggcatgtatgtaatgtaatagaccatgaattctaagaactataatccgagtgcattgatttatt

SEQ ID NO: 56119 - DNA, 180 bp, Glycine max
attgtctgtgtgatggattcccgccttcatatcgttacatggccatttctagaacactcggctatgcagattctgatttgtcggaatcatttacgcagaaatggtgaaagctcaaggaaattggtcagtcgtgggtgataaagtatgcctacaatccaactgcatgagattggatcacaa

SEQ ID NO: 56120 - DNA, 61 bp, Glycine max
tgctgcgcttgcaggggttgtaaaactaatcaatataattaaataaattacattctgtctc

SEQ ID NO: 56121 - DNA, 158 bp, Glycine max
cgagtagttaaagaatacaacatcagaaatccttttgattgcagaataatttactttgactagagaagggtaaacttcgtgtataaattgcatgaaaatggttgtacatggagcttgggcgcatgcaattcaaagaggcataaaaaatggattatcaa

SEQ ID NO: 56122 - DNA, 365 bp, Glycine max
aaaacactcataacacaaagcacaaagcaaagctcatccttgagttaaaaaatggcagcagcttcttccatggctctctcatccccatccttggctggcaaggccgtgaagctgggcccatcagccccagaagtgggaagggtgagcatgaggaagaccgtcaccaagcaggtctcctcaggaagcccatggtacggcccagaccgagtcaagtacttgggcccattctctggcgagcccccgtcctacctaaccggtgagttcccaggcgactacggctgggacactgctgggctttccgcagacccagaaaccttcgccaagaaccgtgaactcgaagtgatccactccaggtgggccatgct

SEQ ID NO: 56123 - DNA, 283 bp, Glycine max
attctctctatgtatttccctaagtctcccttcactattcatttcttcctcaagattctcaccggtacataccactcaaccttgatgtggtcatctctgacagcatcctcaacgtaaaagccaatagtcatgtcaaagaatgaatcaccccggacgatcattgtctcattttcgccttaacgcaacttgttagacggtcgttcttcttgctagttacaagattcataatgtgagtactcttcagctcgtcctccgtctccgtggagtgattcacatcttcgtt

SEQ ID NO: 56124 - DNA, 148 bp, Glycine max
ctcagctgtcagaatccattcaggagtcatgaaagaaaccgctaactgaacaaccaaggtaagaaaaaaaggtgttaatttgagcaatcgtcctcgtgccagtttcagatctcgctgagaaatcattgtataataatgggggtgtcaa

SEQ ID NO: 56125 - DNA, 147 bp, Glycine max
ctgctcccttttgcagttcccttgtgtttaactccattttcactaatgtaactacacctgtgtagcataaaaatctgtatgagaaccattatatttttatatattagaaatttgggtccccagaaaaaaaaaagaaaaatataaatg

SEQ ID NO: 56126 - DNA, 125 bp, Glycine max
tctagccgctcttcctcagtcacagtcgtccaaacaacacacaaccttggaaccacagaacctcatgcaagcctacaattgagcagtcctcctcatgggaattacaaatgtcacccacttatggt

SEQ ID NO: 56127 - DNA, 307 bp, Glycine max
ttccaaccccacattgtacctacctcagcaatgtcacctccaccattttccccccctctctctatttcccttctctttgtcttcctgttagcaccattactcttagctcaatctccaccttcaccgtctccttcttcttcttcttcgtcttctgtagcctgcacttgtacactatagccatcaactctgccgttccattctctcagtcattcgttcatcaccttcagacccttatggctatggcaggttctccatatctcaaagcctcagtcaggcacgagtgttaaccaaagtctttgaggacttt

SEQ ID NO: 56128 - DNA, 338 bp, Glycine max
aattagttcattctctttgcgcagttccctacctctcctttcaagatgcagatcttcgtcaagaccctcaccggaaagaccatcacccttgaggtggaaagctctgacaccatcgacaacgtcaaggccaggatccaggacaaggaaggaattcccccggatcagcaacgtctcatcttcgccggaaagcagctcgaagacggccgtaccctcgccgactacaacatccagaaggagtcaacccttcaccttgtccttcgtctccgtggtggcatgcagatcttcgtcaagactctcactggaaaaaccataaccctagaagtcgaaagctctgacac

SEQ ID NO: 56129 - DNA, 318 bp, Glycine max
ataaaactactcctgtgtagatgttctacttcctcatcaacgttaatttttctctcattctctggattcgtttgaagaattatattttatttttttaaaaagactgaattggtacgaagatattttgctacaactaccttttagtgtgctatagcttagtaaatataccttataaaacccattattccatcaactggcattttcaaaagctgataaaaattttggttaacctagtttgaaaaaaagggtgataaattaaaattggttaaaacaagtttagaaaactataaggtttacaaacctaaatttaaaaatttg

SEQ ID NO: 56130 - DNA, 127 bp, Glycine max
ttcggctcgagcgaagcttcaacgtctcttcactctcatccgtttttcactagttgtagcctctttgggtcaacaggccttcagatccagagccctcggggtttcggtgcgtacagaggcttccaca

SEQ ID NO: 56131 - DNA, 381 bp, Glycine max
ggaggttttgatgatgacatggactccttagttcatgatgatgagaataatcatgcagcgcctgtaagcaagaatgatggtcaagctggttctggaaatttaaaaaaccaaagcagctctcaccgtaaacggaaacataatttgaaggatattatgcatgaaacaaagaaggaaagaagcttgtcagaactaatgggtgggactccagactctcctgatggtgattattggtctgaggagaaggtaattgataatctggtttcacctggccgttccaagaaaaggaggactgttgatcactatgctgatgactttgggaagccagatggaagaaaaacaatttctgttgcaaaagtttctaattacacaaagccgtcattt

SEQ ID NO: 56132 - DNA, 323 bp, Glycine max
ctcgcgctgcatataacatgtccaagatcgatcaaataatgttacgctttcgccttatcgcccccaaacccctcccctccgccgccgccctttccgacgctttctcctcggaaaacaccggggtctccatgcggaaggataacactggcaacaagcggtgcagtcgagggatgcgcaggaggagaaactctgctcatccacgtcctcctccgcttcaggcggtgacactcccgctgctaccgaagactccacatctgatgaaaaccaccttcgtcctaatgacccgtcaagtaccggtgtgcctgagcttacgattaagcttc

SEQ ID NO: 56133 - DNA, 360 bp, Glycine max
atttcagtgagtgatcggtgttcacttgatctcatcataatcgtcagcgtcaattgaagaagatgccgatcagaaacatcgccgtcggaaggcctgaagaggcgactcaccccgacacgttgaaggcggctttggctgagttcatctcaaccttcatcttcgtgttcgccggctcaggctccggcatcgcctacaacaagctcaccgacaacggcgctgccacccctgccggcctcatctccgcctccatcgcccatgcattcgccctcttcgtcgccgtctccgtcggcgccaacatctccggcggccacgtcaaccccgccgtcaccttcggcgccttcgtcggcggcaacatcacct

SEQ ID NO: 56134 - DNA, 179 bp, Glycine max
tttaatcttacatgtttcaagagacaatgtaagattaaattactcctcgttgtatatgtcgcacatgagcaatgaataaggcctcaaaatcaataagtcctatatattgctccaaaattcgatatgaactacaaagtactaatccttaaacctgagattttagtcttgcatagagtaaa

SEQ ID NO: 56135 - DNA, 396 bp, Glycine max
gggggttccaagtttcagtgttcaattttaaatgcctgacagaaagatcactggtctagatacactaacaaacaataaatagtggaacataattttgtaaattgaaatccgtaacacagggctgtttcaactgccaaaagggaagctttatatgtacagataaaagtgcagccttattgagtttgatattttttcctaacaagtaaacaccttactctatttctctaaatttatttttacattaccaattaaattcattacttttagattcataaaaaaaattgtcatactttaaaaatttaaatgttgtttttgtacctgcattgcgggtgcctcttctagtctagttaaaaggaaaaagattgatctatttttcaaagtgatgcacaaaattta

SEQ ID NO: 56136 - DNA, 217 bp, Glycine max
ctcgagccgttcgttttcttttccctcctactcgttagcagttttcgtttcccaaacacgttccttcgccatgtccgatcttggctccgatcttcccgctgccgccgccgctctcagtgctgaggatcgtgctggtctcgtgaatgcactcaaggacaagctccagctcttggctgggcaacatgtggacatcctggagacactgccaaccaaagtc

SEQ ID NO: 56137 - DNA, 134 bp, Glycine max
gtttctcctgttttgttctcaatgtttgttgtctatgtgcaaaaattagtccaaataaaacataattttttaattgtctcttgttttgatcatcttgcttgggtgaaatgttctatgcaatggtggtttttccc

SEQ ID NO: 56138 - DNA, 244 bp, Glycine max
ggttgatataactatactgtctgtaattggcacgagctcatttcctaatcctgcatcacactgcatgactgcatccccttcccatatagtgtaacgaagtctaagttaattcctgttaagtctggatagtgaatagctagctattggcgttgctgcaccctattgtgcttattgatgccaatagtgttagtgttcgaggcattagttggtgacactttaacaaagctaaatgacgttgtaccgt

SEQ ID NO: 56139 - DNA, 402 bp, Glycine max
gatcaggcactcaaacaccgcgacatcggagagtagttaaacaagaaaaaacgagaacaagatggtgttctgaggaaactgaccgttaggcttgcgactcgaaacaagcgactctgctgaaactggaaccgttccaggatgcgatgctgccgcggcattacgagtgaggaagatagggttctctgaaactgatcacgtttcaccacccaccgttgatttcatgcttaacctccctcccgaggaaacttctgccgctgctacaactgatcgatcagatccacctcagaatccagctacttcgacggttgacaatactcttcctcttctcgattgctcaaagcctcatgccatcgcacttgtcatctgatagacatctgtaacgtccttccggatgaacatgtt

SEQ ID NO: 56140 - DNA, 65 bp, Glycine max
gttgcatgctacccctgaaagggtcacaactgttcatggttctagtactagtactttcagtcatg

SEQ ID NO: 56141 - DNA, 268 bp, Glycine max
attctctctgtgtatttccctacctctcccttcaagatgcagatcttcgtcaagaccctcaccggcaagaccatcacccttgaagtggaaagctctgacaccatcgacaacgtcaaggccaagatccaggacaaggaaggaatccccccggaccagcaacgtctcattttcgccggaaagcaacttgaggacggccgtacccttgctgactacaacattcagaaggagagtactcttcaactcgtcctccgtctccgtggtggcatgc

SEQ ID NO: 56142 - DNA, 366 bp, Glycine max
ggcactaatgctttgcaaggatgttcaaaagacaactacaaagatcaagactgggatgatattgcttttaacaaaccttctcttgtgaagctagagcctgtgtctggcataaaggctgatacatcattgcaaggaaaatgtactttggctgagtctcccagagttgatattgacattgacatggctaacatttcagctagtgctatggatgaagatataaccttacacgccaacattatacaacccatggtgaacattaggaaggagtcaccattaacactttcaaattcagctccagggagcatctgcttttctggtggattgcttggtcctgatggaactcatcgatacttgggtaaatggtgc

SEQ ID NO: 56143 - DNA, 145 bp, Glycine max
tttcaacccttgtattttatgacacctaaactagtttttgtattatgagtagttttgtaatttcacatgcattaagtgaatatttgatgtgtgtgttgtgaaataaatttaattgaattgggagaagcccaatccaattaaattt

SEQ ID NO: 56144 - DNA, 112 bp, Glycine max
cttagccgctaaaggcagaaaatatcaaagagaaacactattctcccttgaaaaatgtcagacattctcaacaaaaatgaagccccagaaaaccagaaatttgaagtcacat

SEQ ID NO: 56145 - DNA, 375 bp, Glycine max
ccacaagttgctttcacagtagttccagggtttaagaatggtaaaactggtttacaatgccaagtgtacctcacaacacagcacaaacaacaaagcaagggtaaattttttttcacttcaacaaagcaaaagtgactcatgactgaccccacacaactcaagtgattgaactgggaaggaattccttaattttcctaatggaaaaaaaaccttttggaaggaaattgaaggcctgttggttttgggaacggaccccgggcttggttaacccaccggggaacctttgcccatttgaattttggccattttgaaaagaaaaaccattggaccgcgttgcattggaaacaagccttttttttaaaaaccttttttttt

SEQ ID NO: 56146 - DNA, 238 bp, Glycine max
caatgtcaatgataccatcaggaggagacactacattcggtggtcttgattggtcaccacacgatggctatcaccctaggcataggaaggatagcattgactatactcagttaacatagcaagtcacaggtcatccagatgttgtcatcgatggaacaatgagatcatttggcagagatgtgaccgaggcacactcctctaaaattgagatagctgactttcgtggacccatcaaagg

SEQ ID NO: 56147 - DNA, 362 bp, Glycine max
cagacttaacaacagcacaaagcgggttactgtctgttcaagctaccatctctctctctctttcttagtgcctccttgccagaagttaaaatggcccaagaaactttcctattcacatctgaatcagtgaacgaggggcaccctgacaagctctgtgaccagatctccgatgctgtgctcgatgcatgcttggagcaggaccctgacagcaaggttgcctgtgaaacctgcaccaagaccaacatggtgatggttttcggagagatcacaaccaaggccaacgtggactatgagaagattgtgcgtgacacatgcaggaacattggttttgtctctgatgatgttggtcttgatgctgacaa

SEQ ID NO: 56148 - DNA, 409 bp, Glycine max
gacgtaggcgtacgtaagctcagaattcggatccagagaatatgtaaaaatttggatgggtaagactaacttttaaatctacaagtgaattattaagctggtgtcttaagacacatgcaatatgattctatcggtgggtgaaattgcaggatatgggcagacaggtatagggttgagccaaaagccaggaattgtcgatctgtatggagtcttagcttgtgagaaagccaatttgccacagccgctgctaaaatcccaaaggtattgatttcattccttacctcttatctcctagaatttaagtttctttcggtgtagatattctttgctcttaattttctcggctaaatttaagcgaaaataatttcttttttgctgaaaaaggtaaccacaaccacttttaggatat

SEQ ID NO: 56149 - DNA, 409 bp, Glycine max
gccatctcctccgtcatgaggcgtttcagaggaactttaggatgcgccgtggatggatttggggaggatcgatgattgaaagtacggtttgggtgcgaaggtgctcgagtgccgcggcggcggtcaagcatcttatcttcctggtgcctcgcaagttctgtagcttgcacgagggaaagaggacggagagcttggacctcacggaggagctccggactcaaccctgatataaagcagctcagcaaacacgaaggggaaagacctaatgttcggttcgcgatatgctcaaaatctgtgacgtaatcactcacagtgccggtctgctggagcttacacaatgctccttgcggatcttcgtaaaatgaacgcgcgaatcatgattcgaatgcctgcaacatccacagacacg

SEQ ID NO: 56150 - DNA, 354 bp, Glycine max
ctcgagccgaatcggctcgagtgttgaacaagggtttctctgtctgcttcttcactttctctcgtttcaatcgaaaccaaaacaaaaacatgggcagaaaattcttcgtcggtggcaactggaaatgcaatgggaccactgaggaggtaaagaagattgttactactttgaatgaggctaaagtccctggagaagatgtcgtagaagttgttgtgagccctccttttgtgttccttcctgttgtaaaaagtttgctgcgccctgatttccatgtttcggcacaaaactgttgggttcgcaaaggtggtgcttataccggtgaggttagtgctgaaatgcttgttaatttgggaa

SEQ ID NO: 56151 - DNA, 352 bp, Glycine max
gccacatcaatattatgacagtgatgatgaatatgctcctgacagggtgccactcttgaagaatgctccacctcattatgttgttgatccaggatatgcacatggaaatgatacatggaggagacaaggtataaaagattggcattctttaattgatcatagttttcttattctagctatcttggatttcctttatcatttattttcactagtctgtttcaaatacctattatcatgcatcagccttattcttaaatggtttgaagaggcaagtagaccgtacttcgatttatactacaatttatgaatttgaaaatggttatgtattagataaatctatatcatttttttt

SEQ ID NO: 56152 - DNA, 402 bp, Glycine max
ataggctactaaattgctgatgttgattttgtttgtttaatgcagtttcaacgacgaaaccggatttacaaggaggagcagcgcaaactaagggctgctaccaggaaaggccacgaggatggggttaatgaacatcatcattagaacctggagttaattttcaatctaagcttctgaacaattattttgataaaatgtttgtgatttgcttggatcggtattcctgcatgttctgtgagcccatattttatacttttgatgttgcgggcttcttttccctgtgcaataaattcagaagtcaacttaggactgcaaatttcactataagtttgctgagtgaatttggaaaatgtctttgagatgtaaacatgggttaaaaggattgaaattccctaaatgaaa

SEQ ID NO: 56153 - DNA, 378 bp, Glycine max
aatttttaattttgtttatataattcacagcattttaattccaataataataataataataagtaaggtttaatcattcgagttggtcagattttacttatgttttgattaaattgaattttaaattagtcaaaatctttttttaagaggattaagaaaaaaaaattctaaaaatgtgtcccttaaacatcaagccatcttgattttgcctacttttaatacatttgtcttcttgctcacataaactttttttttatgcgttttttctcataaactcaagaaattaaactggcataagaagatatagatgctaataaaacaaactagagatccccgaacgtactccagctattcaagattcatgtgtgtcaggtttat

SEQ ID NO: 56154 - DNA, 379 bp, Glycine max
gtttgctctgttgttttctcagcagttaccctagaagacactattagtattggaagtcttgcaggcatgtttctcatgttcactgggctctacttggttctttgggccaaaggaaaagaaggacacgcaggtggagatggcttagagtaatcttgaaacagctgttccctttgacgtattggtgacacagaattcccaagagcacattgtagaaagacagaggtctcttgggtttgaagcaatgactcatgagtcatgacaccgttgttgtttttctttcttctttataaaatctctaggtcatatatatataggtgcgacattttaagatgcaagtgaagcaaaatttaacccctggctaggtacaagcaaaaaaata

SEQ ID NO: 56155 - DNA, 203 bp, Glycine max
agctcagtagttatctcaggagtaagccaatatacagatattagtagtagcagacttgcaggtatgtttctcacgttcactaggctctgtttgaatctttgggtgtctggatcagaaagacacgcatgtctctatggctcacaataatcatgaaagagcagttcccattgacgtattcgtgatacattattcacatgagcata

SEQ ID NO: 56156 - DNA, 402 bp, Glycine max
ctagaagcaataagatgaaaatgaaagtgcttgttttgtttgttgctacagttttggtagcatatgaatgccatggctcagactaccagaagttccctctccaaatgaaaactgggtttggtgggcaatacagcaatgaggtggcatgtgccagttggaggcttggcgtggaagcaaacaacgtagtcaagtggcaaactgttcctgcagcttgcggagagtacatagctgactacgttctaggagaccaatatagatcagattccaaaacagttaaccaacaagcttatttctatgctaaatccctcaaactcaccaacaaagatgtctttgtcttggacgttgacgacactactctctctaatctccagtattttgctaaccatgggatttggtgtggaa

SEQ ID NO: 56157 - DNA, 398 bp, Glycine max
atcagattgatgaaaaggtgaagctggtggacagaaggatggggtcattgatcaacttggagcaggcaattcgcgttctcgaaattgggttgctttgcactctaaatgagaacaaaggaaggccctcaatggaacaagtggtggagtttcttctcaacatggataagcctattcctgagctgccaagaactcgccctgttgccttgttcccctataatagcgccaacacaggactttgtaatgcatattcttgcactttttaagtggagccatgcatgacgttgctgaatgattatgtgggaggtgtatgaataaatgtgaaaaaagactattcttaggcctgcaacaacggattgattttccaaatgctgcaagtgcttaaagtgctgtgtatctgt

SEQ ID NO: 56158 - DNA, 373 bp, Glycine max
  unsure (1)..(373): unsure at all n locations
aagaaacttaatcgatcatcacttcacttcactaatacatcatggcagacgagacccagaacaagtatgagagctctgaggttgaggtccaggatcgtggtgtttttgactttctcggtaagaaaaaggatgaagaagacaagcctcatcctcaggaggaggtcatcgccaccgagtttcaaaaagtcactgtctcagaccaaggagagaacaagcacagcctcttagaaaagcttcaccgatctgacagcagctctagctcttcaagtgaggaggaaggagaagatggagagaaaaggaagaagaagaagaaggaaaagaaagggctgaaagagaagatcgaggagaaaatanagggtgatcatcatcatca

SEQ ID NO: 56159 - DNA, 398 bp, Glycine max
aacagcctgtcaaactatgaagagggtgatattgatatggatcagcgactagacaaagcatgtaatttcatcacaagggctgaatgttcagattatgttccaaattgcaactcccaaaaccctaaattccaagaaggataattttgggttaatcaccagataattgggaaggtgattgcttgaatttccggtcaagccggcaacctgggccaagttgttgccggtgccgttccgaaatatcgggtattggaatcaaggtataaatttacaattaagacgctgacacaatgtgagggcagtaaaagagattggggtttgtggtatggatttgcaatggatggtcgtatgtgtacaatagatgaacaacattatgtgggaaacatgggctcaaatcatct

SEQ ID NO: 56160 - DNA, 159 bp, Glycine max
agagagagaggaagagagagcactacattttgtgagccaaggaattagatatataatataaactggcctgagtgctacgctacattgttttgtttgtagcatggcactataactcaaaaaaaaaaaagtacataaaagaaaacaaattaaatcaccatc

SEQ ID NO: 56161 - DNA, 63 bp, Glycine max
ttttttttttttttttttttttttttttttttttttttttttttttttttttttttttttttt

SEQ ID NO: 56162 - DNA, 399 bp, Glycine max
gtgaaagtgagaaaaaataaaaatcaaagagcataatgtcagggatcattcacaagattggggagacccttcatgtgggagggcacaagaaggaggaggagcataagggtgagcaccatgctggagaatacaaaggggagcaccatggtgaacacagtagtgagtacaaaggagagcatcatggtgaacacaaagctggagagtaccatggtgagcacaagccagagcacaaagaggggttcctagacaaagtcaaggacaagatccatggtgagggcggcgccgccgagggcgagaagaagaagaaggagaagaagaagaaggagcatggccatgagcatggccatgacagcagcagcagcagtgacagtgatttaactgctgcatcacctatatatt

SEQ ID NO: 56163 - DNA, 341 bp, Glycine max
gcagtgcaaacctggcattgaaacatttaaggcatcatcatctgtcatcgagagtcaatctggagtgtcttctgatgccatcaaagattctccagccaaaactgaatcagaaaccatcaaggtggaccactgcaagtcaggagctgatctggctaatggcagtaccacagttgaggaaagctcattggaagtggctgagaagcaggatgctcctgaaattcaagcttccgacaatcctgagcaacatgctagtgaagatagtggtaatgcctcaaagcgtccaaggacagaggagtaagccatatgatctactgaatcagcattgaactgacaagacgata

SEQ ID NO: 56164 - DNA, 360 bp, Glycine max
attaaggaatccacacgtgaacagtgtgtggatgatcatttggtgctgagaaagaatggatatatagcagatgaacactagagtccattcgatttttgaggaataaataattagttattgataacaggttctgttagacggttacaagaagttattattccgttaacagttaatcagttatgtcgaaataggtaattcttccgacagtggagtctcaccggcgacagccactgctgctgcaacatagcgagagctaccggcatgcggggacacggctcatggtggaggcggtgggcggcatctccaccgtgtgctgctgcatctcgttcggtctggacaacattatttacctggcgattt

SEQ ID NO: 56165 - DNA, 359 bp, Glycine max
ctcgagccgaatcggctcgaggccggaactctgttccgctctctgaacgtggaaaggtgagagtcgttcgctcgctcgctcttgcttgcatcatcggcgcatggattcactcattgcgtagtgattcggtttcggaattagggttccgatttcggatttaggtcggttttttgttccgaaggtcgtgctctccaagccttaagggttttagtgacgagcttcgttcagtttgctgctcgatccgttgctttatccctttcgattcggttttgccgttgcttttcggagattaacttgtttttgatatgatgctgatggttttgtgcattgcacggtgttgaaattcgattttggcgaaa

SEQ ID NO: 56166 - DNA, 65 bp, Glycine max
aagcattgatggatacatctgcatgtgttctgcaaactaattaaaaatgctcgtacaattggttt

SEQ ID NO: 56167 - DNA, 285 bp, Glycine max
gtaagtttgtgctgctagagagaggggttccgttctgggatactgtgtacataacaattctgactgtttcaacatgtaatgtgtccgagcttgcaaatgttggcaatcacccttattgagtgtacctagccacatctccacatgatctagacttaacacctattcttatcttctcatcctttctactctgaatccaaaacatgcactgcagcagcagtcacaactcacagacataccagtaggatgcatagactcatcacgcatctaagagaacctcatcctcag

SEQ ID NO: 56168 - DNA, 379 bp, Glycine max
caatatattccattctctctgtgtatttccctacctctcccttcaagatgcagatcttcgtcaagaccctcaccggcaagaccatcacccttgaggtggaaagctctgacaccatcgacaacgtcaaggccaagatccaggacaaggaaggaatccccccggaccagcaacgtctcattttcgccggaaagcaacttgaggacggccgtacccttgctgactacaacattcagaaggagagtactcttcacctcgtcctccgtctccgtggtggcatgcagatcttcgttaagacactcaccggcaagaccataaccctagaggttgaaagctccgacaacaaccaataacttcaaggccaagatccaggacaaggagg

SEQ ID NO: 56169 - DNA, 69 bp, Glycine max
caacgaccaaaaaaaatgaggggggaaacaaaaataaaggttatgtaattaatggttataaatgctaaa

SEQ ID NO: 56170 - DNA, 272 bp, Glycine max
cttgaagatcgagattttgcatcaaggaagggtgatcccatgccattccctcctggggttggtggaggacgcatagttggagatgccaaccttgatacttttgaggtgattacggccgaaaaaccaattgacgaaaacaatgttggtaatcggatccctcacaatatgcgctgacaagagagatgggtactgttgtgcccccccacatcatcagattttacacattacacatttttgtgatacaacttgttttgtggagcatcataaaatat

SEQ ID NO: 56171 - DNA, 373 bp, Glycine max
taataacatagacaagaacacaattaatggctggaatgcttcctggagttgaatgtgctagaaggagaaggtttcgtcgatgttcggattcaaattcaacttctttgggatcacatgcatccacaaggcgttcttctttctgtttgtatgctagtaaccatgatcaatgtcgccttttctcatcctcttccctggtttttacccaatacccctaaattgaatgcctttttgatttctatacatgtttttcatctccactgttgatgggtgtgtgctaattttcttcctggatttgaatggaaatagcaaagaagcatgttataccaggcacaccctgatgagaatatgggaggagtggccagagaagccaaac

SEQ ID NO: 56172 - DNA, 365 bp, Glycine max
ctcgagccgattcggctcgagctagaaaggagtgcatctgctcaacaacctggatttggtgaacaagtgatgcatcaactttaccatgtaaaaaatgctactcagttgcgcatggatgatattccaaaacttttggcagagtacaaacagctacctatatgaatgcttgtttgatgaaaatgatccccccctcgcccctcccccaaaaaaaaacccataagaattccatggtgagttgtctcaaaaacatggttccccaacaatacatgattcacagtgcatcgaccttgtttaatatcctgaaatgtagcttttctattttcaacattttttatgccatgtttgaacctacgatttcatgattt

SEQ ID NO: 56173 - DNA, 279 bp, Glycine max
tgacgtcgcacgcacgcgtaaataagctcggaattcagctccagcatcagcccatccacctctactcgcgttttcgcataaacattgctggcctgtgtcatcacacgggataacgtctgatatcatgtgacgggagactcttatacaacatgccagtatcacaggcatcacattcagcacgctggaatctacactctgcaggactctattcttccagactccaatcggttcactcccattctattcttctcaacgtacactcatcatcgacatcccgct

SEQ ID NO: 56174 - DNA, 367 bp, Glycine max
tgcaattcttggaagaggtgaggcttggtatagcaaaaagctttagaaggctaaagagaagatcactaaactgaaggagagggtacaagaactggagacattaactgaagcaaaagagaacgaatatctgaggtctgtgaaactttctaaaataacaaagacttcaaagaatctcgaagaaagcatcaaatctgattctgatacattgacagcttgcaaactttcatcaaaagaacaaagcaaccgaattttgacacccaaatctggaattgacctgactgcaaacgacaacagtaaatattttcaatctttgaagatatagaactccaatgttactaaaaataaggctgtgaatgtcagtaatgga

SEQ ID NO: 56175 - DNA, 370 bp, Glycine max
gtaagtttgtgctgcgagagagaggggttccgttctgggatatggtgtagactaaaattctgaatgtgtagacttgtaaggtgtgccagcttgcagaacttggcatctgcctttttgagtgtacctagtcgcatcttcacctgatctgctcttagcaccttgtgttatcgtctcctcgtatctaggcttaggcctaggcatgcaccccagcctcagtcaccatcctgacacttaccaatagtcagcatggagtcgtcaaagatctacgcttacctcttcctctgcaagatcattctctcttccgccactcgcatccacggttgtggctgctgtggcaaaacccccttaaagcagaagcctggtaaaacac

SEQ ID NO: 56176 - DNA, 147 bp, Glycine max
gcatgggcgatgccacgtttataggggttataaaagcaaaaactgctctcaatagctccttccagtgaacagatcatcaatgagggggagtgcgatcgctaactcatatgtctaggacgctgacagccacagagaaactgcctgtta

SEQ ID NO: 56177 - DNA, 388 bp, Glycine max
caatatattccattctctctgtgtatttccctacctctcccttcaagatgcagatcttcgtcaagaccctcaccggcaagaccatcacccttgaggtggaaagctctgacaccatcgacaacgtcaaggccaagatccaggacaaggaaggaatccccccggaccagcaacgtctcattttcgccggaaagcaacttgaggacggccgtacccttgctgactacaacattcagaaggagagtactcttcacctcgtcctccgtctccgtggtggcatgcagatcttcgttaagacactcaccggcaagaccataaccctagaggttgaaagctccgacaccatcgataacgtcaaggccaagatccaggacaaggagggtatcccccc

SEQ ID NO: 56178 - DNA, 362 bp, Glycine max
attgaagttaaaagccttagccttccctacaactccaaacacaaagacatcatcatccatggctgcctccgtctccactgtcggagctgtcaacagagctcttttgaacctgaatggttctggagctggagcttcagctcccagttcagccttctttgggaccagcttgaagaaggttattgcctcaagggtccccaacagcaaggtttccggtggaagcttcaagattgttgctgtagaagagaagaaagagattgaagagacccatcagaccgacaaggacagatggaagggtcttgcctatgatatctcagacgatcaacaagacattacaagaggaaaaggtttgggttaaccccctt

SEQ ID NO: 56179 - DNA, 356 bp, Glycine max
gcaaagctcatccttgagttaaaaaatggcagcagcttcttccatggctctctcatccccatccttggctggcaaggccgtgaagctgggcccatcagccccagaagtgggaagggtgagcatgaggaagaccgtcaccaagcaggtctcctcaggaagcccatggtacggcccagaccgagtcaagtacttgggcccattctctggcgagcccccgtcctacctaaccggtgagttcccaggcgactacggctgggacactgctgggctttccgcagacccagaaaccttcgccaagaaccgtgaactcgaagtgatccactccaggtgggccatgctcggagccttgggctgcg

SEQ ID NO: 56180 - DNA, 387 bp, Glycine max
  unsure (1)..(387): unsure at all n locations
aaaagccttagccttccctacaactccaaacacaaagacatcatcatccatggctgcctccgtctccactgtcggagctgtcaacagagctcttttgaacctgaatggttctggagctggagcttcagctcccagttcagccttctttgggaccagcttgaagaaggttattgcctcaagggtccccaacagcaaggtttccggtggaagcttcaagattgttgctgtagaagagaagaaagagattgaagagacccagcagaccgacaaggacagatggaagggtcttgcctatgatatctcagacgaacaacangacatcacaagaggaaagggttgggttgactcccttttccaggctccacaggatgctggaactcactatgc

SEQ ID NO: 56181 - DNA, 374 bp, Glycine max
ctcgagccgcttcttcgtcgttatcttcttcttttgttgtttgtgtgtttgttttttctctcacctgaaaatgtcttgctgcggtggtaactgtggttgcggaagcgcctgcaagtgcggcaacggctgcggaggctgcaagatgtacccagacttgagctacaccgagtcaaccaccaccgagaccttggtcatgggagtggcaccagttaaggctcaattcgagagtgctgaaatgggtgttcccgctgagaacgatggctgcaaatgtggagctaactgcacctgcaacccctgcacttgcaagtgaggtgttggagagctaaagcttcaagcagaaatgggccttagaaataatgataaaaactatatgt

SEQ ID NO: 56182 - DNA, 364 bp, Glycine max
tgattttctttgtagaagttttttagtagcatgttttccagattttgtctcaacaagcagagcaggtttgcttgtgtaaattaatacatggagtaagaaccgcttccttgttgtgtattgggacaggttatgttcagtttagggctgaatttgacctggttctgtatgttcttgtactagaccattctaaccatgacaaattggaatgggctaaaggtgtggccccctcttcaaatttcagtcaagtgctgtgaaatcgatgaattcctgcggaatggggagatcgatttagcttagcctgacacatagatgctttctatgtatcttcagtatgatcaaaatttgaatggttcagaaatttatc

SEQ ID NO: 56183 - DNA, 360 bp, Glycine max
cgcacgaatatcttgttgtttggagcgatccgagaaaaactctgtaaacatgttggtttaccaggacctccttacaggtgatgagcttctctctgactccttccgttacaaggaaattgagaatggaatgctgtgggaagttgaggggaagtgggttgttaaaggagcagttgatgtagacattggtgcaaacccttctgctgagggtggaggagaagatgagggagttgatgatgcagctgttaaggttgttgacattgttgacacattcagacttcaggagcaacccgcattcgataagaagcagtttgttaccttcatgaagaggtttatcaagaatttgactcccaagctcgatgc

SEQ ID NO: 56184 - DNA, 242 bp, Glycine max
ggaagatatagacaccgctcctggcttcagtagattcaattcattcatcgagagcaaacgtatgcggtccagtcgtgtagcattgcttacatgtcattaactgcatcttctaactggtggagggagataaaacagtcttcgttcaggcaggatccgattttcgacttacttacaatcatctatggcattctctgcacggtctcgcacgctcactcactgtggatatggtgatcagtgacggc

SEQ ID NO: 56185 - DNA, 402 bp, Glycine max
  unsure (1)..(402): unsure at all n locations
agttgatctcagtttaagtggttggtaatgtggaataaggttaaacggctagatattgtagaaaatattcaatgttccatctgttatgatcatagtcaacaaatcatgtagagaaaatatacttttatccccaggatcagtttattttgtcaaaataattcttttttctttttgtaagcttcccaagacaagtaatgccaaatggagtatttccttaaaattgattgttacccaacatgtataaagtattgagttgctactattgctgtttatttagggctaataatttcttttttatgttgtatggtggcagatgccattttcggatcntgtaggtgccatgaacttaattttcacatgatggtggtcacggtttttccttttgatgcatttcccaccctg

SEQ ID NO: 56186 - DNA, 54 bp, Glycine max
gtggttgcaagggatattatataatatatatatatgttttgccgtatctattcc

SEQ ID NO: 56187 - DNA, 273 bp, Glycine max
cctactcgcatgccttgtactcctaaatccaacaatagagttagacattgaattgctttctatcaaacaaagtccattcgggactcccgtaaagatagttgaaggttaatgcaatgatttaatattcagagtgctattttgacattttaagagaagaaaatgatgtcgtcccacctaaaggcccttactttttcccatgatgttaatgaaccgaaaatttaacctgtttctagactgattccaacctattattagaaaaaaagaataagtttg

SEQ ID NO: 56188 - DNA, 372 bp, Glycine max
cttctggccatctgttctacagcagcctgattgtgacttgttaagtaaagagtattgttgagcttggtatctactatctaagttgataatctataatttatagttgaattgcatgtgagcaagaattatccagttaaaattatgtgactgaagggagcccacatagaataatagttttaatttgtatggatatgctagttgacttgaagcaaaatccatgttgtatgtgtttccatattttcgagctggcctaaaaacttgtatgttctttacttttctctttgctgcttaactttttctggttttgacgctatctgtaagctgtatttactattttgtaataaaatgtcatttaatgtaatagaaaaagag

SEQ ID NO: 56189 - DNA, 389 bp, Glycine max
gcctcgctctgtttctgtctctgtgtttgcggctgaggattccgaacgagcgaccttcttcgtttctcgcaaagtttaagtcatcatgggtaaggaaaagactcacatcaacattgtcgtcattggacatgtcgactctgggaagtcaactaccactggtcatttgatctacaagcttggaggtattgacaagcgtgtgattgagaggttcgagaaggaggctgctgagatgaacaagaggtcattcaagtatgcctgggtgcttgacaagctcaaggctgagcgcgaaagaggaattaccattgatattgctttgtggaagtttgaaaccaccaagtactactgcacagtcatcgatgcccccggacatcgtgactttatcaagaaca

SEQ ID NO: 56190 - DNA, 233 bp, Glycine max
tcttccggctcctcgctcaattaacccctgcgctccgtccttccgcttccgggaaccgtatcaactcaatcaaaaggggttataacggtaaccacaaaatcaagggataacgcacggaagaacatgtgtgcaaaaagcgcaaaaaaagcgaagaaccctgtaaaggccccgtttctggggttttttcacatgcgctccgcccctgagaagcatcacacaaatctacactcaca

SEQ ID NO: 56191 - DNA, 336 bp, Glycine max
tgaaaatcgccatcatgataaagcttgacactgtccacattgctgtcattaggggtaatgtcgtagacgttatctggctcagagggggaaatgatcctctctcagttggtaaaatactgacccgcatccatcacgccagaggtagtcacatttgccatgactatcggtacatatagatgctagacaattattgtgtcttctaagaggacatatacgggtgtcatcagtagtactcactcaacgaagatgtttgctcggtatgacatgaatactgaaagactgtattgatggcagctatgttccaattagcattattattggtctcctggatggtgt

SEQ ID NO: 56192 - DNA, 364 bp, Glycine max
cacgtctactctaaaggatcccctcggggaattccaattccacattttcaagaaataaggaggcaaaaatgttcatatatgaattggaattatttgttttcttattaggcctatcctgaagccaaaggaaatgagatcggaattcctcggggaattccaattccacattttcaagaaataaggaggcaaaaatgttcatatatgaattggaattatttgttttcttattaggcctatcctgaagccaaaggaaatgagatcggaattcctcagggaattccaattccacattttcaacaaataaggaggcaaaaatgttcatatatgaattggaattatttgttttcttaataggcctatcctg

SEQ ID NO: 56193 - DNA, 342 bp, Glycine max
gatcggtgttcacttgatctcatcataatcgtcagcgtcaattgaagaagatgccgatcagaaacatcgccgtcggaaggcctgaagaggcgactcaccccgacacgttgaaggcggctttggctgagttcatctcaaccttcatcttcgtgttcgccggctcaggctccggcatcgcctacaacaagctcaccgacaacggcgctgccacccctgccggcctcatctccgcctccatcgcccatgcattcgccctcttcgtcgccgtctccgtcggcgccaacatctccggcggccacgtcaaccccgccgtcaccttcggcgccttcggcgggcgccaaa

SEQ ID NO: 56194 - DNA, 314 bp, Glycine max
aattatttgaacgacctcaatcggcacaagcaattactcatggagtgatgcattgcgtgggctatatgtgctgatgttgcctttaggggttgcatgttttccctctatatctattaaaacttatggaataatacttgtaacggtgtgtgttagtgtccacctgtgggtgaagttgacaatgtcacaagctggggtcctttattaggcatggcaaaatatcgtagggttgtaaattggcatgaacttgtactgagcataatttctcaagaagcaatcatagtttgtatggttgactaacattaaggactaaaggc

SEQ ID NO: 56195 - DNA, 399 bp, Glycine max
cacacaaacaccgaaaagttgattgaaaaggacatgatgatgtggcaaccataccaaactatgtttggttgactgaagaggatatggtagtattatattcaggcaaacaaccttctttgggggatatgagatttaataaatcaagctgttccttttgtgataattttttatattcaacaaagaacacgagtcatatttgatttttatttataaaaccaaatggccttaacatttctatttgccattgatttcagcacaaaatggaatctgaatcactgatatggggtgacaaactcacacagacgggattgtcaatcgttggttttcatggagcactacctgaagaaaggaatctacgccagaaattcatggtagatgtagatgcatggatggatctca

SEQ ID NO: 56196 - DNA, 351 bp, Glycine max
gttgaagaggtggagatttactatgacccggcagagcttcttggaggccttctttcagggaaccacataaatcacccaattgaagaggatggcaccaaaacttcagcaccttcccaaggatgtcccttctccaaataattacaatgatgtttttaagtgaatggtgtcttgggatccagctatatttcttgaattaattaatgtggcagctgagatttgaaggcaaatatagtatttgtgtgaaattgggtccattgaataaaattggaaacatgtcaaaatgaattatttttccccccgctttatatggaaaattatggcaaataaatgtgatgtgttggaaagcaatgt

SEQ ID NO: 56197 - DNA, 358 bp, Glycine max
  unsure (1)..(358): unsure at all n locations
caaaagttgaaagaatgagccttgcttaagtaagggtgtcgcgataggcccaagtccatatcagtttataaaaattgttgtgctaatgagagaggatctcaacacgaattagagcaattgttcttcgagagagagtagatcattcttaggcttttagctcgctattcttatgctttgtataaattcttccaaggattgtaatcatgctatgagcaattaatctcctcatctgttgggattagaatgcctgacctaatttcatgtaattctcccttttaatataattgtttatgtgtttattaaaaaaaannnnnaaaaaaaaaaaaataataaagaaataaaaaagggcgggccccga

SEQ ID NO: 56198 - DNA, 61 bp, Glycine max
gttgattgtgtcgtttggatgatgattgctcccaacaaatattctaatatttttaactttc

SEQ ID NO: 56199 - DNA, 284 bp, Glycine max
cttcatacattttacccgttactctctctctctccatcttcattctcttcttcttcttcactattttctcacttatcgtgaccttatcccaacccgtttctgttgctaaagtgcttctgggctgttgtcaaatcaatccacaaccctcaaatgttggtcagcttcttctccccaaaaaagcgttctttctttcttttcccttcccatttaatatttttcccactataaatttcgtgccctctttcccttcactttcatcctctatacatggatgttttgtgttt

SEQ ID NO: 56200 - DNA, 357 bp, Glycine max
gtgattgtttgttgttgtaactcgttcttcttcttttgttgttctgtgtttgtgtttgttttttctctcacctgaaaatgtcttgctgcggtggtaactgtggttgcggaagctcctgcaagtgcggcaacggctgcggaggctgcaagatgtacccagacttgagctacactgagtcaaccaccaccgagaccttggtcatgggagtggcacctgttaaggctcaatttgagggtgctgaaatgggtgtgcccgctgagaacgatggctgcaaatgtggaccaaactgctcctgcaacccctgcacttgcaagtgaagtgttgggagagcaagcttcaagcagagataccccttaa

SEQ ID NO: 56201 - DNA, 303 bp, Glycine max
cattattgatggggtcttgcagcggcgatcttgcggcaacgacggcggtgtggtatggaggggaagatgacgcggtcgagatcagatgggacgaggaaatcatcctatatgttgtcgtaatttgaaatggtggttttgttttcttcaatgtttgtgctgcttatttctgtttgaggtttgggagtggatttgccaatttgtaacttggacttggaacaatgtcctaatggccaccgaatgtggaaagctaagaaggctcttgttcaacagttttacaaacttgtttaattggatccttatctg

SEQ ID NO: 56202 - DNA, 128 bp, Glycine max
ctcagttgaaaggggaaaaagaagtacatcgttaacatttttgggtttcctcaaaatatacttgagtttatcattggattgaatctatattaaagtctgatagcaatgtttaaaaaactggatcttaa

SEQ ID NO: 56203 - DNA, 360 bp, Glycine max
gtgcaaactaaagaacctgccctatcttttaaattccttgtgggacaggtaaaccattaacgtaggcaagtcttgttcattcattgacaattcaatggcctgaggtgaaccttatcttcttgtgtattcaccaaatgagtgaatgaacgggtcgtcgacatgttgttactcttactcaactaccttttctttctgttcaatttttctataacaaaaaccgaagccattgataaccttcagtatctgaatcacagctgttcaagcaacaaaaccttcactccaaacagcacctaccaatccaacctccaaaccctcctcacctccctatcttcccatgccaacactgcacaattcttcaac

SEQ ID NO: 56204 - DNA, 128 bp, Glycine max
tcgatttatttgcttagcattcatgtaattgggaaaaagaggataaaaaaattgttgtatattgtatatacatattgtaaatttttgcttgcataattgaaatttaaaaggagaagaaaattcgatct

SEQ ID NO: 56205 - DNA, 383 bp, Glycine max
caaatgctcctgttatctctcttctgggtgccaaggtagaagttggtaaaaaagaatgtgttcctcaaaggttgtctttgcagaatggcaaggctactgaacctgcaatagaactaacaatgtcaagagcaggtagcgttttagggatgaccccaacagtacccttcaatcattcatctgtttttggctataatggagtggcgtcagcatcagtgacacccgcaatgtctttttcatcagccatgtacggatcaggtggcacaattccatacatggtggactcaagaggagctccagttgtccctcaagtgggtggatcttcatcaactgtcctttcatcttactctcagccaccaatctttatgaacatggctggtacacaa

SEQ ID NO: 56206 - DNA, 348 bp, Glycine max
  unsure (1)..(348): unsure at all n locations
gaacatcataatcatgaccaactcgatcaacgtgaacatcatggacatagtcaacatgatcaacatcatcagaagtgtgcctcacaaacatgttcctcaacatgtccaccctgctcttcanattcaagttttggtggaattgttaaccattgtaacaccatgaaggctcatgatcaatgtaaaggaagtgatgaattccatgaacatgatcactgtcatcatggaagatgtgacaagaatcacgatgaagtccacaagcatgacaccgaagataatcatgcagttgcagaaaaaaggcatggtagttgtttgggacataagaaccatgggaaanagcactgccacaac

SEQ ID NO: 56207 - DNA, 291 bp, Glycine max
gagcatggataccgtacacgccagtacattcagtgcggcatcaacacctcagcatcacatgcttggtccagtgagtctgagactcgaggcatgtcatacattcgatctgaacacatctgactgagtgatacaagcacgggaactcaatctgtgctctaggaataggcactgcaagtactgtggctcagcactcgcagttgcatgctacagctccaaacgccagctacattagcggagcacgtcattgctttgcttgacaagtcatatcgtcatgagcactagataaacatg

SEQ ID NO: 56208 - DNA, 374 bp, Glycine max
ctcgagcagcatcttgcggctgatgatcccatggagatcccaaggaaaccatctgcgggttctttattacgaatcagacattgggggagaatcattacatttccgtgaggttattcatcaaagtcatgcattggtgggtataacgttatccatgattattcatgctcagaatgaggaataggtttcctttcccctgcagatgtttggactttgtcatactgaatgactcaaagttcatatctgccatagtgagcattctgcaagatttatgaacagctttttcatgctatgaatatgttctactggtgaagctacacgaaatacgtcactttgcgcaacgtgccatcaattggtttacattcaattcagatgct

SEQ ID NO: 56209 - DNA, 211 bp, Glycine max
gtctttaaatacgtttgtggatattgaactcaatctgtatactagatttcagactggacagtgagatgacatcaataatggcggaacacagatcaatcaagttacaagtatagaatggcaaagcttactggcatcataacatgatatgatactttacctgcgtgagaaggtttttgagcattaatagtcagtcttcacttacacttctcgc

SEQ ID NO: 56210 - DNA, 261 bp, Glycine max
gtcttaatttctctctgccttgctcatttacacacctcaccaacctttcactttcagctttagttgaatccctctctctcgtttccaaatggtcagcgttgagattgtgctagtgttgattatgtgatgtgtcacatgtgtgtctctcgcgtcaagttagctgcatctcgtgtttacacatccagctttcttaagcttggcacgatactttgttaagtgaaattaggagtctcacatgttgcacatcatacaccaatcaca

SEQ ID NO: 56211 - DNA, 426 bp, Glycine max
ttcatgattacagtcagtgaagtgtgcatattacactctgcagatggtgacattcatcttcaattcaggctctctctctcctttccaaatggccagcgttgagattgtgctagtgttgattatgtgatgtttcacttgtgtgtctctcccgtcaagttatttgcttctcatgtttacaaatccagctttcttaagcttggcacgagactttgttagatgaaattagaaatctcccaggttgcacatcatacaccaacaacagttccagaacatgaaacatccgatgtaatcaagacacaggaaacaaccccgggaccagtaccagccactgaggctcctgcaacagatcaggcagcagctgaggttcctgctcatgaagaacaacaagcaactgaggttcctgccgcagaatcaaccaccgaagca

SEQ ID NO: 56212 - DNA, 200 bp, Glycine max
  unsure (1)..(200): unsure at all n locations
cacacactgctttgcagaaaagattacagccgtgaggatactctctgggaagatgttgctgctgtcacagatccctggatattgtctagacctccatattgtgacgtgtatgggagactagtgcctgtcatangatcttgcaagggtcctgcagaccatgtcacgacatgatgcagtaatttggttacggccaggagaat

SEQ ID NO: 56213 - DNA, 377 bp, Glycine max
cgctcaccttttcttctctctcttctttctctcctctgctgctttctcatggaactactgttctggtgggtctccaacgatgtaaacagccttgtcactcttctgggtcaaaacttccttgtttttctgccttttgttgctgctcattagcttcaccattctatatggttttcactttcatgttaatttttctatttctcatttctgcatcctcttggatttgtctatttgtgtggtgactgtatttcattttttgtgattattttctacccttttgccttgtttgatggatttggtgaagtctatctatttatcacttctgttttactttccgtgttcgtttgtgcatagactgacacatttgatagtcaagacac

SEQ ID NO: 56214 - DNA, 357 bp, Glycine max
  unsure (1)..(357): unsure at all n locations
tttatacacgactaataatccacgagtgaatatattactgccttcaagtaatgatagttttcaaccaactcttttggagggcattcatacagttgataacgttgttgatactaggccaattgattatgaggtcatttcacagcccacgtttgattgggatacccctcaaatgtgactcacgctttgatatgcatagcttgctatcctataacgatgtaactgttcccaatcacgtatgtaacagaaaaaaaaattagtggtgagggatatggatggggacaggggtcacgctgggccagggaagatggttcctcttgtaactgatgttcanaatttgttatacacgcatttatgaca

SEQ ID NO: 56215 - DNA, 414 bp, Glycine max
ggtagatgatgggaacgctatctacgcaatttcgttccatcaaacgcccaaattcaaaccctaaactatccaaatcgtcatctcctacaaaatcagaaattaaattcaacgctaaaccaaaaccaaaatcagagtcagagtcagagtcatggtctgtttatctcatcctctccaccaaccatcctatcaaaacctacgttggaattacaaacaatttccctcgccgtttgaagcagcataacggtgaacttaaaggtggtgcaaaggcatcccgtgctggaagaccttggatttgtgcatgcataatttgtggttttacagaccgaagtgaagctagtgtatttgaatcaaaatggaaaactttctcaaggagagctccccgcaaaaatcaaaatgacaatctctccaagcaaa

SEQ ID NO: 56216 - DNA, 344 bp, Glycine max
aaggaaaatggtaggttggtccaataaaaccccaaggaattcaacccggcaaaaacccccttcaaaaaaggatttggcaaaaaatttgccaaccctcaaggacaaggaattgaccaaggctcctttgatttggagatttttcaaacccccaacggaaaaaagtcttccccaataatatgtgctgaaacaagtttgaaaactaccccagaagatgaaactcctggtgattccttgccagacgcaacccctcacatgcaaataactcaaggtgtcttagagaaaagtaatggtgctggtccattcctaataaaagtagttaagcaaaatttgtggattgatggtgt

SEQ ID NO: 56217 - DNA, 183 bp, Glycine max
atcattcctcctcttcctcagtactgtcattttcgattcgcttcactgtaactaggtttaattctaaggccttcatcgacaatgaccatcggacgtcatcgttcaaggcgcatcgtaatggctgtctaatcggatgtgactccgatcagcgccgagaacttccgcgcgctctgcacctgcgag

SEQ ID NO: 56218 - DNA, 302 bp, Glycine max
ctcgagccgctaaaatcaaacagaatacaataccctctctctctctctcttcctctttgtcatggcatttctcttctctttcctttcgttaaaacttggaactttgtgatttttgaatgacccaacaactaaggttatgatcagttggaagcgttggcaaaaaagaatacgcaatagtggtgttgtttgttcattttggtcaaagaaatagtatctgggtacccaggatattgtagttttaagatgggttatctcaattcagttttgtcatcttcaagcgatgttcaagctgcaggtgatgc

SEQ ID NO: 56219 - DNA, 275 bp, Glycine max
gggcgttaaggatggtgatgaattgcacaagcattcgcatcctccttttaggtctgttacacatagcagtagacagtggatggtcatcaaaagaagtaagcagcatcatatcacgattccagcggtatcagattctcaacactgcccatgccatcccgcgttaccaagaatccgcacgatttcatgatgttttaaggtaaagccctctctctggaatcccaaagcattgagtttgtgggaggcatgccacttgtccatctgagatgggaacgctc

SEQ ID NO: 56220 - DNA, 203 bp, Glycine max
gaatacacgcaatcaggacacatccatgaagtgcaggcacatgccatgtagcagcgttggtgggctaatatgcatcacgagcttcgcagatatgtcctcgtacgtactgtgtcgtctgcatctacgtgttcgctgtggatgatcgtccggtgttgtagcatcatgtggcacagctgctggagggtcatcgtcaaatcgattgt

SEQ ID NO: 56221 - DNA, 299 bp, Glycine max
aataaaggattgaaataagaacaaaaacaagttaaacataagttgataaacatgatgaaagactcggaagagaaagagctatggatcgctagttgaatactttttatggagcttgaaggaaattagggcggcccattacaagaaggccattggaccgggaagttggtttggtggaggagtttccatgtgggtgattttccatactttggataatgccgagacttggcatgccaaggtccagcatgggtaccgagaagaatggttgctcacatcgcttttctccaaaacagagaactcgg

SEQ ID NO: 56222 - DNA, 277 bp, Glycine max
tttgagtgcaatgagtttctcaactgtaatatataagactcaaaatgcatgctttgtagaacaaagacgatagtctgttgtataatgtcctgtaagtgtcaaaatggactggttgtcctgtaaaggctattaggagtacaagcaaaaatgatgggggtatacggttaaatctgattgagttattcctttgccaatccatcttttttgtccctcttgtggctacccacaatgttgaagtaacacacaaaatgacaaattcatgtaaaaaaaaaaaaga

SEQ ID NO: 56223 - DNA, 292 bp, Glycine max
caatatcttactagaaatgtcccggcgagtaattatgaagtcgtgctgctccaccagtgacatcctggcagtgatcctccaagtgactgagcatatgttgcaccacatgaactcgaccatctcgtaacaccatcataatgagaacatcgatgtgagggaatcttaatctcatgaagtactgccagctccttgcttcttaccaacactctgtggtatccttcatccaacttatgtattcttctaactatgatgttgacatgtacatagacactgtacatacaccatgcaaatt

SEQ ID NO: 56224 - DNA, 379 bp, Glycine max
cacaacttattaatataatcgtggctaaaatggtgataactatatatattacttttatttatacatttaataatagaataagtatattgataaaaaataatatatatatatagatatatatatatatatatatatacatatatttataattatgtattaaataatataaacatattaaagtttagagaaatagacataatatttacaagttgaatttaattacaaaatattaacagtgtaaagaaactttacattcatctcattagtcatttttcgtgtactataatattcacatatgaaagacatgaatatagcataatattaagatattgtctaatccttttggctaattatgtgtgcgtcatttaaaatattttct

SEQ ID NO: 56225 - DNA, 352 bp, Glycine max
attcaggtctgtcttagtcatgccccttggggccttgctgttgttgtgaagctcttgtggggttcccttccgcttcataaaatctgtcataagatagacttcgtcatgcacatagatggaataagaaggaagaacgatacgaactgtgagcttctgattctaagaaaggaactgattgatggaggacaagtatagtctaaacaggcaaaggagtggaatatggaattgcttgagagatggagactttgaagaggaataagtttgggctgttttcaaggaaaagcccgattacatttctggaattcacaagccaaggggaaaaggatcatcttctcctcttgactgtcctagg

SEQ ID NO: 56226 - DNA, 351 bp, Glycine max
ataatttctattacttctgctgaaatcattagtaaataaacagcaagcaatcttctctaaaatttgagctaaagggttaacaccatagacgaaacttattgcgctgaatctggaattctggattctgttcccccattcaaaatattgctattcgaaatctgaatatatgagtgtgctagggatcatcttctatgcttgctgtcacaagtattctgctaattatttttgtttaaaaaacccatgcatggaggacctgggctgggattacatacttgaaatagaatgaagcatattgcttgtagttcacaattcaaattaagtttcaaatttttgtttaattcaaatactaat

SEQ ID NO: 56227 - DNA, 381 bp, Glycine max
gtggaagttacaatccaactccatcaagtcctccagttggtggaagccatgatccaactccttcaccaccctcaggtggtggtggaagttacaatccaactccatcaactcccccaggtggtggaagctatgatccaaccccatcaccacccacagatggtggaagttacaatccaaccccatcaccaccctcaggcagcaactgtggcacaccaccacatgacccctctactccaacaccctcagtcccaacaacaccatcaaccccatcaacaccatcacaacctccctcaagaagaagtgggtactataactcaccaacaacttatggaagttggtagcccccaacaacaatcactgtgaggccaccttcaaacccaa

SEQ ID NO: 56228 - DNA, 206 bp, Glycine max
aaaaaaaaaaaaagaaaaaaaaaaaaaaaaaaaaaaaaaaaaaagaaaaaaaaaaaaaaaaaaaacaaaaaaaaaaaaaaagaaaaaaaaaaaaaaaaaaaaaaaaaaagagaaaaataaaaaaaaagggggtgccccccaaaaattagcctcgtcaaccggggatttatttcgggtgggaaactgtaaggggtggaaattttccc

SEQ ID NO: 56229 - DNA, 344 bp, Glycine max
cctcattctccgtcatgttcatcatcttcagttcaattctctctcgctgtctctgtcacggttcctcattcgcatggtgaatgacaccgccgccgccgcgcacatcacttccaccgccaccgcggctgctatcgtcagttccggtcgagtgctctctattctccatgatctagaagatgcgcattccaatttctctggcgacgagcagatggcagaacacgtgaacgcagaactcacagcagaagaggtcgttgatcgactatccgatgactgtgaaggataagaatctgtatcggccgcactcagcccgcgctgttcgtccatatcccctttcactaatctca

SEQ ID NO: 56230 - DNA, 93 bp, Glycine max
  unsure (1)..(93): unsure at all n locations
gtcatgacacacctgtgatgtanttaacgttaacattttgtgcgtgttacttgtttaaaatttagctaataggaggaaaataaaattgttgat

SEQ ID NO: 56231 - DNA, 421 bp, Glycine max
catgcacgtctacactagatgatcacctcggtgaattccaattccacattttcaagaaataaggaggcacaaatgttcatatatgaattggaattaattgttttcttattaggcctatcctgaagccacaggaaatgagatcggaattcctcggggaattccaattccacattttcaagaaataacgaggcaaaaatgttcatatatgaattggaattatttgttttcttattatgcctatcctgaagccaaaggaaatgagatcggaattcctcggggaattccaattccacattttcaagaaataaggacgcacaaatgttcatatatgaattggaattatttgttttcttactaagcctatcctgaagccaaaggaaatgagatcggaattcctcgggggtaccgagctcgaattccc

SEQ ID NO: 56232 - DNA, 188 bp, Glycine max
gggtctccaactcattctcacatcactggatgcaggaacacgctgtctctgcagggagcaagaccggcaaacgagaaatggcacacagagattttggcgacgatttaacctcctgcacgtcagtgaaagcatcaaatcagtgcgttgtcggaatctactgacactcgactcatctgaataaacatcag

SEQ ID NO: 56233 - DNA, 348 bp, Glycine max
ttcttattggggatgcagcccacacattccaacgcctagcaggtcgcagaccttaattacgtttgggacactaaccttccacatccaaaccttgtgactttgggaggaatttcaggcaattcaataggtgatgttgttacatccgttttataccaagcgaacacatctccagttcctgaaaagcttaatgtatgattaagtccatgtccataatctaatccatagatcacatgcactttaaacatgtggctctcatcagggatgcatcccacacactcaaacctactactcgtcaaagatttcatttcggattcgtcaatggaatttcacttacccaaattcttgcaa

SEQ ID NO: 56234 - DNA, 158 bp, Glycine max
ctctgggactagctgagggtcaaatccattgtcaccaggaagagtgccattgatgtaagttggggaggctaacccagttaagcactctcccttcttggtgactatggatttgaaacacagctactatcagatgacggacggaatcttacgatgtaggt

SEQ ID NO: 56235 - DNA, 292 bp, Glycine max
gtcagcctggtcaagctcctcgtcctgctggcacaggagcacctgttcgaacctaaaagcaaatcctaagaaaaagccttgatgttatgctctgaccaaatcctaagaacaaatttgttgcttaattttgaacatatcagttttgtgaaggggtattttgttctgattatctgctctagtcgttggatagtatcttgctggttataattttggtggctattattatgaaagtggaacttgatataagttttcattgaaattggttatttatttatttatttcagatcttatt

SEQ ID NO: 56236 - DNA, 369 bp, Glycine max
cggctcgagcgaggaagctccaaaccagacaaccacaccaccacctcctcaagagtcagtggcgcaagtggaggaagtggtagtaaccgatgttccacagccaccagaaaaaacaacaaccactgttccagttgaagaaaccgtcactctcgagactcacctctccaaacccaataatgctgacgacaacgacaacatcatccctgaattcaaggaagaaagcaccaaactctctgaactcccagaaaacgaaaacaaggcactccaagacctcaagaagctcgttcaagacgctctcaacaaccaccacttctcttccaaagaagataataagaacccaccaccacaaactgctgctcacaaggaaaa

SEQ ID NO: 56237 - DNA, 369 bp, Glycine max
gactcatataatgagtttttgaaaatcaaatgggttttgcacaggtctaaactcacaacttattggaaggatgttacagaatcctggtttttctattcacacgccaatttttcctgagaattgccatcttgcacaattggccaatctcactgttcctttacaaatggaggttgttttggtccggaggggaaaattgcttcaggacctaaaatggcattcctaacactaattaaaaaaatggttttattatccaggcctaacatgctgatcacagctagctttataacccaatcaagtcatctgtgttggttacggcatatgttgacttcttgatgaagtaggttgctatttatttcatgagtttatatc

SEQ ID NO: 56238 - DNA, 408 bp, Glycine max
ctctagaggatcccctcggggaattccaattccacattttcaagaaataaggaggcaaaaatgttcatatatgaattggaattatttgttttcttattaggcctatcctgaagccaaaggaaatgagatcggaattcctcggggaattccaattccacattttcaagaaataaggaggcaaaaatgttcatatatgaattggaattatttgttttcttattaggcctatcctgaagccaaaggaaatgagatcggaattcctcggggaattccaattccacattttcaagaaataaggaggcaaaaatgttcatatatgaattggaattatttgttttcttattaggcctatcctgaagccaaaggaaatgagatcggaattcctcgggggtaccgagctcgaattcc

SEQ ID NO: 56239 - DNA, 73 bp, Glycine max
gacgtcggatgcacgcgtacgtatagctcgagattagttcggggtcgacgatcagaatattcggtagcagatt

SEQ ID NO: 56240 - DNA, 379 bp, Glycine max
gttttctcgaattctcgtcctctcactcgactctgatacacattagaaatgtataggaaattacggctggtgattcacaagcttcatctctttggatcgatgctcatctctatggcctcgcggtatctaaagagatttagggtgcatgtaatactgattcatgcaaagattcatcggctgaatcacattcaggcaatcaatgagcagaagtttctcgtttccaaattgtggactatcttgttaggaaatacgatggtggtaaagactcagtgttgcgagttagcacaggtatctatgtgaattgcagcatcgcaaactgcaaataggagtacaatgacgataccagacatgatcatcttgagcatccaaggccattcta

SEQ ID NO: 56241 - DNA, 209 bp, Glycine max
aactcggaattcagctcgagatcacgaggaggagatttgcatagttgttgctgactcacccactgagggtcagtgggagggggggagtgggaggcaggtccgataggatcgtccgcgcgagaaacgtgggtgtggcctccatggcacgctatgtgaggcggcttgtgtgtgaggacacgaggcggagggatgcaacacaatgcaatctt

SEQ ID NO: 56242 - DNA, 129 bp, Glycine max
agttgctccagtggccggcactaagcagcatggcggacaaggcagtcaccagcgggggcggggagtgtgggaggggcaggcttctgtccagggagcgcttcgtcggggagggccttcagccagggaggg

SEQ ID NO: 56243 - DNA, 159 bp, Glycine max
  unsure (1)..(159): unsure at all n locations
agcgaatgagagcatcagacttttcttcttcgatttccattgcggggcggggggtgggggtcggctttctcgtcagtttcggcgcggttggatgttcgtggggggactgctccgaatagcagcggggccactcggggggngggaggatcggaggcttac

SEQ ID NO: 56244 - DNA, 177 bp, Glycine max
gagcacttgactgcaataagtgagcgtgactgagttcttgagagggggggggggggggagaggtttgtgagggtagacgtgaggggagggtgcgtgtgtcgggggggagcgaattgatttccttgggtggggttgatgggggggttagggagggagggatgttgaagatggtatttg

SEQ ID NO: 56245 - DNA, 160 bp, Glycine max
attctcccttcataatagagccactgatcgcttctctttcgggggcgcggggggagtggggaggctagaaccgtcgtttaggggcggttcgagcgctgtcgggggcgatgagtgctagacaaggggtggtaaggggggggtcggggaaggggacattaat

SEQ ID NO: 56246 - DNA, 57 bp, Glycine max
ctcgagccgaatcggctcgagggaagatttgttcaattaatgcaaccggaagttaag

SEQ ID NO: 56247 - DNA, 198 bp, Glycine max
  unsure (1)..(198): unsure at all n locations
ctcggaattcagctcgagaaaaggaaaaaatatatataaatgttattacgatatgtcagtagggtaaagttaggaaaggtggggaggaggatgatatatagcatgtcaggtgtgtgtgtagtgttcctggaggagctagctaggcacaaagggaagtacatgggagtgcaggggtgatggaaancatcattgtaatat

SEQ ID NO: 56248 - DNA, 71 bp, Glycine max
gtaaactcggaattcagctcgaggattggttctggaggttgacacgtcccgtgtatcttccacactcagtt

SEQ ID NO: 56249 - DNA, 55 bp, Glycine max
gagtgctcagctcacatggtatgggttggggaacgtacccgccaagttggggggg

SEQ ID NO: 56250 - DNA, 366 bp, Glycine max
aatttttgctgtatggaatatagatgttcaaattagggttttaaagattgaacaccagtttcttaaagattggcccttgtttccgtgtcttttttaaacagatgaaatcaacattctacttaaattgtgcaaatcatgatggatacaaattagcataggtgctgttgcactaagtgtttttcattccaaattcttaaatttgactgtaggaatgaagcacaagataaattatacataaaaaccgctatattttgttggattgtggacacctgtcttttgaatggtgtattgtcaataaattttccaattttatttgagctatcttttgcagttattcgtggttggttggtcagaagatgctcaaga

SEQ ID NO: 56251 - DNA, 77 bp, Glycine max
ggtaaactcggaattcagctcgagcttgctcatcaagtccaagaaccaacctagcgtttgcaatctcaattcaatgg

SEQ ID NO: 56252 - DNA, 79 bp, Glycine max
gtaaactcggaattcagctcgagacaacatttgcgggtctgcctgcaaattttcgtcccctcaatctatattactcagg

SEQ ID NO: 56253 - DNA, 170 bp, Glycine max
  unsure (1)..(170): unsure at all n locations
gtaagtcctatcagtttcgacgtaagtctccaaaatcagagggaggcggagggggtgcagggcggatagatgggatgggtcgcgcgggcaggtcgctggtgggggtcggtgtgcagcacatgtggggggntggtggggagggcggggagcagcgctggccaaccgcgccg

SEQ ID NO: 56254 - DNA, 53 bp, Glycine max
ctggagccgaattcgggggggggtcgaagggaaatgcgtaggggggggggggg

SEQ ID NO: 56255 - DNA, 59 bp, Glycine max
aggcagtagatgtaagatgcagttgtcctagtaacaagtgggtgggggggggggcaggg

SEQ ID NO: 56256 - DNA, 251 bp, Glycine max
tgaattagtggcatatagaggagcataggcgtcggaagcacgcgtaggtaaactcggaattcagctcgagattcactttctccgagctcgtccttctagccgcaacctcaacctgtttctccgagaggcagggggaagggcggctgtcatggagggagttaagggtgtggagacgaaggatggaggtgtcgcagtagctgctgcgtgtgctggtggggaggagggcggggaggatagagaccacagatttt

SEQ ID NO: 56257 - DNA, 76 bp, Glycine max
ggtaaactcggaattcagctccagactatctccgtccgtaacatcaagagaggaaattttgcggaggaagaagtgg

SEQ ID NO: 56258 - DNA, 74 bp, Glycine max
cgagaggctgctcgtaagaggcgattgaggaaaaaggcctatgtgggggaggggagaggcgggtcggtttgaag

SEQ ID NO: 56259 - DNA, 51 bp, Glycine max
gggaaaactctactggaaggaccaccatgtccaattgatcagggggaaggg

SEQ ID NO: 56260 - DNA, 54 bp, Glycine max
gtgaaagagaatcgcgaggcgaagagaagggaggaattaagatggaggggaagg

SEQ ID NO: 56261 - DNA, 54 bp, Glycine max
cggcaagaaagtcatcatctttggggttcagggtgccttcactcctacttggag

SEQ ID NO: 56262 - DNA, 64 bp, Glycine max
agtgaaagagaatccgaggcgaagagaagggaaaaattaagatggaggggagggaggggggggg

SEQ ID NO: 56263 - DNA, 53 bp, Glycine max
cgctctttaacctgtctgacgaactcgcatctagaagcaaggggggggggggg

SEQ ID NO: 56264 - DNA, 171 bp, Glycine max
  unsure (1)..(171): unsure at all n locations
ctcgagccgaatctgctcgaggcacctcgctcattcaatcaaggcagggcgggggaggaggagcggttgacgtgagaggaagggtgaggagaggtggggaggcgggcagagaaatggaaatgggtgggatggtgggggagggggtggggagcgnatgatctgtcacaagtt

SEQ ID NO: 56265 - DNA, 171 bp, Glycine max
  unsure (1)..(171): unsure at all n locations
gttgtgtttgcacccatggcactgcaaattccttgcaagtcaggagggaggagataggcggagaatctgcagtgtagcgttgcatgtgagttgcatggatgcggagctggaattataatgaaagagggccttcaggagagaggagatggngagaagttgttttggttctca

SEQ ID NO: 56266 - DNA, 69 bp, Glycine max
gcacgcgtacgtaagctcggttcagccacagttgggagaaaaaaaaaggttgtgcgagatggcacgtac

SEQ ID NO: 56267 - DNA, 366 bp, Glycine max
cgctctgtttctgtctctgtgtttgcggctgaggattccgaacgagcgaccttcttcgtttctcgcaaagtttaagtcatcatgggtaaggaaaagactcacatcaacattgtcgtcattggacatgtcgactctgggaagtcaactaccactggtcatttgatctacaagcttggaggtattgacaagcgtgtgattgagaggttcgagaaggaggctgctgagatgaacaagaggtcattcaagtatgcctgggtgcttgacaagctcaaggctgagcgcgaaagaggaattaccattgatattgctttgtggaagtttgaaaccaccaagtactactgcacagtcatcgatgcccccggacat

SEQ ID NO: 56268 - DNA, 189 bp, Glycine max
ctcgatgcgtgattattcgtttgatccgcgaaatcatactggtctcagagaataaaatctatcgcaaattcttggtgcgtgtcaagatggtgcagcggatttcagcatggcgagagaatgcagtgcagtgatgcttcggattcaggtctacttgtttggagagcttcttcagttgggtggttggttgtg

SEQ ID NO: 56269 - DNA, 76 bp, Glycine max
taaactcggaattcagctcgaggtctgtctgtgttacgtttcgagtatctgtggaatccctaaccctaagttagtg

SEQ ID NO: 56270 - DNA, 55 bp, Glycine max
ctcgctcttcgcttcctctggtggcgagagtgtcgactcctgctaagaagagggg

SEQ ID NO: 56271 - DNA, 53 bp, Glycine max
ctacattattagtgtctgtgaggggtgttagtaataagggcgtcggggggggg

SEQ ID NO: 56272 - DNA, 204 bp, Glycine max
aactatcaacgctgactcgaagatctttcgtgaacatgtctagagatgtgggatactactggataaggattactaacctagttgccttaaccctgtccggtgggaaaatcctttaagaaatttggttcaattaaaaaaccaattttggaaaaaggacaagttgcccctttaaaacaaggttcacaggattcaagtccaaaaggg

SEQ ID NO: 56273 - DNA, 270 bp, Glycine max
tgcccttgttgactcaaggcataagaaggtttttaaggtgaaaaactgcataactgacattgatcctgagagggaaaaagaggaaaaagagaaggctgaaagccaaaatatccgcgcaaatgtgcttcttaaccgaaagcgtgagaaggtgaatcggaagtatactccagctgtggagaggaggcgtcaactttctcctgggtttttagaggatgctttggatgaggaggatgaagcggattattatgataatcgtcgttctcagcatcg

SEQ ID NO: 56274 - DNA, 376 bp, Glycine max
caaagctcctcaaggagatgttttcttggctgagctgtgggccatatggacaggccttgttctttccttgggtcttgggattaaagcaatatgggtggaatcaaactccatgattgttgtgatgacggttaatacaaagcaactttgtccattagctgttggctatttgaacgagatatggaaactgttaaagaagtttgatagatatcaaatttctcacgcgtggttgcgaaactaatatggcagcagatcatcttgctaagatggatcttttggcaaatgaagtggttttgtcgccagttgattttccacctagcctttccagaatcattgaagatgatgccataggaacgagatatcgtatacgatgatatct

SEQ ID NO: 56275 - DNA, 380 bp, Glycine max
atgcacgtctacgctagctgatccctcggggaattccagctccacaatttcatgacacaaggaggtttgcgtgacacaatggaatctggaattaatgtcgtcttcgtacttcggcctacacttacaccctctgaattgagatctgaattcctccgcgaagacaaagtcgatgcgtacatgggcgctctgccgcttcctcgctcaatgacacactgcactcggtcgttctcctagcagcgactagctatcaactcactcgaaatgagatctgcagtcatcgagaaaatcaggggataactcatgaaagaacatggaagcaaaaggctaacaatatgacatgaaccgtcttgtggtcgcattacgggcattcttccacaagc

SEQ ID NO: 56276 - DNA, 367 bp, Glycine max
agcccagcttgatggaacggaacagaagtgctcgtacctttgagtgggaggattcaatagacaactcacaacaagcaagacagccaaggaggaggaaaaggaaatggagttcgttggaagaagagacactaagggctggtgtaaaaatgtttggagaaggaaactgggcaacaatccgaagtttttacagtaacatatttgaaaatagaagtggagttgatctgaaggacaagtggagaaacatgatacggtgacactaacgcgctactttcatgtgtatatcttggtaatgacaattttgacagcagcttctctctatgcaatcaagctttgttaaaacaccatccaaatcgtacagttagtgaag

SEQ ID NO: 56277 - DNA, 346 bp, Glycine max
gttagtaaggagttcgttgagaaaaccgtagtgctacaccgtcaggatattaaaggatgctgcgacatgagagtacgactctgcatcaccgataccttgtatcggttgggacatgggcattatacaagtgactactaacagtacacatcatagtagtaatagaagacgtgaagttgactgccaagagaagaaagcattagctagcatagatatgccatgctgcctgatgttgatccagggacgtcacccattgctagaactgtggcccagttacgttttcataagcctatggagttgacccaacactagtctgacacactggagtcacctagttctaccaaatgtg

SEQ ID NO: 56278 - DNA, 328 bp, Glycine max
gtgtgttatgtccaagaaaattcctcacaggagtagtttgataaggatgtaatggagtaattgcctgtggatgtcccaaaccccccttcgagggccatggattgcttctccaactcctgtaactgacaatagcccccagatttctgcatcacctgcctcagatacaattaagctaggatcagtcaaaggatctctgcctccttcctctggcataaagaatgttacttctggtgtctctacttccagtacaggtttgcaaagtatctttacaggaactgcctctcagcttgatgcaaacaacgtgacagtatcacctgctcaacacaat

SEQ ID NO: 56279 - DNA, 359 bp, Glycine max
gttttgcactagtcaatttgagttaatgtcagaacatttccaattacgtaaattttgtttgcaagcctcctcaatttggttatttcaatgttatattttgttatgatgcacaatttatcctttatacgatttgatattcgattttccgtcagttaatactggatcacgaacggtatctactattgtgttttcattgttaaatagagtttgatggcactcgcagagtgtgaaatttcattaaccggacaaaatatcatgttttggtagccatttgcaaactgctttggcgatatctttgatattttgattgatagctgcgtaacatgcctgaacactttccttggagaacatgtcctgat

SEQ ID NO: 56280 - DNA, 364 bp, Glycine max
ggcgaacaatatagatcagactccaaaacagttaaccaacaagcttacttttatgccagagacctcgaagtccatcccaaggacacatttgtgttcagtatagatggcaccgtactctctaatattccatactacaaaaaacatggatatggggtggagaaatttaactcgaccttgtatgatgaatgggttaacaagggcaatgcaccggcactgcccgagactcttaagaattacaacaagctggtgtctcttggcttcaagattatattcttgtcaggaagaacactggacaaacaggccgtaacagaagcaaacttaaagaaggctggctaccacacatgggaaaaaattaattctcaag

SEQ ID NO: 56281 - DNA, 340 bp, Glycine max
cagcctcactgttccaaaaccctaatccttcgtcttccaaggagatggctgaatctcccctcgcacggaattcaacgtcacgttccccatggaaagctcagtcaagatagagatctaggtcaaggtcgagatcaaagtcgaggtcgatgcctagacaaaagccatgatcccgttctataagtcgtggcaggttactgagacatgttgtttactttgagagtaatgctgcaggtgactatgccactcaaggctctagattgtgcactaagattactgacatgatgaacactgttacggccagatgtagatagtacataccatttttttgatgacaaatata

SEQ ID NO: 56282 - DNA, 357 bp, Glycine max
ggctggccttcaacaatagaacttcttcccgaacgatctcttgtacccacgtccataaccccaataagcttcacctaaacggagcatgcttcccctccaaagctctaatgttcacgatcaggactcagcatgaacatccagcagggattaatgccactccttcaacttcttctgccgttgtttagacccaaaagggtcagtctattgctgccgttgacgacatgaactaaggctccaaattctcatcagatcctcgttcatggttgcattggatgcccgaagatgacgatgataattgttcggactcttcttgagatgtccttcaattctcctcatcgaaagactgcgtcaatgact

SEQ ID NO: 56283 - DNA, 390 bp, Glycine max
gttcttcttcgtcgttatcttcttcttttgttgtttgtgtgtttgttttttctctcacctgaaaatgtcttgctgcggtggtaactgtggttgcggaagcgcctgcaagtgcggcaacggctgcagaggctgcaagatgtacccagacttgagctacaccgagtcaaccaccaccgagaccttggtcatgggagtggcaccagttaaggctcaattcgagagtgctgaaatgggtgttcccgctgagaacgatggctgcaaatgtggagctaactgcacctgcaacccctgcacttgcaagtgaggtgttggagagctaaagcttcaagcagaaatggcccttagaaataatgataaaaactatatgtactttcaaaactttaaaattaa

SEQ ID NO: 56284 - DNA, 372 bp, Glycine max
gaatagtgctgcaatggcttcaagtcatgaggaggtgacccttttgggagctactggaagcccatttgtgtgcagggttcatattgccctcaagttgaagggagttcaatacaagtatgtcgaataaaatttgaggaacaagagtgaactgcttctcaaatccaacccagttcacaagaaggttccagtgtttattcacaatgagaagcccatagcagagtctcttgtgattgttgaatacattgatgagacatggaagaacaaccccatcttgccttctgatccttaccaaagagccttggctcgtttctggtccaaattcattgatgataacgtttttggtgctgcatggaaatccgttttcacagctga

SEQ ID NO: 56285 - DNA, 327 bp, Glycine max
gaacagttgcagcgtccgaagtatgaggaagaggggtgtgtggcacgtggttctttactctttatcatcaccaccgtcccttactagtttgcgaaattagcaaatatggcggaagtgagagggagggacacgtggacggaggagctggcgagtctgatagaggattcgggagtgcgctacggtcgagagtcacctccgacgtcgtttgaggtgcacgcgccgcagatcgagtcgggggagagcttgaaggaacaggccttggagttcgtaatcgcgtggtgcaagatactcatggagcttgggagagggttcagggacattctgcga

SEQ ID NO: 56286 - DNA, 353 bp, Glycine max
ccaagatcttcacaccatgaaatgagctgggattgttgcacagtaggtctaggcattgtggagtcattggcaaactgttccaattctaggttttctgggaaaattctccaatctacagagagcaagagagttagtctcagtctccagatgatgatgatcaaagccccaaattgccaaatccacagggattcttcgcttgagggatctaagtctttgcccaaagatttttgtaaggctcctccttactatgcccagcaaaatggctctgttgttatccacaacggtgaatgtgaatctgagtccactgttctttttgcgattggggaaagtggccttaaacttgagccgtttgg

SEQ ID NO: 56287 - DNA, 380 bp, Glycine max
ctgaatctgttacaatcagagatctaaaattgaattgaccagcttgaccatgaattatggaatcacgggttttgaggtagccaccatgattttaaaggtatccaaaaatgctccaggtagatcataactggtggaagtaaaatttggtcgagtactatagtctaattggtctaaagctgataaaatcagtagctgtaaaatagttgagctttttttttaaaaaaaaatgatcttttgatttattcaaaaatatttttaaataaatagatgtttatgcgtgaaatttaagcatggttttttattgtttgactattaattatggatttttcagtttgttagacatgtaagttttttaataattttatattacgtttgtcact

SEQ ID NO: 56288 - DNA, 344 bp, Glycine max
atggtttcttgccattatctatttcatagcaggggttcctggaacatctgaattggggtcccgcaaatctctccatgtctctacctctccaactcacgcatcgtggggatggaaatttaagcaatagtgtggcttacattgctataaagaaatcgaggtttcagcatttcaagtcatgacatgcttcacgagaatgaatgcacagatgatgatgtggccctggatgatcatgtggaatctaagatattggcttgtagataaatcgaccatcttttctctaacaagaaattcaggacaagacacctaattgaggcaattaatggagcatgggcaattcttggtcc

SEQ ID NO: 56289 - DNA, 232 bp, Glycine max
tgcggcggcttccgcgctcactgactcacagtacttggtcattccgcagtggccacctgtaacacggcactcatgtgctgtcagatggttaactacagcagcaagggatcagggaggagcggttatcttagtaaaacgccaggataaggttacgaatcagtaagtaagacgggtatgcaggtgtttgtccatcagctccggccccctgaagagtagcagcaaactggacact

SEQ ID NO: 56290 - DNA, 341 bp, Glycine max
catccacgtagctggggtttgagtaagctcttgaaagagtttgtgactgttggtggaaagttgttgcgtggtatgcttgtttgctacgactatggtccttaaatttcatctgcataaatgtcttgtcctcttcatttgctgtgttttggctcaatcaaatttactatttttattgatatgctcaaatgggttctggtagaatctttaggaggaattagtgatgacactttgctaaattcacttgggctagtgaatgatttgagttcagttgatatcgtcaacttttcccttccgaatttgccagcacctccaaatgccttcaggggaattcgcaggaagag

SEQ ID NO: 56291 - DNA, 345 bp, Glycine max
atagaacatacttgcctgcacgtctactctagatgatcccctcggggaattccaattccacattttcaagaaataaggaggcaaaaatgttcatatatgaattggaattatttgttttcttattaggcctatcctgaagccaaaggaaatgagatcggaattcctcggggaattccaattccacattttcaagaaataaggaggcaaaaatgttcatatatgaattggaattatttgttttcttattaggcctatcctgaagccaaaggaaatgagatcggaattcctcggggaattccaattccacattttcaagaaataacgaggcaaaaatgttcatatatg

SEQ ID NO: 56292 - DNA, 370 bp, Glycine max
gtgatttcagtgagtgatcggtgttcacttgatctcatcataatcgtcagcgtcaattgaagaagatgccgatcagaaacatcgccgtcggaaggcctgaagaggcgactcaccccgacacgttgaaggcggctttggctgagttcatctcaaccttcatcttcgtgttcgccggctcaggctccggcatcgcctacaacaagctcaccgacaacggcgctgccacccctgccggcctcatctccgcctccatcgcccatgcattcgccctcttcgtcgccgtctccgtcggcgccaacatctccggcggccacgtcaaccccgccgtcaccttcggcgccttcgtcggcggcaacatcaccttcctccg

SEQ ID NO: 56293 - DNA, 394 bp, Glycine max
gcagacttaacaacagcacaaagcgggttactgtctgttcaagctaccatctctctctctctttcttagtgcctccttgccagaagttaaaatggcccaagaaactttcctattcacatctgaatcagtgaacgaggggcaccctgacaagctctgtgaccagatctccgatgctgtgctcgatgcatgcttggagcaggaccctgacagcaaggttgcctgtgaaacctgcaccaagaccaacatggtgatggttttcggagagatcacaaccaaggccaacgtggactatgagaagattgtgcgtgacacatgcaggaacattggttttgtctctgatgatgttggtcttgatgctgacaactgcaaggtcctcgtcaacattgagcaacag

SEQ ID NO: 56294 - DNA, 398 bp, Glycine max
gtgaaagtgagaaaaaataaaaatcaaagagcataatgtcagggatcattcacaagattggggagacccttcatgtgggagggcacaagaaggaggaggagcataagggtgagcaccatgctggagaatacaaaggggagcaccatggtgaacacagtagtgagttacaagggaaagcatcatggtgaacacaaagctggagagtaccatggtgagcacaagccagagcacaaagaggggttcctagacaaagtcaaggacaagatccatggtgagggcggcgccgccgagggcgagaagaagaagaaggagaagaagaagaaggagcatggccatgagcatggccatgacagcagcagcagcagtgacagtgattaaactgctgcatcacctatata

SEQ ID NO: 56295 - DNA, 86 bp, Glycine max
gttttttgagaaaacaattccattcagacatgttgatatgttgtatattcaattattcatacttcactaagaacaacaattttcac

SEQ ID NO: 56296 - DNA, 403 bp, Glycine max
gccaagtgaaagtgagaaaaaataaaaatcaaagagcataatgtcagggatcattcacaagattggggagacccttcatgtgggagggcacaagaaggaggaggagcataagggtgagcaccatgctggagaatacaaaggggagcaccatggtgaacacagtagtgagtacaaaggagagcatcatggtgaacacaaagctggagagtaccatggtgagcacaagccagagcacaaagaggggttcctagacaaagtcaaggacaagatccatggtgagggcggcgccgccgagggcgagaagaagaagaaggagaagaagaagaaggagcatggccatgagcatggccatgacagcagcagcagcagtgacagtgattaaactgctgcatcacctatatat

SEQ ID NO: 56297 - DNA, 376 bp, Glycine max
tcggggaattccaattccacattttcaagaaataaggaggcaaaaatgttcatatatgaattggaattatttgttttcttattaggcctatcctgaagccaaaggaaatgagatcggaattcctcggggaattccaattccacattttcaagaaataaggaggcaaaaatgttcatatatgaattggaattatttgttttcttattaagcctatcctgaagccaaaggaaatgagatcggaattcctcggggaattccaattccacattttcaagaaataaggaggcaaaaatgttcatatatgaattggaattatttgttttcttattaggcctatcctgaagccaaaggaaatgagatcggaattcctcggggg

SEQ ID NO: 56298 - DNA, 257 bp, Glycine max
ctcgagccgattatcaagtaaacaaccaacagaattgggactgtgacttctctggtttggctgtcataacacataaggatccatcacaaaatggatgccaattccctgtaatgatttctagtagttcttctttgcttcttcatggagggctttcagaaatccttaagaaagcattgagggtgtatatttttgtcatgtttttgctatagctgaaagatttaggcaatggtggagtattttagaatgtgttctgacaa

SEQ ID NO: 56299 - DNA, 105 bp, Glycine max
ttaaacttgtatttggacaactcatttaaacttgtatttggataactctatgcttaatttctaagcattaatatgatgatacttctgtggctactctgctgctgc

SEQ ID NO: 56300 - DNA, 338 bp, Glycine max
caactacaacattttagttgttgtaggtgatcgtgaagagttctgtgctaaagtatgagcgaatcagcagctactacactcagttacggtgacgcaaacccaatggtggggaattgcataagctcgataactctttgtactctcacaacaagtgtttgagtggctcaccactatcaccttgcaaccataagcagataactgtctaagtcgaattcatactttgataagtattcctattttcatgtgtgtttgtgtgacattccaatttcacctttcaaccattataaacatatgcctatcaaagttggtttcatcacattaattattcagatttcaat

SEQ ID NO: 56301 - DNA, 183 bp, Glycine max
gacttgtatatttacctgtgaagtttcatcattttcttgttttgttcataattggcatgagctgctgcattgaacctagaagtgagtctctggctctctccaacgagaaatcatatgtaatgtaattcttgcacacccattaaatatgagaaagaagtatacatcaaataaattaatttttga

SEQ ID NO: 56302 - DNA, 391 bp, Glycine max
aacttattttttgattgttgacttcaggtaaaacaatgtagtccttgttttcagtaaatatagaggtttcatttcatctgtcccactagtactgctctagctgtgttagtgctaatctcttgggttgatcttcttttcactgggcatatcataaaccattgttatttaaccttcttgatttattaactttgtatgaatatttttgctgtgtaatcagatcatatggtatggagcatggcagaggcggtcgagtaaggaaaaagaggagctgacctcaacccttaaatcaatgttaagcaacatatcaagcatggctgtgttaattgaacacagtttccttgaagcatacggtggagaatcaagagatggctcttcaactgcaaaattctcc

SEQ ID NO: 56303 - DNA, 355 bp, Glycine max
agctgatgtgcctaccatagcacagattgaagagttccattcgatgcagaggatgatgaatgctcctgattcaaatgataatattgatctactgttgaacattgatttgttgggtttacaaggagcaagtcaagcttttccaaacaagattgtttttgatgataagcttgtgttggctaacacacatgaattctttgatggaaattttccagtggattcttggttgccaatttttgtgaattgtctttatcctgtaagtcaattaccttcagaagctgtcgttgtaaatgtcacatgtggtactggacctggtggtttacccaccactgcttggattagttctgcagttaacaat

SEQ ID NO: 56304 - DNA, 239 bp, Glycine max
caaatcttgctgtttgtcctgcaggaacctttatgttatacctttccactatgtggaatgatgccgatgacggaatgaagctactaacagcagccatgaatgctcttcttacactgcctgtaactggaaacccggaatgtattccaagtgttcatagtgatcatgaagatattgcacccattgtgcactggagtgcattttatactcagaaatgagttatgtgtaatcattaatttatc

SEQ ID NO: 56305 - DNA, 391 bp, Glycine max
gatgtcgacagtgatgtacgtctagaagtcttttcatggaacatgcaacttgatagaggaggaaagcataacacggtaacaccacctaaatctgcctccaaagagaatcctgaaaaggttactagcatgaaattgcagaatgtatgagaagtctacccccagtgacaatcatttgcgtgatgctatatgtcaaattcttaatgaagttaacttcaatacggacacatttaccgacattctgaagagacttgccatacagtttgatatggatctcactccgataaacgcatctatgatatccatgattcatgaagagctgacaaaactagctgatgatgcagatgacgatgacagataacaggatcctgagaaagatgaagccccatctaca

SEQ ID NO: 56306 - DNA, 377 bp, Glycine max
tcggggaattccaattccacattttcaagaaataaggaggcaaaaatgttcacatatgaattggaattatttgttttcttaataggcctatcctgaaaccaaaggaaatgagatcggaattcctcggggaattccaattccacattttcaagaaataaggaggcaaaaatgttcatatatgaattggcattatttgttttcatagtacgcctatcctgaagccaaatgaaatgagatcggaattcctcggggaattccaattcgacattttcaagaaataaggaagcaaaaatgttcatatatgaattggaattacttgttttcttattatgcctatcctgaagccaaaggaaatgacattcgtattcctcgggggt

SEQ ID NO: 56307 - DNA, 237 bp, Glycine max
ctcatattttggagaatccgaaaaacacgttaaagaaagtcccattcccactaccgaagcaaattaagaagatgaagatgaagatgggcatgggcatgggcctgggccttttggtggtgatgatggcatgtgggtcggcgagtggtgcggatgatttggcaaccaagtgttcaacggtgattcagaaggtaataccgtgtttggatttcgccaaggggaaaggagtaacgcccaaaa

SEQ ID NO: 56308 - DNA, 89 bp, Glycine max
aaaaaaattagaccacagtttgtacagctaagagaaaaaaaaagataaaaatatttgagatttaataaataatgtaatggagagacatc

SEQ ID NO: 56309 - DNA, 283 bp, Glycine max
aaagcaagctcatcctagagttttaaaaatggcagcagcctcctccatggctctctcttccccatccttggctggcaaggccgtgaagctgggcccatcagcccccgaagtcgggagggtcagcatgaggaagaccgtcaccaagcaggcctcctccggaagcccatggtacggcccagaccgcttcaagtacttgggcccattctctggcgagcccccgtcctacctcactggcgagttcccaggtgactacggctgggacactgctggggcttcggccgac

SEQ ID NO: 56310 - DNA, 353 bp, Glycine max
gtccgaacttcttgaaggttaacacgtataggctactcaggcagcagagtgctatatataactacgttgaatacggagacattgacccaacgcctttgggctgttttcaagaaaaagtgattagatatctcaggtcttgataccacaacggaaaaacggtccttctcccatcacactctcgctaggacacacacaagtgaagccaggatcatcccactgactacttttggcaaggctagtccaagtgccgcacacatcaccaacgttctgcaacactcaggatcgcgcatcattcctgattggacaaaatctaatgtgtacagcccagacaacaccagcacgtcgagtgtttc

SEQ ID NO: 56311 - DNA, 302 bp, Glycine max
gtgtgcaatgcaatcatattcctcacatctacaaggattatgtagacccaacccataagtagatgaatattccagttgagtctgaagcacatgcacccactccatccatcaacgagatggagccatcaatactgataaatgaatttcctgaagccgatgcctgtcaaagactcactgagtcaaggatatggtatgtccagaacctaaggtcatggggttttgaatatcataactaaccatatacaaatgtatacatatctgtctcgagcagttaagtatcactgtgatggatattgtggttc

SEQ ID NO: 56312 - DNA, 300 bp, Glycine max
ctcgagccgattcggctcgacggaagcagacctcagtacacacctcagtcacgaatatgtccacattacctgaatctctgtctatgggcgacgtcttcgacggcagtagtgcaccaacaccttcttccactggccgctcattttggtcccttgaaatttcactctccttttgcaaagatggtgtgaaattgagggagacatttaccattattattattgttactgtgtcactatattagaaaatggagagtatattgcgtcatttttatgggttgagttccgattaatgtaacggtaatc

SEQ ID NO: 56313 - DNA, 383 bp, Glycine max
ctctctcacgcataactcaaacacaaaaaaatagagcttttgatgagaaaatacaccatccaaaatccatgatccaacaccatctactattattgttgttttgaggttgaaaaaacacaattgggtatatatagaactccaaaacctacgagaagaaaagaagacagtgatcaaaaaataaagtgaagcatggaaaaggacaacgagacgtatctgaagctcttttgggggcgttctaatcatgagaagtcatgtttgctgtcaaagaagggcaaaagcacggcacttagcaccaccgtgattttgctcgtttgctttgtaaccactttccttgttttgactatctggaatacgtccacatttgcagctctttccattccaat

SEQ ID NO: 56314 - DNA, 351 bp, Glycine max
ctctagccgctcgagccgattcggctctagtccaatatattccattctctctgtgtatttcccgacgtctcccttcaagatgcacatcttcgtcaaaaccctcaccggcaagaccatcacccttgaggtggcaagctctgacaccatccacaacgtcaagggcaagatccaggacaaggaatgaatccccccggaccatcaacgtctcattttcgccggaaagcaacttgaggacgggcgtacccttgctgactacaacattcagaaggagagtactcttcacctcgtcctccgtctccgtggtgggatgcagatcttcgctaagacactcatctgcaagaccatatccct

SEQ ID NO: 56315 - DNA, 424 bp, Glycine max
ggagagacaagcattgctgcatgcacgtctactctagctgatcccctccggggaattccaattcgcacattttcaagaaataaggaggcaaaaatgttcatatatgaattggcattatttgttttcttattaggcctatcctgaagccaaaggaaatgagatcggaattcctcggggaattccaattccacattttcaagaaataaggaggcacaaatgttcatatatgaattggcattatttgttttcctattaggcctatcctgaagccaaaggaaatgagatcggaattcctcggggaattccaattccacattttcaagaaataaggaggcaattatgttcatatatgaattggaattatttgttttcttattaagcctaccctgaagccaatggaaatgacattcgaattcctcagggg

SEQ ID NO: 56316 - DNA, 264 bp, Glycine max
cctaatttttcgatttcagttagcgtatcatcatcacttaaggagataatggtgtcaaacgtgggagaggcaatgaagaggaacaggcacatgcaaccatatgcacagaatcagcagcagcagctgcagaaacagcttcagtgcaacacacgaaaagctggcaagttcattacgagcagctccaatctggaagaggatggggcttcgtctgccagtctcttactaacttgcatatcttgttcaccttccgatgcttaacgcgca

SEQ ID NO: 56317 - DNA, 315 bp, Glycine max
tatggatctgatgccattcccttctcttttttgtcaataataccaaggatttttaatcttgctagagggatgaacaaggaaacacaaagggatgctgtgaccatcagatgagcaacaatgttgtaaatgtagagtatagctaactttattctgcaactgtatcccaagactcattatcctcaattgtattattacaaattacatactaggtgtcattgcaaagcaccaggcacagtactgacgcctgtgttgttgatattgatactttatttataaaaaaaaagtttcttggatttttttttcaaaaaaaatgag

SEQ ID NO: 56318 - DNA, 405 bp, Glycine max
atttgttctaagttcagatgctagtttacattctactgaagatacaagagggaaaccttactcaacatttgaggctgctgatgctgaaaaagaactagatatgcttttagattcatttggtgagaccaacattctagattcttcgggctttaagtccaacacctcgattccagtttcatcgggagtagcttctgtgtatcctcctcacatttcaaataaagatccagttccatccaaaactgcaccaattactgctagtctagatgatgtacttgatgacttgctggaaggaacatccacgttgacgaatccaaatgttttattacgaccgcaggaagaaaaacccgtccatcacagcatgcaatcttcttcaaattctggtagcaagtccaaagtggctgatga

SEQ ID NO: 56319 - DNA, 317 bp, Glycine max
agaagttgagttgagttgaagttgcgcctgaaataaaattgagtgagaatacacagacacaaaacctgaagcaaaccgtggatttggaaggcagtgagaaaaacacgccatccaagatatcacaaatcaagtatccgcatgccagtgacattgacgatcaagaccacagaatgagccatccacctaggaacgggactcaacgcgacttggtcgcagtccagtatattgggacacgcttctccggatcacagacacaactcagtgtccgtagcgacctcggtgcgcgtgaggaaaccttatccaactgtgctggtcaa

SEQ ID NO: 56320 - DNA, 348 bp, Glycine max
  unsure (1)..(348): unsure at all n locations
aattatgctggtttcaggtgcaattatgtgatcgacagtagatccttacagcaaacgcaacacaacatttgttgccgcagatgcttaaaaagtacaagactcagctttgtatattcatttggatgagactatgtagtcaatcactcatcgaggcattaaatcgtacatcctcaaccaccatgntttcaatcgcgagagctactcattcatgttgtagaccatcctgcacactatcagccttccgatgtacttccaccgtacatgcaccaatgttcgctagtctagatgatgtacattctgacatgctggaaagaacatgttcgtcaatgactacagatcttttaccat

SEQ ID NO: 56321 - DNA, 288 bp, Glycine max
gcaagtactgtacggcattgcaatggtcaccagtcaacagccaaggaacgctcactatagctcctacacctcacttcagggtgctgcgtgtccaaagcggcttggggaagaagacagtgacaatgtacactttacaaataggtggattgtctatatatggaatggtgacataataaatagtactactagttttgcttaaatcttgtgcctacattcattcagtgcaattacaattttaatacgttaaattaatgagttatagttcattgaattgttaaaaagaaactc

SEQ ID NO: 56322 - DNA, 386 bp, Glycine max
gcagacttaacaacagcacaaagcgggttactgtctgttcaagctaccatctctctctctctttcttagtgcctccttgccagaagttaaaatggcccaagaaactttcctattcacatctgaatcagtgaacgaggggcaccctgacaagctctgtgaccagatctccgatgctgtgctcgatgcatgcttggagcaggaccctgacagcaaggttgcctgtgaaacctgcaccaagaccaacatggtgatggttttcggagagatcacaaccaaggccaacgtggactatgagaagattgtgcgtgacacatgcaggaacattggttttgtctctgatgatgttggtcttgatgctgacaactgcaaggtcctcgtcaacattg

SEQ ID NO: 56323 - DNA, 208 bp, Glycine max
ctcttgtcgtcggtgttccaattggcaatgctcatgataaattcattatccatccacagacctcattacatggacatagtccatatccacggaagaccacaattggtagcacatcattacatagtgcagctctcgatggatggctcatggttagtttaatcttcacatgtaaagcaagcactcactttggtggttgacacacttcaag

SEQ ID NO: 56324 - DNA, 384 bp, Glycine max
cacacatgtatagatatatatatatatatatatatatttaactacttcaattcacttcatcatagttacgtatatgagcatctctatttctctcaattaccttaactagcattgtttcaattcacatataaaatcgtttcgtgctcaacctttgtttgtgtgagatatagagatggaagggttggattcgaataattctacccacaacagcatagccaagggcaaacgcactaagaggatgaggcttttgtccccttgcggtgtcatcgttgctgccatcaccaccaccaccaccgtcacctcgagcacttcgagtgctaattcgggtgcctcgtccaccacatcctacgagagcgatgaggaggacatggcgaattgtttgat

SEQ ID NO: 56325 - DNA, 117 bp, Glycine max
ctctttcttcttttttagctatccctctcttgaaaaatctagatctcgttcttccttgatctacgttacgcttttagtgaccggatctgtatggatctgaaccagatctacacgccg

SEQ ID NO: 56326 - DNA, 359 bp, Glycine max
  unsure (1)..(359): unsure at all n locations
gctagaacgaggtttgggttatccaaacctggtgacaatttttttgacatttttttaaaaaaataggatgcgtcttcctcaccttcattttcattgatctcttttagtttaacctatatcttctttcacctattcgaccctcttcaacctctttgacgttattcttcatcttttctctcgtaaaccttcacctttcatctccgaactatgacatgatacaattgcacaatagaatatagaacacagagcggttctttattgtgctcaatacaatacaaaaaaagttgtaagatcataanggatcacaaaaagggaacatggagaacataaaaatgcagcaattaaagcacttaaggtca

SEQ ID NO: 56327 - DNA, 376 bp, Glycine max
ctgaaattgaagatttaagaacagctctagatccaccaactgagcaagatgattctaataaaatgtgccatagaaatccatagtcaactctgtgatggggctgatcctgaaattgaagatttaagaacagctctagatccaccaactgagcaagatgattctaatacaatgtctctggcaattgatgatcattttgttgaagacaccatactgtacatgcttcaggatgctatatcaaagttagatgtcaaaataagactatgcattagagatagcttgttccggttggctcaaagtgcaatgcaaaggaattatgctaatgatacaagcagtacaaacaacactagcagagaagaacttaaagttgctgcaagag

SEQ ID NO: 56328 - DNA, 375 bp, Glycine max
tacatgttcccctgttaaatagattgttctccctcatgtgaacgaaacgagacattatgtcactgtgccaattctttgggttttttcatattatcagggcatttcatacatatatagtatttattataatttcagcaagtagaaatggatcattgaaatatacatgtgttacaattctaaatttccactgtaattcaattatcttgagccattataggatatcagactattcccggattaattttatttatttattttccctttccaggatattgattttgagttcaagatattatcacttattgcaggacaggaggaggtcaacagaaggcataattttatttttgtgtacataacccgtttttgttcctgctt

SEQ ID NO: 56329 - DNA, 320 bp, Glycine max
ctcatattcattaaaaaaacatgacgatgactcatcgtcatttaagcctcatgatgaatagcaggaagattttgaccaaaaccaagagtagttggatgtagattatagatcgagttcctcatctcataatgagcacacgaaatgcaggtgcctaatagcttcagaaagaggaaatgaggaccccacactaccgatgaaggcaccgtttttaactgtatatctgtataaagtaaaatctggtctttgaaaatgaatgtaatctattgtgtatttttgtgttttaatttgatataattaagagaataaaattacctattctt

SEQ ID NO: 56330 - DNA, 389 bp, Glycine max
gcagacttaacaacagcacaaagcgggttactgtctgttcaagctaccatctctctctctctttcttagtgcctccttgccagaagttaaaatggcccaagaaactttcctattcacatctgaatcagtgaacgaggggcaccctgacaagctctgtgaccagatctccgatgctgtgctcgatgcatgcttggagcaggaccctgacagcaaggttgcctgtgaaacctgcaccaagaccaacatggtgatggttttcggagagatcacaaccaaggccaacgtggactatgagaagattgtgcgtgacacatgcaggaacattggttttgtctctgatgatgttggtcttgatgctgacaactgcaaggtcctcgtcaacattgagc

SEQ ID NO: 56331 - DNA, 372 bp, Glycine max
  unsure (1)..(372): unsure at all n locations
tgctggtgatcgatggagtatcatcacgggacttgttggagacacccattgttaaacacctgagttttgccaaccaacattgtttgttttggtgggttctaccaagacttttcctttatgtatatttttgtagtgaagggagaaaaaaaaccgtttacatttgaagtaacttactaccttctcattggttatatatttatagtattgtaaatgtctttccttttttatttatgatgttgtgataattaacacctttgttccccccaagtcgctggcagaatcattaggggtataagcaaacatggattattttggccagttgactatagtttgttcatttgtangggtgcacgcaatggtatatattcttta

SEQ ID NO: 56332 - DNA, 385 bp, Glycine max
aacactcataacacaaagcacaaagcaaagctcatccttgagttaaaaaatggcagcagcttcttccatggctctctcatccccatccttggctggcaaggccgtgaagctgggcccatcagccccagaagtgggaagggtgagcatgaggaagaccgtcaccaagcaggtctcctcaggaagcccatggtacggcccagaccgagtcaagtacttgggcccattctctggcgagcccccgtcctacctaaccggtgagttcccaggcgactacggctgggacactgctgggctttccgcagacccagaaaccttcgccaagaaccgtgaactcgaagtgatccactccaggtgggccatgctcggagccttgggctgcgtcttc

SEQ ID NO: 56333 - DNA, 389 bp, Glycine max
cagcgtctcatctcgtgttcgaagacaactccagcgtccccttggttccggaagagaactggtacatcgaagagaactctgtgacccatcactaagccctgtcgtcgaagagaactctgtgacccatcactaagccctgttcaaggtgtgtcgtgccgcgatggtatcgtacgaattgacggacgaagggcagcttgcttgtggcttcaacatctgccaaccaaacccttagtcatctgggatttaaagggagggaccgttgttggttgtcgcatgtggaagagataccatttctactgcaagttccacaaaacgtttagcatctgaaaatgtttttgttgttcaggttctcgtatccttggtctgccgcttcctagttgcttaacctc

SEQ ID NO: 56334 - DNA, 291 bp, Glycine max
ctcgagccgagaaaccccttctttcgctccacatttcttcgctctcaaccgttcgactcgttcgatgccaccgagttgactcagatccctaagtaaaattttctgttggaatcctccgtgctgagtgcctatataatatggatcaagaagacaacaagatgggcactgtgaatcctcctgaaatgtcttctaatcctctgtcattaggaaaagatgagacaatgggcactgagaatcctctgtcatcaggaaaagatgatgtggtgggtaccgagaatcctccagaagtgt

SEQ ID NO: 56335 - DNA, 385 bp, Glycine max
aaaacactcataacacaaagcacaaagcaaagctcatccttgagttaaaaaatggcagcagcttcttccatggctctctcatccccatccttggctggcaaggccgtgaagctgggcccatcagccccagaagtgggaagggtgagcatgaggaagaccgtcaccaagcaggtctcctcaggaagcccatggtacggcccagaccgagtcaagtacttgggcccattctctggcgagcccccgtcctacctaaccggtgagttcccaggcgactacggctgggacactgctgggctttccgcagacccagaaaccttcgccaagaaccgtgaactcgaagtgatccactccaggtgggccatgctcggagccttgggctgcgtct

SEQ ID NO: 56336 - DNA, 92 bp, Glycine max
gggaagatggtgataattgtgattaggcaaaggatctgctgtaagcgttgagaagactgaaagtattgaaaaagaaagaattggtattgaag

SEQ ID NO: 56337 - DNA, 395 bp, Glycine max
ccataacacaaggcagaaagcaagctcatcctagagttttaaaaatggcagcagcctcctccatggctctctcttccccatccttggctggcaaggccgtgaagctgggcccatcagcccccgaagtcgggagggtcagcatgaggaagaccgtcaccaagcaggcctcctccggaagcccatggtacggcccagaccgcgtcaagtacttgggcccattctctggcgagcccccgtcctacctcactggcgagttcccaggtgactacggctgggacactgctgggctttcggctgacccagaaaccttcgccagaaaccgtgagctcgaagtgatccactccaggtgggccatgctcggggccttgggctgcgtcttccccgaactgttgtcc

SEQ ID NO: 56338 - DNA, 391 bp, Glycine max
caacaagaagtggtagaggaagatggttttttcttgctgcagctccaattgttagtctagtgggcattgttcttgtcttgtggttaggtaataacaactctcagattgaaggaagtagacatctgggcggtcactacttatccgggcaaaatcagcacaccattcatgcttattcctctccaaaccagagggagggtagaagcagagggtggtggtgcccattctaagtgcttcttgatttgtttatcaatatgcctcatgatggccacttgggatgaaatttttaactgactcatggcgtgccttttgtccttagtcctctctaattcaagaagacatgtacagattttagtttgtaatatggtatctgcttttgtttcctgtttccttt

SEQ ID NO: 56339 - DNA, 322 bp, Glycine max
aaaaaacagaaaaatacttttcttccaaaaaccttggttaaatatttacataccattaaaggatttcccaaagcggcaacatttaaaaggaaattcaaaccaaattgccccttaaggtggacaatataggattcaaagaaccgattataaaaagggaaacccaagatttaacaatctcaatgcccaacacacttcccagaaaagaccgttctcttttccatttcatccaaagactcctgccctgattcaagggacacataggatttcatctgttcttcttgcatcacatcatctacacaatatgacattccaacacacacca

SEQ ID NO: 56340 - DNA, 96 bp, Glycine max
atgactttctcaagccaaagtgcatgcatgcctcagtcatttcagatgtatttcattctgtgtattaagaaacagatatcagagtagaaaaagaaa

SEQ ID NO: 56341 - DNA, 123 bp, Glycine max
gcaaaattcttaaccttgtaatttacctgtacgcttaaatttaagttatttaaaaacacgtgattattataaaaaaacagttatttttttaatatatcaggtaacttttgtgtgttaaaaata

SEQ ID NO: 56342 - DNA, 193 bp, Glycine max
ggagctagtaggataagagaaaaatgttatagtgtcgacatcattatttcatattttgggggccaagatggaaaggaatgacagatctttgaaccctcataattttgtaagtagcatgtaaagcaaaattattacatgataccagtagaatgacatcatatgtaacaatattttgtgaaaaaaaaataaaaac

SEQ ID NO: 56343 - DNA, 308 bp, Glycine max
tgaaaattgctaactactacaagttttgtcgagaagtcagtgaaacaatgatggtatctttttgaggcatttaactttcattatagttgtttgatgaagaacttgaggaatgaccaaaggtagtcaatgacaattgacaccacacctgtggtggcaacctgaaattataaatggcccagaccaacctcaggtctgaattattaccttgtccaaaggatataatttggcgcacaaaaattgagacaccggtaaaaaaacctaaaacgctatacaaagatttctctaggacacatttacagtgttttcac

SEQ ID NO: 56344 - DNA, 117 bp, Glycine max
gttcaattgcctcaataatcttctcagcattgccgttgtaaattgatttgtatgtattattccaagaatagaactaattctctatttttggtttaaataatatttgtatttcctttc

SEQ ID NO: 56345 - DNA, 393 bp, Glycine max
agttccggttcttgggagttggtactgtacgcacattggcagtttcagttcttggtattgtgtggctgatttgattctttaacttccattgccacaagtaaataatattttacagcacttaattgatctgtgattctaatagtaactcaaaagatgagaattttggttgctttctctgctcaaactgcgaaacagtagcattaattactgaaatgagatagttgtgttcaatctagagtgaaatccagtgcttagcagatgtttgtggtgctctgcactgtgaccatgagatgaattctggatctaacacatcaacgtgtaatcctgctgctgctgcaaaacatacacatctatgtgaggtatgctttgttctgtctattcatttgctataat

SEQ ID NO: 56346 - DNA, 131 bp, Glycine max
ttttgagttaagtttatgtcacttgaacaatcttgtgtcaagcaatcaatatttgctattatcttcatcagcaactgtattcaatgaacttaagaaaagtataatattttgataatataattatccttatc

SEQ ID NO: 56347 - DNA, 160 bp, Glycine max
gtcatgtcatatcccttaacacctgttgagttagattcaccgtgggtatccaatttatatactgcataaaacatcgagtgaatgtgtagatagtttactttcaagcaagtgaagtgggtggacgtttgactattcaacacactaatttcggaattacatc

SEQ ID NO: 56348 - DNA, 379 bp, Glycine max
  unsure (1)..(379): unsure at all n locations
ttgtgtttgggccttccagcgaccatgaaaggatcaatttcttcccagggatttctgattctaccattacgtcagcaggtgtaagtgaaagagaaaggctagcatcaattcaacacgaaatctggagggttgccagagccattcgaagagctgcttctgcactcagaggagaattcacctaaaaaactaaatgtgaaaaaaaaagttaagttagaggagaatggagatggatgaaatcatctccgtttgagttacctgtaaatatagtagtgtttctttttaacacgagcagagttacctgcattttgaggtatataactgtacattaagttgtaaaaaaggagatgaatgaacatgccagcagtttgaagacacanna

SEQ ID NO: 56349 - DNA, 216 bp, Glycine max
gtttgttgtgagctataagctattttatcgtgaggagaatatgaagttgtttgttttctttgttgctgcagtagttttggtagcatggccatgccatggcgcaggctaccaaaggttccctctccgaatgaaaactggctatggtgagcgttcttcggaggtaaaatgcgcaagttttaggcttgctgtggaagcacacaacatccgaccctttaa

SEQ ID NO: 56350 - DNA, 224 bp, Glycine max
agaagagcactgacgtcgcatgcaagcgtacgtatagctcggaattaattccggaacggtatctgtctgagtaataactttcaatctacaatattaaagcataaatgtctctcaatgatatcataaatgtccctcagtgaggaatataagatctttcttaactaggtaatcaagactgagaagattgtgaagtatttttttaatcgaaggacagttagtgattc

SEQ ID NO: 56351 - DNA, 429 bp, Glycine max
gctagtttatcgtgaggagaatatgaagttgtttgttttctttgttgctgcagtagttttggtagcatggccatgccatggcgcaggctaccaaaggttccctctccgaatgaaaactggctatggtgagcgttcttcggaggtaaaatgcgcaagttttaggcttgctgtggaagcacacaacatccgagcctttaaaaccattcctgaagagtgcgttgaaccaacaaaggactacattaatggcgaacaatttagatcagactctaaaacagttaaccaacaagctttcttttatgctagtgaacgcgaagtccatcacaacgacatatttatattcggcatagataacaccgtactctctaatatcccatactatgaaaaacatggatatggggtggaggaatttaatggaaccttatatgatga

SEQ ID NO: 56352 - DNA, 212 bp, Glycine max
gtcgcttcgatcgggagccagatttatgagaagtgcttcactcgtaccacgtcgcatagtcccaggcaggagcgctcccatagaggacccggagaaaaaaaatacttataatactattcagaataagtattagtaatttttaacatggaaacagaacaaactaggcggccatccagccacaggattgaacagtagtgccacattagggaaga

SEQ ID NO: 56353 - DNA, 427 bp, Glycine max
gcaggtcacctatgatttttgtccttcgtagaaggacactttctcatagccacgatcgctctctctctctctctctctctcgcttgcgttgcatttccatttccagtttccacccatggctgctctcacttctctctctttctcagcagtgactcattgctcagaaagaaaagtaaccctttcctccactcgttttctcgcgtcctcttcagagggctttgggttccggagggaggtcgcggtagcagtaggttggggttcggggcttggaattcggcggcgaggagggatggtcaatgcatgtgtggtgcgacgggggtgcgtcccggggggtctgaagaagagttaaatttcctcaaggcatataagcgaccaatccctagtatctagagtacgggtacggggagggctaatagtggagcaacat

SEQ ID NO: 56354 - DNA, 51 bp, Glycine max
gattttcctgttaagttttgactcaagaataataaagactcttcgctatgg

SEQ ID NO: 56355 - DNA, 191 bp, Glycine max
ctcttcagccttttcatagttcataacacccctttgctaccaaaccaattcagtgatcgttttgctttgctctttcctgagtttgaagaccttagaaccatttcagtacacaacactttctgttccttaatgagatccagttcaatctcagcctctggctcatggagtgttaaggacaacaaggcctttga

SEQ ID NO: 56356 - DNA, 292 bp, Glycine max
tgatcactatatacacactactcttcagccttttcatatttcacaacaaccctttgccaccaaaccagatcactgatctttttgctttgctcattcctgagtttgaaaaccatagaaccacttcactacacaacacttactgtgccctacaggaatcgagttcaatcgcagactcaggctcatggagtgtgaacgacctgagagcctgtgagaatgctggacatgtctaggacaatgagacgcatgatcgtcggcacatgtgtagcgcacgctgttggtggcaagacgacac

SEQ ID NO: 56357 - DNA, 288 bp, Glycine max
caacaatctatcactaacgaacgtccctccattcaatatgtttgtgcagcaatgaaacccagtgttactatccattcatacgcattatcatcagtcaagtcgcttgacaaaggcctatggttctgcctatgtaacgcaccgctcagtttggcatgtttaactatcctgtcaagctcatgcttgtttaaacattggtttatttcacaaacggtggaccaattcatttttacagcttgtaaactgtcctttatgagatactagtttaccacgtttatggataattaattg

SEQ ID NO: 56358 - DNA, 452 bp, Glycine max
aatcaccgcagtctgctccaccccaaacactaattccctatcctaatccgctttctctcaaccatcatccgcagaggtaagtccacgacagaatctctcataaccgacgccaaaattgctgtgaataaaacaggggccgccatgaacacgaggaaaaccccccggtcagggaatgcagtgaaggatcagctcaccacacaaaggagttcaaataccttcccaaatggtacagacgcattcaggcatgtgttcaaccacgaacatcagtggatcagatcgtgatcagctataggacggttccacctgatcaaacaccctgttgcaattatttttgttttctcaaagtgtatgaggttccaacctgtagtttgagtgggaataggacttgttggactagggaccattttgttttgtttatatggtcccaccaaaccaaatttaaggtctctcct

SEQ ID NO: 56359 - DNA, 68 bp, Glycine max
atagaagacaaatgacgtcgcatgaacccttacttaacctcggaattcggttcaacaatggcggatcc

SEQ ID NO: 56360 - DNA, 114 bp, Glycine max
atcttccttgtcactgcccgtgtgtcgccgccatggccaccgtcaccacccaagcctccgccgcaattttccggccatgtacctcgaaagcgatgttttttaacgggtcttccg

SEQ ID NO: 56361 - DNA, 447 bp, Glycine max
ctcacttcaccgtccgcacgcacgcgcgttctcttcgttcgtgagccaaatttatgagaagtgcttcactcgtaccacgtccatatcccaaccaaacgctcccataaaggacccgaagaaaaaaaatacttataatactattcataataattattattaatttttaacataaaaacaaaacaaactaggcggccatccagccacaggattgaagagtagtaccacattagtgaagaccatttttcaattagtctcctctctctctctctctctctctctctctctctctctcactttggccttaacagaaccgaacacaacacaagagagataaagatacaatacaagaacaaactccgacatctctcgctttctccacgttcccctgtttttaatcggaaccaagcaaggcttatttatatagatccctcttttccgtgcttcact

SEQ ID NO: 56362 - DNA, 560 bp, Glycine max
gagatactgtaattcttactcttattcatcgatgtcctgcatgtcgtccaaccattagtttcagggttttctcatcgagaattctaccaatcgtctccgcttcacatccttatcgggtatagttcgcactgaatcaatcacgtgacatatttcagatgatcgcttgtcgagaggtccgtcatctcactcaatggtattcagttcctggaccatgctagagagacagtactgactacgttctacgttaccaatgtaggtaagattgccagttcagttagcggacacgcttagttccaggctaaacccctcaagatcatcagtagcggaggtatttatcgttggccgttgactacactattcatctccagtctcgactaattttgctaagcagttgatttggtgtggtatcacacagtacgacggcatttaataaatgggttcttgatgacgaggcattctcactgacaaagactcttaaaatgtacaaaaaatcgtttgctctcgggatcaggattgtattcttatcagaagaaccactgagtcctagggatgtaacagcc

SEQ ID NO: 56363 - DNA, 80 bp, Glycine max
gatttttgtaccatcatacttcaattcaatgcctacatccttttaaatcaatatatcaaaattacagcgtttatttaaaa

SEQ ID NO: 56364 - DNA, 105 bp, Glycine max
aacagagtcatgcctatgattcatactttgatgatggtatggctttctgctatgacatattcaacactcccaatcaatcggggggactgtcatagttccgagttt

SEQ ID NO: 56365 - DNA, 265 bp, Glycine max
cactataatcaatttgcaccctcttcatcgatctcgtttattctcatcatacttctgctaaggcgtctggatactctggtctcagggattccacaaccacaagcatctactcctcttccgacaacatacactgcccatacgactactactacaactacgattctatgttctacccgtagtcatatcgatacggattttcacataacatagatggtcggttcagtaacgtctcctactattgcttacaagcaactcgaacattctc

SEQ ID NO: 56366 - DNA, 399 bp, Glycine max
ctctcgatatattcttctctctcttcagcgacatcggttttcgccacaagcatcgggtatggcgtcaggatcctcgggtcgctgaacctccgccaccaaatgctgcgaattcgcttccgataagatacgctgcgcctacaacaaccacgctcagcgctaatccacgtcgaactgcaggcagaacgatccggacttgcacacatgaatgacagaaagaacattcatgtttcatagtatagcttattatccactcgaaaaatcttgaattccagatgtgattgcgactgtggagaagactgtcaaatgatatcctgaaaaccgaaagcagttcctaaacggaatcagttcaaggataagacttctggaaatagagtgttactaacgcgatgggtcaacagg

SEQ ID NO: 56367 - DNA, 157 bp, Glycine max
cgacacagtcgcaagatggataacgatgagccctacggcgatgcaatgatgataaaggcataacctactgcgtttcatcagggaagggactatttgggtatcaatacgtctggttcatctacctgtcctagaatattggacccttttctcccttgtc

SEQ ID NO: 56368 - DNA, 390 bp, Glycine max
gttgggcttgacacaatacactgtcatccacaatcatcttctgaggtcaacttcacaagactaactttccggcaagtgcatttgttggaaaagattgactctgtgggtctccgtcgctaccctgcaagatctcacaattgcactaagcattgatgtcgacgatttcacgatgattaacatccctttacagcgagctttcacagtaagtatgtcagtgagtacgtagattgtcaatctaacgttcatgctggaatagacatatgtacataatcatagtaggtcgaaagggtacaagaattgagaggattagctcgtcttgcgcaagactcacgaagatagcaactacaagcttgctttggatggacttcccccaaaggtgccaattccccc

SEQ ID NO: 56369 - DNA, 344 bp, Glycine max
agaacatagcttttaaatcgcagtacgcggcaataacagcataatatcaagccacaagctgtgatttaaaactttaacatttcgtgttgttgaggttaaagttggtaatcaccatggctacggcgagggccctttttctcttaggggctgctctcctctcttgcaccttgataggtgcatcttcgcgtggcgttgagaatcgccgtagcctcctccttccagttccaaataatggtcctgcaatttttgatgtgacgaaattcggtgctgtggcagatgaccagactgacaatattgatgcatttaaggctgcatggggagaagcatgcaaaaacagtactact

SEQ ID NO: 56370 - DNA, 120 bp, Glycine max
agtattctgcataagacaatggatttggtggtgatggacgattaaacacttacatgtaagcaaagatgaaaacaagataattgcataaatgtttttcttttatgaaaaaaaaaacaaaag

SEQ ID NO: 56371 - DNA, 300 bp, Glycine max
cgcgtgttacaatatggtgcgcggatacaccattatcgtgctgggactcagggataccaacgggtacttgtacggagcactggccaacatctgtttcgctgggactgcaatggagatccgctcgcagtctcccggtacgtcgtgcatcatagtctcgaggaagatgcgcgagatcatcgtaggttccaaacggatagggtgctcactgacataggcggtacagtccactgaatcagaatcagtaggtcccaaacaatgggtaccgtgaccaccatcatctgaagctttcagtagcagcag

SEQ ID NO: 56372 - DNA, 89 bp, Glycine max
agtgaatagaaggaatatgattccttcatctacctatgtatggttaagttatgtatttggggtgattgaatgttctcgtgtttgctgtt

SEQ ID NO: 56373 - DNA, 393 bp, Glycine max
cagaaagcaagctcatcctagagttttaaaaatggcagcagcctcctccatggctctctcttccccatccttggctggcaaggccgtgaagctgggcccatcagcccccgaagtcgggagggtcagcatgaggaagaccgtcaccaagcaggcctcctccggaagcccatggtacggcccagaccgcgtcaagtacttgggcccattctctggcgagcccccgtcctacctcactggcgagttcccaggtgactacggctgggacactgctgggctttcggccgacccagaaaccttcgccagaaaccgtgagctcgaagtgatccactccaggtgggccatgctcggggccttgggctgcgtcttccccgaactgttgtcccgcaaccgggt

SEQ ID NO: 56374 - DNA, 327 bp, Glycine max
aaggaccacaccatgttgcagcgagttatctgagaaatacacatctatgatgttcttgttagttgatgtggatgatctaactgtaagtactgaatctacagattactactatttcacatagttatttttgtatcaactagtattccccttcaatacaaacataaaacaattcaaatgtcaaacatattcaattcaacatgaactagaggacactatcacatattaaacattgtctgatgaccatgtagtttattgaacatgggtggtttcattgcatatgttccaggacttcagcacttcatgggacatcaaagccacaccaacttt

SEQ ID NO: 56375 - DNA, 346 bp, Glycine max
aatgtttcaacactggtcaaatcatcattaatgttgcttgagattatagaccttggtatcacataataattacatacactaatctttctccaatttcctgactattttggctgggaaatcatatacatgatgttgaatggttatggtgataggattagagatatgcatttggaaatgtaaattttgagatattgatttatctgatccatgtacattctacggattacgtcatgtcctgtatcttcatgtgcgacttggtgtaacatagtcatgatatgatactttagaaattattagcttttttttcgtcatcacagtttaatttttacgactttacttgaaattt

SEQ ID NO: 56376 - DNA, 82 bp, Glycine max
tcttgccattgatgatgtgccatctgagccttcaaaacccactacttgtattgaaaaatccgaaattgttgatcctcctgtg

SEQ ID NO: 56377 - DNA, 327 bp, Glycine max
gaagtcgcatgcacgcgtacgtaagccccgaaatccggtcgaaccgacaattggattgtaatggaaaagatgaaatgagagaattaataagtgtccaaaataataattaatgaaaattgttaagaaagaagaagaatgtgtccccgaagtcaacgggtccggtgaccggaaggggaaggttcaaccgattccaaacggtgcctcaacctccgaaacaaggctttaagggttccaacaaccaaaaaccttaaaaattcctcaacgaaaccgttcaaaaggttcgcccgctggtccggccccaacctttcaacaaacttaaccttcttc

SEQ ID NO: 56378 - DNA, 401 bp, Glycine max
  unsure (1)..(401): unsure at all n locations
attccattctctctgtgtatttccctacctctcccttcaagatgcagatcttcgtcaagaccctcaccggcaagaccatcacccttgaggtggaaagctctgacaccatcgacaacgtcaaggccaagatccaggacaaggaaggaatccccccggaccagcaacgtctcattttcgccggaaagcaacttgaggacggccgtacccttgctgactacaacattcagaaggagagtactcttcacctcgtcctccgtctccgtggtggcatgcagatcttcgttaagacactcaccggcaagaccataaccctagaggttgaaagctccgacaccatcgataacgtcaaggccaagatccaggacaagganggtatccccccggaccagcaacgtctcatc

SEQ ID NO: 56379 - DNA, 382 bp, Glycine max
cacaatttttttgcttatagaggagccttaaacacaagttttctgaggctaaggtacataaccagaatgaagtcactgattgtagtaacttttctttatttcctaaatttttgcatgtagtcctgctacctaccttctcacgagtttagagaatggatttaactgaagctcaaaatttttgttagctttgaacagatgatgtctcaccatttgcattaaattcccttcagagttgtggggttctaggggacttaactgcggattttgttgttcattattgttgtacttttctttatggacagaatattgttgtactgttgttcatatgtgtattttttctttaattctataaattctggggcttttgtacccttgttggatt

SEQ ID NO: 56380 - DNA, 284 bp, Glycine max
catcacccttccaattccaaacatccactaggttcaagcatgaccccctgaagctgctatgcttcacttggataaataaaagcaccaatctctactctgaatttggattctggcttcctgtcattaactatacacatattatgctacattatctgttggagatgatgttttcttttcaatgttccaattcttcttcgcctttgaattagtacgtgtatttctgtggcacttttgcgttactcgtgtaccttgagtcccattgctatacaacttattttatgatg

SEQ ID NO: 56381 - DNA, 194 bp, Glycine max
atttaacttctgttaaactttgcaaaaaaaaataaattattaaaagaagaatatagtagctatggaattgcactgctgctaaatattcacctgcacaagacaaaccagctgaattttttgtgttcatgtaatatctttatgcgtatttatcattttgtgacgatatcaattgaggaaattcagttgttgctatt

SEQ ID NO: 56382 - DNA, 385 bp, Glycine max
  unsure (1)..(385): unsure at all n locations
tcggggaattccaattccacattttcaagaaataaggaggcaaaaatgttcatatatgaattggaattatttgttttcttattaggcctatcctgaagccaaaggaaatgagatcggaattcctcggggaattccaattccacattttcaagaaataaggaggcaaaaatgttcatatatgaattggaattatttgttttcttattaggcctatcctgaagccaaaggaaatgagatcggaattcctcggggaattccaattccacattttcaagaaataaggaggcaaaaatgttcatatatgaattggaattatttgttttcttattaggcctatcctgaagccanaggaaatgagatcggaattcctcggnggtaccgagct

SEQ ID NO: 56383 - DNA, 371 bp, Glycine max
  unsure (1)..(371): unsure at all n locations
tgaattctccagagagaagaagaaacttaatcgatcatcacttcacttcactaatacatcatggcagacgagacccagaacaagtatgagagctctgaggttgaggtccaggatcgtggtgtttttgactttctcggtaagaaaaaggatgaagaagacaagcctcatcctcaggaggaggtcatcgccaccgagtttcaaaaagtcactgtctcagaccaaggagagaacaagcacagcctcttagaaaagcttcaccgatctgacagcagctctagctcttcangtgaggangaaggagaagatggagagaanaggaagaagaagaagaaagaaaagaaagggctgaaagagaagatcgaggagaaaat

SEQ ID NO: 56384 - DNA, 379 bp, Glycine max
  unsure (1)..(379): unsure at all n locations
ctcattacattttaactgttcanaatattattagggacgagtatgtgggtaaaccagctactatggaagttttgtatgcttaaaaatgttggacctgtttttgcanggtttgaatgtctatagcattttaccgcttgacacaagtgatggtccccgagatgctatgaacataattgtttggcacaatgcttttgaggctgaaactatttttggtgttccctttcatttacaccaactaggataatgttttgtatgtcatgtcgatttcggtttaagggattggtttctcatggtttttaatgataacatcttggccctgaatctggtcttaacagttctttcaaaaacattggatctgaatatctgataagctagcatg

SEQ ID NO: 56385 - DNA, 399 bp, Glycine max
  unsure (1)..(399): unsure at all n locations
tccataattaaggatcaaccatactaatgtgaattgggtcaaagtaatttaccattttcttttgccacttatattgaatggatgctgtagctctgatgccataggaaagggtaagtttagggaagggatgaagaagaactccaagcttgtggcttatgctaaaaagcatggccatggaaactggcgcacagttcctgccaaagctcttcttcgaaacaagatgcttcaagtctagtgcaacaagttacgtatatatgagtgccatatatataggaaagaataagtttagggaaggatgaagatgaactcaaagctcgtggcttatgttgaaaattaaagcatggccatggaaactctggcgttcagttcatgcttaaganggtcttcaaagatgtagaa

SEQ ID NO: 56386 - DNA, 315 bp, Glycine max
ctctcattctctagcttactgtgaatttctgttgcaataaatttcgctacagaaagataccctaagagagcttccacaatggtaagcgcagcaactgctcatagcttcgtcagcgtaagatgcactatgaacgccattggcttattcgtttcaccagcgcgaacattctatggaatcgtcacatagaaatcagtgtaagagttcaagacatatccttaaagatcaacggtgttgaaatgtgcatgttgggtattccatggaaagccttttgtgcacgcacagagtattttaattgtcattatcaacagcgttggg

SEQ ID NO: 56387 - DNA, 361 bp, Glycine max
atccacgcgtacgtaagctcggaattcggctcgaacaaaaaaataacgacctaaaatgccttcaagtgaatgaacaataagtttaagaccaaattaaagggggtttggtgccaatcccggaacaggggtcattggccaagaaattacggaccaattggggggtaggctttccaataaccaccaatttatgacataaacgcaccaaacctttacattccgtaaatggcatttggtacctatgtcattcttgctggcctctcattgggtcttcacggaaagtttagtcgagaagctttgaacttagtattcatcaagggactgctcagttggtttatgcaagctgcactacttaaggtgacac

SEQ ID NO: 56388 - DNA, 54 bp, Glycine max
gtggttgcaagggatattatataatatataaatatgttttgccgtatctattcc

SEQ ID NO: 56389 - DNA, 327 bp, Glycine max
ggagtcaatttacatttcaatcaatcctaattgattccctaatggatgctaagcttacacacactcaatcatcctctcataatgtgtctatgtggattccgggacatgctgcgattgatccactacctgataaacggagcactgagacctgctatcataggttgggtatgccttgttttcagcatcaatgtctttgctgaaagcccccatactgatatgttacatcacagatacgaggatcgtccactacatgaccatgaacttgtccacgataattttcaacaatgcagtcatgtcgatcatctagtgccttctccacagggatta

SEQ ID NO: 56390 - DNA, 382 bp, Glycine max
  unsure (1)..(382): unsure at all n locations
gcctgttccactgcaaacggcttgaacacgttattgttcttgcatagggcaatgtggtgatcatgaacaatgagtgcagcattgcaagtttttacacagccagcgccacagagacatgtggattgacatgccactggaccacacaagcacaatcgcagatggtgcacggcatttcaatgtcgatgcaggtagaggtacagaacgtctccgtgcgatgtcaggangattcacagcttcatattggacagcttgtctgagtgtagacgttggttgaacatcatatgcacacaacatctgatggcggataagtagcttgagacattcgaccaggtgtcatggatctcctactttcagcgagtgtcacactcttgtcagctaaata

SEQ ID NO: 56391 - DNA, 206 bp, Glycine max
ggccattcgcagcactgccctcgagctaagcgcggcgtagatatgcattgttgcagtctcggagaatgtcgcggatcaggctcaggatgaatcggaggtcaatacgctcgtgaacgacatgcacgggaataactactgcgacagctgattggaatcttacggcaggacaacttatcgcagtgaccacacgactactgattatgtcc

SEQ ID NO: 56392 - DNA, 370 bp, Glycine max
atcttcttcttttgttgtttgtgtgtttgttttttctctcacctgaaaatgtcttgctgctgtggtaactgtggttgcggaagcgcctgcaagtgcggcaacggctgcggaggctgcaagatgtacccagacttgagctacaccgagtcaaccaccaccgagaccttggtcatgggagtggcaccagttaaggctcaattcgagagtgctgaaatgggtgttcccgctgagaacgatggctgcaaatgtggagctaactgcacctgcaacccctgcacttgcaagtgaggtgttggagagctaaagcttcaagcagaaatggcccttagaaataatgataaaaactatatgtagtttcaaaacttcaaaa

SEQ ID NO: 56393 - DNA, 249 bp, Glycine max
ccaccctgtcactgtccatatctgcttctcatccaccctcagactcacacaccgttaaagtcacgcctcttgagactatctcacggaggccttgtggttggtatcagtatatttgaaagcaacatctggtaggccgctgcatactaatgagctcttcaagtctgtaattctgtccggaccggtgacagacacgtgtcatagctttcactattgtggatcatcataaacacgtcagtatgcataatcata

SEQ ID NO: 56394 - DNA, 218 bp, Glycine max
ggagaagggaaaaatgtcccaccaacaacatcatgaaaggtccttttataggaccagcactataaattttcctattagcttaactagattgaggtcaagaaagattttgtgcattgggaaaatctttatctgcctcactggtttcattttcattgcgcctttctagaaagtataatgtcagtcaatcaaataatgcaataattaatgccattgtctct

SEQ ID NO: 56395 - DNA, 61 bp, Glycine max
ctaaaaggttcatgacatgttcttgaaaaaccttggttggaattaaatgtagcactagctt

SEQ ID NO: 56396 - DNA, 326 bp, Glycine max
aaaaacttgataagaaagcaacacttgaggccatgcctttgaatgagattcttgcttaattaataatagttacatatgtaccatttgcatgcccccttggagtttttagtattttttaatggccatgaattaatagtagtccttacctttgtgcttttgtacatcatatgatttatcctttgtggggacatcatgtgttgtgttcagttgcctatgtcttaatatctagctggatcatctatgtataccttagatttgcctctattacaaatgaaaatacgtggcaatgtcattaatattggctgcatccaaaaaatttttaaatg

SEQ ID NO: 56397 - DNA, 159 bp, Glycine max
taacgtttgacgaagtgaacacattgcatggctaactcaaaggcaggccattactataaatgatattcgagtgtgatcaggaagcaaatctgcaggcttctgacaatcatgtcctacaagcggtttttcctaagagagatatatgccatcaactgaagg

SEQ ID NO: 56398 - DNA, 361 bp, Glycine max
gatcagtggcttccctcactgtcgcaaaccattgtgttcgcacgttgcatcgcactcactctctcacctaagcatcatcccatcacctcccacttccttccgcgccatcaaagtcacaattttttgggctcagtctatcgcactcatccctgtccatacttcccgcttcctcttcttcactcatgtgcgccattttcgccatcgtgcctaaaggttcagagccaccgaattttacgctaatcgcatagaacgggaagagtgttagcctcgccaacttcagcagtacaccagtctgtgtgtatttctaccctgctgatgagacccctggctgttccatacaggcttgcgctttcagggattc

SEQ ID NO: 56399 - DNA, 383 bp, Glycine max
cctaaattgtggtcagccctagatagagggggggtgttgaaagtcccacatgacggatagctgtgggcaaaaggagacatgctaaagtctcacatcaactaaaaatagtgtcgagataaactatataagtgagaaacaattctcaccttactagccggttttgtaggattgagttatactcataactcgctttctgacacttcatattaaatcacttcatatgttcatgtttcattgtctaaatcctttgtttcccacttttccttgttggaatttatgttttgcagatgggagatgtggcgaaggaccttgcagctgggactgttggaggggcagcacagttgatatgtggacacccattttgacacatcaaggtcaagctc

SEQ ID NO: 56400 - DNA, 195 bp, Glycine max
caaaagagatgaattacgcccgtctgacttccggcggaggatggcgtctccggcgactgtacacggcggttgagactctcgcgggttgggggccgctcgaccgaatgtccttcacgctggatttcacaggcgagtcccgtgcttttgctccatggctcagtggggcagcatgctttacgtcaccgttctgtaggt

SEQ ID NO: 56401 - DNA, 330 bp, Glycine max
  unsure (1)..(330): unsure at all n locations
ggctcgacatctacgcttcacgcaagtctcaataatttcagataacgattacacaccacattgtcctctggcctccgctaaacaatcgatctgtcaatttactggagtggaatcgttcggatcagcaccacttcatgcaggttatgttgcatcttcagtgatcatgatgacacgattaagttatagacggagtgttttgggatgagacttttgaataaaagacatattccagaagagatctatgcaagtgcatgtcttggatatggagatgcacagtccaatgttgatgtggttatgttatcaggttatggaangggcctcatatgacat

SEQ ID NO: 56402 - DNA, 375 bp, Glycine max
ctcgatcactcgcacgcgctcctatattcgctcctccaacgtcgctctctcgagcaaccacaacaccatcttcagcacatggtcagtttttttcattctaagtcgctctcttccttttttcggttatccgatttgttctcacgcagcaaggactaaatgcgcgaatttcgagttttttttttgttggattttgtggcaacggaatttctgagctgggttcgtaattgatgtgatcgtttaagttgaacggtgccttttggaattttctgaaaaagaataaatcgtggcgttttcagatctgatttcggtgtttcgattgagtttttcccgacatggtagcttaatatgataggtacattgcggatttcagtttac

SEQ ID NO: 56403 - DNA, 407 bp, Glycine max
taacttcacacctacaaagctgaattcaaccacactttccattagcccttccaatgatatcatcaagtctctatcagctagtgagattgaactatctgaggactacacttgtgtgatttcccatggccccaatcccaaaacaactcacatttttggggattgcattttggagactcattctaatgcatttaaaacccatttcaagaatgaagagaaggagcatggagtgaagccattgggtagcaacaagttagggagtcctaagccatatccctctagtgacttcttaagtttctgccaccattgcaacaagaaacttgaagaggggaaagacatttatatttatgggggtgaaaaggcattttgcagtttaacttgccgtgccatggagatcatgattgatgagg

SEQ ID NO: 56404 - DNA, 321 bp, Glycine max
gggagatcgagaccatgcggatggagatggaaatgaagcgcactgagatgattctagaatcgcaacagcggattgtcgaggcatttgccaaggccgtttcggaaaagaacaggaagaagaagcccaagactgtgccatcagcctctggttgaggttcagtggtcctttggcccagctgcacttcaacttctatcagtttccatgtacaattggctaaatctctttaatatgtaacgtttatcattatctattacttcatcagcttcgtactttctttgctcttttaaatctaacgctgttgtgacttcattttttctaccc

SEQ ID NO: 56405 - DNA, 83 bp, Glycine max
tgagaatatggctatcgattttaattaggagcaaaatgtatgttcttactccatttttaatgcaatttctttattttcttgcc

SEQ ID NO: 56406 - DNA, 179 bp, Glycine max
acgcctacgtaagatcggaattcggctccaagcattggcaaattgcggcattaaggtaggcaaatccaaagaacaaattaaaacaaccggttttcaaggcccaattgggccaaggccaatggagttccaataatccccagaattacaaaaggacttttgggaaccagtttccaattggg

SEQ ID NO: 56407 - DNA, 410 bp, Glycine max
ccccagttgtgacaaatgctgaagccagtactcctcaaaatgataatcaaagtagtaaacaagtggcaaccactgaagctacccctctaaatgatcaacactccaaacaagtggaacccattgaagccactccgcctctcaatgctcaaagcaacaaacatttgcctgctactgaagctggttctcctctgaatgatcaaaacagcaaagaagtggcatctactataggtgataacgctcaagatgataaccagaaaaaataaaaaactgcctaagagtgtgctcttgtttgttcctaatttgtttttgcaattgaggacaaaaatctttaccagtttaagtggtcgaaacatacatcagtggcttaaagtcatggtgctgtgcagtatacacattctcatttcaattgc

SEQ ID NO: 56408 - DNA, 264 bp, Glycine max
cacgcctacgttaaactccggaattcggctcaaggcgaaaaacccccttccatgaacaattttgccagaaggaatgccaaattcaaataaccaaatataaataaaacaaaagcatttgttttgcaataaaaaaggcgcagattaaggtgaaccatgtattaagtgttgtatatttattatatatataatccttaaaacttttatttttacaaaaaaaacatcaaaaataataaaaacaacaacaaactggcaacaaccaaaagt

SEQ ID NO: 56409 - DNA, 84 bp, Glycine max
tatgagcagcactccattgaggagttcccagtatacttgtcagggatccgtgccctcgacatcgccagcgacttgccctccaca

SEQ ID NO: 56410 - DNA, 379 bp, Glycine max
taaacacaatgaagaaaagagttttgctccatccatcttgagcttatcctgtgcctgacagtgctgctttgactcaataacctcatgaggaacttcaaggctgttggtcaagccatcactgctctcttcatcatctctctgagtgcatggtgttatggacaagtagaacttgacatggctccaatggagaaggcagagcgggatgctctatactccaccattcaaggctttgttggtgattggtggaatggctcagatctctatccagatccttgtggctggactcctattcagggggtctcttgtgatctgtttaatggattttggtatgttactgtcttgaacattggactaatccacgataattctctaagttgtg

SEQ ID NO: 56411 - DNA, 95 bp, Glycine max
gaatcactgaaaagaggtaaaatgtcaatctaaaatatatcttgtgctacaaaagttaaattctgatcctctaatgtatgaactctgttctcgtt

SEQ ID NO: 56412 - DNA, 312 bp, Glycine max
tgaatatgaatatgaatatggtgggtggtaatattgaccgatattaccctgctggtttccctttcattgctgagaatatggatggccagaatgctaaggctggttctgggactggccaggtttcagaatctgttgttttctctgccagcaatcctctcatggtgtcatcatctgtttcccctggtgtgttcacttctcagcagcagcatcaacagtttggactggtggatgagaaacctcacgttattaatccacagtttatgttgaaccagaaccaagttcagttctcagataatccctctttccttttgc

SEQ ID NO: 56413 - DNA, 324 bp, Glycine max
gtcctcctcagaaacgcagataaagagaagggatagggtgtgaggtcgtaccttccccgttaccacccaactcatacatgccttccttgtctatcactcctgagctgttccagtttaatttggcctaccaccatgcaccaatttaatgtattagtatgccacactatgttatcagatatatggtatggcttcaaataaactaactcaggaccttatcttaataccttgaccttagaacctctctcaatggggcttgttcaaatgtgcaagcactttggagaccatggcttccaagagagtacaacaattggggtatattatttt

SEQ ID NO: 56414 - DNA, 102 bp, Glycine max
gagaaatcatggaaaactggtgtcgctgaagctggactgggggcacgccgcaatcgtgttcaaatgcgggagaagacaagtttggactgagcccaatgaagt

SEQ ID NO: 56415 - DNA, 169 bp, Glycine max
agcaaggcaactggacagctctggcatttatgtggaaggagagcccgattgcagttttcttcccccgggcattgggtccgtggacagattcatcaggagtcctaaccttcaagtgggatgtggacaacgcaactgcagtttttgtatcggcgctccttggttttctctt

SEQ ID NO: 56416 - DNA, 274 bp, Glycine max
cgtatctcgggattctgcatcattatttccggacatctccattggatcaatcacccctattactggtgtaaatgcattactagcaattgtgtacgtggtttcacagtttgatggtcttggtgagcttagtataaaacgtgttgatgtaattgtcactgtagaggaatggggttactttctgatgtaggaaagatttggtataacatgatatctaatcagaatctgtacaaggccttactcagccatcaactgagtcggtcactgaactgggttc

SEQ ID NO: 56417 - DNA, 113 bp, Glycine max
ggaaacttcacctctccacaccacaccttactatcaacttacctctcgccctgattttcccagactctctttctcggtgagtagcacccatgaatatctttgtacctacatat

SEQ ID NO: 56418 - DNA, 194 bp, Glycine max
agcaattctctattctgaagatggatttgacagcaagtggcaggggaatttcatttatgaccttttgggtctttcgtcctcgcgattccgctatccctgttttgtcccatccttgctctattgcgtttcaaatgaacggatgggtgtatcccgatgggtaccagacggtgaacctctccagtggcaggctccct

SEQ ID NO: 56419 - DNA, 197 bp, Glycine max
gagattaaaaagcaatatgtcgtgtttgagtgctaaggtcgtgagtaatatgccattgggtccattgagcgccaagttatgcttagttgttaatctttgtaatagctaaaacaatcacctacagttgtttgctcatcgaagtggctagggacagtgtgttttagtgaatgtctatctttgctatgtctgggttggtt

SEQ ID NO: 56420 - DNA, 54 bp, Glycine max
cacgggtacgtaaactcggaaatcggctcgaggacaaatatgaagtcgttccaa

SEQ ID NO: 56421 - DNA, 90 bp, Glycine max
gacgtcggacccatgcgtacgtaaactcggacgtgagcaaaaggccagtcaatcgcaagcaaccgtaaaagggccgcgttgcgtgcgttt

SEQ ID NO: 56422 - DNA, 141 bp, Glycine max
cactattgtgtttagttttgtttcctttgtagtttttatttttccgttttattgttttgccccccgtttgtaattgcatgcttggaaccggatagagattgtgttgaaattttatcgcttacaattcgtttgagtttcctc

SEQ ID NO: 56423 - DNA, 334 bp, Glycine max
gaaaaactttctataattagagtctcactctcagactcgttgtatgtatggctacgctctcgctcactctcaactgttggagtaacgtggaacttgctcacagaagatttccgtcaaccttaacttccctcggccgaaggaattgtatagtcaaacgttcttttgccaggaggtcattgacaaatccaggaaaaatgttatacaaggaacttgacatttcttacctgataagtttgtgttcagaatgaaaacttggacacttctctaactcgagctgccgcgatttctaaccctttacctcccatgagtgctgtgcttcacgcttccagaaaac

SEQ ID NO: 56424 - DNA, 208 bp, Glycine max
gaatccgttgcatcattagaaaaaaaattgtcaagggtggtggtagatttggtaacggatttgaatctcggaatgaaaacataaaaaagcaagtgggttttggtatttaaataagactcatccgcaaatcaactcacaaatggcggccgccaaacaatgagctcgctcagccgggaattaattcccgaacggatagtgcaagcgtatc

SEQ ID NO: 56425 - DNA, 86 bp, Glycine max
aaacccataaatcctctcaccacataaacctcagttgagttgcactgcacgagaccaggtccatgaaattgtaagggtccctcacc

SEQ ID NO: 56426 - DNA, 201 bp, Glycine max
tcttaacatatagaacactaccctgaagatagtaaagaagccagtgctaggatttgttagtgaagcgggtggctcaaaccatgttgctcatgtctagtgtctctagcagttattccgtggatttgactaaagaccttttcctcgaagtgcagagtcaaagtgtaagggctaagttctctcaactctcaggcaacctatttc

SEQ ID NO: 56427 - DNA, 95 bp, Glycine max
aacctgacagcctccaaatccaatggcttcagagaagaaactttcgaacccaatgagggagataaaagtgcagaagctcgtcctcaatatctctg

SEQ ID NO: 56428 - DNA, 189 bp, Glycine max
ggaaagacaagctttttgggcacattgctcttttccaggggcatgcaccagccattcctttggatgacactaaaggggcaggggtacctgaggcacccattcatgatagcaaacagaacaacaattaggttcagagcatgaacttcacttttggatcaaatccttcaaatgcagagtaagttccaaatg

SEQ ID NO: 56429 - DNA, 332 bp, Glycine max
atccccaggaagcttgaatttaactatgtaataatgcattgaattagacatttaatgtattttagcccttaacatgtgttcattctacatttgtgatgaatattattgtagaatgaacacatgttaaaggccaaaatactattcatcacaaatgtagattttaagagtaggtaagtaattatatgtactaagaaaggaaaagtgtccaagcacttggaattcatagtcctacttacaaaatgccatcagtaagtttcactggtttactcccaagggtggtatcaaaatcttagaatagagtagaatagaccaatcgaattcacttttaaagt

SEQ ID NO: 56430 - DNA, 351 bp, Glycine max
tgagaaacatggcttccttaagctccttagtgctgctccttgcagctctaattctatcccctcaagttcttgcaaactatgagaatcccccagtgtacaagcctcccactgagaaaccaccagtttataagcccccagttgagaagcctcctgtttacaaacctccagttgaaaaccccccaatttataagcctccagtagagaagccaccagtgtacaagcccccagttgagaaacccccagtgtacaagcccccagttgacaaaccaccagtgtaaaagcccccagttgagacagcagcagtgtacaagcccccagttgatcaagccccagtttacacgcccccagttg

SEQ ID NO: 56431 - DNA, 141 bp, Glycine max
aaaacgtaaccatcgccggaacgatcccatttcccttgacttctcgacgtgaagatccttgtgtcacacagacccacttatcatgtcagagggaaatgtccggaaacgatagataatcgccatcatctgcgtttcaacctt

SEQ ID NO: 56432 - DNA, 370 bp, Glycine max
attcatattctggaaaaaggttaaatctgttttaaactcagcttatcttgaagcaattcatgttgaattcttgaacttcactgtttttttattgccttttcttactagtaataatttgatttttaaggaggctccaaaattactagtcattattcactaccattcaactacattttcctatcttctagaattgagcttgtatttcagagagagtaaatataatgattactgaattaacgatttcttgtttctgtttttctcttttagtaactaagagtcttaaatgttcattgtaatggaataatgtacggatatatgaagcaacttcattggagcacaatagaaagaaatctatccgaaattcagattt

SEQ ID NO: 56433 - DNA, 168 bp, Glycine max
atttggaaattctcacaggcatacactgcgaccccactctccctgtcgaccctatctcccactctcttgcccgcgacgctagctctcccattctcgctcgacgctggttccgcatgctccccttgctcgcggtggttcagatcaatctgtctcgcatgcactgtggtc

SEQ ID NO: 56434 - DNA, 382 bp, Glycine max
gatcgagataactagaaacagtgtgatgaaaatgaaggtccttgttttcttcgttgctacaattttggtagcatggcaatgccatgcgtacgatatgttccctctccgaatgaacactggctatggtgcccgtactccggaggtgaaatgcgcaagttggaggcttgctgtggaagcacacaacatctttggctttgagaccattcctgaagagtgcgttgaagcaacaaaggaatacatccatggcgaacaatatagatcagactccaaaacagttaaccaacaagcttacttttatgccagagacctcgaagtccatcccaaggacacatttgtgttcagtatagatggcaccgtactctctaatattccatactacaaa

SEQ ID NO: 56435 - DNA, 402 bp, Glycine max
ccaaacccttataatttacagcctcgagcttcctgataaatgcaagcctttgaaaaaggatacaatttgcagccaaaggcgtcatgatgcggaggttctggcaagttctacaggttcaaaggtagcaagtaatacatggattctgaattcaattgcagcctgcaaactgaaatgccttgctcaatgaaatgtgaaaattgagatcatttacatgcatatgatctcaaactgatgtttttcccttttcatcattaattatcatgttaaaaataatattggcaatattatgcaacaaaaaatttaggagtcataatatatactgtgaatgtatccccgatggagcgagaattgtgtttgaaaccgtcttatatcaatggtaaaatctcaatccttggcaatttt

SEQ ID NO: 56436 - DNA, 246 bp, Glycine max
aaacactcataacacaaagcacaaagcaaagctcatccttgagttaaaaaatggcagcagcttcttccatggctctctcatccccatccttggctggcaaggccgtgaagctgggcccatcagccccagaagtgggaagggtgagcatgaggaagaccgtcaccaagcaggtctcctcaggaagcccatggtacgggccagaccgagtcaagtacttggggccattctctggcgaacccccgttct

SEQ ID NO: 56437 - DNA, 386 bp, Glycine max
ggaactgggcttgcacttgttggagttttcttgtactcaagggcaaagaggatcaagtcagtccaaaagacaaattgaggctgcataacccttcaaaaaagaaaggaaacaggcagagggaaaagtaaatattgtagacacataacagccattgattttttttttctttctttttacattttgtgagggtatcactactccttgttaattggccatcctatgcgactaaatcttagtaaataatataggagtttaatagacatgtactgtaagtttaattttttttacaaatattcagaaatctttattgacatgactatagttattataaaatttaattaacttaatatatatatatatatatatatatatatatatatatatat

SEQ ID NO: 56438 - DNA, 306 bp, Glycine max
  unsure (1)..(306): unsure at all n locations
acccaatctatctgaaaattccaacaaaggatcgatggcaactcctagagccagtaaagctagcaaagtggtgatggnggctgaaaatccgttctggatacaaatgtgacaggtatagggagtagtaaatattgtagacacataacagccagtgattttttttttctttctttttacattttgtgagggtatcactactccttgttaattgggcatcctatgcgactaaatcttaataaataatatacgagtttaataggcatgtactgtgagtttaattttttttatcagtattcagagatcttt

SEQ ID NO: 56439 - DNA, 399 bp, Glycine max
  unsure (1)..(399): unsure at all n locations
ataacacaaggcagaaagcaagctcatcctagagttttaaaaatggcagcagcctcctccatggctctctcttccccatccttggctggcaaggccgtgaagctgggcccatcagcccccgaagtcgggagggtcagcatgaggaagaccgtcaccaagcaggcctcctccggaagcccatggtacggcccagaccgcgtcaagtacttgggcccattctctggcgagcccccgtcctacctcactggcgagttcccaggtgactacggctgggacactgctgggctttcggccgacccagaaaccttcgccagaaaccgtgagctcgaagtgatccactccaagtgggccatgctcggggccttgggctgcgtcttcnccgaactgttgtcncgcaac

SEQ ID NO: 56440 - DNA, 368 bp, Glycine max
  unsure (1)..(368): unsure at all n locations
caattgtttgattcagacagaaaaaaaatgttatcgtaacttatcttaattatctctcgattcatttcctctctctttggagagtttgctacttccccttccgaagctgcatggctttttctcatcccgctcatagctaatgccctcttctattatttcagtgtaacaatggatagcgatggaggctccaaattgactgggattaggcagattgtgaagataaaggaaatgctccagaagtggcaaagtgtgacattaggcccaaaaccttgcaattccctttctgatcatgtggctaatgatgatggaagcatatcaccattgatcaacanaagggtagtgaatgtgatatcggacaacgaagacag

SEQ ID NO: 56441 - DNA, 333 bp, Glycine max
aaaaaaatctataacaatgacctccaaataataaaatgttaggccgtttatattgttataagtattgtctggatttcaatataggggccaaagctttttttacaataaatttgagtcacaatcaaacgcatatgtaggacctgcacttaatagcaattctttgttgacttccaagtgtagcattggcttcggcacatctttatgtttggatgggtacgtgaatgtatagaaaaaaaaaaaatagagatgagagttagaggagaaatgcaccaagttgttgattcaaatgtttggtttcatgttaagaatcatgagaattgatttttatctcta

SEQ ID NO: 56442 - DNA, 386 bp, Glycine max
gagctctctctcactgacagagtgcaaggaaagggaaataagagagagagagaaacagaaaacttcagaagaagagcatcaattgctagctccaatatattaccacaccactgcaaaattttctgaagcagagatcattgtccattatcacagaaatgggtgaagtaagagttctctcttacacaaaaaattcttgtctatatttattcttaatcaatctgtctctttccttttttcgacaacttttgctttgaaaactaactacaccacgggactaggatcgtgttttttaaacttttatgatcttttgtatataatgtctgttttatgatgtatatggggggatcaatatcaagtaatgcatgccacacacacacacacacaca

SEQ ID NO: 56443 - DNA, 399 bp, Glycine max
aaaaaaatttacgctgataatataaaaccattaaacaatttggtttaagtggtactcaaaaccttattttgaatcaagaaatataccaaatataataatgaaatcatcaaaacttatttttaaccaaggtattataatgataataacttgagactaaatatgtattataatgatcgtcagtatttacgggaccaaaactaaaacttcaagggcgttgtttatagatatagacatacagcccatgagtaaacggggatccaaaatattaaaaatatagcttaatagtttttttttctatattatttccacaaatagtttgaaattttatcttgttttatgtcctttttatccaaataaatgtaataattagaaaaatctcttgggtattttttttgttac

SEQ ID NO: 56444 - DNA, 357 bp, Glycine max
ctgagaacatcaatgcatacaaagtgcgaatcagcatttgcagatgctgctcttacagcaattgaaattcagtaccggatcagtcaacatctacatctcgcgaatgaaactccatcaggtcatcaacatcgaacgcctcggcctccgcacaaagaagttatagatcgtgccaatgcactcctagctgttccacatgtgccagattttgaatcagttgagccatcagctccatctgcagtagcatcagtcaggccgatttgcctaacagatccaaaggacatggcttttggatgtggacatataactctgcaacgagtgtggcgtggtattagcgccatgccctatgtgccggaagga

SEQ ID NO: 56445 - DNA, 404 bp, Glycine max
ctcgagccgttcagttagaatcgacacaaaatatgaaccgctgattcctaaagaagagaagtcaactatagtatgaaaatttctcttatacatttgacaattttttcattttgctcatttgaaatgagtgtgtaaattttgctgacttaaacctgtttctcacctcaaaacttttcagcaaattttatgtctcaaccttaggtggaagaggattctggtactgattgtggtgtgggttgctttccttctagttcaagtcatcaagaatgatgtagaggcatgcagtccatggtattgggtgctttttggcttgcagtttccaattgcacttttggtgtttgggtatgaagcagtgaagttgtacaaggagcacaaaaggagaatgagcacaaggaacctagaat

SEQ ID NO: 56446 - DNA, 257 bp, Glycine max
aaggactaaagataacaatttgttgggcaaatttggactttcctgcattccccctggccccaaggggggtccccaaaataacgggtgccttgacaatgatgccaatgggaatttggacgtccccggcgaagattagaccaatgggcaaaaaaattagattaccaaccacaattgcaagggttaaccggccaagggaaaattccgaaaaaagggttaaaagggctgaaatttaaaactcaggggttaaagcacacaaa

SEQ ID NO: 56447 - DNA, 294 bp, Glycine max
gaaggccccccgcacggggcccaactttggtccaaacggaaggccaagttcggttgcgggcaattcaagaagacaaagggtggtccgggtggcctgtccgaatcaggggtcctggggcgccggaatccgcccagttccagtggatgaatgggtatgaagttgaactccattccgatgacgaagacatacacattttgctacatagattggttctcaataccaactcagtgcatgcatcctttgtccctctggaaatgacatcaagtttcataagatcgcatccccaataacaat

SEQ ID NO: 56448 - DNA, 321 bp, Glycine max
tacgtaaactcgagaatcggctccaaccgaaaccgggtccaacttgttccaaaatttaaaaagcaattggtttaatggttcaacccctgcgcaatcaataaccatgattgggaattgccctccctttaacaataaccttggggctggttcaagtcccaagtttaacctgcaagcgtccttttaacaatttcctccttttctgaataaagcctggtgtgctttggtaagtggtcaagtttcacataaattcggttgaccgcgtggataaaatagacgctgaacacactagtattcgtcgtgaatacatggacctaaagaaaa

SEQ ID NO: 56449 - DNA, 251 bp, Glycine max
gcatgaaacatgaagctttttttgttgacttttgtgaagtttgtgttttgaacctatgtagtctgctgttgtcctcacacaagaaggcataacatattttagcttggcatgcagatttatcaatcttgtgtgaattttttgccgtagcttttaaagttctaaccatccttgatgatgtagcatattgcttaagtgtgtattatgtgtcttaaggtagttgcgtaatgaagtagtgatttatttcgctccgc

SEQ ID NO: 56450 - DNA, 377 bp, Glycine max
catcaacttgttcggtggcagcagctgatcatgcaggaaactacagcacttggcaaagtactactgatttcgttgatttgaagggaacaaggtcttgtgctgagctggagactgataataacttgagttttcttgatgctgagaagccacagcagagtgaaagtggtagcatcttgatcaattccaccttacaaatgatgggttttggcaagtcatcttcaacttcatcgaattggaatcaatctttattagggagcggttttgattctgtgcttcaagaagaaacaggcataggtggtggcagccaagtttccaccgttgatgctttgaagccaatgaaccaagaattttccttggatcagcagagtctgaattct

SEQ ID NO: 56451 - DNA, 379 bp, Glycine max
atcttgtcaactgaattgacaaatttggccttttcaaaaactgataaaaaaaaaacttatatttatatattcaacttctcttttattcgatttttcttcctgtctctttctttattttccattgatcataactattaatttcacctatataccctaaaaaggatgtgtatggttaatattttcatatgttataacttttttaaacacaattaataatcagtcacttaaaacttcttcatttgatattatatgcattcatcccaacagaatgtgcatttcttaattctaggatgctaatttattgaaaaggtcattcttaaataaataaatgtattaaaagttttacataaccagtaatcaaaaataaactaaagacatg

SEQ ID NO: 56452 - DNA, 383 bp, Glycine max
tgaaaatttacacacatgcacacacacacacagaaattgagcgtgaaaaccactagcattttacagggctatatacttaaatagtgttgaattttacacttgtgttgttccctttagtactcgagacatttttcgttctgtcgtatccctttctacggctctatagtttcctctgaaccttttcttacttgccttcctaaagcttccttccaagcccttggcacatgatggaatgttcactattgaatcgagattctctgcatcgcaaaatatttagtttctattttagatcaccaaatttaattttagcttaccctacactttatattggatctgttggtgtcctatcatttgcagtatatctggattgtatcgataaacag

SEQ ID NO: 56453 - DNA, 168 bp, Glycine max
cacgattatgtttatcatggtgcttttgagagggagtggaatacggtgaaacatatcaggatttcctcttttctaacatgttgccaacaaagaaaaaaaggaatgggcaaacattacaaactattttctagaaagcacatgaatgccatgcgacaataatactgactc

SEQ ID NO: 56454 - DNA, 124 bp, Glycine max
gtactgttagagagtgtgatgatgagggtcatagtccgtagacaatttgttattctttgtatttatctttggaggtctaccggaaatatttttaatgaaaatttttaaaattgctttgattaac

SEQ ID NO: 56455 - DNA, 111 bp, Glycine max
gagagaataaggaataattttctattgatgatttagtgggttggttttgtaatgtatgtaatgaggaaaatgtagtggtattccatttatgtgttgttgtagttgttttgt

SEQ ID NO: 56456 - DNA, 295 bp, Glycine max
atggaattgggaagttggtcaatctggaatcacaaaggcttagttcatgtactagattagtggagttaacatatgcaatcacaagtcttattatactgaacttccttgtcatctctgagagcgtaagccttagtaagttaccagagatcatgggagagttgcgtactttagaaaatctcaattgcagaagttgcataagatgtgagtgatttgccatactcactcaaggagcttgagagcttatccactgtggtgtatgacgaagagagtgctgcattatggtaaccttgcaaaa

SEQ ID NO: 56457 - DNA, 300 bp, Glycine max
aaaaaagggaagtcctcagcacttcaactctgctgatctctctgctcgaaactacatcgttttacacatctcgtcaagtcaaggttacactcattgagggtcgtgcttcaatagaactgcatttcacgtttgcgcctctatgtgtcacaaacactgaatgcctctcattagctcatatgtgaaggtctgcacaggacagtcgtgatgccgatcttcaatctcctaatggtcaattttaagttagagattaggatgtccccagatgacataggggctctgatattgagtcgtgtcatttga

SEQ ID NO: 56458 - DNA, 385 bp, Glycine max
agtggcttcgtcgccttccctcgcaagaatgctaactcatctccgccgcacccccgtcgcatgcggtggtgccacctccaaacatttcctcgtcctcaagcaattcagctccgccgccgccgtcgccgtttcctctgtgtctgattccgacccaacacttccctcttcttccgaatcacagaattaagatgttggaatatcgagagaacaggttgcaaatggaaccattaaaattcagtagtgcttattcatcaaatgaggaattagattctctggaatttaggaaagtggtgtgcaaaggatattttgatgatatatcatcaatctatgtgggaccacgttcaagaagtatttcaggaatcactgaaaatggttactacatcat

SEQ ID NO: 56459 - DNA, 113 bp, Glycine max
ctacgtaaactccgaaattcggctcaaggggctccaattatggaattggccccttttgtgggtgcttatggggggtataagggtgatactggtaactggtcacggtctttgta

SEQ ID NO: 56460 - DNA, 338 bp, Glycine max
ggacactatcaaatttattttaaaatatagatttctggtgaactgtttttgaataacctttttcccccagattttgggtaatatattttagggtttctaatggaaggttcgttttctttttttatttatttgcaatgttaagactcaggcctgatggtagggttgtaattgtagtttgagttctgtattatttgttaactgcaataattaagtgtgaacctgttcttgtgattaaaatcacaatatggcgggcttaatgaaagcattaaaatgtcaaattttcttcagaaacttgattcagaggttcaaaagatggaaagtgtatggcttttttctgc

SEQ ID NO: 56461 - DNA, 384 bp, Glycine max
ggacatacagatggtcatatggcactgcttcatgcaaatactcattccttgatagtaggtgatcactgtgtgggtcagggaagtgccaccttggacataaaagctggtggaaatatgtctgaatacttccaaaccacgtacaaatttttggagctttcaccacatgctttaataccaatgcatgggagagttaatgtctggccaaagcagatgctgtgtggatacctaaagaatcgtaggagtagagaagctaatattgtgaaggcaattgaaggtggagcaaaatctttgtttgacattatagtatatgtatattctgatgttgaccgccgtgcctggattgctgcatcatcaaatgtgaggctccatgtggatcatctagcc

SEQ ID NO: 56462 - DNA, 403 bp, Glycine max
aatcattgtacccggatcgggcctgctctcacgtcagaggaacttgtgttgatcccgcgagttctcggttcgtgagaacatgctaactgagtcgacaatcacgattgattccatcatgtcaaatgacatgagtagtctgccgaccctctttctatgatagcgttcacggaatcctaatctgatgaaatcgcgacagcgccttgacacgtatggaggagttgtgacaacctgtggagaatcatggtgaggttcacgttgtagaaggtgttgatcattggatcaagatactagacgaatcaaggtaatatgttgattacaagtcatccatatcaacactacatatcacttctcttaagtcccacaatacgatggaggctaccttgggcaaaaaactctccacaaa

SEQ ID NO: 56463 - DNA, 296 bp, Glycine max
cgagtttccttatcactcaatctttgaacagccttcatactgtactctgatattaagtgtgctggcagcatggatgcaatatcacagtttggcagtgatatgcatcttcgatctacgcagaaaggattatctgtaaaacgtagacgacgagaggagttaccttgagtttgtgattattcagtttttttgatatgcttgacgcttcacacaaatacaggcctttgcagctttgtgaacgaatgcaagtttttattaaaattcaattttgaagatgcattgtgtactaataatatact

SEQ ID NO: 56464 - DNA, 190 bp, Glycine max
tcacagcgtaactcaggtcccattgtttggattgcccacccactaaactgaggaatcacactcaggaacggaatcacatcgcatctccaactgcttcgaactcagtttataggagtggatttgggcacagtcatcaatcttaggatctcgcggtgactgacttgtcttctacattggataacttggagga

SEQ ID NO: 56465 - DNA, 264 bp, Glycine max
acgcctacgtagactcgaaatccggtccaaaacaaacccaaaaattggttggggggctaaaaggtgattgttacaaaaggcaatatacctttgccggttggaatccccaggataaggaaaattaaaacaaaggccaaataatgggggacaaaatgggaattccacaaggcccctggcaagaaaaatttccaatttagccaacaatgaattgccggttttaacttaaggcaaccaaattcctccagaacaaacctgtcccttaaa

SEQ ID NO: 56466 - DNA, 370 bp, Glycine max
cagaatagatttctactctatgattggctgctgcgactctatgaagattttttatgcatattacttgttttacatagtgggacagtttctagcctctaatctaaacgttggataactctgcaccaacgcgttctaccaagggggatatacgaaaactcaaaagagtcagttttcttttttcctatttctgataaatgttttttgagctgacattatgatttacatttttgtttcttgtataaaattcccacgcttggaaaaggattgtaatctgtttggtcagtatttttttgttatttgatccagtgtcatggagagatcatgttggtccgttggactagtggctgtgtttttcctcacttccacattt

SEQ ID NO: 56467 - DNA, 416 bp, Glycine max
  unsure (1)..(416): unsure at all n locations
acgcgtacgtaaactcggaattcggttccagctcaagccgaatcggctcgaggatcttttcataatgactgttttttatttaaggggcttatctttggcattcggtaacttttggatgcctggtatgtggagatgccactgaatcatataatgacaagtacttctttctgggttgttatcacgttattttctcttgggcagctatggccactaagactgagggaaaagtatgtggtggtagggtgcaccttaaagttgtgacctcattgatgtggtgaattgaacaacggaattgagtacagactatcatgttgtttataaaagttcaattcctatttctatcccatttttaaaatgcacaattcccttagtagtgctaatatgttnatgatcatggcttaaacttttagaatatg

SEQ ID NO: 56468 - DNA, 212 bp, Glycine max
  unsure (1)..(212): unsure at all n locations
atgtgcaccttgctgcggctctctgcanatgtattgagctgtcatgtatgcagaaaataaattactttatttataagtggtatcttctattanggacataacatgatttgcatagcattatttgccataggaattaagaattttttgcaaataaccagctttatgatttggaaatgaagattgaaaagataattgcaattactttaaatttt

SEQ ID NO: 56469 - DNA, 382 bp, Glycine max
tgtcaaacgaaaagagaagtgtgaggtattaggcgcacagttgctttttgggtatgcagcgctataaggctacaagtgaagttgtgctgctaaaagacaggggaaggggagcccacaaattgtaacatctaaatggttcttctttctgcatttgaaaatagaaatgaaggagaaggacggactttcgggtatagaacccctgcaactggcaagtcatgtgatagaaggctcaaattgaatcagtaaaattggagtaacgcacgccactgaatgcatgggtgttattggttcctgtataaaaacattcgtttttaagttaaattattgtacagattacctattaacactgagcaggcttgatgaaaaagcatttagaataatt

SEQ ID NO: 56470 - DNA, 279 bp, Glycine max
gtgcacaccacactatcgaagatgaagtttgttcgatgcaagctaaatgcctatggcattggttgtctttcgggaccacacatcataactgttattgtaagttcacatgtactgtggaattagtgtgaaagcagcgtctacatgtctaagtacacggttctgacttgcacagctactattattgaggtattcagtaacacctggcagtgtcatggatgcatttttggctaattaattacccaaatcctgcaccaggtatagtatcctaattgccatggt

SEQ ID NO: 56471 - DNA, 383 bp, Glycine max
  unsure (1)..(383): unsure at all n locations
atggcactgatgtggatgaggatgaagatgatgatgatgatgaagatgatgatgatgaggaggatgaggatgaagatgcatttgatgtccatgctcatgctagtgctggagaacatgataatcccactattgaatttgacccagatgtattttcaagtgatgaagcatatgcaagagcattacaagaagctgaagagagggaaatggcagctagactattggcttttgctgggataaatgatcgggaagaagaggacatanaggagcatggtgctaattctcaagatgcttgggaggatgttgatccagatgaactttcatatgaggaattactggccttgggtgaagcagttggaactganagcagaggtctttcaactgat

SEQ ID NO: 56472 - DNA, 334 bp, Glycine max
gtgatttcagtgagtgatcggtgttcacttgatctcatcataatcgtcagcgtcaattgaagaagatgccgatcagaaacatcgccgtcggaaggcctgaagaggcgactcaccccgacacgttgaaggcggctttggctgagttcatctcaaccttcatcttcgtgttcgccggctcaggctccggcatcgcctacaacaagctcaccgacaacggcgctgccacccctgccggcctcatctccgcctccatcgcccatgcattcgccctcttcgtcgccgtctccgtcggcgccaacatctccgggcgggcacgtcaaccccgccgtcacct

SEQ ID NO: 56473 - DNA, 282 bp, Glycine max
gaaccatgcagagataattaaactataagctacctagcttcgaatcatcatcactcataattttaattaattttttcctaccatacagtactattagtattaattagttctttgtcttatgtatttttttttttttagatggaagaggatatcgagggatttatagtaggttagatacattgagctagatcgtttgacaccttattttgttaggtagttactttgaatttttttccttagttactttgatgattcctttgcagatggtcaagaattgctcgc

SEQ ID NO: 56474 - DNA, 360 bp, Glycine max
cttggttcacaaaattgtcaaaggcgtttctgtttctgcaattaatccttgactccggggaaagggaataaggataaaatggcgaagatatcatttgttttggtatttgcatttgtgttgttggctctgccattatgttcagttttgggccaagaagattggaaggatctcctggaccaaggagggttctctcaagattctttgaaaaaggcccagatggcttttggtgctgcttctgcccaagcagctgtcaatgattattttggaggtgacgactctcctcaggaagccgatgatggagaagcttcatccttggctgactttttagacgctgacgaaataacaaacaacaacccccat

SEQ ID NO: 56475 - DNA, 286 bp, Glycine max
gataactagaaacagtgtgatgaaaatgaaggtccttgttttcttcgttgctacaattttggtagcatggcaatgccatgcgtacgatatgttccctctccgaatgaacactggctatggtgcccgtactccggaggtgaaatgcgcaagttggaggcttgctgtggaagcacacaacatctttggctttgagaccattcctgaagagtgcgttaaagcaacaaaggaatacatccatggcgaacaatatagatcagactccagaacagttaaccaacaggcttac

SEQ ID NO: 56476 - DNA, 303 bp, Glycine max
gaagagaatggctcccaagggtttaacctttctggctgtgttaatatgcgtttcagcactgtcactgagtccttctgttgcgggggaagggcaaaataatggccttgttatgaacttctacaaggaatcatgccctcaggctgaagacatcatcacagaacaagtcaagcttctctacaagcgccacaagaacactgctttctcctggctcatgaacatcttccatgactgtgctgttcagagttgtgatgcttcactgttgctggactccacaagaaagagcttgtctgagaaggaaacaga

SEQ ID NO: 56477 - DNA, 330 bp, Glycine max
atttctaaggaagaggaagcagaaatcatagatcggacagagcaattaaaagtaggaaaaggtcctgcaaagaataagaatgcaaagccaccaagccccagaggcagtcatgcaagttcagttaaaaagaacaaagatggaaaagatgaagaggtagcatcttctgtttcaaatgggacttttgcttcagactctcacccaagacagcctattaaaaacagatcattgagtgacaagcaggctcgattgtccaagcaccctggaaagtctaacgcagcacattctgaagaatcaatggagaagactagaccacaattatcgaagaaagat

SEQ ID NO: 56478 - DNA, 91 bp, Glycine max
aaaaattaaaaaaaaaaaaataaaaaaaaaaatttaaataaatcaacaaaaataaaaataaataacaaaaaaaaaaaaaaaaaacaataac

SEQ ID NO: 56479 - DNA, 379 bp, Glycine max
ccgaaatcgccgaatacgactaaaatcaaaatcacaacactgatcctttcatttgcaaattgcaaatgcagaaaggaaaagcggattctatctccatcatcagctcccttcctgaagatgttgccctcaaaattgcttcgctacttcaggtgcgggatttgtgtgccttaggttgttgttcgatgttctggaaggaactctgcttctcagattgcatttgggagtctcttgtcagaaacagatggccctcactctcttccttccatttcccttcttcttcttccactcattctcccagtttcgaggtatccactgattctcctcttttggaggaacgccctatttgtttttcaaccttgtttaaacaaagtttggtact

SEQ ID NO: 56480 - DNA, 141 bp, Glycine max
atgcacgcctacgtaagctccggattccggttcaagatgaaattacacgtgcctgtttggcttgctgctacagttttggttgcaaacgaatgcaatggctcaaacaacgatatcttcactctcaagggataaactgggttt

SEQ ID NO: 56481 - DNA, 317 bp, Glycine max
cttaacatattcaggtatggaaggcagataggactgctgcaaggcaatacacaagtcattgacagtgtctagtagagtttctgctaatccagcttttgcaggaatagctgcaaaggttagataccagacctttctgccatatcatagttttgaaaaccagaccggtgaataatccggtcaaggcattgacgaattgacccacatgatcccgtccctgttaagaaaattgaaaattttagtatatatatatatatatacaaaattataaataaaatttagtgtaaacaagggttttaatcgtcgaaattttcaacatt

SEQ ID NO: 56482 - DNA, 246 bp, Glycine max
gtgtatttccctacctctcccttcaagatgcagatcttcgtcaagaccctcaccggcaagaccatcacccttgaggtggaaagctctgacaccatcgacaacgtcaaggccaagatccaggacatcgaaggaatccccccggaccagcaacgtctcattttcgccggaaagcaacttgaggacggccgtacccttgctgactacaacattcagaacgagagtagtcttcacctcgtcctccgtctc

SEQ ID NO: 56483 - DNA, 376 bp, Glycine max
aatttcctaagcccaatgagtcaaacgctgctccctgcacctgcaacctgttcctcctgcacgcgctgcacctgcactcccgtagcctgcaacctgttcctcctgcacgcgcctgcaactgcaaagtcgccagtcaaaccagcggtttgtgaaaccactgcttgaatcgccagtacacgtggcgagatccaccttacgcgaagtgcatgccatagcaatgcctaaagcacaaaggaagaagaaagcctcggtttgtggaattgagacatggagagcagcagtgggagagagagcacggggcgtgtgccactgtcacgggtggtcagatgtactgtcatggctatggtgttcccagagatgggaagaatttggctga

SEQ ID NO: 56484 - DNA, 180 bp, Glycine max
aaacaggcaactatgatccttttgtttaatatctagtctttaacctttaagctgttgtatgttgcacttcctcaatgtagtcttaagaacctctgaaaagaggtaaaatgacgagctaaaatttaacttttgtagcacaagatattctgatcctctaatgtatgaactctgttctcgttt

SEQ ID NO: 56485 - DNA, 300 bp, Glycine max
gtgacagacagacagtcagatcatccggctcacagaatcgtgtgatctgcaatatctccgaaggaggggaaatggtaaaggacatgcgctccatccagatcacgacaggcgcgctaatgatttgagtctgcttgagaaccatacagaccaatactgcaccagcagcatgaactcatcgcagtggacaggctagtatagtatcaggaaacagaatgtgtgacacagttactggctgtaataaagagataggttcattattgaagaatcactatgaagatggtattttataccgcgacgaat

SEQ ID NO: 56486 - DNA, 98 bp, Glycine max
gtggtatttaaaatgtatatatggcatcttacaagaaccattaggttctatcatttgtaaacattgatagaatagcattatcaccgttttttatgtgc

SEQ ID NO: 56487 - DNA, 506 bp, Glycine max
  unsure (1)..(506): unsure at all n locations
aagatactgtaattcttactcttattcaccgatttcccccaaatcttccatccaagaattttagggttttctcttccagatttcccccaatcttctccgcctctcttccttttcctttacatttctctctgattgaaacgccacacccatttgagaggatcttttttctagaggttcgttttttcgcgctaattttttccacttcttgtctaattattattgtttgtaattagtaagccccgctttatcattgagggaatgttgttagttctcgcgcggaaccaaaaagtttctggtttttctcttcctgattctggtggcgggggaacgagggttttccctttttcccccttccatttctgcgttgccctataatgatggcggtgtacttttgaaattggatgtggataatatttatatattggatgggttttcgatgattattgatgttctccatattgattgtanaagccaacccaaagtgtgttttcatggggttgttgtga

SEQ ID NO: 56488 - DNA, 104 bp, Glycine max
gcataattattaggctctactgaagttttgttgcctatgttcaaagactgggtagctgaaacaccgttaatctttttattttgtaatattaattttctaatatt

SEQ ID NO: 56489 - DNA, 292 bp, Glycine max
tgaaggtgaatgaacccaccatattgcaaatcaacttattgctagagcgtcaaaacggattgcacatgtcacttccgaaacactttcaatagtttcacgttcaacttggtctacgaaacggttttgtccatgttattgatgatgatgagcagttaatcatcagacttggattgattgtcataacaggcatgctacatttggcataggaggacatgtttaggcaacgacactactacgctgtggacgtacatgaactagcaagtgaaagcttttcgaccgagtgtgaacattt

SEQ ID NO: 56490 - DNA, 476 bp, Glycine max
  unsure (1)..(476): unsure at all n locations
tttgatttaatttcatcacgcgaccctcaatggacgaagaagcagagaccgagagagttccccatccacactctccaaaactagggtttcccctcccctccgccgccggtgacgcaaacctcctcacagccctcagcaccatcctcgtcgcgtcgattcaggacgccaaagaccgcatctcgcagatcgagtacgtcttctgctcccagctctaccctcacttaaaatccgacgacgcatcaaaacgctgctgcatcgaacagctcaaacgtgacgccgacgagaacgccaagcttctactacacgccgaggagaggcgaaacgccgcgtttttgaaatcggagagctgcgagggcgacaaggcgacgctgctggcgagaatcgccgagttggacgagacattgagattgaagacgcgggagattgaggaggcggagacgaagcggatcgangangaagggaagctactcgagcgc

SEQ ID NO: 56491 - DNA, 242 bp, Glycine max
ctgaatttgcgggttttggatttggacttggtcgtcaacacagtctaattaatatctttttgctccttcgcttaggaatcttcttcttcttcttcttgttcctgcaacgcactgaattcgatcaatcaatcgagcttcaattgcgtggtttcgatcagaggaaaatggccggtcagttatcgaagggagaggaattcgagaaagaggctgagaagaagctcagcggttggggcttgtttggg

SEQ ID NO: 56492 - DNA, 340 bp, Glycine max
gatcgagataactagaaacagtgtgatgaaaatgaaggtccttgttttcttcgttgctacaattttggtagcatggcaatgccatgcgtacgatatgttccctctccgaatgaacactggctatggtgcccgtactccggaggtgaaatgcgcaagttggaggcttgctgtggaagcacacaacatctttggctttgagaccattcctgaagagtgcgttgaagcagcaaaggaatacatccatggcgaacaatatagatcagactccaatacagttaaccaacaagcttacttttatgccaaagacctcgaaatccatcccaaggacacatttgtgttc

SEQ ID NO: 56493 - DNA, 231 bp, Glycine max
aacaaatcaaagccatggccacctccaacttctctattgttctctccgtctccctagccttctttttggtgctacttaccaaggcacactcgaccgataccgtttctttcaccttcaagaagttcagcccagtcgaaccaaacattatgctccaaagagatgctagtatttcagcctctagggtgttacacgtcagcagaagttggcagcaacggggtgcccacctcggga

SEQ ID NO: 56494 - DNA, 174 bp, Glycine max
atctagcctgtggtgtggccataacaagaagggagagaaaacaaaataatttaaggttgagatgaggaagtgtgagctctgtaacagtcccgcgaagttgttctgcgaatcagatcaagccagcctctgttggaaatgcgatgctaaggttcagaatgcgaacgtccacgtcac

SEQ ID NO: 56495 - DNA, 85 bp, Glycine max
ctgatatttgggtcctatgaggaagtccaaagtctaatttgacaaaacaataaatatatgcatgacaagttagtattcaacgata

SEQ ID NO: 56496 - DNA, 122 bp, Glycine max
tcggaattcgggtcgaggcagccacgggagaagatatatattattatcattacatagacacactttattcttcaaagttcagcaagggagtggcggggccagtggttgtcttctcattctca

SEQ ID NO: 56497 - DNA, 106 bp, Glycine max
cagatttaatttcagatagattagcccttggactgggtgcttctggccctctgaaacttgaagatgtgaaagagatatcggagatgtgccttaaagtggcatccag

SEQ ID NO: 56498 - DNA, 126 bp, Glycine max
ttcggctcgaagctgaaaaagctgctgcagatgcaaaggacagggaaacacgggaaagagctacagctgcaacggctgaagcagaagcatgagtgacaggaggacgtgcctccgtacaaagggctg

SEQ ID NO: 56499 - DNA, 234 bp, Glycine max
ctcgagccgcttggctgctggagagggggtcaacaatgttggggcacttctggtaacatgcaggagagcaaagcttgccggtgaattgaggctcaaagaagttggaagtgatcacatggattgttgtgtggaagagaaagtcttacaagtcgagcaaaacctatgatggatacaacaatgggcaatctagggaagaggcccgtagcatataaaaatggagtgaacaaatttggc

SEQ ID NO: 56500 - DNA, 199 bp, Glycine max
agattgtactcctgaccatttgaatcaaaggttagcagaactacgtattggagatagccatcaagtgaagtcaagccagaggcctgttgtttccagaacttctagcattgttaagactccagaagtcgcttccgcagaggtcgcagcgacgaggaggagatcaatgagatcgtcagggaattgtgagacgcttcggcgt

SEQ ID NO: 56501 - DNA, 251 bp, Glycine max
  unsure (1)..(251): unsure at all n locations
aaaataaaataaggattttttttgctgctaattttctcccatcagatcactgcataatcataatgctgttcctcttatatcatctttgttgatccatttttttttctctctctttctcaaangtcctgtgtcagggactctgaagagaggagtcacaaacatcaagtacttactagttagcacaaaattcacagaactcgtgccggggttcagagggactgaaactttctcctttagaagttgctggggta

SEQ ID NO: 56502 - DNA, 118 bp, Glycine max
cggctcgaacttgggtgctggtggtgcagaaagggccattttctgaatgcgctctatctatctcttccgatctggctactaaccctagcccgcgtcgagccgtggcttcctcggcctc

SEQ ID NO: 56503 - DNA, 392 bp, Glycine max
ctctaggagtatgtttacttagtcactgttacagatacaaacctgctttctcagtaacagtgactaaataaacatactcctagagctggatgggagaagcacgtttgtatctgtaaattagaagggggatggcggggggatcttggttacaacagcaattgttccatgcaagtgtaaagaaacatcaagagtaatgtacaacaaataccacaacagggagggagaattcacgggatgttctgcctgttatttagccaaagatatagttcattttttaccattgaatatgtcgagtcacaaaatattactagaaaattgtatcatgtctttatatgatttttcaattggcaatgccaaaggaatgagaagtgtccctttgagttcatgtttgc

SEQ ID NO: 56504 - DNA, 403 bp, Glycine max
ctcgagccgctcgagccgattcggctcgagctcgcgtccctcatcacttcttcaattcgtaactctttttttggttcgatatgagtcaactcggtgtggcgttgcaggaatcgctgcggactcagagggaggccaggagtaccattcttgggttgttgagggagcaaatggacggtgtagatggtgggacccgcaggaggcgaagcttgaaggagcggttcggattcatcggcatgggatgttgtggggcctcctggggattccgttctgacgcgttaagtgtcaaccagggagagcaagaacaacaacaggaaacggattccggtcgagtagcggcgccagaatgtgtgggccccgcgggttcgggttcgggtatgaatcttgcggcagcgctggcggcgga

SEQ ID NO: 56505 - DNA, 401 bp, Glycine max
ctcttttttcagtttctgctaaaagagtacatcagcttcaggactcgttgaacaggatgatatcttccatgtcaagtcaagttgccgagctgaaggcgatcttgagtacttcatcaagattgagttcaacttttcgacctattgctagggttgacattgcttccagtaactctgatacttcatctacagactctgatttcacatttccggctcctgtttcaaatactgaacttttatcttccccagagtcaaattctttccaactagtagttcaggatgtcactgcaggggatggatcgggatctgaaagtggaaaggagggttcatttgatgatttcttctagtaaaatttgtacttcttagcgggcttaaatttacgtgtcctctgtctctggggaaac

SEQ ID NO: 56506 - DNA, 272 bp, Glycine max
gtcaatcatgcatctatggcatgacagtacattttcctcgttgcagttgagatatctctatcacctatatatatctaacttctgtggttatgcacactcttgactctcgtagaattactgtagcagtcgcggatgttgtcagctcaggacaaatttgtactttaccggatggcacacctaccgaaaaccagcttcagtgatcgataccactttaggcttaattccctagtgctgagacgcgtggtcccactccaaaagacgactgcaaatgt

SEQ ID NO: 56507 - DNA, 61 bp, Glycine max
acttaatgtacaatacatatcactgagatattaaggcatttggctttgttccttggaactc

SEQ ID NO: 56508 - DNA, 269 bp, Glycine max
ctcggtcagagtcttctcacagagaaaacaggaaagcgagaaccttcttaccccttcacctcttctctctttcttgggcctctcttttcctatttctttctttctctcacgtttcgttccatcttccctcacgcctcaccccacgtcacccaccttcttctttctctctttctccccttttccctttagtcttcgtttgttcttcccttttgggttcacttgtttctctttgatctcatggagaagatgaaaggggttgtctccttgga

SEQ ID NO: 56509 - DNA, 202 bp, Glycine max
atttctgcgtcaccattttcagatggcctcagaagtttgcaacgctgcttccataaccgcgacgtcctctctctcggcttccagcgcctcgaaaggacctgcggatgcagttgctacggtagtgtccttgaacttcaccatgcctcatgtccacagtctcaacggttccggcaatggctccgcgtcagcatcagcagcacca

SEQ ID NO: 56510 - DNA, 346 bp, Glycine max
gtgatttcagtgagtgatcggtgttcacttgatctcatcataatcgtcagcgtcaattgaagaagatgccgatcagaaacatcgccgtcggaaggcctgaagaggcgactcaccccgacacgttgaaggcggctttggctgagttcatctcaaccttcatcttcgtgttcgccggctcaggctccggcatcgcctacaacaagctcaccgacaacggcgctgccacccctgccggcctcatctccgcctccatcgcccatgcattcgccctcttcgtcgccgtctccgtcggcgccaagatctccggcggccacgtcaaccccgccgtcaccttcggcgccttcgt

SEQ ID NO: 56511 - DNA, 119 bp, Glycine max
tacaaagaaaattcaatggtatacgtactttagaacatcatatataatactcaaagtacgtataccattgaatattatatatgatgttctaaagtgattttttttgcatgtatattttt

SEQ ID NO: 56512 - DNA, 371 bp, Glycine max
ataagacaaagcacaaagcaaagctcatccttgagttaaaaaatggcagcagcttcttccatggctctctcatccccatccttggctggcaaggccgtgaagctgggcccatcagccccagaagtgggaagggtgagcatgaggaagaccgtcaccaagcaggtctcctcaggaagcccatggtacggcccagaccgagtcaagtacttgggcccattctctggcgagcccccgtcctacctaaccggtgagttcccaggcgactacggctgggacactgctgggctttccgcagacccagaaaccttcgccaagaaccgtgaactcgaagtgatccactccacgtgggccatgctcggagccttgggctg

SEQ ID NO: 56513 - DNA, 197 bp, Glycine max
cgcgaacattagtaatcagattgttatttacgatgtttttccttcccttacctttttctgaccgacatgtattacaagcacttcagatcttaaaaagtaacaaattggttacaacggtttttgcagaataggagcttgtaacgtaagccatcgaattgattgacttgcaatggatgactatttcatttaattttaca

SEQ ID NO: 56514 - DNA, 413 bp, Glycine max
caaattagttcattctctttgcgcagttccctacctctcctttcaagatgcagatcttcgtcaagaccctcaccggaaagaccatcacccttgaggtggaaagctctgacaccatcgacaacgtcaaggccaagatccaggacaaggaaggaattcccccggatcagcaacgtctcatcttcgccggaaagcagctcgaggacggccgtaccctcgccgactacaacatccagaaggagtcaacccttcaccttgtccttcgtctccgtggtggcatgcagatcttcgtcaagactctcactggcaaaaccataaccctagaggtcgaaagctctgacaccattgacaacgtcaaggccaagattcaggacaaggaaggaaatcccccaagacaagaaaggtctcatcttcgc

SEQ ID NO: 56515 - DNA, 414 bp, Glycine max
  unsure (1)..(414): unsure at all n locations
gtttgttgatcgagataactagaaacagtgtgatgaaaatgaaggtccttgttttcttcgttgctacaattttggtagcatggcaatgccatgcgtacgatatgttccctctccgaatgaacactggctatggtgcccgtactccggaggtgaaatgcgcaagttggaggcttgctgtggaagcacacaacatctttggctttgagaccattcctgaagagtgcgttgaagcaacaaaggaatacatccatggcgaacaatatagatcagactccaaaacagttaaccaacaagcttacttttatgccagagacctcgaagtccatcccaaggacacatttgtgttcagtatagatggcaccgtactctctaatattcatactacanaaaacatggatatggggtggagaaatt

SEQ ID NO: 56516 - DNA, 156 bp, Glycine max
cgagataactagaaacagtgtgatgaaaatgaaggtccttgttttcgtcggtgctacaattttggtagcatggcaatgccatgcgtacgatatgttcgctctccgactgcacactggctatcgtgctcgtactccggaggtgaaatgcgcaagttg

SEQ ID NO: 56517 - DNA, 378 bp, Glycine max
caaagcagaaagcaaagctcatccttgagttaaaaaatggcagcagcttcttccatggctctctcatccccatccttggctggcaaggccgtgaagctgggcccatcagccccagaagtgggaagggtgagcatgaggaagaccgtcaccaagcaggtctcctcaggaagcccatggtacggcccagaccgagtcaagtacttgggcccattctctggcgagcccccgtcctacctaaccggtgagttcccaggcgactacggctgggacactgctgggctttccgcagacccagaaaccttcgccaagaaccgtgaactcgaagtgatccactccaggtgggccatgctcggagccttgggctgcgttctccccgaa

SEQ ID NO: 56518 - DNA, 375 bp, Glycine max
aaaacactcataacacaaagcacaaagcaaagctcatccttgagttaaaaaatggcagcagcttcttccatggctctctcatccccatccttggctggcaaggccgtgaagctgggcccatcagccccagaagtgggaagggtgagcatgaggaagaccgtcaccaagcaggtctcctcaggaagcccatggtacggcccagaccgagtcaagtacttgggcccattctctggcgagcccccgtcctacctaaccggtgagttcccaggcgactacggctgggacactgctgggctttccgcagacccagaaaccttcgccaagaaccgtgaactcgaagtgatccactccaggtgggccatgctcggagccttg

SEQ ID NO: 56519 - DNA, 124 bp, Glycine max
gccccatcagagggtaactacaatttgacttgctattgtttgtgtgattcttggatttctgttcgtatcctagttcagctgatatcgtgattaaattgtcatatcatccgaaaatttttatggt

SEQ ID NO: 56520 - DNA, 382 bp, Glycine max
gtttgttgatcgagataactagaaacagtgtgatgaaaatgaaggtccttgttttcttcgttgctacaattttggtagcatggcaatgccatgcgtacgatatgttccctctccgaatgaacactggctatggtgcccgtactccggaggtgaaatgcgcaagttggaggcttgctgtggaagcacacaacatctttggctttgagaccattcctgaagagtgcgttgaagcaacaaaggaatacatccatggcgaacaatatagatcagactccaaaacagttaaccaacaagcttacttttatgccagagacctcgaagtccatcccaaggacacatttgtgttcagtatagatggcaccgtactctctaatattccata

SEQ ID NO: 56521 - DNA, 376 bp, Glycine max
cgagataactagaaacagtgtgatgaaaatgaaggtccttgttttcttcgttgctacaattttggtagcatggcaatgccatgcgtacgatatgttccctctccgaatgaacactggctatggtgcccgtactccggaggtgaaatgcgcaagttggaggcttgctgtggaagcacacaacatctttggctttgagaccattcctgaagagtgcgttgaagcaacaaaggaatacatccatggcgaacaatatagatcagactccaaaacagttaaccaacaagcttacttttatgccagagacctcgaagtccatcccaaggacacatttgtgttcagtatacatggcaccgtactctctaatattccatactac

SEQ ID NO: 56522 - DNA, 326 bp, Glycine max
gccaatttcaagatgaaaagcttgcagcgagaatttgtcagaatggttgaatctgggttccgtccggatattacgacctttaatattcgtgctctggccttctcaaggatggctttgttctgggacctccaccttagcattgaacatatggaacatgagaatgtcattcctgatctagtgacttttgggtgtgtagttgatgcatacttggatagaatgcttggaagaaacttggattttgctctaaacatcatgaacttggatgattctccgcgattattaacagattcttttgtgtatcaggccttatgtaaatgggactttca

SEQ ID NO: 56523 - DNA, 71 bp, Glycine max
cgcaagcaaaaagacagaatcccaggcgaggagaaagatggaggggaaggagcacgatctgtcattgggag

SEQ ID NO: 56524 - DNA, 87 bp, Glycine max
caacaatacacacaactaacatataattaaatatcacatacttttgttgctttcattttaatcatcacgaacgaagagatgtatttg

SEQ ID NO: 56525 - DNA, 240 bp, Glycine max
gtttgaatcgctacctctccacacagctaatgcatgtccttataaaatggcggccgcagtgaaacacttccgtctgtttcttcaccagtggtctcactgtagctctcgtcaccgcatcatgtgaagtccgaatgagatgctacggatgctggcagtgattttcatcgacctcaaccaggggtacccagggaaccattgatcacgacacagaaatcgcagagtgtcaatgaagcacaggtt

SEQ ID NO: 56526 - DNA, 241 bp, Glycine max
gctgccaccacagccatgacaacaacggcatgaaaggcagtgacattggtattgtcatacttgatctttaccatacgattctcagactatcatggcagtggaccactcgtcatagctacggggatcatactgatgacgctacatgactgctggttgtgtttttctgcgacctcgacgtgctgtacccctggtaccatgaacctcgatgcagcaaccccagagtgtcaatggttcgctggtt

SEQ ID NO: 56527 - DNA, 114 bp, Glycine max
cgaggagcgcttccgtagcttcaagaagaacttgctccgcgccaagtcagaccagaaattggatccctccgccgtccacggcgtcagcaggttctccgatcacaggccggcgga

SEQ ID NO: 56528 - DNA, 268 bp, Glycine max
ctcgagccgagaagaacaagtcgttgagaaggaagaaggagacgcaaatggcttcctcaatgatcgcttccccagctgtgaccagtgtcaagcgtgccggtgccggcatggttgctccattcagtggcctcaagtccatggctggcttccccaccagaaagaccacgactgacattagctccagtgccagcaacggtggaagagtgcaatgcatgcaagtgtggccgccagttggcaagacgaactttgagacgccgtcctacgctgc

SEQ ID NO: 56529 - DNA, 202 bp, Glycine max
tcgagaacttattctctttctcactccaaccacagcattttcagcaccaccaataacaagaaaatcaatataataaattttcttctctgtttcttttttttttttcgcttccgacgacgttaagaacgaatccgtcgtgactaattctttcgatcttgaagatgaagcagctgatccgccggctgtcgcgcgtggccgaatc

SEQ ID NO: 56530 - DNA, 280 bp, Glycine max
ggaccagctgtgatcttcaacaccgacaaagcctgggacgaccaatggacttactgggttggaccgtgtgttggagctgcggtggctgcatgccatcatcattacattcttaaagctgctgcactcacagctctccaatcattcatgaccacggcttcattaagtgtctcgactaccgagactagtatctgatctcctgcgtatgacatgcgatgcgcacagtgtcagcacacgactcggaattcctgccgtgccagctgctctcaccactcgtccattc

SEQ ID NO: 56531 - DNA, 82 bp, Glycine max
cttgggagaacaggtctagtttcagagccggcatgtgcatgcttaccgactttctctattgggggtcgtattagatcttggt

SEQ ID NO: 56532 - DNA, 105 bp, Glycine max
tggatccagacgcgttggcaaaggcattcctggagcactactacagcaccttcgacaccaaccggaacggtttagcgaatccgtatcaggagggttccacgctca

SEQ ID NO: 56533 - DNA, 185 bp, Glycine max
aaaaacaaaacatatcaacccttctacaaattaaaaagaacacaaaaaaataaaaacaacagggcggcctccgataactcagctcgtcaacgcggaaattactcccggaccggtaccttcaggcttaccatttttccgcaaagtcagtcctcttaaagcttggcttcacgatggtcacaacggtt

SEQ ID NO: 56534 - DNA, 81 bp, Glycine max
atcaaagtttcttcctttctctgccctttgccttctctaaaacatttggtgcctggtaaaccttgttttggcagaaaggtg

SEQ ID NO: 56535 - DNA, 139 bp, Glycine max
ctccccaaaaaaaacaagcagatatataaattaatcaaatactacttcgtgtgggggtgggaaaatgggccactctgaggaaaacagtgatgttgctgccacgcacaatgcaatcgatgattggcttcctgtcactggt

SEQ ID NO: 56536 - DNA, 303 bp, Glycine max
gtgagttcaaagcaaacaaatactaagaccatataaggaaggaggaaggaacgaagctgaatctgaatctgaatcggaatcgctttgtctttgaaattcgcactctctctctctctctctctctctctctctctctcgtgtctctatattgagccacttcgaatccgtcgcctcagctgcagatcacatcgagtttcacccgaatgctctttctggactcgagttagatcgagttcttcatacgctgatagtgtgggaggatatacatgaagaacgggatactggaatgcggtgtttggcatt

SEQ ID NO: 56537 - DNA, 265 bp, Glycine max
ctcttgtggaatgttctagttacatgccactttctggatttcatggagttgtatctggtttcttggttggcattaagcaaagtagaggagctgaagagcttcctttcaataagaggaccccaaagtggttcccatatacaaatgtctagcttgggactgccaggcacgtccggaaagtacaggtgatagcataacctctaaccacatattcaggcacgtaccatcaaccggaatgaggataacaacaggcacaggaaccaagacc

SEQ ID NO: 56538 - DNA, 323 bp, Glycine max
caagtagttgagaactaagaagaaggaaatggcttcctcaatgatctcctccccagctgttaccaccgtcaaccgtgccggtgccggcatggttgctccattcaccggcctcaaatccatggctggcttccccacgaggaagaccaacaatgacattacctccattgctagcaacggtggaagagtacaatgcatgcaggtgtggccaccacttggcaagaagaagttcgagactctttcctacttgccagacctcgatgatgcccacttggcaaaggaagtcgaataccttctaaggaaaggatggattccctgcttggaat

SEQ ID NO: 56539 - DNA, 278 bp, Glycine max
gggttcacgaatggaagcggatccacgaggaagagagtttacagaggtggaccctctcggatggacatgctacccataagaaggagaagctctacgtatacgagatcgagagtcgtggacctcgtaactggtccctcatcatcaggtccatcccgggccgctctggcaactcctgtaggctttactggtgcacgcagctgtccccttcaggctcgcgcactcggccttcaaccactaatccgacgacaccactatcccggccccatgcccccttcggc

SEQ ID NO: 56540 - DNA, 384 bp, Glycine max
gttttctgtagcttcaggaattaccttcagtttttatcacttttcttgcatggagcatgggggaggtcattagatattcacattatgctttcggttgtttgggaaattgtccttcttggatgacctatctcaggtacactgcgtttattgtgctgtatcctttgggagtgggtcctggtgaaatatgggctctgtaccaggctcttccagttatactggagaagaatctctatgcagattccttttcaagcctcccatttagttattctgatttccttaaggtataagtaatcaataacccataatctctaacggatctggtacttgacatcacttatttatgggttttttgcttctcctaatgattcggccatttgattccgg

SEQ ID NO: 56541 - DNA, 295 bp, Glycine max
catgaatacgtaagttcgggaaaggttttgcaccatacaatggagtgctcatccttgccttatcgcctgggagcagcatcttccatggctctctcatccccatccttggctggcaaggacatgaagctgggctcatcagccccagacgtgggaagggtgagcatgaggaagaccgtcactaagcaggtctcctcaagaagtccatggtacggcccagatcgagtcaagtacttgggcccaatctctggcgagcccccgtcctacctaaccggtgggtttccaccgcgaactatgg

SEQ ID NO: 56542 - DNA, 59 bp, Glycine max
ggtttcatgtttattgcattgatctagacatttgattttgcaaccttcatggtatgtat

SEQ ID NO: 56543 - DNA, 94 bp, Glycine max
tgattcggctcgagtaattttgcaagtggggtgttgtaaaatgtacctttgttgatgaatattgagatgtaaaaaaagtctcgacatataagag

SEQ ID NO: 56544 - DNA, 382 bp, Glycine max
ggcaagttatttctctgtctctctctatttgcttctccgttttgaatgaaggaacgtgctgcgtgttttgtttgctgagatgtcacgatttgctgcaactttagggctctgagctggaatttggacttacccttttttcttcttcgagattttctgcactgcttttcgtcccttgattcaggttaatttgcaatgaccgaaccttccaaggtcattcacgttcgaaatgtgggccacgaaatatctgaaaatgacttacttcagctgtttcagccttttggagtcataacaaagcttgtcatgctgcgtgcaaaaaatcaggctcttatccaaatgcaagatgttccttctgcagttaatgctttacaattttatgcaaatg

SEQ ID NO: 56545 - DNA, 192 bp, Glycine max
aaaaacctccaaaccaactctagttaactccatagacactctctctctctctctacaatggcctcagccgcagccctcagagctttctctctcctccactccatcaccccggcctcctcctcctcctccagctccgcctcccgctcgcacgtgcagctctcctcctcgctccgctcgcgcccgctcgtacgc

SEQ ID NO: 56546 - DNA, 87 bp, Glycine max
gattttcagaaatattagtatatatttatatgcatacaatgatgcaaacaaacaggaaccgtttggcagcttaatgcttcaagatct

SEQ ID NO: 56547 - DNA, 362 bp, Glycine max
agcagctcatctacagtagacatcttatcctccaattcgagtaacaaagcaccagtttcctcgttggatggtctctcatctctttcactttctacaaaaacaacttcaaatgctgctcctatgatggatttattggatggatttgcccccatcccgccaacaggttgtaaactttgtttagcatttgggcattgtcattgaatgaaatatagtcaaagtattgaattcttgtcctttcttatcttgagtagaaaacaatggaccggtttatccatctgtaactgcatttgagagcagctccttgaggttgacattcaatttctcaaaacaaccaggaaacccacaaacaacagttatccagg

SEQ ID NO: 56548 - DNA, 119 bp, Glycine max
ccaccccccaagttgtcgtcacttactagcaggttgtaaattatccggtttatccgagaaaaactccacagaaaaatttccaaggatatattaatataatatatgaaaagtttcctttt

SEQ ID NO: 56549 - DNA, 383 bp, Glycine max
tcggggaattccaattccacattttcaagaaataaggaggcaaaaatgttcatatatgaattggaattatttgttttcttattaggcctatcctgaagccaaaggaaatgagatcggaattcctcggggaattccaattccacattttcaagaaataaggaggcaaaaatgttcatatatgaattggaattatttgttttcttattaggcctatcctggaagccaaaggaaatgagatcggaattcctcggggaattccaattccacattttcaagaaataaggaggcaaaaatgttcatatatgaattggaattatttgttttcttattaggcctatcctgaagcaaaggaaatgagatcggattcctcggggtaacgaact

SEQ ID NO: 56550 - DNA, 91 bp, Glycine max
gttcaatgaaggcattgtgtccactgctaaggttgtgtccaaagctgtgattactgggtacaaagatgggttcaaccagattaagtccctg

SEQ ID NO: 56551 - DNA, 341 bp, Glycine max
ctcgagccgattcggctcgagttcaattcaagcagctttggaaaacccaaccagccaacagttaagttctggagggaactgaaaagaaatctttatacaagattacaccttcagaagagtcttgccgaagtgtgtggaatctttgtgacagatgttggtttgattgtgtggacttaggagtgaatagtttgatatatgcgcatggaaggaagagaaggcttcagttctggggttacagtgataggggcagaagctccatcagcctatcatatggcaccaaggagtgaagctccaagtcaggttcctcctcctgttcctgaagcaacaactggagctattgg

SEQ ID NO: 56552 - DNA, 354 bp, Glycine max
ttcattctctttgcgcagttccctacctctcctttcaagatgcagatcttcgtcaagaccctcaccggaaagaccatcacccttgaggtggaaagctctgacaccatcgacaacgtcaaggccaagatccaggacaaggaaggaattcccccggatcagcaacgtctcatcttcgccggaaagcagctcgaggacggccgtacgctcgccgactacaacatccacaaggagtcaacccttcaccttgtccttcgtctccgtggtggcatgcagatcttcgtcaagactctcactggcaaaaccataaccctagaggtcgaaagctctgacaccattgacaacgtcaaggccaag

SEQ ID NO: 56553 - DNA, 57 bp, Glycine max
aaataaatcacgtttccattactcaatggcaaaagtaatatttgttgttttattgcc

SEQ ID NO: 56554 - DNA, 126 bp, Glycine max
atggaaatgaattgtagtggaaaatgtagtaagttttaatgaaattttgaattggtggatagattgtgctttgtttattattgactgagttatttagaatgtgaacatagtgctggactttattac

SEQ ID NO: 56555 - DNA, 370 bp, Glycine max
caatatattccattctctctgtgtatttccctacctctcccttcaagatgcagatcttcgtcaagaccctcaccggcaagaccatcacccttgaggtggaaagctctgacaccatcgacaacgtcaaggccaagatccaggacaaggaaggaatccccccggaccagcaacgtctcattttcgccggaaagcaacttgaggacggccgtacccttgctgactacaacattcagaaggagagtactcttcacctcgtcctccgtctccgtggtggcatgcagatcttcgttaagacaccaccggcaagaccataaccctagaggttgaaagctccgacaccatcgataacgtcaaggccaagatccaggac

SEQ ID NO: 56556 - DNA, 318 bp, Glycine max
tgacatcggacgcacgcctacgtaagctcggaattaggggataatttatgagttaacatgtgagcattaagcgagcataaggccaggaatcgtatcaaacgtcacgtttctggcatcattacaaatgctccggtaccatgactatcatgaaatctttcgattctcgatctcacaggttctcaattcccaatagacaagctcccttacagagtcttcaagctccaatctgcttcgcctcctcgtcgctgcgtagctatctgctacttcgatcctcgacctctcctaaatatcttcggaaggtctcttctatcgacatct

SEQ ID NO: 56557 - DNA, 247 bp, Glycine max
caatagtattaaattttgcgaagtatgatgatttatctattgaggcctattctggaacctggggatgtggcatcggcattggcctgcgatgtccatgtccacactttgaataactatggaagcaacaatgttcaaacatgaattggacttacttgttctcctcctaagcctatcgtgaagccaactgatatgacatccggactcctcgcgggtagcgacctcaaactcgctattatgagtcatatta

SEQ ID NO: 56558 - DNA, 372 bp, Glycine max
agtagttgagaactaagaaggagaagcaaatggcttcctcaatgatctcttccccagctgttaccactgtcaaccgtgccggtgccggcatggttgctccattcactggcctcaagtccatggctggcttccccaccagaaagaccaacaatgacattacctccattgctagcaacggtggaagagtgcaatgcatgcaggtgtggccaccagttggcaagaagaagtttgagactctttcctacctgccagaccttgatgatgcacaattggcaaaggaagtagaataccttcttaggaagggatggattccttgcttggaattcgagttggagcacggtttcgtgtaccgtgagcacaacagggtcacag

SEQ ID NO: 56559 - DNA, 72 bp, Glycine max
aggaatgtgagatgtccatgaagatatatataatatattggctcctattataaataaataaatatatttttt

SEQ ID NO: 56560 - DNA, 75 bp, Glycine max
acgcgtacgtaagctccgaattctgctcgagaacactttccgccgttccactctctacacattctcccgctctct

SEQ ID NO: 56561 - DNA, 256 bp, Glycine max
aaatctcgtcgagaagtttttgaaatgttgtcacaccttcttctagttctatgcccaactcttcccttgtgtttgttgtccttcttcagatatcgtacaacggtcaacaatccaccacttccaccacatctcataggccttcccataatacggaatcttcatcagctagacattccatcgcttcaataacagctatggcatctctcaaataaataaggtcctttactttcccttcaatttgaattaaggcccccca

SEQ ID NO: 56562 - DNA, 213 bp, Glycine max
aacattgcaactgaagtctccacctaatcgacgaaatcaagtaacaaatcagaagttactccgttggttggtatctcagctcttgcaggatctaccatgatatgttacagctacagatcctatgagggacttagtggaaggacttgctgacacccctgcacagagttgtgagctttgtatgtcatttgagtagtgtcactggatgaaacatcg

SEQ ID NO: 56563 - DNA, 70 bp, Glycine max
cgtatatgaaatgagtctttacaagtgatcgtccagcttgcgtaatagagtacaaactcagtggtaggat

SEQ ID NO: 56564 - DNA, 115 bp, Glycine max
aaatatttgacatgttgtcaccacgtcatctatttctatgccctcactcatcctttgccttcgctggcccacttcccaaaccgttcatccttaagctgtccgacacttccaccac

SEQ ID NO: 56565 - DNA, 197 bp, Glycine max
gattaaaatgcagcaatgatgccagtttgaatagtcctgagtcttttcaagatcgtttatggacttcagattccatgttaaagtgagcacgtggtcctgtaaaattttctaacattttcttgtcagagagaaaaaaaaacgaagacacgaacaaacgggcgagcggccgagcattgagctcgtcaacccgggaatta

SEQ ID NO: 56566 - DNA, 267 bp, Glycine max
gagcagtcaatggggatgaataataataacactatattctaaggccggtacaatagacaaggaataatcagagatgtctggaaaggtaagtatctcggttgtttctctcatcctactggttggagtggccataggtgtggtggtgtgtgtctacaagaagtgcaaagatcccacagttcaatgtcaacaaagatcactatgggttatctgccaaaacactgacgagcaaaagctctgccacgataccctaagctccgtgtacggcat

SEQ ID NO: 56567 - DNA, 51 bp, Glycine max
gttcttctagcgctaaaaacataacatcctaaaaaaatgtcaaagtaaggg

SEQ ID NO: 56568 - DNA, 129 bp, Glycine max
cactacagtctctcttgccagtgatctcatcactgtctaggacagaaccacaggtcacactcacactgtacccagtgcggtgttggtgtgtgacacgagctctgtggaagatgccagctttttgatggc

SEQ ID NO: 56569 - DNA, 207 bp, Glycine max
cacgaattttcttgcactatggataaacatacatatactggtaatgaggaactttcaagcaacgatctcgaaggactacaaattactaatgggctggagtgtaagataccttgcagttcatcttaggtctcacatgttttagattacctgggactttttgtttccgctaacaaagctaaaaagaattttgtatccaccacagttcag

SEQ ID NO: 56570 - DNA, 78 bp, Glycine max
gcaattttgatagagttgtgacggcacccattttgccaccgacgaatggaatagacactgtaactgctaagcggtact

SEQ ID NO: 56571 - DNA, 218 bp, Glycine max
gttacatcgaatccggcgagatcaaagtcaagtacgccatcgtcatcggcggtgccaccttcggttgcagctcctcccgcgagcacgcgcgcgtcgcgctgggcgcctcaggcgccgccgcagtggtcgcggattcgtgcgctacgatcttctttcgggactccgtggagaccggctaggtggtctccgcgagagtcggagggagcccgcctgcgagg

SEQ ID NO: 56572 - DNA, 88 bp, Glycine max
tgcaaaaatggcatcattcaccatgacagcttccatccttggcagcccagacgtcaccaaccggtcggcagtcgcaccgcacccggag

SEQ ID NO: 56573 - DNA, 83 bp, Glycine max
cacgcgtacgtaagctcggaattcggctccagacctagttagaccgcacaaggacaagcaactggcttagacaatgatctcct

SEQ ID NO: 56574 - DNA, 202 bp, Glycine max
actgggtccagaaaactccatcaagaacagaggacagataagagtctactccatctggctgaagaagcaatcagcaatgtgcatcctagaacgcatcctcaaggtccatatcacagagaaaaccataaccaaattcgactagtgcagagactccagatgggccaaggccacgaagctctcagagaagcagccctcgttgcat

SEQ ID NO: 56575 - DNA, 261 bp, Glycine max
gctgggtcgagaaccctacatcaggaccataggagagataagagtccactccacctggcctgctcaagcattcatcagtgtgcacaatagaacgcatcctcaaggtccacgtcagagagaacagcataagcaaattcgagcagtccagagacaccataagagccaacgcaacgactctctcaatgaaccaccctcattgcagtagcaacagcagacgagcttctcacgttccactgcacctccttcaactgctccctgggt

SEQ ID NO: 56576 - DNA, 314 bp, Glycine max
tttctctcgcaagattctctttcttcctctcagaaagctggtctgcaatccatagagttttgccttttccccttttcagcattgatcatttgattacacagtgcatgcaattgagtatcagtgttttcaatttgatagaagatattgattcattgattctttaggtcgatcattcgccatgaatgaaagcaagacaaagaatctaaatttgatagaattgagtcaaaatttcgccatgagtttctctgaccatactccatccttcatgaggtcaccggcgtcattttccacagacaccgatgccattgacgtga

SEQ ID NO: 56577 - DNA, 393 bp, Glycine max
attccaatatattccattctctctgtgtatttccctacctctcccttcaagatgcagatcttcgtcaagaccctcaccggcaagaccatcacccttgaggtggaaagctctgacaccatcgacaacgtcaaggccaagatccaggacaaggaaggaatccccccggaccagcaacgtctcattttcgccggaaagcaacttgaggacggccgtacccttgctgactacaacattcagaaggagagtactcttcacctcgtcctccgtctccgtggtggcatgcagatcttcgttaagacactcaccggcaagaccataaccctagaggttgaaagctccgacaccatcgataacgtcaaggccaagatccaggacaaggagggtatccccccg

SEQ ID NO: 56578 - DNA, 400 bp, Glycine max
gcccaaagctagccatgcacttcaaataaaaccccacctccctcccctcattccaacacaaggctacgtacgtcacctttctctctctccatttgtctctgatcttccaacaccttctccagagaagagacaaaatggatcatcattccacttccaaaacctctctcattcttttcatatccctctcctccctcctcttcctcgcaaccgccacgcgcaacatccacatcggccgtcccgacatccactccgacatcaccgaattctgcaagaaaaccaccaaccccgccgtctgcgcccagaccatccaaccccacttcctcaaaaacaacctcgaccccttaaaggcactcgacgtcgaagttgatgccacactggcctctgccaaaaaaaccctaat

SEQ ID NO: 56579 - DNA, 116 bp, Glycine max
atttcattatttatttcaatattagataatgcagaataattgtctatttttaaattttcttttcccctgtatcctaccattttttaaatagaaaatatcctaccaattttagattc

SEQ ID NO: 56580 - DNA, 148 bp, Glycine max
gatgttatgtttctctttgctgtactcctttgaaaattagtacagaatgattgtacagaaaagaaacagggtaatggtgtacctgaataaaaacaaaaaaaaaaaaaaaaaaaaaaaaaagaaaaaaaaaaaaaaaaaaaaaaagaac

SEQ ID NO: 56581 - DNA, 413 bp, Glycine max
ggacgcacctgctgttggcttgttgttcaaggatggcaatttgtaaaaaagatgtttggagagttgaatgtggaatcccttctggatttccgctcacagttatttgcaatagcatttttaatgagatgctcattagatatagctatgaaaaattactgcgtcaggctaaagctccaagtatgtttttacaatccttcaaaaattttgtttctttgtgtgtgtatggtgatgacaacttaattagtgtacatgaatatgtcaagccttactttagtggttctaaattgaaaagctttctagctggtcataatatcaccattactgatggtattgacaaaactagcgcaactttgcaatttagaaagttagcagattgtgactttctcaaaagaaactttaagcagatgtctaac

SEQ ID NO: 56582 - DNA, 287 bp, Glycine max
ttcgagggtttgggtttctcttcctcccttggagaaaaagaagagccaccgctgcgacgccgttcgtgcatttttgaggtgccgctgtcaagtttgggccttgtggaccaaaggagaatgataactccaaataataagaaaatccccggaattccaaaaatgccaatgaagatgtaaatcaaaaagggcaaaaaaaaggggggatttaaaaacccacccaatttgggaaggaattccgaaaaattttaggggtttgggccaaccaattaaattttaaagtgatccgg

SEQ ID NO: 56583 - DNA, 346 bp, Glycine max
ctcgagccggctcctgattcaaatgataatattgatctactgttgagcattgatttgttgggtttacaaggagcaggcaaagcttttccaaacaagattgtttttgatgataagcttgtgttggctaacacacaagaattctttgatggaaattttccagtggattcctggttaccaatttttgtgaattgtccttatcctgtaagtcaattaccttcaaaagctgtcgttgtaaatgtcacatgtggtaatggacgttgtggtttaaccaccaatgcttggaataattctgcagttaacaatcgctcctcagatatcaaccaaaggaattccacaacactttgga

SEQ ID NO: 56584 - DNA, 379 bp, Glycine max
tgcttgcacaaaagcaatgactatgtcatttaatccaaacccgtgttctgatgcatggagtttggaatttctgaagcgtactggatttcattgcgatatcatttgtgtcactggatggactgccaccccaatgcaggatgttcaggttacaattgattggtttatttcctctcaggaatgtgttcccaggacctattgtgttttaaatccacaaaatccttttgtgttaaataggtggatgggaaaattgactttcccccagggcacttcccgaagtgttaagagaatgcctctttctatagggggaggagctggtgcaaagaatgctattctcatgaatatgccaaatgctgttctttcaatgtggagatattttgtt

SEQ ID NO: 56585 - DNA, 350 bp, Glycine max
atttaatccaaacccgtgttctgatgcatggagtttggaatttctgaagcgtactggatttcattgcgatatcatttgtgtcactggatggactgccaccccaatgcaggatgttcaggttacaattgattggtttatttcctctcaggaatgtgttcccaggacctattgtgttttaaatccacaaaatccttttgtgttaaataggtggatgggaaaattgactttcccccagggcacttcccgaagtgttaagagaatgcctctttctatagggggaggagctggtgcaaagaatgctattctcatgaatatgccaaatgctgttctttcaatgtggagatattttg

SEQ ID NO: 56586 - DNA, 374 bp, Glycine max
ggaattttagtggacaaaactggagattggatcacacttatacaaaattctccaattagtaacttgttgagagttgctgcttggaagaaaggctgtttaatggttaagattgtgatgtctgggaatgcagcagtcaaaaggagtgattgggcctcattggtacaagtgtttttaacaaacagcaacagtacagagcattttgatgcatgtaagtggacaaaatcggaaccacattcctgggaattgatcttcccaatagaggtatgcggtcctaataatggttttgaaatgtggagttctgagtgggcaaatcaaacttcatggcatttgagtttccttattgacaatcccaaacagtctacagtttttgacat

SEQ ID NO: 56587 - DNA, 410 bp, Glycine max
  unsure (1)..(410): unsure at all n locations
ctcgtcttttgggcaccattcctcagtccatttcacagcaaactgtttggaatcaaatggcaacagtgagaacaccattgaattttgattctagcaagcagagcttttgtcaattctctattgatcttcttggtggaggaattttagtggacaaaactggagattggatcacacttatacaaaattctccaattagtaacttgttgagagttgctgcttggaagaaaggctgtttaatggttaagattgtgatgtctgggaatgcagcagtcaaaaggagtgattgggcctcattggtacaagtgtttttaacaaacagcaacagtacagagcattttgatgcatgtaagtggacaaaatcggaaccacattcctgngaattgatcttcccaatagaggtatgcggtcct

SEQ ID NO: 56588 - DNA, 406 bp, Glycine max
ctcgagccgattcggctcgagctttgaagtttctaagatgacttctccctacattaaatgtacagtctctttcttcatagcatttggaaatttggctgatgacaccatcaattttgaggcttttccccacaagctggtgcagtttggagagattcaggaaaaagttgtattgaaattttcacaagaggaatttcttacagcttggtcaactcaggtgcgtcctgcaacaactctgttggctgatgggtgcccatatttgtatgctatggtgcatgatagttcagtgtctacaataccaggtgattttgtcattggtgttaagttgacaaccataaacaatatgtgtgcatatgggctcaatcctggtatttcaggttctcgtcttttgggcaccattcctcagtca

SEQ ID NO: 56589 - DNA, 384 bp, Glycine max
tcggggaattccaattccacattttcaagaaataaggaggcaaaaatgttcatatatgaattggaattatttgttttcttattaggcctatcctgaagccaaaggaaatgagatcggaattcctcggggaattccaattccacattttcaagaaataaggaggcaaaaatgttcatatatgaattggaattatttgttttcttattaggcctatcctgaagccaaaggaaatgagatcggaattcctcggggaattccaattccacattttcaagaaataaggaggcaaaaatgttcatatatgaattggaattatttgttttcttattaggcctatcctgaagccaaaggaaatgagatcggaattcctcgggggtaacgaac

SEQ ID NO: 56590 - DNA, 155 bp, Glycine max
aatggctggcatcggcatccagccataccaccagcaatgggctccggcagctgcctctcctcctccttcttatgcagcctctggcggtcctcgtcctcatcctgtggatgatgttccagggattcttattccgggtcttcctgaagaactgaagc

SEQ ID NO: 56591 - DNA, 399 bp, Glycine max
aaattccaatagttttcctatcatgttcaacatgcattgtatggatacttggatagaaggtagcataaacgttggatgagatatttcatttcattttatacatattttatagctaaaaaagattgtatgacttttgttgaatgcaatacagatccagggagcttgtcaccaaagcggacatctgttgattccacgcacagtgattctggagttaactattccgcttgatactcaatggacatcacaaaatcatagatggttgcaccctcttggaataccttttcgcttgtgaacaataaccctagctttttttttttctccccattttcatgtatagaaccttcttgtgtagctaatagatggacatgatggtgggcaagcctgcttatttttcaacca

SEQ ID NO: 56592 - DNA, 376 bp, Glycine max
tcggggaattccaattccacattttcaagaaataaggaggcaaaaatgttcatatatgaattggaattatttgttttcttattaggcctatcctgaagccaaaggaaatgagatcggaattcctcggggaattccaattccacattttcaagaaataaggaggcaaaaatgttcatatatgaattggaattatttgttttcttattaggcctatcctgaagccaaaggaaatgagatcggaattcctcggggaattccaattccacattttcaagaaataaggaggcaaaaatgttcatatatgaattggaattatttgttttcttattaagcctatcctgaagccaaaggaaatgagatcggaattcctccgggg

SEQ ID NO: 56593 - DNA, 174 bp, Glycine max
aaaatgcggaatcctctgcatgatctggaatttgtgttttcttttgcttgttcgtttgtttaattcaataaaggaaattaggcatgaccctcttgttgagtatgctctgcctatttgaaaatttccacacctcttttaattatcgtaatgatgtgtgaagtgtgtgttatttta

SEQ ID NO: 56594 - DNA, 355 bp, Glycine max
cattaattttgaggcttttccccacaagctggtgcagtttggagagattcaggaaaaagttgtattgaaattttcacaagaggaatttcttacagcttggtcaactcaggtgcgtcctgcaacaactctgttggctgatgggtgtccatatctgtatgctatggtgcatgatagttcagtgtctacaataccaggtgattttgtcattggtgttaagttgacaaccataaacaatatgtgtgcatatgggctcaatcctggtatttcaggttctcgtcttttgggcaccattcctcagtctatttcacagcaaactgtttggaatcaaatggcaacagtgagaacaccattgaat

SEQ ID NO: 56595 - DNA, 85 bp, Glycine max
cagagtcataaaaaaccaaagttttccaatccccggagctcaaaaggtgggctaagaataaccgaattttggggtggaaagtatg

SEQ ID NO: 56596 - DNA, 429 bp, Glycine max
aatacgtcacatatgacctctacatgcacctctgcattcgctccgaagtcggctcgcgcaaatttgatacagataactcactctcatagtgtttggctgcaaacagcttatcatgtgcgagtcaaagcacacaattggagcgttctaatgcatgtacaagatttgcagcgactcctgatctcaaatgtcaatattgatctgactgtagcgtaatgactgggttggtgcagaacgagcacgtaacatctttcagaagatgattgtttttgtggagtaatctggtccatgtataacgcagtgaatcacatgctacgagaattccaacgagactctcgttgacaagattgtgtgtactaacatcacctagtgtattacatatgttacacacgatgtcaacattcatgttaaatatgtgtctgcaactgggga

SEQ ID NO: 56597 - DNA, 345 bp, Glycine max
atggatttgatggacaaaaagaaagggacaattctgaaatggattgggcacggagagatgatgatctctataacagaagggttagaaatgatgaacctagaaagagggatagggctaaggttcgagaaaatgagagaaacgacaaagaagatagccttcattctagaaaacagttggataatggtagctacagggttttgtatgaaaaagatgttgggtccagagattcaagacatagggaaagagacgagggcttgaggattaggtacgaagcagtggaggattaccgtggcaagaggaggaaggatgaggaatatcttaagagggagcatattgacaaagaag

SEQ ID NO: 56598 - DNA, 410 bp, Glycine max
gaaaagctttctagctggtcataatatcaccattactgatggtattgacaagactagtgcaactttgcaatttagaaagttagcagattgtgagtttctcaggagatactttaagcagatgtctaatgttttgtgggtagctcctgaggacaaggcgagtttatgggcacaacatcattatgtttcgtgtaataatctggaaatgcaagaagcttatcttgtcaatctcgtaaatgtgttaccagaattgtatttgcacagtccagaggaagctcgccaattgagaatgaaagctctctcgcgtaatgaatggctgcataaagctgatgtgcctaccatagcacagattgaagagttccattcgatgcagacgatgatgaatgctcctgattcagatgataatattgatc

SEQ ID NO: 56599 - DNA, 402 bp, Glycine max
gtgagaacaccattgaattttgattctagcaagcagagcttttgtcaattttctattgaccttctcggtggaggaattttagtggacaaaactggagattggatcacacttatacaaaattctccaattagtaacttgttgagagttgctgcttggaagaaaggctgtttaatggttaagattgtgatgtctgggaatgcagcagtcaaaaggagtgattgggcctcattggtacaagtgtttttaacaaacagcaacagtacagagcattttgatgcatgtaagtggacaaaatcggaaccacattcctgggaattgatcttcccaatagaggtatgtggtcctaataatggttttgaaatgtggagttctgagtgggcaaatcaaacttcatggcatttg

SEQ ID NO: 56600 - DNA, 381 bp, Glycine max
  unsure (1)..(381): unsure at all n locations
ggaaatttggctgatgacaccatcaattttgaggcttttccccacaagctggtgcagtttggagagattcaggaaaaagttgtattgaaattttcacaagaggaatttcttacagcttggtcaactcaggtgcgtcctgcaacaactctgttggctgatgggtgcccatatttgtatgctatggtgcatgatagttcagtgtctacaataccaggtgattttgtcattggtgttaagttgacaaccataaacaatatgtgtgcatatgggctcaatcctggtatttcaggttctcgtcttttgggcaccattcctcagtccatttcacagcanactgtttggaatcaaatggcaacagtgagaacaccattgaattttgat

SEQ ID NO: 56601 - DNA, 328 bp, Glycine max
agtctactctagaggatcccctaggggaattccaattccacattttcaagaaataaggaggcaaaaatgttcatatatgaattggaattatttgttttcttattaggcctatcctgaagccaaaggaaatgagatcggaattcctcggggaattccaattccacattttcaagaaataaggaggcaaaaatgttcatatatgaattggaattatttgttttcttattaggcctatcctgaagccaaaggaaatgagatcggaattcctcggggaattccaattccacattttcaagatataaggaggcaaaaatgttcatatatgaat

SEQ ID NO: 56602 - DNA, 399 bp, Glycine max
tttaccttgtaggaaatccatatttcaagttgggaaagaccatgaatcaccctcattcgtacctatgtcatggtggacgtatgcagtggcagcattagtatgaggactaggaagctcgtggcatcgtactcaatggcctcacacattcatttcttggcaaactccgtcttgagtacggaggtgatatctgtcaaacatcagtctctaaacaactagaggaaacatatcctgatagtagtatgacgtctcacagtttccagcgccatgtggtagaattaacatcattatcatcattatgaagaggaggtaatcatcggatcaacggattcgatcacatcctcttcgccgtccaggccatcctcagcattttgaggaccaagacgatgactaagatgaaga

SEQ ID NO: 56603 - DNA, 377 bp, Glycine max
ctcgagccgaatcggctcgagagcatttggaaatttggctgatgataccatcaattttgaggcttttccccacaagctggtgcagtttggagagattcaggaaaaagttgtattgaaattttcacaagaggaatttcttacagcttggtcaactcaggtgcgtcctgcaacaactctgttggctgatgggtgtccatatttgtatgcaatggtgcatgatagttcagtgtctacaataccaggtgattttgtcattggtgtcaagttgacaaccataaacaatatgtgtgcatatgggctcaatcctggtatttcaggttctcgtcttttgggcaccattcctcagtccatttcacagcaaactgtttggaatcaaa

SEQ ID NO: 56604 - DNA, 387 bp, Glycine max
gggaattccaattcaacattttcacgaaataaggacgcagacatggttcatatctgaattggaattaattgttttcatattacgcctatcctgaagccaaatgaaatgagatcgggattcctcggggaattccaattccacattttcaagaaataaggaggcaaaaatgttcaaatatgaattggaattatttgttttcttagtatgcctatcctgaagccaaatgaaatgagatcggaattcctcggggaattccaattccacattttcaagaaataacgaggcaaaaatgttcatatatgaattggaattaattgttttcgtaataagcctatcctgaagccaaaggaaatgagatcggaattcctcgggggtaccgagctcgaa

SEQ ID NO: 56605 - DNA, 230 bp, Glycine max
gcaagagtccttgatcgtgattggagctcacttaatcctgctactgtccaagctttggtgtgttcacaagattggattaagagtgaactggaaaattagattgctttttccctgcattctaattgtacatgccaattctccccatagaaatatttccatgtaagttaatatcttctaactccacatttcaattttcctgacctttttatattttggttctatttagccaa

SEQ ID NO: 56606 - DNA, 387 bp, Glycine max
cttccatagccccccaaaaatgaagagcaccatcttctttgctctctttctcttttgtgccttcaccacctcatacctaccttcagccatcgctgatttcgtgctcgataatgaaggtaaccctcttgaaaatggtggcacatattatatcttgtcagacataacagcatttggtggaataagagcagccccaacgggaaatgaaagatgccctctcactgtggtgcaatctcgcaatgagctcgacaaagggattggaacaatcatctcgtccccatatcgaatccgttttatcgccgaaggccatcctttgagccttaagttcgattcatttgcagttataatgctgtgtgttggaattcctaccgagtggtctgttgtggagga

SEQ ID NO: 56607 - DNA, 405 bp, Glycine max
  unsure (1)..(405): unsure at all n locations
ccaatatattccattctctctgtgtatttccctacctctcccttcaagatgcagatcttcgtcaagaccctcaccggcaagaccatcacccttgaggtggaaagctctgacaccatcgacaacgtcaaggccaagatccaggacaaggaaggaatccccccggaccagcaacgtctcattttcgccggaaagcaacttgaggacggccgtacccttgctgactacaacattcagaaggagagtactcttcacctcgtcctccgtctccgtggtggcatgcagatcttcgttaagacactcaccggcaagaccataaccctagaggttgaaagctccgacaccatcgataacgtcaaggccaagatccaggacaaggacggtatncccccgggaccagcaacgtct

SEQ ID NO: 56608 - DNA, 399 bp, Glycine max
cacttcccgaaatgttaaaagaatgcctctttctatagggggaggagctggtgcaaagaatgctattctcatgaatatgccaaatgctgttctttcaatgtggagatattttgttggagatctcgtctttgaagtttctaagatgacttctccctacattaaatgtacagtctctttcttcatagcatttggaaatttggctgatgacaccatcaattttgaggcttttccccacaagctggtgcagtttggagagattcaggaaaaagttgtattgaaattttcacaagaggaatttcttacagcttggtcaactcaggtgcgtcctgcaacaaccctgttggctgatgggtgtccatatttgtatgccatggtgcatgacagttcagtgtctacaat

SEQ ID NO: 56609 - DNA, 344 bp, Glycine max
ccccagggcacttcccgaaatgttaagagaatgcctctttctatagggggaggagctggtgcaaagaatgctattctcatgaatatgccaaatgctgttctttcaatgtggagatattttgttggagatctcgtctttgaagtttctaagatgacttctccctacattaaatgtacagtctctttcttcatagcatttggaaatttggctgatgacaccatcaattttgaggcttttccccacaagctggtacagtttggagagattcaggaaaaagttgtattgaaattttcacaagaggaatttcttacagcttggtcaacccaagtgcgtcctgcaacaac

SEQ ID NO: 56610 - DNA, 306 bp, Glycine max
gcaatctcacgcaggtagcagcacagacgctattacccgtgacttcgcagccctactggcctcacacactcagtgcccagtgatggatcaggctgcaagaatcctaggttcgcgcgacgctatctcctgatcacaaatagcatgatgaacgtattgaatgggcaggcacaggaatcaatggcgaattgctgtcgtgagagagtgtacgaaggagagctgccacagggaagcgtgctgcatgtgacactataacacactgtggctgcaacatgcgggcggcagccgactaatgagctcttcgacccg

SEQ ID NO: 56611 - DNA, 400 bp, Glycine max
cttggttgaagataactggaagtttgaagggcctcgttcgcggatccacctagtatcacatcgaggtggtcatctctataggccaacagaaatttctaagaattggaatttgactccaccaaaatagttggaacactcaccttgtaacactgtgcctctattataaagtgattatggttgtgatctgcagataagaactgctatgccaatttctttcccccgtggtagaaaacacagctgttagttgttactctacatcttcaggtgacatgacatgtagttctgtgagggcatgaagattgcaaatgaaggttctttctatgcaagattgttagtcatattttctgctagtctttctaactgggttgagaagctggtgtttttaacatttatgtggtat

SEQ ID NO: 56612 - DNA, 402 bp, Glycine max
gaggaagctcgccaattgagaaggaaagctctctctcgtattgaatggctgcaaaaagctgatgtgcctaccatagcacagattgaagagttccattcgatgcagaggatgatgaatgctcctgattcaaatgataatattgatctactgttgagcattgatttgttgggtttacaaggagcaggtaaagcttttccaaacaagattgtttttgatgataagcttgtgttggctaacacacaagaattctttgatggaaattttccagtggattcttggttaccaatttttgtgaattgtctttatcctgtaagtcaattaccttcagaagctgtcgttgtaaatgttacatgtggtagtggacgtggtggtttacccaccactgcttggattagttctgca

SEQ ID NO: 56613 - DNA, 388 bp, Glycine max
gattgttgtgactcgttcttcttcgtcgttatcttcttcttttgttgtttgtgtgtttgttttttctctcacctgaaaatgtcttgctgcggtggtaactgtggttgcggaagcgcctgcaagtgcggcaacggctgcggaggctgcaagatgtacccagagttgagctacaccgagtcaaccaccaccgagaccttggtcatgggagtggcaccagttaaggctcaattcgagagtgctgaaatgggtgttcccgctgagaacgatggctgcaaatgtggagctaactgcacctgcaacccctgcacttgcaagtgacgtcttggagagctaaagcttcaagcataaatggcccttagaattaatgatacaaactacaagtaatttc

SEQ ID NO: 56614 - DNA, 381 bp, Glycine max
caacgatagtaaaagcagaaaaggtaaactttgcttctaaatctagagttaatttggagttgatttttaacgaactcagggctgagaaatcgaaaggtatcaccattcccaactctgtaaccaataatactagactggggagcgttgaaactggacaagttacaccaccagcttattataagagcaatgctaataccagtagagattttgggatgccggcaaatcaagtgggtcaacagcatggaaaccaatatagcaatatttcttctgcaggtgctgctcctggttcatatacatcatgcaccaactgtggagtctctggtcatagctctgcactttgcccaaatattagaaatgtacctggacattctgcaagaaggg

SEQ ID NO: 56615 - DNA, 449 bp, Glycine max
ggagagacaaacttgcatgcgatgcaggtctactctagacgatccctcggggaattccaattccacattttcaagaaataacgaggcacagatgttcatatatgaattggcattatttgatttcttattacgcctatcctgaagccaaaggatatgagatcggaattcctcggggaattccaattccacattttcaagaactaaggaggcagtaatgttcatatatgaattggaattatttgttttcttactaggcctatcctgaagccaaaggaaatgagatcggaattcctcagggaattcgaattccacattttcaagaaataaggaagcacagatgttcatatatgaattggaattatttgtattcatactaggcctatcctgaatccaaaggaaatgagatatgaattcctcgggggtaccgagctcgaattccgtatagtgag

SEQ ID NO: 56616 - DNA, 364 bp, Glycine max
cggtgagaaggaggaagacgaagatgagcaaccacgtccaatcccattcccacgcccacaacctcgtcaagaagaagagcacgagcagagagaggaacaggaatggcctcgcaaggaggaaaaacgcggagaaaagggaagtgaagaggaagatgaggatgaggatgaggaacaagatgaacgtcaattcccattcccacgcccacctcatcagaaggaagagcgaaagcaagaggaagatgaggatgaggagcagcagcgagagagcgaagaaagtgaagattctgagttacgaagacataagaataagaacccttttctcttcggctctaacaggttcgaaactctcttcaaaaaccaatat

SEQ ID NO: 56617 - DNA, 369 bp, Glycine max
  unsure (1)..(369): unsure at all n locations
gtctatttcacagcaaactgtttggaatcaaatggcaacagtgagaacaccattgaattttgatcctagcaagcagagcttttgtcaattttctattgaccttcttggtggaggaattttagtggacaaaactggagattggatcacacttatacaaaattctccaattagtaacttgttgagagttgctgcttggaagaaaggctgtttaatggttaagattgtgatgtctgggaatgcagtagtcaaaaggagtgattgggcctcattggtacaagtgtttctaacaaacagcaacagtacagagcattttgatgcatgtaagtggacaaaatcggaaccacattcctgngaattgatcttcccaat

SEQ ID NO: 56618 - DNA, 92 bp, Glycine max
cttaatttccttcctttccaaggtacacgctctattgtacttttgagggatctgaaactcgatgtttaagataaagccggtgtttttatgtg

SEQ ID NO: 56619 - DNA, 259 bp, Glycine max
gacgtcgaacgcacgcggacctaaactcggaatacggctcgagtttttgttccgtctctgcggctagctttttgagcatcaatggcggactctgaaaccttcgctttccaggcatggagatcaaccaacttcgcagccgcatcaacaacatctgctacagcaccaatgagattctcttgcgtggactcatcaggaacgcttctgatgcttgggttaagatttgatttgagactctaaccgagaagatgaagctcgatgc

SEQ ID NO: 56620 - DNA, 104 bp, Glycine max
aaaaaaaaaaaaaaaaaaaaaaaaaaaaaaaaaaaaaaaaaaaaaaaaaaaaaaaaaaaaaaaaaaaaaaaaaaaaaaaaaaaaaaaaaaaaaaaaaaaaaaat

SEQ ID NO: 56621 - DNA, 394 bp, Glycine max
ttgaaattttcacaagaggaatttcttacagcttggtcaactcaggtgcgtcctacaacaactctgttggctgatgggtgtccatatttgtatgctatggtgcatgatagttcagtgtctacaataccaggtgattttgtcattggtgttaagttgacaaccataaacaatatgtgtgcatatgggctcaatcctggtatttcaggttctcgtcttttgggtaccattcctcagtctatttcacagcaaactgtttggaatcaaatggcaacagtgagaacaccattgaattttgattctagcaagcagagcttttgtcaattttctattgaccttctcggtggaggaattttagtggacaaaactggagattggatcacacttatacaaaatt

SEQ ID NO: 56622 - DNA, 382 bp, Glycine max
atcaccattactgatggtattgacaagactagtgcaactttgcaatttagaaagttagcagattgtgattttctcaagagaaactttaagcagatgtctaatgttttgtgggtagctcctgaggacaaggcgagtttatggtcacaacttcattatgtttcgtgtaataatctggaaatgcaagaagcttatcttgtcaatctcgtaaatgtgttacgagaattgtatttgcacagtccagaggaagctcgccaattgagaaggaaagctctctctcgtattgaatggctgcaaaaagctgatgtgcctaccatagcacagattgaagagttccattcgatgcagaggatgatgaatgctcctgattcaaatgataatattg

SEQ ID NO: 56623 - DNA, 397 bp, Glycine max
tggcaacagtgagaacaccattgaattttgattctagcaagcagagcttttgtcaattttctattgaccttctcggtggaggaattttagtggacaaaactggagattggatcacacttatacaaaattctccaattagtaacttgttgagagttgctgcttggaagaaaggctgtttaatggttaagattgtgatgtctggaaatgcagcagtcaaaaggagtgattgggcctcattggtacaagtctttttaacaaacagcaacagtacagagcattttgatgcttgtaagtggacaaaatcggaaccacattcctgggaattgatcttcccaatagaggtatgtggtcctaataatggttttgaaatgtggagttctgagtgggcaaatcaaac

SEQ ID NO: 56624 - DNA, 397 bp, Glycine max
ggaaaaagttgtattgaaattttcacaagaggaatttcttacagcttggtcaactcaggtgcgtcctgcaacaactctgttggctgatgggtgtccatatctgtatgctatggtgcatgatagttcagtgtctacaataccaggtgattttgtcattggtgttaagttgacaaccataaacaatatgtgtgcatatgggctcaatcctggtatttcaggttctcgtcttttgggcaccattcctcagtctatttcacagcaaactgtttggaatcaaatggcaacagtgagaacaccattgaattttgattctagcaagcagagcttttgtcaattttctattgaccttctcggtggaggaattttagtggacaaaactggagattggatcacactt

SEQ ID NO: 56625 - DNA, 380 bp, Glycine max
taataattgaatcttcctaagtaatcgcgttttgtttgttctcaaatttaacggttgactcatgatttctgcttttttgtttgtgattattgtttctgaccattccattaggcattcttaaggtttaatttgtttgatgtgattgtgtggtataaataatttgtttaatttgttgatgcatttttatttgagtttatggcaatccatgttttagatgctgacatggatatggaacagaaaaaggtcattgttgtgttcaaacaatgcatgccactcagcgatggttcagttttaagatttttctttttgtctaatgaaattgcaaatgcgtgtcaaagagttgcctttccttaacgcataaaattaacttttgggttaac

SEQ ID NO: 56626 - DNA, 341 bp, Glycine max
  unsure (1)..(341): unsure at all n locations
atgcaattgaaggtgctaaggagagatacgagagagcaaaaacaaaaacaacaagtaaagcttccaaagagagaaacgtgaaggcaaatganggggctgaaggaggaagaagagaagcagaaagtggtgggggtgttcatcatgtggctaagtttgaagagaagaaaacttcagtggggaaagcataacccgagggaagaataagaaaggtattggaaaaaaattggaacaaagaaaaaaaccaaggaatttgtccagaagggaaattgaaggtaaaaaaaccaggaccattggaacctaattgaaaagaaaaatttgaaaccagaaaggtggtggtaagg

SEQ ID NO: 56627 - DNA, 84 bp, Glycine max
gaggaaagtatcgggctatttaactatgacttgagctccatctatgaataaataaatcagcatatgatgcttttgttttgtgta

SEQ ID NO: 56628 - DNA, 344 bp, Glycine max
ctttgggacgccctactttttttcttctatcttcattgatcatcacttctctttcttcattttccttttcggtgggaattaggataaccctcctcaatttttcaactctaaatttgatcatcaccttcacccactttactcttactaggaggaacccttctctctgtgtgtgtgttctgagttgattctgtgcttcagctttccacaaagtaaagtagaaagatggcaatgattccttaccacctttgccgtttaccttaccaggattccctcaaagcacttgaggctgatatacagcacgccaatgctttattgtgtgttgtgccctcttctaaggctgctgc

SEQ ID NO: 56629 - DNA, 307 bp, Glycine max
aaaaaaaaaaaaaaaaaaaaaaaaaaaaaaacaaaaaagaaaaaagaacaaaaatacataacaaacccaaatgagagagaaacacggacccaggttctaaattgcgaccggcccccaaaaaatgggcccgtggtcccagaaattaatcccggaccggtatcggcaggcctaccacctttcccaatccggggccgtattataacgggggcaaaatttggccaaacctgtttcccgtgagaaattggtttccgcccggaattccccaatccatgcgaaccgtaaccataagttctaaaccctgaggggc

SEQ ID NO: 56630 - DNA, 383 bp, Glycine max
caaggcgagtttatggtcacaacttcattatgtttcgtgtaataatctggaaatgcaagaagcttatcttgtcaatctcgtaaatgtgttacgagaattgtatttgcacagtccagaggaagctcgccaattgagaaggaaagctctctctcgtattgaatggctgcaaaaagctgatgtgcctaccatagcacagattgaagagttccattcgatgcagaggatgatgaatgctcctgattcaaatgataatattgatcttctgttgagcattgatttgttgggtttacaaggagcaggtaaagcttttccgaacaagattgtttttgatgataagcttgtgttggctaacacacaagaattctttgatggaaattttccag

SEQ ID NO: 56631 - DNA, 237 bp, Glycine max
gaatgacgtgacactatataagaatatgacgtcgcacgcaagcctaagtaaaccccgaattccgctccaagaaaacgaaaaaggaagaaggaattagaaggaaaattttccggccaaacaaaggaaggttccttccttttgggggaaaaaattggaaccggccttggcttgcttaaaaaaggactcctcaacctttaaaaggttggtttccttaaattttgcgcctttccaattttc

SEQ ID NO: 56632 - DNA, 222 bp, Glycine max
agagtattaccagcaatttctgttccacaggctactgccagatcttctgaaaatgcggaatcctctgcatgatctggaatttgtgttttctttcgcttgttcgtttgtttaattcaataaaggaaattaggcatgaccctcttgttgagtatgctctgcctatttgaaaatttccacacctcttttaattgtcgtaatgatgtgtgaagtgtgtgttatttt

SEQ ID NO: 56633 - DNA, 391 bp, Glycine max
  unsure (1)..(391): unsure at all n locations
catcagtaatggtgatattgacaagactagtgcaactttgcaatttagaaaatcacaatctgctaactttctcaagagaaactttaagcagatgtctaatgttttgtgggtagctcctgaggacaaggcgagtttatggtcacaacttcattatgtttcgtgtaataatctggaaatgcaagaagcttatcttgtcaatctcgtaaatgtgttacgagaattgtatttgcacagtccagaggaagctcgccaattgagaaggaaagctctctctcgtattgaatggctgcaaaaagctgatgtgcctaccatagcacagattgaagagttccattcgatgcanaggatgatgaatgctcctgattcanatgataatattgatctactgttg

SEQ ID NO: 56634 - DNA, 443 bp, Glycine max
  unsure (1)..(443): unsure at all n locations
tgacgtcgcatgcaaccctacgttaaccccggaatccggtccaaccttccccttccccttttaaaattccccggccgtttcaagttagaaaaaattcaacaaaacggtaagaaaaaatccccaaattactaaaaaatcaaccctttcctggttcccctggccccccctaaaaccgtaaacaattggtgttttaacctccgggaaaaaaaaaaaggtttaaagcactctctggtgtggaaggcaaaaacactaattctaaggaattaggtantggtaagtgaattacaaacaaacaagactttaagatttgagaactaaggcntaaggagctcgctaanggctgangaggcacttgccgagatgaaagttaatgaaaacaaaaatgaagtggctggtgatcgttccagtgatttggagaaagagcaaaaggaagggaatgaaga

SEQ ID NO: 56635 - DNA, 97 bp, Glycine max
gggaattcttatcctgatggtgttggatttgtgaagaatcttggatggttggggaaggaacctgattttgattggggtggtgattgtcatctggatt

SEQ ID NO: 56636 - DNA, 103 bp, Glycine max
agttaatcctgctgtacaacaagctaataatgcaatttaaaagtttcggatccaactaactgtttttaaaagtttaaatattctttaaagacaaattaatata

SEQ ID NO: 56637 - DNA, 406 bp, Glycine max
tccaggtttgaccaagttggaatctctcaatttaaagtggtgtaattgcataacagattatgatatgaaacctctttcaggtttgttgcatcttgctttctttttagcaaagtggctgaaacttttgcccaaaattaattgtctcgactttcttttatgcaattattgtgttttctactacagagtagttcttactcatattccacctaagtttatttaccttgagtggaatggtttaatatctctttgaaaagaacatgttgcaatagctgtatttgacaacatataattgccaaggtgcctttgtgtttatactatagaagtgttcactgccatcttccttgtagacatatgattcaataatcaacagtacaattgtctaattcaatttacttccagagcttgc

SEQ ID NO: 56638 - DNA, 357 bp, Glycine max
gaaagagatctagctcgcatgcacgcctacgcaagctcatgaactcggggcaagtcagtgtctgatgaactgggaaaccttgaggcaagcgatctacaacgttggttgcgggtatctgtggactgaacaggccaatgatcatcccagttgactccaccatcggcagtcactcaggggacattcaacattctgtctattgcatcgaactctgatggacatatgtgcaaatgctcctggtgatgatgaggatgcatatgatgcccatactgactccgtcagtggtgacattcaacttcctcgaggatcacccatttggtatttgcatgacatgagggggcaatgttgtacacacatgaa

SEQ ID NO: 56639 - DNA, 416 bp, Glycine max
tcaaaatcggaaccacattcctgggaattgatcttcccaatagaggtatgtggtcctaataatggttttgaaatgtggagttctgagtgggcaaatcaaacttcatggcatttgagtttccttattgacaatcccaaacagtctacagtttttgatattctcttgggaatttctcaagattttgagattgctggtaatactcttatgccagctttttctgttccacaggctactgccagatcttctgaaaatgcggaatcctctgcatgatctggaatttgtgttttcttttgcttgttcgtttgtttaattcaataaaggaaattaggcatgaccctcttgttgagtatgctctgcctatttgaaaatttccacacctcttttaattatcgtaatgatgtgtgaagtgtgtgtta

SEQ ID NO: 56640 - DNA, 382 bp, Glycine max
aatttttgaagcgtaccggatttcactgtgatatcatttgtgtcactggatggactgccaccccaatgcaggatgttcaggttacaattgattggtttatttcctctcaggaatgtgttcccaggacttattgtgttttaaatccacaaaatccttttgtgttaaataggtggatggggaaactgactttcccccagggcacttcccgaaatgttaagagaatgcctctttctatagggggaggagctggtgcaaagaatgctattctcatgaatatgccaaatgctgttctttcaatgtggagatattttgttggagatctcgtctttgaagtttctaagatgacttctccctacattaaatgtacagtctctttcttcat

SEQ ID NO: 56641 - DNA, 332 bp, Glycine max
gggcaaatcaaacttcatggcatttgagtttccttattgacaatcccaaacagtctacagtttttgatattctcttgggaatttctcaagattttgaaattgctggtaatactcttatgccagctttttctgtcccacaggctactgccagatcttctgaaaatgcggaatcctctgcatgatctggaatttgtgttttctctcgcttgttcgtttgtttaattcaataaaggaaattaggcatgaccctcttgttgagtatgctctgcctatttgaaaatttccacacctcttttaattatcgtaatgatgtgtgaagtgtgtgttatttt

SEQ ID NO: 56642 - DNA, 345 bp, Glycine max
ctccatataaccaggtccatcaagctctggaacctcattttcaaggtatctgatatttcatgaaatgcagtaacaaattagtaactacttcgtacatattccagaggcaacatacaacacactaagtgctaacatggcataattaacccgtatcacaggttcaatctctcacattcgtatttctccttacggttttaaaatacaactgatgttaagttttttggtctctgtgaccatgttgcaataataagtagtacgtgatacattttctcattgtcatatagtaatttgtgtcgaataattttaaattttgctgtaattgcgcgtgtgtgcgtcatatcgtag

SEQ ID NO: 56643 - DNA, 346 bp, Glycine max
  unsure (1)..(346): unsure at all n locations
cataaacccagcgatcaatcaaatagccacacagacacacanacaaacacaacttcacttttcacggtcccgccgccgaatcgcgtccgcgtttagttaaaaagttcttgttagattattgtttgttccactatgatgatgggttcgacggcgagggtgccgaagctgggttctttccgccacagcttcgcggagaggaaggagagactgctctcaatgaagggcggcatcggcggcggctactcccaaattgggatcccgctgccggagtccgacgaggaggatcactctccgacgcggaggcgctgctgctcctaccgcgccgtctcggacgggatcgtcggcg

SEQ ID NO: 56644 - DNA, 385 bp, Glycine max
ctcgtctttgaagtttctaagatgacttctccctacattaaatgtacagtctctttcttcatagcatttggaaatttggctgatgacaccatcaattttgaggcttttccccacaagctggtgcagtttggagagattcaggaaaaagttgtgttgaaattttcacaagaggaatttcttacagcttggtcaactcaggtgcgtcccgcaacgactctgttggctgatgggtgcccatatttgtatgctatggtgcatgatagttcagtgtctacaataccaggtgattttgtcattggtgttaagttgacaaccataaacaatatgtgtgcatatgggctcaatcctggtatttcaggttctcgtcttttgggcaccattcctc

SEQ ID NO: 56645 - DNA, 269 bp, Glycine max
gttcactacgcatgctcgaaacgtcagccatttaagggataaggatgcagcacgttgctgtactgcttgatcgaccatagcttccacttggggaacgactttgcccgacagtactctcagtcacagcacacacagtcctcggcctccacctcaggaagtgcacttagtcaaagcaacgatgtcaagcatatcgctcatgatgcgattctgtgcgacccacaggtggattatggtcagatcatccctgtgaacccccatattgtggagat

SEQ ID NO: 56646 - DNA, 393 bp, Glycine max
ctcgagccgcgctcacagttatttgcaatagcatttttaatgagatgctcattagatatagctatgaaaaattactgcgccaggctagagctccaagcatgtttttacaatccttcaaaaattttgtttctttgtgtgtgtatggtgatgataacttaattagtgttcatgaatatgtcaagccttactttagtggttctaaattgaaaagctttctagctggtcataatatcaccattactgatggtattgacaaaactagtgcaactttgcaatttagaaagttagcagattgtgattttctcaagagaaactttaagcagatgtctaatgttttgtgggtggctcctgaagacaacgcgagtttatggtcacaacttcattatgtttcgt

SEQ ID NO: 56647 - DNA, 198 bp, Glycine max
aaatgatcctgttatatcaattgcaaaaaaaaaaaaaagtggcctgtcgcaaggtgctcccacctaatggtgtctagaagagttagatgtacacagccttatccctgcaaacagaggctttttcctagatttgaacctgtgaccttcaagtcacaaggcagcaaccttagtgcagtgccaaaacttgctctcatttgc

SEQ ID NO: 56648 - DNA, 315 bp, Glycine max
gaaagatagaggaggaagaggagagaaagagagaggaggaagaggacgagaagaagagaaggagagaggatgaagaggaggagaagaagaaggaagaggatgaagagaagagaaagagagatgacgaagaggctaaaaggcaacaagaagagagggaaaagaagcgagaggaggaagaagctaggagagagaacgaaagggaaagagaagaggaggcagaaagggagcaagaacaagctaaaagagaagcagaagcagcagcacagagggaacaagaacaagctaaaagagagcaagaaaggatagaaaggagac

SEQ ID NO: 56649 - DNA, 145 bp, Glycine max
gatgaatctgacaaaggaattttttcacagcttgctcaaggagtatctggagtagcacatgggtccccaacggttaccatccgggggtttaccaccaacaccttggggaaaaccttcggaacaaaggtttcctccaaaacaatgg

SEQ ID NO: 56650 - DNA, 370 bp, Glycine max
aaaaaaaaaaaaaaaaaaaaaaaaaaaaaaaaaaaaaaaaaaaaaaaaaaaaaaaaaaaaaaaaaaaaaaaaaaaaaaaaaaaaaaaaaaaaaaaaaaaaaaaaaaaaaaaaaaaaaaaaaaaaaaaaaaagggggggcccccaacaattgaccccttcaacccggaatttatttcgggccgggtccctgaaggcttacaatttttcccaaaagtgattcgtattaaactttggcttaaccagggccaaactttttcccggtgtaaatttgttacccgcccaaatttccacaaaacatacaacccggaaccataatttttaaaccctgggttcccaaaggattgacctaccccaaattatttgctttgcc

SEQ ID NO: 56651 - DNA, 357 bp, Glycine max
aaaatataaaaaaaaaacagacatagtaagtagtagtatgattttaatttggaaatttaaaatttgaaaaaaaataataattgggtgtttccgatagtagtagttgtagcgggcaagccgagccgattcgatgacgcgagccactcacacactgggggttcccccaacaacacgcgcccctccccggcgaccgtaccgtattatcccccacccttcccactctttcgccttgccgtttctctttctctttttccctttcactttctctctcttcaaagcctaatttcctttttccgatgccggacttccaggactccctctcgagcacgccgccgccgcagccgtcccggcccgtcc

SEQ ID NO: 56652 - DNA, 399 bp, Glycine max
acgatttgggtacaaaaagttgaagtgggttgtgggagagaaggctgatattcttggatcaggtaagtctcaggttgttttatcagctgtgcttgagaagcctgtaagggtctagagcttcaaacaacatgatggcaagatgtgagtataatgctattgcttctgctggatctgcttcacttcacacacaatttgtgtgaatgaatgaactgcttctaacatcatcagatcacatcagtagtgaagaggaataagtgtatgaatatttctgtttttcaagtaatgttttgtatattattcggctactaatagcgctactatttcgcaggagacaacttgttagagaacctaaaatgaattacatttttttagttataaagttaacatgcctcccttttc

SEQ ID NO: 56653 - DNA, 408 bp, Glycine max
atcagaaccacattcctgggaattgatcttcccaatagaggtatgtggtcctaataatggttttgaaatgtggagttctgagtgggcaaatcaaacttcatggcatttgagtttccttattgacaatcccaaacagtctacagtttttgatattctcttgggaatctctcaagattttgaaattgctggtaatactcttatgccagctttttctgttccacaggctactgccagatcttctgaaaatgcggaatcctctgcatgatctggaatttgtgttttctttcgcttgttcgtttgtttaattcaataaaggaaattaggcatgaccctcttgttgagtatgctctgcctatttgaaaatttccacacctcttttaattgtcgtaatgatgtgtgaagtgtgtg

SEQ ID NO: 56654 - DNA, 55 bp, Glycine max
aaaaaaaaaaaaaaaaaaaaaaaaaaaaaaaaaaaaaaaaaaaaaaataaaaaaa

SEQ ID NO: 56655 - DNA, 393 bp, Glycine max
ctcaagtgagaacgccggtgcaaggaatggggatgttagggtctcaaatgatgccaagtggaatcggttcacatcaacagaggtctgtgcaatcgtcacttagacctccaacctctgccccgaataatcaacccgctggttcacaaagcttccaagggcatggacttatgagaccctcatcagtgggatcaacggctactccatctccgagttcatcacaaagcatgcagtcacttaatcagccatggttgtcatctgggtcacaagggaagcctcctttgccatccgcagcttataggcagcaattgaacccacaatccatgcagcaaacgtcacatattcctctgatgcatcaatccacaccaacatcctcgcagcagcagcaacaacaac

SEQ ID NO: 56656 - DNA, 404 bp, Glycine max
  unsure (1)..(404): unsure at all n locations
gatgcagatcttcgtcaagaccctcaccggcaagaccatcacccttgaggtggaaagctctgacaccatcgacaacgtcaaggccaagatccaggacaaggaaggaatccccccggaccagcaacgtctcattttcgccggaaagcaacttgaggacggccgtacccttgctgactacaacattcagaaggagagtactcttcacctcgtcctccgtctccgtggtggcatgcagatcttcgttaagacactcaccggcaagaccataaccctagaggttgaaagctccgacaccatcgataacgtcaaggccaagatccaggacaaggagggtatccccccggaccagcaacgtctcatcttcgccggaaagcagctcgaggacngccgcaccctcgccgact

SEQ ID NO: 56657 - DNA, 384 bp, Glycine max
atggagtttggaatttctgaagcgtaccggatttcattgtgatatcatttgtgtcactggatggactgccaccccaatgcaggatgttcaggttacaattgattggtttatttcctctcaggaatgtgttcccaggacctattgtgttttaaatccacaaaatccttttgtgttaaataggtggatgggaaaactgactttccctcagggcacttcccgaagtgttaagagaatgcctctttctatagggggaggagctggtgcaaagaatgctattctcatgaatatgccaaatgctgttctttcaatgtggagatattttgttggagatctcgtctttgaagtttctaagatgactttcccctacattaaatgtacagtctc

SEQ ID NO: 56658 - DNA, 375 bp, Glycine max
atggcgtttggaatttctgaagcgtaccggatttcattgtgatatcatttgtgtcactggatggactgccaccccaatgcaggatgttcaggttacaattgattggtttatttcctctcaggaatgtgttcccacgacctattgtgttttaaatccacaaaatccttttgtgttaaatacgtggatgggaaaactgactttccctcatggcacttctcgaagtgttaagagaatgcctctttctatacggggacgagctggtgcaaagaatgctattctcatgaatatgccagatgctgttctttcaatgtggagatattttgttggagatctcgtctttgaagtttctaagatgacttctccctacattaaatg

SEQ ID NO: 56659 - DNA, 383 bp, Glycine max
atttgtgtcactggatggactgccactccaatgcaggatgttcaggttacaattgattggtttatttcctctcatgaatgtgttcccaggacctattgtgttttaaatccacaaaatccttttgtgttaaataggtggatggggaaactgactttcccccaaggcacttcccgaagtgtcaaaagaatgcctctttctatagggggaggagctggtgcaaagaatgctattctcatgaatatgccaaatgctgttctttcaatgtggagatattttgttggagatctcgtctttgaagtttctaagatgacttctccctacattaaatgtacagtcactttcttcatagcatttggaaatttggctgatgcacacatcaattt

SEQ ID NO: 56660 - DNA, 323 bp, Glycine max
ggcaacagtgagaacaccattgaattttgattctagcaagcagagcttttgtcaattctctattgatcttcttggtggaggaattttagtggacaaaactggagattggatcacacttatacaaaattctccaattagtaacttgttgagagttgctgcttggaagaaaggctgtttaatggttaagattgtgatgtctgggaatgcagcagtcaaaaggagtgattgggcctcattggtacaagtgtttttaacaaacagcaacagtacagaacattttgaagcaagttaatggacaaaatccggaacaaaatcctgggaaa

SEQ ID NO: 56661 - DNA, 371 bp, Glycine max
ttcatggaagccatgaaaggatcaagagttggcgtgggcgaggaccacgacatgcctgacggtatgcaatgcaactaccacccgtatagaaactaccctggcgggatcagctccttctgcctccaagacaatctcggcaagcttgtttcctcttctttccctctcactaaccatcctccttcttccccttctttcatatcccacctcccagactcttcactcacccgcgctgcctcatcagctccagctcattcttcttcctcttcctcctccctccctatcaacaacgccaccgatcattattactactctcgcataactcgccacccttcacccttgcccaagaagaagaataatacgcccccttcagc

SEQ ID NO: 56662 - DNA, 357 bp, Glycine max
aggacgcacctgctgttggcttgttgttcaaggatggcaatttgtaagaaagatgtttggagagttgaatgtggaatcccttctggatttccgctcacagttatttgcaatagcatttttaatgagatgctcattagatatagctatgaaaaattactgcgccaggctaaagctccaagtatgtttttacaatccttcaaaaattttgtttctttgtgtgtgtatggtgatgataacttaattagtgttcatgaatatgtcaagccttactttagtggttctaaattgaaaagctttctagctagtcataacatcaccattactgatggtattgacaaaactagtgcaactttgcaa

SEQ ID NO: 56663 - DNA, 361 bp, Glycine max
aaaaaaaaaaaaaaaaaaaaaaaaaaaaaaaaaaaaaaaaaaaaaaaaaaaaaaaaaaaaaaaaaaaaaaaaaaaaaaaaaaaaaaaaaaaaaaaaaaaaaaaaaaaaaaaaaaaaaaaaaaaaaaaaaaaaagaagggggggcccccaaaaatgggccccgtcacccgggaaattatttcgggccgggtcctggaggggttaaaattttccccaagggggatcccttttaggcttggggttacccagggcaaaagctgttcccgggggaaatttgttaccggcccaaatttccaaaaacttaagaaccggggaccaaaagttttaacccgggggggccctaaggggtgggaaaccccaaa

SEQ ID NO: 56664 - DNA, 389 bp, Glycine max
gctactggaagcccatttgtgtgcagggttcatattgccctcaagttgaagggagttcaatacaaatatgtcgaagaaaatttgaggaacaagagtgaactgcttctcaaatccaacccagttcacaagaaggttccagtgtttattcacaatgagaagcccatagcagagtctcttgtgattgttgaatacattgatgagacatggaagaacaaccccatcttgccttctgatccttaccaaagagccttggctcgtttctggtccaaattcattgatgataaggtttttggtgctgcatggaaatccgttttcacagctgatgagaaagagcgtgagaagaatgttgaggaagcaattgaggctctgcagtttcttgagaatgagat

SEQ ID NO: 56665 - DNA, 255 bp, Glycine max
  unsure (1)..(255): unsure at all n locations
gccaaganattccccaaattgcaatctatatatatagctagatagcattgtgtactggacatccttcaaccagatcattcagccgaacggcctgctaggtgataaaacattccacctcgtgataagtctaggactccaccaggaggccttgaaacttctggggcccacattgggtgcacgaccggtccttgcctcatctgtaacacgtcgtaatcgtgggaatgttccgctctacgggtgcttctaagcgtcgaa

SEQ ID NO: 56666 - DNA, 364 bp, Glycine max
acagtccagaggaagctcgccaattgagaaggaaagctctctctcgtattgaatggctgcaaaaagctgatgtgcctaccatagcacagattgaagagttccattcgatgcagaggatgatgaatgctcctgattcaaatgataatattgatctactgttgagcattgatttgttgggtttacaaggagcaggtaaagcttttccaaacaagattgtttttgatgataagcttgtgttggctaacacacaagaattctttgatggaaattttccagtggattcttggttaccaatttttgtgaattgtctttatcctgtaagtcaattaccttcagaagctgtcgttgtaaatgttacatgtgg

SEQ ID NO: 56667 - DNA, 386 bp, Glycine max
catgtaggattcactcgtatctgaactcggaactcggctcgagggtgttctccatcatcattctcttcccaatgtgatgtagtagtcgtcgctccaaggtttgaaatgcggcatcgtcatccgcagccgaggcgatacattttccactttgactagtcgcgccttcaagtcacttcacccttttctattcgcagcaggtcggtcacctgcgctacgcctctcgttaaacgttccgggttcgcgatccactggcctcttgacagagagagaccaatgcagtttcgaaagagatacattctccaggtgaatgtcggttggagccacttgccgtgatgctgttgttgttgtagttggtgaccgatcaatgttgggtatggagaaggatt

SEQ ID NO: 56668 - DNA, 166 bp, Glycine max
gttcaggggcatgtcactccctacataattggcaccatccaggatcgctgtcttactcatgtttatatcactagtagagatggtacatacaaaggaactactgcttttcactatgaagttttaccgcagtgtcagtttctcacaattgccgttattcatatgtcca

SEQ ID NO: 56669 - DNA, 357 bp, Glycine max
  unsure (1)..(357): unsure at all n locations
gttgcaggacgcacctgagttgaccaagctgtggtgcatgatagttcagtgtctacaataccaggtgattttgtcattggtgttaagttgacaaccataaacaatatgtgtgcatatgggctcaatcctggtatttcaggttctcgtcttttgggcaccattcctcagtccatttcacagcaaactgtttggaatcaaatggcaacagtgagaacaccattgaattttgattctagcaagcagagcttttgtcaattctctattgatcttcttggtggaggaattttagtggacaaaactggagattggatcacacnttatacaaattctccaattagtaacttgttgagagttgct

SEQ ID NO: 56670 - DNA, 167 bp, Glycine max
caattttggttaagagtcttgaaaaagcaagagaaaaaaaaataccaaccatggcaaccatttctgattaacctaaaaggtcctactcctaaggaacctcaaatggagcaccctaaggaaccacgtttgagaacaacaacagcatttacaaaccaactttaagccaa

SEQ ID NO: 56671 - DNA, 89 bp, Glycine max
atttgatcgcagtgcctactggtgttgcatggtggatgtacaacaatgaagaaactcccgttgttgccgtttccaataatgacaccaac

SEQ ID NO: 56672 - DNA, 366 bp, Glycine max
acaaggcagaaagcaagctcatcctagagttttaaaaatggcagcagcctcctccatggctctctcttccccatccttggctggcaaggccgtgaagctgggcccatcagcccccgaagtcgggagggtcagcatgaggaagaccgtcaccaagcaggcctcctccggaagcccatggtacggcccagaccgcgtcaagtacttgggcccattctctggcgagcccccgtcctacctcactggcgagttcccaggtgactacggctgggacactgctgggctttcggccgacccagaaaccttcgccagaaaccgtgagctcgaagtgatccactccaggtgggccatgctcggggccttgggctg

SEQ ID NO: 56673 - DNA, 380 bp, Glycine max
  unsure (1)..(380): unsure at all n locations
aatatgtcaagccttactttagtggttctaaattgaaaagctttctagctagtcataacatcaccattactgatggtattgacaaaactagtgcaactttgcaatttagaaagttagcagattgtgattttctcaagagaaactttaagcagatgtctaatgttttgtgggtggctcctgaggacaaggcgagtttatggtcacaacttcattatgtttcgtgtaataatctggaaatgcaagaagcttatcttgtcaatctcgtaaatgtgttacgagaattgtatttgcacagtccagaggaagctcgccaattgagaaggaaagctctctctcgtattgaatggctgcnaaaagctgatgtgcctancatagcacag

SEQ ID NO: 56674 - DNA, 351 bp, Glycine max
gtcttccatagccccccaaaaatgaagagcaccatcttctttgctctctttctcttttgtgccttcaccacctcatacctaccttcagccatcgctgatttcgtgctcgataatgaaggtaaccctcttgaaaatggtggcacatattatatcttgtcagacataacagcatttggtggaataagagcagccccaacgggaaatgaaagatgccctctcactgtggtgcaatctcgcaatgagctcgacaaagggattggaacaatcatctcgtccccatatcgaatccgttttatcgccgaaggccatcctttgagccttaagttcgattcatttgcagttaaaatgctg

SEQ ID NO: 56675 - DNA, 399 bp, Glycine max
gttcgtttgtttaattcaataaaggaaattaggcatgaccctcttgttgagtatgctctgcctatttgaaaatttccacacctcttttaattgtcgtaatgatgtgtgaagtgtgtaaattttcaaataggcagaggtgatttcagtgagtgatcggtgttcacttgatctcatcataatcgtcagcgtcaattgaagaagatgccgatcagaaacatcgccgtcggaaggcctgaagaggcgactcaccccgacacgttgaaggcggctttggctgagttcatctcaaccttcatcttcgtgttcgccggctcaggctccggcatcgcctacaacaagctcaccgacaacggcgctgccacccctgccggcctcatctccgcctccatcgcccatgca

SEQ ID NO: 56676 - DNA, 266 bp, Glycine max
gatcaagttgcacttggaccactttacacgaatgactccatccagtcccttcccatggcgaatacgtttaagcctgtagagacagccgtcgagtctcgactaccattggctagcatgtacgatggtgtgccgggttacgccgattccatttgcgcttaagctggaatgtccctaaagattcgtcatattgcatcagagactgcgatttacacttcagggatggacttggctgaagagagtgtctgagactcactgcaatccccatg

SEQ ID NO: 56677 - DNA, 284 bp, Glycine max
atcagaactagtatcataatacggtttcctctgcttgggtcgccgggatacagtgatcctgacatcactttgctgtcggataatgagtaatagaggataagaataccccgatctctttaacaggatcagagttctactacgttctcgttatgaggcatcattgactcaatagtctcatccagaggctgcacagcttcacttcagaggatgagaaactatcgaaagctgcagagcatgaagtattattcaagggaatgcacaatgcttctcaggcactatttgtc

SEQ ID NO: 56678 - DNA, 382 bp, Glycine max
taaacactcatcagtcatcaccatggccaagctagtttttttccctttgttttctgcttttcagtggctgctgcttcgctttcagttccagagagcagcctcagcaaaacgagtgccagatccaaaaactcaatgccctcaaaccggataaccgtatagagtcagaaggagggctcattgagacatggaaccctaacaacaagccattccagtgtgccggtgttgccctctctcgctgcaccctcaaccgcaacgcccttcgtagaccttcctacaccaacggtccccaggaaatctacatccaacaaggtaagggtatttttggcatgatatacccgggttgtcctagcacatttgaagagcctcaacaacctcaacaaag

SEQ ID NO: 56679 - DNA, 391 bp, Glycine max
cacaattgtagaaatgaatccatagacaatgctgaagctttagaaaacggtggcagtgtggccagtaaagacaagataatccaaaagaaggaaaacctcctcctgaactggcccttaatgtcatcggtcattgtttattgtgttttcgcacttcatgatattgcatatcaagaggttttctcattatgggctgtgagtcctcaaaggttggggggtttgaactttacaactgatgatgttggtaatgttctttcaatatcaggtctagcacttatcatttaccaacttaccatatacccatccgtggaaaaagctagtggacctattgttattggtcgcatttctgggatgatatccataccacttttgcaaagttaccccttcaaaacct

SEQ ID NO: 56680 - DNA, 348 bp, Glycine max
acttaatcgatcatcacttcacttcactaagacatcatggcagacgagacccagaacaagtatgagagctctgaggttgaggtccaggatcgtggtgtttttgactttctcggtaagagtaaggatgaagaagacaagcctcatcctcaggaggaggtcatcgccaccgagtttcaaaaagtcactgtcgcagaccatggagagaagaagcacagcctcttagaaaagcttcaccgatctgacagcagctctagctcttcaagtgaggacgaaggagaagatggagagaaaaggaagaagaagaataaggaaaagaaagggctgaaagagaagatcgaggagaaaata

SEQ ID NO: 56681 - DNA, 336 bp, Glycine max
gaccgctgtcgccctcatggcagaaaagccaacagctgacagacgctgaaatagtgacttgtctccatcagtgttgatcaataaaggctttgagtttgaatgccatatccacctgaaatcgatgtcctccccatacccaatgcctcaaagtcccgacctttcagcccttcttcacattcaatccattcccaaattcaagccatgggcaaacgacagctcacactcttcgactcaccatcagctgcaaactgaaacactcacactaaataaagcttagggggaagagtgtgacacaaaatattgtgttatcagaggcttcatctcacacactcacag

SEQ ID NO: 56682 - DNA, 383 bp, Glycine max
  unsure (1)..(383): unsure at all n locations
cctttgttcactcttcttctcttgcggctagggttttagcgcagcttcttctagatttaaggaagatgggtaaggaaaaggttcacatcagtattgtggtcattggccatgtcgactctgggaaatccactaccactggtcacctgatttacaagcttggaggcattgacaagcgtgttattgagaggtttgagaaggaagctgctgagatgaacaagaggtctttcaagtatgcctgggtgctggacaaacttaaggctgagcgtgaaagaggaatcaccattgatattgctttgtggaagtttgaaacaacaaagtattattgcacagttattgatgcgcctggacatanggatttcattaagaatatgattactgggaaa

SEQ ID NO: 56683 - DNA, 72 bp, Glycine max
tgtaactgtagaagggtgagagaagatgtttcctcaggagaatcctagtaacggctatcagcatcagcacgg

SEQ ID NO: 56684 - DNA, 185 bp, Glycine max
cagatcttctgaaaatgcggaatcctctgcatgatctggaatttgtgttttctttcgcttgttcgtttgtttaattcaataaaggaaattaggcatgaccctcttgttgagtatgctctgcctatttgaaaatttccacacctcttttaattgtcgtaatgatgtgtgaagtgtgtgttatttta

SEQ ID NO: 56685 - DNA, 300 bp, Glycine max
acggcaggaagttcccctgaggaaaatccctctcgatgcaccatatttcgtgattatccccctgcattcatcacgtcaactctcggcccagtcacccaagttttgcatgaccgtcatcgtttttttggcttggtgtgttggccctccaggttaccattttatgtagtggtatctgcattcgtcatatccgcaggcctcaaatcgaacgggatacgagcaccaactattttggtcacatttacagctggccagcagtgttgaattcctccacggccgcctgggcacgcttgctcatgggct

SEQ ID NO: 56686 - DNA, 140 bp, Glycine max
ctgtgaaggaggagagagaggagtttagctcttcaattagttccgtgaccattctgtttgaattttgatattcataataaagtttccctccgaatatagttgatgtacttgtgaagtaattaaattattttttccccaag

SEQ ID NO: 56687 - DNA, 162 bp, Glycine max
tacgtacactcgaatctccgatcgcggccgcactgttgttcctttttgaggaccagtagtccatcgcggtgaattcggctgcgaacgacatagttcgtcgcgaccgtcattcaatcatgaggtcaacgtcgggcgcagtaacgaaggttttggttgaccgtc

SEQ ID NO: 56688 - DNA, 55 bp, Glycine max
aaaaaaaaaaaaaaaaaaaaaaaaaaaaaaaaaaaaaaacaaaaaaaaaaaaaaa

SEQ ID NO: 56689 - DNA, 123 bp, Glycine max
aaattttgctgacaagtgtccacaaaatttgttagctgaatactgcccccataattgaggatcatgtattgaaacatatttaatttgctcacgaatttaatttgttcctgctgtttctttctc

SEQ ID NO: 56690 - DNA, 405 bp, Glycine max
atcccctcggggaattccaattccacattttcaagaaataaggaggcaaaaatgttcatatatgaattggaattatttgttttcttattaggcctatcctgaagccaaaggaaatgagatcggaattcctcggggaattccaattccacattttcaagaaataaggaggcaaaaatgttcatatatgaattggaattatttgttttcttattaggcctatcctgaagccaaaggaaatgagatcggaattcctcggggaattccaattccacattttcaagaaataaggaggcaaaaatgttcatatatgaattggtattagttgttttcttattatgcctatcgtgaagccatacgaaatgagatcggaattcctcgggggtaccgagctcgaattccctatag

SEQ ID NO: 56691 - DNA, 338 bp, Glycine max
ttcggctcgagatcaaggtttcttcctttctctgctctttgtcttctctgacacatttggggccttgttgagtgtgtttttgcaagagggtatcgcaacggacattgaagttgctgaacggggctccttccctggaaaggaccagcagtaccctcaaccaacacaagccatgaatgctcagggcccccaaaatgggccctttaaaaaggcccctaactgcggattcaatggcaacttggtcctcccccaaaatactggggccaaaatttcaaggtccaagcaccaaacgggttatgctgaagcctgtggtgaggttggcaatcctggcaatgcaatgg

SEQ ID NO: 56692 - DNA, 409 bp, Glycine max
ttcggctgcaagctctagtgctgggacctgtctcacacagggaaactacgatctgcgtaggattgcaaccaacatgatctactcacacaagagcactccaacacccatgcatgtgatattcggcgtcattcgcgccatcccttggcacatctccctcatctacggctgccttcctctccaaacccaagctgctctcacatgttctgccacgccgccgctccgtcaccgccatgccatcgcatgcgaactctttcgcgcagctggcggcgacatctccatatggcacggcagcatgcctctactgattgacgatgacagaatccgacaccgcattgtggcgtttcatgacctgaagggagagggatcgtggaatgtcgcttgtgacgcgctacaggtaccgtggctccat

SEQ ID NO: 56693 - DNA, 375 bp, Glycine max
tggaggtacaatcagtgtttaccacttgtgttgcgtcaccccttttgattccggggagtgctacagtatggatgagatctagtgacattcatgctgatggagtataaggtctgtccaactggatgatcttggtttcacctcagtaagatcccaaatcatcggaaatttacagggtcatgatcaagtcacaggttgttggtgcattgagatcgattgtgagttgttcatgtggagttccaactctgcgacgtgctaaatgcgatagcgcatcacaattctcatgtgtgggtagttctccagactacgtgtgcattgcggaatttgctcgctcatatgtatactgccacggtgcatgagatcttcaagtgagctgca

SEQ ID NO: 56694 - DNA, 394 bp, Glycine max
ggaacatctatcaccacagcattggatacagcataattatcctgggaatcatcaacatcttcagggggtttagcatcttgcatcctgatcagaaatggaaatcaacttacactgcagtgctcattgcacttggtgcagttgccttgttcttggaagtgatcacatggattgttgtgttgaagagaaagtctggcaagtccaccaaaacctatgatggacacaacaatggacaatctacggaagaccccctaaccatataaaaataaagtgaacaaatttggcttgaatgtgttctactttccctttcccttctttccccccctttttttttccttctatttatatgacacatatgatatctttgtataatgcttgcgtataaaatataaaattt

SEQ ID NO: 56695 - DNA, 124 bp, Glycine max
ggaatacgttgtggagaacttgaagcggtagtgttgattcctgggtgcttggaattttgtttggttgtgaagacatacattacatgtattcaaaggctgctattatcattacgattatgacgat

SEQ ID NO: 56696 - DNA, 370 bp, Glycine max
  unsure (1)..(370): unsure at all n locations
aaaaatataaattcccttgtttcatgtctttcctttatttgggttcttttggggtgatcttttgagttgaacggagattaatgttgaaatcttttttataaacctagatgatttccttgctgtcttggtaaatttaatctgtatattcgtttgtgtttgtaagtttaaaccccacacttgttaggataagggtgtgttgttggatcntttgtgttggttggcatcttattgtagcgttcgactattggttgatggaaaatgttggattcttgtggctatttatggtttttttaagttgttcttgtttgttttcctggccttaatgttactagactttaatttgaccaaacatcagctttgcccagttttt

SEQ ID NO: 56697 - DNA, 83 bp, Glycine max
ttggatctccgatcgcgtccgctccttctaattttttttttgttccaatgttttgcatcttttcactctctcaagtatctctt

SEQ ID NO: 56698 - DNA, 389 bp, Glycine max
attgaattttgattctagcaagcagagcttttgtcagttttctattgaccttctcggtggaggaatcttagtggacaaaactggagattggatcacacttatacaaaattctccaattagtaacttgttgagagttgctgcttggaagaaaggctgtttaatggtcaagattgtgatgtctgggaatgcagcagtcaaaaggagtgattgggcctcattggtacaagtgtttttaacaaacagcaacagtacagagcattttgatgcatgtaagtggacaaaatcagaaccacattcctgggaattgatcttcccaatagaggtatgtggtcctaataatggttttgaaatgtggagttctgagtgggcaaatcaaacttcatggcatt

SEQ ID NO: 56699 - DNA, 396 bp, Glycine max
  unsure (1)..(396): unsure at all n locations
ctctctctctctctctctctcatcactctctctctctctctctaagacacacaaacactacacatcacaatctcacattgttctcaagtttcaacactttctagttctaccatggcggtaggactctccgccgccataaccatgaagtccctcctccgtttccaccaacctcacctgaacctccccaaatcaatcccaacaacactccctttctcccccatgagaattttccaccacacagcatcaccaagaacccaaaaagtttcaactttcaccgtttgtgtcctcatgcaggacccaaaacaaggcacccacatggaaattgagccacaagaacaacctcctcctcctcctcctcctcncgctcaacaagttctgtcaccaaagttggctgag

SEQ ID NO: 56700 - DNA, 124 bp, Glycine max
tggatagattgaactctttctccaacgtcaaagattctttatattttctccctttttctttttttcttcttgtttttgttttccctttaagcttataatatttgtatctatcatttaatcaaaa

SEQ ID NO: 56701 - DNA, 59 bp, Glycine max
ttgatattatgtcatatttctattctcattccaaacgttctgaatattttactattatc

SEQ ID NO: 56702 - DNA, 418 bp, Glycine max
gactctaaaggatccctcggggaattccaattccacattttcaagaaataaggaggcaaaaatgttcatatatgaattggaattatttgttttcttattacgcctatcctgaagccaaaggaaatgagatcggaattcctcggggaattccaattccacattttcaagaaataaggaggcaaaaatgttcatatatgaattggaattatttgttttcttattaggcctatcctgaagccaaaggaaatgagatcggaattcctcggggaattccaattccacattttcaagaaataaggaggcaaaaatgttcatatatgaattggaattatttgttttcttattaggcctatcctgaagccaaaggaaatgagatctgaattcctcgggggtatcgagctcgaattctctatagtga

SEQ ID NO: 56703 - DNA, 329 bp, Glycine max
gtgagaacaccattgaattttgattctagtaaacagagcttttgtcaattttctattgaccttctcggtggaggaattttagtggacaaaactggagattggatcacacttatacaaaattctccaattagtaacttgttgagagttgctgcttggaagaaaggctgtttaatggttaagattgtgatgtctgggaatgcagcagtcaaaaggagtgattgggcctcattggtacaagtgtttttaacaaacagcaacagtacagagcattttgatgcatgtaagtggacaaaatcggaaccacattcctgggaattgatcttcccaat

SEQ ID NO: 56704 - DNA, 140 bp, Glycine max
gccagattgagacaaagaatagattctcaatacaatgaggttcaggctcagatggaaacaaatttgtttaaattgtctcttgatgatgttgaaactcctaaaggttccatgttggatctgaaaatttctcaatctaaaat

SEQ ID NO: 56705 - DNA, 313 bp, Glycine max
gttgataatgttaacatgggtttgggactaatggagacttatggaaaaacacacactgatactaaaatctctctctcaaattggcacaacccggcaccttgggtggcttcaagttcaacacttgggggtcctctagctgaagttctaaggtcaagcacagtcactgccacggacaatgaagcaacctccaacgcaacctcatcacaagcaacaactaacatctgaattcaaaaaccctccgggaacaattgggtcaaccccaatccgggttgtgcaaaaaacccctaattcaatggccgaaaacaattacaat

SEQ ID NO: 56706 - DNA, 362 bp, Glycine max
attatttccaccatctcaacagtgggtggcttcggtttctcatccttggccagagtggatccaactcatgaagtgcttgttcagcaaggggatactttgtcatgaggaggaaaaaatgttccgcaatgctggagatttcttagataaaggaggctatttcaacaaataatgcatgctgggaaattggagaatcacccatcaagatatgaataaactgggaacctaaaatttcttcggtgcttggtagaacacagagccaaaagctaagtcggttacaagagtctcactattaatattatgagcacagtgagcaaccgtctgtcaaaagttgataactggcaaagaatcagtttcagcccctg

SEQ ID NO: 56707 - DNA, 132 bp, Glycine max
cggggaattccaattccacattttcaagagataaggaggcacaacttgttcacatatgaattggaattatttgttttcttattaggcctatcctgaagccaaaggaaatgagatcggtattcctcggggaat

SEQ ID NO: 56708 - DNA, 53 bp, Glycine max
cggaggggacgaagactcttgccctcgtggtggaggatattgatgcgaccgat

SEQ ID NO: 56709 - DNA, 105 bp, Glycine max
aattcggcccaaccccggttcaaaaaccctaaccctccgccttcaaaaaaatggctgatcttccccttgcaaggaattcaaggtccccttccccgtggaaagctc

SEQ ID NO: 56710 - DNA, 59 bp, Glycine max
ctcgagccgaaaaaaaaaaaataaatataaaagaaaagaagaaaatcaaaaaaataaac

SEQ ID NO: 56711 - DNA, 120 bp, Glycine max
gaatccggtccagccgagctagctagctagcaagcaagcacagagattgaagcaaagccaagccatgccctcatgtgcttggcacgtgtttcaatcctcctctgcgctctaaacctaacc

SEQ ID NO: 56712 - DNA, 279 bp, Glycine max
ctcgagccgctccattggtccttaaacactcatcagtcatcaccatggccaagctagttttttccctttgttttctgcttttcagtggctgctgcttcgctttcagttccagagagcagcctcagcaaaacgagtgccagatccaaaaactcaatgccctcaaaccggataaccgtatagagtcagaaggagggctcattgagacatggaaccctaacaacaagcgattccagtgtgccggtgttgccctctctcgctggaccctcaaacggaaagccc

SEQ ID NO: 56713 - DNA, 102 bp, Glycine max
ctctttctctctctagaattctcagatttgcggggcgagatgatgcagcagccaggacccggcatggcacctcccaccatgggccagcagccgccgcaacag

SEQ ID NO: 56714 - DNA, 296 bp, Glycine max
tggtaatactcttatgccagctttttctgttccacaggctactgccagatcttctgaaaatgcggaatcctctgcatgatctggaatttgtgttttctttcgtttgttcgtttgtttaattcaataaaggaaattagacatgaccctcttgttgagtatgctctgtctatttgaaaatttccacatctcttttaattgtcgtaatgatgtgtgaagtgtgtgttattttaaaaaaattcataaaaaaaatcattcatttgcaaaaaaaaaaatcattttcataaattggggtaaaa

SEQ ID NO: 56715 - DNA, 197 bp, Glycine max
tggtaatacacttatgccaactttttctgttccacaggctatcgctatatcttctaaaaaggcttaatcctctacatgatctggaatttgtgttttctttcgtttgttcattgggttaactcactaaaggaacttccacatcaccctcttgttgattacgctatgtctattcttacattttccacctctcttttaat

SEQ ID NO: 56716 - DNA, 100 bp, Glycine max
ggaatccggttcaggcaaaagggaaggaaactaaaattgttttgggaaaacccttccaattggaaccggaatcagatttaaaaccttcttaaagagcccc

SEQ ID NO: 56717 - DNA, 122 bp, Glycine max
ggaagagtgaacatgacaatgacaatggggtccgggggaatactgaacacaacgcccactgcacagcttcaaaactaaatcgccatcgccatcaagactttccgtgcccaaatgatgagaaa

SEQ ID NO: 56718 - DNA, 204 bp, Glycine max
gaaagatctagaaacttaggagttttaaactttctctatcacagaatacaaaaccctaaaactaccaacgtcacccaaccaccacaacctcccttaatagccgccgcaccaccataagcaccaactcgccacccgcgaccaaactccgaccactatcgccgcgccgcatcgtctccgacgccaaacagaaacatctcatccaac

SEQ ID NO: 56719 - DNA, 88 bp, Glycine max
cacaaccgaggcagtcttttattttatatagtataattcattctgtcatatatatctgtgtgtgtaacaatggtggtctttatttgca

SEQ ID NO: 56720 - DNA, 210 bp, Glycine max
gaaagtcttccatagccccccaaaaatgaagagcaccatcttctttgctctctttctcttttgtgccttcaccacctcatacctaccttcagccatcgctgatttcgtgctcgataatgaaggtaaccctcttgaaaatggtggcacatattatatcttgtcagacataacagcatttggtggaataagagcagccccaacgggaaatga

SEQ ID NO: 56721 - DNA, 111 bp, Glycine max
ccaccactgaaataacttccattcactactataacatggcttcttctaccagcatctcttccttcctaacatcatccccttcagggcccttcaacataccatcatctcctt

SEQ ID NO: 56722 - DNA, 186 bp, Glycine max
caaaaaaagaaggatgaaccttgaacccttgggaaaaaggcacctacaacattaagggctccaacttctcctcctcctggtccccttcctcccaatttcccccctcctcctaaaaacctttcggtaaccccttttaattcaacaacttgcacccattgtccatcccgggcggtgtgaacccaagac

SEQ ID NO: 56723 - DNA, 181 bp, Glycine max
tatgaaccctgatactacgagagctacaccgtttcgttcagtatatacgatcgacaggtgcatggggatcagacgttccttcagagcatcgttgtggagcctgtaccgttgaccacctgctgagtaaccgaagatccatttcgactcgatgtttacacctctcatcagggtgttaaccttc

SEQ ID NO: 56724 - DNA, 75 bp, Glycine max
gacgtcgcacgcacgcgtacgtaaacccgaattccgctcgagctcgagccggtttttgatgataaacttgtgctg

SEQ ID NO: 56725 - DNA, 269 bp, Glycine max
cttcaatcatatcagcttcactgtcactgtaatctccccaacacttgcttggctttttcttactaaaatgattaacacaaaggataggaactggctccttgcaagatgcctgtcgagatacctaaaactgatgccaaggattgactggactgaggaggtctttgaggcacaactgattacttatgaggatttctgaaaggtttcacacagcttggtacatacttttctatcgcggttccaatttatagcgtgtttcgtgaaagacgctc

SEQ ID NO: 56726 - DNA, 121 bp, Glycine max
acgtaaactcgaaattcggctccaaaactgaaaaggtttttaatcaagaccttaattttaagaaaaccgtcaaagatgttggaaaacccatgacccacttggaatcgattgcaacctctgc

SEQ ID NO: 56727 - DNA, 98 bp, Glycine max
gtgtgggtgaattctcacgaagtgtgggcaccatgccttcagcaagtaccaatgggttgatgacgttgtgggtttgacccttcagtcaacacttttag

SEQ ID NO: 56728 - DNA, 414 bp, Glycine max
aggtcgaatctagatgatcccctcggggaattccaattccacattttcaagaaataaggaggcaaaaatgttcatatatgaattggaattatttgttttcttattacgcctatcctgaagccaaaggaaatgagatcggaattcctcggggaattccaattccacattttcaagaaataaggaggcaaaaatgttcatatatgaattggaattatttgttttcttattaagcctatcctgaagccaaaggaaatgagatccgaattcctcggggaattccaattccacattttcaagaagtaacgaggcaaaaatgttcatatatgaattggaattactttgtttttctaataggcctatccggatgccaaaggaaatgacatcggaattcctcgggggtaccgagctcgaatt

SEQ ID NO: 56729 - DNA, 381 bp, Glycine max
attgcacaatgtttaacatgggaacgttttgggagcttttttttgttagaattttgggaattgtcttgtctgtgatggaatgctccttaaacccaggcttgggttcttttgattctgatacacttaatggttttagaatttagagtaggggatcatgatccagattagcttcctcatctgaaaatgagtatatgacagatggaaacctaataagaatctccggatactagattgattttgcacgatattgacaagggaagagaggtttaattggtggattttagacataatttgataaagatccaatgctaaatatttatgtttcaaagattgtatttcagtgaagcacaattgttgcaaagttgttgggcaccatacatg

SEQ ID NO: 56730 - DNA, 66 bp, Glycine max
taacaatcccaaccattgtatgctaaaaacaaaaaaaaccatagtatactaaaacatttacgctac

SEQ ID NO: 56731 - DNA, 217 bp, Glycine max
gtcaaagtcagcactctgcatcaggtgacaaaattcggatatcccgctgtacttcgccattgggtggcagccgctacactgtgaactacaccaagtatcggcatgttgacaaatggccaatacaaatactcaatggggcctcatcggaggaacgtgtagaggccaaatgatggcacgttgctacatacaagccgaatgaagtgcatggcaatatgac

SEQ ID NO: 56732 - DNA, 225 bp, Glycine max
gctagggagaaaagaaaatatttacatcgatgataaatatagaattagcacgaatcttttcatttcaagtcagatatgtatcagttgacatctctttcatgtatatgcagtcagagttatagataaattttgaatttacgcggaatattctgtacagaataagaggtggaattatgcaaggacgtggtaattaatttaattgattagcgtatggtttttttcaaa

SEQ ID NO: 56733 - DNA, 368 bp, Glycine max
agctcggaattcagctcgagtctgtgcttactttttcttcttcatctaaatgtttccgagcttgccaaggttatctgcatttggtgagcctgttccttttttttttggtgaagttggtgagcttgtttcctagtgtttagctaaccaaactttagctgttattaattgatgccacacaaaactttggtgtctaagaaattaatgttaatattattttaagttgttgattttacaatcatctgatgcagcgcagactgaaatttagagctttgtgcataaataatcatggaaaatgtgtaatactataaatacttgtggatattcatttaaaagtgtattgacttaaaagtcttctgaatgccaggaga

SEQ ID NO: 56734 - DNA, 308 bp, Glycine max
tttggtttggtaaggtaaccttgtgttgttgttccaaaaaataaaaagttttgttaaagttaaactacttcctaagtaccccaaaatccacttttaagggtaagggtcctaataataatggaataaaatttggttaaaagaccaaaaaaaaaaaaaaccacaaaaatcctactctcgaacaccaaagttcacatccaacctctcacaacaaaaaaacaaaaaaaaaaaaggggggccccccccaatagtgcccccctaccccgggaaaaaattcccgcccggttcttcacgggtgtaaaattttcccc

SEQ ID NO: 56735 - DNA, 61 bp, Glycine max
aaaaaaaaaaaaaaaaaaaaaaaaaaaaaaaaaaaaaaaaaaaaaaaaaaaaaaaaaaaaa

SEQ ID NO: 56736 - DNA, 328 bp, Glycine max
attatgctagttttgatggttattaccaagcaagttatgagcaagatggcagaaatgatcaacagtctttgtggtggtgatgaaaaactgatgcgtgaaaggacacacctgctgttggcttgttgttcaaggatggcaatttgtaagaaagatgtttggagagttgaatgtggaatcccttctggatttccgctcacagttatttgcaatagcatttttaatgagatgctcattagatatagctatgaaaaattactgcgccaggctaaagctccaagtatgtttttacaatccttcataaattttgtttccttgtgtgtgtatggtg

SEQ ID NO: 56737 - DNA, 71 bp, Glycine max
tggagaaccagctcgaccagatgcctaggagattctatcttgctgggaaccaagagcaagagtttccaaaa

SEQ ID NO: 56738 - DNA, 394 bp, Glycine max
aatccttaaagttagatatttaagattaccagttgcagtcaaacaagggccccacacatgcgcaagaatgtaaaatgattaacaattgtcatacaaactgtaggaatccttaaccataatcaatggtacatgtgcatcaaatgcctcctcatagagttatagaaaaagcctattgcaagctaatcaatctcccttctatccatgaggatttctggcaattctcagtgataagtctataaatccttgccttcatacacattggggccaaaacaatggagtaagataatggttattgaatccctgtttttgtgcaagtcttttgtttttgtttttgcttttctttactaacaactgtgacctatagatgtgattgtatttggtgaactttacccct

SEQ ID NO: 56739 - DNA, 404 bp, Glycine max
ctattgtgttttaaatccacaaaatccttttgtgttaaataggtggatggggaaactgactttcccccagggcacttcccgaagtgtcaaaagaatgcctctttctatagggggaggagctggtgcaaagaatgctattctcatgaatatgccaaatgctgttctttcaatgtggagatattttgttggagatctcgtctttgaagtttctaagatgacttctccctacattaaatgtacagtctctttcttcatagcatttggaaatttggctgatgacaccatcaattttgaggcttttccccacaagctggtgcagtttggagagattcaggaaaaagttgtattgaaattttcacaagaggaatttcttacagcttggtcaactcaggtgcgtcctgcaa

SEQ ID NO: 56740 - DNA, 333 bp, Glycine max
cgtgcctaagctcagaattcagctcgagtcttggtggaggaattttagtggacaaaactggagattggatcacacttatacaaaattctccaattagtaacttgttgagagttgctgcttggaagaaaggctgtttaatggttaagattgtgatgtctgggaatgcagcagtcaaaaggagtgattgggcctcattggtacaagtgtttttaacaaacagcaacagtacagagcattttgatgcatgtaagtggacaaaatcggaaccacattcctgggaattgatcttcccaatagaggtatgcggtcctaataatggttttgaaatgtgga

SEQ ID NO: 56741 - DNA, 66 bp, Glycine max
agctcggaattcagctcgagcccattaagcgcagcggaagggaagtgttaccgaacaaggttttag

SEQ ID NO: 56742 - DNA, 377 bp, Glycine max
aaatattttaatactaatttgtgtaagttttttgttttctatttaacaggaggcttgccaagcgatcgctgaaaggttggagtgtcatctcaacctaaggatagtcacgctaggcacaaagacacatgaggccatcgaacaatgcctcaggattgtcaagagtgtcacagaagaccgcattgtgtatgtgagatcttgatgtaggcgacgcacagatcagccatagtttatttacacatttgatattatcatatttggaagatgtatatacatttcttgtacttgaaaacatgtttgtttttgactgaacattttgtatattttaagttactttggtttatgataatagtttataaattaatgttaacgtttaaatg

SEQ ID NO: 56743 - DNA, 120 bp, Glycine max
gaaaacttcgatacaagttagtgcttttccttccgttgttctgccggaatttctttacctaggatgctacgacaccgcatcacgctcggagcttctgaagtaccaggggatttctcgtgg

SEQ ID NO: 56744 - DNA, 117 bp, Glycine max
gtcggacgcacgagtacgtaagctcgggggaccgatccacggagtcatcagttgcatagtttgttgcaaagcgggcattgcactcgagtcactttctcgttccgctatccgtcgaat

SEQ ID NO: 56745 - DNA, 284 bp, Glycine max
caacagctttcatgggatgatgattagcagggttttcgatgattacacaggcatgttgcggctggtccacttttggcttggggatgctgcaacatacgcggcaggaggtcatggtatgggtttgggcaactccacctgcgagccagttccatggtcgttcggtcatatcatgggtgacctttttacccacggatattgccaatgaaagcatcgctctcgcgaatttaatccatgcatccgtgtccttggcaccatgacagtgtccataatcataattatggtgt

SEQ ID NO: 56746 - DNA, 437 bp, Glycine max
ctcgacaggtcacctctgaccgtttgaaggaagctgtcaatcgcctctctcaaggccaggcgtctctcacccagagccacacagccttaaacaccaaaatgaattccatccactccttccttaacactaaaattaactccctcatagaccaaatcgcagccatcaccaccaaccccagctcaccttccccttcctctcagccatctccttctccgattcaccgtcctcacatgaaactggacgcacctcgtttcaatggtcacgacccgcttggatggatatttaaaatatcccaattctttgactaccagacaattctggagcaagagcctctcactgttgcgtctttctacatggatgggtcggcgcttcactgatatcagtggatgtctcgacaggttcttttcatcgtgggctgtgatgtggtgcatcacatg

SEQ ID NO: 56747 - DNA, 403 bp, Glycine max
gtaagctcggaaatcggctcgagcattggtacaagtgtttttaacaaacagcaacagtacagagcattttgatgcatgtaagtggacaaaatcggaaccacattcctgggaattgatcttcccaatagaggtatgcggtcctaataatggttttgaaatgtggagttctgagtgggcaaatcaaacttcatggcatttgagtttccttattgacaatcccaaacagtctacagtttttgacattctcttgggaatttctcaagattttgaaattgctggtaatactcttatgccagctttttctgttccacaggctactgccagatcttctgaaaatgcggaatcctctgcatgatctggaatttgtgttttctttcatttgtccgtttgtttaattcaataa

SEQ ID NO: 56748 - DNA, 415 bp, Glycine max
ctggacgtcgacactagaggatcccctcggggaattccaattccacattttcaagaaataaggaggcaaaaatgttcatatatgaattggaattatttgttttcttattaggcctatcctgaagccaaaggaaatgagatcggaattcctcggggaattccaattccacattttcaagaaataaggaggcaaaaatgttcatatatgaattggaattatttgttttcttattaggcctatcctgaagccaaaggaaatgagatcggaattcctcggggaattccaattccacattttcaagaaataaggaggcaaaaatgttcatatatgaattggaattatttgttttcttattacgcctatcctgaagccaaaggaaatgagatcggaattcctccggggtaacgaagcttcg

SEQ ID NO: 56749 - DNA, 400 bp, Glycine max
gactctacaggatcccctcggggaattccaattccacattttcaagaaataaggaggcaaaaatgttcatatatgaattggaattatttgttttcttattaggcctatcctgaagccaaaggaaatgagatcggaattcctcggggaattccaattccacattttcaagaaataaggaggcacaaatgttcatatatgaattggcattatttgttttcttattaggcctatcctgaagccaaaggaaatgagatcggaattcctcggggaattccaattccacattttcaagaaataaggaggcaaaaatgttcatatatgaattggaattatttgttttcttattaggcctatcctgaagccaaaggaaatgagatcggaattcctcgggggtaccgag

SEQ ID NO: 56750 - DNA, 385 bp, Glycine max
tcggggaattccaattccacattttcaagaaataaggaggcaaaaatgttcatatatgaattggaattatttgttttcttattacgcctatcctgaagccaaaggaaatgagatcggaattcctcggggaattccaattccacattttcaagaaataaggaggcaaaaatgttcatatatgaattggaattatttgttttcttattaggcctatcctgaagccaaaggaaatgagatcggaattcctcggggaattccaattccacattttcaagaaataaggaggcaaaaatgttcatatatgaattggaattatttgttttcttattaggcctatcctgaagccaaaggaaatgagatcggaattcctcgggggtaccgagct

SEQ ID NO: 56751 - DNA, 406 bp, Glycine max
tctaaaggatcactcggggaattccaattccacattttcaagaaataaggaggcacaaatgttcatatatgaattggaattatttgttttcttattaggcctatcctgaagccaaaggaaatgagatcggaattcctcggggaattccaattccacattttcacgaaataaggaggcaaaaatgttcatatatgaattggaattatttgttttcttattaggcctatcctgaagccaaaggaaatgagatcggaattcctcggggaattccaattccacattttcaagaaataaggaggcaaaaatgttcatatatgaattggaattatttgttttccttattacgcctatcctgaagccaaacgaaatgacatttgaattcctcggcgacattcaattccacatt

SEQ ID NO: 56752 - DNA, 374 bp, Glycine max
agattcaggaaaaagttgtattgaaattttcacaagaggaatttcttacagcttggtcaactcaggtgcgtcctgcaacaactctgttggctgatgggtgtccatatttgtatgctatggtgcatgatagttcagtgtctacaataccaggtgattttgtcattggtgttaagttgacaaccataaataatatgtgtgcatatgggctcaatcctggtatttcaggttctcgtcttttgggcaccattcctcagtccatttcacagcaaactgtttggaatcaaatggcaacagtgagaacaccattgaattttgattctagcaagcagagcttttgtcaattttctattgaccttctcggtggaggaatttta

SEQ ID NO: 56753 - DNA, 408 bp, Glycine max
ctgcacgtcgacactagaggatcccctcggggaattccaattccacattttcaagaaataaggaggcaaaaatgttcatatatgaattggaattatttgttttcttattaggcctatcctgaagccaaaggaaatgagatcggaattcctcggggaattccaattccacattttcaagaaataaggaggcaaaaatgttcatatatgaattggaattatttgttttcttattaggcctatcctgaagccaaaggaaatgagatcggaattcctcggggaattccaattccacattttcaagatataaggatgcaaaaatgttcatatatgaattggaattatttgttttcttattacgcctaacctgaagcaaaagaaatgagatcggaattcctcgggggtaccgag

SEQ ID NO: 56754 - DNA, 383 bp, Glycine max
gattctagcaagcagagcttttgtcaattttctattgaccttctcggtggaggaattttagtggacaaaactggagattggatcacacttatacaaaattctccaattagtaacttgttgagagttgctgcttggaagaaaggctgtttaatggttaagattgtgatgtctggaaatgcagcagtcaaaaggagtgattgggcctcattggtacaagtgtttttaacaaacagcaacagtacagagcattttgatgcatgtaagtggacaaaatcagaaccacattcctgggaattgatcttcccaatagaggtatgtggtcctaataatggttttgaaatgtggagttctgagtgggcaaatcaaacttcatggcatttgag

SEQ ID NO: 56755 - DNA, 381 bp, Glycine max
caagaggcatttgaattttcgtgttttgatcagaatccaaggaaaacatcacataatttcggaatcacaagttaaagtttcatgtagcagacgaagagaaaagaatggtatcggaggatttggagaaacatgaattggatgaattgcagaaacaattggggaataagctaaaatttgaatccgcaacttcggctctaaaagctcatctccaatacacgtaaccatcagcatctcgatcgcttcacaaaaccttttaattgggtaaaagacaagttgccactgtgttgagaagcacgtatagagcagcatctttctggaaagctggactgggccattttgagtatgatcaattacatgttgtcgaaagcttctgagaaagag

SEQ ID NO: 56756 - DNA, 410 bp, Glycine max
ggatcactcggggaattccaattccacattttcaagaaataaggaggcaaaaatgttcatatatgaattggaattatttgttttcttattaggcctatcctgaagccaaaggaaatgagatcggaattcctcggggaattccaattccacattttcaagaaataaggaggcaaaaatgttcatatatgaattggaattatttgttttcttattaggcctatcctgaagccaaaggaaatgagatcggaattcctcggggaattccaattccacattttcaagaaataaggaggcaaaaatgttcatatatgaattggaattatttgttttcttattaggcctatcctgaagccaaaggaaatgagatcggaattccccggggggtaccaactcgaattccctatagtgag

SEQ ID NO: 56757 - DNA, 77 bp, Glycine max
cacgcgtccgtaagctcggaaatcggctcgagcttgatcagaacttattgttgatgtaatacgtatactgatatcct

SEQ ID NO: 56758 - DNA, 382 bp, Glycine max
tcaggttctcgtcttttgggcaccattcctcagtccatttcacagcaaactgtttggaatcaaatggcaacagtgagaacaccattgaattttgattctagcaagcagagcttttgtcaattttctatcgaccttctcggtggaggaattttagtggacaaaactggagattggatcacacttatacaaaattctccaattagtaacttgttgagagttgctgcttggaagaaaggctgtttaatggtcaagattgtgatgtctgggaatgcagcagtcaaaaggagtgattgggcctcattggtacaagtgtttttaacaaacagcaacagtacagagcattttgatgcatgtaagtggacaaaatcagaaccacattcct

SEQ ID NO: 56759 - DNA, 394 bp, Glycine max
caaaaatgaagagcaccatcttctttgctctctttctcttttgtgccttcaccacctcatacctaccttcagccatcgctgatttcgtgctcgataatgaaggtaaccctcttgaaaatggtggcacatattatatcttgtcagacataacagcatttggtggaataagagcagccccaacgggaaatgaaagatgccctctcactgtggtgcaatctcgcaatgagctcgacaaagggattggaacaatcatctcgtccccatatcgaatccgttttatcgccgaaggccatcctttgagccttaagttcgattcatttgcagttataatgctgtgtgttggaattcctaccgagtggtctgttgtggaggatctaccagaaggacctgctgt

SEQ ID NO: 56760 - DNA, 396 bp, Glycine max
aaaaaacagtaactgaaaagtcatgatttgtcatttgcttgaattctctggggccagatgttgttgtgcagctgttttatttcatcacttgttctaattgcttcttgttaggagcatggtttctttcttctctgagaaaggctaattatgcaaactaaaggagtttataatctggacatagtgttatgggcttctgttttgtgtacggcaattgttttgagaaaggaaactgttcattcaaactctgggttgtgatggggatcaagcgttttctgtgttggagggtcaagtcatgacaatccttttcttacattcaaacattgagaagtggaacttttgctatgaagtattatccttttgatttgaatgtatgtttcagtttatagcacatcatta

SEQ ID NO: 56761 - DNA, 383 bp, Glycine max
  unsure (1)..(383): unsure at all n locations
cattggtccttaaacactcatcagtcatcaccatggccaagctagttttttccctttgttttctgcttttcagtggctgctgcttcgctttcagttccagagagcagcctcagcaaaacgagtgccagatccaaaaactcaatgccctcaaaccggataaccgtatagagtcagaaggagggctcattgagacatggaaccctaacaacaagccattccagtgtgccggtgttgccctctctcgctgcaccctcaaccgcaacgcccttcgtagaccttcctacaccaacggtccccatgaaatctacatccaacaaggtaagggtanttttggcatgatataccgggttgtcctagcacatttgaagagcctcaacaacctc

SEQ ID NO: 56762 - DNA, 393 bp, Glycine max
gtgcatgacagttcagtgtctacaataccaggtgattttgttattggtgttaagttgacaaccatagacagtatgtgtgcatatgggctcaatcctggtatttcaggttctcgtcttttgggcaccattcctcagtctatttcacagcaaactgtttggaatcaaatggcaacagtgagaacaccattgagttttgattctagcaagcagagtttttgtcaattttctattgaccttctcggtggaggaattttagtggacaaaactggagattggatcacacttatacaaaattctccaattagtaacttgttgagagttgctgcgtggaagaaaggctgtttaatggttaagattgtgatgtctgggaatgcagcagtcaaaaggagtgat

SEQ ID NO: 56763 - DNA, 387 bp, Glycine max
ctcggggaattccaattccacattttcaagaaataaggaggcaaaaatgttcatatatgaattggaattatttgttttcttattaggcctatcctgaagccaaaggaaatgagatcggaattcctcggggaattccaattccacattttcaagaaataaggaggcaaaaatgttcatatatgaattggaattatttgttttcttattaggcctatcctgaagccaaaggaaatgagatcggaattcctcggggaattccaattccacattttcaagaaataaggaagcacatatgttcatatatgaattggaattatttgttttcttattagggctatcctgaagccaaaggaaatgagatttggaatcctcggggggtaacgagct

SEQ ID NO: 56764 - DNA, 395 bp, Glycine max
  unsure (1)..(395): unsure at all n locations
tttaatccaaacccgtgttctgatgcatggagtttggaatttttgaaccgtaccggatttcactgtgatatcatttgtgtcactggatggactgccaccccaatgcaggatgttcaggttacaattgattggtttatttcctctcangaatgtgttcccaggacttattgtgttttaaatccacaaaatccttttgtgttaaatacgtggatggggaaactgactttcccccagggcacttcccgaaatgttaagagaatgcctctttctatagggggaggagctggtgcaaagaatgctattctcatgaatatgccaaatgctgttctttcaatgtggagatattttgttggagatctcgtctttgaagtttctaagatgacttctccctacat

SEQ ID NO: 56765 - DNA, 345 bp, Glycine max
cataatcagtagcacatccgtagttcaggatgcggaagccgttcactccctctctgccctccctctgcttgctcgtcttgacatgtgcacgcatgacgtatatcataaggagttctcaacgaatgctggatcaggcatacctacacgattagtctccgcacacagcattgagtccgcctgtagttctgagcacgacggtgtggctactgtgagaagcctgctctggattaggagacaagtgcttagacctagactaatcaggattggccggtagttatggctgcagctgatgctgctgaggagaagatcattgaccatgcgaaccagatctgatgtgaggggata

SEQ ID NO: 56766 - DNA, 395 bp, Glycine max
ctcgagccgattcggctcgaggctggtgcagtttggagagattcaggaaaaagttgtattgaaattttcacaagaggaatttcttacagcttggtcaactcaggtgcgtcctgcaacaactctgttggctgatgggtgtccatatttgtatgctatggtgcatgatagttcagtgtctacaataccaggtgattttgtcattggtgttaagttgacaaccataaacaatatgtgtgcatatgggctcaatcctggtatttcaggttctcgtcttttgggcaccattcctcagtctatttcacagcaaactgtttggaatcaaatggcaacagtgagaacaccattgaattttgattctagtaaacagagcttttgtcaattttctattgaccttc

SEQ ID NO: 56767 - DNA, 72 bp, Glycine max
cggctcgagatgaagttcttatacatccaaaacttacatattttaaattatatattttgtttgttggtgttt

SEQ ID NO: 56768 - DNA, 332 bp, Glycine max
tgcacaatcttcattgcctcggaactcttcattgctcccattcatcaccaaccattataccctgatggaaccattcccaccacccagctccacaactttgaacactccttcatggccatggctttcttggtctatgccatctttgccatagttcttgatagaacatgcatcacagctcagcatgacctatctaatttgctaggagcccttagcttttacacaacaatttcttctcatccagcttcactctacggatcacatgggacgagaatggcatttctacttcctgttgcaacttttgatcactatttccttgagtacaaccctcatgg

SEQ ID NO: 56769 - DNA, 411 bp, Glycine max
cgactctaaagaatcccctcggggaattccaattccacattttcaagaaataaggaggcaaaaatgttcatatatgaattggaattatttgttttcttattacgcctatcctgaagccaaaggaaatgagatctgaattcctcggggaattccaattccacattttcaagaaataaggaggcaaaaatgttcatatatgaattggaattatttgttttcttattacgcctatcctgaagccaaaggaaatgagatcggaattcctcggggaattccaactccacattttcaagaaataaggaggcaaaaatgttcacatatgaattggaattacttgttttcttattacgcctatcctgaagccaaaggaaatgagatctgaattcctcgggggtaccgagctcgaattcc

SEQ ID NO: 56770 - DNA, 392 bp, Glycine max
gtcaaaaggagtgattgggcctcattggtacaagtgtttttaacaaacagcaacagtacagagcattttgatgcatgtaagtggacaaaatcggaaccacattcctgggaattgatcttcccaatagaggtatgcggtcctaataatggttttgaaatgtggagttctgagtgggcaaatcaaacttcatggcatttgagtttccttattgacaatcccaaacagtctacagtttttgacattctcttgggaatttctcaagattttgaaattgctggtaatactcttatgccagctttttctgttccacaggctactgccagatcttctgaaaatgcggaatcctctgcatgatctggaatttgtgttttctttcatttgtccgtttgttt

SEQ ID NO: 56771 - DNA, 155 bp, Glycine max
tcttgttggtgaacctattatgtatccagggataaatgcacttgtggatgagctgcacaaacggaggatttccacttttctattatatctccgtgtcgatgctgcaacaaatgactctttgaatgcaagtcagagatcacacttcggagatttct

SEQ ID NO: 56772 - DNA, 401 bp, Glycine max
ggcaaatccaatggctacagtgattaaggctgtcgcagaagctgccgaagatgtgataaaatccaagccctctggaagtgtatttgatagacttggtcgcagtatggatacattagatgataacacgcaacttgaagatagtttccaacatcaggagcaatatcatttattccgttctcaaaaaactgagtacaatgggcagtatgctgcaaatatgactatgatgggacatgaaactggctatccttctgattctaattcagacaatgaagggtttgatgatattaatgtcatggatcgtacggtgtctggagcttctcagatctgcccctctgctggaaacaggggcaatgattcactgatggtgcagtatagtgtagcaaaaaatgtcgatgatagtt

SEQ ID NO: 56773 - DNA, 114 bp, Glycine max
aaaattcttccaccaagttatgggtttccttgtgttgcatcgtttctccctcttacgtctctcttctagttccagcatggctacccggcgcttccatattggaccttgacccaa

SEQ ID NO: 56774 - DNA, 399 bp, Glycine max
aggtcgacatctagaggatcccctcggggaattccaattccacattttcaagaaataaggaggcaaaaatgttcatatatgaattggaattatttgttttcttattaggcctatcctgaagccaaaggaaatgagatcggaattcctcggggaattccaattccacattttcaagaaataaggaggcaaaaatgttcatatatgaattggaattatttgttttcttattaggcctatcctgaagccaaaggaaatgagatcggaattcctcggggaattccaattccacattttcaagaaataaggaggcaaaaatgttcatatatgaattggaattatttgttttcttattaggcctatcctgaagccaaaggaaatgagattggaattcctcggggg

SEQ ID NO: 56775 - DNA, 236 bp, Glycine max
ggaaatctttatattttgtaaatactacaaaacacaaggtactacgttcggtgttatgttggggaataaaagaaagaagtaaagattttcacaatgaaggacacctccaccagcgttgaccgcgacaaggaacggagttccagtggctccggtagccacatttgggtgatgagaagggtcatgcaagtcaacatgttccttgctgggcctgccgtgttgtggaggttccccaaaac

SEQ ID NO: 56776 - DNA, 342 bp, Glycine max
agcaataagatgaaaatgaaagtgcttgttttgtttgttgctacagttttggtagcatatgaatgccatggctcagactaccagaagttccctctccagatgaaaactgggtttggtgggcaatacagcaatgaggtggcatgtgccagttggaggcttggcgtggaagcaaacaacgtagtcaagtggcaaactgttcctgcagcttgcggagagtacatagctgactacgttctaggagaccaatatagatcagattccaaaacagttaaccaacaagcttatttctatgctaaatccctcaaactcaccaacatagatgtctttgtcttggacgttgac

SEQ ID NO: 56777 - DNA, 340 bp, Glycine max
  unsure (1)..(340): unsure at all n locations
ctcacacgtaaacgggagactagaggactctttcattcatcactaatatccttccatacctattcatttttcgttacttttcaagtttagttccaccaaatctattgcagatgatgggttatgagtatattttgggaggcagtatagcttctagcttggtgcttgtgtttgttatagatggttctgtatcaaagacgaagggcanatgttcagtacatgcagaaagtaatggtggtagtactataacgacatcaccagaacatggaaaccaccatcaagagatctcagatactacagacgtcatcattgtcggtgctggggttgctggcgcaacccttgc

SEQ ID NO: 56778 - DNA, 350 bp, Glycine max
gtaaactcggaaatcggctcgagatgtgatagaaataaaagcagatgccgtttccaaaaataaagaagaagtagtttcccaaacaaattcaagcaccaatacaaaggaaacaagggatccaaccaaataagggggcttaaaaaattgtaatggcggagaaaaattaacagtaaaatcaaccaaacaggacggttgatgcaaccccaaaggaaaaaggatccaaaatccaattttggaaactaaattttgataagtacctcaaggcaatgcaattagttcaaaggttcaacaagcgttttgggcgcaaaggtatatgccaaagccagaggcattttcaaagtcccttgcac

SEQ ID NO: 56779 - DNA, 354 bp, Glycine max
cctgtaacaccttcacctccttccccttcaacaccttcaccgtttccttcacctacgacacctgtaacgccttcacctccttcgccatttccttcacctacgccacctgtaacaccttcacctccttccccttcaacaccttcaccgtttccttcacctacgacacctgtaacgccttcacctccttcacctacaacaccttcaccatttccttcacctacgacacctgtaacaccttcacctccttcgccatttccttcacctacgccagctgtaactccttcaccagtaccttcacctccatcacctacaacagtaccacctgttcatagtccttctccagggtatttgcca

SEQ ID NO: 56780 - DNA, 386 bp, Glycine max
acacaacacaacacagcataccgtgtttcattttctctcacacacaaacctccttcgttttcatttacttctcaggaggtataactactagttttcgctttttttttaaaaaataaattgaggagatcttttgccatgggaacccatactttgcgacctcaggactgcttggtagaatgaatcatggcaccacgggctgaattttccccgaggaggacctacagtgattactatcatcagcagattttttggaagtgcagctaccatgaacatgtgttccaattgtcacaaagacatgtatctgaaacaggagcaggcacggcttgtagcatcatccattgggaatattatgaatgggtcatcaagcagcagtggaaatgaacctg

SEQ ID NO: 56781 - DNA, 349 bp, Glycine max
gaccgtcgcgagtctccatcttcttcatgggcctgcgccacccttacgatgcctgagttgcgttccgggccagacatattgcgccctgtctagagggtaaacggcagtccgacaagtcagccaggctcggcgtcggtcgcctgaacctgtcaaaggaggctagccgtcgtcgccgtcacgaccgggatgaatcatacgctgaagtacgcgattgccgtcacgatcgatcagatcctgaacgctgtagagtaaagtcgtaccgttcgtggaagcacttcgatgaaactgaatcaggatcacggattgatggagaatcttgggaatcagagggtttcagttagggttttgg

SEQ ID NO: 56782 - DNA, 354 bp, Glycine max
aaggaaagcaaccaacaaccttctcctttagagattgaaagtctcaaggctgaacttgctgctttggccaggcaggtgaatgtgtcagacttggaattacagaccctcacgaagcaaattgtgaaggaatgcaaaagagggcaggatcttgcgacagaagtcatcgtcttgaaagaggaaaaggaagcactcacgacagaatgtgacaatctcacgtcttttcagaaacgcatggatgaggccaaagtgaagaacagatcacaattggcacgtgcagatcttcaagctcttgttgaagaaatatgacaccaattggatcatgagaaggacctatacgcatatctccgattacag

SEQ ID NO: 56783 - DNA, 349 bp, Glycine max
aatgaatcaggttgcctagacaagagcactgacatcggacgcacgcgtacgtaaactcggcagaaattatgtcgttgtagcataatgacgcttgcttaatttgacaaattaaccccacggcaattgggtagagattagagaagcaaaaacacagttttcttacgcacgatctgatttagacaccgccacttgatcattttttttatatactttttttaagaaaaaatactataacatatgctcatcataagttggtgatagagatagttttgttcccttctaaggtgttaattggatgaagtttaggatgtggtagctattcaatagaccttactcttgatatgaaggg

SEQ ID NO: 56784 - DNA, 409 bp, Glycine max
ggtcatagaccttaagaaaagcctattaagtctgataggctggcttatttagcacaaatatttttttaaaaaaaattattattattatgatatataatattatagttatttcaatgaaattgcgaaattattttaatgatttgacgatttgaatcattttaatgtttggaatatgttgattcctataagtgtaaatgagtaccaggaataaaggctcttttcttttggtggaactcaaaagactttggtagcctatcacgtgtaatatcaataggcaagttttggccacatcttgtggtgtaaaattgtcgttttgtttttaatgaaaatctttggctttgttaaaggaaaaaaaaagtaaataggaatgcaatgcaaccaattttgggtaacttacgaataacatata

SEQ ID NO: 56785 - DNA, 381 bp, Glycine max
atgaaccctaactctaaaccaccaaactgcagccatggatatgtcgcaatcattgtgggctctgttctcggcttggcgttgctgctgttgcgtgtctgaggcggcggcggagacagtcagcaaagccgcgaagccagtggtggctgcgctggcggaggcggggacgtcatcgtcaaaggagggacgggaatctagttcgtcgttgtcggtgtcaccgattctggcatcgttgctggggctgaacaagatcaagacgagatcggggccgctgccgcaggagagcttcttcggattcaggggcgagaaagggacggcggtgctcggcggcaacaacctctcccggccgggtgtcggtgcccgcgctggcggtgggaagaagaa

SEQ ID NO: 56786 - DNA, 369 bp, Glycine max
gtactcaggcgtggtccttttatgacttcagatggtatctttgtgatacattcctagttcctgataataaggataactgcaggcattaaaataagtaggatcaacagagtaagaacatgcatatacgaagcatatatttatgatctgtagtagaaagaaacagagtttaagatgaaggcataaatggtactaaaaaataggcatttatttcctgattattttggcattttgtatcggtgattcaaaataaaaacaaaaatgacattggatttggaggtgcatctctttgtcgtaaagctggttggacaaaaatgagcttcgttgtggggtatcctaattcctaaaggctaaagcaatgtgtaattttgt

SEQ ID NO: 56787 - DNA, 269 bp, Glycine max
gaatttccttggggacaaatgaaagggagaatcttgtttattatttaatttcttttaaggatttgatcttcgtcactcagttgaaaagagagccttagtttcttgtgtatgtgtgcttggagtaggattttagccccttcatgaagggaaaattgcacgaacagtctgcaatgtttaacttttctccggatatggatggtacttgtcaaatgacttggctgaattttaatacatggacgattgtgtcaaaaataaaactttcatcaagg

SEQ ID NO: 56788 - DNA, 352 bp, Glycine max
ggttgattaggaaatggatgacgaggatgtgaatgaaagtttgcgcgagacgaaccagtttgatgaagagttcctaagagatattctgcagcagccagaagagggcggtgaagatctgaaaaactcatcgatcatgtcgtctctatttccaacaacttatatactgtccttcgacaaatccgctgctgaattgttaccaactgaaactgatcatcgtgattattcttcttcccaattgccctcatcatcaaattcaagggccaaccatggaaccaacaagaagcctcgaagcgcttcggagtcactggatcacatcatgtcagagagaaataggagacaggagctcaacagc

SEQ ID NO: 56789 - DNA, 117 bp, Glycine max
gttctccaaaaccggcggccaataattaactcctccaacccggaaataaattccggaccgttactggaagggttacaaccttccccaaaatggatccgaataaaaccttggcgtatc

SEQ ID NO: 56790 - DNA, 314 bp, Glycine max
gattgatgcagagacggctaccgacgatgtagtagatggggcggtcgatacatacgactttgctgaactattcctaagagatactctgcagcagccagaagagggcagtggccatcggtaggctcaccgatcaggtcgtcgcaatttccaacaacatatagcctgtccttcaacaaatccgctgctgaattgctaccacctgatactgatcatcgtgattattcttcctcccaattgcactcatcatcaaattcacaggccaaccatggtaccaacatgaagcctccaagcgcttccgagtcactggatcacat

SEQ ID NO: 56791 - DNA, 375 bp, Glycine max
ctttcagaaaaaaataaaaacagtacaaactacaaaacaacgttagttaagctcgatattcaccccgaaaataaaactttcaggaagaatcttcctttatgggataaaccgaattaaaaaagaaaaggagcatggattggtttattaatgaataatgaattaattaagcagatgaagaggaagatgattctgcgtaatccaaaaagtgatatatattatgagccgtagttccaaagaaagcctttgaagtccgacaaacagagtcggtgaacgacgcgcacagctaaaccacaacacaccacacacaccaacaacatttctctctctctctctttctctcgctgtcgcttccgccaacgtctccgccgcgaatgc

SEQ ID NO: 56792 - DNA, 405 bp, Glycine max
cggaaatgaaagtatgaaatagcataacaacaggtcagggagcgggttttcttcttccaccccttctaatttctctcttctctgaagctatcaggttttctatctatccatctcttgcctgccgctatttatttacgcctctttaattgtccgttctacaaacagatgctaattaattccctgtcacagctattgttgttttttgaaattgttgtttgcaattctgattaatatggtattggtatctctagagattggttattgctctcatcatatagctttactccatttggattctgtttaaggtttatttgttcgacaaccgtgggtttgacgctaatgtttgcactcatttgtcgatgcctatgatcggaagatttggattcctctaatctaatctaatct

SEQ ID NO: 56793 - DNA, 78 bp, Glycine max
caaaaagggagtcttgacttctgatcacgtgcttttcaacggcggctccactgattcactgggaagaacttacagcca

SEQ ID NO: 56794 - DNA, 317 bp, Glycine max
gcagaacacgaatttcacgtgtgttctgcgtgatgagataccccttcagccatcttcccaatccgacagcgaggagatcgagaacctcatcaatgccagggttcaccaatcagtcccgtcggcgagacgcgtcagaccttcacgcacctcgatccccgtcaccgtctgcgtcaccaatggcccttcccgcttcatcgcttccaattgcactccgctcactcttctacacaaaacctcagtcgccgccgtcactcggtcaccatggggggctcaccccgggatctccatcacagggtttggtctcgccccaaagacgc

SEQ ID NO: 56795 - DNA, 234 bp, Glycine max
gccaaatcttatcttatcgaccccatcataacagccacgacactaattctcatactctattaagcaactgtaccaccactctcggacaggatccggatcaccctatgaatgacaccgattctgaagcgcgttgaggtagctcccataaaggatgatggatccatccctgtcgtttacgaacgcgacttgcattgcgacggatacgtcatgacgatcatacgcacctgtcgccac

SEQ ID NO: 56796 - DNA, 393 bp, Glycine max
  unsure (1)..(393): unsure at all n locations
ctgacatatgtggctcttatttagctatgtctgttccttgttttctttctgtagtgtagcccttattttaaaatttcagaggttttggttttgtatatttgaagagcggggattgtgtgtatcggtgttgtgctacaatcaatgcactcttccgaaagagttccctgcaatattgtcttgagaaagtgggcagttgtgttttcatcttttgttgaaatcacaacaatcattttccctacatctctatcttctcaatcccttcncctccctctgattttacctttttttttatgaaaaaaaaatcgtattgattaagttaacttagaatatagtcctataccgtttacattttgtgggtgtttaattttaaaaatgaaactgccaatgtcagcg

SEQ ID NO: 56797 - DNA, 384 bp, Glycine max
aaccgccaagaggaggcggaaaaatctgaagcctgatgttagtcagtgagagtattcggcattcgcaagacttttggtaaacttcacctacaactctattatacttcaatgaatagagagaaacggaggtgcatgccattttgcaagaactctctaagcacttgttattctcggcggatgtcggcataaactggaatttggtggtttatttatttattttctttaatatgtggagaggacatcatcttcaatgaattgaagggctttcaggattgtatataaaaatcaatgaggttggaagtggcagaactttggcaaaatttattagaacttgaggttaagtaaaggtttttttcttgacgatttggtattcataacaacaaa

SEQ ID NO: 56798 - DNA, 379 bp, Glycine max
aggtcaactctaaaggatcccctcggggaattccaattccacattttcaagaaataaggaggcaaaaatgttcatatatgaattggaattatttgttttcttactaggcctatcctgaaaccaaagggaaatgagattcggaattcctccggggaattccaattcacatttttcaagaaataaggaggcaaaaatgttcatatatgaattggaattatttgttttcttattaggcctatcctgaatccaaaggaaatgagatcggaattcctcggggaattccaattccacattttcaagaaataaggaggcaaaaatgttcatatatgaattggaattatttgttttcttattaggcctatcctgaagccaaaggaaa

SEQ ID NO: 56799 - DNA, 285 bp, Glycine max
ggggatgcaaaagggatgataaagggctgtgaagagcgatcgacagggattcgatagaagggactcgcattgagacaatggctgcacctgtactgcagacgtgacacagaagtattacatcactggagtcacgccatcataacgatgactggactccccacgcatgtcctacgtatattggaccttcgcttgtcatgtccttcgatccgtctgcgtcgtgagatggccaacgtcatcagcttggcgcacaccaaggtcatcatgacctcccattaggtcctcctc

SEQ ID NO: 56800 - DNA, 378 bp, Glycine max
gtgatttcagtgagtgatcggtgttcacttgatctcatcataatcgtcagcgtcaattgaagaagatgccgatcagaaacatcgccgtcggaaggcctgaagaggcgactcaccccgacacgttgaaggcggctttggctgagttcatctcaaccttcatcttcgtgttcgccggctcaggctccggcatcgcctacaacaagctcaccgacaacggcgctgccacccctgccggcctcatctccgcctccatcgcccatgcattcgccctcttcgtcgccgtctccgtcggcgccaacatctccggcggccacgtcaaccccgccgtcaccttcggcgccttcgtcggccgcaacatcaacttcctccgcggcatcg

SEQ ID NO: 56801 - DNA, 382 bp, Glycine max
gaatcttcaagatgattttgaaatttaaaggagtagaggtgtatgggtggttgatcagcattgagtagcacttaactgctctgaaaacagtagaggttggttgagaagccatcgcattctgtgaagacactaagaggttgtattttcagatggtggcttaagtggaaatggcacaatctgaatacgacatggtggacctttgtgaaggttgtgatcaaacatttccaaccagagtactgcctagatcaagtggtctgggcattggaaagaaacaagaatggttgctgccacaagtcttggaaccagagacaaccaagaatggggaaacctagagggagtatccagtctcctatttagataagtaactagacctgaactaatc

SEQ ID NO: 56802 - DNA, 238 bp, Glycine max
gttgattcaaatgccatacacccagatacttcatatcggtacgtgttaaattcggtgtggattgttggattgccacttgtttcgtaccgttcaagtgattgtttgaatgatccatcatgaaatggaccacagcactgatgcacaacgcacggacatgatgaacataacacggttcgtgctgaacgaccaatccaggcacccctagtcatgcgagtatttccacatcatgctcagtcac

SEQ ID NO: 56803 - DNA, 87 bp, Glycine max
attttctgcattgtagaaatggtgccctggaagtgccactttgtgttttgtttattgtggtatgtaatatcttagtcttgatatttc

SEQ ID NO: 56804 - DNA, 182 bp, Glycine max
gaaatctctgatgatgcaaaccttttggcggattgtggatctaacaatcctgtggtagtaaaaattttacgaacccccatatgctttgcttccgggaatcatctgatgggtccttctgtcatacctctgtgcacaataattctgaatgctttgattggaatggacatcccaatatatgatca

SEQ ID NO: 56805 - DNA, 395 bp, Glycine max
tctcattgtctttctccaagaataacaactctcaattccaacctcttcaacttcgatcttccatcttccatcttccatcttccatcttatgcccactaaattctcttctctttcaccttcacttcaattacttcaattaagttgagacttccatcttcgactactagtttcaaactctctctctcacatacactataccattccttttctcgctccctctttctctttcactacaactttcccgattctgtatcatctctgcttcagttcagcatccttacatcctctctatcttccacctatttgatttgttttcatttcttccattttctttctatcttctcacaccttgttccattccacttcttttctcctcgaatctaatccttttggtc

SEQ ID NO: 56806 - DNA, 217 bp, Glycine max
attcgatcctagtgggaagtgactcacgcctttctctccctccctctaaatatagatgtctgacaacccagagtcaagccaagacaagcgactgaactagaaatagagtgattgttggatgatgcaaaggcctcatgccttgtctctcttttgatggagggtgacaaacgtgtgttatttatgagtattgtagatgagcaagttccctttctttttg

SEQ ID NO: 56807 - DNA, 371 bp, Glycine max
gaaccatctgcttgtttaagcatcacctgccaaggacctgggtactggcggaatacagctccactgtaattgacaatataaggtgctattgcaactgtctttgaatactctctgattcggatgtagaacactggagtgaattgagaaagaaagcggtagtgcaaatctttggctgggaagcccgggaggccaaagaggaattgttgagggtcttgggacttcaagaagaagagggaagttccctagaatttcttcgaagaggctacaaggcaagcacgtggtgggaagaagattttgattcagaagtatcttctgcatggcggagttgagtagtacactgttagaagagactgttttattgcatctgcatg

SEQ ID NO: 56808 - DNA, 396 bp, Glycine max
cacctttgttcactcttcttctcttgcggctagggttttagcgcagcttcttctagatttaaggaagatgggtaaggaaaaggttcacatcagtattgtggtcattggccatgtcgactctgggaaatccactaccactggtcacctgatttacaagcttggaggcattgacaagcgtgttattgagaggtttgagaaggaagctgctgagatgaacaagaggtctttcaagtatgcctgggtgctggacaaacttaaggctgagcgtgaaagaggaatcaccattgatattgctttgtggaagtttgaaacaacaaagtattattgcacagttattgatgcgcctggacatagggatttcattaagaatatgattactgggacatcccaagctga

SEQ ID NO: 56809 - DNA, 360 bp, Glycine max
cgtacgtaaactcggaattcggctcaagagttaaccctcaaatggcattggaaaatatcaaattcaacgaagattcaaacttgcccctcaacaacagcaaaacatcaaaatccctcccttcactttgtatgacactttgttccccaaggtcccctccaatgaatggattctcctccaatccctcaatggccaacaatcaaaaacttccttcctccaagccaatgtcaatccaaagcccaaagcctctccctctcaaaacctccaacaataacctcctctcgctggcaacaatccttggccttccgaatccaaaattccaatcatcagttaacaccctggtgatgccgtttccgtcgttgt

SEQ ID NO: 56810 - DNA, 222 bp, Glycine max
ctcaaattgacggtgttgattccaataatgcatgcgacataggaatcgctgctcagtttaattgtgtcatgtgggtctccaacgattcatgggagtggatgtgatgaacgcttcgtccgcagatggagtacactgtatccctaagggccagatctacctattggtcgacctgccgcaatcgcaatgcgaattcatcctgatgaccccacttccattgacagc

SEQ ID NO: 56811 - DNA, 206 bp, Glycine max
ctcggaactcggctcgaggctacatgtcaaaatccatatcggtatgcacacagctctgcatatacctaccaaaccttttgatcaaccttgacaaggtcgatgttttggagaataagttgagtgattcagcgtaagttggcgacgcttagtcacatcaacttttaacgaagaatgcccttggccatccaaaactaccaaagtacttc

SEQ ID NO: 56812 - DNA, 322 bp, Glycine max
catgatccgtacgatcacatataaagtccttgatatctacatagatccccaataggtggtttcacagatgagtgggttcggcatgtctcctatccttagtgaatatcttcggtgcgggtctatgagtgattcatcgcttaccctcaggacccacagagctcaagccttcgctgtaggcctccccaaatggctcgaagttggctcacaattaagtctgatcatatgaatgctcaggtgtacaatctagttctaaagcattcaaacgctatcagcctgattagttatcatcaatatgagggttgttctactcagatcgcttcac

SEQ ID NO: 56813 - DNA, 236 bp, Glycine max
ttcttgtttctctgatgaagggtgttccttctctctctcatcttcacaaggatggtgcgacatcagagcgtgtgcgggatgttcggcgacgtcggcgactctcacaaactttaccgcagcatcacaggtcggtaacgtttcctacactcttattgaagtcactattactgagaagttacagagatcaatcttagcgattggtgctaaagctaggggagaaattactcgaggcatat

SEQ ID NO: 56814 - DNA, 354 bp, Glycine max
cgacgttttcctcgacgcgcttcctcactgccccttccaccattgctccggcgccgccgataaatcgccggaatcttcctcctcttcttcaattctctccgaccccaacccaccgctccccacctccggtaaccacaatccgccgccgttcaacccgccgtaactcaccggttagggagaccacgaataccggttccagccacaattcgaccaccggaaacgtcacgaaccttcggagcgatcgatatctcggaacttcaaacggaaatgagaatttccccgagaaatgcgattcaaatcgagagaaagttcgtccctttcaatctccaagcgttggcatcgaagaggggaacg

SEQ ID NO: 56815 - DNA, 221 bp, Glycine max
agtagtttgaggaaattcacgtagtaaatgaacaatacaagtttgcaccagtgcagcattctttacgcggtgcatcagtggagccttagagatgacacgactgcggaagaagcattggctgaacagcagaggatatttgcagaggcacttgaaagaatgattggacgagcgattcggacaacagaactagaggttgaagccagtttatcagagataagttt

SEQ ID NO: 56816 - DNA, 262 bp, Glycine max
gtacaagttgctcaccatcatatttaaatatgcgtattacactttttgttttcatgacgactatatcgatggagaatcactcttatctcaagcacgtcatgcataccttgacgtgctgggactcttcgcagcaaccatccattgatcgattgacatggtctacccgccctgacaacgctcgtcacttcggcttcaatgctaaacatggcaacctaatcaacgtcctcgtgttatgaggggtggccgcaagacatgatttccc

SEQ ID NO: 56817 - DNA, 318 bp, Glycine max
gcagactcttatacccattctcacaagaatcgtcgtcctcttcaaaatgctcaaggtttcaacagcatcatcattttataatcaacatgcagtgccctcatccagtgttgcccgggatcaaggctatctcaggaaagccagttctggcccactcaggcttcatgctctccccagaagaaggcctactccctccatctacgcaccctcaagtccgggtgcttctggggccaccattgctacgcctcctacttctacgtacgccaacgctgcgccaacagtgactgcgacgaatctctcttctgcaactgtatccaggga

SEQ ID NO: 56818 - DNA, 379 bp, Glycine max
tgatgaaatgtgcgaaacggtgatcgtgtacaccgcgaagcactcgatctgcgggccgtgtcccctctctctgtctctgaactcaacactctcactcacccactgcaccaccgcactttcttctctctacgatttcatttccatggatctttgttgattcttcagatccagcatggccaacttcctcgctcagttccagactattaagaacacctccgatcgccttgtcatttcagtggaggatgtgagtgacttgtggccaactgtcaagcctgcttttgaggcgcgtttgccgttcaaaagggcgactttgaataacaagacgcggaaccctgtctttgttgacacattgccggcagagttcatattaactaccgat

SEQ ID NO: 56819 - DNA, 387 bp, Glycine max
gtcacacgcagttgtattgtagaactgaacaagggtttctctttctctttctctgtctgcttcttcactttctctcgtttcaatcgaaaaaaatcatgggcagaaaattcttcgtcggtggcaactggaaatgcaatgggaccactgaggaggtgaagaagattgttactactttaaatgaagctaaagtccctggagaagatgttgtagaagttgttgtgagccctccttttgtgttccttccttttgtaaaaagtttgctgcgccctgatttccatgtctcggcccaaaattgttgggttcgcaaaggtggtgcttatactggagaggttagtgctgaaatgcttgttaatttgggaattccttgggttattattggtcactctg

SEQ ID NO: 56820 - DNA, 409 bp, Glycine max
atggatggatgtgacattgtggcaaatgcagataaaagattgcctgcaacctccaaagttgcgaaatccaaacccaggttgaagaagtctgaaaagggaaccaagataaagtatattccaaaacagaagacaaatacctagtgtgaaagaataaattggagttgttagttatacagatatacagagtttgactttgttgccaatttatgttagcagaggtccaagttttaccggatggtcttctgtcagaatgttgaaagtaggtttttgccggaaaatctttacattccgcccctgttgtccgaaagatttcatatgggattttggctagttagattctttttacttgttgaattattaccttttttttttgtaataaacttgtttgatttccgtacaagttgacttt

SEQ ID NO: 56821 - DNA, 336 bp, Glycine max
cgtttatgtagcacgtatttaatcgcgtttatgtagcgtttatccacatggctccaccttgtcttgctgttggtgtaaagcttcagttgtctattcttcatctcaatggccttggtcttccaacacatgtttgaggtaagactcggttatgaggcttctatagcgcttttgaaaggtaagtttgtagtaccttttttcatccgaagaagagttccaaggaaaggactgtgttttaagggtggttttgtatgaacccaccacaccttcactccttggaactcttctatgatttttttgttatcgttcatgctaagcatcaacggggtgcctgtgttt

SEQ ID NO: 56822 - DNA, 381 bp, Glycine max
gccctcactactccatgttaacgcgatgattcatttccgggattcaaggattcccttgcctcgcttcaatctctctcccaaatcatagaaaagccttcaattagaatgaacaatttcccttttgggtttcaagcccccaagtccttccccgcttacccaagaaccgagttcgacttataatcacgaaccgccataaaacgaacccgaaagccgaaaaattcgccctttcacattctcagaatgatcaaatcatttgggaaccgtttccatcacttcttcaagcttcaccctctaatgggtctcttcctagccttgtcctttttgctcacacctgtcatgattctctccttgtatggaacccaatatggggtgcaaagtggt

SEQ ID NO: 56823 - DNA, 254 bp, Glycine max
ttcggctcaagcacacataagcactagattattttctttggtctctcattttcaccatagctcaatgggttctggtgctttatagcttcttcgtgatcttgggtcatccggctagttcaggctaaacacaggccgcacgtggtgcatcaacacgatcatgtacaacatgcatatcatcattattagcacaatcagaaactgactagcgtccattccgaccacacagctaccatcatcaacatcacaattaggca

SEQ ID NO: 56824 - DNA, 152 bp, Glycine max
ggtgggcaaaaatgatccatagccacctatcagcgctctcctgtttggtctcacccaatgactccatcagacattcatttcatcttattgggaaatcagcatgtaaggttcatttcgttgggcaatgagagtacgcgttgtgttggtgatcc

SEQ ID NO: 56825 - DNA, 266 bp, Glycine max
atcattactacctcttgaaaccacgagggtcactctgtgctatgacctcagtttcaaacgaaagccttgttcatttccgtgacattccttcctatcacagtcatctaacctacaactcagataattcatttactctatatcctcagttgagttacaaccgtttcgaatgtgaatacctgcagataccagctattcagttagggtatcacatcaggccaccactcttatattgattattacagagcaagatgcaccagctcacacat

SEQ ID NO: 56826 - DNA, 133 bp, Glycine max
taattaattgagaactaaagctgtatttgttgttcactctaaaaaagaagctgtgttttgtttattaaaaagagtgctctgttttctctgttttggttacacgacgttcattaaaatatagtatttgatatca

SEQ ID NO: 56827 - DNA, 340 bp, Glycine max
attgacttcaacttgtgtgttcatcaatcatcacaatagtaatattaatatttggcatttgatttgaatcgattaacatcgaataaaaataataaggatggtgctgccactgctgaaactgggaactctggccgtgacaaccctaagcatcacccgtggcgagcatactgaatcagcaagccactcttcatcctatattccgcgaactcatcgttagaatggctcattctaatcatcacatcactactaagatgcaaatgcgcatttacagtgactccacagacgttgagattcaccccttgaacgaggaatatgccgttcacaccaccgttgaccttat

SEQ ID NO: 56828 - DNA, 373 bp, Glycine max
tcacatctaagccttcattactggggtccatatgtcgctgactcgatcgacaaaggcttctgtccagcagttcagtgcgctgtgtctgcagcatttgggtgaccgtgtagctgctggcgaacctgattcaagcgccttcagtggccgccacagctgtgttttcacggaatgttctatacacatatcggaatgtcagaagcttagagttacaagctgtgcgtctatcattgtcatcatttccaactgggtgcatgtgacatattcagcatggacttactagcattgaacaacttccaaagccgattcctagctatgcctacgattgacattcgagtgatttatgtcaggcgctaacctcatcgtagagtctcac

SEQ ID NO: 56829 - DNA, 311 bp, Glycine max
cttcctacattctcaacacatctactctctctcacgactaatacatgccagtagtgatcacataaatgtgtgggagaagataattagactccttcaggaacccaatttcagaaactgctgatctaaacactcaaatctgcgtccatgttccagtcctctcaaaggatcaccattttcacggctctcttatcttcttgtctctacggcaactgaaagcagtcgacatgcgtcacccaagacgattaccctgaatagtacattcgcagtagcaaccttcagcagcttccggatcactgccggtgcatcacaca

SEQ ID NO: 56830 - DNA, 326 bp, Glycine max
  unsure (1)..(326): unsure at all n locations
ggtccaaccggcaaacaaccttaattggggccaaacaacaaaaatggtggtccccccggaatcggtttccaaaaaccaaaaggcttaatgggccccttctccgggttgattccccccttggccaaacctaattgctactccaacaacatttactttctggcccccaaaaaaaccctaaattcaatttaaaattcactccacacaaaaacgccaacaatagtcttcgctctcaagctcgccaatgagaacaaagacaangggatccaatacgacgacgttctcctctccttcagagtcttcgagagcgtgaacaccacgcgccccct

SEQ ID NO: 56831 - DNA, 377 bp, Glycine max
ctctcagcagcttaggctagggttcagaaacgaaaaagggttcggtgttcagttcgcgatgagagccaaggtgagttcaattcgtcactgttgtttcgctaaattccttgattttatcaaacgttgaggtatgattgggacttttttttttttttttttttttttgcattggaaaaaaaaccttctgaggaggttaaaaaggaacccccaaacaattacacagatttcaatgtagtgcttaaacccaattatttaattcccgttgctttaaaaataaggttgtcaaattgggcacccatttgtaaaaggcacgggtttcccctttgtgatgttttgataaattttggttgggttaaattcgtcttaggtaattacct

SEQ ID NO: 56832 - DNA, 220 bp, Glycine max
caactccgaaatatatcatggtcgtaacgtaaaatcctcggtttcaacgttcattcgctatgtcaaggtacagaactatggcatcactctcaggaatttgctcctcatcaccgattcgcataatcttcgcaaaccaagccccatcggtgacagatgctctccgcaaagattacatgtccttcaccgcacgcctcgccgatcgtgtccctcagtgtcgtgc

SEQ ID NO: 56833 - DNA, 406 bp, Glycine max
agttcattctctttgcgcagttccctacctctcctttcaagatgcagatcttcgtcaagaccctcaccggaaagaccatcacccttgaggtggaaagctctgacaccatcgacaacgtcaaggccaagatccaggacaaggaaggaattcccccggatcagcaacgtctcatcttcgccggaaagcagctcgaggacggccgtaccctcgccgactacaacatccagaaggagtcaacccttcaccttgtccttcgtctccgtggtggcatgcagatcttcgtcaagactctcactggcaaaaccataaccctagaggtcgaaagctctgacaccattgacaacgtcaaggccaagatccaggacaaggagggaatcccccagaccagcaacgtctcatcttcgcc

SEQ ID NO: 56834 - DNA, 190 bp, Glycine max
ctcgttcggacaatctggcacagtgtatctgttcacacatgaagcatcactaacggataatgaggatgatacccgcgtcagtacatgtagagcttagtgaatatttggtccagaagctagtgcacctttccgaaaattatgtagccacatcttcagcggttgtttgggagtggttgtaggaaaatcagct

SEQ ID NO: 56835 - DNA, 256 bp, Glycine max
atccggtccaagctcaaaaataattgggaaaataaggacttggccagaccaacaaccccaaaggggaaacctttgaaccacaaacctttaaagggaaaaatttgggatccaaacaaccttaaaaatcctccaactccaacggttgaggttgcccgtttgggggcgggaaacatggcaacgggccaactttacagccaccaaaaaccccccaaacaacttctctggtgatggaacaatcccaattgaggtaaccgat

SEQ ID NO: 56836 - DNA, 147 bp, Glycine max
cttgaaacaaagtatattttgtctcatgtagttttaagacaacttgattaggctgagtctgttgcgaaaattttccttgtatgatgacgatgatgtttaccatctcttccgcgtggtcaattttctaaatatattcctttcctgaat

SEQ ID NO: 56837 - DNA, 386 bp, Glycine max
  unsure (1)..(386): unsure at all n locations
caaaggcaagttcaaccaattttttgggactgggagacgcttagatggaaactcaattcctcctgtttatccttcacggccttctgatgttccaaatgtcaattcattgtcttttacaaattctagttcaccaaatttcgctcgtccatctcagggaaagctagagtttgcatcgagagtttttaccgcacaaaaataataggaaagataattctggtgttctaacccaatgtcttctgcagtttggcccttcttatatagtaataattagctgactgcaaactaatatcattttcctatttactgtangaaaagaccgagtcaaaacaagaggcaccccaaatttcagcctttcactgggaaagaagtattcccctaagatataa

SEQ ID NO: 56838 - DNA, 352 bp, Glycine max
gtacgtaaacttaagcttcggattcgggtcgaggttgtttgtcactctgtagaacactactacatccagacctggtgctaaacgtaagttctcacaccatatcggttctccaggttcagcaatacccacattttgatggttgattttctagctgataggccatggctattcgaagattgcttgatgttgatgttgatcccaagtcgaacgcagagacgtaggggtacgacgatgtgaactccatggacaaactcaccgcagccttctccaatgattagaagatgattgacgttcttgagggtgatggcaaatcagttgtgtctgaccacgacatgcgttatggtaaatgttc

SEQ ID NO: 56839 - DNA, 375 bp, Glycine max
  unsure (1)..(375): unsure at all n locations
ctcactcccaatttgaagcttaaaaagcagtcagtaccaaccttcctttctgttacactgcagattctctaaaccactaactcttctcatccatcaacaagagatgaaaggcatagacatcttctgtgcatcacaggcctcaacagctatatgtcttagcatggatcaaccctcttcctcctattcctcttcttcatcttccatttccaacactgctcaatttggtggcagagccattgaccgccacnaacccatcatcacagatcctaaaagaccccctcaagagaacttcatttccccaactccttcttctcagtccccaaattgagccaaacctttgcaagattatctcaaaaggacaaagaaaaactccac

SEQ ID NO: 56840 - DNA, 393 bp, Glycine max
agaatgcagtgaaagaagaattcttcttctacacaacaaaagaacacactccatgtcaaacaaaccatatcaaagagaaagtgcttgggtgacttacactttctgaaaattgtgggctgggaattcctgctgccaaggatctaaacagaggggttacttgaagaggggagctgaactccaatcttgatgaggcagaaacaatcccatcattgtttatctgttcctcaaaacacggtttataatttgtgaatcaagttccaaaactaaagttcaattcaaagacaactacccaaactgctaaacttgggattgcaaacatgatgctggtctggcaagttgtttgagttatgagagttttgagccaagactgcaagtggtgctcttggttgctga

SEQ ID NO: 56841 - DNA, 152 bp, Glycine max
ggcaatcccattctcagcgtccatttccaccatcactactattttcgtgtggttgagaagcttcgcgaacgagaacatggaaccctaaaacgtcaaataacgattccatgaccatgtctggtgattgccctctttctcaggattgggaacct

SEQ ID NO: 56842 - DNA, 388 bp, Glycine max
  unsure (1)..(388): unsure at all n locations
tccctctcttctcttctcttctcttctctcttatcattctctctctctctctcctgcaacaacaacaaccatttaagggatttcgggatgtgtatcgtccagtgaattgaggagaatgacatttttgggttctgttgattgtgttgtagatggggggtttggctgttagattgttgtttgttgagtacaatcttatgttcagtgaagatgatttcgtgatgtggttgagagagtggtttttgtagaggaaggcttgttatttttgttgttgttgtggtagtttattttgtttaagagtangaacatagtcggcagacgagaagaattaagttttgttggatgggtaataaacttgggaagaggagacaagtggtagatgagaaatata

SEQ ID NO: 56843 - DNA, 357 bp, Glycine max
taacaacagcacaaagcgggttactgtctgttcaagctaccatctctctctctctttcttagtgcctccttgccagaagttaaaatggcccaagaaactttcctattcacatctgaatcagtgaacgaggggcaccctgacaagctctgtgaccagatctccgatgctgtgctcgatgcatgcttggagcaggaccctgacagcaaggttgcctgtgaaacctgcaccaagaccaacatggtgatggttttcggagagatcacaaccaaggccaacgtggactatgagaagattgtgcgtgacacatgcaggaacattggttttgtctctgatgatgttggtcttgatgctgacaac

SEQ ID NO: 56844 - DNA, 299 bp, Glycine max
ttaaaaaaatcacttattatactaacacccttactgaaaatgctccttattaaggagggtctgagagagcaagcaatagccttagaggaggctagagatcgttgggagaggcatggaatcaaagtggtagttgatgatgacctccgcaaggaggcctcggctggagtgacatggcttaatgcctcagagcaggtctcggttcaaggaacagttgacagggccgagagcttattggacaagctcaaacaaatggctgcagatatcagaggaaagtctagagatacccttgataaaatcat

SEQ ID NO: 56845 - DNA, 406 bp, Glycine max
aggagccagagtgagtgatacagagaaagaagaaagatttaaaattggaagaggaacaattggaaggagaaaaccctaattggaggatgtgatttattgcataatcgatggaaaaaccctagattcggagcagggggcgcaatcgacgacgccgtagatgcttgttgcggttggagcgtcgtgggatctgaattggttcctgcaattgttgctctccgtcatcgtcgtggccattggggttcactacttcgtcaaggtcaccgcttccaaatacttcttggtcgacgccaatttcgaaggggaccaccaccacgccctcgccaccgacgccatgcccggtgccctcgctgccgccgatcctctctgtgccgtctgcgccacgccagcccctaagaagtgctcgcgc

SEQ ID NO: 56846 - DNA, 330 bp, Glycine max
atcaggttgaagactacgaagactaccagcggtgcatcttcggaaatgctgggcatggcgaacaccctgagctcgacgtccaccattttgttcatcctcgtcactttcatgcttttttgcgcctttcttcctgttttcactcctcttccgtctttctcctcgcaccaatcccgtcccaatacagttaacagtaagttcgagattgccgacgataggttctggaaagatggtgaaccatttcacatcatcggtggtgacatgcattaattccaagtgcatccacaatactgggaatatagactgctattagccatagcattgagcttgaac

SEQ ID NO: 56847 - DNA, 371 bp, Glycine max
cgctctgtttctgtctctgtgtttgcggctgaggattccgaacgagcgaccttcttcgtttctcgcaaagtttaagtcatcatgggtaaggaaaagactcacatcaacattgtcgtcattggacatgtcgactctgggaagtcaactaccactggtcatttgatctacaagcttggaggtattgacaagcgtgtgattgagaggttcgagaaggaggctgctgagatgaacaagaggtcattcaagtatgcctgggtgcttgacaagctcaaggctgagcgcgaaagatgaattaccattgatattgctttgtggaagtttgaaacgacaagtactacggcacagtcatcgatgcccccggacatcgtgac

SEQ ID NO: 56848 - DNA, 220 bp, Glycine max
ttcatccttggcactctcaggcttttttgcgcctttcgtccggtgatcactcctcattggtctttcccctcgcagcaatctcgttccaatacagttcatcgtcaagtcaaccatggggaagatccgttctagaaatgtgaatgatcagttggcattatgggtggcgatgtgcagtaattccaagtgctgttaaagttctcggaagattgactgcctttag

SEQ ID NO: 56849 - DNA, 142 bp, Glycine max
tgccaatgctaggtcggcttataattattgtaaagaagaaagcaggcaaagataaattagatagcatgtaaattgtagcttgcacttactgaaatggatcatatgtttaattttatttattttgcaactattcagtttttgt

SEQ ID NO: 56850 - DNA, 382 bp, Glycine max
atcaagaacagagagagagagagagaaagagaaagaaagaagggtacatttttatgcttgttaaccatagaggcaaaaacccaaaagagcagcttcgtcatcttgatcgaagtccaaacctttgtacccttttgtgtttccctctcgtttttgtgtcacaacacaatccttaaccacacaaaacctttcctatttgtggggttgattgagccatttttggaggctgcaagaggatatttccctctctttgttgggtggctatatagggaaagtctttgggttcaaaaggggtgggttagttcccagaaaaaaaaagcagtgaaaggaagaaccttgtaaaccgcgtcattgtgaacaagggtggctttgtgcgttggacaag

SEQ ID NO: 56851 - DNA, 349 bp, Glycine max
tgatgaacctcaaacaaaggttcagacacgcaaacaattccttgcactgtatcaactatcaaaaaatgtatggtcggtaacagaagagccgcgtgatggaaagaaacacataaattccacacctcaagcttgttaactacactttctctctttctttttcatcaataataaattttaatcacaatattagtatttaaggagccaaaataacaatgcgctgcgcgaaccacataagaacaacacgtagtacctaactatatgagtgaacagttgcaaacgatttttctgtctaacttggatgatgcacccgctacacagggtgctcgtgaggcttttaaggatactcaac

SEQ ID NO: 56852 - DNA, 392 bp, Glycine max
  unsure (1)..(392): unsure at all n locations
gaagaatatgactctcattctgaacaaaataagagataatgttgccatgactgcaaaggattcaaaggggcagcctgtgatggaggaaaatccacttatgagagaaacattcttggatggccctgaaaattttgaagttgaactggacattacagagattgatggtgctgatattgacaccataatctcatcatttggaaagattgtgaaaggatttcagtcaagaaacaaacacattgcagataagtttcatgaattttcagattgtatggatgagtttatttctcctctccatgaaaaactactggaaacagagaccatgtcaacgactattgttgagaacatggaaattatgaaaattaaagcaaatagcatgggaaaattganagaac

SEQ ID NO: 56853 - DNA, 205 bp, Glycine max
ctttaggtgtgaaattccacgtgccaaaagaagttttgaagacaaaccaacgatctcaatcaagggcctgatatattgttggcagtctagcggtcagatgaaattctaccagtggagcaccagaggggttaaggttcatgttcagggaaattcttcacggaagcttaatgtcgtcatgaggaagcggatcatagtactgatgtat

SEQ ID NO: 56854 - DNA, 62 bp, Glycine max
aaacaattgatgagtacaaattgccaccccataaacacacataaagttatgggttcttgctc

SEQ ID NO: 56855 - DNA, 285 bp, Glycine max
cttgttttttgatgctgtcaaaattgagaattgcacatccgtgctgatcagcacttgtgcgtctacacatgcatgcgacgagcttgcacgacaaaatgccctgcttatctacacaccagagcaatgtttccaaggctacaactcaataccattcgtgaggaccatgccagttaaatgctctccatatacagcacatttgaccaccgtgtagccatatgccctcgttttaggtgtgtccaatggatctactgcagtatccaagtttgtctcatagaagtagactac

SEQ ID NO: 56856 - DNA, 362 bp, Glycine max
ctctctttgaattggcattggaattcaactcttctctttctctgtcgaagaacaagtagtttcagaaagatgctagagaatcttcaggctcctccgtcaacaacggaatcggccccagtggtgaagcgctatgctccacccaaccagaggaaccgttctgctaacaggcgcaaatcatctggtcagctcactccttattttctcccaatctttttattcacctgccctttgctaacttttttctgttcttttttcaaatgggtatttaataatgtcaaagaaatatagcccctttttttctcatgagcatgatgtgctttatttactttttttagttgcgcaagtcaagtttccgttgccaa

SEQ ID NO: 56857 - DNA, 85 bp, Glycine max
gcacgcatacgtacgctcggaattcggctcgaccttgaacttagtcccgggctagaagttgttatactagaaactaaactacgca

SEQ ID NO: 56858 - DNA, 75 bp, Glycine max
tgacatcgcactgcacgcgtacgtaacctccggaattcggtccaagcttaaaccccattcagaacttcgaccttt

SEQ ID NO: 56859 - DNA, 372 bp, Glycine max
attttagtcagtttgcacatgagttttcattctcgaaagaaagctttcttcgcgctctccctctctcttttttggcatgaatagtcttcaaggtacaatatataggcataaacgctaaggacgtaactgtttcaaatgatgtttatttagctagctactgttcaaattcaaaccacagccattaaaaaatgtgttgaggaatatttaacatacgtcgttgagtttagatggacatgtcatccatctttgatgacaattctgatgtggagtaacatccttcaccttcgtctgtggatcaaaatgatcattcagtcacttaatacgttggttactcacctttattcagtggggataccttcgcgtattgtcggt

SEQ ID NO: 56860 - DNA, 93 bp, Glycine max
gttacagtgacactgcagcttctgtcggagacactggatcccttcacgctttggcgacttctctgagtctgtgtcagtgacagtgacttattc

SEQ ID NO: 56861 - DNA, 388 bp, Glycine max
caaaatatcacgcctaattttccatttaatgtaactgatcagtgttctgaagctgatgatgatggaaagattaaaattacttggctaccagcaccagaaccgccctgtactgagctaatagattgccacaattggccccattcgacatgcagagaaacaagtgaaggaggaagcaggtgccgttgtgactcaaactataagtggaataacacaatcatgagttgcaccttagaagagcattcaaccaaccagctggaattgattcttatagtaattcttagtggcatggctattctggcatgcacaatagcatttgccatagtgcggagaaagaaaaaagctcatgagcttggtcaggcaaatgctcggattcaggagagcttatatg

SEQ ID NO: 56862 - DNA, 386 bp, Glycine max
atttgataaatgatgataatcatgagtaggtgaaaagctttgtggtaacacctctctggagaataaagcctgaaaggcaagacgcccctcgtcagagacctccttctaagaatcagtaaggttgttaatgcatcgggagtcatgaaatgcgtcaatagtacccaagttctggacagtttcagcatagtctaaaagatggtcgatatttgccaaacttgactattgcacaaagatcaggggttggctctcatctatcaaataatgcatatcatgatggcgaatcagacaatgcatctaatgatagtcgatatagagctacacttgaggaattagataatttctgcatccacggtaacgtgaaggaatcacttaatgttttggaattg

SEQ ID NO: 56863 - DNA, 388 bp, Glycine max
catttcactcgacacacatcttcccaattgtgctattaagcttcgtggagtccacgactggttcaggtctcgtcaacgccgcgcgactgaggtcagattgttgatcgcaatcatcccggaggtcgctgggtcccgggctgaatgtcacatcacggtgggcgcgactccatgggacaccagtgacacctctcaagtgcatgcatggattcgttcagcaacatggctcacatgctcaagaatcaggtcagcaaagtcgaagagttgtcatcacgagcgacacttgatgggtcaagggcagtaggtgaccacgttgttgcacagcggtagttgtcgaatttcgataactatatcggattgtgcatctgcgttcagccttttatcgcccccc

SEQ ID NO: 56864 - DNA, 366 bp, Glycine max
ttccattctctctgtgtatttccctacctctcccttcaagatgcagatcttcgtcaagaccctcaccggcaagaccatcacccttgaggtggaaagctctgacaccatcgacaacgtcaaggccaagatccaggacaaggaaggaatccccccggaccagcaacgtctcattttcgccggaaagcaacttgaggacggccgtacccttgctgactacaacattcagaaggagagtactcttcacctcgtcctccgtctccgtggtggcatgcagatcttcgttaagacactcaccggcaagaccataaccctagaggttgaaagctccgacaccatcgataacgtcaaggccaagatccaggacaa

SEQ ID NO: 56865 - DNA, 236 bp, Glycine max
catgcactcctgatcaagctccgaattcagcacatgacggcagggaacaaggggaaaagcaaatgcggagtctaaagtaacaacgccgtctcgaaaacctaatgattttccgtcctgtattcagagcgtgcctccttcctccgtccctataaccatccacgccaaacctggtgccaaatccgcatctataactgatataagccgacaagcggtgggagtgcaaattgacgcacctg

SEQ ID NO: 56866 - DNA, 301 bp, Glycine max
gaccttttagcttccatgtagaggtttatgtatgtatatatttttctttttctttttttcccatctcatgtaaggtataatctttcttctgctctatttaattttatttattcaatgaagtgtatcttctttgttgttttatttgtttgaaacgagcattttaacgtgtcttcgaatgaatgggatgaacgagtatcttgcttatttgtaagcattttctagatttacgagtggcaataacgtatcagcttaacactgtatattcattttagcttattttgaaaaaataaatcgttttatt

SEQ ID NO: 56867 - DNA, 249 bp, Glycine max
ctcgagccgctcaattttgctttgtaaaccaactcagacacgcagatcgatcgattcgtcaacgcgtaatttttggaaggaaaagcccacccccacccaggtgagtgatgtgcaatgcatagatcacgtgaagctcttctacatagaaggagagctaaaactgggtctggctataaactctctcactcaatgcgttttcatttgtggcctctaatcttccgcgctcatggataccccgcacccacagag

SEQ ID NO: 56868 - DNA, 359 bp, Glycine max
cagtgggagccttaaacattatattttcgagcttaaatagtactagcaccatatttaagtggcagactaattagaaaattttcatgtgccttggtagcaagttttgttattagataataaatcatttttttattttgtgttttggtaaagaatactatagacagatgcattttcatgttccaaagagtcgtgtgctgttctaactaaactcattttgtttgatcatatagaacaacttttaaattttttaatgagccatttacgaatgtgaaaatgagcatttttagcctagaattttcatatagatgtggttctgtagcaacctgattaaagggttcatttgcctcctaattatgttg

SEQ ID NO: 56869 - DNA, 401 bp, Glycine max
  unsure (1)..(401): unsure at all n locations
aaaattcagagttgatccacctctaggggagccaaataagttcattcctgcacctcaactcaagtgcttcagttatgaattctctgctgagaggtttgaaataaccccaggtcatggacaagctgctgcttgtgacctgtgtggtgttagccaagattattctgatggattgaaacttggccttggattgtataatcctggaacatctgaggtcgggcctagtcaatctaaggacgaacctgagacagatgaaattaatgatgcagattggagcgatctcacagaagcccagctggaagaacttgtcctgactaatttggacacaattctcaagagtgcaattaanaaaattgtagcatgcggctacactgaagacgttgctactaaggccattttaagac

SEQ ID NO: 56870 - DNA, 138 bp, Glycine max
tctgcttcgtgtgaggcagatattcaatgaatgccaaccaaccccacgcttctggggagccggattggcccatgggagcgtggggttggcgggcaggcattggcggggctgggtcgccgggggggcggtcggggggcg

SEQ ID NO: 56871 - DNA, 390 bp, Glycine max
aaaattctgaagacaaaaccgctcaggaattattcacaagggaacatgaaggattgcgcagaaaagcagaagattggatgaaacgcactgctgagttctgtatacttatttcaactgtcattgctacagcagtgttctctgctgcgattaacataccaggtggcatcgatgatcaaacgaaaaaaccaaattacttggacaaaacatcgttcctggtgtttgcaatatcagatggaattgcattcatctcatctgcaacttcaatattaatcttcttgtcaattctcatctcgcgttatgcggagtatgattttcacaagtcactgcccttcaagttaatatgtggattggtaactctgttcatctccataacatgcatgatggtagcct

SEQ ID NO: 56872 - DNA, 198 bp, Glycine max
aacatttctctaatctgaatatggcagtgaacaacagtcgtaagggaattcaattcatgacgtttaatctctttcatcttctccgttctgccatctctgtttattcccatgcatcctctaatgcctttcagatttgccgatgggtataacatcttgggtatcacatcgtgagaactcaccatgtggaagtcgcctaag

SEQ ID NO: 56873 - DNA, 362 bp, Glycine max
tcgcatgatcggactaagctcgatcgccagtgtaagactaagatggtcccggttggtgaacgtttcaaagcttgtgtttccatcttagtactcctccggttggtagcacagtttgcttgggtggatggttgtaaacttggctcacgtgctcatgtgaattcttataacctcaagcatggcctatatcccacgtagaatcatccagtacctgataatgtcgttggtctgtattacagcctttcactcaacccggtactgcatgattctgagtcgtcagtcccaaatgattggcacaataggaacatgtgtattctcactggtgctccagtgctcaattctaagcttaacattacatcgctttc

SEQ ID NO: 56874 - DNA, 438 bp, Glycine max
  unsure (1)..(438): unsure at all n locations
catacgtaagctcggaattcggctgagaagaaatctcctagcaagcatgtaaaacatggacgaaaaggtgcctcaaaaaattaattcccatcatgaggatgccaaagagagttctgagttatcaaaccctgaagatatatctaaagctgagattaactcaggtggttctgaagcagaacaggctgaagggtctgaaataattgtaactaagcagaagaaatctaacaagaaagcaaaatcagtttcacgtggaaagaaacttaagaaagagaagagcttaaggtataggaaagaatcagatgaagagaaaaggaagaagaagaagaaggaaaagaaagggctgaaagagaagatcgaggagaaaatagagggtgatcatcatcatcacaaggatgaggacacaagtgtcnctgttgagaaagttgaggttgttgaaac

SEQ ID NO: 56875 - DNA, 384 bp, Glycine max
gaaaaaaggtggtagttttgtaattaaaaagtgaaaacagaatatgaaatttggaaattaaaatagaagtaaacatgcccttggtgtttttctcctatagattctaaaaagaattaaatgtttggtttgagttggttttgaagttctgttgtgagtcatgactaatgcttgagtgaggggaatagtttggaaagggaacaaggaaatggagataaagcaatctatttttgttctccatttttagcgttcctttcatctcttcaccaacatatacccgaagacaccagaagtactctttttatgggtttgtgactatttatttttattttttattttattagagcacttcaagaattgacttcatttgcttatctttttctgaaa

SEQ ID NO: 56876 - DNA, 377 bp, Glycine max
gatttcaggaaaatccaggagatagggtgttgggtcatgctcggaaggtggagggatcagtgaggaagaagacgaatgcaaggaaagagcagagaaagagcaaagaggagagaatggctatagaacaaaaggagagggaggaggagttgaaacgcttaaagaatttgaagaagcaggaaatacaggagaaggttaaaaagataatgaagactgcagggatccatggtgatgatattattccattgtccatggcagaaattgaagaggaatttgacccagaggagtatgatagaatgatgaagaaggcatttgacgagaaatattataatgcagtggatgctgaccctgacttttgtagtgacattgatgacaatgag

SEQ ID NO: 56877 - DNA, 394 bp, Glycine max
acggaccgtaatggagagcaaacttccagtgaagaagcacaaaagcagtttcttatcgctggtagaccaccaaatctatcctttcctccaatgcaaaacttccattttctaccttcccaagcacatgcatcccctgtgaactatggagaggggtttgaaaatgatccaaatatcccaagctctcagcttgaagcttatagaaaacttcttcaatgccagattcaggtaatgtgtgctcttttttcttttacccacacagtaagtgatgtgtcaccttggttttacctgaatataaaagatcaaatttgatgattatgatgaccaccaaatgaacccttctcctgtatgcatgctaaattctggcaccccgaaaagggacattaactgatattat

SEQ ID NO: 56878 - DNA, 378 bp, Glycine max
agattcgtgatttttttaaaaacaataacgaatctccacagtaaattgatttaatgaatcctcgttaaccacatcatcgtcaccaatgacatttgtatacatggcacatcaaaatccttatgggattaggagagcagcttttgcaagtgctcagttgtcaggtgtggttgctgatggcgcctcatcagggccaggttatgaatgttcggccttggcatcctcatcacatggggcctcgacgatgtctgccatgcgagaatctgaatcaacgtcacttggttcactgacattgccaagtggtaacgccgcactcgatgttgtacgccttcagggcaacgtcgcaagcaagcgtttcgttgatgtcttgattgggggtgg

SEQ ID NO: 56879 - DNA, 392 bp, Glycine max
gtaggattatataccgaaagccttcaacaattgcttgagacagtgagggggcttcatgctccatcaaatgatgttgttcttgaagacttaagtctgcctggtttatctgaactcaaaggtcactggcatggatctcttgacgctagtggtgggggaaatggagacaccctggcagaatttgactttcatggggaggactgggaatggggagactacaaaactcagcgtgtgttggcagttggtgcttacagtaatgatgatggtatgtacctggagagaatttttatccagaaggataatgccaccatccatgcagatggaacattgctaggacctaaaaccaacctccattttgcggtattaaattttcctgttagtctggtcccaactgt

SEQ ID NO: 56880 - DNA, 324 bp, Glycine max
tgtcaccctagaaatttagctgaaaggatacacatcaacatttatcgtaattagcgacttgctaatcctgtattcagctttggcatagagttgcaaaaaaatgattttactaaaattaagagagaagctatgttaaaaaatgtcatccaaagggtcatcaacatgcaactcaccggcgaactgcaaataggacatgggcgacgaacttcaactaatacttccacagcttctgcaagtatcgtaccattatgaagagcaagactgattaagacatcgccctcttgcggcaattcgagcatcccgggaatgttttcggggtcctca

SEQ ID NO: 56881 - DNA, 120 bp, Glycine max
tttattttttttttttattttttttttttgtgttttatatgttagtattatatatatatatattaagaaaaacaagagagggcagacaaaaaaagaaacaaaaaaaaggggggagagaag

SEQ ID NO: 56882 - DNA, 382 bp, Glycine max
ctcttcttctcttgcggctagggttttagcgcagcttcttctagatttaaggaagatgggtaaggaaaaggttcacatcagtattgtggtcattggccatgtcgactctgggaaatccactaccactggtcacctgatttacaagcttggaggcattgacaagcgtgttattgagaggtttgagaaggaagctgctgagatgaacaagaggtctttcaagtatgcctgggtgctggacaaacttaaggctgagcgtgaaagaggaatcaccattgatattgctttgtggaagtttgaaacaacaaagtattattgcacagttattgatgcgcctggacatagggatttcattaagaatatgattactgggacatcccaagct

SEQ ID NO: 56883 - DNA, 388 bp, Glycine max
gtgaagcggaaggacctcgccggagccctgcggttcctcaagtccctcgaatcggaacagccgctcgtaaacggcggttctccgtcgagcgagtcgactcggctccggttcggcgagttggagcggttcgggccgcagagggactgggaggttctggacacgtgtttgaatgctgatgacatgaaacttgtcgctaacgcttacaggttcctcagagataggggtttcttgcccaatttcggtaaatgcagaaacattgttttggagggaccgaggaaagtgacaccagatgtcttgagctcctctactggtttggaagtgactaaacttgctcctaagaagtggggtctttcagatggttcaagcattgttttggttgcttttcttg

SEQ ID NO: 56884 - DNA, 382 bp, Glycine max
gccactttcattggccaaacaacattatacaattttatcttagtaacaaaaagaaagattcacgtcaccaaataaaatatacaggaaacatgacaaaattcacaaacttttacttagacaagagaaagataacaccaataataagctaaactcagacgactccttccaacaattgaaacaacaatccaccacactaaagttcttttggtatcatcacagtatatggcaagtttcttctgtatccccaggaatagccaatatatggaaatttcagtggccggtgtgacttgcctcagatctaggaaacctcttttattttctttgctatttttttcattttcaatgaccccattttttccttatctccgttttctagagagag

SEQ ID NO: 56885 - DNA, 392 bp, Glycine max
aaggaatgcaaacttgggaggcctatgatgcatattagtggattttaataaaatttgaagaacatcagaaagagtaggtatatgtcaaagggtgcaagttgagagcattatgaaggaatttaatggatggattgcagacctagaggttgaggatgtgccttgtgcgggacgaaaattcatcaggtacagaccaatgggacaactaaaagtagattggacaaaattcttgtatccgcagaatggcttgccaaatgacaaggaagcacttagtttatcatggattgcaatttcttagaccattgcccaattctcttgagatccacaattgttgataggggcctgaagtcgtttcgggttctggattgttggtttgaggataaatctttcaggaa

SEQ ID NO: 56886 - DNA, 391 bp, Glycine max
ctaatctcttctttttctatacctctctttttcttcttctacacataacaaactctctttaaaattttcaacactgtcgtcgtcgacatcttctttgtgtttctttctctttttgaattccctacacttgcttttgaagccacataccaactatatatctatatcgtgattaggttaattaccctaattcagaaatgaagaacatttctcaccgtgtgttgcttttggcattgtttctagcttcctttacctttatatcttcgacctcaactcaacaacaagaagccaaacatgaccctattgccatcaacatggaaacaaagcttggaacccaaagaaaactattaaggtacgtgccagaggcaaagaaagctgcattgcaaaacctaga

SEQ ID NO: 56887 - DNA, 388 bp, Glycine max
caaccacttagtggccagacctgtattaattgcagtaatacatgacaattgacatatatattattactctagtagtgacacgcatgcatttttattaagtactagtagtttttaccacacctatgaaatcacaccattatcaccccgttggatcgatggtattggtttcatggtggtccataatgtattgggcggacgggaactggatctcgatggccataggcgggaaatggatctggccggcgataacgacctgttgggcggacgggaactggatctcgatggccatagtcgggaactggcccgccataaccttgttgatttcgctaaatctgcatcaatcaatcaatctttgtcttcctcacaaccaacaccattctccgccggt

SEQ ID NO: 56888 - DNA, 240 bp, Glycine max
gtttccatgatctattactctgctgcttcatattcgccttcattgtcactggtttgatgacccatcatcatggagcttcttctacagcactatcttggattagtactttgcttcaaggatccatgcgagaccgtccagcggcacatctcacattcatctacaaatcgccatccatggcgttcactccttcgtgttgaccgaatgcttcgcatgctcatgtgttttacgatgttaggttca

SEQ ID NO: 56889 - DNA, 423 bp, Glycine max
ctaacacaaaccctaaccctagccccaaacacctccccttccccttcccggaccccgcccctctgggccctccccctcctcccgcctacggcttccacatgcttgaacgccgcaccatcgtcctcgccgacggtagcgttcgctcctacttcgccctccctcctgattaccaagacttcgccccccgccctctcgacctccctccccgcttctgcctccccgactactcataccgccgccgccgccaagcgaaaatacggtgatgatgacggcggtcccagggatgacctcgccaggcagagggagcagcttctccgtaacgccaatggcatttccagggagcagttctctgcgggccccagtgacttgaggccctccaagcactccaagctcgatgggttgtcgaaatctacgagacactcg

SEQ ID NO: 56890 - DNA, 282 bp, Glycine max
ctaacacaaacccgaaccctagccccaaacacctcgccttccccttcacggacaccgcacgtctgggccctcaccctcgtcacgcctacggctgtccagatgcttgaatgcctcaccatcctcctcgccgacggtggcgttcgctcgtacttcgctctcactcctgattatcaagacatcgccctgcgcactctgcatgtcgctcaccgcatctgcgtccacgactactcatagagccgctgccgacaatcgaaaaaacggtgatagatactgcagtcccag

SEQ ID NO: 56891 - DNA, 423 bp, Glycine max
acaaggcagaaagcaagctcatcctagagttttaaaaatggcagcagcctcctccatggctctctcttccccatccttggctggcaaggccgtgaagctgggcccatcagcccccgaagtcgggagggtcagcatgaggaagaccgtcaccaagcaggcctcctccggaagcccatggtacggcccagaccgcgtcaagtacttgggcccattctctggcgagcccccgtcctacctcactggcgagttcccaggtgactacggctgggacactgctgggctttcggccgacccagaaaccttcgccagaaaccgtgagctcgaagtgatccactccaggtgggccatgctcggggccttgggctgcgtcttccccgaactgttgtcccgcaacggggtcaagtttggagaagctgtgtggtt

SEQ ID NO: 56892 - DNA, 434 bp, Glycine max
aaacactcttcttcatattcttcttcttcttcttgttcttgttctatctgtgacgagcatcatggcctcgagagcagtgctattgttggctatgtgtgtgcttccggccatggttgtggccattcgcccagcaaagaaccctttttgcgtgaagggtcgcgtctactgtgacccttgccgtgctggttttgagacctcagcaaccacctacattgccggtaactgctaaccctttttctctctttactctttttattcttaaaaaaaaaaaatactagtatttatgttatacggttccaagtttcagatctgcttcttaaagtgaatatctgttgcttcaatgcaatctttgagcttttcgttcatatgcttttgttttcttacttaaatttcattcctttacgcttaagaaccttcagtttcgaaaaaatgca

SEQ ID NO: 56893 - DNA, 443 bp, Glycine max
gagagaagaagaaacttaatcgatcatcacttcacttcactaatacatcatggcagacgagacccagaacaagtatgagagctctgaggttgaggtccaggatcgtggtgtttttgactttctcggtaagaaaaaggatgaagaagacaagcctcatcctcaggaggaggtcatcgccaccgagtttcaaaaagtcactgtctcagaccaaggagagaacaagcacagcctcttagaaaagcttcaccgatctgacagcagctctagctcttcaagtgaggaggaaggagaagatggagagaaaaggaagaagaagaagaaggaaaagaaagggctgaaagagaagatcgaggagaaaatagagggtgatcatcatcatcacaaggatgaggacacaagtgtccctgttgagaaagttgaagttgttgaaacagcacatgctg

SEQ ID NO: 56894 - DNA, 404 bp, Glycine max
gggctttgcagttagttaggcccaataatatattcaaggcccttgatcttgttaaccaaaacggaacttttttttccttccccaataattggtgtaaccgtcgtcccggtgcttaagtgtgggtttggagatgcaatgttatatgtgaataatgtgatactaatcctcatggagaaacaaggaaacaaagagatttgatttatttcaaaaaaaaaaaaaaaaaaaaaaaaaaaaaaaaaataaaaaaaaagaataaaaataaaaaaaataaaaaaaaaaaaaaaaaaaaataaaaaaattataaaaaaaaaaaaaaggggcggcccccaataattgacccctccaacccggaaataatttcgggccggttacttgaggggttacaatttttcccaaaagggggc

SEQ ID NO: 56895 - DNA, 228 bp, Glycine max
taagctcagactacggctcgaggttggctacttcagccgcgagcgcctcaaccttgaaccgcaaccaacttcttcaacaacttcctcttcggctgcggcaaaaaaaaccagggcctcttcggcggttcccccggcctaattggccccggccgcaacccattctccttcttcaaaaaaactgccgccaaataccttaaaacctcccctaacggcttcccctcaacttca

SEQ ID NO: 56896 - DNA, 128 bp, Glycine max
  unsure (1)..(128): unsure at all n locations
gtaagctaggaatacngctcgaggagctatgtggtgactgtggctggggacacccggaacctgacgatgggtccgtccggggcggtgttcgggtcgctgacatggaacgattggaaccacggggttcg

SEQ ID NO: 56897 - DNA, 248 bp, Glycine max
gaatccctaccctgtctctctccttcttcatcatctccttcattgacaatgttttgccatccccatgctgcatcattccactccagcatgtcttggattactacgttgcgtagaggatccattcattcatcgtcaagatgaagagctcaaggcaactacaactcagcaaccatagctttcactcctgcatgtccacctaattcttcgcacgctcatttgaaatactcagttaggctcacaatgacaca

SEQ ID NO: 56898 - DNA, 284 bp, Glycine max
atgtttttggcgggtacaccctgtggttcttcttctgcacgtactcactatcatcatcctagaccgctgcatcataacagaaacgtcctcgataggtgctcggtgggcatcagcgtgcaggagaatcacgagatcggcaccaagctgcagtgttcggtgtctttccctccgatcatggctgcgaagatggtggttctggttaggcacaggcagatcacgttgaatgccttagggatgatctagagaatctccacattctctgttctcatcataaatggccagtc

SEQ ID NO: 56899 - DNA, 181 bp, Glycine max
gtatccctatcatcactacatacgcggatacagtctgtcaaatcaatcatctctctctctctgtcttactgcctccttagcgaaacttaatatggcccgttatactttcctattcacatctgaatcaatggaaaaggagcacccagacagactgtgtgaccagattcccgatgctgtgctc

SEQ ID NO: 56900 - DNA, 395 bp, Glycine max
ggcctgtggagaagaatgagtactttgtgctcgacgaagaggaagaagaggctgccgagattgcgcttagggatgaagaatttgagctttgaagcaatctggctatataactaaatatcagtgcaatatggtttcattcattgatgacttggagaattgatgtttagagcaagtgagcatgcaattgaacaagagtgctgcctggatccatttttcttatactaatagagtaccttgaagcatagcaaggattgattcatgatgggcaagtggggggttttgtggctaactatatcttctaactattcaattggttaatgttagtatgttttatttgctcctggtttatacttgttcattttttgtgaaagatctgctagaaatgttgttgattt

SEQ ID NO: 56901 - DNA, 326 bp, Glycine max
ctgatgttatgtcttctgtgaagcatgatgactcacgttcttactttcttcagttaccaatgcaaactgtaaagcataatgtccttctaaagatgagtgtgcaaatgaatcgtgaaaacatgttagtcctttactggagattcatcatgcagtcgagtgtgtactccccaataaaattcatcatgcggtcagaagtttaatccccaaccaaaattgatttgtgtaatcaagtaacttgaagcatagcaatgattgattcatgatggggcaatggggggttttgtggctaactatatcctccaactaattcattggttaaaggtagg

SEQ ID NO: 56902 - DNA, 279 bp, Glycine max
cgggaaaagaggttccattccactgtgagagcatgtcacaagcctcaatgagggttcacagtgttcctaataaatgacctaccaatgaacgataacctgtagggattaaaaatacctttttgctgacgctagtacattttactagttgagccaaccatcgttgacaatgatgttatccctttgattgttatgtcttgactgcattatcccttttgttgaagaaatataatcagaattgtctttttcataactgacgtactgattgcccctcttctccat

SEQ ID NO: 56903 - DNA, 407 bp, Glycine max
aatggagatttacaaaggatccatgacaaatggcttttgagtagcgcttgcttatcacaaggtgcaaagcttgaagtggaaagactccaacttaaatgcttttggggcctctatgtgatctgcgggcttgcctgcttgcttgcactcttggtatatcttatacagatttggaggcaataccacaagcactacgtctctgaagaacttgattcttctgacggccaaagcttaggatcaaaatcttcacgtcttaagacttttctttcgtttgcagacgaaaaagaagagaccgttaagagcccgtccaagaaaaggaaaaatggagaggatctcatacagaagcagtgaaggaagctcatccatcagctctaataagggatatgctccacgcagaagtgaatgtgcta

SEQ ID NO: 56904 - DNA, 306 bp, Glycine max
  unsure (1)..(306): unsure at all n locations
tgcacgcggacctaagctcagaattaggctcgagggtcattctcaataaatgaaatcaattcaatccagttctcttacccctggcaaatgtacaacaggtgagaaccataaaaagaatatggaaaatattctgcgagaaaatgcaggttagtttctgactgcttatgagttatgaatatggattgctagaacttatttggaaaatcttcttcataaatagttataactggaaaaaaaaaaatgaaataagtttcttattgcaattcgtatanagcttggtcaatcttcaggcactaattgttttga

SEQ ID NO: 56905 - DNA, 303 bp, Glycine max
gtatgttctgtcgaaatacacaaacgatggataatgacatcacatcgcattttagaaaacatggaattatctcctatctattacggatctatacaagggatttctcatggtaagacatcatcacttcagtgttgctctctttcagtcgtaaagcatattcgatatcatcatgcacaggcttcattttctgcgatcgcatcaagattcgattaccgctttaatggaacaacattatgaatttctcagttgaatgcggtctcgttcacctaacttacagatggtcttcagatgttggtaaagaaa

SEQ ID NO: 56906 - DNA, 286 bp, Glycine max
gcaggagggggggcagaacagagtagacgaggagcaaaacacgcacaagtgtggtggtggcgcgccactcattgcccccatcttccatcttccatttctgcactcaacagttcacaagcaacgtaaaaaccaacactttccactcactcttctctcaaatgcacgatggaggaacaacaacaacaacggcaacaaaaaccaaagggtcctctccccattgactggagccggcagttccagagcgactcgccgccgcgcgagtacgacgtcgtgccggcctccgccg

SEQ ID NO: 56907 - DNA, 279 bp, Glycine max
cggaaaacactgaagggtggcacggttcatattacctggcgctacagaacacccgtcttaaccctcgagtttccattctcaatctgacagtctctccatcgtcggggcggatttccacatcaagttttggcaaatataagcagctgggtcagcgatgaatcttcctgtggtttcctatcttactaaactctcatatcatatctctgcaattaatgtgattcgcatcgcgtcatccggggaattgctaccctctggagctgatagatgtgacttgataat

SEQ ID NO: 56908 - DNA, 217 bp, Glycine max
cgaaaatcaatgcagggtgggaccgttcatataaactggcacgacaggaaacacgtcgtaagcctcgacttccatccacactctgcaagtctcaccatcgacgaggccgatttcgagatcacgttttggcacataaaagcagtcgggtcaactgataatctgccagtggatgcctaacttagtagacgcacttagtataacgctgcaggtaaagtta

SEQ ID NO: 56909 - DNA, 51 bp, Glycine max
gagtacttcatgctgataccttatttttaaatatattaattattatttttt

SEQ ID NO: 56910 - DNA, 297 bp, Glycine max
cactttcagactctttcactctctcgctctctcactcataattttctcctctctctgattcctttaactaattggagttttcacgctccttggtctttcccatgaagccatttcatcttcgtagggaggtcgggaaagggtcagccacttcgcacgattggtgaatgaggatgtaaatgatggaacctcaactgaggggttcacaatgctgttgaataaggacaacgatgtgaaaaagcacagtggaaacccagagtcagcataatggatagataatgatcctcattgcaaactttt

SEQ ID NO: 56911 - DNA, 57 bp, Glycine max
ctagcctagctagctagcacatagcaatgttaaaaaaccaaccacaaccagattggc

SEQ ID NO: 56912 - DNA, 130 bp, Glycine max
cttctaatgtaggattctctattataatatataagaagactgctgtagttggattttgttagagagacatcaactaaatggttgccgtgtatgaactgagaatgttaatgaaagttattcccctcgttga

SEQ ID NO: 56913 - DNA, 286 bp, Glycine max
tttctctcttccaatctcatttctcaagatcgctttcgctgcttcctcatgaattatgtcttttgtgccgaattatcaagcagacgatcgtggtttaaatagtaggaaccggtccagcttcgctggaaggaactatcgtaccatcactaggaaaggattgcggaatacttaggagtccacgaattgtcagattcacaatcacaaccggattgcattcggcgacaattttaatttttacaatgccgatgatgacgaagtatgccatataggatgccgtccgactacc

SEQ ID NO: 56914 - DNA, 81 bp, Glycine max
gtttgttgttgtaactcgttcttcttcttttgttgttctgtgtttgggtgtggttgtgctcgcatgtgagaatgtcttgct

SEQ ID NO: 56915 - DNA, 357 bp, Glycine max
gtcgccgccaccatcgtcccccccgccatcatccccaccaccatcatcttcgcctcctccgtcgccgccaccgccgtcatcaaatgatgagaagagtctcgcctccgccatctgattcatcgtcctgggccgcatctccaccacggctgccacctcctgataaggattcaggcagcgaccggtcgccaccgcctgcgccacattcaagacatgagttttcacctcctccgcctccgagccaccggttgtctccacccaagtcgtcatcatcaggttcctcggatggattgaatgatattgattgacactcattgagcatgccagttagactaggaattgcagctggagctggcattt

SEQ ID NO: 56916 - DNA, 76 bp, Glycine max
cacattggtttgtttggggtcctgtggctgcacatatccaaccttaagttctgccgtcgtggcgctctggtcattg

SEQ ID NO: 56917 - DNA, 77 bp, Glycine max
cgagcctggtgtccctttgggtcctcttctccggcgttgcgttgtgtgctggaaattgctcgccgcagcatcataac

SEQ ID NO: 56918 - DNA, 77 bp, Glycine max
agcaaataaagcacagaacagttgaagtgaatggcataaaaatgtatgttgcagcgaaatgagagggtccagtggtg

SEQ ID NO: 56919 - DNA, 145 bp, Glycine max
aaagaaagaaaaccctagcttaccttttcaactttcaagatgcaaatcgttgtgaagacacgcactggtaagacaatcacgcttgaggtggagagttcagataccatagataatgtggagtccaagattcaagacgtggaaggga

SEQ ID NO: 56920 - DNA, 263 bp, Glycine max
ccgggacatgacagaagagggttcatcttgttagggaggtcaatgtcaacgttaattctgccattgcagcttccgcttctgaattgaatcttggactggttgctaacatcttctttcagctggaagaagccgaaagttcggatatgtcagatcggttcatcaagacccagatcgccactcatcctctctatccaaatctagtatccgcttacataaaatgtgcgaaaggttgagtcaccgctataactggtgtcacttcttga

SEQ ID NO: 56921 - DNA, 54 bp, Glycine max
atagccttcaaatccttcgtcggcctccgccagtcctcgccggaggccccgcag

SEQ ID NO: 56922 - DNA, 51 bp, Glycine max
ttcggctcgagtgggataagtctgaatgtgacgctgatattctctcttgca

SEQ ID NO: 56923 - DNA, 144 bp, Glycine max
aagcaataagatgaaaatgaaagtgcttgttttgtttgttgctacagttttggtagcatatgagtgccatggctcagacgaccagaagttccctctcgagatggaaactgcgtttggtgggcaatacagcactggcgtggcatg

SEQ ID NO: 56924 - DNA, 278 bp, Glycine max
ctccagccgaatcagctcgagcgggtctagaaagacatgtcgctgcaacttcagcatcatcttcttcttcttgatcacaggtggttctgttcagtcttccttgcaccttcttctttggagatcgaggttgtgtttttgtgaatatgggaattccacagaaagaccctctttctcaattgagtttacgtcctggcttgcggttttagctcaccgacgatgaactcctcattcagtatctagacatcaatgtcgctggcaaccaattctatcttccaatc

SEQ ID NO: 56925 - DNA, 76 bp, Glycine max
gaagaatcgaagataagaatgaataaagttgttaggtcgaatttgacggtgcgtcttggtgaggttgtttctgtgc

SEQ ID NO: 56926 - DNA, 112 bp, Glycine max
tattataccatatttatatatcttcacatacttaataatatataataatgggtgttgtacggacgtgggagagcaggagggcgtccctggaggcctttcgccggagccgggt

SEQ ID NO: 56927 - DNA, 96 bp, Glycine max
gcacaaagcaagctcatcctagagttttaaaaatggcagcatcctccgccatggctctctcgtccccatccttggctgcgaaggccgtgaagctgg

SEQ ID NO: 56928 - DNA, 82 bp, Glycine max
gaattctctatcactcttcaccttcctctgcgcaatttgtgcgcactccgtcgcggtcgacgccgcggcatatccttccatc

SEQ ID NO: 56929 - DNA, 112 bp, Glycine max
ctcctttgaaaaaacaaattacaatactgtgttgtgttgtgttgaagtatcaatctaacaaagatctctggtatcttacgacgcaataacgggcacaagatcatcggtactg

SEQ ID NO: 56930 - DNA, 120 bp, Glycine max
gtgcaagagtaagcaccttgggaggagcacatggcacaaatactgatttaaaacagcgttctggggttactgccacggccacaatcgtcagcgagcctgatgattcagaaggttccagct

SEQ ID NO: 56931 - DNA, 77 bp, Glycine max
ggacgaccctttggtgtttggatcttcaagaaagagagacccttgggatttcgtcaccatgagtctcgtcggtcttg

SEQ ID NO: 56932 - DNA, 112 bp, Glycine max
ggagttagatctaaactctatggcatcggtaacgaaatttgcagcagattttaattcctctggtcttccaatcaatagcctatcgtaagaacttgcaactcgaactgtactt

SEQ ID NO: 56933 - DNA, 214 bp, Glycine max
cggctcgagatccgttcaataggtgatccattcccacggcaggtgatcagtgccatgttgtccactcgaactgtaatgacccaacagggtggaatctccctgagcccttctcgtcgctcggcgccaggcacatggggtcagtgtccacatcatcttcaacgatctgtaccatatacatccgcacacttgcctcggcaccgtctccgactgtctc

SEQ ID NO: 56934 - DNA, 54 bp, Glycine max
ctgaggtaactgtacatgtttttgtatttagtgtgctagatggtgggaagcatt

SEQ ID NO: 56935 - DNA, 77 bp, Glycine max
gagaggtacttgctcagagatatatttttttttttgtcggcatcattttctgggtagcgttgggtctctgtggttca

SEQ ID NO: 56936 - DNA, 282 bp, Glycine max
gattgacaagtaattaaaataggctgcacttgggagtgctaaggaagatgctagtaacaagggaactttcttccagtcttgaattgattgcaaagcaaagttgggaagtaaataattcagtacctgaaagttgagctgatccaagtgctacaagttgtgatgggacttgcgtgtaacattcttataattcacaatgtcttaggtgcagagagaacatgccaagtttgagatgagtttaccatatttttcagattggactggcttccggtaaaaatttaagtt

SEQ ID NO: 56937 - DNA, 257 bp, Glycine max
gagaacaagtatagtttaaaattgtgcattattgatgaagtgataaatggcagataatgatgttggtagtggcggcctgactcgagacatctgttggtatgtcagtggaaacgaaatccgttaaatactatgtggtggctgcttctactgcgtcagcatttaaggggaaccgtgtatcagtgtctttcatatatgaatatagatattacgagtggattcatacatttttggcagaattttataatacttagaattgt

SEQ ID NO: 56938 - DNA, 270 bp, Glycine max
cggagcgattccacttctggtgagcctcctgaagagtggagggttctgcgcgaagaacgacgcatcgacagcgctgtactcgcggtgcacggcgacagagaataagactcacggcgctaaagcagggatcagaaacgtacatgaggagctcaagggggacttccagtcaatcactgtagacaactctgggtacgtggaaaccctactggaggtcgtagacgatgcaatcgctcgacaagcagttcatggagatgtacgtccacccctagt

SEQ ID NO: 56939 - DNA, 104 bp, Glycine max
gtggaggtgtggggagagagagttgggtttcactatcacatgtctgtacgtgattacgaattctgaggtggggtttgagggagtgaggatttgggttgagagtt

SEQ ID NO: 56940 - DNA, 249 bp, Glycine max
gtgcatttacagaacagttagattgtagctcggtagattgtgctttagttcccctgggacctcctttactgtcctaccaaagcaactgcaaggcaatgctaacgtgctgttgatggcgctgttgagcttgcagttgatcgcccgtataaagccggggacccaattgttgtgtggtgtggccctcaacctaactcaaagttgcttataaactatggttttgttgatgaatatatttccactgatcgtcgt

SEQ ID NO: 56941 - DNA, 385 bp, Glycine max
cgagagaaagtcaaccaatctgcaaggtttgcacacaaacgacatgtacaaacctcgggggaactctgtattgataacacgccattgaagctctaattcgaattccatcacagacccttttcgtttgtcctctcacagttttgttcttttggcctcgaattgatattcagcgcaaaattttctttttggctgataatatctgtaaacagtatatgcacatacatgccctattttggtctttgttttaggtgttccaatggatggcaaaatcttggattctcagaatcaggttaactttgtggaaaatttatctgcaagggtttctaattgctcccttggagacaagatatcctattccgattctcctctggatgtatatgtggat

SEQ ID NO: 56942 - DNA, 397 bp, Glycine max
gtccttgtcccactccctctcttggctcatatagatatacaatcttttcaaattttcttctaaaacatgttttgctcttctcttgtccctttgatgcatagcagcaaaaggggtgtttgcataaagcagaaaagttggtaaatggcatggtatatctttaacagtggagccttttggggttgaatattctgaaaaaaaagttgaagagttcagaaagtttagatcttgttgttgttagaaaaaggtgaaaaaagttgggaaggagtgaggataataataatatgccaactgtgtggttctctttgaagaggtctctacactgcaaatcagagccatcagatgttcatgaccccaaaacaaggaagcagttaaccacaatctttaccaagaagggaag

SEQ ID NO: 56943 - DNA, 291 bp, Glycine max
tgcttatgcattcctcctattatcattatcgctcgattcttttggacactttcttttccatctatctccttcaccgaacatctttcaaggttctctcacccactacatccccccattcaagccatacggatggcttctgtatttcttatcggaatttcaggatctatatttctggggagagatacagcatcagtactagagatcatcatgaggactagcaagtttgaaggatcgtgtgggagaagccatgttttgagtgtagaggtctgtgagtctcgttcagttacaagt

SEQ ID NO: 56944 - DNA, 133 bp, Glycine max
cttgtatctctatctcctactcgacgatccgatcttccatcacgcatcgatcgttaccgctatataaaccgtaacggacttccctccagcaaaaggtagggaccacgtcactcggctcatcccttcggtgggg

SEQ ID NO: 56945 - DNA, 373 bp, Glycine max
gtgaaatgaaaaaaaaaaaaaaaattctcccttagctgcttttcttcctctgagaaaattctcagcaactctaaaaagggaaaacaacaccattacaacccatcaatcaaaaccccatttttcttcttgaagccaaacaaaatgaaagaaaactggagaggggcaacatcattacatcccatcaacccaaaatcacatcttctctgggaagccaaccataagccagaaaaaagaaaaagggtaggaaagtgggggaagaaaatcatgaagaaaccaaatccccttagttgatgttgttgttttcagcaccttgtaaggcaattaagttgttgatgatcacgaagttgacttttttcttgggatcatttgggca

SEQ ID NO: 56946 - DNA, 351 bp, Glycine max
gtggagaatagcagtcatctcacgccacgaagatttctttggctctgtgctttgcgtccgagtctctcccagagcgacagcatccatcttctttcacagtttgccactacattatggttcgtcgtcatttcggattgaatgattcaatagcttagcaaacgatgccatggcaactctgcaatctctgccaccttctttccgtcgatcaatcctagccccaaattcccactcattcacagccactccctttaactagtcccccaaattcattgcctcaaagggtgtcatcgttaggctcaggatctccatcagttctcccagggtttcggtttccagttcggagtatagtcc

SEQ ID NO: 56947 - DNA, 185 bp, Glycine max
ctcgagtgcagattgagacattccaccatgcagacacagtcaccgtggaatattagattcttgatcttctcgtatggcttcatcgcttggctaccagaagtacggctgtcagtgatactcgcatagtatggcctgggaacaggtctcctgttgtgactgctttgcatggcacagatgagcaccta

SEQ ID NO: 56948 - DNA, 259 bp, Glycine max
gttctgggctttggctttgagttatgcactcagttgttagctagcttctacatgctcatgcacctgaaactccaaccggcaaactcactacctccatgcgaaggagcattatcataacttccgtcatgccactgggattattacttccactaatagaggtggaagtccctcgcatcaatagtatatcaccagcatacactcctaccatgttgcacgtgcagcacccaaactctcacctttaagatcacaacctcaacgt

SEQ ID NO: 56949 - DNA, 276 bp, Glycine max
tccaacttcactttggtggcagttgaacgagtttgcaaccccacacacagtaaccatcacccttaaaaatgtcatccccctcgccggtggctacggtggtccccgccgccgcgctgtacgagtgcgccacaggggtggaagaatgctacgacaccaaggtcggagtcaacggtttgatcgattcgggaatcagtaccatcccgcctttcttcgtccacccgagggaaaccttagcggacctcaagcgcggaacctatccctggtctccgccggaca

SEQ ID NO: 56950 - DNA, 54 bp, Glycine max
gtaatttctacctcattaagagactgctctggctacctcaatgagttcttcctc

SEQ ID NO: 56951 - DNA, 244 bp, Glycine max
cacaaccacaagaagctgattcttgttaacagttacagaatgaatgctcactggactcgttctcccatatttacagttgagaaaaacttgtccgttaagttttaaatctaagcgatggctcttccatggttcgtcatctgcttcaagatctgcatttcattcacacaccataccattatgttactcataacacaccctttccttaaacttaggctcacactcttctcaatccataaccctttaa

SEQ ID NO: 56952 - DNA, 223 bp, Glycine max
tcttaatcaacttcacaaataaagtgtcatcactttctcttcctttgctttgggcccatcactcatatgattgccttgcagtaaattaaatagtgcagtggtgaagataaagggacagattcataagtatgggaaagtgataatagttcagtctggagcacctcagttcaaggtaatcagatattcacttgtcacgtacattggtggtacgctgttcggtgta

SEQ ID NO: 56953 - DNA, 423 bp, Glycine max
caattctttatgcatgagaactagaccacataaggtcaagtgagttgtaggagctctcgatgcaggcattggactggggacaccgtgctgtttgtaacaatttattgattactgtaaatccaaggtgtttactgtctgtagtaacgtttatgttgtatattgttagttcatggcaggagaaaaaagggagtaagttttcatatatactctctctctctctctctttttcttctttttttttaaagattatgtatccatacttgagaatgatacgtgtatggtgtggaacttggttccaaaccgtagccagaatgatgatgggcttgaaagtgaaagagccagcgagtcctgaatgtccaaagtattagttggaagcagttattacgcattatgctatttcttgcaatgagtttgataattgat

SEQ ID NO: 56954 - DNA, 263 bp, Glycine max
atatcttatttcatttttttttcggttcctattcctactctgcatctggaattctcaagcaggttcttacgcctgcttgctagttcaggtttgatggtcttgggatacatatagacatttttctcggtgtggtggtgctcttcgttgggttttcggtcctcccggagtcacgatcatcgctctgccgattcttcaagttgtgatgtttacgctcatctctatacgcgtactgacctcatatctgtccctttatcctttcctct

SEQ ID NO: 56955 - DNA, 217 bp, Glycine max
gggctttgcagttagttaggcccaataatatattcaaggcccgtgatcttgtttatcaagacggaactttttttttccttctctaatatttgttgtatccgtcgtctcggtgcttaggtgtgggtttggagatgcaatgttatatgtgaataatgtgatactaatccgcatggagaaacaaggaaacatagagatttgatttagttcaaaaaagaaa

SEQ ID NO: 56956 - DNA, 242 bp, Glycine max
gggctttgcagttaattacgccctctaagataatcaatgcccgtgatcttgtttatcatcaccgcactttttttttccttctctaacatttgttgtaggcgtcctcacggatctgaggtgtcggtggggggatgcaatgtcacatgtcaaaagcgttatcataatcttcatagagagacattgtcacgtatagatttgatttagttcaaaacgaacgagattgcactgacaaccttactatt

SEQ ID NO: 56957 - DNA, 174 bp, Glycine max
gtaagtttcggtaatggaatcggcagtggctatcaaatgcctctgctgttgcgtatcacatcatgggctcagaggccccccactcctctccggggcagcgctgttccctctcatcacgcttctcgggggggacgtaccctcgggtctctttggagtgacatatcccgtcatggg

SEQ ID NO: 56958 - DNA, 322 bp, Glycine max
ctctaatggaattcattcatggcatttcagaaaactcaattggtaatcctgcgtcgcttcacttctcacacaatcttcgatagcgcagaatttacagtcggtgagaagcacttggcgtctaatattcacgtacgggagtagcattagattggttcggaatcaaagttatcgaaatcgatcatgcaggtggtgtcaaatgtatcaatggtcagcttcctgtgttggcggtgaccacggtagagtagaaatcgtggcatcagacacatctaacgttacaattagaagggtgtgacaatgagattgattttgatagatgatgaca

SEQ ID NO: 56959 - DNA, 88 bp, Glycine max
agagaattggattggacgcagttgtgtgcctcaagttttgcttcttacccgctgatcgcggtgtttcacacagggttgcccactcttg

SEQ ID NO: 56960 - DNA, 82 bp, Glycine max
gcgctttccctctcttccgtgtgtgtttcctgtgctctcagtgctcttctcttctcctctcccatttccccgcttgcgcctt

SEQ ID NO: 56961 - DNA, 271 bp, Glycine max
cgaaatggagactaaacagagttcggtgacggttacgctcagttacggcgcgttgacgtgcgccgcggaatttctcgcgactttgctagcttctgctgtcgtcaaagcctcgcttttggccacgggtcgctaccggctgctattgatcaacacgcctactgccaaaggagagagcaaacttcagactgaggacaagcaacgtgatgcatagggagaagatggtcacgatgatgaaggcgaccatgacgaccatggatatggtggatctggc

SEQ ID NO: 56962 - DNA, 150 bp, Glycine max
attttctctcacctgaagatgtcttgctgctgaggtaagtgtggctgcagaaactcatggaagtgcggtaagggctgaggcagctgcactatgtaagtagatatgatctagagtgagtcaacgataagcgggagcttgctaatgggatgt

SEQ ID NO: 56963 - DNA, 164 bp, Glycine max
  unsure (1)..(164): unsure at all n locations
ctcgagctcgagttgattcggntaaagggatgtctcaggcacctttttgctaaaggaaaggttttttcaccgctctttaatgttgttggaattggcgttttaatgcatttagcatcttccatttttgcatcactggggggaaagttggttgcgggtcgtctcct

SEQ ID NO: 56964 - DNA, 266 bp, Glycine max
cttctcgtccgtaagttgagctcctagactcgaggtcctcccaattgtgctccttcaatttctgtggtcactaaatttgatgatggtacacctgcacctcgtgctctgatgttgctagaagccatatggggcttaacctgccaagactactaatggtggcagccatcatcagatgatgcaactatctagttagatgaagtggttgattgactttctagatcctccaaggatctaggtcggggaatttgtatcccaaattctgaaca

SEQ ID NO: 56965 - DNA, 135 bp, Glycine max
caaatcgatgggtcgttgagcgactagactatgtgtactcctatgtggagtcattcaatttctgcgcttactccagtcgtggtcgctataccgggacccagtgctacaaattcctcgatgtcatcggggggatag

SEQ ID NO: 56966 - DNA, 82 bp, Glycine max
catatcgttcgattatcattcgacgaaaacacgggtattcctaattatgttgcttcacttattgcgctcacaaaatacgatt

SEQ ID NO: 56967 - DNA, 54 bp, Glycine max
caagctatacctgatccaaaggagtatgcttagtgagtttgattgcatgtttca

SEQ ID NO: 56968 - DNA, 398 bp, Glycine max
ctgtggagaaactgcagctggatgtccaaccatttgatccaccaactcccataaatctttgccaaaaattgggaaatagcatggattcatttgagcacacaccaagcagccgtatctccaaagcacaagatactgaagatgactctgttgactatatggaaaaaattggtcagggaaccttcatacggcggataggtctgaaaggaatgcagctttggtttcacctttgctagccacatatactcagagaaagaacaagtctgttcgttttgaaagtgaaactgacttggtaacctatggaagctcatcatatgattgggatatgaaggaaaacaagtcaccaaatatccaaagtgcatattaaccatctccttatcctaccccgttgaagttaattg

SEQ ID NO: 56969 - DNA, 225 bp, Glycine max
  unsure (1)..(225): unsure at all n locations
cgtacgaaagcaaggnattcggctcgagctctacttcatctgtggtttactgggtgcgtttgtgttttattcgacttttgtgctcttgctttgcgtctgcttggttccctttgcctttcggcgtggggcgcttcttcctgttcgcctggtggggtcgggtttccgtgcctgctttttccttcttctgcttctctttcccctctgcgctttcgtccgcctttgttt

SEQ ID NO: 56970 - DNA, 421 bp, Glycine max
  unsure (1)..(421): unsure at all n locations
ggtgcaagagtttgttgtgagctataagctagtttatcgtgaggagaatatgaagttgtttgttttctttgttgctgcagtagttttggtagcatggccatgccatggcgcaggctaccaaaggttccctctccgaatgaaaactggctatggtgagcgttcttcggaggtaaaatgcgcaagttttaagcttgctgtggaatcacacaacatccgagcctttaaaaccattcctgaatagtgcgttgaaccaacaaaggactacattaatggcgaacaatttagatcagactctaaaacagttaaccaacaagctttcttttatgctagtgaacgcgaagtccatcacaacgacatatttatattcggcatagataacaccgtactctctaatatcncataccatgaaaaacatggatat

SEQ ID NO: 56971 - DNA, 261 bp, Glycine max
ggcacaagtgagtttgttgatcgagataactagaatcagtgtgatgaatatgaacgtccttgatttcttcgttgctacaattttggtagcatggcaatgccatgcgtacgatatgttccctctccgaatgaacactggctatggtgcccgtactccggaggtgaaatgcgcaagttggatgcttgctgtggaggcacacaacatctttggctttgacaccattcctgaagagtgcgttgaatcaacaaaggaatacatcca

SEQ ID NO: 56972 - DNA, 356 bp, Glycine max
ggcacaagtgagtttgttgatcgagataactagaaacagtgtgatgaaaatgaaggtccttgttttcttcgttgctacaattttggtagcatggcaatgccatgcgtacgatatgttccctctccgaatgaacactggctatggtgcccgtactccggaggtgaaatgcgcaagttggaggcttgctgtggaagcacacaacatctttggctttgagaccattcctgaagagtgcgttgaagcaacaaaggaatacatccatggcgaacaatatagatcagactccaaaacagttaaccaacaagcttacttttatgccagagacctcgaagtcgatcccaaggacaaatttgtgt

SEQ ID NO: 56973 - DNA, 405 bp, Glycine max
ggcacaagtgagtttgttgatcgagataactagaaacagtgtgatgaaaatgaaggtccttgttttcttcgttgctacaattttggtagcatggcaatgccatgcgtacgatatgttccctctccgaatgaacactggctatggtgcccgtactccggaggtgaaatgcgcaagttggaggcttgctgtggaagcacacaacatctttggctttgagaccattcctgaagagtgcgttgaagcaacaaaggaatacatccatggcgaacaatatagatcagactccaaaacagttaaccaacaagcttacttttatgccagagacctcgaagtccatcccaaagacacatttgtgttcagtataaatggcaccgtactctctaatattccatactacaaaaaaca

SEQ ID NO: 56974 - DNA, 436 bp, Glycine max
  unsure (1)..(436): unsure at all n locations
ggttttgtagttgcatgaatgaattttcaaagcacaagggtttatgctctctcttcttccacgtccacttcttacaacccctttccctctctccctcaatatataaactcttcactcacattcacagacccacttttcttgcaactcaaataagaccctgagtgagtgagccacttctctttttaaccctttttgccactgccccaacacaaaacaaaggcacaaaactggggaggcttgtgtgtgtgattgcagcagccatgggggtctcttctcagagcacccctttgtattgcccctcttgttcncgccacttccgtgctgctctcttttcttggtccttgttggctccctctcaatcacacctccccaggttctttttccttcaaagtggtcatcttttctccattgggtgttgtcttcttctttgccttgg

SEQ ID NO: 56975 - DNA, 125 bp, Glycine max
cgtcgctaaagcaccacaaaaaggggagcagggggctcatctctatttgtcgaccgcaataactgtcaataatgcgtcgcttctctgcgtcattgatgtctacgccgctagacttcttcgaccat

SEQ ID NO: 56976 - DNA, 410 bp, Glycine max
ggcacaagtgagtttgttgatcgagataactagaaacagtgtgatgaaaatgaaggtccttgttttcttcgttgctacaattttggtagcatggcaatgccatgcgtacgatatgttccctctccgaatgaacactggctatggtgcccgtactccggaggtgaaatgcgcaagttggaggcttgctgtggaagcacacaacatctttggctttgagaccattcctgaagagtgcgttgaagcaacaaaggaatacatccatggcgaacaatatagatcagactccaaaacagttaaccaacaagcttacttttatgccagagacctcgaagtccatcccaaggacacatttgtgttcagtatagatggcaccgtactctctaatattccatactacaaaaaacatggat

SEQ ID NO: 56977 - DNA, 415 bp, Glycine max
  unsure (1)..(415): unsure at all n locations
ggcacaagtgagtttgttgatcgagataactagaaacagtgtgatgaaaatgaaggtccttgttttcttcgttgctacaattttggtagcatggcaatgccatgcgtacgatatgttccctctccgaatgaacactggctatggtgcccgtactccggaggtgaaatgcgcaagttggaggcttgctgtggaagcacacaacatctttggctttgagaccattcctgaagagtgcgttgaagcaacaaaggaatacatccatggcgaacaatatagatcagactccanaacagttaaccaacaagcttacttttatgcccagagactcgaagtccatcccagggacacatttgtgttcagtatagatggcaacgtactctctaatattccatactacaaaaaacatggatattgg

SEQ ID NO: 56978 - DNA, 406 bp, Glycine max
ggcacaagtgagtttgctgatcgagataactagaaacagtgtgatgaaaatgaaggtccttgttttcttcgttgctacaattttggtagcatggcaatgccatgcgtacgatatgttccctctccgaatgaacactggctatggtgcccgtactccggaggtgaaatgcgcaagttggaggcttgctgtggaagcacacaacatctttggctttgagaccattcctgaagagtgcgttgaagcaacaaaggaatacatccatggcgaacaatatagatcagactccaaaacagttaaccaacaagcttacttttatgccagagacctcgaagtccatcccaaggacacatttgtgttcagtatagatggcaccgtactctctaatattccatactacaaaaaacat

SEQ ID NO: 56979 - DNA, 404 bp, Glycine max
  unsure (1)..(404): unsure at all n locations
ggcacaagtgagtttgttgatcgagataactagaaacagtgtgatgaaaatgaaggtccttgttttcttcgttgctacaattttggtagcatggcaatgccatgcgtacgatatgttccctctccgaatgaacactggctatggtgcccgtactccggaggtgaaatgcgcaagttggaggcttgctgtggaagcacacaacatctttggctttgagaacattcctgaagagtgcgttgaagcaacanaggaatacatccatggcgaacaatatagatcagactccaaaacagttaaccaacaagcttacttttatgccagagacctcgaagtccatcccaaggacacatttgtgttcagtatagatggcaccgtactctctaatattcatactacaaaaaaca

SEQ ID NO: 56980 - DNA, 246 bp, Glycine max
tccaggtctcccacacgtccgacaggagcaaaaagaggagcacaagtggcatagttgattttgatgatcaagataactgtagataatgttatgagtccttgtgtccttcgttgctacaattctagaatcatggtaacatgatacttacaagagtttcacacgttcactcacacacagtgatactgtgctacgtaccccgtacgtcagatgctgcaattgcaagcttgctgtttgatcacacaacat

SEQ ID NO: 56981 - DNA, 419 bp, Glycine max
  unsure (1)..(419): unsure at all n locations
gaaggtgcaagagtttgttgtgagctataagctagtttatcgtgaggagaatatgaagttgtttgttttctttgttgctgcagtagttttggtagcatggccatgccatggcgcaggctaccaaaggttccctctccgaatgaaaactggctatggtgagcgttcttcggaggtaaaatgcgcaagttttaagcttgctgtggaagcacacaacatccgagcctttaaaaccattcctgaagagtgcgttgaaccaacaaaggactacattaatggcgaacaatttagattagactctaaaacagttaaccaacaagctttcttttatgctagtgaacgccaagttcatcacancgacatatttatattcggcatagataacaccgtactctctaatatcccatactatgaaaaacatg

SEQ ID NO: 56982 - DNA, 406 bp, Glycine max
  unsure (1)..(406): unsure at all n locations
ggcacaagtgagtttgttgatcgagataactagaaacagtgtgatgaaaatgaaggtccttgttttcttcgttgctacaattttggtagcatggcaatgccatgcgtacgatatgttccctctccgaatgaacactggctatggtgcccgtactccggaggtgaaatgcgcaagttggaggcttgctgtggaagcacacaacatctttggctttgagaccattcctgaagagtgcgttgaagcaacaaaggaatacatccatggcgaacaatatagatcagactccaaaacagttaaccaacaagcttacttttatgccagagacctcgaagtccatcncaaggacacatttgtgttcagtatagatggcaccgtactctctaatattccatactacaaaaaacat

SEQ ID NO: 56983 - DNA, 429 bp, Glycine max
  unsure (1)..(429): unsure at all n locations
ggcacaagtgagtttgttgatcgagataactagaaacagtgtgatgaaaatgaaggtccttgttttcttcgttgctacaattttggtagcatggcaatgccatgcgtacgatatgttccctctccgaatgaacactggctatggtgcccgtactccggaggtgaaatgcgcaagttggaggcttgctgtggaagcacacaacatctttggctttgagaccattcctgaagagtgcgttgaagcaacaaaggaatacatccatggcgaacaatatagatcagactccaaaacagttaaccaacangcttacttttatgccagagacctcgaagtcatcccaaggacacatttgtgttcagtatagatggcaccgtactctctaatattccatactacaaaaaacatgggtatggggtggagaaatttaac

SEQ ID NO: 56984 - DNA, 421 bp, Glycine max
ggcacaagtgagtttgttgatcgagataactagaaacagtgtgatgaaaatgaaggtccttgttttcttcgttgctacaattttggtagcatggcaatgccatgcgtacgatatgttccctctccgaatgaacactggctatggtgcccgtactccggaggtgaaatgcgcaagttggaggcttgctgtggaagcacacaacatctttggctttgagaccattcctgaagagtgcgttgaagcaacaaaggaatacatccatggcgaacaatatagatcagactccaaaacagttaaccaacaagcttacttttatgccagagacctcgaagtccatcccaaggacacatttgtgttcagtatagatggcaccgtactctctaatattccatactacaaaaaacatggatatggggtggag

SEQ ID NO: 56985 - DNA, 405 bp, Glycine max
ggcacaagtgagtttgttgatcgagataactagaaacagtgtgatgaaaatgaaggtccttgttttcttcgttgctacaattttggtagcatggcaatgccatgcgtacgatatgttccctctccgaatgaacactggctatggtgcccgtactccggaggtgaaatgcgcaagttggaggcttgctgtggaagcacacaacatctttggctttgagaccattcctgaagagtgcgttgaagcaacaaaggaatacatccatggcgaacaatatagattagactccaaaacagttaaccaacaagcttacttttatgccagagacctcgaagtccatcccaaggacacatttgtgttcagtatagatggcaccgtactctctaatattccatactacaaaaaaca

SEQ ID NO: 56986 - DNA, 432 bp, Glycine max
ggcacaagtgagtttgttgatcgagataactagaaacagtgtgatgaaaatgaaggtccttgttttcttcgttgctacaattttggtagcatggcaatgccatgcgtacgatatgttccctctccgaatgaacactggctatggtgcccgtactccggaggtgaaatgcgcaagttggaggcttgctgtggaagcacacaacatctttggctttgagaccattcctgaagagtgcgttgaagcaacaaaggaatacatccatggcgaacaatatagatcagactccaaaacagttaaccaacaagcttacttttatgccagagacctcgaagtccatcccaaggacacatttgtgttcagtatagatggcaccgtactctctaatattccatactacaaaaaacatggataatggggtggagaaatttaact

SEQ ID NO: 56987 - DNA, 326 bp, Glycine max
ggcacaagtgagtttgttgatcgagataactagaaacagtgtgatgaaaatgaaggtccttgttttcttcgttgctacaattttggtagcatggcaatgccatgcgtacgatatgttccctctccgaatgaacactggctatggtgcccgtactccggaggtgaaatgcgcaagttggaggcttgctgtggaagcacacaacatctttggctttgagaccattcctgaagagtgcgttgaagcaacaaaggaatacatccatggcgaacaatatagatcagactccaaaacagttaaccaacaagcttacttttatgccagagacc

SEQ ID NO: 56988 - DNA, 283 bp, Glycine max
ggcacaagtgagtttgttgatcgagataactagaaacagtgtgatgaaaatgaaggtccttgttttcttcgttgctacaattttggtagcatggcaatgccatgcgtacgatatgttccctctccgaatgaacactggctatggtgcccgtactccggaggtgaaatgcgcaagttggaggcttgctgtggaagcacacaacatctttggctttgagaccattcctgaagagtgcgttgaagcaacaaaggaatacatccatggcgaacaatatagatcagac

SEQ ID NO: 56989 - DNA, 407 bp, Glycine max
  unsure (1)..(407): unsure at all n locations
ggcacaagtgagtttgttgatcgagataactagaaacagtgtgatgaaaatgaaggtccttgttttcttcgttgctacaattttggtagcatggcaatgccatgcgtacgatatgttccctctccgaatgaacactggctatggtgcccgtactccggaggtgaaatgcgcaagttggaggcttgctgtggaagcacacaacatctttggctttgagaccattcctgaagagtgcgttgaagcatcaaaggaatacatccatggcgaacaatatagatcagactccanaacagttaaccaacaagcttacttttatgccagagaactcgaagtccatcccaaggacacatttgtgttcagtatagatggcaccgtactctctaatattccatactacanaaaacatg

SEQ ID NO: 56990 - DNA, 357 bp, Glycine max
  unsure (1)..(357): unsure at all n locations
ggcacaagtgagtttgttgatcgagataactagaaacagtgtgatgaaaatgaaggtccttgttttcttcgttgctacaattttggtagcatggcaatgccatgcgtacgatatgttccctctccgaatgaacactggctatggtgcccgtactccggaggtgaaatgcgcaagttggaggcttgctgtggaagcacacaacatctttggctttgagaccattcatgaagagtgcgttgaagcaacaaaggaatacatccatggcgaacaatatagatcagactccanaacagttaaccaacaagcttacttttatgccagagacctcgaagtccatcccaaagacacatttgtgtt

SEQ ID NO: 56991 - DNA, 417 bp, Glycine max
gggtttagcctctcatagccatgagagactttatacttgaaagactaatacaagaaagggatggatgactagtagtaagaaagaaggaatgactaagaaagaggatttcctctaaaggatagacccaggccttggatagatttgagcctcaatatatttttcttttgcttcctcctccttatataggcactatgaagcttaattttcatgctaacttcgtgcttagtgtcggcttttgcgctaagcgcgcctttggacttcattatgggctttttcgcgcgctaagcctgagctgtacgctaagtgcggacacgcgctaagcgagctgtccacttcttcaatttcgcttcaaggctttttcgtctactttttgcctcaatttttcttcaaagcacttgaattcctcatctcttgact

SEQ ID NO: 56992 - DNA, 411 bp, Glycine max
  unsure (1)..(411): unsure at all n locations
ggcacaagtgagtttgttgatcgagataactagaaacagtgtgatgaaaatgaaggtccttgttttcttcgttgctacaattttggtagcatggcaatgccatgcgtacgatatgttccctctccgaatgaacactggctatggtgcccgtactccggaggtgaaatgcgcaagttggaggcttgctgtggaagcacacaacatctttggctttgagaccattcctgaagagtgcgttgaagcaacaaaggaatacatccatggcgaacaatatagattagactccaaaacagttaaccaacaagcttacttttatgtcagagacctcgaagtccatcccaaggacacatttgtgttcagtatagacggcaccgtactctctaatattccatactacaanaaacatggata

SEQ ID NO: 56993 - DNA, 202 bp, Glycine max
cgacagaacgggcacaccaagtcctgcgcatcttccagacagcagcagcaacaacatacaaactctttctggattcagtttgtgatgtgaaactggcagtgactcttacatcaacactcgttctggcattgctattcgctgcttcagcttttgctgctcatcagcctagagtacctgaagcttacctccaaaatgggaactt

SEQ ID NO: 56994 - DNA, 433 bp, Glycine max
ggcacaagtgagtttgttgatcgagataactagaaacagtgtgatgaaaatgaaggtccttgttttcttcgttgctacaattttggtagcatggcaatgccatgcgtacgatatgttccctctccgaatgaacactggctatggtgcccgtactctggaggtgaaatgcgcaagttggaggcttgctgtggaagcacacaacatctttggctttgagaccattcctgaagagtgcgttgaagcaacaaaggaatacatccatggcgaacaatatagatcagactccagaacagttaaccaacaagcttacttttatgccagagacctcgaagtcgatcccaaggacacatttgtgttcagtatagatggcaccgtactctctaatattccgtactacaaaaaaacatggattatggggtggagaaatttaact

SEQ ID NO: 56995 - DNA, 407 bp, Glycine max
  unsure (1)..(407): unsure at all n locations
ggcacaagtttgttgagatagctagaagcaataagatgaaaatgaaagtgcttgttttgtttgttgctacagttttggtagcatatgaatgccatggctcagactaccagaagttccctctccaaatgaaaactgggtttggtgggcaatacagcaatgaggtggcatgtgccagttggaggcttggcgtggaagcaaacaacgtagtcaagtggcaaactgttcctgcagcttgcggagagtacatagctgactacgttctaagagaccaatatagatcagattccaaaacagttaaccaacaagcttatttctatgctaaatccctcaaactcatcaacanagatgtctttgtcttggacgttgacgacactactctctctaatctccagtattttgctaaccat

SEQ ID NO: 56996 - DNA, 273 bp, Glycine max
  unsure (1)..(273): unsure at all n locations
ggcacaagtgagtttgttgatcgagataactagaaacagtgtgatgaaaatgaaggtccttgttttcttcgttgctacaattttggtagcatggcaatgccatgcgtacgatatgttccctctccgaatgaacactggctatggtgcccgtactccggaggtgaaatgcgcaagttggaggcttgctgtggaagcacacaacatctttggctttgagaccattcctgaagagtgcgttgaagcaacanaggaatacatccatggcgaacaata

SEQ ID NO: 56997 - DNA, 302 bp, Glycine max
ggcacaagtgagtttgttgatcgagataactagaaacagtgtgatgaaaatgaaggtccttgttttcttcgttgctaaaattttggtagcatggcaatgccatgcgtacgatatgttccctctccgaatgaacactggctatggtgcccgtactccggaagtgaaatgcgcaagttggaagcttgctgtggaaacacacaacatctttggctttgagaccattcctgaagagtgcgtttaagcaacaaaagaatacatccatggcgaacaatatagattagactccaaaacagttaaccaac

SEQ ID NO: 56998 - DNA, 262 bp, Glycine max
ggcacaagtttgttgagatagctagaagcaataagatgaaaatgaaagtgcttgttttgtttgttgctacagttttggtagcatatgaatgccatggctcagactaccagaagttccctctccaaatgaaaactgggtttggtgggcaatacagcaatgaggtggcatgtgccaattggaggcttggcgtggaagcaaacaacatagtcaagtggcaaactgttcctgcagcttgcggagagtacatagctgactacgttct

SEQ ID NO: 56999 - DNA, 405 bp, Glycine max
  unsure (1)..(405): unsure at all n locations
ggcacaagtgagtttgttgatcgagataactagaaacagtgtgatgaaaatgaacgtccttgttttcttcgttgctacaattttggtagcatggcaatgccatgcgtacgatatgttccctctccgaatgaacactggctatggtgcccgtactccggaggtgaaatgcgcaagttggaggcttgctgtggaagcacacaacatctttggctttgagaccattcctgaagagtgcgttgaagcaacanaggaatacatccatggcgaacaatatagatcagactccanaacagttaaccaacaagcttacttttatgccagagacctcgaagtccatcccaaagacacatttgtgttcagtatagatggcaccgtactctctaatattccatactacaaaaaaca

SEQ ID NO: 57000 - DNA, 349 bp, Glycine max
ggcacaagtgagtttgttgatcgagataactagaaacagtgtgatgaaaatgaaggtccttgttttcttcgttgctacaattttggtagcatggcaatgccatgcgtacgatatgttccctctccgaatgaacactggctatggtgcccgtactccggaggtgaaatgcgcaagttggaggcttgctgtggaagcacacaacatctttggctttgagaccattcctgaagagtgcgttgaagcaacaaaggaatacatccatggcgaagaatatagattagactccagaacagttaaccaacaagcttacttttatgccagagacctcgaagtccatcccaaggacaca

SEQ ID NO: 57001 - DNA, 159 bp, Glycine max
acgggtccgtaaagatgacagaaagggaaagtggggaaatttgttgtgatctcaaagctagtttatcctgaggagaacatcaaagttgcttgtattccctgtagctacactaattatggtaacatggacatgcgaattggcatgctatcaatggctcac

SEQ ID NO: 57002 - DNA, 415 bp, Glycine max
ggtgcacaagtgagtttgttgatcgagataactagaaacagtgtgatgaaaatgaaggtccttgttttcttcgttgctacaattttggtagcatggcaatgccatgcgtacgatatgttccctctccgaatgaacactggctatggtgcccgtactccggaggtgaaatgcgcaagttggaggcttgccgtggaagcacacaacatctttggctttgagaccattcctgaagagtgcgttgaagcaacagaggaatacatccatggcgaacaatatagattagactccagaacagttaaccaacaagcttacttttatgccagagacctcgaagtccatcccaaggacacatttgtgttcagtagagatggcaccgtactctctaatattccatactacaaaaaacatggatatg

SEQ ID NO: 57003 - DNA, 354 bp, Glycine max
tgctgctacaagacgacaacagggggggaacgtgtaagagtttgttgtgagcgaataacgagtataacttgaggagaatacgaagttgttagcattctatggtgctgtggtagatttggggacattgccaattccactgagcatgctatctactgttacttccccgactgaacgcttgctatcgagaatcttcgcctatcgcatggctactatgttctaagcatgctgtgggaccataccatatacgagccttgtactacatcactgactaatttgttaagcccctcgtacgattacattaatgcagaatcactcatctcatgcaccgaaacattttacggacagtctttcttt

SEQ ID NO: 57004 - DNA, 384 bp, Glycine max
  unsure (1)..(384): unsure at all n locations
ggatgcacaagtttgttgagatagctagaagcaataagatgaaaatgaaagtgcttgttttgtttgttgctacagttttggtagcatatgaatgccatggctcagactaccagaagttccctctccaaatgaaaactgggtttggtgggcaatacagcaatgaggtggcatgtgccagttggaggcttggcgtggaagcaaacaacgtagtcaagtggcaaactgttcctgcagcttgcggagagtacatagctgactacgttctangagaacaatatagatcagattccanaacagttaaccaacaagcttatttctatgctaaatccctcaaactcancaacaaagatgtctttgtcttggacgttgacgacactactctct

SEQ ID NO: 57005 - DNA, 94 bp, Glycine max
aaaaggggcaattcaggggcacaaatgattctgttcgtcgaaataactcgttgtaatgtaatgaggataaaggacattgtgattcgtcgtctac

SEQ ID NO: 57006 - DNA, 415 bp, Glycine max
  unsure (1)..(415): unsure at all n locations
ggcacaagtgagtttgttgatcgagataactagaaacagtgtgatgaaaatgaaggtccttgttttcttcgttgctacaattttggtagcatggcaatgccatgcgtacgatatgttccctctccgaatgaacactggctatggtgcccgtactccggaggtgaaatgcgcaagttggaggcttgctgtggaagcacacaacatctttggctttgagaccattcctgaagagtgcgttgaagcaacanaggaatacatccatggcgagcagtatagatcagactccaaaacagttaaccaacaagcttacttttatgccagagacctcgaagtccatcccaaggacacatttgtgttcagtatagatggcaccgtactctctaatattccatactacaaaaaacatggatatggg

SEQ ID NO: 57007 - DNA, 220 bp, Glycine max
aggggcacaagtgagtttgttgatcgacatatctagagacagtgtgatgaaaatgaaggtccttgttttcttcgttgctacaattttggtagcatggcaatgccatgcgtacgatatgttccctctcacgaatgaacactggctacagtgcccgtactccggaggtgaaatgcgcaagttggaggcttgctgtggaagcacacaacatctttggctttga

SEQ ID NO: 57008 - DNA, 101 bp, Glycine max
tactgctgcgacgtcgacacacagcgggattcattccagacaccacccctcttctcatagcctgctcagttggcagcaggtactctcattcctctagcgga

SEQ ID NO: 57009 - DNA, 125 bp, Glycine max
gacagcatatatatcaataatctattttatactatacctacattttgataactttccttgtagttgatagccatggctacccgtggaaagcttgaggttgacactgatgtcaagtccaatccaga

SEQ ID NO: 57010 - DNA, 433 bp, Glycine max
gagtgcacaagtgagtttgttgatcgagataactagaaacagtgtgatgaaaatgaaggtccttgttttcttcgttgctacaattttggtagcatggcaatgccatgcgtacgatatgttccctctccgaatgaacactggctatggtgcccgtactccggaggtgaaatgcgcaagttggaggcttgctgtggaagcacacaacatctttggctttgagaccattcctgaagagtgcgttgaagcaacacaggaatacatccatggcgagcagtatagatcagactccaaaacagttaaccaacaagcttacttttatgccagagacctcgaagtccatcccaaggacacatttgtgttcagtatacatggcaccgtactcgcgaatattccatacgacgtaaaacatggatatggggtggaaaaatttaac

SEQ ID NO: 57011 - DNA, 246 bp, Glycine max
gagtggtcgcaactgtaagtctgaacgtcgcagactacgacgacggtgacgaggacgaggagtccgttgccgcggtggagcctcctatggtttcgcaccaggcgcctcgtgtctgtacatccaacagggcagtcattacccccatcgaatcgcagaactgaacgaggcgaggtttcttgttccttcacgaatgggagcatgaggcaggagagcgagtggaatctcaccgaccttgacggtcgcgct

SEQ ID NO: 57012 - DNA, 278 bp, Glycine max
cgtacgcataagaagacagacggggaggggttcgcaggtggtaaatcacagaatccctgttagcactctcgtcgcgacgattccctgtgatctctcagtctgctcttgcagtggatcagacttcacatcacgattcaaaagccttggtcaatactcactcatgtctgttcctaatgatgataacttgtcatattcccagctttcatatgctatcttggatctccttgattccatcatagtctacgtggcatcagaatgtcacatactaccaacgctga

SEQ ID NO: 57013 - DNA, 270 bp, Glycine max
gattacacacacacaaattacatatccccagtactctgagacagaagcattcaccctgactgtttccattgccaagttccactcccttcccctaagtattttccttctcttggccttcaacataaaacccctcctaacagcagtcacagaaccagtggttgaaacccatgggaaccctttggatccaatagtaaggtaccacatgtggccactttggactgatcaacgacgcctcacactacgccaacctaggaacattacatgccctct

SEQ ID NO: 57014 - DNA, 266 bp, Glycine max
gaaggtgcaagagtttgttgtgagctataagctagtttatcgtgaggagaatatgaagttgtttgttttctttgttgctgcagtagttttggtagcatggccatgccatggcgcaggctaccaaaggttccctctccgaatgaaaactggctatggtgagcgttcttcggaggtaaaatgcgcaagttttaggcttgctgtggaagcacacaacatccgagcctttaaaaccattcctgaagagtgcgttgagccaacaaaggact

SEQ ID NO: 57015 - DNA, 292 bp, Glycine max
gatctggcagcagaagaacaagtagttgagaactaagaaggagaagcaaatggcttcctcaatgatctcttccccagctgttaccactgtcaaccgtgccggtgccggcatggttgctccattcactggcctcaagtccatggctggcttccccaccagaaagaccaacaatgacattacctccattgctagcaacggtggaagagtgcaatgcatgcaggtgtggccaccagttggcaagaagaagtttgagactctttcctacctgccagaccttgatgatgcacaattg

SEQ ID NO: 57016 - DNA, 403 bp, Glycine max
ggcacaagtgagtttgttgatcgagataactagaaacagtgtgatgaaaatgaaggtccttgttttcttcgttgctacaattttggtagcatggcaatgccatgcgtacgatatgttccctctccgaatgaacactggctatggtgcccgtactccggaggtgaaatgcgcaagttggaggcttgctgtggaagcacacaacatctttggctttgagaccattcctgaagagtgcgttgaagcaacaaaggaatacatccatggcgaacaatatagattagactccaaaacagttaaccaacaagcttactttttatgcagagacctcgaagttccatccaaagacacatttgtgttcagtttagatggcacgtactctcaataatccatactacaaaaaaca

SEQ ID NO: 57017 - DNA, 383 bp, Glycine max
  unsure (1)..(383): unsure at all n locations
gatgcacaagtttgttgagatagctagaagcaataagatgaaaatgaaagtgcttgttttgtttgttgctacagttttggtagcatatgaatgccatggctcagactaccagaagttccctctccaaatgaaaactgggtttggtgggcaatacagcaatgaggtggcatgtgccagttggaggcttggcgtggaagcaaacaacgtagtcaagtggcaaactgttcctgcagcttgcggagagtacatagctgactacgttctangagaccaatatagatcagattccaaaacagttaaccaacaagcttatttctatgctaaatccctcaaactcaccaacaaagatgtctttgtcctggacgttgacgacactactctct

SEQ ID NO: 57018 - DNA, 412 bp, Glycine max
  unsure (1)..(412): unsure at all n locations
ggcacaagtgagtttgttgatcgagataactagaaacagtgtgatgaaaatgaaggtccttgttttcttcgttgctacaattttggtagcatggcaatgccatgcgtacgatatgttccctctccgaatgaacactggctatggtgcccgtactccggaggtgaaatgcgcaagttggaggcttgctgtggaagcacacaacatctttggctttgagaccattcctgaagagtgcgttgaagcaacaaaggaatacatccatggcgaacaatatagattagactccaaaacagttaaccaacaagcttacttttatgccagagacctcgaagtccatcccaaggacacatttgtgttcagtatagatggcaacgtactctctaatattccatactacnaaaaacatggatat

SEQ ID NO: 57019 - DNA, 206 bp, Glycine max
gacagattaaaaccatagacgatacagaagttcatgaatgataggagttaaatgtctactacgagacatgtctcccttctgtccctttacctcatcctatctctaaattccctttacatgaccatggctgcaaggatcattccccagagtgctcctagcacagttacaaggcctcaatttctatcagaagctgaaacttaattgaa

SEQ ID NO: 57020 - DNA, 419 bp, Glycine max
ggcacaagtgagtttgttgatcgagataactagaaacagtgtgatgaaaatgaaggtccttgttttcctcgttgctacaattttggtagcatggcaatgccatgcgtacgatatgttccctctccgaatgaacactggctatggtgcccgtactccggaggtgaaatgcgcaagttggaggcttgctgtggaagcacacaacatctttggctttgagaccattcctgaagagtgcgttgaagcaacaaaggaatacatccatggcgaacaatatagatcagactccaaaacagttaaccaacaagcttacttttatgccagagacctcgaagtccatcccaaggacacatttgtgttcagtatagatggcaccgtactctctaatattccatactacaaaaaacatggatatggggggg

SEQ ID NO: 57021 - DNA, 268 bp, Glycine max
ggcacaagtttgttgagatagctagaagcaataagatgaaaatgaaagtgcttgttttgtttgttgctacagttttggtagcatatgaatgccatggctcagactaccagaagttccctctccaaatgaaaactgggtttggtgggcaatacagcaatgaggtggcatgtgccagttggaggcttggcgtggaagcaaacaacgtagtcaagtggcaaactgttcctgcagcttgcggagagtacatagctgactacgttctaggaga

SEQ ID NO: 57022 - DNA, 275 bp, Glycine max
  unsure (1)..(275): unsure at all n locations
ggcacaagtgagtttgttgatcgagataactagaaacagtgtgatgaaaatgaaggtccttgttttcttcgttgctacaattttggtagcatggcaatgccatgcgtacgatatgttccctctccgaatgaacactggctatggtgcccgtactccggaggtgaaatgcgcaagttggaggcttgctgtggaagcacacaacatctttggctttgagaccattcctgaagagtgcgttgaagcaacanaggaatacatccatggcgaacaatata

SEQ ID NO: 57023 - DNA, 250 bp, Glycine max
acgggcccggcaggctgacaacagtcggggtctcaggggattcggcaggtcttggacttgctcaggttgtctgtgctccacgctctgtcgtcatctggtgtttaatggagctgtcacaatgcatcagcttcctgtaggtaccagtctgtctcaggaggccagtgatacacagtatgctcgtaggatccgggagattagtgggagacttgttggttttgcctaagtgggacgaggctcccagatcccatgt

SEQ ID NO: 57024 - DNA, 219 bp, Glycine max
ggcacaagtgagtttgttaattcaaaataactaaaaacattgtgataaaaataaaggtccttgtttccttcgttcctacaattttggtagcttggcaatgccatgcgtacgatatgttccctctccgaattaacactggctatggtgccggtatccgtgatgtgaaatgcgcaagttggaggcttgcggttgaagcatacaacatctttggctttgaga

SEQ ID NO: 57025 - DNA, 353 bp, Glycine max
ggcacaagtgagtttgttgatcgagataactagaaacagtgtgatgaaaatgaaggtccttgttttcttcgttgctacaattttggtagcatggcaatgccatgcgtacgatatgttccctctccgaatgaacactggctatggtgcccgtactccggaggtgaaatgcgcaagttggaggcttgctgtggaagcacacaacatctttggctttgagaccattcctgaagagtgcgttgaagcaacaaaggaatacatccatggcgaacaatatagatcagactccaagacagttaagcaacaagcttacttttatgccagagagctcgaagtccatcccaaggacacatttg

SEQ ID NO: 57026 - DNA, 278 bp, Glycine max
gacacatgcccatcatcaaagtttcttcctttctctgctctttgtcttctctgacacatttggggccttgttgagtgtgtttttgcaagagggtatggcgaaggacgttgaggttgctgagcgtggctccttctctgggaaggactaccaggaccctccacgagcaccactcattgatgctgaggagctcacaaagtggtccttttacagggctcttattgctgagttcattgccactttgctcttcctctacattactgtgctcacagttatagggt

SEQ ID NO: 57027 - DNA, 242 bp, Glycine max
agacgtcagacaacgcgtcagaggggttcgacaaaactaccgttcgtattctggtgaggatgcgccctctgactggaacaaagcggcacataatggtgtatgcaacaatactaatggatctcaagcttggatgcattatacagatgacaaagataggcaaatctagagtcacggaactacacatatcgaacatcctagctggaaccatcgatcgtcgaacacatcagagctggagttcagca

SEQ ID NO: 57028 - DNA, 291 bp, Glycine max
agaaggggcacaagtgagtttgttgatcgagataactagaaacagtgtgatgaaaatgaaggtccttgttttcttcgttgctacaattttggtagcatggcaatgccatgcgtacgatatgttccctctccgaatgaacactggctatggtgcccgtactccggaggtgaaatgcgcaagttggaggcttgctgtggaagcacacaacatctttggctttgagaacattcctgaagagtgcgttgaatcaacataggaatacatccatggcgaagcatatagatcagactc

SEQ ID NO: 57029 - DNA, 56 bp, Glycine max
tcatcgtgctgcgaaggagacaacaggggtgcatttagtttgttgatgatggtatt

SEQ ID NO: 57030 - DNA, 318 bp, Glycine max
gaaggtgcaagagtttgttgtgagctataagctagtttatcgtgaggagaatatgaagttgtttgttttctttgttgctgcagtagttttggtagcatggccatgccatggcgcatgctaccaaaggttccctctccgaatgaaaactggctatggtgagcgttcttcggaggtaaaatgcgcaagttttaggcttgctgtggaagcacacaacatccgaacctttaaaaccattcctgaagagtgcgttgaaccaacaaaggactacattaatggcgaacaatttagatcagctctaaagaagttaaccaacaagct

SEQ ID NO: 57031 - DNA, 305 bp, Glycine max
  unsure (1)..(305): unsure at all n locations
ggcacaagtgagtttgttgatcgagataactagaaacagtgtgatgaaaatgaaggtccttgttttcttcgttgctacaattttggtagcatggcaatgccatgcgtacgatatgttccctctccgaatgaacactggctatggtgcccgtactccggaggtgaaatgcgcaagttggaggcttgctgtggaagcacacaacatctttggctttgagaccattcctgaagagtgcgttgaagcaacanaggaatacatccatggcgaacaatatagattagactccaaaacagttaaccaacaag

SEQ ID NO: 57032 - DNA, 417 bp, Glycine max
ggcacaagtgagtttgttgatcgagataactagaaacagtgtgatgaaaatgaaggtccttgttttcttcgttgctacaattttggtagcatggcaatgccatgcgtacgatatgttccctctccgaatgaacactggctatggtgcccgtactccggaggtgaaatgcgcaagttggaggcttgctgtggaagcacacaacatctttggctttgagaccattcctgaagagtgcgttgaagcaacaaaggaatacatccatggcgaacaatatagatcagactccaaaacagttaaccaacaagcttacttttatgccagagacctcgaagtccatcccaaggacacatttgtgttcagtacagatggcaccgtactctctaatattccatactacaaaaaacatggatatggggt

SEQ ID NO: 57033 - DNA, 373 bp, Glycine max
gcacaagtttgttgagatagctagaagcaatatgatgaaaatgaaagtgcttgttttgtttgttgctacagttttggtagcatatgaatgccatggctcagactaccagaagttccctctccaaatgaaaactgggtttggtgggcaatacagcaatgacgtggcatgtgccagttggaggcttggcgtggaagcaaacaacgtagtcaagtggcaaactgttcctgcagcttgcggagagtacatagctgactacgttctaggagaccaatatagatcagattccaaaacagttaaccatcaagcttatttctatgctaaatccctcaaactcaccaacaaagatgtctttgtcttggacgttgacgacact

SEQ ID NO: 57034 - DNA, 426 bp, Glycine max
ggaacgaagaagccggtgtttctgccgtgggaattgatcatgatgttgccgctgaagtctcttatccgtttcaagactgtattcgtaggttcctgtaaggattttttacttttggactacaatcgaagctctttcatcttcaatccatctacaggacttcataaatttgtagattggtcacctatttccaataatatgggtggatatggttttggatatgacccatcaaccgatgactactcgctggttcaagcatctacaaataaaaatcctacaacttcaacctaaatgaacgcgtgtaatctgtttggagtaattctcactcagagctaatgcttggaaagaaattgagcctatccatttgtcttaccagggctgctctgatcgtgtagttttggactttgagttggtcttcaacggtgtcct

SEQ ID NO: 57035 - DNA, 60 bp, Glycine max
cccacgcgtccgcccacgcgtccgcccacgcgtccgcccacgcgtccgcccacgcgtccg

SEQ ID NO: 57036 - DNA, 361 bp, Glycine max
gaaggtgcaagagtttgttgtgagctataagctagtttatcgtgaggagaatatgaagttgtttgttttctttgttgctgcagtagttttggtagcatggccatgccatggcgcatgctaccaaaggttccctctccgaatgaaaactggctatggtgagcgttcttcggaggtaaaatgcgcaagttttaggcttgctgtggaagcacacaacatccgagcctttaaaaccattcctgaagagtgcgttgaaccaacaaaggactacattaatggcgaacaatttagattagactctaaaacagttaaccaacaagctttcttttatgctagtgaacgcgaagtccatcacaacgacata

SEQ ID NO: 57037 - DNA, 363 bp, Glycine max
ggcacaagtgagtttgttgatcgagataactagaaacagtgtgatgaaaatgaaggtccttgttttcttcgttgctacaattttggtagcatggcaatgccatgcgtacgatatgttccctctccgaatgaacactggctatggtgcccgtactccggaggtgaaatgcgcaagttggaggcttgctgtggaagcacacaacatctttggctttgagaccattcctgaagagtgcgttgaagcaacaaaggaatacatccatggcgaacaatatagattagactccaaatcagttaaccaacaagcttacttttatgccagagacctcgaagtccatcccaaggacacatttgtgttcagtat

SEQ ID NO: 57038 - DNA, 444 bp, Glycine max
ggcacaagtgagtttgttgatcgagataactagaaacagtgtgatgaaaatgaaggtccttgttttcttcgttgctacaattttggtagcatggcaatgccatgcgtgcgatatgttccctctccgaatgaacactggctatggtgcccgtactccggaggtgaaatgcgcaagttggaggcttgctgtggaagcacacaacatctttggctttgagaccattcctgaagagtgcgttgaagcaacaaaggaatacatccatggcgaacaatatagattagactccaaaacagttaaccaacaagcttacttttatgccagagacctcgaagtccatcccaaggacacatttgtgttcagtatagatggcaccgtactctctaatattccatactacaaaaaacatggatatgggggtgagaaatttaacttcgacttgtatga

SEQ ID NO: 57039 - DNA, 411 bp, Glycine max
  unsure (1)..(411): unsure at all n locations
ggcacaagtgagtttgttgatcgagataactagaaacagtgtgatgaaaatgaacgtccttgttttcttcgttgctacaattttggtagcatggcaatgccatgcgtacgatatgttccctctccgaatgaacactggctatggtgcccgtactccggaggtgaaatgcgcaagtcgaaggcttgctgtggaagcacacaacatctttggctttgagaccattcctgaatagtgcgttgaagcaacagaggaatacatccatggcgaacaatatagattagactccacaacagttaaccaacaagcttacttttatgccagagacctcgaagtcatcncaaggacacatttgtgttcagtatagatggcaccgtactctctaatattccatactacananaacatggatat

SEQ ID NO: 57040 - DNA, 409 bp, Glycine max
  unsure (1)..(409): unsure at all n locations
ggcacaagtgagtttgttgatcgagataactagaaacagtgtgatgaaaatgaaggtccttgttttcttcgttgctacaattttggtagcatggcaatgccatgcgtacgatatgttccctctccgaatgaacactggctatggtgcccgtactccggaggtgaaatgcgcaagttggaggcttgctgtggaagcacacaacatctttggctttgagaccattcctgaagagtgcgttgaagcaacaaaggaatacatccatggcgaacaatatagattagactccaaaacagttaaccaacaagcttacttttatgccagagacctcgaagtccatcccaaggacacatttgtgttcagtatagatggcaccgtactctctaatattccatactacaanaaacatgga

SEQ ID NO: 57041 - DNA, 399 bp, Glycine max
ggtgcacaagtgagtttgttgatcgagataaccagaaacagtgtgatgaaaatgaaggtccttgttttcttcgttgctacaattttggtagcatggcaatgccatgcgtacgatatgttccctctccgaatgaacactggctatggtgcccgtactccggaggtgaaatgcgcaagttggaagcttgctgtggaagcacacaacatctttggctttgagaccattcctgaagagtgcgttgaagcaacaaaggaatacatccatggcgaacaatatagatcagactccaaaacagttaaccaacaagcttacttttatgccagagacctcgaagtccatcccaaggacacatttgtgttcagtatagatggcaccgtactctctaatattccatactac

SEQ ID NO: 57042 - DNA, 406 bp, Glycine max
gaaggtgcatgagtttgttgtgagctataagctagtttatcgtgaggagaatatgaagttgtttgttctctttgttgctgcagtagttttggtagcatggccatgccatggcgcaggctaccaaaggttccctctccgaatgaaaactggctatggtgagcgttcttcggacgtaaaatgcgcaagttttaggcttgctgtggaagcacacaacatccgagcctttaaaaccattcctgaagagtgcgttgaaccaacacaggactacattaatggcgaacaatttagattagactctaaaacagttaaccaacaagctttcttttatgctagtgaacgcgaagtccatcacaacgacatatttatattcggcatagataacaccgtactctctaatatcccatac

SEQ ID NO: 57043 - DNA, 435 bp, Glycine max
gatgttgatgaggttgaggaactaagggataatgctgcagaggctcttgtcaattattatgtcgatccattgtatcatgatagcgtgtctgatgcgattaatgttccttcgttcagaaatatgcagaatagattaactcatattcgtgcatcgaatgagcacatggctagatccttgagaagaatgagtgttgagcagctcacttggaacccagatcttgcataatcatttgaagggtatgttttgatctcaaagcctttggaaagttgttttcagtctcttaacttttatcagttttacaccctagcatagatatatgttgtgatgagaattggtagaaggagatatatgttgatctttgctgtatatttgtagaagttacaaacacaaataaaaatgagtgagtagatagccttgtaattgtgggaaaatact

SEQ ID NO: 57044 - DNA, 402 bp, Glycine max
ggcacaagtgagtttgttgatcgagataactagaaacagtgtgatgaaaatgaaggtccttgttttcttcgttgctacaattttggtagcatggcaatgccatgcgtacgatatgttccctctccgaatgaacactggctatggtgcccgtactccggaggtgaaatgcgcaagttggaggcttgctgtggaagcacacaacatctttggctttgagaccattcctgaagagtgcgttgaagcaacaaaggaatacatccatggcgaacaatatagatcagactccaaaacagttaaccaacaagcttacttttatgccagagacctcgaagtccatcccaaggacacatttgtgttcagtatagatggcaccgtactctctaataatccatactacaaaaa

SEQ ID NO: 57045 - DNA, 387 bp, Glycine max
ggatttggatttgggggaagaattagtagaagatgattttttgaggtgaatgggctggaggaatctcaacaaccttcatcctgtgaagcagcagcacatggagtagttgcatacagagacacataataatggagaagaaaccctcgtgacgtccaatccctatcccaatcttgacgattgcatctatgacatccaaaccagacgccgtaagaggctacgcaagggtcagctccagtacctaatcaaatgacgtcgatggtctgaaacggcgatgacatgggaacctcttgtaaatctacagtccgttcctgatctcgttgaatgcttttgaagacagcctcaaatctgggaagcatcacaggcgcaagcgcaagcatgtagatgtgc

SEQ ID NO: 57046 - DNA, 385 bp, Glycine max
atatttgagtgcagggattgtagcaactatgccatctatcacaagctatctgaggcgtggattggggtggcactttcccaaagtggtaggttttgagctcttcacatccctggtgatggcttttataagctggcaactgtttgctgcatgtcagagaccttcagtgtgagaaacctcattacataatgatcgaatcctgcttaactattttctggctagagttttgatccagggtcatctgtttctttttgctgctgcaatgctgtttctttaaatttcaagaatgttttcttgcggtagaatgttggctgcaattcattagaaatttttgtttattcagaaaattagagatatttaccccgaacatctgggattgataggttgc

SEQ ID NO: 57047 - DNA, 405 bp, Glycine max
  unsure (1)..(405): unsure at all n locations
ggcacaagtgagtttgttgatcgagataactagaaacagtgtgatgaaaatgaaggtccttgttttcttcgttgctacaattttggtagcatggcaatgccatgcgtacgatatgttccctctccgaatgaacactggctatggtgcccgtactccggaagtgaaatgcgcaagttggaggcttgctgtggaagcacacaacatctttggctttgagaccattcctgaagagtgcgttgaagcancaaaggaatacatccatggcgaacaatatagattagactccaaaacagttaaccaacaagcttacttttatgccagagacctcgaagtcaatcccaaggacacatttgtgttcagtatagatggcaccgtactctctaatattcatactacanaaaacat

SEQ ID NO: 57048 - DNA, 433 bp, Glycine max
ggcacaagtgagtttgttgatcgagataactagaaacagtgtgatgaaaatgaaggtccttgttttcttcgttgctacaattttggtagcatggcaatgccatgcgtacgatatgttccctctccgaatgaacactggctatggtgcccgtactccggaggtgaaatgcgcaagttggaggcttgctgtggaagcacacaacatctttggctttgagaccattcctgaagagtgcgttgaagcaacaaaggaatacatccatggcgaacaatatagattagactccaaaacagttaaccaacaagcttacttttatgccagagacctcgaagtccatcccaaggacacatttgtgttcagtatagatggcaccgtactctctaatattccatactacaaaaaacatggatatggggtggagaaattaactcga

SEQ ID NO: 57049 - DNA, 422 bp, Glycine max
  unsure (1)..(422): unsure at all n locations
gaaggtgcaagagtttgttgtgagctataagctagtttatcgtgaggagaatatgaagttgtttgttttctttgttgctgcagtagttttggtagcatggccatgccatggcgcaggctaccaaaggttccctctccgaatgaaaactggctatggtgagcgttcttcggaggtaaaatgcgcaagttttaggcttgctgtggaagcacacaacatccgagcctttaaaaccattcctgaagagtgcgttgaaccaacaaaggactacattaatggcgaacaatttagatcagactctaaaacagttaaccaacaagctttcttttatgctagtgaacgcgaagtccatcacaacgacatatttatattcggcatagataacaccgtactctctaatatcncatactatganaaacatggat

SEQ ID NO: 57050 - DNA, 207 bp, Glycine max
ggcagccaaaagaaaacacaagggggtacacctccggctgctacaattcaaatctaccagtacgcatagctcaactgtcaagacatctcactccagcctcagttcatcgactagcgcgattacctttcaccaagcccgatgaatcagcctgttacaatcagaggaagacaaagtgaacctgcggaaaatgcaagtagaaggtcaact

SEQ ID NO: 57051 - DNA, 361 bp, Glycine max
  unsure (1)..(361): unsure at all n locations
gaaggtgcaagagtttgttgtgagctataagctagtttatcgtgaggagaatatgaagttgtttgttttctttgttgctgcagtagttttggtagcatggccatgccatggcgcaggctaccaaaggttccctctccgaatgaaaactggctatggtgagcgttcttcggaggtaaaatgcgcaagttttaggcttgctgtggaagcacacaacatccgagcctttaaaaccattcctgaagagtgcgttgaaccaacanaggactacattaatggcgaacaatttagatcagactctanaacagtttaacaacaggctttcttttatgctagtgaacgcgaagtccatcacaacgacata

SEQ ID NO: 57052 - DNA, 323 bp, Glycine max
gacacttcaaaatcctctggtaacccttattttagctattctctctcattcatttgtgtactaagcagctagaatcattggcaaggaaaagaagccatgcctctttcatcatgtttgcaatgcttgatggcgtgatcactcatagccttgacaatcctgtaatatccaccactgttgaagatcagattaactatctagactccagatccatatgctggaaatcccccctcatgctcatacagtactactcctcgatctcatggccatggaaactctccaccctcacatcatcacagtagtctaagtactccatcaacatcctc

SEQ ID NO: 57053 - DNA, 211 bp, Glycine max
ggcacaagtgagtttgttgatcgagataactagaaacagtgtgatgaaaatgaaggtccttgttttcttcgttgctacaattttggtagcatggcaatgccatgcgtacgatatgttccctctccgaatgaacactggctatggtgcccgtactccggaggtgaaatgcgcaagttggaggcttgctgtggaagcacacaacatctttggc

SEQ ID NO: 57054 - DNA, 402 bp, Glycine max
  unsure (1)..(402): unsure at all n locations
ggcacaagtgagtttgttgatcgagataactaaaaacaatgtgatgaaaattaaaggtccttgttttcctccgttgccaaaattttggtaacaatgcaatgccatgcgtacgatatgtccctctccgaatgaacactggctaatggtgccgtactccggaagtgaaatgcgcaagttggaggcttgctgtggaagcacacaacatctttggctttgagaccattcctgaagagtgcgttgaagcaacanaggaatacatccatggcgaacaatatagattagactccaaaacagttaaccaacaagcttacttttatgccagagacctcgaagtccatcccaaggacacatttgtgttcagtatagatggcaccgtactctctaatattccatactacaaaa

SEQ ID NO: 57055 - DNA, 356 bp, Glycine max
  unsure (1)..(356): unsure at all n locations
ggcacaagtgagtttgttgatcgagataacaaganacagtgtgatgaaaatgaaggtccttgttttcttcgttgctacaattttggtagcatggcaatgccatgcgtacgatatgttccctctccgaatgaacactggctatggtgcccgtactccggaggtgaaatgcgcaagttggaggcttgctgtggaagcacacaacatctttggctttgagaccattcctgaagagtgcgttgaagcaacaaaggaatacatccatggcgaacaatatagattagactccaaaacagttaaccaacaagcttacttttatgccagagacctcgaagtccatcccaaggacacatttgtgt

SEQ ID NO: 57056 - DNA, 242 bp, Glycine max
gaaccaatcaacattctactacagcctctctcaaactcagtctctgaaccgtgagaccttgattacgttcttccctccattttggaaccacagctctgccacagttccaatccattaccactcccaaggctgccctagctctagcacctcatcctccggccttcaacggcacttctagtgctacatggtgcgtttgccaagatcgaagccaatcgattcagtccaagacgttagactaagcc

SEQ ID NO: 57057 - DNA, 355 bp, Glycine max
  unsure (1)..(355): unsure at all n locations
ggcacaagtgagtttgttgatcgagataacaagaaacagtgtgatgaaaatgaaggtccttgttttcttcgttgctacaattttggtagcatggcaatgccatgcgtacgatatgttccctctccgaatgaacactggctatggtgcccgtactccggaagtgaaatgcgcaagttggangcttgctgtggaagcacacaacatctttggctttgagaacattcctgaagagtgcgttgaagcancanaggaatacatccatggcgaacaatatagattagactccanaacagttaaccaacaagcttacttttaatgcagagaactcgaagttcatccaangacacatttgtgt

SEQ ID NO: 57058 - DNA, 304 bp, Glycine max
  unsure (1)..(304): unsure at all n locations
ggagggcaaaggaaatggttcaccgtgccccatatccttcaaccctttggctattcttatccattaagtacatcttcacatattatcatgatacaccatcttctgctgcatcataagagttggatgttaagagcatggctgcacaagctcntgtctcatcatcatctcgtatcttcacagcggacgctgcacgagatagtcttggtgcaagatcactcgactctccatgttgattcaccacataagcgtccgtacatgttaaagcacctgctaacctgcctgtcaagcatcgatcagacaaacc

SEQ ID NO: 57059 - DNA, 316 bp, Glycine max
ggatccatcagtcgtgctacgactgcaagacaacgagaggttgggatttgctgagcacttagcgtccatggttaacaaatctgcaattgtacttaatccctcttagtctcaaaaaatcctaagctctcgtcatctcgtaaactgcagtgttcgctcagtaaaagaaagacgtagcgaacgcttttgccaattccagcagcatcagtttcgcttcagacaattcgcgcgtcaatggcttcatctgccatcacatacgccgagacttaccattttctgttcactacgtgtggttccgtaagatctatagaacacccgt

SEQ ID NO: 57060 - DNA, 357 bp, Glycine max
  unsure (1)..(357): unsure at all n locations
ggcacaagtttgttgagatagctagaagcaataagatgaaaatgaaagtgcttgttttgtttgttgctacagttttggtagcatatgaatgccatggctcagactaccagaagttccctctccaaatgaaaactgggtttggtgggcaatacagcaatgaggtggcatgtgccagttggaggcttggcgtggaagcaaacaacgtagtcaagtggcaaactgttcctgcagcttgcggagagtacatagctgactacgttctaggagaccaatatagatcagattccaaaacagttaaccaacaagcttatttctatgctaaatccctcaaactcaccancaaagatgtctttgtct

SEQ ID NO: 57061 - DNA, 361 bp, Glycine max
  unsure (1)..(361): unsure at all n locations
ggtgcacaagtgagtttgttgatcgagataactaaaaacagtgttgatgaaaatgaaggtccttgttttcttcgttgcaacaattttggtagcatggaaatgccatgcgtacaatatgttccctctccgaatgaaaactggctatggtgcccgtactccggaggtgaaatgcgcaatttggaggcttgctgtggaagcacacaacatctttggctttgaaaccattcctgaagagtgcgttgaagcaacanaggaatacatccatggcgaacaatatagattagactccaaaacagttaaccaacaagcttacttttatgccagagacctcgaagtccatcccaaggacacatttgtgttc

SEQ ID NO: 57062 - DNA, 357 bp, Glycine max
  unsure (1)..(357): unsure at all n locations
ggttctagtgtgtgattgtttgttgttgtaactcgttcttcttcttttgttgttctgtgtttgtgtttgttttttctctcacctgaaaatgtcttgctgcggtggtaactgtggttgcggaagctcctgcaagtgcggcaacggctgcggatgctgcaagatgtacccagacttgagctacactgagtcaaccaccaccgagaccttggtcatgggagtggcacctgttaaggctcaatttgagggtgctgaaatgggtgtgcccgctgagaacgatggctgcaaatgtggaccaaactgctcctgcaacccctgcacttgcaagtgangtgttgggagagcaagcttcaagcagag

SEQ ID NO: 57063 - DNA, 386 bp, Glycine max
gaaggtgcaagagtttgttgtgagctataagctagtttaacgtgaggagaatatgaagttgtttggtttccttggtgctgcagtagttttggtagcatgggcatgccatggcgcaggctacaaaaggttccctctccgaatgaaaactggctatggtgagcgttcttcggaggtaaaatgcgcaattttaaggcttgctgtggaagcacacaacatccgagcctttaaaacaattcctgaagattgcgttgaaccaacaaaggactacattaatggcgaacaatttagattagactctaaaacagttaaccaacaagctttcttttatgctagtgaacgcgaagtccatcacaacgacatatttatattcggcatagataacaccg

SEQ ID NO: 57064 - DNA, 312 bp, Glycine max
gattgagtacaacttcacattttagaagaataccccctcttttgctgcatcagaggagttgtaaattaagagcatggctgcacaagctcttgtatcatcatcttctcttaccttctcagcggaggctgcaagacaaagtcttggaccaagatcactccaatctccatttggcttctccagaaaagcctcctttcttgttaaggcagctgctaccccccctgtcaagcaaggattagacagacctttgtggtttgcatcaaagcaaagtctttcttacttggatggaagccttccgggtgactatggatttga

SEQ ID NO: 57065 - DNA, 158 bp, Glycine max
  unsure (1)..(158): unsure at all n locations
gaaggtgcaagagtttgttgtgagctataagctagtttatcgtgaggagaatatgaagttgtttgttttctttgttgctgcagtagttttggtagcatggccatgccatggcgcaggctaccaaaggttcnctctccgaatganaactggctatggtg

SEQ ID NO: 57066 - DNA, 387 bp, Glycine max
caggcatcaggcaacttagtggagaaagcttgtatgagtattgggaaagattcaagaaattatgtgcaagctgccctcaccaccagatttcagagcaacttcttcttcaatatttctatgaggggcttagtaacatggagaggaaaacttgatgccttggtcaacctagtaactcagcttgccatgaatcagaaatctacacctgttgcaagagtatgtggtctatgttcttctgcagatcaccatttagatctttgtccttctttgtagtaatctggagtcaatgagcaacctgaagcttatgctgtaaacatttataatagacctccacaacagcaaaaccaacaatagcaaaatacttatgacctttcaagcaacagatacaat

SEQ ID NO: 57067 - DNA, 395 bp, Glycine max
acttcgaatcagttcacgctgtcaaactctacaacaacatcaaggagcgctcgagtgcccaggggaattcacctttgccgatttcgtcacgccggatcctcatcgaaccaacgctcttctcaattttggtgcctatagggacgccaggttgaactgtcttggaaattgaggacgaagtgaatgcgatagaggcgcaacgaacagagttggaggagaataggatgttgcagaacattaggtagagcactgagttacattaacaataactgagacgacaaattaatcaagaccagcttggtgacaaaccaactcttgatatcattgaagaattaaaagcacttggtggagatattgttgtaccagaaagttatacaaaaacctggtactttaatttt

SEQ ID NO: 57068 - DNA, 361 bp, Glycine max
ggcacaagtgagtttgttgatcgagataactagaaacagtgtgatgaaaatgaaagtccttgttttcttcgttgctacaattttggtaacaatggaatgccatgcgttacgatatgttctcctcccccaaatgaacactggctatggtgcccgtactccggaggtgaaatgcgcaagttggaggcttgctgtggaagcacacaacatctttggctttgagaccattcctgaagagtgcgttgaagcaacaaaggaatacatccatggcgaacaatatagattagactccaaaacagttaaccaacaagcttacttttatgccagagacctcgaagtccatcccaaggacacatttgtgttc

SEQ ID NO: 57069 - DNA, 386 bp, Glycine max
gaaggtgcaagagtttgttgtgagctataagctagtttatcgtgaggagaatatgaagttgtttgttttctttgttgctgcagtagttttggtagcatggccatgccatggcgcaggctaccaaaggttccctctccgaatgaaaactggctatggtgagcgttcttcggaggtaaaatgcgcaagttttaggcttgctgtggaagcacacaacatccgagcctttaaaaccattcctgaagagtgcgttgaaccaacaaaggactacattaatggcgaacaatttagattagactctaaaacagttaaccaacaagctttcttttatgctagtgaacgcgaagtccatcacaacgacatatttatattcggcatagattacaccg

SEQ ID NO: 57070 - DNA, 408 bp, Glycine max
  unsure (1)..(408): unsure at all n locations
gcacaagtgagtttgttgatcgagataactagaaacagtgtgatgaaaatgaaggtccttgttttcttcgttgctacaattttggtagcatggcaatgccatgcgtacgatatgttccctctccgaatgaacactggctatggtgcccgtactccggaggtgaaatgcgcaagttggaggcttgctgtggaagcacacaacatctttggctttgagaccattcctgaagagtgcgttgaagcaacanaggaatacatccatggcgaacaatatagatcagactccaaaacagttaaccaacaagcttacttttatgccagagacctcgaagtccatcccaaggacacatttgtgttcagtatagatggcaccgtactctctaatattccatactacaaaanacatgga

SEQ ID NO: 57071 - DNA, 157 bp, Glycine max
tacatccatggcgaacaatatagatagactcaaaacagttaaccaacaagcttacttttatgccagagacctcgaagtccatcccaaggacacatttgtgttcagtatagatggcaccgtactctctaatatttcatactacaaaaaacatggatat

SEQ ID NO: 57072 - DNA, 306 bp, Glycine max
gaaggtgcaagagtttgttgtgagctataagctagtttatcgtgaggagaatatgaagttgtttgttttctttgttgctgcagtagttttggtagcatggccatgccatggcgcacgctaccaaaggttccctctccgaatgaaaactggctatggtgagcgttcttcggaggtaaaatgcgcaagttttaggcttgctgtggaagcacacaacatccgagcctttaaaaccattcctgaagagtgcgttgaaccaacaaaggactacattaatggcgaacaatttagatcagactctaaaacagt

SEQ ID NO: 57073 - DNA, 360 bp, Glycine max
ggtgcacaagtgagtttgttgatcgagataactagaaacagtgtgatgaaaatgaaggtccttgtgttcttcgttgctacaattttggtagcatggcaatgccatgcgtacgatatgttccctctccgaatgaacactggctatggtgcccgtactccggacgtgaaatgcgcaagttggacgcttgctgtgggagcacacaacatctttggctttgagaccattcctgaagagtgcgttgaagcaacataggaatacatccatggcgaacaatatagattagactccaatacagttaaccaacaagcttacttttatgccagagacctcgaagtccatcccaaggacacatttgtgttc

SEQ ID NO: 57074 - DNA, 327 bp, Glycine max
ccactcacgcgtccgacagctgccaaaagaagggggcacaagtgagtttgttgatcgagatagctacaaacagtgtgatgaaaatgaaagtccttgttttcttcgttgctacaattttggtagcatggcaatgccatgcgtacgatatgttccctctccgaatgaacactggctatggtgcccgtactccggaggtgaaatgcgcaagttggaagcttgctgtggaagcacacaacatcattggctttgacaccattcgtgaagagtgcgttgaatcaacaaaggaatacatccattgggaacaatacagattaaactccaaaacag

SEQ ID NO: 57075 - DNA, 403 bp, Glycine max
gaaggtgcaagagtttgttgtgagctataagctagtttatcgtgaggagaatatgaacttgtttgttttctttgttgctgcagtagttttggtaacatggccatgccatggcgcatgctaccaaaggttccctctccgaatgaaaactggctatggtgagcgttcttcggaggtaaaatgcgcaagttttaggcttgctgtggaatcacacatcatccgagcctttaaaaccattcctgaagagtgcgttgaaccaacacaggactacattaatggcgaacactttagatcagactctaaaacagttaaccaacaagctttcttttatgctagtgaacgcgaggtccatcacaacgacatatttatattcggcatactatacaccgtactctctaatatccca

SEQ ID NO: 57076 - DNA, 322 bp, Glycine max
gcacaagtgagtttgttgatcgacataactagaaacagtgtgatgaaaatgaacgtccttgttttcttcgttgctacaattttggtagcatggcaatgccatgcgtacgatatgttccctctccgaatgaacactggctatggtgcccgtactccggaggtgaaatgcgcaagttggaggcttgctgtggaagcacacaacatctttggctttgagaccattcctgaagagtgcgttgaagcaacaaatgaatacatccatggcgaacaatatagatcagactccagagcagttaaccaacaagcttacttttatgccagag

SEQ ID NO: 57077 - DNA, 390 bp, Glycine max
ggggcacaagtgagtttgttgatcgagataactagaaacagtgtgatgaaaatgaacgtccttgttttcttcgttgctacaattttggtagcatggcaatgccatgcgtacgatatgttccctctccgaatgaacactggctatggtgcccgtactccggaggtgaaatgcgcaagttggaggcttgctgtggaagcacacaacatcgttggctttgagaccattcctgaatagtgcgttgaagcaacagaggaatacatccatggcgaacaatttttgataagactccagaacagttaaccaacatgcttacttttatgccagagacctcgaagtccatcccaaggacacatttgtgttcagtatagatggcaccgtactctctaatat

SEQ ID NO: 57078 - DNA, 377 bp, Glycine max
  unsure (1)..(377): unsure at all n locations
cggggcacaagtttgttgagatagctagaagcaataagatgaaaatgacagtgcttgttttgtttgttgctacagttttggtagcatatgaatgccatggctcagactaccagaagttccctctccaaatgaaaactgggtttggtgggcaatacagcaatgaggtggcatgtgccagttggaggcttggcgtggaagcaaacaacgtagtcaagtggcaaactgttcctgcagcttgcggagagtacatagctgactacgttctacgagaccaatatagatcagattccaaaacagttaaccaacaagcttatttctatgctaaatcgctcaaactcaccaacanagatgtctttgtcttggacgttgacgacact

SEQ ID NO: 57079 - DNA, 286 bp, Glycine max
gcacaagtgagtttgttgatccagataactagaaacagtgtgatgaaaatgaaggtccttgttttcttcgttgctacaattttggtagcatggcacatgccatgcgtacgatatgttccctctccgaatgaacactggatatggtgcacgtactccggaggtgaaatgcgcaagttggaggcttgctgtggaagcagacaacatctttggctttgagaccattcctgaagagtgccttcgaccaacacatgaatacatccatgcgcatcaagatagatcacactcc

SEQ ID NO: 57080 - DNA, 227 bp, Glycine max
ggcacaagtgagtttgttgatcgagataactagaaacagtgtgatgaaaatgaaggtccttgttttcttcgttgctacaattttggtagcatggcaatgccatgcgtacgatatgttccctctccgaatgaacactggctatggtgcccgtactccggaggtgaaatgcgcaagttggaggcttgctgtggaagcacacaacatctttggctttgagaccattcctg

SEQ ID NO: 57081 - DNA, 372 bp, Glycine max
tcaaagtagatcatcggggataacaaaggacatgtggcacacactcattgtctcgccgtgctgtgttcacacgtctcgtaatccctagcgttcttcgcgcttccgccgagtcgcgacatgctcatcgactggtccgacgctcaaaccgttagatagaggttgaagacggatgggtgctggtgctgggaggaagcaatcgacgaaacctgctgaaggattggaacaagctctacaataggtcgaaacgctttcttcggatttaagtttgacgatatcagaccagttcaagaacgaacattctaagaatagatctctccatgttgtcagttgagctggtggtgactcctggcactcgcgagctgatgcttaaaa

SEQ ID NO: 57082 - DNA, 367 bp, Glycine max
ggcacaagtgagtttgttgatcgagataactagaaacagtgtgatgaaaatgaaggtccttgttttcttcgttgctacaattttggtagcatggcaatgccatgcgtacgatatgttccctctccgaatgaacactggctatggtgcccgtactccggaggtgaaatgcgcaagttggaggcttgctgtggaagcacacaacatctttggctttgagaccattcctgaagagtgcgttgaagcaacaaaggaatacatccatggcgaacaatatagattagactccaaaacagttaaccaacaagcttacttttatgccagagacctcgaagtccatcccaaggacacatttgtgttcagtatagat

SEQ ID NO: 57083 - DNA, 378 bp, Glycine max
gcgaaaagacgacagaagggggcacaagtgagtttgttgatcgagataactagaaacagtgtgatgaaaatgaaggtccttgttttcttcgttgctacaattttggtagcatggcaatgccatgcgtacgatatgttccctctccgaatgaacactggctatggtgcccgtactccggaggtgaaatgcgcaagttggaggcttgctgtggaagcacacaacatctttggctttgagaccattcctgaagagtgcgttgaagcaacaaaggaatacatccatggcgaacaatatagatcagactccaaaacagttaaccaacaagcttacttttatgccagagacctcgaagtccatcccaaggacacatttgtgttc

SEQ ID NO: 57084 - DNA, 291 bp, Glycine max
gacattcacgttctctttaatgcatcatctcagcgcttcaaacgccaaccattcctcaaactcaaagtcttcacagagccatggggttgttgtgcataccaatatcatctagtgttcttcaaacattgttcctcttttgctctgcattctttgtttctcaagctcttggggccagaatcccacaaccacataagcctcttccgttcatttggcctctgtctgaaaattaatttgctttgctatgctttattattcgttgaacagatggcctgttctctaaaaaaaaaataa

SEQ ID NO: 57085 - DNA, 386 bp, Glycine max
ggcacaagtttgttgagatagctagaagcaataagatgaaaatgaaagtgcttgttttgtttgttgctacagttttggtagcatatgaatgccatggctcagactaccagaagttccctctccaaatgaaaactgggtttggtgggcaatacagcaatgaggtggcatgtgccagttggaggcttggcgtggaagcaaacaacgtagtcaagtggcaaactgttcctgcagcttgcggagagtacatagctgactacgttctaggagaccaatatacatcagattccaaaacagttaaccaacaagcttatttctatgctaaatccctcaaactcaccaacaaagatgtctttgtcttggacgttgacgacactactccctccaat

SEQ ID NO: 57086 - DNA, 407 bp, Glycine max
gggcacaagtgagtttgttgatcgagataactagaaacagtgtgatgaaaatgaaggtccttgttttcttcgttgctacaattttggtagcatggcaatgccatgcgtacgatatgttccctctccgaatgaacactggctatggtgcccgtactccggaggtgaaatgcgcaagttggaggcttgctgtggaagcacacaacatctttggctttgagaccattcctgaagagtgcgttgaagcaacaaaggaatacatccatggcgaacaatatagattagactccaaaacagttaaccaacaagcttacttttatgccagagacctcgaagtccatcccaaggacacatttgtgttcagtatagatggcaccgtactctctaatattccatactacaaaaaacat

SEQ ID NO: 57087 - DNA, 356 bp, Glycine max
ggcacaagtgagtttgttgatcgagataactagaaacagtgtgatgaaaatgaaggtccttgttttcttcgttgctacaattttggtagcatggcaatgccatgcgtacgatatgttccctctccgaatgaacactggctatggtgcccgtactccggaggtgaaatgcgcaagttggaggcttgctgtggaagcacacaacatctttggctttgagaccattcctgaagagtgcgttgaagcaacaaaggaatacatccatggcgaacaatatagattagactccaaaacagttaaccaacaagcttacttttatgccagagacctcgaagttcatcccaaggacacatttgtgt

SEQ ID NO: 57088 - DNA, 321 bp, Glycine max
gattttattattgcttatatatacaacacaatattgtaaaaaaatacacatcataatattgtaagcaaactactccattttcattacattattatatttaagtttcgcataaaaaaaataaaccaagccattttaattggtttattcttttttttaaatcaacttcataccaactaatttgattaggttacaaagttttttttcttcttcacaaagtcaaacgtcaagacaagaagtaggtttgctatcaccatcagcctcgggtttacctcgtgaaatggaagaatcgagcacaaaaaagtccaaaacagtaccttgaag

SEQ ID NO: 57089 - DNA, 385 bp, Glycine max
  unsure (1)..(385): unsure at all n locations
ggcacaagtgagtttgttgatcgagataactagaaacagtgtgatgaaaatgaaggtccttgttttcttcgttgctacaattttggtagcatggcaatgccatgcgtacgatatgttccctctccgaatgaacactggctatggtgcccgtactccggaggtgaaatgcgcaagttggaggcttgctgtggaagcacacaacatctttggctttgagaccattcctgaagagtgcgttgaagcaacaaaggaatacatccatggcgaacaatatagatcagactccanaacagttaaccaacaagcttacttttatgccagagacctcgaagtccatcccaaggacacatttgtgttcagtatagatggcaccgtactctctaat

SEQ ID NO: 57090 - DNA, 315 bp, Glycine max
ggcacaagtgagtttgttgatcgagataactagaaacagtgtgatgaaaatgaaggtccttgttttcttcgttgctacaattttggtagcatggcaatgccatgcgtacgatatgttccctctccgaatgaacactggctatggtgcccgtactccggaggtgaaatgcgcaagttggaggcttgctgtggaagcacacaacatctttggctttgagaccattcctgaagagtgcgttgaagcaacaaaggaatacatccatggcgaacaatatagatcagactccaaaacagttaaccaacaagcttactttta

SEQ ID NO: 57091 - DNA, 353 bp, Glycine max
gatgaaaatgaaagtgcttgttttgtttgtcgctacagttttggtaccatatgaatgccatggctcagactaccataagttccctctccaaatgaaaactgggtttggtgggcaatacagcaatgaggtggcatgtgccagttggaggcttggcgtggaagcaaacaacgtagtcaagtggcaaactgttcctgcagcttgcggaagattacatagctgactacgttctacgagaccaatatagatcagattccacaacagttaaccaacaagcttatttctatgctaaatccctcaaactcaccaacaaagatgtctttgtcttggacgttgacgacactactctctctaat

SEQ ID NO: 57092 - DNA, 323 bp, Glycine max
ggcacaagtgagtttgttgatcgagataactagaaacagtgtgatgaaaatgaaggtccttgttttcttcgttgctacaattttggtagcatggcaatgccatgcgtacgatatgttccctctccgaatgaacactggctatggtgcccgtactccggaggtgaaatgcgcaagttggaggcttgctgtggaagcacacaacatctttggctttgagaccattcctgaagagtgcgttgaagcaacaaaggaatacatccatggcgaacaatatagatcagactccaaaacagttaaccaacaagcttacttttatgccagag

SEQ ID NO: 57093 - DNA, 402 bp, Glycine max
gaaggtgcaagagtttgttgtgagctataagctagtttatcgtgaggagaatatgaagttgtttgttttctttgttgctgcagtagttttggtagcatggccatgccatggcgcaggctaccaaaggttccctctccgaatgaaaactggctatggtgagcgttcttcggaggtaaaatgcgcaagttttaggcttgctgtggaagcacacaacatccgagcctttaaaaccattcctgaagagtgcgttgaaccagcataggactacattaatggcgaacactttagatcagactctaaaacagttaaccaacaagctttcttttatgctagtgaacgcgaagtccatcacaacgacatatttatattcggcatagataccaccgtactctctaatatccc

SEQ ID NO: 57094 - DNA, 387 bp, Glycine max
gcagcagaagaacaagtagttgagaactaagaaggagaagcaaatggcttcctcaatgatctcttccccagctgttaccactgtcaaccgtgccggtgccggcatggttgctccattcactggcctcaagtccatggctggcttccccaccagaaagaccaacaatgacattacctccattgctagcaacggtggaagagtgcaatgcatgcaggtgtggccaccagttggcaagaagaagtttgagactctttcctacctgccagaccttgatgatgcacaattggcaaaggaagtagaataccttcttaggaagggatggattccttgcttggaattcgagttggagcacggtttcgtgtaccgtgagcacaacaagtcaacaag

SEQ ID NO: 57095 - DNA, 360 bp, Glycine max
ggcacaagtgagtctgttgatcgagataactagaaacagtgtgatgaaaatgaaggtccttgttttcttcgttgctacaattttggtagcatggcaatgccatgcgtacgatatgttccctctccgaatgaacactggctatggtgcctgtactccggaggtgaaatgcgcaagttggaggcttgctgtggaagcacacaacatctttggctttgagaccattcctgaagagtgcgttgaagcaacaaaggaatacatccatggcgaacaatatagatcagactccaaaacagttaaccaacaagcttacttttatgccagagacctcgaagtccatcccaaggacacatttgtgttcag

SEQ ID NO: 57096 - DNA, 403 bp, Glycine max
ggcaagagtttgttgtgagctataagctagcttatcgtgaggagaatatgaagttgtttgttttctttgttgctgcagtagttttggtagcatggccatgccatggcgcaggctaccaaaggttccctctccgaatgaaaactggctatggtgagcgttcttcggaggtaaaatgcgcaagttttaggcttgctgtggaagcacacaacatccgagcctttaaaaccattcctgaagagtgcgttgaaccaacaaaggactacattaatggcgaacaatttagatcagactctaaaacagttaaccaacaagctttcttttatgctagtgaacgcgaagtccatcacaacgacatatttatattcggcatagataacaccgtactctcctatatcccatacta

SEQ ID NO: 57097 - DNA, 396 bp, Glycine max
ggcacaagtgagtttgttgatcgagataactagaaacagtgtgatgaaaatgaaggtccttgttttcttcgttgctacaattttggtagcatggcaatgccatgcgtacgatatgttccctctccgaatgaacactggctatggtgcccgtactccggaggtgaaatgcgcaagttggaggcttgctgtggaagcacacaacatctttggctttgagaccattcctgaagagtgcgttgaagcaacaaaggaatacatccatggcgaacaatatagatcagactccaaaacagttaaccaacaagcttacttttatgccagagacctcgaagtccatcccaaggacacatttgtgttcagtatagatggcaccgtactctctaataatcaatacta

SEQ ID NO: 57098 - DNA, 360 bp, Glycine max
  unsure (1)..(360): unsure at all n locations
ggcacaagtgagtttgttgatcgagataactagaaacagtgtgatgaaaatgaaggtccttgttttcttcgttgctacaattttggtagcatggcaatgccatgcgtacgatatgttccctctccgaatgaacactggctatggtgcccgtactccggaggtgaaatgcgcaagttggaggcttgctgtggaagcacacaacatctttggctttgagaccattcctgaagagtgcgttgaagcaacaaaggaatacatccatggcgaacaatatagatcagactccaaaacagttaaccaacaagcttacttttatgccagagacctcgaagtccatcncaaggacacatttgtgttcag

SEQ ID NO: 57099 - DNA, 397 bp, Glycine max
  unsure (1)..(397): unsure at all n locations
ggcacaagtgagtttgttgatcgagataactagaaacagtgtgatgaaaatgaaggtccttgttttcttcgttgctacaattttggtagcatggcaatgccatgcgtacgatatgttccctctccgaatgaacactggctatggtgcccgtactccggaggtgaaatgcgcaagttggaggcttgctgtggaagcacacaacatctttggctttgagaccattcctgaagagtgcgttgaagcaacaaaggaatacatccatggcgaacaatatagatcagactccanaacagttaaccaacaagcttacttttatgccagagacctcgaagtccatcccaaggacacatttgtgttcagtatagatggcaccgtactctctaatattccatactac

SEQ ID NO: 57100 - DNA, 312 bp, Glycine max
  unsure (1)..(312): unsure at all n locations
ggcacaagtgagtttgttgatcgagataactagaaacagtgtgatgaaaatgaaggtccttgttttcttcgttgctacaattttggtagcatggcaatgccatgcgtacgatatgttccctctccgaatgaacactggctatggtgcccgtactccggaggtgaaatgcgcaagttggaggcttgctgtggaagcgcacaacatctttggctttgagaccattcctgaagagtgcgttgaagcaacaaaggaatacatccatggcgaacaatatagatcagactccanaacagttaaccaacaagcttactt

SEQ ID NO: 57101 - DNA, 361 bp, Glycine max
ggtgcacaagtgagtttgttgatcgagataactagaaacagtgtgatgaaaatgaaggtccttgttttcttcgttgctacaattttggtagcatggcaatgccatgcgtacgatatgttccctctccgaatgaacactggctatggtgcccgtactccggaggtgaaatgcgcaagttggaggcttgctgtggaagcacacaacatctttggctttgagaccattcctgaagagtgcgttgaagcaacaaaggaatacatccatggcgaacaatatagatcagactccaaaacagttaaccaacaagcttacttttatgccagagacctcgaagtccatcccaaggacacatttgtgttca

SEQ ID NO: 57102 - DNA, 400 bp, Glycine max
  unsure (1)..(400): unsure at all n locations
gaaggtgcaagagtttgttgtgagctataagctagtttatcgtgaggagaatatgaagttgtttgttttctttgttgctgcagtagttttggtagcatggccatgccatggcgcaggctaccaaaggttccctctccgaatgaaaactggctatggtgagcgttcttcggaggtaaaatgcgcaagttttaggcttgctgtggaagcacacaacatccgagcctttaaaaccattcctgaagagtgcgttgaaccaacanaggactacattaatggcgaacaatttagatcagactctaaaacagttaaccaacaagctttcttttatgctagtgaacgcgaagtccatcacaacgacatatttatattcggcatagataacaccgtactctctaatatc

SEQ ID NO: 57103 - DNA, 380 bp, Glycine max
gaaggtgcaagagtttgttgtgagctataagctagtttatcgtgaggagaatatgaagttgtttgttttctttgttgctgcagtagttttggtagcatggccatgccatggcgcaggctaccaaaggttccctctccgaatgaaaactggctatggtgagcgttcttcggaggtaaaatgcgcaagttttaggcttgctgtggaagcacacaacatccgagcctttaaaaccattcctgaagagtgcgttgaaccaacaaaggactacattaatggcgaacaatttaaatcagactctaaaacagttaaccaacaagctttcttttatgctagtgaacgcgaattcaatcacaacgacatatttatattcggcatagata

SEQ ID NO: 57104 - DNA, 304 bp, Glycine max
ggtgcacaagtgagtttgttgatcgagataactagaaacagtgtgatgaaaatgaaggtccttgttttcttcgttgctacaattttggtagcatggcaatgccatgcgtacgatatgttccctctccgaatgaacactggctatggtgcccgtactccggaggtgaaatgcgcaagttggaggcttgctgtggaagcacacaacatctttggctttgagaccattcctgaagagtgcgttgaagcaacaaaggaatacatccatggcgaacaatatagatcagactccaaaacagttaaccaac

SEQ ID NO: 57105 - DNA, 400 bp, Glycine max
  unsure (1)..(400): unsure at all n locations
ggcacaagtttgttgagatagctagaagcaataagatgaaaatgaaagtgcttgttttgtttgttgctacagttttggtagcatatgaatgccgtggctcagactaccagaagttccctctccaaatgaaaactgggtttggtgggcaatacagcaatgaggtggcatgtgccagttggaggcttggcgtggaagcaaacaacgtagtcaagtggcaaactgttcctgcagcttgcggagagtacatagctgactacgttctaggagaccaatatagatcagattccaaaacagttaaccaacaagcttatttctatgctaaatccctcanactcancaacaaagatgtctttgtctcggacgttgacgacactactctctctaatctccagtattttgc

SEQ ID NO: 57106 - DNA, 354 bp, Glycine max
gacaagtgagtttgttgatcgagataactagaaacagtgtgatgaaaatgaaggtccttgttttcttcgttgctacaattttggtagcatggcaatgccatgcgtacgatatgttccctctccgaatgaacactggctatggtgcccgtactccggaggtgaaatgcgcaagttggaggcttgctgtggaagcacacaacatctttggctttgagaccattcctgaagagtgcgttgaagcaacataggaatacatccatggcgaacaatatagatcagactccaaaacagttaaccaacaagcttacttttatgccagagacctcgaagtccatcccaaggacacatttgtgt

SEQ ID NO: 57107 - DNA, 358 bp, Glycine max
ggcacaagtgagtttgttgatcgagataactagaaacagtgtgatgaaaatgaaggtccttgttttcttcgttgctacaattttggtagcatggcaatgccatgcgtacgatatgttccctctccgaatgaacactggctatggtgcccgtactccggaggtgaaatgcgcaagttggaggcttgctgtggaagcacacaacatctttggctttgagaccattcctgaagagtgcgttgaagcaacaaaggaatacatccatggcgaacaatatagatcagactccacaacagttaaccaacaagcttacttttatgccagagacctcgaagtccatcccaaggacacatttgtgttc

SEQ ID NO: 57108 - DNA, 113 bp, Glycine max
acccacaagtcaatagggatgtgactacagacagaaagggattctctggcactctccttccctcccatttcaatcagccatcaccaagcgcttcccaatgccgtctcttcgct

SEQ ID NO: 57109 - DNA, 210 bp, Glycine max
cgggctcctacagattcttcatcaactgctattttggatcggaacctcttctgcggcgtagcaatgggacactctcctctttggaaatctcgggccggaaaactaatgtcctggttctcgcacttccctcgtgtgttggaaaccccctagattgatcatgaactaacgccttatgtgccacatgcaatgcttcccttgcaatccctcgga

SEQ ID NO: 57110 - DNA, 397 bp, Glycine max
  unsure (1)..(397): unsure at all n locations
ggcacaagtgagtttgttgatcgagataactagaaacagtgtgatgaaaatgaaggtccttgttttcttcgttgctacaattttggtagcatggcaatgccatgcgtacgatatgttccctctccgaatgaacactggctatggtgcccgtactccggaggtgaaatgcgcaagttggaggcttgctgtggaagcacacaacatctttggctttgagaccattcctgaagagtgcgttgaagcaacanaggaatacatccatggcgaacaatatagatcagactccaaaacagttaaccaacaagcttacttttatgccagagacctcgaagtccatcccaaggacacatttgtgttcagtatagatggcaccgtactctctaatattccatactac

SEQ ID NO: 57111 - DNA, 211 bp, Glycine max
gaaggtgcaagagtttgttgtgagctataagctagtttatcgtgaggagaatatgaagttgtttgttttcgttgttgctgcagtagttttggtagcatggccatgccatggcgcaggctaccaaaggttccctctccgaatgaaaactggctatggtgagcgttcttcggaggtaaaatgcgcaagttttaggcttgctgtggaagcacac

SEQ ID NO: 57112 - DNA, 396 bp, Glycine max
  unsure (1)..(396): unsure at all n locations
ggttctagtgtgtgattgtttgttgttgtaactcgttcttcttcttttgttgttctgtgtttgtgtttgttttttctctcacctgaaaatgtcttgctgcggtggtaactgtggttgcggaagctcctgcaagtgcggcaacggctgcggaggctgcaagatgtacccagacttgagctacactgagtcaaccaccaccgagaccttggtcatgggagtggcacctgttaaggctcaatttgagggtgctgaaatgggtgtgcccgctgagaacgatggctgcaaatgtggaccaaactgctcctgcaacncctgcacttgcaagtgaggtgttgggagagcaagcttcaagcagagatagcccttaaataggaataatgataaactattaatgtg

SEQ ID NO: 57113 - DNA, 397 bp, Glycine max
ggcacaagtgagtttgttgatcgagataactagaaacagtgtgatgaaaatgaaggtccttgttttcttcgttgctacaattttggtagcatggcaatgccatgcgtacgatatgttccctctccgaatgaacactggctatggtgcccgtactccggaggtgaaatgcgcaagttggaggcttgctgtggaagcacacaacatctttggctttgagaccattcctgaacagtgcgttgaagcaacaaaggaatacatccatggcgaacaatatagatcagactccaaaacagttaaccaacaagcttacttttatgccagagacctcgaagtccatcccaaggacacatttgtgttcagtatagatggcaccgtactctctaatattccatactac

SEQ ID NO: 57114 - DNA, 356 bp, Glycine max
ggtgtcaactcgaactacaatggatccaacttgagctaaaaatacaaacaaattttgcagttgactcaaaaaataaatttggcccatgctgatccgagttaacccacctaaacaattacataacaaagccctaagtaacctaattttatttttttaagagtggctctctcgtcactccctctctgtcacggcgtcagcgtcattcactcactcactctcgagctcgacgccgcgactcactcaggcacagcgccacaaagatccactctccgcctcgatcccgcaccccactcataaacacagctcgccgaccgcgacgccgtgccactgcatttccgcgaacccgcgccgccgcg

SEQ ID NO: 57115 - DNA, 366 bp, Glycine max
ggcagttcaattccaatatattccattctctctgtgtatttccctacctctcccttcaagatgcagatcttcgtcaagaccctcaccgggaagacgatcacccttgaggtggaaagctctgacaccatcgacaacgtcaaggccaagatccaggacaaggaaggaatccccccggaccagcaacgtctcattttcgccggaaagcaacttgaggacggccgtacccttgctgactacaacattcagaaggagagtactcctcagctcgtcctccgtctccgtggtggcatgcagatcttcgttaagacactcaacggcaagaccataaacctagaggttgaaagctccgacaccatcgataacgtc

SEQ ID NO: 57116 - DNA, 367 bp, Glycine max
ggttctagtgtgtgattgtttgttgttgtaactcgttcttcttcttctgttgttctgtgtttgtgtttgttttttctctcacctgaaaatgtcttgctgcggtggtaactgtggttgcggaagctcctgcaagtgcggcaacggctgcggaggctgcaagatgtacccagacttgagctacactgagtcaaccaccaccgagaccttggtcatgggagtggcacctgttaaggctcaatttgagggtgctgaaatgggtgtgcccgctgagaacgatggctgcaaatgtggaccaaactgctcctgcaacccctgcacttgcaagtgaggtgttgggagaagcagcttcaagcagagatagccctta

SEQ ID NO: 57117 - DNA, 218 bp, Glycine max
gatctggcagcagaagaacaagtagttgagaactaagaaggagaagcaaatggcttcctcaatgatctcttccccagctgttaccactgtcaaccgtgccggtgccggcatggttgctccattcactggcctcaagtccatggctggcttccccaccagaaagaccaacaatgacattacctccattgctagcaacggtggaagagtgcaatgcatgc

SEQ ID NO: 57118 - DNA, 256 bp, Glycine max
ggcacaagtgagtttgttgatcgagataactagaaacagtgtgatgaaaatgaaggtccttgttttcttcgttgctacaattttggtagcatggcaatgccatgcgtacgatatgttccctctccgaatgaacactggctatggtgcccgtactccggaggtgaaatgcgcaagttggaggcttgctgtggaagcacacaacatctttggcttttagaccattcctgaagagtgcgttgaagcaacaaaggaatac

SEQ ID NO: 57119 - DNA, 157 bp, Glycine max
acaattacatacacagatatatcaccataaactcacgcacttcatctcaaggtcacctcaataacttctggcctcacttacacaaaacacttcccttacgagcccgcgaaatcataatcacacatccactatacgattcacagtttattaacctcat

SEQ ID NO: 57120 - DNA, 380 bp, Glycine max
ggcacaagtgagtttgttgatcgagataactagaaacagtgtgtagcatgtgacagcccatgtggtcctcgtcgccacaatttcggtagcatggtaatgccatgcgtacgatatgttccctctccgaatgaacactggctatggtgcccgtactccggaggtgaaatgcgcaagttggaggcttgctgtggaagcacacaacatctttggctttgagaccattcctgaagagtgcgttgaagcaacaaaggaatacatccatggcgaacaatatagatcagactccaaaacagttaaccaacaagcttacttttatgccagagacctcgaagtccatcccatagacacatttgtgttcagtatagatggaaccgtactct

SEQ ID NO: 57121 - DNA, 409 bp, Glycine max
gaatgtgcaagagtttgttgtgagctataagctagtttatcgtgaggagaatatgaagttgtttgttttctttgttgctgcagtagttttggtagcatggccatgccatggcgcaggctaccaaaggttccctctccgaatgaaaactggctatggtgagcgttcttcggaggtaaaatgcgcaagttttaggcttgctgtggaagcacacaacatccgagcctttaaaaccattcctgaagagtgcgttgaaccaacaaaggactacattaatggcgaacaatttagatcagactctaaaacagttaaccaacaagctttcttttatgctagtgaacgcgaagtccatcacaacgacatatttatattcggcatagataacaccgtactctctaatatcgcatactag

SEQ ID NO: 57122 - DNA, 408 bp, Glycine max
ggcacaagtgagtttgttgatcgagataactagaaacagtgtgatgaaaatgaaggtccttgttttcttcgttgctacaattttggtagcatggcaatgccatgcgtacgatatgttccctctccgaatgaacactggctatggtgcccgtactccggaggtgaaatgcgcaagttggaggcttgctgtggaagcacacaacatctttggctttgagaccattcctgaagagtgcgttgaagcaacaaaggaatacatccatggcgaacaatatagatcagactccaaaacagttaaccaacaagcttacttttatgccagagacctcgaagtccatcccaaggacacatttgtgttcagtatagatggcaccgtactctctaatatttcatactacaaagaacatgg

SEQ ID NO: 57123 - DNA, 134 bp, Glycine max
tcaaaccgctgcgagacaacgacagatcggggcacaactgagtttgtcgatctacatcactagacagactgtgactcacacgaacgtccctgttttcttcgttgcaaggggtctggtagagggccaatgcgagg

SEQ ID NO: 57124 - DNA, 76 bp, Glycine max
cgtcacccaaacgtcgacgctgcagaagacacaaaaggctatgttcttaacaacacagtctccttgcaccctggtt

SEQ ID NO: 57125 - DNA, 358 bp, Glycine max
ggcacaagtgagtttgttgatcgagataactagaaacagtgtgatgaaaatgaaggtccttgttttcttcgttgctacaattttggtagcatggcaatgccatgcgtacgatatgttccctctccgaatgaacactggctatggtgcccgtactccggaggtgaaatgcgcaagttggaggcttgctgtggaagcacacaacatctttggctttgagaccattcctgaagagtgcgttgaagcaacaaaggaatacatccatggcgaacaatatagatcagactccataacagttaaccaacaagcttacttttatgccagagacctccaagtccaacccaaagacacatttgtgttc

SEQ ID NO: 57126 - DNA, 350 bp, Glycine max
ggcacaagtgagtttgttgatcgagataactagaaacagtgtgatgaaaatgaaggtccttgttttcttcgttgctacaattttggtagcatggcaatgccatgcgtacgatatgttccctctccgaatgaacactggctatggtgcccgtactccggaggtgaaatgcgcaagttggaggcttgctgtggaagcacacaacatctttggctttgagaccattcctgaagagtgcgttgaagcaacaaaggaatacatccatggcgaacaatatagatcagactccaaaacagttaaccaacaagcttactttttatgccagagacctcaaagtccatcccaaggacaca

SEQ ID NO: 57127 - DNA, 370 bp, Glycine max
  unsure (1)..(370): unsure at all n locations
atcccaaatacgcctaagattgatctgtggcaaagtctcctcaagcgaactctttcctggaaacgaatgtgagcatcatagtaaattgcttggtctctcctatcctaaaatccaattgaaattgttgatactgtgatgtactgtgacaacacttcagcgaggaaattcagccttaatagacctggaagcacaggactgggcctccaattttcaggttggagtactgacgttttggtattgatccactcatcttcctcagctctaaattcaacanatatgacatggtcttcctgattgtatgcacatactatccttactaatagtatttcagcaactaaaacaatgtgaactacatcatatggatgttcat

SEQ ID NO: 57128 - DNA, 358 bp, Glycine max
ggcacaggtgagtttgttgatcgagataactagaaacagtgtgatgaaaatgaaggtctttgttttcttcgttgctacaattttggtagcatggcaatgccatgcgtatgatatgttccctctccgaatgaacactggctatggtgcccgtactccggaggtgaaatgcgcaagttggaggcttgctgtggaagcacacaacatctttggctttgagaccattcctgaacagtgcgttgaagcaacaaatgaatacatccatggcgaacactatacatcagactccaaaacagttaaccaacaagcttacttttatgccacagacctcgaagtccatcccaaggacacatttgtgttc

SEQ ID NO: 57129 - DNA, 388 bp, Glycine max
catatttttctcccttctggcttctttttccttggttggtaatgatcctgcacactctaaatatttcttgtacagttaagtatttacttcctccgatcctctttataagaaacaagttttagtgtattttacactaaaacttgtttcttattaaaaaaaaaaagacagtaggtagtattataataatgaaactgagtgatgtcagttatcctggacccatgtttggttaggttgttctgccttgaccggttgttacatgtttgatattttgatcattacgtcttaatacgtacacaggctgttaaagaaacggggcgcaagttccgggagaccattcttgctcttggaggtggcaagccaccactagatgtaagatacactacatcac

SEQ ID NO: 57130 - DNA, 303 bp, Glycine max
ggcacaagtgagtttgttgatcgagataactagaaacagtgtgatgaaaatgaaggtccttgttttcttcgttgctacaattttggtagcatggcaatgccatgcgtacgatatgttccctctccgaatgaacactggctatggtgcccgtactccggaggtgaaatgcgcaagttggaggcttgctgtggaagcacacaacatctttggctttgagaacattcctgaagagtgcgttgaagcaacaaaggaatacattcatggcgaacaatatagattagacccaaaacagttaaccaacaa

SEQ ID NO: 57131 - DNA, 364 bp, Glycine max
gaaggtgcaagagtttgttgtgagctataagctagtttatcgtgaggagaatatgaagttgtttgttttctttgttgctgcagtagttttggtagcatggccatgccatggcgcaggctaccaaaggttccctctccgaatgaaaactggctatggtgagcgttcttcggaggtaaaatgcgcaagttttaggcttgctgtggaagcacacaacatccgagcctttaaaaccattcctgaagagtgcgttgaaccaacaaaggactacattaatggcgaacaatttagatcagactctaaaacagctaaccaacaagctttcttttatgctagtgaacgcgaagtccatcacaacgacatattt

SEQ ID NO: 57132 - DNA, 199 bp, Glycine max
tggagaagcaaagggcgttgagttgttgccagtggaacaagccacaccaacgataggtcctcctcctcctcctgctcctcccactacgagggaagaggccactggaagactccgatgcccactccagttacgtcaagattctcgctgttattcaagaccttcgtcctcactttcgccaagttctccgaactccatacta

SEQ ID NO: 57133 - DNA, 230 bp, Glycine max
ggttccaaaagacgacagaaggggatacagtagtgagtatgttgagcgtcattgtgagcatcaatatgatgaaatcatgtggcctcgtcttcttcctcgtcatcattgtcgttgcatcgcaattggatgcgtacgaggtgttcacactctgtgtgtcaaatggccatggggtccatggtctggatgtgaaatacccaagttgtgcgtttgccggggggacacacagtatc

SEQ ID NO: 57134 - DNA, 108 bp, Glycine max
aaaagaactacggagggggaaccgttcagataatgttgtgcgtctttgtgaacatagtgatgaagtggtcgtgtggcttcatcatcatgctcttcagcattgtctgtg

SEQ ID NO: 57135 - DNA, 290 bp, Glycine max
ggcacaagtgagtttgttgatcgagataactagaaacagtgtgatgaaaatgaaggtccttgttttcttcgttgctacaattttggtagcatggcaatgccatgcgtacgatatgttccctctccgaatgaacactggctatggtgcccgtactccggaggtgaaatgcgcaagttggaggcttgctgtggaagcacacaacatctttggctttgagaccattcctgaagagtgcgttgaagcaacaaaggaatacatccatggggaacaatatagatcagactcaaaaa

SEQ ID NO: 57136 - DNA, 366 bp, Glycine max
ggcacaagtgagtttgttgatcgagataactagaaacagtgtgatgaaaatgaaggtccttgttttcttcgttgctacaattttggtagcatggcaatgccatgcgtacgacatgttccctctccgaatgaacactggctatggtgcccgtactccggaggtgaaatgcgcaagttggaggcttgctgtggaagcacacaacatctttggctttgagaccattcctgaagagtgcgttgaagcaacaaaggaatacatccatggcgaacaatatagatcagactccaaaacagttaaccaacaagcttacttttatgccagagacctcgaagtccatcccaaggacacatttgtgttcagtataga

SEQ ID NO: 57137 - DNA, 360 bp, Glycine max
gaaggtgcaagagtttgttgtgagctataagctagtttatcgtgaggagaatatgaagttgtttgttttctttgttgctgcagtagttttggtagcatggccatgccatggcgcaggctaccaaaggttccctctccgaatgaaaactggctatggtgagcgttcttcggaggtaaaatgcgcaagttttaggcttgctgtggaagcacacaacatccgagcctttaaaaccattcctgaagagtgcgttgaaccaacaaaggactacattaatggcgaacaatttagatcagactctaaaacagttaaccaacaagctttcttttatgctagtgaacgcgaagttcatcacaacgacat

SEQ ID NO: 57138 - DNA, 172 bp, Glycine max
ctggggagggggagggggaacattgaagaggatagagggcagcatcgccatgggattgagtattctgataagcacttccatttccactcggtaacgcttcctccgagtccaaacgcatgtttctcaagtcttgttcgttcatctttcgcctccatttcccccacagggtgtg

SEQ ID NO: 57139 - DNA, 337 bp, Glycine max
ggatagctaaaattccgaatcaggaaagaaaaagcctactaatgccgccgatggggaggaagcgaaaggtagcacccagatcttctctatcgagcgagccacctctcaagcagcagcaaccaaaacccgaaaatccccctcaagaatacgaagaagtcgaagaggaagttgaggaagaagaggtataggaagaggtcgaagaggaagaagaagaagaagatgaggacgaggaagaagaggaggaggaagaagaagaataagaagaaaacgacgtcgtcaaacaacagcagcagcaacagcaagacgaagacgacatcgcgatatcgaaacttctgga

SEQ ID NO: 57140 - DNA, 299 bp, Glycine max
ggcacaagtgagtttgttgatgcagatagctagaaacagtgtgatgaaaatgaaggtccttgttttcttcgtggctacaattttggtagcatggcagtgccatgcgtacgatatgttccctctccgaatgaacactggctatggtgcccgtactccggaggtgaaatgcgcaagttggacgcttgctgtggaagcacacaacatctttggctttgagaccattcctgaagagtgccttgaagcaacaaaggaatacatccatggcgaacaatatagatcagactccaaaacagttaacc

SEQ ID NO: 57141 - DNA, 236 bp, Glycine max
aaatgaaagtgcttgttttgtgtgttgctacagttttggtagcatatgaatgccatggctcaaactaacacaagttccctctccaaatgaaaactgggtttggtgggcaatacagcaatgaggtggcatgtgccacttggaaggctggcgttggaacaaacaacgtactcaactggcaaactgttccctcagcttgcggagagtacataactgactacgttctaggataccaatat

SEQ ID NO: 57142 - DNA, 196 bp, Glycine max
caaaaagagatagcaatccacatcatcgaaaatggctgcacctctgctctctaataaaatcatgaacaataaggtgaaggggttcaggacgcctcatattgacatgataatttccgtcaagacaaaatgtcatatatcacacggtatagactccattcttaggacaatgttcatgggatacactttggatccaaag

SEQ ID NO: 57143 - DNA, 355 bp, Glycine max
  unsure (1)..(355): unsure at all n locations
ggcacaagtttgttgagatatgtagaagcaataagatgaagatgaaagtgcttgttttgtttgttgctacagttttggtaccatatgaatgccatggctcagactaccagaagttccctctccaaatgaaaactgggtttggtgggcaatacagcaatgaggtggcatgtgccagttggaggcttggcgtggaaggcaacaacgtagtcaagtggcaaactgttcctgcagcttgcggagagtacatagctgactacgttctangagaccaatatagatcagattccaaaacagttaaccaacaaacttatttctatgctaaatccctcagactcaccaacaaagatgtccttgt

SEQ ID NO: 57144 - DNA, 291 bp, Glycine max
gatgatgtagatagagaataaagagagaccagtgtgcagtgagaaagaggttgggcacttcttgtgtggctttgttttgttcgttgtgttggcatttgttgatgggtgaagagggagaagaggtgtcaagagataaggaacagcaacacatgggagtttatggaaatgagtggttgtttagtagtttctgtgcaaagtggcgcggtttaagacaccagaattcctgttcaatgcctccttttgagccaggcgattggggtcatcggaaaaggaaaaacggccgctctagag

SEQ ID NO: 57145 - DNA, 380 bp, Glycine max
ggtaacggtcatgaattctcgggtcgacgcaagcgtgcgaaacggtgccaaaagacgagagaaggggacacttcaaaatcctgtagtaagccttcttttctctctctctctctcgtgttctgagctgctagaagcaatggagaggaaaagaagccatggttctttcagcatgtttgcaatgcttgttggattgctctctcagagccttgtcattcctgtaatatccacgactgttgcagatcagaagaactactacacgccagatccacatgctggaagtccccccacaggtttctccgattctctgtgctcacacaatagtagtcctccatctcatggccatgggagctctccagcctcacatcacaatagtccaagta

SEQ ID NO: 57146 - DNA, 183 bp, Glycine max
ggtgtgattgtttgatggtgtgacgcggtcatcctctcttgttgttctgtggctgtgtgtgtgtgttcgctcacccgaacatgtcatgctgtcgtggtaactgtggatgcggaagctcctgcaagtgcggaaatggctgcagaggctgcaagatgtacccatacttgaactacactgagtcaa

SEQ ID NO: 57147 - DNA, 360 bp, Glycine max
ggcaagagtttgttgtgagctagaagctagtttatcgtgaggagaatatgaagttgtttgttttctttgttgctgcagtaattttggtagcatggccatgccatggcgcaggctaccaaaggttccctctccgaatgaaaactggctatggtgagcgttcttcggaggtaaaatgcgcaagttttaggcttgctgtggaagcacacaacatccgagcctttaaaaccattcctgaagagtgcgttgaaccaacaaaggactacattaatggcgaacaatttagatcagactctaaaacagttaaccaacaagctttcttttatgctagtgaacgcgaagtccatcacaacgacatattta

SEQ ID NO: 57148 - DNA, 368 bp, Glycine max
gaaggtgcaagagtttgttgtgagctataagctagtttatcgtgaggagaatatgaagttgtttgttttctttgttgctgcagtagttgtggtagcatggccatgccatggcgcaggctaccaaaggttccctctccgaatgaaaactggctatggtgagcgttcttcggaggtaaaatgcgcaagttttaggcttgctgtggaagcacacaacatccgagcctttaaaaccattcctgaagagtgcgttgaaccaacaaaggactacattaatggcgaacaatttagatcagactctaaaacagttaaccaacaagctttcttttatgctagtgaacgcgaagtccatcacaacgacatatttatat

SEQ ID NO: 57149 - DNA, 367 bp, Glycine max
ggcacaagtgagtttgttgatcgagataactagaaacagtgtgatgaaaatgaaggtccttgttttcttcgttgctacaattttggtagcatggcaatgccatgcgtacgatatgttccctctccgaatgaacactggctatggtgcccgtactccggaggtgaaatgcgcaagttggaggcttgctgtggaagcacacaacatctttggctttgagaccattcctgaagagtgcgttgaagcaacaaaggaatacatccatggcgaacaatatagatcagactccagaacagttaaccaacaagcttacttttatgccagagacctcgaagttcatcgcaaggacacatttgtgttcagtatagat

SEQ ID NO: 57150 - DNA, 278 bp, Glycine max
aaacatgtcacgatgaagcgtatcgggagtgagagagaagtgtctaccagacatcttcaaacgcaacgagaagtcagtgcgtgggcgagagtgagcactattcggagtgagcggaggtatgattaattatggtgatagcataaggaacaccttggtaagagtttgaagttgggtacggtggatggggataagatgtcccggacaaggttgaatctgccccgtcgagggaatatgaatgtatccccgacgcttttgatggttatcactcggtcaggctg

SEQ ID NO: 57151 - DNA, 285 bp, Glycine max
gaccaagtgaaccaatatagcccaagccctatacaaccaaaccctaacacacacccatttgattcagtttccatggctagcctcaaggttgcatttttggctgcagtgctctgcatggttgtggtgagtgcacccatggcacatgcagctatcacgtgcgggcaggtgacgaatagcctgatcaattgcatcggttacctccagaacggaggaacgccgccgtcgggatgctgcaacggagtgaagagcctcaatgccgccgccaagaccaccgccgaccgccag

SEQ ID NO: 57152 - DNA, 139 bp, Glycine max
gaaatcaagttatattcacttgctacaaaattatatccatctcaagatacacacttatactcacgatcaccctagtcatctcgaccatggggcttccgcatatacccactctcggacctgttatccttcaccttcactc

SEQ ID NO: 57153 - DNA, 374 bp, Glycine max
gggacaaatgtgcatcgaatttcaatacctccaaacaaaatcacttttgttgaagcttcgcatcttcccttcatttatctttctctttaacccaatttgattatctctctctctctctctctactattcagcctctattgttctttccttctcttcttagccttggagctggttgatggatattgaacccttgtgggctattggggggtggtcatttctttcaaattattgcatggcagaacctaaagcatcatcatcatcatcaccaatctcagaacctttctcaaaatcaccctcttttcttcacttcctctcacttttcttcatcctcctccttctcatcaacctatcccaccagccacacccttctacca

SEQ ID NO: 57154 - DNA, 194 bp, Glycine max
gggttttctggggattttcttcttggctcttaacctcatgtttgctaatattctcattcttctgtccccgcatcgtccccttggcagggcacgcgctcgctctctccgcatgtttcctctcactacggactcctagagcagaggtaagatcattcggttgtctttcaacaaatccttttaaccagatccttgct

SEQ ID NO: 57155 - DNA, 361 bp, Glycine max
gaaggtgcaagagtttgttgtgagctagaagctagtttatcgtgaggagaatatgaagttgtttgttttctttgttgctgcagtaattttggtagcatggccatgccatggcgcaagctaccaaaggttccctctccgaatgaaaactggctatggtgagcgttcttcggaggtaaaatgcgcaagttttaggcttgctgtggaagcacacaacatccgagcctttaaaaccattcctgaagagtgcgttgaaacaacaaaggactacattaatggcgaacaatttagattagactctaaaacagttaaccaacaagctttcgtttatgctagtgaacgcgaagtcgatcacaacgacata

SEQ ID NO: 57156 - DNA, 279 bp, Glycine max
ggcacaagtgagtttggtgatcgagataactagaaacagtgtgatgaaaatgaaggtccttgttttcttcgttgctacaattttggtagcatggcaatgccatgcgtaagatagtgttccctctccgaatgaacactggctatggtgcccgtactccggaggtgaaatgcgcaagttggaggcttgctgtggaagcacacaacatctttggctttgagaccattcctgaagagtgcgttgaagcaacataggaatacatccatggcgaacaatatagat

SEQ ID NO: 57157 - DNA, 381 bp, Glycine max
  unsure (1)..(381): unsure at all n locations
gcacaagtttgttgagatagctagaagcaataagatgaagatgaaagtgcttgttttgtttgttgctacagttttggtagcatatgaatgccatggctcagactaccagaagttccctctccaaatgaaaactgggtttggtgggcaatacagcaatgaggtggcatgtgccagttggaggcttggcgtggaagcaaacaacgtagtcaagtggcaaactgttcctgcagcttgcggagagtacatagctgactacgttctangagaacaatatagatcagattccaaaacagttaaccaacaagcttatttctatgctaaatccctcaaactcacaancanagatgtctttgtcctggacgttgacgacactactctctc

SEQ ID NO: 57158 - DNA, 284 bp, Glycine max
  unsure (1)..(284): unsure at all n locations
ggcacaagtttgttgagatagctagaagcaataagatgaaaatgaaagtgcttgttttgtttgttgctacagttttggtagcatatgaatgccatggctcagactaccagaagttccctctccaaatgaaaactgggtttggtgggcaatacagcaatgaggtggcatgtgccagttggaggcttggcgtggaagcaaacaacgtagtcaagtggcaaactgttcctgcagcttgcggagagtacatagctgactacgttctangagaacantatagatcagat

SEQ ID NO: 57159 - DNA, 358 bp, Glycine max
gaaggtgcaagagtttgttgtgagctataagctagtttatcgtgaggagaatatgaagttgtttgttttctttgttgctgcagtagttttggtagcatggccatgccatggcgcaggctaccaaaggttccctctccgaatgaaaactggctatggtgagcgttcttcggaggtaaaatgcgcaagttttaagcttgctgtggaagcacacaacatccgagcctttaaaaccattcctgaagagtgcgttgaaccaacaaaggactacattaatggcgaacaatttagattagactctaaaacagttaaccaacaagctttcttttatgctagtgaacgcgaagtcgatcacaacgac

SEQ ID NO: 57160 - DNA, 303 bp, Glycine max
gagcgaaacagagagtgatttcagtgagtgatcggtgttcacttgatctcatcataatcgtcagcgtcaattgaagaagatgccgatcagaaacatcgccgtcggaaggcctgaagaggcgacccaccccgacacgttgaaggcggctttggctgagttcatctcaaccttcatcttcgtgttcgccggctcaggctccggcatcgcctacaacaagctcaccgacaacggcgctgccacccctgccggcctcatctccgcctccatcgcccatgcattcgccctcttcgtcgccgtctccgt

SEQ ID NO: 57161 - DNA, 340 bp, Glycine max
ggcacaagtgagtttgttgatcgagataactagaaacagtgtgatgaaaatgaaggtccttgttttcttcgttgctacaattttggtagcatggcaatgccatgcgtacgatatgttccccctccgaatgaacactggctatggtgcccgtactccggaagtgaaatgcgcaagttggaggcttgctgtggaagcacacaacatctttggctttgagaccattcctgaagagtgcgttgaagcaacaaaggaatacatccatggcgaacaatatagatcagactccataacagttaatcaacaagcttacttttatgccagagatctcgaagtccaatcc

SEQ ID NO: 57162 - DNA, 406 bp, Glycine max
  unsure (1)..(406): unsure at all n locations
ggcacaagtgagtttgttgatcgagataactagaaacagtgtgatgaaaatgaaggtccttgttttcttcgttgctacaattttggtagcatggcaatgccatgcgtacgatatgttccctctccgaatgaacactggctatggtgcccgtactccggaggtgaaatgcgcaagttggaggcttgctgtggaagcacacaacatctttggctttgagaccattcctgaagagtgcgttgaagcaacanaggaatacatccatggcgaacaatatagatcagactccaaaacagttaaccaacaagcttacttttatgccagagacctcgaagtccatcccaaggacacatttgtgttcagtatagatggcaccgtactctctaatattccatactacaaaaaacat

SEQ ID NO: 57163 - DNA, 401 bp, Glycine max
  unsure (1)..(401): unsure at all n locations
ggtgcacaagtgagtttgttgatcgagataactagaaacagtgtgatgaaaatgaaggtccttgttttcttcgttgctacaattttggtagcatggcaatgccatgcgtacgatatgttccctctccgaatgaacactggctatggtgcccgtactccggaggtgaaatgcgcaagttggaggcttgctgtggaagcacacaacatctttggctttgagaccattcctgaagagtgcgttgaagcaacaaaggaatacacccatggcgaacaatatagatcagactccaaaacagttaaccaacaagcttacttttatgccagagaactcgaagtcaatcncaaggacacatttgtgttcagtatagatggcaccgtactctctaatattccatactacaa

SEQ ID NO: 57164 - DNA, 408 bp, Glycine max
  unsure (1)..(408): unsure at all n locations
ggagataactagaaacagtgtgatgaaaatgaaggtccttgttttcttcgttgctacaattttggtagcatggcaacgccatgcgtacgatatgttccctctccgaatgaacactggctatggtgcccgtactccggaggtgaaatgcgcaagtcggacgcttgctgtggaagcacacaacatctttggctttgagaccattcctgaagagtgcgttgaagcaacataggaatacatccatggcgaacaatatagatcagactccaaaacagttaaccaacaagcttacttttatgccagagacctcgaagtccatcncaaggacacatttgtgttcagtatagatggcaccgtactctctaatattccatactacaataaacattgatatggggttgaaaaatttaa

SEQ ID NO: 57165 - DNA, 299 bp, Glycine max
ggcttctttcacatggagcagacaaaaagcatatggtctcccgtcacagatccaagaagtggtttcaaccgggaatccaaaagtttccaaaggcacaagccccctcaccgtttcactccccccacagtcaccgtcgtcacagccgcattctcactccatccacggcgcaactcccagttccagggtccctccaacgccattaacgacactgccaaaggtgaaacggcctctccatagggggagcccctccaccgggccaaaaccctagcctcgaatctcgccacaatcctcaaactcac

SEQ ID NO: 57166 - DNA, 237 bp, Glycine max
acccaaaggggcacaactgagtttgttgatcaccataactaaaaacagtgtgattaaaatgaatatctttatattcctcgatgtcacaaatttggcacgggggcaatactatgcgtacaatatgtgccctctccgaatgtctcacgtcaaaggtgcatgtacttcggccgtgtaatgctcaagttggcacgcttgctgtgctactacacactatctttggatatgggactattcctg

SEQ ID NO: 57167 - DNA, 412 bp, Glycine max
gaaggtgcaagagtttgttgtgagctataagctagtttatcgtgaggagaatatgaagttgtttgttttctttgttgctgcagtagttttggtagcatggccataccatggcgcaggctaccaaaggttccctctccgaatgaaaactggctatggtgagcgttcttcggaggtaaaatgcgcaagttttaggcttgctgtggaagcacacaacatccgagcctttaaaaccattcctgaagagtgcgttgaaccaacaaaggactacattaatggcgaacaatttagatcagactctaaaacagttaaccaacaagctttcttttatgctagtgaacgcgaagtccatcacaacgacatatttatattcggcatagataacaccgtactctccaatatcccatactaagaa

SEQ ID NO: 57168 - DNA, 230 bp, Glycine max
ggcacaagtgagtttgttgatcgagatcactaggaacagtgtgatgaaaatgaacgcccttgttttctccgttgctagaattttggtagcatggcaatgccatgcgtacgataggttccctctccgaatgaacactggctatggtgcccgtactccggaggtgaaatgcccaagttgaaggcttgctgtggaaccacacaaaatctttggttttgaaacaatccctaaaa

SEQ ID NO: 57169 - DNA, 224 bp, Glycine max
tgattcactgcatgcctcacgtatgcgttccagtttttagcattgttgcataatcaactggtttgaacatggacatacgtcaacacgctatcactccattagaattaattatggtcaaggctgcttcctccctctacttacggaaaaccacgttgttccagggtccgtccatttccttcatggccttggccacaggttaagacatgcagcaggaagaggtcctc

SEQ ID NO: 57170 - DNA, 360 bp, Glycine max
ggcacaagtgagtttgttgatcgagataactagaaacagtgtgatgaaaatgaaggtccttgttttcttcgttgctacaattttggtagcatggcaatgccatgcgtacgatatgttccctctccgaatgaacactggctatggtgcccgtactccggaggtgaaatgcgcaagttggaagcttgctgtggaagcacacaacatctttggctttgagaccattcctgaagagtgcgttgaagcaacaaaggaatacatccatggcgaacaatatagatcagactccaaaacagttaaccaacaagcttacttttatgccagagacctcgaagtccatcccaaagacacaattgtgttcag

SEQ ID NO: 57171 - DNA, 405 bp, Glycine max
  unsure (1)..(405): unsure at all n locations
ggcacaagtgagtttgttgatcgagataactagaaacagtgtgatgaaaatgaaggtccttgttttcttcgttgctacaattttggtagcatggcaatgccatgcgtacgatatgttccctctccgaatgaacactggctatggtgcccgtactccggaggtgaaatgcgcaagttggaggcttgctgtggaagcacacaacatctttggctttgagaccattcctgaagagtgcgttgaagcaacaaaggaatacatccatggcgaacaatatagatcagactccaaaacagttaaccaacaagcttacttttatgccagagacctcgaagtccatcncaaggacacatttgtgttcagtatagatggcaccgtactctctaatattccatactacaaaaaaca

SEQ ID NO: 57172 - DNA, 407 bp, Glycine max
agttctagtgtgtgattgtttgttgttgtaactcgttcttcttcttttgttgttctgtgtttgtgtttgttttttctctcacctgaaaatgtcttgctgcggtggtaactgtggttgcggaagctcctgcaagtgcggcaacggctgcggaggctgcaagatgtacccagacttgagctacactgagtcaaccaccaccgagaccttggtcatgggagtggcacctgttaaggctcaatttgagggtgctgaaatgggtgtgcccgctgagaacgatggctgcaaatgtggaccaaactgctcctgcaacccctgcacttgcaagtgaggtgttgggagagcaagcttcaagcagagatagcccttaattaggaataatgataaactattaatgtgtagctaaaaac

SEQ ID NO: 57173 - DNA, 329 bp, Glycine max
gactcaccacttcaaaacactcataacacaaagcacaaagcaaagctcatccttgagttaaaaaatggcagcagcttcttccatggctctctcatccccatccttggctggcaaggccgtgaagctgggcccatcagccccagaagtgggaagggtgagcatgaggaagaccgtcaccaagcaggtctcctcaggaagcccatggtacggcccagaccgagtcaagtacttgggcccattctctggcgagcccccgtcctacctaaccggtgagctcccaggcgactacggctgggacactgctgggctttccgcagacccagaaacct

SEQ ID NO: 57174 - DNA, 367 bp, Glycine max
gaaggtgcaagagtttgttgtgagctataagctagtttatcgtgaggagaatatgaagttgtttgttttctttgttgctgcagtagttttggtagcatggccatgccatggcgcaggctaccaaaggttccctctccgaatgaaaactggctatggtgagcgttcttcggaggtaaaatgcgcaagttttaggcttgctgtggaagcacacaacatccgagcctttaaaaccattcctgaagagtgcgttgaaccaacaaaggactacattaatggcgaacaatttagatcagactctaaaacagttaaccaacaagctttcttttatgctagtgaacgccaagtccatcacaacgacatatttata

SEQ ID NO: 57175 - DNA, 398 bp, Glycine max
gaggtgcaagagtttgttgtgagctataagctagtttatcgtgaggagaatatgaagttgtttgttttctttgttgctgcagtagttttggtagcatggccatgccatggcgcaggctaccaaaggttccctctccgaatgaaaactggctatggtgagcgttcttcggaggtaaaatgcgcaagttttaggcttgctgtggaagcacacaacatccgagcctttaaaaccattcctgaagagtgcgttgaaccaacaaaggactacattagtggcgaacaatttagatcagactctaaaacagttaaccaacaagctttcttttatgctagtgaacgcgaagtccatcacaacgacatatttatattcggcatagataacaccgtactctctaatat

SEQ ID NO: 57176 - DNA, 409 bp, Glycine max
ggcacaagtgagtttgttgatcgagataactagaaacagtgtgatgaaaatgaaggtccttgttttcttcgttgctacaattttggtagcatggcaatgccatgcgtacgatatgttccctctccgaatgaacactggctatggtgcccgtactccggaggtgaaatgcgcaagttggaggcttgctgtggaagcacacaacatctttggctttgagaccattcctgaagagtgcgttgaagcaacaaatgaatacatccatggcgaacaatatagatcagactccaaaacagttaagcaacaagcttacttttatgccagagacctcgaagtccatcccaaggacacatttgtgttcagtatagatggcaccgtactctctaatattccatactacaaaaaacatgga

SEQ ID NO: 57177 - DNA, 348 bp, Glycine max
ggcacaagtgagtttgttgatcgagataactagaaacagtgtgatgaaaatgaaggtccttgttttcttcgttgctacaattttggtaacatggcaatgccatgcgtacgatatgttccctctccgaatgaacactggctatggtgcccgtactccggaggtgaaatgcgcaagttggaggcttgctgtggaagcacacaacatctttggctttgagaccattcctgaagactgcgttgaagcaacaaaggaatacatccatggcgaacaatatagatcatactccaaaacagttaaccaacaagcttacttttatgccagagacctcgaagtcgatcccatcgacac

SEQ ID NO: 57178 - DNA, 394 bp, Glycine max
ggttctagtgtgtgattgtttgttgttgtaactcgttcttcttcttttgttgttctgtgtttgtgtttgttttttctctcacctgaaaatgtcttgctgcggtggtaactgtggttgcggaagctcctgcaagtgcggcaacggctgcggaggctgcaagatgtacccagacttgagctacactgagtcaaccaccaccgagaccttggtcatgggagtggcacctgttaaggctcaatttgagggtgctgaaatgggtgtgcccgctgagaacgatggctgcaaatgtggaccaaactgctcctgcaacccctgcacttgcaagtgaggtgttgggagagcaagcttcaagcagagatagcccttaattacgaataatgattaactattaatg

SEQ ID NO: 57179 - DNA, 368 bp, Glycine max
  unsure (1)..(368): unsure at all n locations
gattggttagaagattagtctgtaaggaaggcaaagaaacaaagaagcgagacatgccaaacaagatcaaccaaccatttcctaactttgctccctcgtctttgttggattccgttttccaactctcaattccccaaatcttaattgctgcaatgcgttagcaaagtttcaatctttgccaaagggacgagaagaatcatggggagggacccatcttctgccaccgtcgaggtgcagattcatccgcgctgcgacnacancaccgtcaaccccggacggggcngaggcactctccgtcgccgccgagtccccctgccgtgcacgatcgcgacttcagcctcttcaagcgctggttcccatggctggtc

SEQ ID NO: 57180 - DNA, 277 bp, Glycine max
tcattgcctgatatccttgtcgcgacactaggtctggcatcacggcaataccatggcacatgcaacaacaagtcacgtcccttcatgtatgatgacaaatgtgaacgatctactgctagtatcaatggcatctcttaaggcatgcgagggactcatcaaacaatggattcttaaaaacaatgctcgagatctggttgaatctggtattgacaacattgatggcgacaagattacactaaacacttggacgcattttgaatatacttgcgcatatgct

SEQ ID NO: 57181 - DNA, 139 bp, Glycine max
acacagtatccgagtcttaaaaaccattcctgaagagctgcgagtacataactgtagacatactaagggatcacaatttatatcagtctccaacacagttaaccaacaagctttcctatgaaatatccctcaaaagcct

SEQ ID NO: 57182 - DNA, 216 bp, Glycine max
ggcacaagtgagtttgttgatcgagataactacaaacagtgtgatgaaaatgaaggtccttgttttcttcgttgctacaattttggtagcatggcaattccatgcgtacgatatgttccctctccgaatgatcactggccatggtgtccgtaatccggacgtgaaatccgcaagttcgacgcctactgtagaaacagaccatgatctctggctttg

SEQ ID NO: 57183 - DNA, 402 bp, Glycine max
gaaggtgcaagagtttgttgtgagctataagctagtttatcgtgaggagaatatgaagttgtttgttttctttgttgctgcagtagttttggtagcatggccatgccatggcgcaggctaccaaaggttccctctccgaatgaaaactggctatggtgagcgttcttcggaggtaaaatgcgcaagttttaggcttgctgtggaagcacacaacatccgagcctttaaaaccattcctgaagagtgcgttgaaccaacaaaggactacattaatggcgaacaatttagatcagactctaaaacagttaaccaacaagctttcttttatgctagtgaacgcgaagtccatcacaacgacatatttatattcggcatagataacaccgtactctctaatatccc

SEQ ID NO: 57184 - DNA, 348 bp, Glycine max
gcacaagtttgttgagatagctagaagcaataagatgaaaatgaaagtgcttgttttgtttgttgctacagttttggtagcatatgaatgccatggctcagactaccagaagttccctctccaaatgaaaactgggtttggtgggcaatacagcaatgaggtggcatgtgccagttggaggcttggcgtggaagcaaacaacgtagtcaagtggcaaactgttcctgcagcttgcggagagtacatagctgactacgttctaggagaccaatatagatcagattccaaaacagttaaccaacaagcttaattctatgctaaatccctcaaactccacaacaaaagatg

SEQ ID NO: 57185 - DNA, 412 bp, Glycine max
  unsure (1)..(412): unsure at all n locations
ggcagttcaattccaatatattccattctctctgtgtatttccctacctctcccttcaagatgcagatcttcgtcaagaccctcaccggcaagaccatcacccttgaagtggaaagctctgacaccatcgacaacgtcaaggccaagatccaggacaaggaaggaatccccccggaccagcaacgtctcattttcgccggaaagcaacttgaggacggccgtacccttgctgactacaacattcagaaggagagtactcttcacctcgtcctccgtctccgtggtggcatgcagatcttcgttaagacactcaccggcaagaccataaccctagaggttgaaagctccgacaccatcgataacgtcaaggccaagacccaggacaaagagggtatcnccccggaccagcaac

SEQ ID NO: 57186 - DNA, 398 bp, Glycine max
  unsure (1)..(398): unsure at all n locations
gcacaagtttgttgagatagctagaagcaataagatgaaaatgaaagtgcttgttttgtttgttgctacagttttggtagcatatgaatgccatggctcagactaccagaagttccctctccaaatgaaaactgggtttggtgggcaatacagcaatgaggtggcatgtgccagttggaggcttggcgtggaagcaaacaacgtagtcaagtggcaaactgttcctgcagcttgcggagagtacatagctgactacgttctaggagaccaatatagatcagattccaaaacagttaaccaacaagcttatttctatgctaaatccctcaaactcaccaacanagatgttcttgtcttggacgttgacgacactactctctctaatcctcagtattttg

SEQ ID NO: 57187 - DNA, 390 bp, Glycine max
  unsure (1)..(390): unsure at all n locations
ggcacaattttgttgaaatacctaaaagcaataagataaaaatgaaagtgcttgttttgtttgttgctacagttttggtagcatatgaatgccatggctcagactaccagaagttccctctccaaatgaaaactgggtttggtgggcaatacagcaatgaggtggcatgtgccagttggaggcttggcgtggaagcaaacaacgtagtcaagtggcaaactgttcctgcagcttgcggagagtacatagctgactacgttctangagaccaatatagatcagattccaaaacagttaaccaacaagcttatttctatgctaaatccctcaaactcaccaacaaagatgtctttgtcttggacgttgacgacactactctctctaatctcc

SEQ ID NO: 57188 - DNA, 399 bp, Glycine max
gaaggtgcaagagtttgttgtgagctataagctagtttatcgtgaggagaatatgaagttgtttgttttctttgttgctgcagtagttttggtagcatggccatgccatggcgcatgctaccaaaggttccctctccgaatgaaaactggctatggtgagcgttcttcggaggtaaaatgcgcaagttttaggcttgctgtggaagcacacagcatccgagcctttaaaaccattcctgaagagtgcgttgaaccaacataggactacattaatggcgaacaatttagatcagactctaaaacagttaaccaacaagctttcttttatgctagtgaacgcgaagtccatcacaacgacatatttatattcggcatagataacaccgtactctctaatat

SEQ ID NO: 57189 - DNA, 205 bp, Glycine max
cccacacgtccatacaggcgtcagtacagctgagaagggaacacatattggggaacatctcaactccatttctacacatccctagctctgtcgttccgtctttcgctactgttttccggatgtgcccgggggatgtctgatctctccatcgtctctctctctttttcatcgcttcttccagtgtcttctacgaattccgtttcga

SEQ ID NO: 57190 - DNA, 397 bp, Glycine max
  unsure (1)..(397): unsure at all n locations
ggcacaagtgagtttgttgatcgagataactagaaacagtgtgatgaaaatgaaggtccttgttttcttcgttgctacaattttggtagcatggcaatgccatgcgtacgatatgttccctctccgaatgaacactggctatggtgcccgtactccggaggtgaaatgcgcaagttggaggcttgctgtggaagcacacaacatctttggctttgagaccattcctgaagagtgcgttgaagcaacaaaggaatacatccatggcgaacaatatagatcagactccaaaacagttaaccaacaagcttacttttatgccagagacctcgaagtccatcccaaggacacatntgtgttcagtatagatggcaacgtactctctaatatttcatactac

SEQ ID NO: 57191 - DNA, 328 bp, Glycine max
ggcacaagtgagtttgttgatcgagataactagaaacagtgtgatgaaaatgaaggtccttgttttcttcgttgctacaattttggtagcatggcaatgccatgcgtacgatatgttccctctccgaatgaacactggctatggtgcccgtactccggaggtgaaatgcgcaagttggaggcttgctgtggaagcacacaacatctttggctttgagaccattcctgaagagtgcgttgaagcaacaaaggaatacatccatggcgaacaatatagatcagactccagaacagttaaccaacaagcttacttttatgccagagacctc

SEQ ID NO: 57192 - DNA, 214 bp, Glycine max
gacaccgattcgcataacaagaaacaatcgatcatagtttcacgtcggccttatccactttacggtttcggttctctacactaactttcacgtatcgaatccttacatttcacatcaggtcagagcaatctggttggtagaacctttggtcttagtcactcaagttttacgtccgaattaaacgatcaaaatcctactgccttcgatccttctg

SEQ ID NO: 57193 - DNA, 392 bp, Glycine max
ggcacttcaattgcaatcaaattagttcattctctttgcgcagttccctacctctcctttcaagatgcagatcttcgtcaagaccctcaccggaaagagcatcacccttgaggtggaaagctctgacaccatcgacaacgtcaaggccaagatccaggacaaggaaggaattcccccggatcagcaacgtctcatcttcgccggaaagcagctcgaggacggccgtaccctcgccgactacaacatccagaaggagtcaacccttcaccttgtccttcgtctccgtggtggcatgcagatcatcgtcaagactctcactggcaaaaccataaccctagaggtcgaaagctctgacaccattgacaacgtcaaggccaagatccaggacaagg

SEQ ID NO: 57194 - DNA, 396 bp, Glycine max
gaaggtgcaagagtttgttgtgagctataagctagtttatcgtgaggagaatatgaagttgtttgttttctttgttgctgcagtagttttggtagcatggccatgccatggcgcaggctaccaaaggttccctctccgaatgaaaactggctatggtgagcgttcttcggaggtaaaatgcgcaagttttaggcttgctgtggaagcacacaacatccgagcctttaaaaccattcctgaagagtgcgttgaaccaacagaggactacattaatggcgaacaatttagatcagactctaaaacagttaaccaacaagctttcttttatgctagtgaacgcgaagtccatcacaacgacatatttatattcggcatagataacaccgtactctctaa

SEQ ID NO: 57195 - DNA, 289 bp, Glycine max
gactacgagaggaagcgaaaggaatcacaatcacgttttgcgacaaaatgagaaacagcgctttcggtttaagcagcaccgttaacaatgtttttcatattggattcggggtaggcacggacatccgcctgagattgctcacccaaaacctctggtctcctcttctgatctcacagagttccctaatctccctcgcactttcgacgacgttcgctctccactccaactcaaatttagccatcaacccctacccaattactttgacttctagcaaatcggaccttgcact

SEQ ID NO: 57196 - DNA, 387 bp, Glycine max
ggcacaagtttgttgagatagctagaagcaataagatgaaaatgaaagtgcttgttttgtttgttgctacagttttggtagcatatgaatgccatggctcagactaccagaagttccctctccaaatgaaaactgggtttggtgggcaatacagcaatgaggtggcatgtgccagttggaggcttggcgtggaagcaaacaacgtagtcaagtggcaaactgttcctgcagcttgcggagagtacatagctgactacgttctaggagaccaatatagatcagattccaaaacagttaaccaacaagcttatttctatgctaaatccctcaaactcaccaacaaagatgtctttgtcctggacgttgacgacactactctctctaatc

SEQ ID NO: 57197 - DNA, 212 bp, Glycine max
gaaacaaagtctcttctacgggcaattccttcggcgttatgatctcaccagtcccgtcaggcgcctgaaccttgtcctccatcgggcatggctgagaacagccacagggagtttttgcaatcgccacccttgtctctgagcacgacgtaggctccgtcgcggaaggcagacagctgaggtgggagatgcatctgtgcatcgaatgctgttcg

SEQ ID NO: 57198 - DNA, 321 bp, Glycine max
ggcacaagtgagtttgttgatcgagataactagaaacagtgtgatgaaaatgaaggtccttgttttcttcgttgctagggttttggtagcatggcaatgccatgcgtacgatatgttccctctccgaatgaacactggctatggtgcccgtactccggaggtgaaatgcgcaagttggaggcttgctgtggaagcacacaacatctttggctttgagaccattcctgaagagtgcgttgaagcaacagaggaatacatccatggcgaacaatatagatcagactccagatcagttgagcaacaggcttacttttatgccag

SEQ ID NO: 57199 - DNA, 346 bp, Glycine max
  unsure (1)..(346): unsure at all n locations
ggcacaagtttgttgagatagctagaagcaataagatgaaaatgaaagtgcttgttttgtttgttgctacagttttggtagcatatgaatgccatggctcagactaccagaagttccctctccaaatgaaaactgggtttggtgggcaatacagcaatgaggtggcatgtgccagttggaggcttggcgtggaagcaaacaacgtagtcaagtggcaaactgttcctgcagcttgcggagagtacatagctgactacgttctangagaccaatatagatcagattccaaaacagttaaccaacaagcttatttctatgctaaatccctcaaactcaccaacaaaga

SEQ ID NO: 57200 - DNA, 387 bp, Glycine max
  unsure (1)..(387): unsure at all n locations
ggcacaagtgagtttgttgatcgagataactagaaacagtgtgatgaaaatgaaggtccttgttttcttcgttgctacaattttggtagcatggcaatgccatgcgtacgatatgttccctctccgaatgaacactggctatggtgcccgtactccggaggtgaaatgcgcaagttggaggcttgctgtggaagcacacaacatctttggctttgagaccattcctgaagagtgcgttgaagcaacaaaggaatacatccatggcgaacaatatagatcagactccaaaacagttaaccaacaagcttacttttatgccagagacctcgaagtccatcncaaggacacatttgtgttcagtatagatggcaccgtactctctaatat

SEQ ID NO: 57201 - DNA, 397 bp, Glycine max
caacaaaagggggatccacaattttgttgaaatacctaaaattaatgaaatgaaaatgaaattgcttgttttgtttgttgctacagttttggtagcatatgaatgccatggctcagactaccagaagttccctctccaaatgaaaactgggtttggtgggcaatacagcaatgaggtggcatgtgccagttggaggcttggcgtggaagcaaacaacgtagtcaagtggcaaactgttcctgcagcttgcggagagtacatagctgactacgttctaggagaccaatatagatcagattccaaaacagttaaccaacaagcttatttctatgctaaatccctcaaactcaccaacaaagatgtctttgtcttggacgttgacgacactactctctct

SEQ ID NO: 57202 - DNA, 97 bp, Glycine max
gcaaaaagacaacagaagggggagatttccattctctggcgctctgtgtctctatgatccgcttctaacggtccaaaatgttcggggcctgtgtcgc

SEQ ID NO: 57203 - DNA, 383 bp, Glycine max
gaaggtgcaagagtttgttgtgagctataagctagtttatcgtgaggagaatatgaagttgtttgttttctttgttgctgcagtagttttggtagcatggccatgccatggcgcaggctaccaaaggttccctctccgaatgaaaactggctatggtgagcgttcttcggaggtaaaatgcgcaagttttaggcttgctgtggaagcacacaacatccgagcctttaaaaccattcctgaagagtgcgttgaaccaacaaaggactacattaatggcgaacaatttagatcagactctaaaacagttaaccaacaagctttcttttatgctagtgaacgcgaagttcatcacaacgacatatttatattcggcatagataaca

SEQ ID NO: 57204 - DNA, 358 bp, Glycine max
ggcacaagtgagtttgttgatcgagataactagaaacagtgtgatgaaaatgaaggtccttgttttcttcgttgctacaattttggtagcatggcaatgccatgcgtacgatatgttccctctccgaatgaacactggctatggtgcccgtactccggaggtgaaatgcgcaagttggaggcttgctgtggaagcacacagcatctttggctttgagaccattcctgaagagtgcgttgaagcaacaaatgaatacatccatggcgaacaatatagatcagactccacaacagttaaccaacaagcttacttttatgccagacacctcgaagtccatcccaaggacacatttgtgttc

SEQ ID NO: 57205 - DNA, 382 bp, Glycine max
  unsure (1)..(382): unsure at all n locations
ggttctagtgtgtgattgtttgttgttgtaactcgttcttcttcttttgttgttctgtgtttgtgtttgttttttctctcacctgaaaatgtcttgctgcggtggtaactgtggttgcggaagctcctgcaagtgcggcaacggctgcggaggctgcaagatgtacccagacttgagctacactgagtcaaccaccaccgagaccttggtcatgggagtggcacctgttaaggctcaatttgagggtgctgaaatgggtgtgcccgctgagaacgatggctgcaaatgtggaccaaactgctcctgcaacccctgcacttgcaagtgangtgttgggagagcaagcttcaagcagagatagcccttaattaggaataatgat

SEQ ID NO: 57206 - DNA, 402 bp, Glycine max
ggcacaattgattttgttgatcgagataactagaaacagtgtgatgaaaatgaaggtccttgttttcttcgttgctacaattttggtagcatggcaatgccatgcgtacgatatgttccctctccgaatgaacactggctatggtgcccgtactccggaggtgaaatgcgcaagttggaggcttgctgtggaagcacacaacatctttggctttgagaccattcctgaagagtgcgttgaagcaacaaaggaatacatccatggcgaacaatatagatcagactccaaaacagttaaccaacaagcttacttttatgccagagacctcgaagtccatcccaaggacacatttgtgttcagtatagatggcaacgtactctctaatattccatactacaaaaa

SEQ ID NO: 57207 - DNA, 397 bp, Glycine max
gaaggtgcaagagtttgttgtgagctataagctagtttatcgtgaggagaatatgaagttgtttgttttctttgttgctgcagtagttttggtagcatggccatgccatggcgcaggctaccaaaggttccctctccgaatgaaaactggctatggtgagcgttcttcggaggtaaaatgcgcaagttttaggcttgctgtggaagcacacaacatccgagcctttaaaaccattcctgaagagtgcgttgaaccaacaaaggactacattaatggcgaacaatttagatcagactctaaaacagttaaccaacaagctttcttttatgctagtgaacgcgaagtcgatcacaacgacatatttatattcggcatagataacaccgtactctctaat

SEQ ID NO: 57208 - DNA, 380 bp, Glycine max
  unsure (1)..(380): unsure at all n locations
ggcacaagtgagtttgttgatcgagataactagaaacagtgtgatgaaaatgaacgtccttgttttcttcgttgctacaattttggtagcatggcaatgccatgcgtacgatatgttccctctccgaatgaacactggctatggtgcccgtactccggaggtgaaatgcgcaagttggaggcttgctgtggaagcacacaacatctttggctttgagaccattcctgaagagtgcgttgaagcaacaaaggaatacatccatggcgaacaatatagatcagactccaaaacagttaaccaacaagcttacttttacgccagagacctcgaagtcnatcccaaggacacatttgtgttcagtatagatggcaccgtactct

SEQ ID NO: 57209 - DNA, 384 bp, Glycine max
ggatgcacaagtttgttgagatagctagaagcaataagatgaaaatgaaagtgcttgttttgtttgttgctacagttttggtagcatatgaatgccatggctcagactaccagaagttccctctccaaatgaaaactgggtttggtgggcaatacagcaatgaggtggcatgtgccagttggaggcttggcgtggaagcaaacaacgtagtcaagtggcaaactgttcctgcagcttgcggagagtacatagctgactacgttctaggagaccaatatagatcagattccaaaacagttaaccaacaagcttatttctatgctaaatccctcaaactcaccaacaaagatgtctttgtcttggacgttgacgacactactctct

SEQ ID NO: 57210 - DNA, 308 bp, Glycine max
cgcgtccatgaggagacgacagaaggggaaagtggggttgggtgtgatacacaagacattcgagcctaatgttgctctcttacaccaaccaagcacctctcactccttcatcttcgctttcagcacagtcgcaaattgcgcagcaggatatgcaaatctcttcgctcgtcaccagatcatccaaaatgatgaatcatgattccgaggactaacagcatcacattctccatgccaccgatgacgacgagatgttggacacgctgatgggaggtcacgacgactacggatcatcagttcaccatcaccaa

SEQ ID NO: 57211 - DNA, 131 bp, Glycine max
gatactcctctcatgcatctacagtattcacatctccatttccagattcatctgacatcattacaatacttgattcctctggaacggtcggggtctcttgtgacttctgagtcttgcattgtcatcttctt

SEQ ID NO: 57212 - DNA, 216 bp, Glycine max
ggttctctgcgcttgcctctatggttatcatttcaccatttccagtttttcgctgctccttgcattctgccactcacaaggatacgggtccaccgacatgtaaatgttccgtctctcaatgacgtcttctttaggtggacaatacagcaatgcattggtacgtgccatttagccgcttcgcttcttctcagtcaaccacctcactttgcgggctgt

SEQ ID NO: 57213 - DNA, 339 bp, Glycine max
ggagcgaagaagatattagggtttttgagtgcggtgcggcgatcctagcactctcttctgcagctttcgccgacagcttcattcaccatggctgagcaaaccgagaaggcttttttgaaacaaccaaaagtgtttctcagctcgaagaaaactgggaagggaaagagacccggaaagggtgggaaccgcttttggaaatccattgggcttggatttaagactcccaggggagccatcgaaggaacctacattgacaagaagtgccccttcactggcaatgtttccatccgtggccgtatcttggctggaacatgtcacagtgctaagatgaacaggact

SEQ ID NO: 57214 - DNA, 391 bp, Glycine max
  unsure (1)..(391): unsure at all n locations
caaaaaaacaacagaagggggaaaaattttgttgaaatacctaaaaccattaaaatgaaattgaaattgcttgttttgtttgttgctacagtttttggtagcatatgaatgccatggctcagactaccagaagttccctctccaaatgaaaactgggtttggtgggcaatacagcaatgaggtggcatgtgccagttggaggcttggcgtggaagcaaacaacgtagtcaagtggcaaactgttcctgcagcttgcggagagtacatagctgactacgttcangagacaatataatcaatcaaaacattacaaaagctattcatgcaaatccccaactcacagcanagatgtctttgtcttggacgttgacgacactactctctctaatct

SEQ ID NO: 57215 - DNA, 386 bp, Glycine max
  unsure (1)..(386): unsure at all n locations
ggcacaagtgagtttgttgatcgagataactagaaacagtgtgatgaaaatgaaggtccttgttttcttcgttgctacaattttggtagcatggcaatgccatgcgtacgatatgttccctctccgaatgaacactggctatggtgcccgtactccggaggtgaaatgcgcaagttggaggcttgctgtggaagcacacaacatctttggctttgagaccattcctgaagagtgcgttgaagcaacaaaggaatacatccatggcgaacaatatagatcagactccaaaacagttaaccaacaagcttacttttatgccagagacctcgaagtcaatcncaaggacacatttgtgttcagtatagatggcaacgtactctctaata

SEQ ID NO: 57216 - DNA, 390 bp, Glycine max
ggcacaagtttgttgagatagctagaagcaataagatgaaaatgaaagtgcttgttttgtttgttgctacagttttggtagcatatgaatgccatggctcagactaccagaagttccctctccaaatgaaaactgggtttggtgggcaatacagcaatgaggtggcatgtgccagttggaggcttggcgtggaagcaaacaacgtagtcaagtggcaaactgttcctgcagcttgcggagagtacatagctgactacgttctaggagaccaatatagatcagattccaaaacagttaaccaacaagcttatttctatgctaaatccctcaaactcaccaacaaagatgtctttgtcttggacgttgacgacactactctctctaatctcc

SEQ ID NO: 57217 - DNA, 420 bp, Glycine max
aaaaaacaacaaaagggggaaaaattgatttggttgttcaaaataactaaaaacattgtgataaaaatgaaggtcccttgtttttcttccgttgctacaattttggtagcatggcaatgccatgcgtacgatatgttccctctccgaatgaacactggctatggtgcccgtactccggaggtgaaatgcgcaagttggaggcttgctgtggaagcacacaacatctttggctttgagaacattcctgaagagtgcgttgaagcaacaaaggaatacatccatggcgaacaatatagattagactccaaaacagttaaccaacaagcttacttttatgccagagacctcgaagtccatcgcaaggacacatttgtgttcagtatagatggcaccgtactctctaatattccatactacaaa

SEQ ID NO: 57218 - DNA, 284 bp, Glycine max
gacggttcaagagtttgttgtgagctactagctactttatcgtgaggataataggcctttgtttcttctctgcgttgcttttggtgtcatggtagcaccgtgcttccaaggtgtccgctctcgaaagttccatcgcctatgtgagcccgtgctcaggtggtggtacctccgaggtagaagcctcctgttgtaggcctgctgatcattgcgcattgcaaccaatcctttagaatgcttcgtggaaagtgcgttgtacctccatgggaattcatttatgtcaaacc

SEQ ID NO: 57219 - DNA, 390 bp, Glycine max
ggcacaagtttgttgagatagctagaagcaataagatgaaaatgaaagtgcttgttttgtttgttgctacagttttggtagcatatgaatgccatggctcagactaccagaagttccctctccaaatgaaaactgggtttggtgggcaatacagcaatgaggtggcatgtgccagttggaggcttggcgtggaagcaaacaacgtagtcaagtggcaaactgttcctgcagcttgcggggagtacatagctgactacgttctaggagaccaatatagatcagattccaaaacagttaaccaacaagcttatttctatgctaaatccctcaaactcaccaacaaagatgtccttgtcctggacgttgacgacactactctctctaatctca

SEQ ID NO: 57220 - DNA, 274 bp, Glycine max
  unsure (1)..(274): unsure at all n locations
ggcacaagtgagtttgttgatcgagataactagaaacagtgtgatgaaaatgaaggtccttgttttcttcgttgctacaattttggtagcatggcaatgccatgcgtacgatatgttccctctccgaatgaacactggctatggtgcccgtactccggaggtgaaatgcgcaagttggaggcttgctgtggaagcacacaacatctttggctttgagaccattcctgaagagtgcgttgaagcaacanaggaatacatccatggcgaacaatat

SEQ ID NO: 57221 - DNA, 389 bp, Glycine max
gacaagtttgttgagatagctagaagcaataagatgaaaatgaaagtgcttgttttgtttgttgctacagttttggtagcatatgaatgccatagctcagactaccagaagttccctctccaaatgaaaactgggtttggtgggcaatacagcaatgaggtggcatgtgccagttggaggcttggcgtggaagcaaacaacgtagtcaagtggcaaactgttcctgcagcttgcggggagtacatagctgactacgttctaggagaccaatatagatcagattccaaaacagttaaccaacaagcttatttctatgctaaatccctcaaactcaccaacaaagatgtctttgtcttggacgttgacgacactactctctctaatctcca

SEQ ID NO: 57222 - DNA, 208 bp, Glycine max
gactcgctagttcaaaccactctaaacaatatggtggtgcctctactccctaataagattgttactacaatggtgaaaacattcaagaggcctcacacagacaagaaaattctgtcacgacaaactggaacagactatagggtaccgaatcccatgtaaggagaatgttcaaggtatgcactttgattccaaacattgaatatggttc

SEQ ID NO: 57223 - DNA, 155 bp, Glycine max
ggaacctaattgaggttttgcctttgccacttcaaaaccagattttcatcattcgtccttctgtgatgacttcttccagtatgtgcacgtgagggcaaccacaggagttgcataagtacatttatgagatccttcagatcacgctgaacgcaaat

SEQ ID NO: 57224 - DNA, 400 bp, Glycine max
gcacaagtgagtttgttgatcgagataactagaaacagtgtgatgaaaatgaaggtccttgttttcttcgttgctacaattttggtagcatggcaatgccatgcgtacgatatgttccctctccgaatgaacactggctatggtgcccgtactccggaggtgaaatgcgcaagttggaggcttgctgtggaagcacacaacatctttggctttgagaccattcctgaagagtgcgttgaagcaacaaaggaatacatccatggcgaacaatatagattagactccaaaacagttaaccaacaagcttacttttatgccagagacctcgaagtccatcccaaggacacatttgtgttcagtatagatggcaccgtactctctaatattccatactacaaaa

SEQ ID NO: 57225 - DNA, 379 bp, Glycine max
ggtgcacaagtgagtttgttgatcgagataactagaaagagtgtgatgaaaatgaaggtccttgttttcatcgttgctacaattttggtagcatggcaatgccatgcgtacgatatgttccctctccgaatgaacactggctatggtgcccgtactccggaggtgaaatgcgcaagttggaggcttgctgtggaagcacacaacatctttggctttgagaccattcctgaagagttcgttgaagcaacaaaggaatacatccatggcgaacaatatagatcagactccaaaacagttaaccaagaagcttacttttatgccagagacctcgaagtccatcccaaggacacatttgtgttcagtatagatggcaccgtac

SEQ ID NO: 57226 - DNA, 353 bp, Glycine max
  unsure (1)..(353): unsure at all n locations
ggtgcacaagtgagtttgttgatcgagataactagaaacagtgtgatgaaaatgaaggtccttgttttcttcgttgctacaattttggtagcatggcaatgccatgcgtacgatatgttccctctccgaatgaacactggctatggtgcccgtactccggaggtgaaatgcgcaagttggaggcttgctgtggaagcacacaacatctttggctttgagaccattcctgaagagtgcgttgaagcaacanaggaatacatccatggcgaacaatatagatcagactccanaacagttaaccaacaagcttacttttatgcaagagacctcgaagtccatcccaaggacacatt

SEQ ID NO: 57227 - DNA, 346 bp, Glycine max
ggcacaagtgagtttgttgatcgagataactagaaacagtgtgatgaaaatgaaggtccttgttttcttcgttgctacaattttggtagcatggtaatgccatgcgtacgatatgttccctctccgaatgaacactggctatggtgcccgtactccggagttgaaatgcgcaagttggaggcttgctgtggaagcacacaacatctttggctttgagaccattcctgaagagtgcgttgaagcaacaaaggaatacatccatggcgaacaatatagatcagactccaaaacagttaaccaacaagcttacttttatgccagagacctcgaagttcatcccaaggac

SEQ ID NO: 57228 - DNA, 265 bp, Glycine max
agaaacagtaagtccacgcaatacatattttaagcgctgtatcaccaagtttggaaggcttttggggtacccggtgagacacagtggattcattagatctccatggatatggagctctgttctgtagccatcatctctctttttcgttttcattattggcttactaatgtgccctgtagttgatttctgatatccacaggagaagatatgaatgtgaagcacatcgtgttgtggttcggaaacctctgactctgtctgttgccat

SEQ ID NO: 57229 - DNA, 233 bp, Glycine max
gagtgcacaagtgagtttgttgatcgagataactagaaacagtgtgatgaaaatgaaggtccttgttttcttcgttgctacaattttggtagcatggcaatgccatgcgtacgatatgttccctctccgaatgaacactggctatggtgcccgtactccggaggtgaaatgcgcaagttggaggcgtgctgtggaagcacacaacatctctggggttgagaccatatcctgaa

SEQ ID NO: 57230 - DNA, 367 bp, Glycine max
ggcacaagtgagtttgttgatcgagataactagaaacagtgtgatgaaaatgaacgtccttgttttcttcgttgcgacaattttggtagcatggcaatgccatgcgtacgatatgttccctctccgaatgaacactggctatggtgcccgtactccggaggtgaaatgcgcaagttggaggcttgctgtggaagcacacaacatctttggctttgagaccattcctgaagagtgcgttgaagcaacaaaggaatacatccatggcgaacaatatagatcagactccaaaacagttaaccaacaagcttacttttatgccagagacctcgaagtccatcccaaggacacatttgtgttcagtatagat

SEQ ID NO: 57231 - DNA, 355 bp, Glycine max
aaacaacagagaggaaggcacatggaacaatcttcagggattgtccagcaacagggaagacaaccctgcgtgcccaagatctcaactttgcgaatgaggttgcaggttcagcagatgagcaacttgtggtcctctgtgactcagtcgtgatacgatacgggcaatagttcgaccagggccataaaacatgaagtattaactaacttctgatgatatgcctggcatgcatgataacattcattatgcaggacaagtgcactatgtggatgcaatgttcacggcccttgctcacgaacatggaattggcatatacatacccatgcattacgaaagcctctgcacagtttacattcta

SEQ ID NO: 57232 - DNA, 211 bp, Glycine max
ggcacaagtgagtttgttgatcgagataaccacaaacagtgtgattaaaatgaaggtccttgttttcctcgttgctacaattttggtatcatggcaatgccatgcgtacgatatgttcactctccgaatgaacactggctatggtgcccgtactcaggaggtgaaatgcgcaagttggatgcttgctgtggaagcacacagcatctttggc

SEQ ID NO: 57233 - DNA, 338 bp, Glycine max
  unsure (1)..(338): unsure at all n locations
ggtattgtagaactgaacaagggtttctctttctctttctctgtctgcttcttcactttctctcgtttcaatcgaaaaaaatcatgggcagaaaattcttcgtcggtggcaactggaaatgcaatgggaccactgaggaggtgaagaagattgttactactttaaatgaagctaaagtccctggagaagatgttgtanaagttgttgtgagccctccttttgtgttccttccttttgtaaaaagtttgctgcgccctgatttccatgtctcggcccaaaattgttgggttcgcaaaggtggtgcttatactggagaagttagtgctgaaatgcttgtt

SEQ ID NO: 57234 - DNA, 377 bp, Glycine max
ggcacaagtgagtttgttgatcgagataactagaaacagtgtgatgaaaatgaacgtccttgttttcttcgttgctacaattttggtagcatggcaatgccatgcgtacgatatgttccctctccgaatgaacactggctatggtgcccgtactccggaggtgaaatgcgcaagttgggggcttgctgtggaagcacacaacatctttggctttgagaccattcctgaagagtgcgttgaagcaacgaaggaatacatccatggcgaacaatatagatcagactccagaacagttaaccaacaagcttacttttatgccagagacctcgaagtccatcgcaaggacacatttgtgttcagtatagatggcaccgtac

SEQ ID NO: 57235 - DNA, 299 bp, Glycine max
ttgttgttagatataactaatttagtgtgatgagaatataagtctgtgtgttctccttcgctacaaatttggggcagggcaatgccatgcctacgagcagtgctctctccgtttcctcaccgactataaagtgcctattctgaacgtgctatgcgcagattatgggcatgttgtaggcgtacacatcaacactagagtatccaccactctataaacattccttaaaactgcgttggaatacatccagggcaaataataggcaataaactccaatcaaattctacaacaatcttacattt

SEQ ID NO: 57236 - DNA, 363 bp, Glycine max
ggcacaagtgagtttgttgatcgagataactagaaacagtgtgatgaaaatgaaggtccttgttttcttcgttgctacaattttggtagcatggcaatgccatgcgtacgatatgttccctctccgaatgaacactggctatggtgcccgtactccggaggtgaaatgcgcaagttggaggcttgctgtggaagcacacaacatctttggctttgagaccattcctgaagagtgcgttgaagcaacaaaggaatacatccatggcgaacaatatagatcagactccaatacagttaaccaacaagcttacttttatgccagagacctcgaagtccatcccaaggacacatttgtgttcagtat

SEQ ID NO: 57237 - DNA, 390 bp, Glycine max
gaaggtgcaagagtttgttgtgagctataagctagtttatcgtgaggagaatatgaagttgtttgttttctttgttgctgcagtagttttggtagcatggccatgccatggcgcaggctaccaaaggttccctctccgaatgaaaactggctatggtgagcgttcttcggaggtaaaatgcgcaagttttaggcttgctgtggaagcacacaacatccgagcctttaaaaccattcctgaagagtgcgttgaaccaacaaaggactacattaatggcgaacaatttagatcagactctaaaacagttaaccaacaagctttcttttatgctagtgaacgcgaagtccatcacaacgacatatttatattcggcatagataacaccgtact

SEQ ID NO: 57238 - DNA, 176 bp, Glycine max
agggacaagcccatgtgattgatgtcccattccaactcccataacatgaagacattacttgatgacgtcgttcctcatcatgctaatagacgagtcgtgggtaaatccatctcccagaacaagataccgcagtctcgctcgccgccagtgtgcacattctgtacaactcgctctcc

SEQ ID NO: 57239 - DNA, 276 bp, Glycine max
ggcacaagtgagtttgttgatcgagataactataagcagtgtgatgaaaatgaaagtccttggtttcttcgttgctacaattttggtagcatggcaatgccatgcgtacgacatgttccctctccgaatgaacactggctacggtgcccgtactccggaggtgaaatgcgcaagttggaggcttgctgtggaagcacactatatctttggctttgagaccattcctgaagagtgcgttgatgcagctaatgaatacatccatggcgaataatatat

SEQ ID NO: 57240 - DNA, 333 bp, Glycine max
ggcacaagtttgttgagatagctagaagcaataagatgaaaatgaaagtgcttgttttgtttgttgctacagttttggtagcatatgaatgccatggctcagactaccagaagttccctctccaaatgaaaactgggtttggtgggcaatacagcaatgaggtggcatgtgccagttggaggcttggcgtggaagcaaacaacgtagtcaagtggcaaactgttcctgcaacttgcggagagtacatagctgactacgttctaagagaccaatatagatcagattccaaaacagttaaccaacaagcttatttctatgccaaatccctcaaac

SEQ ID NO: 57241 - DNA, 373 bp, Glycine max
gacttctcttcacacctttgttcactcttcttctcttgcggctagggttttagcgcagcttcttctagatttaaggaagatgggtaaggaaaaggttcacatcagtattgtggtcattggccatgtcgactctgggaaatccactaccactggtcacctgatttacaagcttggaggcattgacaagcgtgttattgagaggtttgagaaggaagctgctgagatgaacaagaggtctttcaagtatgcctgggtgctggacaaacttaaggctgagcgtgaaagaggaatcaccattgatattgctttgtggaagtttgaaacaacaaagtattattgcacagttattgatgcgcctggacatagggatttc

SEQ ID NO: 57242 - DNA, 362 bp, Glycine max
ggcacaagtgagtttgttgatcgagataactagaaacagtgtgatgaaaatgaaggtccttgttttcttcgttgctacaattttggtagcatggcaatgccatgcgtacgatatgttccctctccgaatgaacactggctatggtgcccgtactccggaggtgaaatgcgcaagttggaggcttgctgtggaagcacacaacatctttggctttgagaccattcctgaagagtgcgttgaagcaacaaaggaatacatccatggcgaacaatatagatcagactccaaaacagttaaccaacaagcttacttttatgccagagacctcgaagtccatcccaaggacacatttgtgttcagta

SEQ ID NO: 57243 - DNA, 137 bp, Glycine max
ggatctcctcaaaactcaagcattgcatccctcttgaattgtaatttgttttgtgcttcatataaaagttctgccaaatcaagacggggtttaagatcataatgtgtgttttgcaacaatgcgcaaattctttgctg

SEQ ID NO: 57244 - DNA, 381 bp, Glycine max
  unsure (1)..(381): unsure at all n locations
gatgcacaagtttgttgagatagctagaagcaataagatgaaaatgaaagtgcttgttttgtttgttgctacagttttggcagcatatgaatgccatggctcagactaccagaagttccctctccaaatgaaaactgggtttggtgggcaatacagcaatgaggtggcatgtgccagttggaggcttggcgtggaagcaaacaacgtagtcaagtggcaaactgttcctgcagcttgcggagagtacatagctgactacgttctangagaccaatatagatcagattccaaaacagttaaccaacaagcttatttctatgctaaatccctcaaactcaccaacaaagatgtctttgtcttggacgttgacgacactactct

SEQ ID NO: 57245 - DNA, 376 bp, Glycine max
cgggattcatggcaatgttcatggccttaatggcatgcaattgttcaacattggtctctgcttccctacaaaccatgcatgtttcaaccaggggatcagcaccatcaacatcgttaggtccccctctatacaactctcctaccatgtcaccacatattgagcctttgtttccaactcctgcaggttctgcattctctccaacagactcctcatgatcccacacttcattcaattcttaaccctcccaaccgctgatgtcaccagtaatccatagtcattattggcttttccaccttcagagtctacgtaagttaaggccacatcttccaagggtgaatcactgccactttattcatttttacatcatgccattctg

SEQ ID NO: 57246 - DNA, 302 bp, Glycine max
ggcacaagtgagtttgttgatcgagataactagaaacagtgtgatgaaaatgaaggtccttgttttcttcgttgctacaattttggtagcatggcaatgccatgcgtacgatatgttccctctccgaatgaacactggctatggtgcccgtactccggaggtgaaatgcgcaagttggaggcttgctgtggaagcacacaacatctttggctttgagaccattcctgaagagtgcgttgaagcaacaaaggaatacatccatggcgaacaatatagatcagactccaaaacagttaaacaac

SEQ ID NO: 57247 - DNA, 340 bp, Glycine max
ggcagtaggcagaggtattgtcgatttaaagaagcaaatcctcgatgaggaaagtgcacaagtgagtttgttgatcgagataactagaaacagtgtgatgaaaatgaaggtccttgttttcctcgttgctacaattttggtagcatggcaatgccatgcgtacgatatgttccctctccgaatgaacactggctatggtgcccgtactccggaggtgaaatgcgcaagttggaggcttgctgtggaagcagacaacatctttggctttgagaccattcctgaagagtgcgttgatgcaccataagaatacatccatggcgaacaatacagatcagactcc

SEQ ID NO: 57248 - DNA, 359 bp, Glycine max
ggtgcacaagtgagtttgttgatcgagataactagaaacagtgtgatgaaaatgaaggtccttgttttcttcgttgctacaattttggtagcatggcaatgccatgcgtacgatatgttccctctccgaatgaacactggctatggtgcccgtactccggaggtgaaatgcgcaagttggaggcttgctgtggaagcacacaacatctttggctttgagaccattcctgaagagtgcgttgaagcaacaaaggaatacatccatggcgaacaatatagatcagactccaaaacagttaaccaacaagcttacttttatgccagagacctcgaagtccatccaaagacacatttgtgttc

SEQ ID NO: 57249 - DNA, 354 bp, Glycine max
ggcacaagtttgttgagatagctagaagcaataagatgaaaatgaaagtgcttgttttgtttgttgctacagttttggtagcatatgaatgccatggctcagactaccagaagttccctctccaaatgaaaactgggtttggtgggcaatacagcaatgaggtggcatgtgccagttggaggcttggcgtggaagcaaacaacgtagtcaagtggcaaactgttcctgcagcttgcggagagtacatagctgactacgttctaggagaccaatatagatcagattccaaaacagttagccaacaagcttatttctatgctaaatccctcaaactcaccaacaaagatgtctttg

SEQ ID NO: 57250 - DNA, 169 bp, Glycine max
ggtgctgaggacgaggagaatgaagaggatgaggaagacgacgacgatgaagcattgcagcccccaaagaaaagaaagaagtgaatttagtttaatcaagcctcccgtttgtaatgttatgtacgaatttggcttccaacttgcatgtttttacctttttgggtactaa

SEQ ID NO: 57251 - DNA, 355 bp, Glycine max
ggtgcacaagtgagtttgttgatcgagataactagaaacagtgtgatgaaaatgaaagtccttgttttcttcgttgctacaattttggtagcatggcaatgccatgcgtacgatatgttccctctccgaatgaacactggctatggtgcccgtactccggacgtgaaatgcgcaagttggaggcttgctgtggaagcacacaacatctttggctttgagaccattcctgaagagtgcgttgaagcaacatacgaatacatccagggccaacaatatagatcagactcaaaacagtttacaacaagcttaactttatgccagagacctccaagtccatctccaagacacatttgtg

SEQ ID NO: 57252 - DNA, 325 bp, Glycine max
gagtgcacaagtgagtttgttgatcgagataactagaaacagtgtgatgaaaatgaaggtccttgttttcttcgttgctacaattttggtagcatggcaatgccatgcgtacgatatgttccctctccgaatgaacactggctatggtgcccgtactccggaggtgaaatgcgcaagttggaggcttgctgtggaagcacacaacatctttggctttgagaccattcctgaagagtgtgttggagcaacaaaggaatacatccatggcgaacaatatagattagactccaaaacagttaaccaacaagcttacttttatgccaga

SEQ ID NO: 57253 - DNA, 302 bp, Glycine max
ggcacaagtgagtttgttgatcgatataactagaaacagtgtgatgaaaatgaatgtccttgttttcgtcgttgctacaattttggtagcgtggcaatgccatgcgtacgatatgttccctctccgaatgaacactggctatggtgcccgtactccggatgtgaaatgcgcaagttggaggcttgctgtggaagcacacaacatctttggctttgagaccattcctgaagagtgcgttgaagcatcataggaatacatctatggagaacactatagatcagactccacaacagttaaccaac

SEQ ID NO: 57254 - DNA, 384 bp, Glycine max
  unsure (1)..(384): unsure at all n locations
ggcacaagtttgttgagatagctagaagcaataagatgaaaatgaaagtgcttgttttgtttgttgctacagttttggtagcatatgaatgccatggctcagactaccagaagttccctctccaaatgaaaactgggtttggtgggcaatacagcaatgaggtggcatgtgccagttggaggcttggcgtggaagcaaacaacgtagtcaagtggcaaactgttcctgcagcttgcggagagtacatagctgactacgttctaggagaccaatatagatcagattccaaaacagttaaccaacaagcttatttctatgctaaatccctcaaactcaccaacanagatgtctttgtcttggacgttgacgacactactctctcta

SEQ ID NO: 57255 - DNA, 315 bp, Glycine max
gacaagtgagtttgttgatcgagataactagaaacagtgtgatgaaaatgaaggtccttgttttcttcgttgctacaattttggtagcatggcaatgccatgcgtacgatatgttccctctccgaatgaacactggctatggtgcccgtactccggaggtgaaatgcgcaagttggaggcttgctgtggaagcacacaacatctttggctttgagaccattcctgaagagtgcgttgaagcaacaaaggaatacatccatggcgaacaatatagattagactccaaaacagtttaccaacaagcttacttttatg

SEQ ID NO: 57256 - DNA, 308 bp, Glycine max
  unsure (1)..(308): unsure at all n locations
ggtgcagacgtgagtttgttgatcgagataactagaaacagtgtgatgaaaatgaacgtccttgatttcttcgttgctacaattttggtagcatggcaatgctatgcgtacgatatgttccctctccgaatgaacactggctatggtgcacgtactccggaggtgaaatgcacaagttggaggcttgctgtggaagcacacagcatctttggctttgagaccattcctgaagagtgcgttgaagcaacacaggaatacatccatggcgaacaatatagattagactcaancacagttaaccaacaagc

SEQ ID NO: 57257 - DNA, 329 bp, Glycine max
ggtgcacaagtgagtttgttgatcgagataactagaaacagggtgatgaaaatgaaggtccttgttttcttcgttgctacaattttggtagcatggcaatgccatgcgtacgatatgttccctctccgaatgaacactggctatggtgcccgtactccggaggtgaaatgcgcaacttggaggcttgctgtggaagcacacaacatctttggctttgagaccattcctgaagagtgcgttgaagcaacaaaggaatacatccatggcgaacaatatagatcagactccaaaacagttaaccaacaagcttacttttatgccagagacct

SEQ ID NO: 57258 - DNA, 315 bp, Glycine max
ggcacaagtgagtttgttgatcgagataactagaaacagtgtgatgaaaatgaaggtccttgttttcttcgttgctacaattttggtagcatggcaatgccatgcgtacgatatgttccctctccgaatgaacactggctatggtgcccgtactccggaggtgaaatgcgcaagttggaggcttgctgtggaagcacacaacatctttggctttgagaccattcctgaagagtgcgttgaagcaacaaaggaatacattcaatgggcgaacaatatagatcagactcccaaaacagtttaacaacaggcttactt

SEQ ID NO: 57259 - DNA, 386 bp, Glycine max
  unsure (1)..(386): unsure at all n locations
gaaggtgcaagagtttgttgtgagctataagctagtttatcgtgaggagaatatgaagttgtttgttttctttgttgctgcagtagttttggtagcatggccatgccatggcgcaggctaccaaaggttccctctccgaatgaaaactggctatggtgagcgttcttcggaggtaaaatgcgcaagttttaggcttgctgtggaagcacacaacatccgagcctttaaaaccattcctgaagagtgcgttgaaccaacanaggactacattaatggcgaacaatttagatcagactctaaaacagttaaccaacaagctttcttttatgctagtgaacgcgaagtccatcacaacgacatatttatattcggcatagataacaccg

SEQ ID NO: 57260 - DNA, 384 bp, Glycine max
ggcacaagtgagtttgttgatcgagataactagaaacagtgtgatgaaaatgaaggtccttgttttcttcgttgctacaattttggtagcatggcaatgccatgcgtacgatatgttccctctccgaatgaacactggctatggtgcccgtactccggaggtgaaatgcgcaagttggaggcttgctgtggaagcacacaacatctttggctttgagaccattccttgaagagtgcgttgaagcaacaaaggaatacatccatggcgaacaatatagatcagactccaaaacagttaaccaacaagcttacttttatgccagagacctcgaagtccatcccaaggacacatttgtgttcagtatagatggcaccgtactctcta

SEQ ID NO: 57261 - DNA, 148 bp, Glycine max
ggctgcagcttatcatcagcatctcgcccaagagagagagagagagatgcgcgaaaatgaccgtagcgactgcgatgatgcagggatcgagctttgtgatcgattgcgctaagccggtggacgacaccgttatggacattgcttctct

SEQ ID NO: 57262 - DNA, 327 bp, Glycine max
ggcacgagtgagtttgttgatcgagataactagaaacagtgtgatgaaaatgaaggtccttgttttcttcgttgctacaattttggtagcatggcaatgccatgcgtacgatatgttccctctccgaatgaacactggctatggtgcccgtactccggaggtgaaatgcgcaagttggaggcttgctgtggaagcacgcaacatctttggctttgagaccattcctgaagagtgcgttgaagcaacaaaggaatacatccatggcgaacaatatagatcagactccaaaacagttaaccaacaagcttacttttatgccagagaact

SEQ ID NO: 57263 - DNA, 303 bp, Glycine max
ggcacaagtgagtttgttgatcgagataactagaaacagtgtgatgaaaatgaatgtccttgttttcttcgatgctacaagtttggtaccatggcattgacatgcgtacgatatgttccgtctccgaatgaacactggctatggtgcccatactccggaggtgaaatgcgcaagttggaggcttgctgtggaagcacacaacatctttggctttgagaccattcctgaacagttcgttgaagcaacaaaggaatacatccatggcgaacaatataaattagactccaaaacagtttatcaaca

SEQ ID NO: 57264 - DNA, 379 bp, Glycine max
ggtgcacaagtgagtttgttgatcgagataactagaaacagtgtgatgaaaatgaaggtccttgttttcttcgttgctacaattttggtagcatggcaatgccatgcgtacgatatgttccctctccgaatgaacactggctatggtgcccgtactccggaggtgaaatgcgcaagttggaggcttgctgtggaagcacacaacatctttggctttgagaccattcctgaagagtgcgttgaagcaacaaaggaatacatccatggcgaacaatatagatcagactccaaaacagttaaccaacaagcttacttttatgccagagacctcgaagtccatcccaaggacacatttgtgttcagtatagatggcaccgtac

SEQ ID NO: 57265 - DNA, 350 bp, Glycine max
ggcacaagtgattttgttgatcaaaataactagaaccagtgtgatgaaaatgaaggtccttgttttcttcgttgctacaattttggtagcatggaaatgccatgcgtacaaaatgttccctctccgaatgaacactggctatggtgcccgtactccggaggtgaaatgcgcaatttggaggcttgctgtggaagcacacaaaatctttggctttgagaccattcctgaaaattgcgttgaagcagcaaaggaatacatccatggcgaacattatagatcagactccaaagcagttaaccaacaagcttacttttatgccagagacctcgaagtccatcccaaggacacat

SEQ ID NO: 57266 - DNA, 393 bp, Glycine max
ggcacaagtgagtttgttgatcgagataactagaaacagtgtgatgaaaatgaaggtccttgttttcttcgttgctacaattttggtagcatggcaatgccatgcgtacgatatgttccctctccgaatgaacactggctatggtgcccgtactccggaggtgaaatgcgcaagttggaggcttgctgtggaagcacacaacatctttggctttgagaccattcctgaagagtgcgttgaagcaacaaaggaatacatccatggcgaacaatatagatcagactccaaaacagttaaccaacaagcttacttttatgccagagacctcgaagtccatcccaatgacacatttgtgttcagtatagatggcaccgtactctctaatattccata

SEQ ID NO: 57267 - DNA, 207 bp, Glycine max
ggaacctgcttcctaactaactgagcgaacagcaggaagcatcgacgtaacagccactgctgaccggtttcaatgaaaccgtgtaagactttatttcagtcattcagcacgtggataccaagaggccaagtccaatcattcaggtgacaggtcaatcgtcgacattaagaatgtctgtatgcacggctctatcgcatgccactgtgc

SEQ ID NO: 57268 - DNA, 208 bp, Glycine max
cagggaagagaacacgatacagtttagtccggtaagcagaaatgagttccctctctaccacgaccgctaccaccatgaattccatgcctcagtcgagtgccactaactacaagatcaagttcagacaaaagataagcattttagaccttgagtctcattcaccatgtagcacgttaactgacacgatcacctcatcgacgattcgtgc

SEQ ID NO: 57269 - DNA, 392 bp, Glycine max
ggttggcagcgaaaggaagagacaagaggcttcacatcgagactcagcttcacctgtaatcagacaattgcggtcaacgtcgaagtcatatcattacgatgcaagtaaatgaagaacacaacaaaccttgctcagacccatttttacagtggagtcagtggcagttgcttgattctcttttacctacgggtggatttgctcattcttttggccttgaagcagcagttcagtgccacttagtgtctgattccaatgaccttaagacatttgttatccatatattggagaatacaggaagcttactccttccttttgtgtactcagcttccatgttgcccaatttagaaacttggcataagcttgacaaaatattggatgctaccctaactaat

SEQ ID NO: 57270 - DNA, 390 bp, Glycine max
ggcacaagtgagtttgttgatcgagataactagaaacagtgtgatgaaaatgaaggtccttgttttcttcgttgctacaattttggtagcatggcaatgccatgcgtacgatatgttccctctccgaatgaacactggctatggtgcccgtactccggaggtgaaatgcgcaagttggaggcttgctgtggaagcacacaacatctttggctttgagaccattcctgaagagtgcgttgaagcaacaaaggaatacatccatggcgaacaatatagatcagactccaatacagttaaccaacaagcttacttttatgccagagacctcgaagtccatcccaaggacacatttgtgttcagtatagatggcaccgtactctctaatattca

SEQ ID NO: 57271 - DNA, 336 bp, Glycine max
  unsure (1)..(336): unsure at all n locations
ggcacaagtttgttgagatagctagaagcaataagatgaaaatgaaagtgcttgttttgtttgttgctacagttttggtagcatatgaatgccatggctcagactaccagaagttccctctccaaatgaaaactgggtttggtgggcaatacagcactgaggtggcatgtgccagttggaggcttggcgtggaagcaaacaacgtactcaagtggcaaactgttcctgcagcttgcggagagtacatagctgactacgttctatgagaccaatatagatcagattccaaaacagttaaccaacaagcttatttctatgctaaatcactcanactca

SEQ ID NO: 57272 - DNA, 388 bp, Glycine max
ggcacaagtgagtttgttgatcgagataactagaaacagtgtgatgaaaatgaaggtccttgttttcttcgttgctacaattttggtagcatggcaatgccatgcgtacgatatgttccctctccgaatgaacactggctatggtgcccgtactccggaggtgaaatgcgcaagttggaggcttgctgtggaagcacacaacatctttggctttgagaccattcctgaagagtgcgttgaagcaacaaaggaatacatccatggcgaacaatatagatcagactccaatacagttaaccaacaagcttacttttatgccagagacctcgaagtccatcccaaggacacatttgtgttcagtatagatggcaccgtactctctaatatt

SEQ ID NO: 57273 - DNA, 341 bp, Glycine max
gagtttcatttttctcacgttctttctttctatcttttttttttttcaatgctcttactctataacctctgcttcgtttgttcattgtggtagaaactagaagtggatggtggtggctacaacttaacaacaacctctttgagcagttcaatggagcaagtgatgagacccaaatcaccattgccgggcttagttgattttcatgggaagcggaagcaaatggttaagattcacgttttggagagagagattggtttgcttcaggaggaattaaaatcacttgaaggccttaaccctgcttctacatgctgcaaagagcttgatgcctttgtagactctgt

SEQ ID NO: 57274 - DNA, 383 bp, Glycine max
ggcacaagtgagtttgttgatcgggataactagaaacagtgtgatgaaaatgaaggtccttgttttcttcgttgctacaattttggtagcatggcaatgccatgcgtacgatatgttccctctccgaatgaacactggctatggtgcccgtactccggaggtgaaatgcgcaagttggaggcttgctgtggaagtacacaacatctttggctttgagaccattcctgaagagtgcgttgaagcaacagaggaatacatccatggcgaacaatatagatcagactccaaaacagttaaccaacaagcttacttttatgccagagacctcgaagtccatcccaaggacacatttgtgttcagtatagatggcaccgtactctcta

SEQ ID NO: 57275 - DNA, 374 bp, Glycine max
ggcacaagtgagtttgttgatcgagataactagaaacagtgtgatgaaaatgaatgtccttgttttcttcgttgctacaattttggtagcatggcaatgccatgcgtacgatatgttccctctccgaatgaacactggctatggtgcccgtactccggatgtgaaatgcgcaagttggacgcttgctgtggaagcacacaacatctttggctttgagaccattcctgaagagtgcgttgaagcaacaaaggaatacatccatggcgaacaatatatatcagactccaaaacagttaaccaacaagcttacttttatgccagagacctcgaagtccatcccaaggacacatttgtgttcagtatagatggcaccg

SEQ ID NO: 57276 - DNA, 365 bp, Glycine max
ggcacaagtgagtttgttgatcgagataactagaaacagtgtgatgaaaatgaaggtccttgttttcttcgttgctacaattttggtagcatggcaatgccatgcgtacgatatgttccctctccgaatgaacactggctacggtgcccgtactccggaggtgaaatgcgcaagttggaggcttgctgtggaagcacacaacatctttggctttgagaccattcctgaagagtgcgttgaagcaacaaaggaatacatccatggcgaacaatatagattagactccaaaacagttaaccaacaagcttacttttatgccagagacctcgaagtccatcccaaggacacatttgtgttcagtatag

SEQ ID NO: 57277 - DNA, 380 bp, Glycine max
ggcacaagtgagtttgttgatcgagataactagaaacagtgtgatgaaaatgaaggtccttgttttcttcgttgctacaattttggtagcatggcaatgccatgcgtacgatatgttccctctccgaatgaacactggctatggtgcccgtactccggaggtgaaatgcgcaagttggaggcttgctgtggaagcacacaacatctttggctttgagaccattcctgaaaagtgcgttgaagcaacaaaggaattcatccatggcgaacaatatagattagactccaaaacagttaaccaacaagcttacttttatgccagagacctcgaagtccatcccaaggacacatttgtgttcagtatagatggcaccgtactct

SEQ ID NO: 57278 - DNA, 389 bp, Glycine max
ggcacaagtttgttgagatagctagaagcaataagatgaaaatgaaagtgcttgttttgtttgttgctacagttttggtagcatatgaatgccatggctcagactaccagaagttccctctccaaatgaaaactgggtttggtgggcaatacagcaatgaggtggcatgtgccagttggaggcttggcgtggaagcaaacaacgtagtcaagtggcgaactgttcctgcagcttgcggagagtacatagctgactacgttctaggagaccaatatagatcagattccaaaacagttaaccaacaagcttatttctatgctaaatccctcaaactcaccaacaaagatgtctttgtcttggacgttgacgacactactctctctaatctc

SEQ ID NO: 57279 - DNA, 383 bp, Glycine max
gactcaccacttcaaaacactcataacacaaagcacaaagcaaagctcatccttgagttaaaaaatggcagcagcttcttccatggctctctcatccccatccttggctggcaaggccgtgaagctgggcccatcagccccagaagtgggaagggtgagcatgaggaagaccgtcaccaagcaggtctcctcaggaagcccatggtacggcccagaccgagtcaagtacttgggcccattctctggcgagcccccgtcctacctaaccggtgagttcccaggcgactacggctgggacactgctgggctttccgcagacccagaaaccttcgccaagaaccgtgaactcgaagtgatccactccaggtgggccatgctcggag

SEQ ID NO: 57280 - DNA, 379 bp, Glycine max
  unsure (1)..(379): unsure at all n locations
gcacaagtgagtttgttgatcgagataactagaaacagtgtgatgaaaatgaaggtccttgttttcttcgttgctacaattttggtagcatggcaatgccatgcgtacgatatgttccctctccgaatgaacactggctatggtgcccgtactccggaggtgaaatgcgcaagttggaggcttgctgtggaagcacacaacatctttggctttgagaccattcctgaagagtgcgttgaagcaacanaggaatacatccatggcgaacaatatagattagactccaaaacagttaaccaacaagcttacttttatgccagagacctcgaagtccatcccaaggacacatttgtgttcagtatagatggcaccgtactct

SEQ ID NO: 57281 - DNA, 358 bp, Glycine max
ggcacaagtgagtttgttgatcgagataactagaaacagtgtgatgaaaatgaaggtccctgttttcttcgttgctacaagtttgggggcatggcaatgccatgcgtatgatatgtgccctcaccgaatgaacactgtctatggtgcccgtactccggacgtgaaatgcgcaagttggaggcttgctgtggaagcacacaacatctttggctttgagaccattcctgaatagtgcgttgaagcaccacaggaatatatccatggcgaacaatatagatcagactccaaaacagttaaccaacaagcttacttttatgccagagacctcgaaatcgatctcaaggacacatttgtgttc

SEQ ID NO: 57282 - DNA, 209 bp, Glycine max
caaagggacgttctacgcaatagacaaaccctaactagttgaatctaccttcccccatccaatctcccgtgccagtacaaacctccttcgcccgggagagaccctcagatcgacgcctcctcgttttgctcgatgacttcgccatcaaatcctctcactctcacttcttcaacacactcagttctcgcgaattcaatctcgacctccac

SEQ ID NO: 57283 - DNA, 381 bp, Glycine max
gaacagcgaaacagagagtgatttcagtgagtgatcggtgttcacttgatctcatcataatcgtcagcgtcaattgaagaagatgccgatcagaaacatcgccgtcggaaggcctgaagaggcgactcaccccgacacgttgaaggcggctttggctgagttcatctcaaccttcatcttcgtgttcgccggctcaggctccggcatcgcctacaacaagctcaccgacaacggcgctgccacccctgccggcctcatctccgcctccatcgcccatgcattcgccctcttcgtcgccgtcaccgtcggcgccaacatctccggcggccacgtcaaccccgccgtcaccttcggcgccttcgtcggcggcaacatcacctt

SEQ ID NO: 57284 - DNA, 221 bp, Glycine max
ggcatcaattcaaaatatatcatcaattataagcatgggtttgtggaacacaacgaatgcagtgtcttgccgctttcacaagtttggtgatgaccaaaagaatctggtcttccaaggtgatgccacgtcttcttccaggggcatagaactcacaaagttagacggtggaggaaaaccagtgggtggcagtgtggggagagtgttatactcttctccagtgc

SEQ ID NO: 57285 - DNA, 54 bp, Glycine max
gaacgtgcagcaatttgatatgagcattaagcgatttaaacatcaggacacaat

SEQ ID NO: 57286 - DNA, 384 bp, Glycine max
ggcacgagtttgttgagatagctagaagcaataagatgaaaatgaaagtgcttgttttgtttgttgctacagttttggtagcatatgaatgccatggctcagactaccagaagttccctctccaaatgaaaactgggtttggtgggcaatacagcaatgaggtggcatgtgccagttggaggcttggcgtggaagcaaacaacgtagtcaagtggcaaactgttcctgcagcttgcggagagtacatagctgactacgttctaggagaccaatatagatcagattccaaaacagttaaccaacaagcttatttctatgctaaatccctcaaactcaccaacaaagatgtctttgtcttggacgttgacgacactactctctcta

SEQ ID NO: 57287 - DNA, 380 bp, Glycine max
ggcacaagtgagtttgttgatcgagataactagaaacagtgtgatgaaaatgaaggtccttgttttcttcgttgcgacaattttggtagcatggcaatgccatgcgtacgatatgttccctctccgaatgaacactggctatggtgcccgtactccggaggtgaaatgcgcaagttggaggcttgctgtggaagcacacaacatctttggctttgagaccattcctgaagagtgcgttgaagcaacaaaggaatacatccatggcgaacaatatagatcagactccaaaacagttaaccaacaagcttacttttatgccagagacctcgaagtccatcccaaggacacatttgtgttcagtatagatggcaccgtactct

SEQ ID NO: 57288 - DNA, 187 bp, Glycine max
gacgactacattgagtgaacaatattttccctccactaaggtcgcaatttttcttaaagcccatgacaccctcactgaggcaactgctgcagcatagaatcgcgatttttccaaaatgtccatgtccaaaagttccacgatgcatcagtacatcaactaccgtatgcgtgtcaccattcaggacggt

SEQ ID NO: 57289 - DNA, 380 bp, Glycine max
gacactaaacaagttaaaagaagagcatcactgaactaacaaagcaaccctatgtcgaaggtggtttgtgtcaccggagccagcggcgccatcggatcatgggtggtcctactcctcctccagcgtggttacaccgtccatgccaccgtccaagatatcaaggatgaaaatgagacgaaacatttggaggaaatggaaggagcaaagagtcatctccatttttttgaaatggatcttcttgacatcgactccattgccgctgccatagagggttgttccggcgtaatccaccttgcatgtcctaacatcattggtcaagtcgaagatcccgagaaacagatattggaaccggcgataaaaggaacggttaatgtgttgaa

SEQ ID NO: 57290 - DNA, 388 bp, Glycine max
ggcacaagtgagtttgttgatcgagataactagaaacagtgtgatgaaaatgaaggtccttgttttcttcgttgctacaattgtgggtagcatggcaatgccatgcgtacgatatgttccctctccgaatgaacactggctatggtgcccgtactccggaggtgaaatgcgcaagttggaggcttgctgtggaagcacacaacatctttggctttgagaccattcctgaagagtgcgttgaagcaacaaaggaatacatccatggcgaacaatatagatcagactccaaaacagttaaccaacaagcttacttttatgccagagacctcgaagtccatcccaaggacaaatttgtgttcagtatagatggcaacgtactctcgaatat

SEQ ID NO: 57291 - DNA, 278 bp, Glycine max
gagaagaaacggaagcggtgtaaaagtaacagaggcggatagaaccgaaatacccaacccgaccgggtgagcgtgactgtaggagtttctaattgcctggttcagcttcaccttcaccttcaccttctcttcttcttctctctctcatggtcttgtagcggaaccgttctcgcttctcggagaatattgcctccatcccctccgctgaactcaattacctcatttatcgctaccttcaagaatcaggtttcacgcatgctgcttttacttttggttat

SEQ ID NO: 57292 - DNA, 385 bp, Glycine max
ggcacaagtgagtttgttgatcgagataactagaaacagtgtgatgaaaatgaaggtccttgttttcttcgttgctacaattttggtagcatggcaatgccatgcgtacgatatgttccctctccgaatgaacactggctatggtgcccgtactccggaggtgaaatgcgcaagttggaggcttgctgtggaagcacacaacatctttggctttgagaccattcctgaagagtgcgttgaagcaacaaaggaatacatccatggcgaacaatatagatcagactccaaaacagttaaccaacaagcttacttttatgccggagacctcgaagtccatcccaaggacacatttgtgttcagtatagatggcaccgtactctctaat

SEQ ID NO: 57293 - DNA, 379 bp, Glycine max
ggaaacagagagtgatttcagtgagtgatcggtgttcacttgatctcatcataatcgtcagcgtcaattgaagaagatgccgatcagaaacatcgccgtcggaaggcctgaagaggcgactcaccccgacacgttgaaggcggctttggctgagttcatctcaaccttcatcttcgtgttcgccggctcaggctccggcatcgcctacaacaagctcaccgacaacggcgctgccacccctgccggcctcatctccgcctccatcgcccatgcattcgccctcttcgtcgccgtctccgtcggcgccaacatctccggcggccacgtcaaccccgccgtcaccttcggcgccttcgtcggcggcaacatcaccttcctc

SEQ ID NO: 57294 - DNA, 375 bp, Glycine max
gaaggtgcaagagtttgttgtgagctataagctagtttatcgtgaggagaatatgaagttgtttgttttctttgttgctgcagtagttttggtagcatggccatgccatggcgcaggctaccaaaggttccctctccgaatgaaaactggctatggtgagcgttcttcggaggtaaaatgcgcaagttttaggcttgctgtggaagcacacaacatccgagcctttaaaaccattcctgaagagtgcgttgaaccaacaaaggactacattaatggcgaacaatttagatcagactctaaaacagttaaccaacaagctttcttttatgctagtgaacgcgaagttcatcacaacgacatatttatattcggcat

SEQ ID NO: 57295 - DNA, 385 bp, Glycine max
ggttctagtgtgtgattgtttgttgttgtaactcgttcttcgtcttttgttgttctgtgtttgtgtttgttttttctctcacgtgaaaatgtcttgctgcggtggtaactgtggttgcggaagctcctgcaagtgcggcaacggctgcggatgctgcaagatgtagccagacttgagctacactgagtcaaccaccaccgagaccttggtcatgggagtggcacctgttaaggctcaatttgagggtgctgaaatgggtgtgcccgctgagaacgatggctgcaaatgtggaccaaactgctcatgcaacccctgcacttgcaagtgaggtgttgggagagcaggcttcaagcagagatacccttaattaggaatatgataaact

SEQ ID NO: 57296 - DNA, 394 bp, Glycine max
ggcacaagtgagtttgttgatcgagataactagaaacagtgtgatgaaaatgaaggtccttgttttcttcgttgctacaattttggtagcatggcaatgccatgcgtacgatatgttccctctccgaatgaacactggctatggtgcccgtactccggaggtgaaatgcgcaagttggaggcttgctgtggaagcacacaacatctttggctttgagaccattcctgaagagtgcgttgaagcaacataggaatacatccatggcgaacaatatagatcagactccaaaacagttaaccaacaagcttacttttatgccagagacctcgaagtccatcccaaggacacatttgtgttcagtatagatggcaccgtactctctaatattccatac

SEQ ID NO: 57297 - DNA, 403 bp, Glycine max
ggcacaagtgagtttgttgatcgagataactagaaacagtgtgatgaaaatgaaggtccttgttttcttcgttgctagaattttggtaggatggcaatgccatgcgtacgatatgttccctctccgaatgaacactggctatggtgcccgtactccggaggtgaaatgcgcaagttggaggcttgctgtggaagcacacaacatctttggctttgagaccattcctgaagagtgcgttgaagcaacaaaggaatacatccatggcgaacaatatagatcagactccaaaacagttaaccaacaagctttactttatgccagagacctcgaagtccatcccaaggacacatttgtgttcagtatagatggcaccgtactctctaatattccatactacagaaaa

SEQ ID NO: 57298 - DNA, 359 bp, Glycine max
gagacacgtacgcaactgaaacggaaaaccctattacatgaatagaactcctatcttgttcgctctcttctttcatctttgtgccttcagctcatatcgaccatcatgccaacgctgatgatgatcatgtgtacgacagtgacggcgatcagcttcaatacggtgtcaattactgcgtgttgccagtgataacaagagctggcagtggaatagcagtaacataaggacgaaacgaggattgacctctgactgtggtgcaatctggcagcgagctctctgatgggttatcgatacagatgtgcatctcgatcagcatgagtcgctttcatcattcattgccagcatttcagtaacattca

SEQ ID NO: 57299 - DNA, 415 bp, Glycine max
  unsure (1)..(415): unsure at all n locations
gataccacaaacaaaacacaagccaagtgaaagtgagaaagaataaaaatcaaagagcataatgtcagggatcattcacaagattggggagacccttcatgtgggagggcacaagaaggaggaggagcataagggtgagcaccatgctggagaatacaaaggggagcaccatggtgaacacagtagtgagtacaaaggagagcatcatggtgaacacaaagctggagagtaccatggtgagcacaagccagagcacaaagaggggttcctagacaaagtcaaggacaagattcatggtgagggcggcgccgccganggcgagaagaagaagacggagaagaagaagaagagcatggccatgagcatgggcatgacagcagcagcagcagtgacagtgattaaactgctgcatcac

SEQ ID NO: 57300 - DNA, 376 bp, Glycine max
ggtgcacaagtgagtttgttgatcgagatacctagaaacagtgtgatgaaaatgaaggtccttgttttcttcgctgctacaattttggtagcatggcaatgccatgcatacgatatgttccctctccgaatgaacactggctatggtgcccgtactccggaggtgaaatgcgcaagttggaggcttgctgtggaggcacacaacatcatcggctttgagaccattcctgaagagtgcgttgaagcaacaaaggaatacatccatggcgaacaatatagatcagactccaaaacagttaaccaacatgcttacttttatgccagagacctcgaagtccatcccaaggacacatttgtgttcagtagagatggcaccg

SEQ ID NO: 57301 - DNA, 386 bp, Glycine max
ggtcactcaccacttcaaaacactcataacacaaagcacaaagcaaagctcatccttgagttaaaaaatggcagcagcttcttccatggctctctcatccccatccttggctggcaaggccgtgaagctgggcccatcagccccagaagtgggaagggtgagcatgaggaagaccgtcaccaagcaggtctcctcaggaagcccatggtacggcccagaccgagtcaagtacttgggcccattctctggcgagcccccgtcctacctaaccggtgagttcccaggcgactacggctgggacactgctgggctttccgcagacccagaaaccttcgccaagaaccgtgaactcgaagtgatccactccaggtgggccatgctcggag

SEQ ID NO: 57302 - DNA, 199 bp, Glycine max
gagaacctttgcacaccaaacacacaagaatcacctcctttgtatcgtcatcattcatgcatcttgcatccccatagcctcatgcctcaatggcgcgctaagtactatcgcccgattaagacgccaccactatattggcctccactctacaagtcactactgtacaacccactggtttataaatcaacatcaccggctt

SEQ ID NO: 57303 - DNA, 271 bp, Glycine max
aaaagaacaacaaaagggggtacacacgcgtttgcagatcaagtaccctatagccactgtaatgacatgtatggtcctctgaaatcatcgctgctacactggtggtagcatagcaatgtcatccgtactagatgttcccgtctccgaaatgaacacgggagtatagtgaccctactccggtgagtgacatcctcagattcgaagtctgctgtgaaagcacacgacatctttgactttgtgaccattcatgttgcgtgcgttggcacagcat

SEQ ID NO: 57304 - DNA, 292 bp, Glycine max
agcagcaaaagggggtccaaagggggaattgttaggagtgggacacgggcctcctcctttggtggtccggtgttggggttggtttttcccctaacgggaagaggccttgatctgggggaaatggtggttccggaaccacgggaaggtcaggaaacggtaggggaggcggaaaaagttaccaagacttgacacaacatgaattcaacaacaaccacaacacttggccatggaattggaactggtaaggcgcaaatttaaggttgctaaaatggttgtgccgattaaaaacaat

SEQ ID NO: 57305 - DNA, 380 bp, Glycine max
gcacaagtgagtttgttgatcgagataactagaaacagtgtgatgaaaatgaaggtccttgttttcttcgttgctacaattttggtagcatggcaatgccatgcgtacgatatgttccctctccgaatgaacactggctatggtgcccgtactccggaggtgaaatgcgcaagttggaggcttgctgtggaagcacacaacatctttggctttgagaccattcctgaagagtgcgttgaagcaacaaaggaatacatccatggcgaacaatatagatcagactccaaaacagttaaccaacaagcttacttttatgccagagacctcgaagtccatcgcaaggacacatttgtgttcagtatagatggcaccgtactctc

SEQ ID NO: 57306 - DNA, 369 bp, Glycine max
gcacaagtgagtttgttgatcgagataactagaaacagtgtgatgaaaatgaaggtccttgttttcttcgttgctacaagtttggtaggagggcaatgccatgcgtacgatatgttccctctccgaatgaacactggctatggtgcccgtactccggaggtgaaatgcgcaagttggaggcttgctgtggaagcacacaacatctttggctttgagaccattcctgaagagtgcgttgaagcaacaaaggaatacatccatggcgaacaatatagatcagactccaaaacagttaaccaacaagcttacttttatgccagagacctcgaagtccatcccaaggacacatttgtgttcagtataaatggg

SEQ ID NO: 57307 - DNA, 414 bp, Glycine max
  unsure (1)..(414): unsure at all n locations
ggcacaagtgagtttgttgatcgagataactagaaacagtgtgatgaaaatgaaggtccttgttttcttcgttgctacaattttggtagcatggcaatgccatgcgtacgatatgttccctctccgaatgaacactggctatggtgcccgtactccggaggtgaaatgcgcaagttggaggcttgctgtggaagcacacaacatctttggctttgagaccattcctgaagagtgcgttgaagcaacaaaggaatacatccatggcgaacaatatagatcagactccaaaacagttaaccaacaagcttacttttatgccagagacctcgaagtccacccaaggacacatttgtgttcagtatagatggcaccgtactctctaatattccatactacanaaacatggatatgggg

SEQ ID NO: 57308 - DNA, 253 bp, Glycine max
ggcgtattgagtgaaccttatggtgtgtactctatcacgtacaatgatctgtcgggccgcatatcacacttacggtccgcactgaccctgagatgatcacgttaatcacattgtagtcgaggtctcagatatattcctggatctgcagttgggctcgttaagccaaaaactgtgtccttttatctcaccacgaatcttagctcagtacatgaatctcctgcagtatgcccacgcactctttacccttctgcat

SEQ ID NO: 57309 - DNA, 281 bp, Glycine max
gacacgtgagtcagcagatcgaaagtactatgatgcactgtgatgaccatcacggtacttgatctcttcacgtcccaacgttgggtaccggggacgatccatacgtccaaatgtattccgcgttgtaatgaaaactcctaattgctgatgtactctcgacgttaaatcctcaagttgcacgcatggtgcggcagcgtattctatctttcgaagagagagaagctgagacgagtacgtaggcgcaacccgtgactgcagctaacgcgtactcgatgcgatca

SEQ ID NO: 57310 - DNA, 358 bp, Glycine max
ggcacaagtgagtttgttgatcgagataaccacaatcagtgtgatgaatatgaacgtccgtgttttcttcgttgctacaattttggtagcatggcaatgccatgcttacgatatgttccctctccgaatgaacattggctatggtgcccgtactccggaggtgaaatgcgcaagttggaagcttgctgtggaagcacacaacatcattggctttgagaccattcatgacgagtgcgttgaagcatcaaaggaatacatccatggcgaagaatatagattagactccataacagttatccaacaagcttacttttatgccagagacctcgaagtccatcacaatgacacatttgtgttc

SEQ ID NO: 57311 - DNA, 417 bp, Glycine max
gtattttgattggagtggagaggatgtgagacatattggtgagactgatttcagtatgctgtggatatatgtttaccagcctgattatgttcaaggggttgatggtgaattaatacaacatttattccaaagaataaaaatattgattgtttaagtttttgtgtaatttcagaaagatgtattcatcattgtccaacgcaatgaattcaggaacaactgaacaagaataataatggcttctaaaatgttgtaaaaatgcatttttatttttatagtatataattgttgatttaagtattgggataacagataattgacggtgcatcagcaacaaggggattacgtaatggcgcaatgccattggacgatgcaagtgggttgggtcctggcatccatcaaggctgggaatgtggactg

SEQ ID NO: 57312 - DNA, 384 bp, Glycine max
ggtgcacaagtgaatttgttgatcgagataactagaaacagtgtgatgaaaatgaaggtccttgttttcttcgttgctacaattttggtagcatggcaatgccatgcgtacgatatgttccctctccgaatgaacactggctatggtgcccgtactccggacgtgaaatgcgcaagttggaggcttgctgtggaagcacacaacatctttggctttgagaccattcctgaagagtgcgttgaagcaacaaaagaatacatccatggcgaacaatatagatcagactctacaacagttaagcaacaggcttacttttatgccagagacctcgaggtccatctcacggacacatttgtgttcagtatagatggcaccgtactctct

SEQ ID NO: 57313 - DNA, 241 bp, Glycine max
acgcgtccaacggaagccaaaagacggactaatgggattatatttgagttcatatatctcaaagccatgaccaactctaaagtctctaatggtcactccgtcaccctacccatcattttggtggggctgaccatggcatactccaccgataacgtctctttcaacttcaactggttcaatacattctaatcatacatttagctccataaataagcagtatcccatccactagggtattaca

SEQ ID NO: 57314 - DNA, 363 bp, Glycine max
aatccttgtggcgtcaaccctaacttatcttccctctttggaattggcgtcatccaaaaactctacagcctgtatcaaacgttccgccccgtaaggttcaacattatctggtatcagagcttcggctcttgatgcaggttctatcctatcctattatttttctttgaaatttgtccaggttcatgttttgtccttgttctgttatttgcgtttttgtttacatcttgtttcgttcttgtttgcgtcctgtgttctgttatttgcgtttttgtttacatcttgtttcattcttgtttgcgtcctgtgttctgttatttgcgttcttgtttacatcttatttcgttcttgttcttgttcttgtca

SEQ ID NO: 57315 - DNA, 319 bp, Glycine max
ggcacaagtgagtttgttgatcgagataactagaaacagtgtgatgaaaatgaaggtccttgttttcttcgttgctacaattttggtagcatggcaatgccatgcgtacgatatgttccctctccgaatgaacactggctatggtgcccgtactccggaggtgaaatgcgcaagttggaggcttgctgtggaagcacacaacatctttggctttgagaccattcctgaagagtgcgttgaagcaacaaaggaatacatccatggcgaacaatatagattagactccaaaacaatttaacaacaagcctaattttaagcc

SEQ ID NO: 57316 - DNA, 411 bp, Glycine max
  unsure (1)..(411): unsure at all n locations
ggcacaagtgagtttgttgatcgagataactagaaacagtgtgatgaaaatgaaggtccttgttttcttcgttgctacaattttggtagcatggcaatgccatgcgtacgatatgttccctctccgaatgaacactggctatggtgcccgtactccggaggtgaaatgcgcaagttggaggcttgctgtggaagcacacaacatctttggctttgagaccattcctgaagagtgcgttgaagcaacaaaggaatacatccatggcgaacaatatagattagactccaaaacagttaaccaacaagcttacttttatgccagagacctcgaagtccatccaaggacacatttgtgttcagtatagatggcaacgtactctctaatattccatactacannaaacatggatat

SEQ ID NO: 57317 - DNA, 406 bp, Glycine max
gaaggtgcaagagtttgttgtgagctataagctagtttatcgtgaggagaatatgaagttgtttgttttctttgttgctgcagtacttttggtaacatggccatgccatggcgcaggctactaaaggttccctctccgaatgaaaactggctatggtgagcgttcttcggaggtaaaatgcgcaagttttaggcttgctgtggaagcacactacatccgagcctttaagatcattcctgaagagtgcgttgaaccaacagaggactacattaatggcgaacaatttagatcagactctagtacagttaaccaacaggctttcgttgatgctagtgaacgcgaagtccatcacaacgacatatttatattcggcatagataacaccgtactctctaatatcgcatac

SEQ ID NO: 57318 - DNA, 397 bp, Glycine max
  unsure (1)..(397): unsure at all n locations
ggcacaagtgagtttgttgatcgagataactagaaacagtgtgatgaaaatgaaggtccttgttttcttcgttgctacaattttggtagcatggcaatgccatgcgtacgatatgttccctctccgaatgaacactggctatggtgcccgtactccggaggtgaaatgcgcaagttggaggcttgctgtggaagcacacaacatctttggctttgagaccattcctgaagagtgcgttgaagcaacaaaggaatacatccatggcgaacaatatagatcagactccanaacagttaaccaacaagcttacttttatgccagagacctcgaagttcaatcccaagacacatttgtgttcagtatagatggcaccgtactctctaataattcatactac

SEQ ID NO: 57319 - DNA, 247 bp, Glycine max
ggattactaccaagtcaaaaagcagttaacgaagcatatattgcgtgtaacacagtgagaattaaagtgttgggtaacgagaaatggctaggtgtcgcaccttgggggttcttgcccttggcatggttgcagttgccagaaagctgccaattgatccaggtttggaggaccagaggaatttcctcgggtacgggttcacgtgagttggcgaaattgggcttccatttggagaattgggtactgggtt

SEQ ID NO: 57320 - DNA, 381 bp, Glycine max
ggcacaagtttgttgagatagctagaagcaataagatgaaaatgaaagtgcttgttttgtttgttgctacagttttggtagcatatgaatgccatggctcagactaccagaagttccctctccaaatgaaaactgggtttggtgggcaatacagcaatgacgtggcatgtgccagttggaggcttggcgtggaagcaaacaacgtagtcaagtggcaaactgttcctgcagcttgcggagagtacatagctgactacgttctacgagaccaatatagatcagattccaaaacagttgaccaacacgcttatttctatgccaaatccctcagactcaccaacaaagatgtctttgtcgtggacgttgacgacactactctct

SEQ ID NO: 57321 - DNA, 366 bp, Glycine max
gaagtggatcaggcaaacttacccaacatggaaacaatggaaggctcaagcagatatggaatgtatagaactaagggggaattttctgttgacttgaagcttggccaagtgggaaattctggcagggaatcatcagtgttgactaagtccaaagatggtggtgctgttggagtctccaaaatgatatcctcatcttcttcagggtcagctaagagagctcgttcccttagcaacgggacacaaacagtgtcatgccttgtggacgggtgccactctgatctcagtaactgcagagactatcataggcgccataaggtctgtgaagtccattccaagactgcacaggtcacaattggaggccagaaa

SEQ ID NO: 57322 - DNA, 349 bp, Glycine max
ggcacaggtgagtttgttgatcgagataactagaaacagtgtgatgaagatgaaggtccttgttttcttcgctgctacaattttggtagcatggcaatgccatgcgtacgatatgttccctctccgaatgaacactggctatggtgcccgtactccggaggtgaaatgcgcaagttggaggcttgctgtggaagcacacaacatctttggctttgagaccattcctgaagagtgcgttgaagcaacaaaagaatacatccatggcgaacaatatagattagactccaaaacagttaaccaacaagcttacttttatgccacgagacctcgaagtccatcccaaggacac

SEQ ID NO: 57323 - DNA, 293 bp, Glycine max
  unsure (1)..(293): unsure at all n locations
ggcacaagtttgttgagatagctagaagcaataagatgaaaatgaaagtgcttgttttgtttgttgctacagttttggtagcatatgaatgccatggctcagactaccagaagttccctctccaaatgaaaactgggtttggtgggcaatacagcaatgaggtggcatgtgccagttggacgcttggcgtggaagcaaacaacgtagtcaagtggcaaactgttcctgcagcttgcggagagtacatagctgactacgttctangagaccaatatagattagattccaaaaca

SEQ ID NO: 57324 - DNA, 382 bp, Glycine max
ggcacaagtttgttgagatagctagaagcaataagatgaaaatgaaagtgcttgttttgtttgttgctacagttttggtagcatatgaatgccatggctcagactaccagaagttccctctccaaatgaaaactgggtttggtgggcaatacagcaatgaggtggcatgtgccagttggaggcttggcgtggaagcaaacaacgtagtcaagtggcaaactgttcctgcagcttgcggagagtacatagctgactacgttctaggagaccaatatagatcagattcgaaaacagttaaccaacaagcttagttctatgctaaatcgctcaaaactcacaaacaaagatgtctttgtcttggacgttgacgacactactctct

SEQ ID NO: 57325 - DNA, 381 bp, Glycine max
ggcacaagtttgttgagatagctagaagcaataagatgaaaatgaaagtgcttgttttgtttgttgctacagttttggtagcatatgaatgccatggctcagactaccagaagttccctctccaaatgaaaactgggtttggtgggcaatacagcaatgaggtggcatgcgccagttggaggcttggcgtggaagcaaacaacgtagtcaagtggcaaactgttcctgcagcttgcggagagtacatagctgactacgttctaggagaccaatatagatcagattccaaaacagttaaccaacaagcttatttctatgctaaatccctcagactcaccaacaaagatgtccttgtcttggacgttgacgacactactctct

SEQ ID NO: 57326 - DNA, 387 bp, Glycine max
gaaggtgcaagagtttgttgtgagctataagctagtttatcgtgaggagaatatgaagttgtttgttttctttgttgctgcagtagttttggtagcatggccatgccatggcgcaggctaccaaaggttccctctccgaatgaaaactggctatggtgagcgttcttcggaggtaaaatgcgcaagttttaggcttgctgtggaagcacacaacatccgagcctttaaaaccattcctgaagagtgcgttgaaccaacaaaggactacattaatggcgaacaatttagattagactctaaaacagttaaccaacaagctttcttttatgctagtgaacgcgaagtccatcacaacgacatatttatattcggcatagataacaccgt

SEQ ID NO: 57327 - DNA, 383 bp, Glycine max
gagtgcacaagtgagtttgttgatcgagataactagaaacagtgtgatgaaaatgaaggtccttgttttcttcgttgctacaattttgggggcatggcaatgccatgcgtacgatatgttccctctccgaatgaacactggctatggtgcccgtactccggaggtgaaatgcgcaagttggaggcttgctgtggaagcacacaacatctttggcgttgagaccattcctgaagagtgcgttgaagcaacaaaggaatacatccatggcgaacaatatagatcagactccaaaacagttaaccaacaagcttacttttatgccagagacctcgaagtccatcccaaggacacatttgtgttcagtatagatggcaccgtactct

SEQ ID NO: 57328 - DNA, 77 bp, Glycine max
gggcacacgtgagtttgttcatcgagacatctagaaacagtgtgatcaaaatgaacgtccttgttttcttcgttgct

SEQ ID NO: 57329 - DNA, 345 bp, Glycine max
gcatgcaagagtaccccaacaaacaatcctatcaatattagccttgtcagttaccttccattaagcattggtatcagaaagaaggaccacgtaattgcattgcatcacccatcaattaattagtaataaataccgtttatgtgagaagaccaaaacgaggagcatgatgttaacttggccttatgactaacacacacattgattgattacacaccaatattaaagtccttcaatcattctaaacctagccaggacaattcctaggaagcaacacccatattaatagtatcctaccacaaccacaaaaaccaattaactacaagaaaaaaaaacgcctcaaaataa

SEQ ID NO: 57330 - DNA, 340 bp, Glycine max
ggccgacgtacgtatcgatgcgagaagagacagaagggggcacaagtgagtttgttgatcgagataactagaaacagtgtgatgaaaatgaaggtccttgttttcttcgttgctacaattttggtagcatggcaatgccatgcgtacgatatgttccctctccgaatgaacactggctatggtgcccgtactccggaggtgaaatgcgcaagttggaggcttgctgtggaagcacacaacatctttggctttgagaccattcctgaagagtgcgttgaagcaacaaaggaatacatccatggcgaacaatatagatcagactccaaaacagtttaccaac

SEQ ID NO: 57331 - DNA, 302 bp, Glycine max
ggtaagagtttgttgtgaccaacactccatctgatcgtgaggacaatataaacttatctgtcatcactgtggctccatcagtgttgctagcacagccacactctcatgcacgatatcacacgttcactcactgagtgaagactggctacgatgatcttactgcgaatgtaatatgcacatgtcctaagcctgctgtgaaagcactgacaatcagattcattatcacaactcatgatcattacgtagatccaagcgaggacttgataaatgacgattcatatacatcagactctgcaccagtt

SEQ ID NO: 57332 - DNA, 392 bp, Glycine max
ggcacaagtgagtttgttgatctagataactagaaacagtgtgatgaaaatgaaggtccttgttgtcttcgttgccacaattttggtagcatggcaatgccatgcgtacgatatgttccctctccgaatgaacactggctatggtgcccgtactccggatgtgaaatgcgcaagttggacgcttgctgtggaagcacacaacatctttggctttgagaccattcctgaagagtgcgttgaagcaacagaggaatacatccatggcgaacaatatagatcagactcctcaacagttaaccaacaagcttacttttatgccatagacctcgaagtccatcccaaggacacatttgtgttcagtatagatggcaccgtactctcaaaaattccaa

SEQ ID NO: 57333 - DNA, 147 bp, Glycine max
  unsure (1)..(147): unsure at all n locations
caacggggtgcgcatcttcatccctaacgcgtgcatatcagagtcacacacacacaccaatcattcgactgagacttccangtcttataaggggttggggacaacccataccccaagtcacgtttctgccgtcgtcttccttatccc

SEQ ID NO: 57334 - DNA, 403 bp, Glycine max
gaaagtgcaagagtttgttgtgagctataagctagtttatcgtgaggagaatatgaagttgtttgttttctttgttgctgcagtagtgttggtagcatggccatgccatggcgcatgctaccataggttccctctccgaatgaaaactggctatggtgagcgttcttcggacgtaaaatgcgcaagttttaggcttgctgtggaagcacacaacatccgagcctttaaaaccattcctgaagagtgcgttgaaccaacaaaggactacattaatggcgaacaatttagatcagactctaaaacagttaaccaacaagctttcttttatgctagtgaacgcgaagtcatcacaacgacatatttatattcggcatagataacatcgtactctctaatatcccat

SEQ ID NO: 57335 - DNA, 386 bp, Glycine max
  unsure (1)..(386): unsure at all n locations
ggttctagtgtgtgattgtttgttgttgtaactcgttcttcttcttttgttgttctgtgtttgtgtttgttttttctctcacctgaaaatgtcttgctgcggtggtaactgtggttgcggaagctcctgcaagtgcggcaacggctgcggaggctgcaagatgtacccagacttgagctacactgagtcaaccaccaccgagaccttggtcatgggagtggcacctgttaaggctcaatttgagggtgctgaaatgggtgtgcccgctgagaacgatggctgcaaatgtggaccaaactgctcctgcaacccctgcacttgcaagtgaggtgttgggagagcaagcttcaagcacagatacccttaacttangaaatatgataaac

SEQ ID NO: 57336 - DNA, 397 bp, Glycine max
  unsure (1)..(397): unsure at all n locations
ggcacaagtgagtttgttgatcgagataactagaaacagtgtgatgaaaatgaaggtccttgttttcttcgttgctacaattttggtagcatggcaatgccatgcgtacgatatgttccctctccgaatgaacactggctatggtgcccgtactccggaggtgaaatgcgcaagttggaggcttgctgtggaagcacacaacatctttggctttgagaccattcctgaagagtgcgttgaagcaacaaaggaatacatccatggcgaacaatatagatcagactccaaaacagttaaccaacaagcttacttttatgccagagacctcgaagtccatcncaaggacacatttgtgttcagtatagatggcaccgtactctctaatattccatactac

SEQ ID NO: 57337 - DNA, 208 bp, Glycine max
acccaggcgtccgagacgacagaaggggaccacattccggatgacaatcgcatacattgtagtcacacttttgtctcggaatgtgttcgtttgagtcatggcaagcttaatggttgcatgtgtggttttgacgtgcatggccgtcaggagtgcactaatgacggtgcaagccgtgtcatgtcgtgatgtgtcagtgaacctatcaacg

SEQ ID NO: 57338 - DNA, 400 bp, Glycine max
ggcacaagtgagtttgttggtcgagataactagaaacagtgtgatgaaaatgaaggtccttgttttcttcgttgctacaattttggtagcatgggaatgccatgcgtacgatatgttccctctccgaatgaacactggctatggtgcccgtactccggaggtgaaatgcgcaagttggaggcttgctgtggaagcacacaacatctttggctttgagaccattcctgaagagtgcgttgaagcaccaaaggaatacatccatggcgaacaatatagatcagactcaaaacagtttagcaacaagcttacttttatgccagagacctcgaagtccatcccaaggacacatttgtgttcagtatagatggcaccgtactctctaatattccctactacaaaa

SEQ ID NO: 57339 - DNA, 194 bp, Glycine max
ggcacaactttgttcacatacctacacgcaataagatgaaaatcaaagtgcttgttttgtttattcctacacttttgctggcacagggggggcatgcctcatactaccagaacttccctctccacataaaaactggctttggtgggcaatacagcaattacgtggcatgttccaatttcatgcttgtcgtccaa

SEQ ID NO: 57340 - DNA, 375 bp, Glycine max
gagtgcacaagtgagtttgttgatcgagataactagaaacagtgtgatgaaaatgaaggtccttgttttcttcgttgctacaattttggtagcatggcaatgccatgcgtacgatatgttccctctccgaatgaacactggctatggtgcccgtactccggaggtgaaatgcgcaagttggaggcttgctgtggaagcacacaacatctttggctttgagaccattcctgaagagtgcgttgaagcaacaaaggaatacatccatggcgaacaatatagatcagactccaaaacagttaaccaacaagcttacttttatgccagagacctcgaagtccatcccaaggacacatttgtgttcagtatagatggcac

SEQ ID NO: 57341 - DNA, 298 bp, Glycine max
aagcgtcagcaaaaccatacaatggggaggtaaatcagacagaacggggctcaaggttcttcgatcatcgagataacgaaagttaatgattagaatttggatgtccgagagatcaacagggcgttgaatcttgaaatgtttccaaagggaatgctcgtatcctttcgtgaaccagatgtttgtgttggcaagatacgggttctaattcggggtcaataaaattcctgcggctggaaatcatgggggtcatctcaaaagaaagggaaacgagtctttatcaataattcgaatggtcttc

SEQ ID NO: 57342 - DNA, 226 bp, Glycine max
ggcacaagtgagtttgttgatcgagatcactagaatcagtgtgattaaaatgaaagtccttgttttcttccttgctacaattttggtagcatggcaatgccatgcgtacgacatgttccctctccgaatgaacactggctatggtgcccgtactccggacgtgaaatgctcaagttggacgcatgctgtttaagcacacaccaaccttggcgttgagaccattcct

SEQ ID NO: 57343 - DNA, 220 bp, Glycine max
ttacatttttaattattacattaagcatcaaaacctccctccacatctattgctctcaacactgatctctaccctttcctttgtggggtgatttacccactaatctacatcacatttgttcttagacattctcatgtttacccttatgcatacccatattctaacacataattctacaagtacctcaacacttcaaatctcacttcaactggcatctaca

SEQ ID NO: 57344 - DNA, 403 bp, Glycine max
  unsure (1)..(403): unsure at all n locations
ggaaaaattaattttgttaatcaaaataactaaaaccattttaataaaaataaaggcccttgtttcctccgttgcaacaattttggaagcatggcattgcaatgcgtaacaatatgttcccctctcccaatgaacactggctatggtgcccgtactccggaggtgaaatgcgcaagttggaagcttgctgttgaagcacacaacatctttggctttgagaccattcctgaagagtgcgttgaagcaacaaaggaatacatccatggccaacaatatagatcagactccaaaacagttaaccaacaagcttacttttatgccagagacctcgaagtccatcccaaggacacatttgtgttcagtatagatggcaccgtactctctaatattccatacntacaaa

SEQ ID NO: 57345 - DNA, 228 bp, Glycine max
ggcacaagtgagtttgttgatccagataactaaaaacaatcttatcaatactattgtccgtgttatcttcgttcctacaattttggcaggggtcaaactaccaacttttcactctctacctcaccgatgtgcttaggcgctcaagacaccattcacgtgacatgttccagttccctgcttggcttactatcaaacaacgtagtcatgtgtgggggtgttcctgcatct

SEQ ID NO: 57346 - DNA, 401 bp, Glycine max
ggcacaagtgagtttgttgatcgagataactagaaacagtgtgatgaaaatgaaggtccttgttttcttcgttgctacaattttggtagcatggcaatgccatgcgtacgatatgttccctctccgaatgaacactggctatggtgcccgtactccggaggtgaaatgcgcaagttggaggcttgctgtggaagcacacaacatctttggctttgagaccattcctgaagagtgcgttgaagcaacaaaggaatacatccatggcgaacaatatagatcagactccaaaacagttaaccaacaagcttacttttatgccagagacctcgaagtccatcccaagggcacatttgtgttcagtatagatggcaccgtactctctaatattccatactacaaaa

SEQ ID NO: 57347 - DNA, 255 bp, Glycine max
gaaccaaaaaagggtccaacaaaacccaatccaatttcggcccgtcccgggaaaaggaaacctcaacggaacggtccgatccatttccgaatggggcaaccgctgaacttcccggccggaggaattcggctaagtttcccttcgtcggtcaacggctcggcaagctttcaacggcggtcttcggtcggcgccttcgcggctaaggcggtggatacgcagcggccggcggcaagcctttacaaggtgctgcaattc

SEQ ID NO: 57348 - DNA, 401 bp, Glycine max
  unsure (1)..(401): unsure at all n locations
ggcacaagtgattttgttgatcgagataactagaaacagtgtgatgaaaatgaaggtccttgttttcttcgttgctacaattttggtagcatggcaatgccatgcgtacgatatgttccctctccgaatgaacactggctatggtgcccgtactccggaggtgaaatgcgcaagttggaggcttgctgtggaagcacacaacatctttggctttgagaacattcctgaagagtgcgttgaagcaacanaggaatacatccatggcgaacaatatagatcagactccaaaacagttaaccaacaagcttacttttatgccagagacctcgaagttcatcccaaggacacatttgtgttcagtatagatggcaccgtactctccaatatccatactacaaaaa

SEQ ID NO: 57349 - DNA, 360 bp, Glycine max
ggcacaagtgagtttgttgatcgagataactagaaacagtgtgatgaaaatgaaggtccttgttttcttcgttgctacaattttggtagcatggcaatgccatgcgtacgatatgttccctctccgaatgaacactggctatggtgcccgtactccggaggtgaaatgcgcaagttggacgcttgctgtggaagcacacaacatctttggctttgagaccattcctgaagagtgcgttgaagcaacaaaggaatacatccatggcgaacaatatagatcagactccaaaacagttaaccaacaagcttacttttatgccagagacctcgaagtccatcccaaggacacatttgtgttcag

SEQ ID NO: 57350 - DNA, 384 bp, Glycine max
gagaaaatggaccttcagttcttcaccttcttcacttgaatcgcaacttcccaaatccaaatctcacagagaaaccctaattcagagccgaaccctcccaaaatgtcctcgccgcttacctaccccgcggtgctcgacgacaaggacctcgacgacgccgcattgtgggccatgatcgactccgccacagcctcacactccccctccaagtgcaagtccctagcctccgccaaattccccatccgccagctcccttccccgatctcaaacccctccccgccgcccaagttccggaaggtcctccgggactctggcgacagcggcgaggtggtgcaagacccgtggccctaccgccctccgcggaagatcgcgaggacgtgtcct

SEQ ID NO: 57351 - DNA, 65 bp, Glycine max
atgaagacgacagaaggtacagctgcagattcgacacaaggtacgctgcgataacagacagaacg

SEQ ID NO: 57352 - DNA, 69 bp, Glycine max
ggcatcagtgagtttgctgcttcagattaccacaaacagtgttctgaaaatgaaaggccctggtttcct

SEQ ID NO: 57353 - DNA, 406 bp, Glycine max
ggcacaagtgagtttgttgatcgagataactagaaacagtgtgatgaaaatgaaggtccttgttttcttcgttgctacaattttggtagcatggcaatgccatgcgtacgatatgttccctctccgaatgaacactggctatggtgcccgtactccggatgtgaaatgcgcaagttggaggcttgctgtggaagcacacaacatctttggctttgagaccattcctgaagagtgcgttgaagcaacaaaggaatacatccatggcgaacaatatatatcagactccaaaacagttaaccaacatgcttacttttatgccagagacctcgaagtccatcccaaggacacatttgtgttcagtatacatggcaccgtactctctaatattccatactacaaaaaacac

SEQ ID NO: 57354 - DNA, 375 bp, Glycine max
  unsure (1)..(375): unsure at all n locations
gaaggtgcaaaagtttgttgtgagctataagctagtttatcgtgaggagaatatgaagttgtttgttttctttgttgctgcagtagttttggtagcatggccatgccatggcgcaggctaccaaaggttccctctccgaatgaaaactggctatggtgagcgttcttcggaggtaaaatgcgcaagttttaggcttgctgtggaagcacacaacatccgagcctttaaaaccattcctgaagagtgcgttgaaccaacaaaggactacattaatggcgaacaatttagattagactctanaacagttaaccaacaagctttcttttatgctagtgaacgcgaagtcaatcacaacgacatatttatattcggcat

SEQ ID NO: 57355 - DNA, 388 bp, Glycine max
ggcacaagtgagtttgttgatcgagataactagaaacagtgtgatgaaaatgaaggtccttgttttcttcgttgctagaattttggtagcatggcaatgccatgcgtacgatatgttccctctccgaatgaacactggctatggtgcccgtactccggaggtgaaatgcgcaagttggaggcttgctgtggaagcacacaacatctttggctttgagaccattcctgaagagtgcgttgaagcaacaaaggaatacatccatggcgaacaatatagattagactccaaaacagttaaccaacaagcttacttttatgccagagacctcgaagtccatcccaaggacacatttgtgttcagtatagatggcaccgtactctctaatatt

SEQ ID NO: 57356 - DNA, 392 bp, Glycine max
ggagtttgttgatcgagataactagaaacagtgtgatgaaaatgaaggtccttgttttcttcgttgctacaattttggtagcatggcaatgccatgcgtacgatatgttccctctccgaatgaacactggctatggtgcccgtactccggaggtgaaatgcgcaagttggaggcttgctgtggaagcacacaacatctttggctttgagaccattcctgaagagtgcgttgaagcaacaaaggaatacatccatggcgaacaatatagattagactccaaaacagttaaccaacaagcttacttttatgccagagacctcgaagtccatcccaaggacacatttgtgttcagtatagatggcaccgtactctctaatattccatactacaaa

SEQ ID NO: 57357 - DNA, 338 bp, Glycine max
atgagataaactgtatcaattatgagccagatgaattgagcatgttgcctgaacgaggagctgaaagtgcatcaatgagttatgaccctgctttagactatgaaatgcaggcccaggctggtggtactttacaaaataagaacaaagaggtattgactgacaccaaaccaggatctaaggggttggataaggaggcaaaatcaaaacttaccccaaataattctgataaaagaaagactggtgggccgataaggagagggaagacttctaaacctaatgctttggatgaagcacgagcacgtgctgagagcttacggaactacaaagcggatctccag

SEQ ID NO: 57358 - DNA, 402 bp, Glycine max
ggcacaagtgagtttgttgatcgagataactagaaacagtgtgatgaaaatgaaggtccttgttttcttcgttgctacaattttggtagcatggcaatgccatgcgtacgatatgttccctctccgaatgaacactggctatggtgcccgtactccggaggtgaaatgcgcaagttggaggcttgctgtggaagcacacaacatctttggctttgagaccattcctgaagagtgcgttgaagcaacaaaggaatacatccatggcgaacaatatagatcagactccaaaacagttaaccaacaagcttacttttatgccagagaactcgaaattcatcgcaaagacacatttgtgttcagtatagatggcaccgtactctctaatattccatactacaaaaa

SEQ ID NO: 57359 - DNA, 403 bp, Glycine max
  unsure (1)..(403): unsure at all n locations
acccacacgtccggccaacccttcgaacggttccaaaaaaacaacaaaagggggaacaaatgaatttggttattcaaaataacaaaaaacattttaataaaaataaaggtccttgtttccttcgttgctacaattttggtagcatggcaatgccatgcgtacgatatgttccctctccgaatgaacactggctatggtgcccgtactccggaagtgaaatgcgcaagttggangcttgctgtggaagcacacaacatctttggctttgagaccattcctgaagagtgcgttgaagcaacaaaggaatacatccatggcgaacaatatagattagactccaaaacagttaaccaacaagcttacttttatgccagagacctcgaagtccatcccaaggacacat

SEQ ID NO: 57360 - DNA, 201 bp, Glycine max
gaaggtgcaagagtttgttgtgagctataagctagtttatcgtgaggagaatatgaagttgtgtgttttctttgttgctgcagtaattttggtagcatggccatgccatggcgcaggctatcacaggttccctctccgaatgagaactggctatcgtgagcgttcttcggaggtaaaatgctcaagttttacgcttgctgt

SEQ ID NO: 57361 - DNA, 397 bp, Glycine max
  unsure (1)..(397): unsure at all n locations
ggcacaagtgagtttgttgatcgagataactagaaacagtgtgatgaaaatgaaggtccttgttttcttcgttgctacaattttggtagcatggcaatgccatgcgtacgatatgttccctctccgaatgaacactggctatggtgcccgtactccggaggtgaaatgcgcaagttggaggcttgctgtggaagcacacaacatctttggctttgagaccattcctgaagagtgcgttgaagcaacaaaggaatacatccatggcgaacaatatagattagactccaaaacagttaaccaacaagcttacttttatgccagagacctcgaagtccatcncaaggacacatttgtgttcagtatagatgggcacgtactctctaatattccatactac

SEQ ID NO: 57362 - DNA, 390 bp, Glycine max
ggttctagtgtatgtgattgttgtgactcgttcttcttcgtcgttatcttcttcttttgttgtttgtgtgtttgttttttctctcacctgaaaatgtcttgctgcggtggtaactgtggttgcggaagcgcctgcaagtgcggcaacggctgcggaggctgcaagatgtacccagacttgagctacaccgagtcaaccaccaccgagaccttggtcatgggagtggcaccagttaaggctcaattcgagagtgctgaaatgggtgttcccgctgagaacgatggctgcaaatgtggagctaactgcacctgcaacccctacacttgcaagtgaggtgttggagagctaaagcttcaagcagaaatggcccttagaaataatgattaaaac

SEQ ID NO: 57363 - DNA, 340 bp, Glycine max
gattcgaatggatcacgagtggatgggttccgctgtataagctagacctagcttacgtctctcgcagtgtgtgtgaatctgctgaatgcagaatgttccaaggttatggtctagactgtaactgatgtgtcatcacacacaattcgttaaagcgttatcctctcagcgagtctagttgagaggcatcacgctgaagtaatattctgatattatagcaactgcactatttagaggatttgctccttatgatcctgactgctactatgtcacagttgcatcgatagcgagattcatatacatgataagatgacttggtattggtacctttcagatgatttat

SEQ ID NO: 57364 - DNA, 377 bp, Glycine max
gacaagtgagtttgttgatcgagataactagaaacagtgtgatgaaaatgaaggtccttgttttcttcgttgctacaattttggtagcatggcaatgccatgcgtacgatatgttccctctccgaatgaacactggctatggtgcccgtactccggaggtgaaatgcgcaagttggaggcttgctgtggaagcacacaacatctttggctttgagaccattcctgaagagtgcgttgaagcaacaaaggaatacatccatggcgaacaatatagatcagactccaaaacagttaaccaacaagcttacttttatgccagagacctcgaagtccatcccaaggacacatttgtgttcagtatagatggcaccgtactc

SEQ ID NO: 57365 - DNA, 400 bp, Glycine max
gaaggtgcaagagtttgttgtgagctataagctagtttatcgtgaggagaatatgaagttgtttgttttctttgttgctgcagtagttttggtagcatggccatgccatggcgcaggctaccaaaggttccctctccgaatgaaaactggctatggtgagcgttcttcggaggtaaaatgcgcaagttttaggcttgctgtggaagcacacaacatccgagcctttaaaaccattcctgaagagtgcgttgaaccaacaaaggactacattaatggcgaacaatttagattagactctaaaacagttaaccaacaagctttcttttatgctagtgaacgcgaagtccatcacaacgacatatttatattcggcatagataacaccgtactctctaatatc

SEQ ID NO: 57366 - DNA, 336 bp, Glycine max
gctttcttcgttgctacaattttggtagcatggcaatgccatgcgtacgatatgttccctctccgaatgaacaccggctatggtgcccgtactccggaggtgaaatgcgcaagttggaggcttgctgtggaagcacacaacatctttggctttgagaccattcctgaagagtgcgttgaagcaacaaaggaatacatccatggcgaacaatatagatcagactccaaaacagttaaccaacaagcttacttttatgccagagacctcgaagtcgatcccaaggacacatttgtgttcagtatagatggcaccgtactctctaatattccatactac

SEQ ID NO: 57367 - DNA, 394 bp, Glycine max
ggcacaagtgagtttgttgatcgagataactagaaacagtgtgatgaaaatgaaggtccttgttttcttcgttgctacaattttggtagcatggcaatgccatgcgtacgatatgttccctctccgaatgaacactggctatggtgcccgtactccggaggtgaaatgcgcaagttggaggcttgctgtggaagcacacaacatctttggctttgagaccattcctgaagagtgcgttgaagcaacataggaatacatccatggcgaacaatatagattagactccaaaacagttaaccaacaagcttacttttatgccagagacctcgaagtccatcccaaggacacatttgtgttcagttatagatggcacgtactctctaatattccatac

SEQ ID NO: 57368 - DNA, 383 bp, Glycine max
ggtgcacaagtgagtttgttgatcgagataactagaaacagtgtgatgaaaatgaaggtccttgttttcttcgttgctacaattttggtagcatggcaatgccatgcgtacgatatgttccctctccgtatgaacactggctatggtgcccgtactccggaggtgaaatgcgcaagttggaggcttgctgtggaagcacacaacatctttggctttgagaacattccttaaaaattgctttgaagcagtaaaggaatacatccatggcgaacaatatagattagactccaaaacagttaaccaacaagcttacttttatgccagagacctcgaagtccatcccaaggacacatttgtgttcagtatagatggcaccgtactct

SEQ ID NO: 57369 - DNA, 222 bp, Glycine max
gggtcgaccgacgcgtccacccacgagtccgcccacgcgtccgcccacgcgtccggcgataagacgacagatgggggcacatgtttgttgagatagctagaagcaatacgatgaaaacgacagtgcttgttttgtttgttgctacagttttggtagcatatgaatgccatggctcagactaccagaagttccctctccaattgaccactgggtttggtgggc

SEQ ID NO: 57370 - DNA, 400 bp, Glycine max
  unsure (1)..(400): unsure at all n locations
ggcacaagtgagtttgttgatcgagataactagaaacagtgtgatgaaaatgaaggtccttgttttcttcgttgctacaattttggtagcatggcaatgccatgcgtacgatatgttccctctccgaatgaacactggctatggtgcccgtactccggaggtgaaatgcgcaagttggaggcttgctgtggaagcacacaacatctttggctttgagaccattcctgaagagtgcgttgaagcaacanaggaatacatccatggcgaacaatatagatcagactccaaaacagttaaccaacaagcttacttttatgccagagacctcgaagtccatcccaaggacacatttgtgttcagtatagatggcaccgtactctctaatattccatactacaaa

SEQ ID NO: 57371 - DNA, 396 bp, Glycine max
  unsure (1)..(396): unsure at all n locations
gacaaaagtggtgtgtgtggagagagagagaacagaacaaagagggagagatagagagagagggcaaaaagatgggttaggctgaaaagtgagttggtataacattgttggtttggtttaatttagtttcctcagtgcagagggctcttttattttggtggtgatggaagtgggaaaattgaatggcaggaacttttggaagaggcagaagcaagtttcagagtggtggcagttgcacaagcaacacgaagtgcaaagctgggagtgcaaggaatcaacaacccattaggaataagtgcanagcttcattaaaagctggaagaggaaaatcacaacaggggtctgactctggatcctaacaggaattatcatcatcatcatcttctgcatcaacaa

SEQ ID NO: 57372 - DNA, 392 bp, Glycine max
ggcacaagtgagtttgttgatcgagataactagaaacagtgtgatgaaaatgaaggtccttgttttcttcgttgctacaattttggtagcatggcaatgccatgcgtacgatatgttccctctccgaatgaacactggctatggtgcccgtactccggaggtgaaatgcgcaagttggaggcttgctgtggaagcgcacaacatctttggctttgagaccattcctgaagagtgcgttgaagcaacaaaggaatacatccatggcgaacaatatagatcagactccaaaacagttaaccaacaagcttacttttatgccagagacctcgaagtccatcccaaggacacatttgtgttcagtatagatggcaccgtactctctaatattccat

SEQ ID NO: 57373 - DNA, 368 bp, Glycine max
ggcacaagtgagtttgttgatcgagataactagaaacagtgtgatgaaaatgaaggtccttgttttcttcgttgctacaattttggtagcatggcaatgccatgcgtacgatatgttccctctccgaatgaacactggctatggtgcccgtactccggaggtgaaatgcgcaagttggaagcttgctgtggaagcacacaacatctttggctttgagaccattcctgaagagtgcgttgaagcaacaaaggaatacatccatggtgaacaatatagatcagactccaaaacagttaaccaacaagcttacttttatgccatagacctcgaggtccatcccaaggacacatttgtgttcagtatagatg

SEQ ID NO: 57374 - DNA, 381 bp, Glycine max
ggcacaagtgagtttgttgatcgagataactagaaacagtgtgatgaaaatgaaggtccttgttttcttcgttgctacaattttggtagcatggcaatgccatgcgtacgatatgttccctctccgaatgaacactggctatggtgcccgtactccggaggtgaaatgcgcaagttggaggcttgctgtggaagcacacaacatctttggctttgagaccattcctgaagagtgcgttgaagcaacagaggaatacatccatggcgaacaatatagatcagactccaaaacagttaaccaacaagcttacttttatgccaaagacctcgaagttcacccaaggacacatttgtgttcagtatagatggcaccgtactctct

SEQ ID NO: 57375 - DNA, 382 bp, Glycine max
  unsure (1)..(382): unsure at all n locations
ggcacaagtgagtttgttgatcgagataactagaaacagtgtgatgaaaatgaaggtccttgttttcttcgttgctacaattttggtagcatggcaatgccatgcgtacgatatgttccctctccgaatgaacactggctatggtgcccgtactccggaggtgaaatgcgcaagttggaggcttgctgtggaagcacacaacatctttggctttgagaacattcctgaagagtgcgttgaagcaacanaggaatacatccatggcgaacaatatagatcagactccataacagttaaccaacaagcttacttttatgccagagacctcgaagtccatcacaaggacacatttgtgttcagtatagatggcaccgtactctct

SEQ ID NO: 57376 - DNA, 365 bp, Glycine max
ggtgcacaagtgagtttgttgatcgagataactagaaacagtgtgatgaaaatgaaggtccttgttttcttcgttgctacaattttggtagcatggcaatgccatgcgtacgatatgttccctctccgaatgaacactggctatggtgcccgtactccggaggtgaaatgcgcaagttggaggcttgctgtggaagcacacaacatctttggctttgagaccattcctgaagagtgcgttgaagcaacaaaggaatacatccatggcgaacaatatagatcagactccataacagttaaccaacaagcttacttttatgccagagacctcgaagtccatcgcaaggacacatttgtgttcagtat

SEQ ID NO: 57377 - DNA, 392 bp, Glycine max
gaaggtgcaagagtttgttgtgagctataagctagtttatcgtgaggagaatatgaagttgtttgttttctttgttgctgcagtagttttggtagcatggccatgccatggcgcatgctaccaaaagttccctctccgaatgaaaactggctatggtgagcgttcttcggaggtaaaatgcgcaagttttaggcttgctgtggaagcacacaacatccgagcctttaaaaccattcctgaagagtgcgttgaaccaacaaaggactacattaatggcgaacaatttagatcagactctaaaacagttaaccaacaagctttcttttatgctagtgaacgcgaagtccatcacaacgacatatttatagtcggcatagataacaccgtactct

SEQ ID NO: 57378 - DNA, 173 bp, Glycine max
aggggcacaagtgagtttgttgatcgagataactagaaacagtgtgatgaaaatgaaggtccttgttttcgtcgctgccacgatttaggtagcatagcaatgccatgcgtatgatatgttccctctccgtatgaacactggctatggtgcccgtacgccggaggtgaaatgcg

SEQ ID NO: 57379 - DNA, 388 bp, Glycine max
gaaggtgcaagagtttgttgtgagctataagctagtttatcgtgaggagaatatgaagttgtttgttttctttgttgctgcagtagttttggtagcatggccatgccatggcgcaggctaccaaaggttccctctccgaatgaaaactggctatggtgagcgttcttcggaggtaaaatgcgcaagttttaggcttgctgtggaagcacacaacatccgagcctttaaaaccattcctgaagagtgcgttgaaccaacaaaggactacattaatggcgaacaatttagattagactctaaaacagttaaccaacaagctttcttttatgctagtgaacgcgaagtccatcacaacgacatatttatattcggcatagataacaccgtt

SEQ ID NO: 57380 - DNA, 390 bp, Glycine max
ggcacaagtttgttgagatagctagaagcaataagatgaaaatgaaagtgcttgttttgtttgttgctacagttttggtagcatatgaatgccatggctcagactaccagaagttccctctccaaatgaaaactgggtttggtgggcaatacagcaatgacgtggcatgtgccagttggaggcttggcgtggaagcaaacaacgtagtcaagtggcaaactgttcctgcagcttgcggagagtacatagctgactacgttctaggagaccaatatagatcagattccaaaacagttaaccaacaagcttatttctatgctaaatccctcaaactcaccaacaaagatgtctttgtcttggacgttgacgacactactctctccaatctcc

SEQ ID NO: 57381 - DNA, 382 bp, Glycine max
ggcacaagtgagtttgttgatcgagatagctagaaacagtgtgatgaaaatgaaggtccttgttttcttcgttgctacaattttggtagcatggcaatgccatgcgtacgatatgttccctctccgaatgaacactggctatggtgcccgtactccggaggtgaaatgcgcaagttggaggcttgctgtggaagcacacaacatctttggctttgagaccattcctgaagagtgcgttgaagcaacaaaggaatacatccatggcgaactatatagatcagactccaaaacagttaaccaacaagcttacttttatgccagagacctcgaagtccatcacaaggacaaatttgtgttcagtatagatggcaacgtactctct

SEQ ID NO: 57382 - DNA, 379 bp, Glycine max
ggcacaagtttgttgagatagctagaagcaataagatgaaaatgaaagtgcttgtgttgtttgttgctacagttttggtagcatatgaatgccatggctcagactaccagaagttccctctccaaatgaaaactgggtttggtgggcaatacagcaatgaggtggcatgtgccagttggaggcttggcgtggaagcaaacaacgtagtcaagtggcaaactgttcctgcagcttgcggagagtacatagctgactacgttctaggagaccaatatagatcagattccaaaacagttaaccaacaagcttatttctatgctaaatccctcaaactcaccaacaaagatgtctttgtcttggacgttgacgacactactct

SEQ ID NO: 57383 - DNA, 398 bp, Glycine max
ggcacaagtttgttgagatagctagaagcaataagatgaaaatgaaagtgcttgttttgtttgttgctacagttttggtagcatatgaatgccatggctcagactaccagaagttccctctccaaatgaaaactgggtttggtgggcaatacagcaatgaggtggcatgtgccagttggaggcttggcgtggaagcaaacaacgtagtcaagcggcaaactgttcctgcagcttgcggagagtacatagctgactacgttctaggagaccaatatagatcagattccaaaacagttaaccaacaagcttatttctatgctaaatccctcaaactcaccaacaaagatgtctttgtcttggacgttgacgacactactctctctaatctccagtatttt

SEQ ID NO: 57384 - DNA, 403 bp, Glycine max
gaaggtgcaagagtttgttgtgagctataagctagtttatcgtgaggagaatatgaagttgtttgttttctttgttgctgcagtacttttggtagcatggccatgccatggcgcaggctaccaaaggttccctctccgaatgaaaactggctatggtgagcgttcttcggaggtaaaatgcgcaagttttaggcttgctgtggaagcacacaacatccgagcctttaaaaccattcctgaatagtgcgttgaaccaacacaggactacattaatggcgaacaatttagatcagactctaaaacagttaaccaacaagctttcttttatgctagtgaacgcgaagtccatcacaacgacatatttatattcggcatagataacaccgtactctctaatatccca

SEQ ID NO: 57385 - DNA, 395 bp, Glycine max
ggaagagtgaagagaatggctcccaagggtttaacctttctggctgtgttaatatgcgtttcagcactgtcactgagtccttctgttgcgggggaagggcaaaataatggccttgttatgaacttctacaaggaatcatgccctcaggctgaagacatcatcacagaacaagtcaagcttctctacaagcgccacaagaacactgctttctcctggctcaggaacatcttccatgactgtgctgttcagagttgtgatgcttcactgttgctggactccacaagaaggagcttgtctgagaaggaaacagatagaagctttgggttgagaaatttcaggtacattgagaccatcaaagaagctttggaaagagaatgccctggagttgtttcatg

SEQ ID NO: 57386 - DNA, 387 bp, Glycine max
ggcacaagtttgttgagatagctagaagcaataagatgaatatgaaagtgcttgttgtgtttgttgccacagttttggtagcatatgaatgccatggctcagactaccagaagttccctctccaaatgaaaactgggtttggtgggcaatacagcaatgaggtggcatgtgccagttggaggcttggcgtggaagcaaacaacgtagtcaagtggcaaactgttcctgcagcttgcggagagtacatagctgactacgttctaggagaccaatatagatcagattccaaaacagttaaccaacaagcttacttctatgctaaatcactcaaactcaccaacaaagatgtctttgtcttggacgttgacgacactactctctctaatc

SEQ ID NO: 57387 - DNA, 207 bp, Glycine max
tggggcacatgtttgttgagatagctagaagcactcttattaacatgaaagtgcttgtcttgtttgttgctacagttttggtagcatattaatgccatggctcagactaccagaaattccctctccaaattaaaactgggtttggtgggcattcaagccatgatgtggcatctgccacttcgacgcatggcctggaagcacacaacg

SEQ ID NO: 57388 - DNA, 385 bp, Glycine max
ggcacaagtttgttgagatagctagaagcaataagatgaaaatgaaagtgcttgttttgtttgttgctacagttttggtagcatatgaatgccatggctcagactaccagaagttccctctccaaatgagaactgggtttggtgggcaatacagcaatgaagtggcttgtggcaattggaagcgtggcgtggaagcaaacaacgtagtcaagtggcaaactgttcctgcagcttgcggagagtacatagctgactacgttctaggagaccaatatagatcagattccaaaacagttaaccaacaagcttatttctatgctaaatccctcaaactcaccaacaaagatgtctttgtcttggacgttgacgacactactctctctaa

SEQ ID NO: 57389 - DNA, 385 bp, Glycine max
  unsure (1)..(385): unsure at all n locations
ggcacaagtgagtttgttgatcgagataactagaaacagtgtgatgaaaatgaaggtccttgttttcttcgttgctacaattttggtagcatggcaatgccatgcgtacgatatgttccctctccgaatgaacactggctatggtgcccgtactccggaggtgaaatgcgcaagttggaggcttgctgtggaagcacacaacatctttggctttgagaccattcctgaagagtgcgttgaagcaacaaaggaatacatccatggcgaacaatatagattagactccaaaacagttaaccaacaagcttacttttatgccagagacctcgaagtccatcncaaggacacatttgtgttcagtatagatggcaccgtactctctaat

SEQ ID NO: 57390 - DNA, 407 bp, Glycine max
ggcacaagtgagtttgttgatcgagataactagaaacagtgtgatgaaaatgaaggtccttgttttcttcgttgctacaattttggtagcatggcaatgccatgcgtacgatatgttccctctccgaatgaacactggctatggtgcccgtactccggaggtgaaatgcgcaagttggaggcttgctgtggaagcacacaacatctttggctttgagaccattcctgaagagtgcgttgaagcaacaaaggaatacatccatggcgaacaatatagatcagactccaaaacagttaaccaacaagcttacttttatgccagagacctcgaagtccatcccaaggacacatttgtgttcagtatagatggcaccgtactctctaataatccatactacaaaaaacatg

SEQ ID NO: 57391 - DNA, 234 bp, Glycine max
ggcacatgtgagtttgttgctcaagacaactacaagtaatgtgatgaaacttaaagtccctgctgtcttcggggctataagcatggttgccaggtcagatcaatcgtaggaaaagttccctccacgtcatgaaatcgagcgatagcgctcctcatccggatgtgacacgcccaacttggacgattgctgcggaaacccacaatacagttggcgctgacaatattcctcaaaaat

SEQ ID NO: 57392 - DNA, 388 bp, Glycine max
ggcacaagtttgttgagatagctagaagcaataagatgaaaatgaaagtgcttgttttgtttgttgctacagttttggtagcatatgaatgccatggctcagactaccagaagttccctctccaaatgaaaactgggtttggtgggcaatacagcaatgaggtggcatgtgccagttggaggcttggcgtggaagcaaacaacgtagtcaagtggcaaactgttcctgcagcttgcggagagtacatagctgactacgtcctaggagaccaatatagatcagattccaaaacagttaaccaataagcttatttctatgctaaatccctcaaactcaccaacaaagatgtctttgtcttggacgttgacgacactactctctctaatct

SEQ ID NO: 57393 - DNA, 383 bp, Glycine max
gaaggtgcaagagtttgttgtgagctataagctagtttatcgtgaggagaatatgaagttgtttgttttctttgttgctgcagtagttttggtagcatggccatgccatggcgcaggctaccaaaggttccctctccgaatgaaaactggctatggtgagcgttcttcggaggtaaaatgcgcaagttttaggcttgctgtggaagcacacaacatccgagcctttaaaaccattcctgaagagtgcgttgaaccaacaaaggactacattaatggcgaacaatttagatcagactctaaaacagttaaccaacaagctttcttttatgctagtgaacgcgaagtccatcacaacgacatatttatattccgcatagataaca

SEQ ID NO: 57394 - DNA, 235 bp, Glycine max
gaatgttgtgttgtgtcgcttcgcttcacaaactctcttcttctattgcaaagacccttttgaagtaatccatggagtctcagtcactttcgagattctagcttcgtcattccttaagcaatctcgtgcttgcactctttcaggcggcaggtaatagtgaagtcgcttactgcgataagaaggcagattatccggtaaaggtgtcgggagttgagatctcaccagaccctgtgga

SEQ ID NO: 57395 - DNA, 359 bp, Glycine max
gcacaagtgagtttgttgatcgagataactagaaacagtgtgatgaaaatgaaggtccttgtttacttcgttgctacaattttggtagcatggcaatgccatgcgtacgaaatgttccctctccgaatgaacactggctatggtgcccgtactccggacgtgaaatgcgcaagttggaggcttgctgtggaagcacacaacatctttggctttgagaccattcctgagtaatgcgtttgaacaacaaaggaatacatccatggcgaacaatatagatcagactccaaaacagttaaccaacaagcttacttttatgccagagacctcgaagtcaatcccaaggacacatttgtgttcag

SEQ ID NO: 57396 - DNA, 384 bp, Glycine max
ggcacaagtttgttgagatagctagaagcaataagatgaaaatgaaagtgcttgttttgtttgttgctacagttttggtagcatatgaatgccatggctcagactaccagaagttccctctccaaatgaaaactgggtttggtgggcaatacagcaatgaggtggcatgtgccagttggaggcttggcgtggaagcaaacaacgtagtcaagtggcaaactgttcctgcagcttgcggagagtacatagctgactacgttctaggagaccaatatagatcagattccgaaacagttaaccaacaagcttatttctatgctaaatcgctcaaactcaccaacaaagatgtctttgtcttggacgttgacgacactactctctcta

SEQ ID NO: 57397 - DNA, 382 bp, Glycine max
  unsure (1)..(382): unsure at all n locations
ggcacaagtttgttgagatagctagaagcaataagatgaaaatgaaagtgcttgttttgtttgttgctacagttttggtagcatatgaatgccatggctcagactaccagaagttccctctccaaatgaaaactgggtttggtgggcaatacagcaatgaggtggcatgtgccagttggaggcttggcgtggaagcaaacaacgtagtcaagtggcaaactgttcctgcagcttgcggagagtacatagctgactacgttctaggagaccaatatagatcagattccacaacagttaaccaacaagcttatttctatgctaaatcnctcaaactcaccaacaaagatgtctttgtcttggacgttgactacactactctctc

SEQ ID NO: 57398 - DNA, 395 bp, Glycine max
ggcacaagtgagtttgttgatcgagataactagaaacagtgtgatgaaaatgaaggtccttgttttcttcgttgctacaattttggtagcatggcaatgccatgcgtacgatatgttccctctccgaatgaacactggctatggtgcccgtactccggaggtgaaatgcgcaagttggaggcttgctgtggaagcacacaacatctttggctttgagaccattcctgaagagtgcgttgaagcaacaaaggaatacatccacggcgaacaatatagatcagactccaaaacagttaaccaacaagcttacttttatgccagagacctcgaagtccatcccaaggacacatttgtgttcagtatagatggcaccgtactctctaatattccatact

SEQ ID NO: 57399 - DNA, 54 bp, Glycine max
aattcccgggtcgacccacacgtccaacggggtgcgaaaaaaccaccgaaaggg

SEQ ID NO: 57400 - DNA, 107 bp, Glycine max
gggtgcaagagtttgttgtgagctataagctagtttatcgtgaggagaatatgaagttgtttgttttctttgttgctgcagtacttttggtagcatggccatgccat

SEQ ID NO: 57401 - DNA, 382 bp, Glycine max
  unsure (1)..(382): unsure at all n locations
ggcacaagtgagtttgttgatcgagataactagaaacagtgtgatgaaaatgaaggtccttgttttcttcgttgctacaattttggtagcatggcaatgccatgcgtacgatatgttccctctccgaatgaacactggctatggtgcccgtactccggaggtgaaatgcgcaagttggaggcttgctgtggaagcacacaacatctttggctttgagaccattcctgaagagtgcgttgaatcagcataggaatacatccatggcgaacantatagatcggactccataacagttaaccaacaagcttacttttatgccagagacctcgaagtccatcccaaggacacatttgtgttcagtatagatggcaccgtactctct

SEQ ID NO: 57402 - DNA, 394 bp, Glycine max
ggcacaagtgagtttgttgatcgagataactacaaacagtgtgatgaaaatgaaggtccttgttttcttcgttgctacaattttggtagcatggcaatgccatgcgtacgatatgttccctctccgaatgaacactggctatggtgcccgtactccggaggtgaaatgcgcaagttggaggcttgctgtggaagcacacaacatctttggctttgagaccattcctgaagagtgcgttgaatcaacaaaggaatacatccatggcgaacactatagatcagactccaaaacagttaaccaacaagcttacttttatgccagagacctcgaagtccatcccaaggacacatttgtgttcagtatagatggcaccgtactctctaatattccatac

SEQ ID NO: 57403 - DNA, 382 bp, Glycine max
gaactcgttctagtgtgtgattgtttgttgttgtaactcgttcttcttcttttgttgttctgtgtttgtgtttgttttttctctcacctgaaaatgtcttgctgcggtggtaactgtggttgcggaagctcctgcaagtgcggcaacggctgcggaggctgcaagatgtacccagacttgagctacactgagtcaaccaccaccgagaccttggtcatgggagtggcacctgttaaggctcaatttgagggtgctgaaatgggtgtgcccgctgagaacgatggctgcaaatgtggaccaaactgctcctgcaacccctgcacttgcaagtgaggtgttgggagagcaagcttcaagcagagatagcccttaattaggaata

SEQ ID NO: 57404 - DNA, 315 bp, Glycine max
gagcgaaacagagagtgatttcagtgagtgatcggtgttcacttgatctcatcataatcgtcagcgtcaattgaagaagatgccgatcagaaacatcgccgtcggaaggcctgaagaggcgactcaccccgacacgttgaaggcggctttggctgagttcatctcaaccttcatcttcgtgttcgccggctcaggctccggcatcgcctacaacaagctcaccgacaacggcgctgccacccctgccggcctcatctccgcctccatcgcccatgcattcgccctcttcgtcgccgtctccgtcggcgccaacat

SEQ ID NO: 57405 - DNA, 309 bp, Glycine max
gacaagtgagtttgctgatcgagataactagaaacagtgtgatgaaaatgaaggtccttgttttcttcgttgctacaattttggtagcatggcaatgccatgcgtacgatatgttccctctccgaatgaacactggctatggtgcccgtactccggaggtgaaatgcgcaagttggaggcttgctgtggaagcacacaacatctttggctttgagaccattcctgaagagtgcgttgaagcaacaaaggaatacatccatggcgaacaatatagatcagactccaaaacagttaaccaacaagcttact

SEQ ID NO: 57406 - DNA, 326 bp, Glycine max
ggcacaagtgagtttgttgatcgagataactagaaacagtgtgatgaaaatgaacgtccttggtgtcttcgtctgctacaagtttggtaacatggcaatgccaagcctacgatatgttccctctccgaatgaacactggctatggtgcccgtactccggatgtgaaatgcgcaacttggacgcttgctgtagaagcacacaacatctttggctttgagaccattcctgaagagtgcgttgaggcaacatcggcatacatccatggcgaacaatatacatcagactccaaaacagttaaccaacaagcttacttttatgccagagac

SEQ ID NO: 57407 - DNA, 346 bp, Glycine max
ggcacaagtgagtttgttgattgagataactagaaacagtgtgatgaagatgaaggtccttgttttcttcgttgctacaattttggtagcatggcaatgccatgcgtacgatatgttccctctccgaatgaacactggctatggtgcccgtactccggaggtgaaatgcgcaagttggaggcttgctgtggaagcacacaacatctttggctttgagaccattcctgaagagtgcgttgaagcaacaaaggaatacatccatggcgaacaatatagatcagactccaaaacagttaaccaacaagcttacttttatgccagagacctcgaagtccatcccaaggac

SEQ ID NO: 57408 - DNA, 221 bp, Glycine max
  unsure (1)..(221): unsure at all n locations
tgggacgattactagaggtganaaacaattatctaagcatgtatagcgtgtattacattgagaaaaaaaaattgttgggtaaagagaaatggctaggtggtgcatcttggaggttcttgcccttgtcgtggttgacagtgcaaaaaccatgccaaatgacccaggtttggaggacaagaaaaccttccccgggtaggggtcccctggatttggaaaaattg

SEQ ID NO: 57409 - DNA, 306 bp, Glycine max
  unsure (1)..(306): unsure at all n locations
ggcacaagtttgttgagatagctagaagcaataagatgaaaatgaaagtgcttgttttgtttgttgctacagttttggtagcatatgaatgccatggctcagactaccagaagttccctctccaaatgaaaactgggtttggtgggcaatacagcaatgaggtggcatgtgccagttggaggcttggcgtggaagcaaacaacgtagtcaagtggcaaactgttcctgcagcttgcggagagtacatagctgactacgttctangagaccaatatagatcagattccaaaacagttaaccaacaag

SEQ ID NO: 57410 - DNA, 286 bp, Glycine max
ggcacaagtgagtttgttgatcgagataactagagacagtgtgatgaaaatgaaggtccttgttttcttcgttgctacaattttggtagcatggcaatgccatgcgtacgatatgttccctctccgaatgaacactggctatggtgcccgtactccggaggtgaaatgcgcaagttggaggcttgctgtggaagcacacaacatctttggctttgagaccattcctgaagagtgcgttgaagcaagaaaggaatacatccatggcgaacaatatagatcagactcc

SEQ ID NO: 57411 - DNA, 180 bp, Glycine max
acatataagcataatctctggaaaaccttatctgatcctggctcatagccgacgaataaggatggggcaaactatgtggcctggtttggggttcagaatttaaccatagttttactcatttacatatatatattgaatgcacattctgtagcatacgatatcttgtatacggttgaatat

SEQ ID NO: 57412 - DNA, 388 bp, Glycine max
ggcacaagtgagtttgttgatcgagataactagaaacagtgtgatgaaaatgaaggtccttgttttcttcgttgctacaattttggtagcatggcaatgccatgcgtacgatatgttccctctccgaatgaacactggctatggtgcccgtactccggaggtgaaatgcgcaagttggaggcttgctgtggaagcacacaacatctttggctttgagaccattcctgaagagtgcgttgaagcaacagatgaatacatccatggcgaacaatatagattagactccaaaacagttaaccaacaagcttacttttatgccagagacctcgaagtccatcccaaggacacatttgtgttcagtatagaaggcaccgtactctccaatatt

SEQ ID NO: 57413 - DNA, 380 bp, Glycine max
ggtgcacaagtgagtttgttgatcgagataactagaaacagtgtgatgaaaatgaaggtccttgttttcttcgttgctacaattttggtagcatggcaatgccatgcgtacgatatgttccctctccgaatgaacactggctatggtgcccgtactccgggggtgaaatgcgcaagttggaggcttgctgtggaagcacacaacatctttggctttgagaccattcctgaagagtgcgttgaagcaacaaaggaatacatccatggcgaacaatatagatcagactccaaaacagttaaccaacaagcttacttttatgccagagacctcgaagtccatcccaaggacacatttgtgttcagtatagatggcaccgtact

SEQ ID NO: 57414 - DNA, 382 bp, Glycine max
gaaggtgcaagagtttgttgtgagctataagctagtttatcgtgaggagaatatgaagttgtttgttttctttgttgctgcagtagttttggtagcatggccatgccatggcgcaggctaccaaaggttccctctccgaatgaaaactggctatggtgagcgttcttcggaggtaaaatgcgcaagttttaggcttgctgtggaagcacacaacatccgagcctttaaaaccattcctgaagagtgcgttgaaccaacaaaggactacattaatggcgaacaatttagatcagactctaaaacagttaaccaacaagctttcttttatgctagtgaacgcgaagtccatcacaacgacatatttatagtcggcagagataca

SEQ ID NO: 57415 - DNA, 68 bp, Glycine max
ttccaaaaaaacaacaaagggggacctcgctgtgaacacatcaatggattacacaaaacctaggcatc

SEQ ID NO: 57416 - DNA, 391 bp, Glycine max
ggcacaagtgagtttgttgatcgagataactagaaacagtgtgatgaaaatgaaggtccttgttttcttcgttgctacaattttggtagcatggcaatgccatgcgtacgatatgttccctctccgaatgaacactggctatggtgcccgtactccggaggtgaaatgcgcaagttggaggcttgctgtggaagcacacaacatctttggctttgagaccattcctgaagagtgcgttgaagcaacaaaggaatacatccatggcgaacaatatagatcagactccaaaacagttaaccaacaagcttacttttatgccagagacctcgaagtccatcccaaggacacatttgtgttcagtatacatggcaccgtactctctaatattccg

SEQ ID NO: 57417 - DNA, 387 bp, Glycine max
ggttctagtgtgtgattgtttgttgttgtaactcgttcttcttcttttgttgttctgtgtttgtgtttgttttttctctcacctgaaaatgtcttgctgcggtggtaactgtggttgcggaagctcctgcaagtgcggcaacggctgcggaggctgcaagatgtacccagacttgagctacactgagtcaaccaccaccgagaccttggtcatgggagtggcacctgttaaggctcaatttgagggtgctgaaatgggtgtgcccgctgagaacgatggctgcaaatgtggaccaaactgctcctgcaacccctgcacttgcaagtgaggtgttgggagagcaagcttcaagcagagatagcccttaattaggaataatgataaact

SEQ ID NO: 57418 - DNA, 388 bp, Glycine max
ggccctccttctctcttccttccttccaacgactacaaatcactgcaatcaaggtttgacttccatgggaccctgttaagcttccggaaccccattccaaatttctccgtgttggatgcgtcctccaaacaaaatgggaataagggccaatcccaaaaatttgaatttccgaaattgcagaataaaggttaagagccccaaaaattgccccagaaaagggtcgtgacgtaaccccgttgggtccttggccttctgaaggatctgcaccaaaagtgcacaaaggagatggatgaatatgttggctgcatgtactaccatacaaatgaatttgacgtgtgtcgcaaagagcagcaagcatttgagaaaaagtgcgctttggaatgaaatt

SEQ ID NO: 57419 - DNA, 386 bp, Glycine max
ggcacaagtgagtttgttgatcgagataactagaaacagtgtgatgaaaatgaaggtccttgttttcttcgttgctacaattttggtagcatggcaatgccatgcgtacgatatgttccctctccgaatgaacactggctatggtgcccgtactccggaggtgaaatgcgcaagttcgaggcttgctgtggaagcacacaacatctttggctttgagaccattcctgaagagtgcgttgaagcaacagaggaatacatccatggcgaacaatatagatcagactccaaaacagttaaccaacaagcttacttttatgccagagacctcgaagtccatcccaaggacacatttgtgttcagtagagatggcaccgtactctctaata

SEQ ID NO: 57420 - DNA, 395 bp, Glycine max
  unsure (1)..(395): unsure at all n locations
gacaagtgagtttgttgatcgagataactagaaacagtgtgatgaaaatgaaggtccttgttttcttcgttgctacaattttggtagcatggcaatgccatgcgtacgatatgttccctctccgaatgaacactggctatggtgcccgtactccggaggtgaaatgcgcaagttggaggcttgctgtggaagcacacaacatctttggctttgagaccattcctgaagagtgcgttgaancaacaaaggaatacatccatggcgaacaatatagatcagactccaaaacagttaaccaacaagcttacttttatgccagagacctcgaagtccatcncaaggacacatttgtgttcagtatagatggcaccgtactctcgaatattcaatactac

SEQ ID NO: 57421 - DNA, 388 bp, Glycine max
ggcacaagtgagtttgttgatcgagataactagaaacagtgtgatgaaaatgaaggtccttgttttcttcgttgctacaattttggtagcatggcaatgccatgcgtacgatatgttccctctccgaatgaacactggctatggtgcccgtactccggaggtgaaatgcgcaagttggaggcttgctgtggaagcacacaacatctttggctttgagaccattcctgaagagtgcgttgaagcaacagaggaatacatccatggcgaacaatatagatcagactccaaaacagttaaccaacaagcttacttttatgccagagacctcgaagtccatcccgaagacacatttgtgttcagtatagatggcaacgtacgctctaatatt

SEQ ID NO: 57422 - DNA, 370 bp, Glycine max
ggcacaagtgagtttgttgatcgagataactagaaacagtgtgatgaaaatgaaggtccttgttttcttcgttgctacaattttggtagcatggcaatgccatgcgtacgatatgttccctctccgaatgaacactggctatggtgcccgtactccggaggtgaaatgcgcaagttggatgcttgctgtggaagcacacagcatctttggctttgagaccattcctgaagagtgcgttgaagcaacagaggaatacatccatggcgaacaatatagatcagactccaaaacagttaaccaacaagcttacttttatgccagagacctcgaagtccatcccaaggacacatttgtgttcagtatagagggc

SEQ ID NO: 57423 - DNA, 391 bp, Glycine max
gaaggtgcaagagtttgttgtgagctataagctagtttatcgtgaggagaatatgaagttgtttgttttctttggtgctgcagtagttttggtagcatggccatgccatggcgcaggctaccaaaggttccctctccgaatgaaaactggctatggtgagcgttcttcggaggtaaaatgcgcaagttttaggcttgctgtggaagcacacaacatccgagcctttaaaaccattcctgaagagtgcgttgaaccaacaaaggactacattaatggcgaacaatttagatcagactctaaacagttaaccaacaagctttcttttatgctagtgaacgcgaagtccatcacaacgacatatttatattcggcataggtaacaccgtactct

SEQ ID NO: 57424 - DNA, 350 bp, Glycine max
gcacaagtgagtttgttgatcgagataactagaaacagtgtgatgaaaatgaaggtccttgttttcttcgttgctacaattttggtagcatggcaatgccatgcgtacgatatgttccctctccgaatgaacactggctatggtgcccgtactccggaggtgaaatgcgcaagttggaggcttgctgtggaagcacacaacatctttggctttgagaccattcctgaagagtgcgttgaagcaacagaggaatacatccatggcgaacaatatagatcagactccaaaacagttaaccaacaagcttacttttatgccagagacctcgaagtccatcccaaagacacatt

SEQ ID NO: 57425 - DNA, 389 bp, Glycine max
  unsure (1)..(389): unsure at all n locations
ggcacaagtgagtttgttgatcgagataactagaaacagtgtgatgaaaatgaaggtccttgttttcttcgttgctacaattttggtagcatggcaatgccatgcgtacgatatgttccctctccgaatgaacactggctatggtgcccgtactccggaggtgaaatgcgcaagttggaggcttgctgtggaagcacacaacatctttggctttgagaccattcctgaagagtgcgttgaagcaacaaaggaatacatccatggcgaacaatatagatcagactccanaacagttaaccaacaagcttacttttatgccagagaactcgaagtccatcccaaggacacatttgtgttcagtatagatgggcacgtactctctaatattc

SEQ ID NO: 57426 - DNA, 369 bp, Glycine max
  unsure (1)..(369): unsure at all n locations
ggaacgaaaattagggtttgtagtgtagcaggaagaagcagcaatggcgccgaagataacacgtaaggttagcagaaaccctgaattgataaggggaaaatgaaagtgcttgttttgtttgttgctacagttttggtagcatatgaatgccatggctcagactaccagaagttccctctcgaaatgaaaactgggtttggtgggcaatacagcaatgaggtggcatgtgccagttggaggcttggcgtggaagcaaacaacgtagtcaagtggcaaactgttcctgcagcttgcggagagtacatagctgactacgttctangagaccaatatagatcagattccaaaacagttaaccaacaagcttat

SEQ ID NO: 57427 - DNA, 388 bp, Glycine max
ggcacaagtgagtttgttgatcgagataactagaaacagtgtgatgaaaatgaaggtccttgttttcttcgttgctacaattttggtagcatggcaatgccatgcgtacgatatgttccctctccgaatgaacactggctatggtgcccgtactccggacgtgaaatgcgcaagttggaggcttgctgtggaagcacacaacatctttggctttgagaccattcctgaagagtgcgttgaagcaacaaaggaatacatccatggcgaacaatatagatcagactccaaaacagttaaccaacaagcttacttttatgccagagacctcgaagtccatcccaaggacacatttgtgttcagtatagatggcaccgtaatctctaatatt

SEQ ID NO: 57428 - DNA, 387 bp, Glycine max
ggcacaagtgagtttgttgatcgagataactagaaacagtgtgatgaaaatgaaggtccttgttttcttcgttgctacaattttggtagcatggcaatgccatgcgtacgatatgttccctctccgaatgaacactggctatggtgcccgtactccggaggtgaaatgcgcaagttggaggcttgctgtggaagcacacaacatctttggctttgagaccattcctgaagagtgcgttgaagcaacaaaggaatacatccatggcgaacaatatagatcagactccaaaacagttaaccaacaagcttacttttatgccagagacctcgaagtccatcccaaggacacatttgtgttcagtatagatggcaccgtactctcgaatat

SEQ ID NO: 57429 - DNA, 398 bp, Glycine max
gaaggtgcaagagtttgttgtgagctataagctagtttatcgtgaggagaatatgaagttgtttgttttcgttgttgctgcagtagttttggtagcatggccatgccatggcgcaggctaccaaaggttccctctccgaatgaaaactggctatggtgagcgttcttcggaggtaaaatgcgcaagttttaggcttgctgtggaagcacacaacatccgagcctttaaaaccattcctgaagagtgcgttgagccaacaaaggactacattaatggcgaacaatttagatcagactctaaaacagttaaccaacaagctttcttttatgctagtgaacgcgaagtccatcacaacgacatatttatattcggcatagataacagcgtactctctaata

SEQ ID NO: 57430 - DNA, 390 bp, Glycine max
ggcacaagtgagtttgttgatcgagataactagaaacagtgtgatgaaaatgaaggtccttgttttcttcgttgctacaattttggtagcatggcaatgccatgcgtacgatatgttccctctccgaatgaacactggctatggtgcccgtactccggaggtgaaatgcgcaagttggaggcttgctgtggaagcacacaacatctttggctttgagaccattcctgaagagtgcgttgaagcaacagaggaatacatccatggcgaacaatatagatcagactccataacagttaaccaacaagcttacttttatgccagagacctcgaagtccatcgcaaggacacatttgtgttcagtatagatggcaccgtagtctctaatattcc

SEQ ID NO: 57431 - DNA, 314 bp, Glycine max
ttccagaggatgatcatgacgaatactgcgcacatggaacaagagtacgccgaaaagcgttccaaactctgcctgcatgagaccgatgaaacgcagaggaagaaattggatgaactgaaagtcgtggaaaattcctaatttgattacgataaaatgaaccagagaatgcaagatgagattgatggcttactgcggagaatggaagcaacatagcatcaatgggtttaattttatttttgttgcatttccttaggttttcttactcaggatactgctaaatgtgtaatttaatgatatgtgatgtgttggtaatg

SEQ ID NO: 57432 - DNA, 357 bp, Glycine max
gagcgaaacagagagtgatttcagtgagtgatcggtgttcacttgatctcatcataatcgtcagcgtcagttgaagaagatgccgatcagaaacatcgccgtcggaaggcctgaagaggcgactcaccccgacacgttgaaggcggctttggctgagttcatctcaaccttcatcttcgtgttcgccggctcaagctccggcatcgcctacaacaagctcaccgacaacggcggctgccacccctgccggcctcatctccgcctccatcgcccatgcattcgccctcttcgtcgccgtctccgtcggcgccaacatctccggcggccacgtcaaccccgccgtcaacttcggcgcct

SEQ ID NO: 57433 - DNA, 218 bp, Glycine max
ggtatgttacaaacgattcactcactctcactctcacaggcaatttgacgcactcacgctcacacgcagttggtgtcgtagtgggaagcgcacggactcaacgcgaacagttcgggtaaatggtcaaaccggggtagcaggtctgcctctacgaggtgatgctggagttcatggagaagggctccagctccgccgacagcgaggagctgaccgtggac

SEQ ID NO: 57434 - DNA, 392 bp, Glycine max
ggcacaagtgagtttgttgatcgagataactagaaacagtgtgatgaaaatgaaggtccttgttttcttcgttgctacaattttggtagcatggcaatgccatgcgtacgatatgttccctctccgaatgaacactggctatggtgcccgtactccggaggtgaaatgcgcaagttggaggcttgctgtggaagcacacaacatctttggctttgagaccattcctgaagagtgcgttgaagcaacaaaggaatacatccatggcgaacaatatagatcagactccaaaacagttaaccaacaagcttacttttatgccagagacctcgaagtccatcccaaggacacatttgtgttcagtatagatggcaccgtactctctaatattccat

SEQ ID NO: 57435 - DNA, 311 bp, Glycine max
  unsure (1)..(311): unsure at all n locations
gcctcttctctcgcgtcgctccgcaccaatttcaccgcacgaatatcctgttgtttggagcgattcgagaaaaactctgtaaacatgttggtttaccaggacctccttacaggtgatgagcttctctctgactccttccgttacaaggaaattgagaatggaatgctgtgggaagttgaggggaagtgggttgttaaaggagcagttgatgtagacattggtgcaaacccttctgctgaaggtggaggagaagatganggagttgatgatgcagctgttaaagttgttgacattgttgacacattcagact

SEQ ID NO: 57436 - DNA, 325 bp, Glycine max
gattttagcggttcaaatcacaacttcggctcttccgactcctatagcacgtttcgtcgcaatcatgaacattgtcaagatcgggatcacctgctttggaagtattgactgtatgattgacacactcacactggttacgcaacgatgtagagctcatgacagtaatgcagcctttcgataacaccgtttacatgacatacatgttggttaacgtcaatgttcacagccagtggtcacatcaagaggtcaccgttaaggacgaaaatacccatcgtcttcggtgacaaggcactcactgtttttggacacagctatcctgaagaga

SEQ ID NO: 57437 - DNA, 317 bp, Glycine max
ggcacaagtgagtttgttgatcgagataactagaaacagtgtgatgaaaatgaaggtccttgttttcttcgttgctacaattttggtagcatggcaatgccatgcgtacgatatgttccctctccgaatgaacactggctatggtgcccgtactccggaggtgaaatgcgcaagttggaggcttgctgtggaagcacacaacatctttggctttgagaccattcctgaagagtgcgttgaagcaacaaaggaatacatccatggcgaacaatatagatcagactccaaaacagttaaccaacaagcttacttttatt

SEQ ID NO: 57438 - DNA, 373 bp, Glycine max
cagtaggaatgcaacaagacaacggaagggagggcctagttaacgtgactccagtactgtgtccatggcggctgcgtttacaagtatcagtgtaagactgatactgtcaactgttggagagaccagaggtttgcaactgcgtatgtgtaaccctaatcctaagaagctgaaagttatggaggggtttggaagatgttctggagtggcagtgggtgtgagaaaaagaaatcgaattggaacggttacggttcgggatcgggcaagttcttcgtcggacgatgccatgaatgcgcaatcaaaaatgactcagaaagtaatcattgacgtcagtattggaaatccatttgtgaagcttgtgtcacgtattgtgatt

SEQ ID NO: 57439 - DNA, 95 bp, Glycine max
ggtcaggaatacccgggtcgaccaagccttcaacggatgcgtcagcacaacagtccgcggtggctcctgtatggcagatagaagcctacacaacg

SEQ ID NO: 57440 - DNA, 324 bp, Glycine max
ggcacaagtgagtttgttgatcgagataactagaaacagtgtgatgaaaatgaaggtccttgttttcttcgttgctacaattttggtagcatggcaatgccatgcgtacgatatgttccctctccgaatgaacactggctatggtgcccgtactccggaggtgaaatgcgcaagttggaggcttgctgtggaagcacacaacatctttggctttgagaccattcctgaagagtgcgttgaagcaacaatggaatacatccatggcgaacaatatagattagactccaaaacagttaaccaacaagcttacttttatgccataga

SEQ ID NO: 57441 - DNA, 377 bp, Glycine max
gactcaccacttcaaaacactcataacacaaagcacaaagcaaagctcatccttgagttaaaaaatggcagcagcttcttccatggctctctcatccccatccttggctggcaaggccgtgaagctgggcccatcagccccagaagtgggaagggtgagcatgaggaagaccgtcaccaagcaggtctcctcaggaagcccatggtacggcccagaccgagtcaagtacttgggcccattctctggcgagcccccgtcctacctaaccggtgagttcccaggcgactacggctgggacactgctgggctttccgcagacccagaaaccttcgccaagaaacgtgaactcgaagtgattcactccaggtgggccatgc

SEQ ID NO: 57442 - DNA, 326 bp, Glycine max
gcacaagtgagtttgttgatcgagataactagaaacagtgtgatgaaaatgaaggtccttgttttcttcgttgctacaattttggtagcatggcaatgccatgcgtacgatatgttgcctctccgaatgaacactggctatggtgcccgtaatcgggaagtgaaatgcgcaagttggaggcttgctgtggaagcacacaacatctttggctttgagaccattcctgaagagtgcgttgaagcaacagaagaatacatccatggcgaacaatatatatcagactccataacagttaaccaacaagcttacttttatgccagagacct

SEQ ID NO: 57443 - DNA, 330 bp, Glycine max
ggcacaagtgagtttgttgatcgagataactagaaacagtgtgatgaaaatgaaggtccttgttttcttcgttgctacaattttggtagcatggcaatgccatgcgtacgatatgttccctctccgaatgaacactggctatggtgcccgtactccggaggtgaaatgcgcaagttggaggcttgctgtggaagcacacaacatctttggctttgagaccattcctgaagagtgcgttgaagcaacaaaggaatacatccatggcgaacaatatagatcagactccaaaacagttaaccaacaagcttacttttatgccagagacctcca

SEQ ID NO: 57444 - DNA, 386 bp, Glycine max
ggcacaagtgagtttgttgatcgagataactagaaacagtgtgatgaaaatgaaggtccttgttttcttcgttgctacaattttggtagcatggcaatgccatgcgtacgatatgctccctctccgaatgaacactggctatggtgcccgtactccggaggtgaaatgcgcaagttggaggcttgctgtggaagcatacaacatctttggctttgagaccattcctgaagagtgcgttgaagcaacaaaggaatacatccatggcgaacaatatagatcagactccaaaacagttaaccaacaagcttacttttatgccagagacctcgaagtccatcccaaggacacatttgtgttcagtatagatggcaccgtactctctaata

SEQ ID NO: 57445 - DNA, 329 bp, Glycine max
  unsure (1)..(329): unsure at all n locations
ggcacaagtttgttgagatagctagaagcaataagatgaaaatgaaagtgcttgttttgtttgttgctacagttttggtaacatatgaatgccatggctcagactaccagaagttccctctccaaatgaaaactgggtttggtgggcaatacagcaatgaggtggcatgtgccagttggaagcttggcgtggaagcaaacaacgtagtcaagtggcaaactgttcctgcagcttgcggagagtacatagctgactacgttctangagaacaatatagatcagattccanaacagttaaccaacaagcttatttctatgctaaatccctc

SEQ ID NO: 57446 - DNA, 381 bp, Glycine max
gacaagtttgttgagatagctagaagcaataagatgaaaatgaaagtgcttgttttgtttgttgctacagttttggtagcatatgaatgccatggctcagactaccagaagttccctctccaaatgaaaactgggtttggtgggcaatacagcaatgaggtggcatgtgccagttggaggcttggcgtggaagcaaacaacgtactcaagtggcaaactgttcctgcagcttgcggagagtacatagctgactacgttctaggagaccaatatagatcagattccaaaacagttaaccaacaagcttatttctatgctaaatccctcaaactcaacaacaaaaaagtctcttgccttggacgttgacgacactaccctctc

SEQ ID NO: 57447 - DNA, 342 bp, Glycine max
atgtttagtatatttaataacatcaactgaaactttataccgattccaatattttattcagcgcgttcatgcaacacgtcctagtaattccaattcactcacttttctcgtgacaggtattagtgttctcatattatgcttgttttaaccacattttgtgaatgtgtttttttccttcctttatattgcatcaaggtcccatttacgccttactgcttatatgtttcagttcttctgttattcatgatactgaactctcaccagatgtccccaaactttctggtaaggtcttgtagtatgtaaagcagacatgcaagtttttttatgaaaattatgacattt

SEQ ID NO: 57448 - DNA, 379 bp, Glycine max
aatactcttattataataaaaataactataattaatatgctaaaaaaatttaagatatccaattatgagcagaaataattcttatattatgatcaattttatactttcattctaaatatctcacaaaatacttaattaaaatagtattaaaaatttattctacttaaaagacaatataaaagtattggtttgattctaataattttagtttattaatctatgaaacaagatgtgtgaggttcgtttctaataatgggttcctcccttttctcattctttaatttcattttgtttttactctttataagacttattataaatctcacctttaagaagaaaagaataggaaaaggagaagttatgcagcattaatattgga

SEQ ID NO: 57449 - DNA, 364 bp, Glycine max
ggcacaagtttgttgagatagctagaagcaataagatgaaaatgaaagtgcttgttttgtttgttgctacagttttggtagcatatgaatgccatggctcagactaccagaagttccctctccaaatgaaaactgggtttggtgggcaatacagcaatgaggtggcatgtgccagttggaggcttggcgtggaagcaaacaacgtagtcaagtggcaaactgttcctgcagcttgcggagagtacatagctgactacgttctaggagaccaatatagatcagattccaaaacagttaaccaacaagcttatttctatgctaaatccctcaaactcaccaacaaagatgtctttgtcttggacgt

SEQ ID NO: 57450 - DNA, 92 bp, Glycine max
ggttctagtgtgtgattgtttgttgttgtaactcgttcttcttcttttgttgttctgtgtttgtgtttgttttttctctcacctgaaaatgt

SEQ ID NO: 57451 - DNA, 391 bp, Glycine max
ggcacaagtgagtttgttgatcgagataactagaaacagtgtgatgaaaatgaaggtccttgttttcttcgttgctacaattttggtagcatggcaatgccatgcgtacgatatgttccctctccgaatgaacactggctatggtgcccatactccggaggtgaaatgcgcaagttggaggcttgctgtggaagcacacaacatctttggctttgagaccattcctgaagagtgcgttgaagcaacaaaggaatacatccatggcgaacaatatagatcagactccaaaacagttaaccaacaagcttacttttatgccagagacctcgaagtccatcccaaggacacatttgtgttcagtatagatggcaccgtactctctaatattcca

SEQ ID NO: 57452 - DNA, 129 bp, Glycine max
gcgtgacacactctgtacctgcgcattaaccgcggctggtgtagtggttacacgcagcgtgacagcgacacatggcagagccttatcgctcgcacgtttcactggctacccttcaattctcgccaggtt

SEQ ID NO: 57453 - DNA, 185 bp, Glycine max
aaggtttcctctccggatgataactgggtaaggtgagcgttcttcggaggtaaaatgcgcaagttttaagcttgccgtggcagcacacaacatccgagcctttaaaaccattcctgaaaaatgccttgaaccaacaaaggactacattaatggcgaacaatttagatcagactctaaaacagtta

SEQ ID NO: 57454 - DNA, 185 bp, Glycine max
gagtgtgtacgagtctgttgttacctcaaaacgacattaacatgctgagactcagacccatcatggtttccttggcggtgcattacctttgggaacatggacattccagggaacagggaacctacagttttcccccaggatccagaattgctcaagggaacgttattccgcaagttaaatgcgaa

SEQ ID NO: 57455 - DNA, 319 bp, Glycine max
ggcacaagtgagtttgttgatcgagataactagaaacagtgtgatgaaaatgaaggtccttgttttcttcgttgctacaattttggtagcatggcaatgccatgcgtacgatatgttccctctccgaatgaacactggctatggtgcccgtactccggaggtgaaatgcgcaagttggaggcttgctgtggaagcacacaacatctttggctttgagaccattcctgaagagtgcgttgaagcaacaaaggaatacatccatggcgaacaatatagatcagactccaaaacagttaaccaacaagcttacttttatgcc

SEQ ID NO: 57456 - DNA, 353 bp, Glycine max
cgacagaaggggaaggtgcaagagtttgttgtgagctataagctagtttatcgtgaggagaatatgaagttgtttgttttctttgttgctgcagtagttttggtagcatggccatgccatggcgcaggctaccaaaggttccctctccgaatgaaaactggctatggtgagcgttcttcggaggtaaaatgcgcaagttttaggcttgctgtggaagcacacaacatccgagcctttaaaaccattcctgaagagtgcgttgaaccaacaaaggactacattaatggcgaacaatttagatcagactctaaaacagttaaccaacaagctttcttttatgctagttaacgcca

SEQ ID NO: 57457 - DNA, 379 bp, Glycine max
gaaggtgcaagagtttgttgtgagctataagctagtttatcgtgaggagaatatgaagttgtttgttttctttgttgctgcagtagttttggtagcatggccatgccatggcgcaggctaccaaaggttccctctccgaatgaaaactggctatggtgagcgttcttcggaggtaaaatgcgcaagttttaggcttgctgtggaagcacacaacatccgagcctttaaaaccattcctgaagagtgcgttgaaccaacaaaggactacattaatggcgaacaatttagatcagactctaaaacagttaaccaacaagctttcttttatgctagtgaacgcgaagtcgatcacatcgacatatttatattcggcatagat

SEQ ID NO: 57458 - DNA, 389 bp, Glycine max
ggcacaagtgagtttgttgatcgagataactagaaacagtgtgatgaaaatgaaggtccttgttttcttcgttgctacaattttggtagcatggcaatgccatgcgtacgatatgttccctctccgaatgaacactggctatggtgcccgtactccggaggtgaaatgcgcaagttggaggcttgctgtggaagcacacaacatctttggctttgagaccattcctgaagagtgcgttgaagcaacaaaggaatacatccatggcgaacaatatagatcagactccaaaacagttaaccaacaagcttacttttatgccagagacctcgaagtccatcccaaaggacacaatttgtgttcggtataagatggcaccgtactctctaata

SEQ ID NO: 57459 - DNA, 302 bp, Glycine max
tgtggccgccacataccacatagggggagatagatccgcttccagttgctcgaacgaatttctagcatgcggagcaatggcagacgttgaggtcgatgtgactgctgcagcagcaacagggcatccaaagagagagagcgtacacgaagttgagttacaggggcgtggatctccactcgcctcaggacatgtctagcaatgaactcctctggatgttcagtgctcgcgcacatgaacggttcaacatacgcctcaatcaagcacccagggcaatgatcatgaagctccacaaagcgtcatga

SEQ ID NO: 57460 - DNA, 365 bp, Glycine max
ggcacaagtgagtttgttgatcgagataactagaaacagtgtgatgaaaatgaaggtccttgttttcttcgttgctacaattttggtagcatggcaatgccatgcgtacgatatgttccctctccgaatgaacactggctatggtgcccgtactccggaggtgaaatgcgcaagttggaggcttgctgtggaagcacacaacatctttggctttgagaccattcctgaagagtgcgttgaagcaacaaaggaatacatccatggcgaacaatatagatcagactccaaaacagttaaccaacaagcttacttttatgccagagacctcgaagttcatcccaaggacacatttgtgttcagtatag

SEQ ID NO: 57461 - DNA, 380 bp, Glycine max
gaaggtgcaagagtttgttgtgagctataagctagtttatcgtgaggagaatatgaagttgtttgttttctttgttgctgcagtagttttggtagcatggccatgccatggcgcaggctaccaaaggttccctctccgaatgaaaactggctatggtgagcgttcttcggaggtaaaatgcgcaagttttaggcttgctgtggaagcacacaacatccgagcctttaaaaccattcctgaagagtgcgttgaaccaacaaaggactacattaatggcgaacaatttagatcagactctaaaacagttaaccaacaagctttcttttatgctagttaacgccaagtcaatcacaacgacatatttatattcggcatagata

SEQ ID NO: 57462 - DNA, 378 bp, Glycine max
gggtgcaagagtttgttgtgagctataagctagtttatcgtgaggagaatatgaagttgtttgttttctttgttgctgcagtagttttggtagcatggccatgccatggcgcaggctaccaaaggttccctctccgaatgaaaactggctatggtgagcgttcttcggaggtaaaatgcgcaagttttaggcttgctgtggaagcacacaacatccgagcctttaaaaccattcctgaagagtgcgttgaaccaacaaaggactacattaatggcgaacaatttagatcagactctaaaacagttaaccaacaagctttcttttatgctagtgaacgccaagtccatcacaacgacatatttatattcggcatagata

SEQ ID NO: 57463 - DNA, 378 bp, Glycine max
  unsure (1)..(378): unsure at all n locations
gggcacaagtttgttgagatagctagaagcaataagatgaaaatgaaagtgcttgttttgtttgttgctacagttttggtagcatatgaatgccatggctcagactaccagaagttccctctccaaatgaaaactgggtttggtgggcaatacagcaatgaggtggcatgtgccagttggaggcttggcgtggaagcaaacaacgtagtcaagtggcaaactgttcctgcagcttgcggagagtacatagctgactacgttctaggagaccaatatagatcagattccaaaacagttaaccaacaagcttatttctatgctaaatccctcaaactcaccaacanagatgtctttgtcttggacgttgacgacactact

SEQ ID NO: 57464 - DNA, 324 bp, Glycine max
ggcacaagtgagtttgttgatcgagataactagaaacagtgtgatgaaaatgaaggtccttgttttcttcgttgctacaattttggtagcatggcaatgccatgcgtacgatatgttccctctccgaatgaacactggctatggtgcccgtactccggaggtgaaatgcgcaagttggaggcttgctgtggaagcacacaacatctttggctttgagaccattcctgaagagtgcgttgaagcaacaaaggaatacatccatggcgaacaatatagatcagactccaaaacagttaaccaacaagcttacttttatgccagaga

SEQ ID NO: 57465 - DNA, 282 bp, Glycine max
ggcacaagtgagtttgttgatcgagataactagaaccagtgtgatgaaaatgagggcccttgtttcctccgttgcaacattttgggcacccaagaaaccacccggacgaaaaattccccccccccaagaacaccggctatggtgcccctactcccgaggtgaaatgcgcaagttggaggcttgctgtggaagcacacaacatctttggctttgagaccattcctgaagagtacgttgaagcaacaaacgaatacatccatggcgaacaatatagatcagact

SEQ ID NO: 57466 - DNA, 425 bp, Glycine max
  unsure (1)..(425): unsure at all n locations
cgggtcgacgcacgcgtcagcccacgcgtccgaagacgacagaagggggcacaagtgagtttgttgatcgagataactagaaacagtgtgatgaaaatgaaggtccttgttttcttcgttgctacaattttggtagcatggcaatgccatgcgtacgatatgttccctctccgaatgaacactggctatggtgcccgtactccggaggtgaaatgcgcaagttggaggcttgctgtggaagcacacaacatctttggctttgagaccattcctgaagagtgcgttgaagcaacaaaggaatacatccatggcgaacaatatagatcagactccaaaacagttaaccaacaagcttacttttatgccagagacctcgaagtccatcncaaggacacatttgtgttcagtatagatggcaccgtact

SEQ ID NO: 57467 - DNA, 292 bp, Glycine max
ggcacaagtgagtttgttgatcgagataactagaaacagtgtgatgaaaatgaaggtccttgttttcttcgttgctacaattttggtagcatggcaatgccatgcgtacgatatgttccctctccgaatgaacactggctatggtgcccgtactccggaggtgaaatgcgcaagttggaggcttgctgtggaagcacacaacatctttggctttgagaccattcctgaagagtgcgttgaagcaacaaaggaatacatccatggcgaacaatatagatcagactccaaaaca

SEQ ID NO: 57468 - DNA, 361 bp, Glycine max
  unsure (1)..(361): unsure at all n locations
gaaggtgcaagagtttgttgtgagctataagctagtttatcgtgaggagaatatgaagttgtttgttttctttgttgctgcagtagttttggtagcatggccatgccatggcgcatgctaccaaaggttccctctccgaatgaaaactggctatggtgagcgttcttcggaggtaaaatgcgcaagttttaggcttgctgtggaagcacacaacatccgagcctttaaaaccattcctgaagagtgcgttgaaccaacaaaggactacattaatggcgaacaatttagatcagactctaaaacagttaaccaacaagctttcttttatgctagtgaacgcgaagtccatcacancgacata

SEQ ID NO: 57469 - DNA, 356 bp, Glycine max
ttgtccccatgtgtttaggtgcacttctatatcaaacatcaactgtctgcacaaccataggaaaagggcaactgaaagtcaaacacaatataaaattacaaactaccatcaaatattgtagcacaatttcaaattccaaaaaagaatcaatcattaacaagaaattttacacacaataaccatgcaagcaagcatacaagaaattgttttcaggaatgctgatgtaaattctgatataattcttgatactgttatgttcagggcttggacgtggatgactgcaaaagtgaaaggttttaagtactactttatacagtggatacaaggtatatgagcatgcattcaagcactgattt

SEQ ID NO: 57470 - DNA, 364 bp, Glycine max
gaaggtgcaagagtttgctgtgagctataagctagtttatcgtgaggagaatatgaagttgtttgttttctttgttgctgcagtagttttggtagcatggccatgccatggcgcaggctaccaaaggttccctctccgaatgaaaactggctatggtgagcgttcttcggaggtaaaatgcgcaagttttaggcttgctgtggaagcacacaacatccgagcctttaaaaccattcctgaagagtgcgttgaaccaacaaaggactacattaatggcgaacaatttagattagactctaaaacagttaaccaacaagctttcttttatgctagtgaacgcgaagtccatcacaacgacatattt

SEQ ID NO: 57471 - DNA, 395 bp, Glycine max
ggcacaagtttgttgagatagctagaagcaataagatgaaaatgaaagtgcttgttttgtttgttgctacagttttggtagcatatgaatgccatggctcagactaccagaagttccctctccaaatgaaaactgggtttggtgggcaatacagcaatgaggtggcatgtgccagttggaggcttggcgtggaagcaaacaacgtagtcaagtggcaaactgttcctgcagcttgcggagagtacatagctgactacgttctaggagaccaatatagatcagattccaaaacagttaaccaacaagcttatttctatgctaaatccctcaaactcaccaacaaagatgtctttgtcttggacgttgacgacactactctctctaatctccagtat

SEQ ID NO: 57472 - DNA, 376 bp, Glycine max
  unsure (1)..(376): unsure at all n locations
gaccacgaatcccctcaacttttcncatacttactcatactactaaaatggcctccttccgtgtgcctctcctatcatttttcttcattgctttgtcacttttatccattggcaatgtccaagccagtagaaaacttctggcacccacattgcccaatatgaacaattctcctcctcgcgtgatttttcctccattcccaccagtaacagactggccagagtataggttgccttcacccttaactcgcacacttccacccttctcatcaccttccacaactaccaatccttgagttgttgcattatttgctacaagtatatatgctccacagaccacagttgattaatgtagcgtaatcaatgttgcttagcatgt

SEQ ID NO: 57473 - DNA, 367 bp, Glycine max
  unsure (1)..(367): unsure at all n locations
ggcacaagtgagtttgttgatcgagataactagaaacagtgtgatgaaaatgaaggtccttgttttcttcgttgctacaattttggtagcatggcaatgccatgcgtacgatatgttccctctccgaatgaacactggctatggtgcccgtactccggaggtgaaatgcgcaagttggaggcttgctgtggaagcacacaacatctttggctttgagaccattcctgaagagtgcgttgaagcaacaaaggaatacatccatggcgaacaatatagattagactccaaaacagttaaccaacaagcttacttttatgccagagacctcgaagtccatcncaaggacacatttgtgttcagtatagat

SEQ ID NO: 57474 - DNA, 303 bp, Glycine max
aggtcaacgtccaagacaaagacatctgtgttggtgagtttgatggatttagcatagaaataagcttgttgctacaattttggtaacatatgtgtgctctgggtcacagtactagaagttccctcacgaactgaccactgggtttgctgggcaatgtaccatcgcggtgggatgtgccacttggatgattggtcttcaagcgtacaatgtactcatgtgacactttgtgcctgcagcttgcggatagtacatatctgactaagtcctaagagatcagttgagatcagattcgactacagttat

SEQ ID NO: 57475 - DNA, 331 bp, Glycine max
gctgtaaaaccctagataaaccctaatagtcacaccgtcccttcaaatatggccaaaaagaaagtctctcaatctcacgaccccaaagaatcccaaaacgtaaagcaacccttgccaatggctactccaaccgatggctcctcagaactgcagattcagaacctcaaaaacctcaacgccgtccttctcaaggagaagaaggaggtggaaaagagcgttgaaacgttaacagaggaaaaagatggtgttcgtaaggctttgaatgttcttcagaaggagttagaggataagcagcacgagcttgatgaagctgttagagtgaggagtgaga

SEQ ID NO: 57476 - DNA, 359 bp, Glycine max
gaaggtgcaagagtttgttgtgagctacaagctagtttatcgtgaggagaatatgaagttgtttgttttctttgttgctgcagtagttttggtagcatggccatgccatggcgcaagctaccaaaggttccctctccgaatgaaaactggctatggtgagcgttcttcggaggtaaaatgcgcaagttttaggcttgctgtggaagcatacaatatccgatcctttaaagccattcctgaagactgcgttgaaccaacaaaggactacattactggcgaacaatttagatcagactctaaaacagttaaccaacaagctttcatttatgctagtgaacgctaagtccatcacaacgaca

SEQ ID NO: 57477 - DNA, 384 bp, Glycine max
  unsure (1)..(384): unsure at all n locations
ggcacaagtgagtttgttgatcgagataactagaaacagtgtgatgaaaatgaaggtccttgttttcttcgttgctacaattttggtagcatggcaatgccatgcgtacgatatgttccctctccgaatgaacactggctatggtgcccgtactccggaggtgaaatgcgcaagttggaggcttgctgtggaagcacacaacatctttggctttgagaccattcctgaagagtgcgttgaagcaacaaaggaatacatccatggcgaacaatatagattagactccaaaacagttaaccaacaagcttacttttatgccagagacctcgaagtccatcncaaggacacatttgtgttcagtatagatggcaccgtactctctaa

SEQ ID NO: 57478 - DNA, 376 bp, Glycine max
ggcacaagtgagtttgttgatcgagataactagaaacagtgtgatgaaaatgaaggtccttgttttcttcgttgctacaattttggtagcatggcaatgccatgcgtacgatatgttccctctccgaatgaacactggctatggtgcccgtactccggaggtgaaatgcgcaagttggaggcttgctgtggaagcacacaacatctttggctttgagaccattcctgaagagtgcgttgaagcaacaaaggaatacatccatggcgaacaatatagattagactccaaaacagttaaccaacaagcttacttttatgccagagacctcgaagtccatcccaaggacacatttgtgttcagtatagatggcaccgta

SEQ ID NO: 57479 - DNA, 341 bp, Glycine max
gatactgaaaacggatggatgagaagtactaagcaacttcttctgcacgagaaattccttcatcgccaaacacaatgaaggaactgggcgtggttgcaatcctgttgtcaatagagttctttgacgtgattgtctacactgtaagcaaagcagccatgaagaagggcatgaatgactttgtgtttgtcatgtactccaatgccttcgcaacttgcctccttcttcccataacttttatcttttataggaaaagagctcttcctccactcacatatttcatagttggccaattatttattaatggcttcttaagttgcagtgttcagatgctcaggtttttt

SEQ ID NO: 57480 - DNA, 382 bp, Glycine max
ggcacaagtgagtttgttgatcgagataactagaaacagtgtgatgaaaatgaaggtccttgttttcttcgttgctacaattttggtagcatggcaatgccatgcgtacgatatgttccctctccgaatgaacactggctatggtgcccgtactccggaggtgaaatgcgcaagttggaggcttgctgtggaagcacacaacatctttggctttgagaccattcctgaagagtgcgttgaagcaacaaagggatacatccatggcgaacaatatagattagactccaaaacagttaaccaacaagcttacttttatgccagagacctcgaagtccatcccaaggagacatttgtgttcagtatagatggcaccgtactctct

SEQ ID NO: 57481 - DNA, 388 bp, Glycine max
  unsure (1)..(388): unsure at all n locations
ggcacaagtgagtttgttgatcgagataactagaaacagtgtgatgaaaatgaaggtccttgttttcttcgttgctacaattttggtagcatggcaatgccatgcgtacgatatgttccctctccgaatgaacactggctatggtgcccgtactccggaggtgaaatgcgcaagttggaggcttgctgtggaagcacacaacatctttggctttgagaccattcctgaagagtgcgttgaagcaacaaaggaatacatccatggcgaacaatatagattagactccaaaacagttaaccaacaagcttacttttatgccagagacctcgaagtccatcncaaggacacatttgtgttcagtatagatggcaccgtactctctaatatt

SEQ ID NO: 57482 - DNA, 367 bp, Glycine max
gggcacaagtgagtttgttgatcgagataactagaaacagtgtgatgaaaatgaaggtccttgttttcttcgttgctacaattttggtagcatggcaatgccatgcgtacgatatgttccctctccgaatgaacactggctatggtgcccgtactccggaggtgaaatgcgcaagttggaggcttgctgtggaagcacacaacatctttggctttgagaccattcctgaagagtgcgttgaagcaacaaaggaatacatccatggcgaacaatatagatcagactccaaaacagttaaccaacaagcttacttttatgccagagacctcgaagtccatcccaaggacacatttgtgttcagtataga

SEQ ID NO: 57483 - DNA, 278 bp, Glycine max
gcatttagtcaaatttctgccaatttatctacattgaagtttcaggataacattgaactcttttgtcagacaaggcgcaatattaataccgttcttaatgagtatgtgatgtgaatattataaataagttcattattaatataatccaaatccattttgtttagagcttaatttgatgtgtattgccttttgaagtttgctcattaagtttgtgcagaatgagaacgatgcctggcataatgagccaaatgcccccttttcttgtttccatgaatgag

SEQ ID NO: 57484 - DNA, 378 bp, Glycine max
ggcacaagtgagtttgttgatcgagataactagaaacagtgtgatgaaaatgaaggtccttgttttcttcgttgctacaattttggtagcatggcaatgccatgcgtacgatatgttccctctccgaatgaacactggctatggtgcccgtactccggaggtgaaatgcgcaagttggaggcttgctgtggaagcacacaacatctttggctttgagaccattcctgaagagtgcgttgaagcaacaaaggaatacatccatggcgaacaatatagattagactccaaaacagttaaccaacaagcttacttttatgccagagacctcgaagtccatcccaaggacacatttgtgttcagtatagatggcaccgtact

SEQ ID NO: 57485 - DNA, 381 bp, Glycine max
ggcttaaattatcataaccctaacaatattcgttcggtcagtgtctgagagtagattgagcatcagaggaacgatgtcgaagaagaacaacctcgccaagagaaagaagcagtacgaattcgatctccaaagagagaaacaagagaagataaagaaagagcagaagctccatgcgaagaacaacaagatgaaagttgatggtagtgacaagaaaaagaaaggtgggagtggatttcaggtggggaagagaaaagtgaagaccaagttgactgcccttgctaaagctaaggctgcccaggcaatggagcttgacaaatgagcatgtccgccttgcaagttatttgcagcgatgaagagtttggcattttgttttcatgatga

SEQ ID NO: 57486 - DNA, 380 bp, Glycine max
  unsure (1)..(380): unsure at all n locations
ggcacaagtgagtttgttgatcgagataactagaaacagtgtgatgaaaatgaaggtccttgttttcttcgttgctacaattttggtagcatggcaatgccatgcgtacgatatgttccctctccgaatgaacactggctatggtgcccgtactccggaggtgaaatgcgcaagttggaggcttgctgtggaagcacacaacatctttggctttgagaccattcctgaagagtgcgttgaagcaacaaaggaatacatccatggcgaacaatatagattagactccanaacagttaaccaacaagcttacttttatgccagagacctcgaagtccatcncaaggacgcatttgtgttcagtatagatggcaccgtactct

SEQ ID NO: 57487 - DNA, 392 bp, Glycine max
gaaggtgcaagagtttgttgtgagctataagctagtttatcgtgaggagaatatgaagttgtttgttttctttgttgctgcagtagttttggtagcatggccatgccatggcgcaggctaccaaaggttccctctccgaatgaaaactggctatggtgagcgttcttcggaggtaaaatgcgcaagttttaggcttgctgtggaagcacacaacatccgagcctttaaaaccattcctgaagagtgcgttgaaccaacaaaggactacattaatggcgaacaatttagattagactctaaaacagttaaccaacaagctttcttttatgctagtgaacgcgaagttcatcacaacgacatatttatattcggcatagataacaccgtactct

SEQ ID NO: 57488 - DNA, 256 bp, Glycine max
gactcaccacttcaaaacactcataacacaaagcacaaagcaaagctcatccttgagttaaaaaatggcagcagcttcttccatggctctctcatccccatccttggctggcaaggccgtgaagctgggcccatcagccccagaagtgggaagggtgagcatgaggaagaccgtcaccaagcaggtctcctcaggaagcccatggtacggcccagaccgagtcaagtacttgggcccattctctggcgagcccccg

SEQ ID NO: 57489 - DNA, 352 bp, Glycine max
ggtgcaagagtttgttgtgagctataagctagtttatcgtgaggagaatatgaagttgtttgttttctttgttgctgcagtagttttgggagcatggccatgccatggcgcaggctaccaaaggttccctctccgaatgaaaactggctatggtgagcgttcttcggaggtaaaatgcgcacgttttaggcttgctgtggaagcacacaagatccgagcctttaaaaccattcctgaagagtgcgttgaaccaacaaaggactacattaatggcgaacactttagatcagactctaaaacagttaaccaacaagctttcttttatgccagtgaacgccacatccaacacaac

SEQ ID NO: 57490 - DNA, 387 bp, Glycine max
gaaggtgcaagagtttgttgtgagctataagctagtttatcgtgaggagaatatgaagttgtttgttttctttgttgctgcagtagttttggtagcatggccatgccatggcgcaggctaccaaaggttccctctccgaatgaaaactggctatggtgagcgttcttcggaggtaaaatgcgcaagttttaggcttgctgtggaagcacacaacatccgagcctttaaaaccattcctgaagagtgcgttgaaccaacaaaggactacattaatggcgaacaatttagatcagactctaaaacagttaaccaacaagctttcttttatgctagtgaacgcgaagtccatcacaacgacatatttatattcggcatagattacaccgt

SEQ ID NO: 57491 - DNA, 92 bp, Glycine max
gataggggggttcactttggttcaaattgagagtatcattactccattaatcattgacgtactaatctgcgatggcttcctcttctctgttt

SEQ ID NO: 57492 - DNA, 280 bp, Glycine max
cgtcaaagataagacgacagaaggggaaccgcgaaccatctgaagattctgaagtctgaaccgaacagctacacaaagttcgcgtaggttggaggcacgggttggttaagccgcgtaacaggtgaacaaacactgagagagcgattaccattacttacaagcgtgtgtgtctttcgttcgttcagtctccatttcctcatcgatcagatctgagtcaatctcacattcctcaatttaatttcagtcggaattcacttatcgtgatttccgaatctgggcg

SEQ ID NO: 57493 - DNA, 385 bp, Glycine max
ggaggagaatatgaagttgtttgttttctttgttgctgcagtagttttggtagcatggccatgccatggcgcaggctaccaaagggtccctctccgaatgaaaactggctatggtgagcgttcttcggaggtaaaatgcgcaagttttacgcttgctgtggaagcacacaacatccgagcctttaaaaccattcctgaacagtgcgttgaaccaacaaacgactacattaatggcgaccaatttagatcagactctaaaacagttaccaacaagctttcttttatgctagtgaacgccaactccatcacaacgatcatatttatattcggcattaataacaccgttctctctaatatcccaatctatgaaaaacattgatattgg

SEQ ID NO: 57494 - DNA, 157 bp, Glycine max
ggacttcttcagtccctcttttgctttaccaaattccattttccaattcaaaaccctaactccgttcgagacaccaaatcgtgatggcaccaaagagagagaagaagccagcagagaagaagcctgtggaggagaagaaatcgacggtgggagacaa

SEQ ID NO: 57495 - DNA, 83 bp, Glycine max
gacaacacaacgcatcacaacgcgcactctctcttttctctcttaacatgagaaccctatcaatcttcgctgtttcgacaatt

SEQ ID NO: 57496 - DNA, 84 bp, Glycine max
gtctgctcaaacagcacactcctgtgtttgtgaaaagaaaactttgaaagctcaatttgttagcaaggttgctctgtgaatccg

SEQ ID NO: 57497 - DNA, 80 bp, Glycine max
cgcgtcaacggacgcgataagacgacacaaggggctctacctcaagccactctaaggaaaatggcggtgcctctactctc

SEQ ID NO: 57498 - DNA, 358 bp, Glycine max
ggcacaagtgagtttgttgatcgagataactagaaacagtgtgatgaagatcaaggtccttgttttcttcgttgctacaattttggtagcatggcaatgccatgcgtacgataggttccctctccgaatgaacactggctatggtgcccgtactccggaggtgaaatgcgcaagttggaggcttgctgtggaagcacacaacatctttggctttgagaccattcctgaagagtgcgttgaagcaacaaaggaatacatccatggcgaacaatatagagtagactccaaaacagttaaccaacaagcgtacttttatgccacagacctcgaggtccatcccaaggacacatttgtgttc

SEQ ID NO: 57499 - DNA, 324 bp, Glycine max
ggttcaagttctaaacagatgatttgagtaaaacgccgtcgttccgtgtttcgttcgctcctctctttcccgctccgcacactcttctctttgttcttccccaatccccaaccacattttggggtttagggttttcctctctcctctgcaatatccaatttctccctttctcccccactctctccgcaatccagtgacaatgatgtacaatgatcctcagcagcagcagcagcagcaccagtaccagcaacaacagcagcagcagcatttccaccagcagccgcctggtccggacttccaccgcgggaccgctgccgccgtcgc

SEQ ID NO: 57500 - DNA, 375 bp, Glycine max
cgcgtcaagttttcttcgttgctacaattttggtagcatggcaatgccatgcgtacgatatgttccctctccgaatgaacagtgggtatggtgcgagtactccggaggtgaaatgcgcaaggttggaggcttgctgtggaaacacacaacatctttggctttgagaccattcctgaagagtgcgttgaagcaacagaggaatacatccatggacaacaatatagatcagagtccaaaacagttaagcaacaagcttacttttatgccatagacctcgaagtccatcgcaaggacacatttgtgttcagtatatatggcaccgtactctctaatattcgatactaccaaaaacatggatatggggtggaaaaattt

SEQ ID NO: 57501 - DNA, 129 bp, Glycine max
ggcattatatttgagttcaaacaagtcaaagccatggtcacctccaacttctcgattgttctgaccgtctccctagccttctttttggtgcgacttaccaggggagactccaccgataccgtctctttc

SEQ ID NO: 57502 - DNA, 363 bp, Glycine max
ggcacaagtgagtttgttgatcgagataactagaatcagtgtgatgaaaatgaaggtccttgttttcttcgttgctacaattttggtagcatggcaatgccatgcgtacgatatgttccctctccgaatgaacactggctatggtgcccgtactccggaggtgaaatgcgcaagttggaggcttgctgtggaagcacacaacatctttggctttgagaccattcctgaagagtgcgttgaagcaacaaaggaatacatccatggcgaacaatatacatcagactccaacacagttaaccaacaagcttacttttatgccacagacctcgatgtccatcccactgacacatttgtgttcagtat

SEQ ID NO: 57503 - DNA, 382 bp, Glycine max
ggcacaagtttgttgagatagctagaagcaataagatgaaaatgaaagtgcttgttttgtttgttgctacagttttggtagcatatgaatgccatggctcagactaccagaagttccctctccaaatgaaaactgggtttggtgggcaatacagcaatgaggtggcatgtgccagttggaggcttggcgtggaagcaaacaacgtagtcaagtggcaaactgttcctgcagcttgcggagagtacatagctgactacgttctaggagaccaatatagatcagattccaaaacagttaaccaacaagcttatttctatgctaaatccctcaaactcaccaacagagatgtctttgtcttggacgttgacgacaactagtctct

SEQ ID NO: 57504 - DNA, 222 bp, Glycine max
gacgtttcattccatcgatggttcgttcttatccaatgtaagtcagcgactacgccatcatgacgaccaaggtgcaatccctggggcggtcgggtctctcccgggtcccaccacaatacattcatacccctcaaacccgacgcgtccgccacaccgcacccgtatctgactccattcccgtcatcgacctctcctccttcaaccccacgggaggcggtctcc

SEQ ID NO: 57505 - DNA, 374 bp, Glycine max
ggcacaagtgagtttgttgatcgagataactagaaacagtgtgatgaaaatgaaggtccttgttttcttcgttgctacaattttggtagcatggcaatgccatgcgtacgatatgttccctctccgaatgaacactggctatggtgcccgtactccggaggtgaaatgcgcaagttggaggcttgctgtggaagcacacaacatctttggctttgagaccattcctgaagagtgcgttgaagcaacagaggaatacatccatggcgaacaatatagatcagactccagaacagttaaccaacaagcttacttttatgccagagacctcgaagtccatcccaaggacacatttgtgttcagtatatatggcaccg

SEQ ID NO: 57506 - DNA, 76 bp, Glycine max
ggcacaactttgttgagatagctacaatcaataagatcaaaatcaaggtgcttgttttgtctgttgctacactttt

SEQ ID NO: 57507 - DNA, 275 bp, Glycine max
gcacaagtgagtttgttgatcgagataactagaaacagtgtgatgaagagtaaggtccttgttttcttcgttgctacaattttggaaggatggcaatgccatgcgtacgatatgttccctctccgaatgaacactggctatggtggccgtactccggaggtgagatgcgcaagttggacgcttgctgtgcaagcacacaacatctttgggtttgagaccattcctgaagagtgcgttgaagcaacaaatgaagacatccatggcgaacagtatag

SEQ ID NO: 57508 - DNA, 139 bp, Glycine max
ggaactagtcaactcaacccaacactctttctctcttcctcttcaccccacatgctattttttcaaatctaggggggtggtctgcctctagggtttcttcattctgcaatcatcaatgggcgtaattactcctccccat

SEQ ID NO: 57509 - DNA, 325 bp, Glycine max
gagtgcacaagtgagtttgttgatcgagataactagaaacagtgtgatgaaaatgaagggccttgttttcgtcgttgctacaattttggtagcatgggaatgccatgcgtacgatatgttccctctccgaatgaacactgggtatggtgcccgtactccggaggtgaaatgcgcaagttggaggcttgctgtggaagcacacaacatctttggctttgagaccattcctgaagaatgcgttgaagcaacaaaggaatacatccatggcgaacaatatagatcagactccagaacagttagccaacaagcttacttttatgccaga

SEQ ID NO: 57510 - DNA, 263 bp, Glycine max
ggcacaagtgagtttgttgatcgagataactagaaagagtgtgatgaacgtgaaggtccttgttttcttcgttgcggcaattttggtggcatggcagtgccatgcgtacgatatgttccgtctccgaatgaacactggcgatggtgcccgtactcgggaggtgaaatgcgcacgttggaggcttgctgtcgcagcacacaacatctttggctttcggaccattcctgaagagtgcattgaagcaacaaaggaatacatccatg

SEQ ID NO: 57511 - DNA, 84 bp, Glycine max
ggcacaagtgagtttgttgatcgagataactagaaacagtgtgatcgagatgaaggtccgtgttttcttcgttgctacaatttt

SEQ ID NO: 57512 - DNA, 68 bp, Glycine max
gcatctcgcactacactgagaggaacacggagtgacgcggggtgttcctcagttgccaccttctccca

SEQ ID NO: 57513 - DNA, 244 bp, Glycine max
gatacattcccaaagcaaagtttctccctaaaaaacgaaagccttctcaattcttgcaagttgcaacccatcaaccatggcctcaggcagacccttcatcactgctttccttcttcctgtgaccttctcaagcatgagtttgagcctagcatcatctcgtcacctcttgcaaacaaccacatctccaaatttgcctggtaatcccactttgggcaacccatcatcactgtcaccttttgccatc

SEQ ID NO: 57514 - DNA, 291 bp, Glycine max
ggcacaagtgagtttgttgatcgagataactagaaacagtgtgatgaaaatgaaggtccgtgtgttcttcggtgctacaattttggtagcatggcaaagccatgcgtacgatatgttccctctccgaatgagcactggctatggtgcccgtacaccggaggtgaaatgcgcacgttggaggcttgctgtggaagcacacaacatctttggctttgagaccattcctgaagagtgtgttgaagcaacaaaggaatacatccatggcgaacaatatagatcagactccaaggc

SEQ ID NO: 57515 - DNA, 84 bp, Glycine max
ggttctcttaagtccttcccattccaatggattctgcgttctccatcaacgcgaccgcgcagctggcgctcttcagagcgctcc

SEQ ID NO: 57516 - DNA, 84 bp, Glycine max
ggagcacaatcctaatccccatttttcttcctcagtagtgtcatttagaggtctcttctcgtcagcagctatgcctaaccctaa

SEQ ID NO: 57517 - DNA, 79 bp, Glycine max
taacgggaaagtgcaatagtttgttgtgagctataagctacatgtgcgtgaggagaagatgaagttgtttgttttcttt

SEQ ID NO: 57518 - DNA, 359 bp, Glycine max
ggcacaagtgagtttgttgatcgagataactagaaacagtgtgatgaaaatgaaggtccttgttttcttcgttgctacaattttggtagcatggcaatgccatgcgtacgatatgttccctctccgaatgaacactggctatggtgcccgtactccggaggtgaaatgcgcaagttggaggcttgctgtggaagcacacaacatctttggctttgagaccattcctgaagagtgcgttgaagcaacaaaggaatacatccatggcgaacaatatagatcagactccaaaacaagttaaccaacaagcttacttttaagccatagacctccaagtccatcccaaggacacatttgtgttc

SEQ ID NO: 57519 - DNA, 218 bp, Glycine max
ggcctctgctccgcataactcctcacacacacacacacaacagaacacaacacatacacatacacatgttgttgatgagtggagggaaggggaaacacagatccatcacacacatgaccaactgatctttgtcctttgtatataatctgattccactttttggcactaacagagccactcaacgctctgggatgtactatactccattcggggttctg

SEQ ID NO: 57520 - DNA, 275 bp, Glycine max
gaaagtgcaagagtttgttgtgagctataagctagtttatcgtgaggagaatatgaaagtgtttgttttcggtggtgctgcagtagttttggtagcatggccatgccatggcgcaggctaccaaatgttccctctccgaatgaaaactggctatggtgagcgttcttcggaggtaaaatgcgcaggttttaggcttgctgtggaagcacacagcatccgagcctttaaaaccattcctgaagaatgcgttgaaccaacagaggactacattaatg

SEQ ID NO: 57521 - DNA, 342 bp, Glycine max
cgggtgcaacatacatttaaaagtttgaggctatggacatcttgaatagtgtccatctagagtgtagtaattaaggtcattcggaagagttggtggtaaggagacaaaagtctcaatcctccttgtagcaacttatgattatgaatgatatgttctgggaaggagagatctaggataaagtggcacaagaatggcgaccaaaacaggagtttcttccagacgatgacgaagatcaggaagaaaacatagcatatatttcttcttcatgccgagacacgtcccatctctgatacgtcgggcagtaagagtcgtttcctatcggtcgatacagaggagtttgcc

SEQ ID NO: 57522 - DNA, 332 bp, Glycine max
gacacatttctctgtttcaacttgcattattttctattccctccttcaacccttttgacattctctgcgcggacaatgccacagccttttctcagcttaccctcttaaactaaactccattgtcttctcttctccccccccatcatcatcatcacctctcttctcattttcactataataaatagcttcttcttcccattctctcttcccctgtagtagccaacagacaccccaaaaatgcacgagagatcgatgaaagaagctgctggcacgtgcccacagaggagaagaaccccttccttctcctcttcgcttctcgacgccatttaccg

SEQ ID NO: 57523 - DNA, 357 bp, Glycine max
acccacgagtcaatacagctgtcagtacagctgagaaaggggcacaaatgggtttattgatcaatatgtcgataaacattgtgataaacattatggtccttgttttcgtcgttgctatcatcgtggcagcattttagtgacaatcgtactacaattcctctcacagattcactctcggattgggtactggtaatcgtgccgttactccggcagtttaatgcgctgctttggagccacatatcatcttaggctttagcattattcttgaaaagagtcttgaagcatgagttgaataaatccatggataccaatatagataagactccatatcagtctccaaacaattttacttttatg

SEQ ID NO: 57524 - DNA, 114 bp, Glycine max
tccagctgctaaaagacgacatcaggggacacacttgcccatcatcacagtttcttcctttctctgctctttgccttctctgatacaagtagtgccttgtagagcgtgttttgg

SEQ ID NO: 57525 - DNA, 115 bp, Glycine max
cgcgtccacccacgcgtccgccggctgcgggtgggcgcctgccgggggcctcagtcccgtcggtcagtcccacctctttggcgggtcgtcttcccggatgatctcactgcatcta

SEQ ID NO: 57526 - DNA, 250 bp, Glycine max
gacatttgttgtggcttagttaatcctcagatggcagtggaaaatatctgagtccacgaagagtccaacgttgcccctccaccatcatggggacaatcactatcgctcgctttcactttgtacgacactttggtcctcaggttccggtccattgactggatcttcttctattccctcagatgctcaacaatcagagacttctttcgtctatgcgaatgtcattccatagctcaaagcctctctctctcac

SEQ ID NO: 57527 - DNA, 261 bp, Glycine max
ggcacaagtgagtttgttgatcgagataactagaaacagtgtgatgaaaagagaggtccttgtgttcttcgttgctacaattttggtaacatggcaatgccatgcgtacgatatgttccctctccgaatgaacactggctatggtgcccgtactccggacgtgagatgcgcaagttggaggcttgctgtggaagcacacaacaactttggctttgagaccattcctgaagagtgcgttgaagcaacaaaggaatacatcca

SEQ ID NO: 57528 - DNA, 352 bp, Glycine max
gcgtccgtgctactacaagacgacaacaggggacggatgagtttgatgctagacattcctgaatcaactgttacgatatggaaggtccttgctttcttcgtcgctacgacttttgcagcatggaatggccatgcgtcagatgggtgccctccccccagtgaacaaccggttatggtgcgcgtaatctagatgtgcaatacgcactttgggtgcttgcagtcctcaccgacaacatccttggactggtgatcattcctgaattatgagttgacacaacagcagtgtacacccatggaggacacttcctatccaaatgttggatagttaacctgcacacttacttttaagcgat

SEQ ID NO: 57529 - DNA, 132 bp, Glycine max
gaacgtgcaagagtttgttgtgagctataagctagtttaccgtgaggagaatatgaagttgtttgttttctttgttgctgaagtatttttgggggaatgggcatgcaatggcgcaggttaccaaaggttccc

SEQ ID NO: 57530 - DNA, 166 bp, Glycine max
acccaaacgtccagttcgcgaaagcggttgcaattgcatagcatagagaaagtgcagagagagcacaacgtaaccactcaatcaaacaatccgttactccttaatttaatttccttccttccttccccggttgcaaaactcgctcccaaacaacaagccttcccca

SEQ ID NO: 57531 - DNA, 366 bp, Glycine max
ggcacaagtgagtttgttgatcgagataactagaaacagtgtgatgaaaatgaaggtccttgttttcttcgttgctacaattttggtagcatggcaatgccatgcgtacgatatgttccctctccgaatgaacactggctatggtgcccgtactccggaggtgaaatgcgcaagttggaggcttgctgtggaagcacacgacatctttggctttgagaccattcctgaagagtgcgttgaagcaacaaaggaatacatccatggcgaacaatatagatcagactccaaaacagttaaccaacaagcttacttttatgccagagacctcgaagtccatcccaacgacacatttgtgttcagtataga

SEQ ID NO: 57532 - DNA, 345 bp, Glycine max
gatacaaactcaaaatcacaatggccttctcatcgtccatatggtcttcttccatctttgttcccaacccaaacagaaccaccatttccactcgattctctcacacaccctccaaaccccctctctcgccggcattcgccattccgccgctctccacggccaccgccacggacgtctcgggcgtcatcgacgggacgacgatcgcggtggtcagcggggggttcgtggcggcacttgcggcggtgctgtcgctgacggaccccgaacggcggggggaaaatccaaccggaggaggtgggccggcggcacaacgaagttggtagggagtacttcaacaactccggg

SEQ ID NO: 57533 - DNA, 383 bp, Glycine max
ggtgcacaagtgagtttgttgatcgagataactagaaacagtgtgatgaaaatgaaggtccttgttttcttcgttgctacaattttggtagcatggcaatgccatgcgtacgatatgttccctctccgaatgaacactggctatggtgcccgtactccggaggtgaaatgcgcaagttggaggcttgctgtggaagcacacaacatccgagcctttaaaaccattcctgaagagtgcgttgaaccaacaaaggactgcattaatggcgaacaatttagatcagactctaaaacagttaaccaacaagctttcttttatgctagtgaacgcgaagtccatcacaacgacatatttatattcggcatagataacaccgtactctc

SEQ ID NO: 57534 - DNA, 388 bp, Glycine max
gacaagtgagtttgttgatcgagataactagaaacagtgtgatgaaaatgaaggtccttgttttcttcgttgctacaattttggtagcatggcaatgccatgcgtacgatatgttccctctccgaatgaacactggctatggtgcccgtactccggaggtgaaatgcgcaagttggaggcttgctgtggaagcacacaacatctttggctttgagaccattcctgaagagtgcgttgaagcaacaaaggaatacatccatggcgaacaatatagatcagactccaaaacagttaaccaacaagcttacttttatgccagagacctcgaagtccatcccaaggacacatttgtgttcagtatagatggcactgtactctctaatattcc

SEQ ID NO: 57535 - DNA, 382 bp, Glycine max
gaaggtgcaagagtttgttgtgagctataagctagtttatcgtgaggagaatatgaagttgtttgttttctttgttgctgcagtagttttggtagcatggccatgccatggcgcaggctaccaaaggttccctctccgaatgaaaactggctatggtgagcgttcttcggaggtaaaatgcgcaagttttaggcttgctgtggaagcacacaacatccgagcctttaaaaccattcctgaagagtgcgttgaaccaacaaaggactacattaatggcgaacaatttagatcagactctaaaacagttaaccaacaagctttcttttatgctagtgaacgcgaagtccatcacaacgacatatttatattcggcatagataac

SEQ ID NO: 57536 - DNA, 350 bp, Glycine max
gattacggggaacatttcactagtctctatttatcatcctcaataatgccatttacacgtctcctctctggagcatctaagcatatacctaaggtcgtctgcgaaatgacaatttgaggtcaatatgctgggcacatcgtgatgtggctctagtcactggtgatgccctgtatcgtcgacaacttcgtaacgctttgcaccgttggatgaagggcctacggcgtttcggcaagcgcctccatgacattggcgcttccatccaccgtgtgatctcgagtttcatgtgtcatcggtggctatttcaccggcgggaaaatcacctgcggttagtcgatttatcgtcccaagtt

SEQ ID NO: 57537 - DNA, 383 bp, Glycine max
gaaggtgcaagagtttgttgtgagctataagctagtttatcgtgaggagaatatgaagttgtttgttttctttgttgctgcagtagttttggtagcatggccatgccatggcgcaggctaccaaaggttccctctccgaatgaaaactggctatggtgagcgttcttcggaggtaaaatgcgcaagttttaggcttgctgtggaagcacacaacatccgagcctttaaaaccattcctgaagagtgcgttgaaccaacataggactacattaatggcgaacaatttagatcagactccaaaacagttaaccaacaagctttcttttatgctagtgaacgcgaagttcatcacaacgacatatttatattcggcatacataaca

SEQ ID NO: 57538 - DNA, 382 bp, Glycine max
ggcacaagtgagtttgttgatcgagataactagaaacagtgtgatgaaaatgaaggtccttgttttcttcgttgctacaattttggtagcatggcaatgccatgcgtacgatatgttccctctccgaatgaacactggctatggtgcccgtactccggaggtgaaatgcgcaagttggaggcttgctgtggaagcacacaacatctttggctttgagaccattcctgaagagtgcgttgaagcaacaaaggaatacatccatggcgaacaatatagatcagactccaaaacagttaaccagcaagcttacttttatgccagagacctcgaagtccatcccaaggacacatttgtgttcagtatagatggcaccgtactctct

SEQ ID NO: 57539 - DNA, 214 bp, Glycine max
gaacacataagtttgatgcactgaactttgactataattttcataattcagattgtccttctcttctgcattgcgacattgggggtttaattttctgacaaagcgtacgataggttcacgcccctcttttatagtgctgctttgcctcgtaatcgagacgttcaatacccaagttgaaagcttgctctgtgaacacacatgaaccttggtcttt

SEQ ID NO: 57540 - DNA, 385 bp, Glycine max
ggcacaagtttgttgagatagctagaagcaataagatgaaaatgaaagtgcttgttttgtttgttgctacagttttggtagcatatgagtgccatggctcagactaccagaagttccctctccaaatgaaaactgggtttggtgggcaatacagcaatgaggtggcatgtgccagttggaggcttggcgtggaagcaaacaacgtagtcaagtggcaaactgttcctgcagcttgcggagagtacatagctgactacgttctaggagaccaatatagatcagattccaaaacagttaaccaacaagcttatttctatgctaaatccctcaaactcaccaacaaagatgtctttgtcttggacgttgacgacactactctctctaa

SEQ ID NO: 57541 - DNA, 385 bp, Glycine max
ggcacaagtgagtttgttgatcgagataactagaaacagtgtgatgaaaatgaaggtccttgttttcttcgttgctacaattttggtagcatggcaatgccatgcgtacgatatgttccctctccgaatgaacactggctatggtgcccgtactccggaggtgaaatgcgcaaattggaggcttgctgtggaagcacacaacatctttggctttgagaccattcctgaagagtgcgttgaagcaacaaaggaatacatccatggcgaacaatatagatcagactccaaaacagttaaccaacaagcttacttttatgccagagacctcgaagtccatcccaaggacacatttgtgttcagtatagatggcaacgtactctctaat

SEQ ID NO: 57542 - DNA, 382 bp, Glycine max
ggcacaagtgagtttgttgatcgagataactagaaacagtgtgatgaaaatgaaggtccttgttttcttcgttgctacaattttggtagcatggcaatgccatgcgtacgatatgttccctctccgaatgaacactggctatggtgcccgtactccggaggtgaaatgcgcaagttggaggcttgctgtggaagcacacaacatctttggctttgagaccattcctgaagagtgcgttgaagcaacaaaggaatacatccatggcgaacaatatagatcagactccaaaacagttaaccaacaagcttacttttatgccagagacctcgaagtccatcgcaaggacacatttgtgttcagtatagatggcaccgtactctct

SEQ ID NO: 57543 - DNA, 359 bp, Glycine max
ggtgcacaagtgagtttgttgatcgagataactagaaacagtgtgatgaaaatgaaggtccttgttttcttcgttgctacaattttggtagcatggcaatgccatgcgtacgatatgttccctctccgaatgaacactggctatggtgcccgtactccggaggtgaaatgcgcaagttggaggcttgctgtggaagcacacaacatctttggctttgagaccattctgaagagtgcgttgaagcaacaaaggaatacatccatggcgaacaatatagatcagactccaaaacagttaaccaacaagcttacttttatgccagagacctccaaatccatcccaaggacaaatttgtgttc

SEQ ID NO: 57544 - DNA, 241 bp, Glycine max
gatcgcatttcatatcactcaccatcatttccaccacgtcagcgtcctcaaaaacgtttttcgcaatctctgaatttccaacagggtcaggggaatgaagataagcatcaggaggagaacaactggaaactcacacaatatacatcttcaatggccccatacaagttcaacccgacaatcgtatttccagaaatgcaaagggcactatgtatagcgtcaccatacaaatcttccagaaact

SEQ ID NO: 57545 - DNA, 380 bp, Glycine max
gcacaagtgagtttgttgatcgagataactagaaacagtgtgatgaaaatgaaggtccttgttttcttcgttgctacaattttggtagcatggcaatgccatgcgtacgatatgttccctctccgaatgaacactggctatggtgcccgtactccggaggtgaaatgcgcaagttggaggcttgctgtggaagcacacaacatctttggctttgagaccattcctgaagagtgcgttgaagcaacaaaggaatacatccatggcgaacaatatagatcagactccaaaacagttaaccaacaagcttacttttatgccagagacctcgaagtccatcccaaggacacatttgtgttcagtatagatggcaccgtactctc

SEQ ID NO: 57546 - DNA, 350 bp, Glycine max
ggcacaagtgagtttgttgatcgagataactagaaacagtgtgatgaaaatgaaggtccttgttttcttcgttgctacaattttggtagcatggcaatgccatgcgtacgatatgttccctctccgaatgaacactggctatggtgcccgtactccggaggtgaaatgcgcaagttggaggcttgctgtggaagcacacaacatctttggctttgagaccattcctgaagagtgcgttgaagcaacaaaggaatacatccatggcgaacaatattaattagactccaaaacagttatacaacaagcttacttttatgccagagacctcgaagtccatcccaaggacacat

SEQ ID NO: 57547 - DNA, 389 bp, Glycine max
  unsure (1)..(389): unsure at all n locations
ggcacaagtttgttgagatagctagaagcaataagatgaaaatgaaagtgcttgttttgtttgttgctacagttttggtagcatatgaatgccatggctcagactaccagaagttccctctccaaatgaaaactgggtttggtgggcaatacagcaatgaggtggcatgtgccagttggaggcttggcgtggaagcaaacaacgtagtcaagtggcaaactgttcctgcagcttgcggagagtacatagctgactacgttctangagaccaatatagatcagattccaaaacagttaaccaacaagcttatttctatgctaaatcgctcaaactcaccaacaaagatgtctttgtcttggacgttgacgacactactctctctaatctc

SEQ ID NO: 57548 - DNA, 386 bp, Glycine max
gaaggtgcaagagtttgttgtgagctataagctagtttatcgtgaggagaatatgaagttgtttgttttctttgttgctgcagtagttttggtagcatggccatgccatggcgcaggctaccaaaggttccctctccgaatgaaaactggctatggtgagcgttcttcggaggtaaaatgcgcaagttttaggcttgctgtggaaacacacaacatccgagcctttaaaaccattcctgaagagtgcgttgaaccaacaaaggactacattaatggcgaacaatttagatcagactctaaaacagttaaccaacaagctttcttttatgctagtgaacgcgaagtccatcacaacgacatatttatattcggcatagataacaccg

SEQ ID NO: 57549 - DNA, 348 bp, Glycine max
gcacaagtgagtttgttgatcgagataactagaaacagtgtgatgaaaatgaaggtccttgttttcttcgttgctacaattttggtagcatggcaatgccatgcgtacgatatgttccctctccgaatgaacactggctatggtgcccgtactccggaggtgaaatgcgcaagttggaggcttgctgtggaagcacacaacatctttggctttgagaccattcctgaagagtgcgttgaagcaacaaaggaatacatccatggcgaacaatatagatcagactccaaaacagttaaccaacaagcttacttttatgccagagacctcgaagtccatcccaaggacaca

SEQ ID NO: 57550 - DNA, 383 bp, Glycine max
gagtgcacaagtgagtttgttgatcgagataactagaaacagtgtgatgaaaatgaaggtccttgttttcttcgttgctacaattttggtagcatggcaatgccatgcgtacgatatgttccctctccgaatgaacactggctatggtgcccgtactccggaggtgaaatgcgcaagttggaggcttgctgtggaagcacacaacatctttggctttgagaccattcctgaagagtgcgttgaagcaacaaaggaatacatccatggcgaacaatatagatcagactccaaaacagttaaccaacaagcttacttttatgccagagacctcgaagtccatcccaaggacagatttgtgttcagtatagatggcaccgtactct

SEQ ID NO: 57551 - DNA, 378 bp, Glycine max
ggcacaagtgagtttgttgatcgagataactagaaacagtgtgatgaaaatgaaggtccttgttttcttcgttgctacaattttggtagcatggcaatgccatgcgtacgatatgttccctctccgaatgaacactggctatggtgcccgtactccggaggtgaaatgcgcaagttggaggcttgctgtggaagcaaaaaacatctttgggttttagaacattcctgaaaaatgcgttgaagcaacaaaggaatacatccatggcgaacaatatagatcagactccaaaacagttaaccaacaagcttacttttatgccagagacctcgaagtccatcccaaggacacatttgtgttcagtatagatggcaccgtact

SEQ ID NO: 57552 - DNA, 76 bp, Glycine max
gagccggccgaactgcaccttcaacttcccttccagatggcaaagtctaagaatcatacactgcataaccatctcc

SEQ ID NO: 57553 - DNA, 386 bp, Glycine max
ggcacaagtgagtttgttgatcgagataactagaaacagtgtgatgaaaatgaaggtccttgttttcttcgttgctacaattttggtagcatggcaatgccatgcgtacgatatgttccctctccaaatgaacactggctatggtgcccgtactccggaggtgaaatgcgcaagttggaggcttgctgtggaagcacacaacatctttggctttgagaccattcctgaagagtgcgttgaagcaacaaaggaatacatccatggcgaacaatatagatcagactccaaaacagttaaccaacaagcttacttttatgccagagacctcgaagtccatcccaaggacacatttgtgttcagtatagatggcaccgtactctctaata

SEQ ID NO: 57554 - DNA, 154 bp, Glycine max
cggctgtcgagcaagactgacagaagcgggaaggtgcacagagtttgattgtgcagctatactgctagtcttatcgtgcaggagacatatcgaagttgctttgcttttctcttgttgctgcaggtagtttgtggtaccatgcgccatgcgcatg

SEQ ID NO: 57555 - DNA, 391 bp, Glycine max
ggcacaagtgagtttgttgatcgagataactagaaacagtgtgatgagaatgaaggtccttgttttcttcgttgctacaattttggtagcatggcaatgccatgcgtacgatatgttccctctccgaatgaacactggctatggtgcccgtactccggaggtgaaatgcgcaagttggaggcttgctgtggaagcacacaacatctttggctttgagaccattcctgaagagtgcgttgaagcaacaaaggaatacatccatggcgaacaatatagatcagactccaaaacagttaaccaacaagcttacttttatgccagagacctcgaagtccatcccaaggacacatttgtgttcagtatagatggcaccgtactctctaatattcca

SEQ ID NO: 57556 - DNA, 216 bp, Glycine max
acgcgtccatacgattgcaataggacaccaaaaggggacctggggtttcactggagatgcgtatgtcgtcgtctattgactaatttggtgcagtctcacacttaccgcatgagtcaccttcatggggatgctcctaaacaagatatcgtcggcatcacccctgattcgaaggtcgtttatcagaccattgtggagacgattaacgtccacatttgg

SEQ ID NO: 57557 - DNA, 395 bp, Glycine max
ccacgcgtcaacccaagcgtccgtcgctgctctcaatacaatcatggagaagctgtctttttcaaggcaccagtaaaacgggaagaaggcatggccctcatttttgtttgctgcaacccaacttgtggctaccgttggagagactatgactcttaatagtcaatgttcaacattggggagttgagcatatcaaattcttcactcttggatggatgagaaactttatttgtatatataaaacttggctactgtgaggacgttcataattaagtagttgtgatgactgtttaatctccctaaacaattatgttgacgcagttaatggtccaatcctttagtttatgggttatgaaagaaattcgcatttcttatttgagctccaagacatttatgaa

SEQ ID NO: 57558 - DNA, 128 bp, Glycine max
gattttccttgcgtttctctttcactttccctcactttctcgctcgccgaacgcccctctctctcctccaccttacgcttctctcacggtcggtttcctttccgtcttctgtgccttgctttgcctcg

SEQ ID NO: 57559 - DNA, 395 bp, Glycine max
ggcacaagtgagtttgttgatcgagataactagaaacagtgtgatgaaaatgaaggtccttgttttcttcgttgctacaattttggtagcatggcaatgccatgcgtacgatatgttccctctccgaatgaacactggctatggtgcccgtactccggaggtgaaatgcgcaagttggaggcttgctgtggaagcacacaacatctttggctttgagaccattcctgaagagtgcgttgaagcaacaaaggaatacatccatggcgaacaatatagatcagactccaaaacagttaaccaacaagcttacttttatgccagagacctcgaagtccatcccaaagacacatttgtgttcagtatagatggcaccgtactctctaatattccatact

SEQ ID NO: 57560 - DNA, 292 bp, Glycine max
ggcaagagtttgttgtgagctataagctagtttatcgtgaggagaatatgaagttgtttgttttctttgttgctgcagtagttttggtagcatgggcatgccatggcgcaggctaccaaaggttccctctccgaatgaaaactggctatggtgagcgttcttcggagggaaaatgcgcaagttttaagcttgctgtggaagcacacaacaatccgagcctttaaaaccattcctgaagagtgcgttgaaccaacacacgactacattaatggctaacaatttagatcagact

SEQ ID NO: 57561 - DNA, 357 bp, Glycine max
ggcacaagtgagtttgttgatcgagataactagaaacagtgtgatgaaaatgaaggtccttgttttcttcgttgctacaattttggtagcatggcaatgccatgcgtacgatatgttccctctccgaatgaacactggctatggtgcccgtactccggaggtgaaatgcgcaagttggaggcttgctgtggaagcacacaacatctttggctttgagaccattcctgaagagtgcgttgaagcaacaaaggaatacatccatggcgaacaatatagatcagactccaaaacagttaaccaacaagcttacttttatgccagagacctcgaagtccatcccaaagggacatttgtgtt

SEQ ID NO: 57562 - DNA, 383 bp, Glycine max
gatgcacaagtttgttgagatagctagaagcaataagatgaaaatgaaagtgcttgttttgtttgttgctacagttttggtagcatatgaatgccatggctcagactaccagaagttccctctccaaatgaaaactgggtttggtgggcaatacagcaatgaggtggcatgtgccagttggaggcttggcgtggaagcaaacaacgtagtcaagtggcaaactgttcctgcagcttgcggagagtacatagctgactacgttctaggagaccaatatagatcagattccaaaacagttaaccaacaagcttatttctatgctaaatccctcaaactcaacaacaaagatgtctttgtcttggacgttgacgacactactctct

SEQ ID NO: 57563 - DNA, 381 bp, Glycine max
ggatgtgttggtcaatgcgcagtgtgcgacatcgatcatcgtccgagaacaatcgtggtaggattatatacttaataataatgagacgagtgggtggcttcttagacttgttcggttcgtatgcatgttctgtccgttcacacattattcctctccagtcatgagtcgtcgattggcatggtttgaggaacgccagagtaagaataagtctcggcgaatgaaaaggtactggatgtgaaagggatgcctcagtcacctcccagctctagtatggttatacatctcccactgatattcactcctcacgcacaggtggttctcatgttacgatgtgatcacatgcatgatctaagttgatccaggatggaaataacttcaggg

SEQ ID NO: 57564 - DNA, 358 bp, Glycine max
ggcacaagtgagtttgttgatcgagataactagaaacagtgtgatgaaaatgaaggtccttgttttcttcgttgctacaattttggtagcatggcaatgccatgcgtacgatatgttccctctccgaatgaacactggctatggtgcccgtactccggaggtgaaatgcgcaagttggaggcttgctgtggaagcacacaacatctttggctttgagaccattcctgaagagtgcgttgaagcaacaaaggaatacatccatggcgaacaatatagatcagactccaaaacagttaaccaacaagcttacttttatgccagagacctcgaagttcatcccaaggacacatttttgttc

SEQ ID NO: 57565 - DNA, 69 bp, Glycine max
acccaagcgtccaacgtgatacttcacactcctctattcgaccttcttgtctctctctcagtctcgcgt

SEQ ID NO: 57566 - DNA, 453 bp, Glycine max
tacaggtcaggaattcccgggccgacccacgcgtcaaagacgacagaagggggcagtgatagcaaagagaagatcatttcataatcagactcacctaactccgccatggctgctgttccctctactttcgctctaaccaaatctgcattgtccataaacaagctggaccactctctggtcaagatcaaaccatacagcttctctctgaatctaaaccgtctagggaggatggaaacatctttaaccagaaggcctctaacaattcaagccacatatagtgatggtggaaggcccagcagtgctagtgtatttgttggtgggtttctcttgggaggattaatagttggcactcttggttgtgtgtatgcacctcaggtagtatttgttactgaaatgtactttttcaagtgctagatgttggtgttcgatgggatacattcagatattttgtgt

SEQ ID NO: 57567 - DNA, 383 bp, Glycine max
ggcacaagtgagtttgttgatcgagataactagaaacagtgtgatgaaaatgaaggtccttgttttcttcgttgctacaattttggtagcatggcaatgccatgcgtacgatatgttccctctccgaatgaacactggctatggtgcccgtactccggaggtgaaatgcgcaagttggaggcttgctgtggaagcacacaacatctttggctttgagaccattcctgaagagtgcgttgaagcaacaaaggaatacatccatggcgaacaatatagatcagactccagaacagttaaccaacaagcttacttttatgccagagacctcgaagtccatcccaaggacacatttgtgttcagtatagatggcaccgtactctcta

SEQ ID NO: 57568 - DNA, 382 bp, Glycine max
ggttctagtgtgtgattgtttgttgtcgtaacccgttcttcttcttttgttgttcggtgtttgtgtttgttttttctctcacctgaaaatgtcttgctgcggtggtaactgtggttgcggaagctcctgcaattgcggcaacggctgcggaggctgcaagatgtacccagacttgagctacactgattcaaccaccaccgagaccttggtcatggaattggcacctgttaaggctcaatttgagggtgctgaaatgggtgtgcccgctgagaacgatggctgcaaatgtggaccaaactgctcctgcaacccctgcacttgcaattgaggtgttggaagagcaagcttcaagcagagatagcccttaattaggaataatgat

SEQ ID NO: 57569 - DNA, 370 bp, Glycine max
gaaggtgcaagagtttgttgtgagctataagctagtttatcgtgaggagaatatgaagttgtttgttttctttgttgctgcagtagttttggtagcatggccatgccatggcgcaggctaccaaaggttccctctccgaatgaaaactggctatggtgagcgttcttcggaggtaaaatgcgcaagttttaggcttgctgtggaagcacacaacatccgagcctttaaaaccattcctgaagagtgcgttgaaccaacaaagggctacattaatggcgaacaatttagattagactctaaaacagttaaccaacaagctttcttttatgctagtgaacgcgaagtccatcacaacgacatatttatattc

SEQ ID NO: 57570 - DNA, 389 bp, Glycine max
ggttctagtgtatgtgattgttgtgactcgttcttcttcgtcgttatcttcttcttttgttgtttgtgtgtttgttttttctctcacctgaaaatgtcttgctgcggtggtaactgtggttgcggaagcgcctgcaagtgcggcaacggctgcggaggctgcaagatgtacccagacttgagctacaccgagtcaaccaccaccgagaccttggtcatgggagtggcaccagttaaggctcaattcgagagtgctgaaatgggtgttcccgctgagaacgatggctgcaaatgtggagctaactgcacctgcaacccctgcacttgcaagtgaggtgttggagagctaaagcttcaagcagaaatggcccttagaaataatgataaaaa

SEQ ID NO: 57571 - DNA, 296 bp, Glycine max
ggcagaagtaaggttgcagctcacgcatgctgaagacattgttctaaagatgagagtctgtgtatatcctctcatgcatacaatatgtagaagcaaggccatgtcattcctaggaaaggttgcatctcgaaacaccgactgcatactgtacgactcagtaatgccgtgaagcatcccacattagcggcttgccgttgacacatacaacaccgtgtgcttcggcaccgttcgtgtgcactactttcacacactccgcgactacatctacgctcagatactcagaatagactcgctct

SEQ ID NO: 57572 - DNA, 416 bp, Glycine max
gcacaagtttgttgagatagctagaagcaataagatgaaaatgaaagtgcttgttttgtttgttgctacagttttggtagcatatgaatgccatggctcagactaccagaagttccctctccaaatgaaaactgggtttggtgggcaatacagcaatgaggtggcatgtgccagttggaggcttggcgtggaagcaaacaacgtagtcaagtggcaaactgttcctgcagcttgcggagagtacatagctgactacgttctaggagaccaatatagatcagattccaaaacagttaaccaacaagcttatttctatgctaaatccctcaaactcaccaacaaagatgtctttgtcttggacgttgacgacactactctctctaatctccagtattttgctaaccatggatttggtg

SEQ ID NO: 57573 - DNA, 382 bp, Glycine max
ggtgcacaagtgagtttgttgatcgagataactagaaacagtgtgatgaaaatgaaggtccttgttttcttcgttgctacaattttggtagcatggcaatgccatgcgtacgatatgttccctctccgaatgaacactggctatggtgcccgtactccggaggtgaaatgcgcaagttggaggcttgctgtggaagcacacaacatctttggctttgagaccattcctgaagagtgcgttgaagcaacaaatgaatacatccatggcgaacaatatagatcagactccaaaacagttaaccaacaagcttacttttatgccagagacctcgaagtccatcccaaggacacatttgtgttcagtatagatggcaccgtactct

SEQ ID NO: 57574 - DNA, 380 bp, Glycine max
  unsure (1)..(380): unsure at all n locations
agaagaaagacgacaggggggggcaaaggagtttgttgatcgagataactctagaaacagtgtgatgaaaagaagtgcttgggttcttccctgctacaaatttggtagcatggcaatgccatgcgtacgatatgttccctctccgaatgaacactggctatggtgcccgtactccggaggtgaaatgcgcaagtttggngcttgctgtggaaacacacaacatctttggctttgagaccattcctgaagagtgcgttgaagcaacaaaggaatacatccatggcgaacaatatagatcagactccaaaacagttaaccaacaagcttacttttatgccagagacctcgaagtccatcccaaggacacatttgtgttcagt

SEQ ID NO: 57575 - DNA, 383 bp, Glycine max
ggaacatcagtgatgttggtggtgctgttgctgcggggcacgttagagatgaatgcgagagaagttcggctgtgctgcctggcttggattctaaggaatctgcacgcgtttgaataatggaaactggaaaatgaagaagattattattgctgttgtcttgtgggtcatatgattctttgcaaaatgatgttaatgcatgcaagagtagtattataaggtttctttttatgattgatttttagatgtattctggtagttagttttactgttgttgtgcatgcatatgatgttttggtctctgttgaggatttgggtgctgctgctgctggcttgtgtaactgtcttagtattttgtcatatttggttctcttatacatcatttc

SEQ ID NO: 57576 - DNA, 364 bp, Glycine max
gaaggtgcaagagtttgttgtgagctataagctagtttatcgtgaggagaatatgaagttgtttgttttctttgttgctgcagtagttttggtagcatggccatgccatggcgcaggctaccaaaggttccctctccgaatgaaaactggctatggtgagcgttcttcggaggtaaaatgcgcaagttttaggcttgctgtggaagcacacaacatccgagcctttaaaaccattcctgaagagtgcgttgaaccaacaaaggactacattaatggcgaacaatttagattagactctaaaacagttaaccaacaagctttcttttatgctagtgaacgcgaagtccatcacaacgacatattt

SEQ ID NO: 57577 - DNA, 351 bp, Glycine max
ggtgcacaagtgagtttgttgatcgagataactagaaacagtgtgatgaaaatgaaggtccttgttttcttcgttgctacaattttggtagcatggcaatgccatgcgtacgatatgttccctctccgaatgaacactggctatggtgcccgtactccggaggtgaaatgcgcaagttggaggcttgctgtggaagcacacaacatctttggctttgagaccattcctgaagagtgcgttgaagcaacaaaggaatacatccatggcgaacaatatagattagactccaaaacagttaaccaacaagcttacttttatgccagagacctcgaagtccatcccaaggacaca

SEQ ID NO: 57578 - DNA, 370 bp, Glycine max
gacacttcaaaatcctctagtaacccttcttttctctctctctctctcgtgttctgagctgctagaagcaatggagaggaaaagaagccatgcttctttcaccatgtttgcaatgcttgttggattgctctctcagagccttgtcattcctgtaatatccaccactgttgcagatcagaagaactactacaccccagatccacatgctggaagtccccccacaggtttatacgattctctgtgttcatataatagtaatcgtagatctcaaggctatgagagctctagaccatgtcatcaaactagtcgatcatgtcgatcatgtggctcatgtggaaactgtggctagctacagcacaacatcatgatc

SEQ ID NO: 57579 - DNA, 381 bp, Glycine max
ggcacaagtttgttgagatagctagaagcaataagatgaaaatgaaagcgcttgttttgtttgttgctacagttttggtagcatatgaatgccatggctcagactaccagaagttccctctccaaatgaaaactgggtttggtgggcaatacagcaatgaggtggcatgtgccagttggaggcttggcgtggaagcaaacaacgtagtcaagtggcaaactgttcctgcagcttgcggagagtacatagctgactacgttctaggagaccaatatagatcagattccaaaacagttaaccaacaagcttatttctatgctaaatccctcaaactcaccaacaaagatgtctttgtcttggacgttgacgacactactctct

SEQ ID NO: 57580 - DNA, 367 bp, Glycine max
ggcacaagtgagtttgttgatcgagataactagaaacagtgtgatgaacatgaaggtccttgttttcttcgttgctacaattttggtagcatggcaatgccatgcgtacgatatgttccctctccgaatgaacactggctatggtgcccgtactccggaggtgaaatgcgcaagttggaggcttgctgtggaagcacacaacatctttggctttgagaccattcctgaagagtgcgttgaagcaacaaaggaatacatccatggcgaacaatatagattagactccaaaacagttaaccaacaagcttacttttatgccagagacctcgaagtccatcccaaggacacatttgtgttcagtatagat

SEQ ID NO: 57581 - DNA, 383 bp, Glycine max
ggcacaagtgagtttgttgatcgagataactagaaacagtgtgatgaaaatgaaggtccttgttttcttcgttgctacaattttggtagcatggcaatgccatgcgtacgatatgttccctctccgaatgaacactggctatggtgcccgtactccggaggtgaaatgcgcaagttggaggcttgctgtggaagcacacaacatctttggctttgagaccattcctgaagagtgcgttgaagcaacaaaggaatacatccatggcgaacaatatagattagactccaaaacagttaaccaacaagcttacttttatgccagagacctcgaagtccatcccaaggacacatttgtgttcagtatagatggcaccgtactctcta

SEQ ID NO: 57582 - DNA, 381 bp, Glycine max
ggcacaagtatgttgagatagctagaagcaataagatgaaaatgaaagtgcttgttttgtttgttgctacagttttggtagcatatgaatgccatggctcagactaccagaagttccctctccaaatgaaaactgggtttggtgggcaatacagcaatgaggtggcatgtgccagttggaggcttggcgtggaagcaaacaacgtagtcaagtggcaaactgttcctgcagcttgcggagagtacatagctgactacgttctaggagaccaatatagatcagattccaaaacagttaaccaacaagcttatttctatgctaaatccctcaaactcaccaacaaagatgtctttgtcttggacgttgacgacactactctct

SEQ ID NO: 57583 - DNA, 388 bp, Glycine max
ggttctagtgtgtgattgtttgttgttgtaactcgttcttcttcttttgttgttctgtgtttgtgtttgttttttctctcacctgaaaatgtcttgctgcggtggtaactgtggttgcggaagctcctgcaagtgcggcaacggctgcggaggctgcaagatgtacccagacttgagctacactgagtcaaccaccaccgagaccttggtcatgggagtggcacctgttaaggctcaatttgagggtgctgaaatgggtgtgcccgctgagaacgatggctgcaaatgtggaccaaactgctcctgcaacccctgcacttgcaagtgaggtgttgggagagcaagcttcaagcagagatagcccttaattaggaataatgataaacta

SEQ ID NO: 57584 - DNA, 383 bp, Glycine max
gaaggtgcaagagtttgttgtgagctataagctagtttatcgtgaggagaatatgaagttgtttgttttctttgttgctgcagtagttttggtagcatggccatgccatggcgcaggctaccaaaggttccctctccgaatgaaaactggctatggtgagcgttcttcggaggtaaaatgcgcaagttttaggcttgctgtggaagcacacaacatccgagcctttaaaaccattcctgaagagtgcgttgaaccaacaaaggactacattaatggcgaacaatttagattagactctaaaacagttaaccaacaagctttcttttatgctagtgaacgcgaagtccatcacaacgacatatttatattcggcatagataaca

SEQ ID NO: 57585 - DNA, 384 bp, Glycine max
gaaggtgcaagagtttgttgtgagctataagctagtttatcgtgaggagaatatgaagttgtttgttttctttgttgctgcagtagttttggtagcatggccatgccatggcgcaggctaccaaaggttccctctccgaatgaaaactggctatggtgagcgttcttcggaggtaaaatgcgcaagttttaggcttgctgtggaagcacacaacatccgagcctttaaaaccattcctgaagagtgcgttgaaccaacaaaggactacattaatggcgaacaatttagatcagactctaaaacagttaaccaacaagctttcttttatgctagtgaacgcgaagtccatcacaacgacatatttatattcggcatagataacac

SEQ ID NO: 57586 - DNA, 371 bp, Glycine max
gaaggtgcaagagtttgttgtgagctataagctagtttatcgtgaggagaatatgaagttgtttgttttctttgttgctgcagtagttttggtagcatggccatgccatggcgcaggctaccaaaggttccctctccgaatgaaaactggctatggtgagcgttcttcggaggtaaagtgcgcaagttttaggcttgctgtggaagcacacaacatccgagcctttaaaaccattcctgaagagtgcgttgaaccaacaaaggactacattaatggcgaacaatttagatcagactctaaaacagttaaccaacaagctttcttttatgctagtgaacgcgaagtccatcacaacgacatatttatattcg

SEQ ID NO: 57587 - DNA, 373 bp, Glycine max
gagcgaaacagagagtgatttcagtgagtgatcggtgttcacttgatctcatcataatcgtcagcgtcaattgaagaagatgccgatcagaaacatcgccgtcggaaggcctgaagaggcgactcaccccgacacgttgaaggcggctttggctgagttcatctcaaccttcatcttcgtgttcgccggctcaggctccggcatcgcctacaacaagctcaccgacaacggcgctgccacccctgccggccgcatctccgcctccatcgcccatgcattcgccctcttcgtcgccgtctccgtcggcgccaacatctccggcggccacgtcaaccccgccgtcaccttcggcgccttcgtcggcggcaacatc

SEQ ID NO: 57588 - DNA, 377 bp, Glycine max
ggcacaagtgagtttgttgatcgagataactagaaacagtgtgatgaaaatgaaggtccttgttttcttcgttgctacaattttggtagcatggcaatgccatgcgtacgatatgttccctctccgaatgaacactggctatggtgcccgtactccggaggtgaaatgcgcaagttggaggcttgctgtggaagcacacaacatctttggctttgagaccattcctgaagagtgcgttgaagcaacaaaggaatacatccatggcgaacaatatagatcagactccaaaacagttaaccaacaagcttacttttatgccagagacctcgaagtccatcgcaaggacacatttgtgttcagtatagatggaacgtact

SEQ ID NO: 57589 - DNA, 335 bp, Glycine max
ggcacaagtttgttgagatagctagaagcaataagatgaaaatgaaagtgcttgttttgtttgttgctacagttttggtagcatatgaatgccatggctcagactaccagaagttccctctccaaatgaaaactgggtttggtgggcaatacagcaatgaggtggcatgtgccaattggaggcttggcgtggaagcaaacaacgtagtcaagtggcaaactgttcctgcagcttgcggagagtacatagctgactacgttctaggagaccaatatagatcagattccaaaacagttaaccaacaagcttatttctatgctaaatccctcaaactc

SEQ ID NO: 57590 - DNA, 380 bp, Glycine max
  unsure (1)..(380): unsure at all n locations
ggcacaagtgagtttgttgatcgaaataactagaaacagtgtgatgaaaatgaacgtccttgttttcttcgttgctacaattttggtagcatggcaatgccatgcgtacgatatgttccctctccgaatgaacactggctatggtgcccgtactccggaggtgaaatgcgcaagttggaggcttgctgtggaagcacacaacatctttggctttgagaccattcctgaagagtgcgttgaagcaacaaaggaatacatccatggcgaacaatatagatcagactccaaaacagttaaccaacaagcttacttttatgccagagacctcgaagtccatcccanggacacatttgtgttcagtatagatggcaccgtactct

SEQ ID NO: 57591 - DNA, 345 bp, Glycine max
ggcacaagtttgttgagatagctagaagcaataagatgaaaatgaaagtgcttgttttgtttgttgctacagttttggtagcatatgaatgccatggctcagactaccagaagttccctctccaaatgaaaactgggtttggtgggcaatacagcaatgaggtggcatgtgccagttggaggcttggcgtggaagcaaacaacgtagtcaagtggcaaactgttcctgcagcttgcggagagtacatagctgactacgttctaggagaccaatatagatcagattccaaaacagttaaccaacaagcttatttctatgctaaatccctcaaactcaccaacaaag

SEQ ID NO: 57592 - DNA, 363 bp, Glycine max
ggcacaagtgagtttgttgatcgagataactagaaacagtgtgatgaaaatgaaggtccttgttttcttcgttgctacaaatttggtagcatggcactgacatgcgtacgatatgttccctctccaaatgaacactggctatggtgcccgtactccggaagtgaaatgcgcaagttggaggcttgctgtggaagcacacaatatctttggctttgagaccattcctgaataatgcattgaagcaataaatgaatacatccatggcgaacaatatagatcagactccagaacagttatacagcaagcatacctttatgccatagacctcgaagtccatcccaaggacacatttgtgttcagtat

SEQ ID NO: 57593 - DNA, 315 bp, Glycine max
gagatgaatctgcattaaacaattctggcagcaatgttggccgaaatctggagcgtcgggaagttccactaggtcattcacccaatgaagcaatcaagattgacaaggataagttaaaggcactggcagctatgggaaagaagagaaaggaacaacgaggcgaaatggcattaaagaaagatgtaatggatgtggatgatctcattgagagggagctggaagatggaattgaattagcagtcgaggatgagaaaaataagcgtgagagaaggcagaactggtctaagcctgatggtgaagatcaccatggggggg

SEQ ID NO: 57594 - DNA, 381 bp, Glycine max
ggcacaagtgagtttgttgatcgagataactagaaacagtgtgatgaaaatgaaggtccttgttttcttcgttgctacaattttggtagcatggcaatgccgtgcgtacgatatgttccctctccgaatgaacactggctatggtgcccgtactccggaggtgaaatgcgcaagttggaggcttgctgtggaagcacacaacatctttggctttgagaccattcctgaagagtgcgttgaagcaacaaaggaatacatccatggcgaacaatatagatcagactccaaaacagttaaccaacaagcttacttttatgccagagacctcgaagtccatcccaaggacacatttgtgttcagtatagatggcaccgtactctc

SEQ ID NO: 57595 - DNA, 72 bp, Glycine max
gaccgcacagaattagggttttccaattcacagagcaacacaacgaaccaacaatggcgcagcctcagccgc

SEQ ID NO: 57596 - DNA, 224 bp, Glycine max
gacacatcaccatcctctggtaccttcttaccatcatactagttcgcgcccgttccttcgcggtctacgcagcttgcagtccaggctctgcaacgccacccagtctcttacaccaagttcgccatgctcgatggagtgatttctcggcacgtgtcactccccgttcgagccaccaatgtcgttgatcaccccaacgacaacgtgccactttcaaatttcagctc

SEQ ID NO: 57597 - DNA, 378 bp, Glycine max
ggtgcacaagtgagtttgttgatcgagataactagaaacagtgtgatgaaaatgaaggtccttgttttcttcgttgctacaattttggtagcatggcaatgccatgcgtacgatatgttccctctccgaatgaacactggctatggtgcccgtactccggaggtgaaatgcgcaagttggaggcttgctgtggaagcacacaacatctttggctttgagaccattcctgaagagtgcgttgaagcaacaaaggaatacatccatggcgaacaatatagatcagactccaaaacagttaaccaacaagcttacttttatgccagagacctcgaagtccatcccaaggacacatttgtgttcagtatagatggcaccgta

SEQ ID NO: 57598 - DNA, 333 bp, Glycine max
ggctgccagcgcagtcgaacatccagcgacacgcagatcatgtgctcctcccccagatcatctggaacgttcttacccggtggcgatgatcgacactttgatggccattggcatggttgtgcaggtcgagttcaacgtcgtcaacggacagaccggcgccatcgcccgccgtattcatgacaagcttccggctgcatcagacatccatgcgctgcatcacacatgatagctacatcttcgacaaactcagatacgtcagttacacctacttctgtcatgcgaacgagattctctggatgctaatcccgttctcgtacatggaagatatccaga

SEQ ID NO: 57599 - DNA, 379 bp, Glycine max
gatgcacaagtttgttgagatagctagaagcaataagatgaaaatgaaagtgcttgttttgtttgttgctacagttttggtagcatatgaatgccatggctcagactaccagaagttccctctccaaatgaaaactgggtttggtgggcaatacagcaatgaggtggcatgtgccagttggaggcttggcgtggaagcaaacaacgtagtcaagtggcaaactgttcctgcagcttgcggagagtacatatctgactacgttctatgagaccaatatagatcagattccaaaacagttaaccaacaagcttatttctatgctaaatccctcaaactcaccaacaaagatgtctttgtcttggacgttgacgacactact

SEQ ID NO: 57600 - DNA, 327 bp, Glycine max
tggggcacaagtgagtttgttgatcgagataactagacacagtgtgatgaaaatcaaggtccttgtgttcatcgttgctacaattttggtagcatggcaatgccatgcgtacgatatgttccctctccgaatgaacactggctatggtgcccgtactccggatgtgaaatgcgcaagttggaagcttgctgtggaagcacacaccatctttggctttgagaccattcctgaagagtgcgttgaagcaacaaaggaatatatccatggcgaacattatacatcagactcaattacagttaaccaacaagcatacttttatgccagaga

SEQ ID NO: 57601 - DNA, 377 bp, Glycine max
ggcacaagtgagtttgttgatcgagataactagaaacagtgtgatgaaaatgaaggtccttgttttcttcgttgctacaattttggtagcatggcaatgccatgcgtacgatatgttccctctccgaatgaacactggctatggtgcccgtactccggaggtgaaatgcgcaagttggaggcttgctgtggaagcacacaacatctttggctttgagaccattcctgaagagtgcgttgaagcaacaaaggaatacatccatggcgaacaatatagatcagactccaaaacagttaaccaacaagcttacttttatgccagagacctcgaagtccatcccaaggacacatttgtgttcagtatagatggcaccgtac

SEQ ID NO: 57602 - DNA, 263 bp, Glycine max
ggcacaagtttgttgagatagctagaagcaataagatgaaaatgaaagtgcttgttttgtttgttgctacagttttggtagcatatgaatgccatggctcagactaccagaagttccctctccaaatgaaaactgggtttggtgggcaatacagcaatgaggtggcatgtgccagttggaggcttggcgtggaagcaaacaacgtagtcaagtggcaaactgttcctgcagcttgcggagagtacatagctgactacgttcta

SEQ ID NO: 57603 - DNA, 387 bp, Glycine max
ggttctagtgtgtgattgtttgttgttgtaactcgttcttcttcttttgttgttctgtgtttgtgtttgttttttctctcacctgaaaatgtcttgctgcggtggtaactgtggttgcggaagctcctgcaagtgcggcaacggctgcggaggctgcaagatgtacccagacttgagctacactgagtcaaccaccaccgagaccttggtcatgggagtggcacctgttaaggctcaatttgagggtgctgaaatgggtgtgcccgctgagaacgatggctgcaaatgtggaccaaactgctcctgcaacccctgcacttgcaagtgaggtgttgggagagcaagcttcaagcagagatagcccttaattaagaataatgataaact

SEQ ID NO: 57604 - DNA, 385 bp, Glycine max
ggcacaagtgagtttgttgatcgagataactagaaacagtgtgatgaaaatgaaggtccttgttttcttcgttgctacaattttggtagcatggcaatgccacgcgtacgatatgttccctctccgaatgaacactggctatggtgcccgtactccggaggtgaaatgcgcaagttggaggcttgctgtggaagcacacaacatctttggctttgagaccactcctgaagagtgcgttgaagcaacaaaggaatacatccatggcgaacaatatagatcagactccaaaacagttaaccaacaagcttacttttatgccagagacctcgaagtccatcccaaggacacatttgtgttcagtatagatggcaccgtactctctaat

SEQ ID NO: 57605 - DNA, 375 bp, Glycine max
gaaagtgcaagagtttgttgtgagctataagctagtttatcgtgaggagaatatgaagttgtttgttttctttgttgctgcagtagttttggtagcatggccatgccatggcgcaggctaccaaaggttccctctccgaatgaaaactggctatggtgagcgttcttcggaggtaaaatgcgcaagttttaggcttgctgtggaagcacacaacatccgagcctttaaaaccattcctgaagagtgcgttgaaccaacaaaggactacattaatggcgaacaatttagatcagactctaaaacagttaaccaacaagctttcttttatgctagtgaacgcgaagtccatcacaacgacatatttatattcggcat

SEQ ID NO: 57606 - DNA, 358 bp, Glycine max
gaaggtgcaagagtttgttgtgagctataagctagtttatcgtgaggagaatatgaagttgtttgttttctttgttgctgcagtagttttggtagcatggccatgccatggcgcaggctaccaaaggttccctctccgaatgaaaactggctatggtgagcgttcttcggaggtaaaatgcgcaagttttaggcttgctgtggaagcacacaacatccgagcctttaaaaccattcctgaagagtgcgttgaaccaacaaaggactacattaatggcgaacaatttagatcagactctaaaacagttaaccaacaagctttcttttatgctagtgaacgcgaagtccatcacaacgac

SEQ ID NO: 57607 - DNA, 393 bp, Glycine max
  unsure (1)..(393): unsure at all n locations
aaaagggggaaaaattaatttggttattcaaaatactaaaaacattttaataaaattaaaggccctggtttcctccttggcaaaattttgggaacaagggaatgccatgcgtacgatatgttccctctccgaatgaacactggctatggtgcccgtactccggaggtgaaatgcgcaagttggaggcttgctgtggaagcacacaacatctttggctttgagaccattcctgaagagtgcgttgaagcaacaanaggaatacatccatggcgaacaatatagatcagactccaaaacagttaaccaacaagcttacttttatgccagagacctcgaagtccatcncaaggacacatttgtgttcagtatagatggcaccgtactctctaatat

SEQ ID NO: 57608 - DNA, 303 bp, Glycine max
ggcacaagtttgttgagatagctagaagcaataagatgaaaatgaaagtgcttgttttgtttgttgctacagttttggtagcatatgaatgccatggctcagactaccagaagttccctctccaaatgaaaactgggtttggtgggcaatacagcaatgaggtggcatgtgccagttggaggcttggcgtggaagcaaacaacgtagtcaagtggcaaactgttcctgcagcttgcggagagtacatagctgactactttctaggagaccattatagatcagattccaaaacagttaaccaac

SEQ ID NO: 57609 - DNA, 366 bp, Glycine max
ggtgcacaagtgagtttgttgatcgagataactagaaacagtgtgatgaaaatgaaggtccttgttttcttcgttgctacaattttggtagcatggcaatgccatgcgtacgatatgttccctctccgaatgaacactggctatggtgcccgtactccggaggtgaaatgcgcaagttggaggcttgctgtggaagcacacaacatctttggctttgagaccattcctgaagagtgcgttgaagcaacaaaggaatacatccatggcgaacaatatagatcagactccaaaacagttaaccaacaagcttacttttatgccagagacctcgaagtccatcccaaggacacatttgtgttcagtata

SEQ ID NO: 57610 - DNA, 378 bp, Glycine max
  unsure (1)..(378): unsure at all n locations
ggcacaagtgagtttgttgatcgagataactagaaacagtgtgatgaaaatgaaggtccttgttttcttcgttgctacaattttggtagcatggcaatgccatgcgtacgatatgttccctctccgaatgaacactggctatggtgcccgtactccggaggtgaaatgcgcaagttggaggcttgctgtggaagcacacaacatctttggctttgagaccattcctgaagagtgcgttgaagcaacanaggaatacatccatggcgaacaatatagatcagactccaaaacagtttaacaacaagcttacttttatgccagagacctcgaagtccatcncaaggacacatttgtgttcagtatagatggcaccgtact

SEQ ID NO: 57611 - DNA, 327 bp, Glycine max
  unsure (1)..(327): unsure at all n locations
ggcacaagtgagtttgttgatcgagataactagaaacagtgtgatgaaaatgaaggtccttgttttcttcgttgctacaattttggtagcatggcaatgccatgcgtacgatatgttccctctccgaatgaacactggctatggtgcccgtactccggaggtgaaatgcgcaagttggaggcttgctgtggaagcacacaacatctttggctttgagaccattcctgaagagtgcgttgaagcaacaaaggaatacatccatggcgaacaatatagatcagactccaaaacagttaaccagcaagcttacttgntatgccagagact

SEQ ID NO: 57612 - DNA, 358 bp, Glycine max
ggtgcacaagtgagtttgttgatcgagataactagaaacagtgtgatgaaaatgaaggtccttgttttcttcgttgctacaattttggtagcatggcaatgccatgcgtacggtatgttccctctccgaatgaacactggctatggtgcccgtactccggaggtgaaatgcgcaagttggaggcttgctgtggaagcacacaacatctttggctttgagaccattcctgaagagtgcgttgaagcaacaaaggaatacatccatggcgaacaatatagatcagactccaaaacagttaaccaacaagcttacttttatgccagagacctcgaagtccatcccaaaggacacatttgtg

SEQ ID NO: 57613 - DNA, 385 bp, Glycine max
gcacaagtgagtttgttgatcgagataactagaaacagtgtgatgaaaatgaaggtccttgttttcttcgttgctacaattttggtagcatggcaatgccatgcgtacgatatgttccctctccgaatgaacactggctatggtgcccgtactccggaggtgaaatgcgcaagttggaggcttgctgtggaagcacacaacatctttggctttgagaccattcctgaagagtgcgttgaagcaacaaaggaatacatccatggcgaacaatatagatcagactccaaaacagttaaccaacaagcttacttttatgccagagacctcgaagtccatcccaaggacacatttgtgttcagtatagatggcaccgtactctctaata

SEQ ID NO: 57614 - DNA, 380 bp, Glycine max
ggcacaagtgagtttgttgatcgagataactagaaacagtgttatgaaaatgaaggtccttgttttcttcgttgctacaattttggtagcatggcaatgccatgcgtacgatatgttccctctccgaatgaacactggctatggtgcccgtactccggaggtgaaatgcgcaagttggaggcttgctgtggaagcacacaacatctttggctttgagaccattcctgaagagtgcgttgaagcaacaaaggaatacatccatggcgaacaatatagatcagactccaaaacagttaaccaacaagcttacttttatgccagagacctcgaagtccatcccaaggacacatttgtgttcagtatagatggcaccgtactct

SEQ ID NO: 57615 - DNA, 406 bp, Glycine max
cgggtcaggccatgccgtgcgtacggatgcgtacagaagacagaaaggggcacaagtgagtttgttgatcgagataactagaaacagtgtgatgaaaatgaaggtccttgttttcttcgttgctacaattttggtagcatggcaatgccatgcgtacgatatgttccctctccgaatgaacactggctatggtgcccgtactccggaggtgaaatgcgcaagttggaggcttgctgtggaagcacacaacatctttggctttgagaccattcctgaagagtgcgttgaagcaacaaaggaatacatccatggcgaacaatatagatcagactccaaaacagttaaccaacaagcttacttttatgccagagacctcgaagtccatcccaaggacacaattgtgttc

SEQ ID NO: 57616 - DNA, 329 bp, Glycine max
gaattgctgcataactgaggaaacggaggaagagaccgcactgccatcgatacgatatacgtcgattaagtatactgtggatcttgggagatgctgatggcaacaatgacctcaaaaagcctgttcatggccgcagcaaagaatatccataaccaagacggtgtcgttctgggcgatcatactcagaaccatgtcatctaaatgtctcacctttgacgttttttacttcaccaatatcctatactttttccttatgttcactgatgatctaaaacgactacttttgtttgcttccgatttacgttttgaaattctcaaacagacccttc

SEQ ID NO: 57617 - DNA, 327 bp, Glycine max
ggcacaagtgagtttgttgatcgagataactagaaacagtgtgatgaaaatgaaggtccttgttttcttcgttgctacaattttggtagcatggcaatgccatgcgtacgatatgttccctctccgaatgaacactggctatggtgcccgtactccggaggtgaaatgcgcaagttggaggcttgctgtggaagcacacaacatctttggctttgagaccattcctgaagagtgcgttgaagcaacaaaggaatacatccatggcgaacaatatagattagactccaaaacagttaaccaacaagcttacttttatgccagagacct

SEQ ID NO: 57618 - DNA, 325 bp, Glycine max
gcacaagtgagtttgttgatcgagataactagaaacagtgtgatgaaaatgaaggtccttgttttcttcgttgctacaattttggtagcatggcaatgccatgcgtacgatatgttccctctccgaatgaacactggctatggtgcccgtactccggaggtgaaatgcgcaagttggaggcttgctgtggaagcacacaacatctttggctttgagaccattcctgaagagtgcgttgaagcaacaaaggaatacatccatggcgaacaatatagatcagactccaaaacagttaaccaacaagcttacttttatgccagagacc

SEQ ID NO: 57619 - DNA, 401 bp, Glycine max
ggcacaagtgagtttgttgatcgagataactagaaacagtgtgatgaaaatgaaggtccttgttttcttcgttgctacaattttggtagcatggcaatgccatgcgtacgatatgttccctctccgaatgaacactggctatggtgcccgtactccggaggtgaaatgcgcaagttggaggcttgctgtggaagcacacaacatctttggctttgagaccattcctgaagagtgcgttgaagcaacaaaggaatacatccatggcgaacaatatagatcagactccaaaacagttaaccaacaagcttacttttatgccagagacctcgaagtccatccaaaggacacatttgtgttcagtatagatggcaccgtactctctaatattccatactacaaaa

SEQ ID NO: 57620 - DNA, 401 bp, Glycine max
ggcacaagtgagtttgttgatcgagataactagaaacagtgtgatgaaaatgaaggtccttgttttcttcgttgctacaattttggtagcatggcaatgccatgcgtacgatatgttccctctccgaatgaacactggctatggtgcccgtactccggaggtgaaatgcgcaagttggaggcttgctgtggaagcacacaacatctttggctttgagaccattcctgaagagtgcgttgaagcaacaaaggaatacatccatggcgaacaatatagatcagactccaaaacagttaaccaacaagcttacttttatgccagagacctcgaaatccatccccaaggacacatttgtgttcagtatagatggcaccgtactctctaatattccatactacaaa

SEQ ID NO: 57621 - DNA, 270 bp, Glycine max
ggcacttgcagattttcatttccttcactttcccgaaaaatggctaacacttttgactttcttcacgacgttctcacatcaagatagctcgtacgaagcacatcgatcacatttacatcgatgggaatgggtcacgtaagcagtccggcgacatcgacgcacggaagtccgcacaggtgaactgctgactcaagtagcccgatcgattcaggccgggaaacgtagcccatagggataataaaaaatcctagcagagcaacgagcttctca

SEQ ID NO: 57622 - DNA, 394 bp, Glycine max
  unsure (1)..(394): unsure at all n locations
ggcacaagtgagtttgttgatcgagataactagaaacagtgtgatgaaaatgaaggtccttgttttcttcgttgctacaattttggtagcatggcaatgccatgcgtacgatatgttccctctccgaatgaacactggctatggtgcccgtactccggaggtgaaatgcgcaagttggaggcttgctgtggaagcacacaacatctttggctttgagaccattcctgaagagtgcgttgaagcaacaaaggaatacatccatggcgaacaatatagatcagactccaaaacagttaaccaacaagcttacttttatgccagagacctcgaagtccatcccaaggacacatttgtgttcagtatanatggcaccgtactctctaatattccatac

SEQ ID NO: 57623 - DNA, 393 bp, Glycine max
ggcacaagtgagtttgttgatcgagataactagaaacagtgtgatgaaaatgaaggtccttgttttcttcgttgctacaattttggtagcatggcaatgccatgcgtacgatatgttccctctccgaatgaacactggctatggtgcccgtactccggaggtgaaatgcgcaagttggaggcttgctgtggaagcacacaacatctttggctttgagaccattcctgaagagtgcgttgaagcaacaaaggaatacatccatggcgaacaatatagatcagactccaaaacagttaaccaacaagcttacttttatgccagagacctcgaagtccatcccaaggacacatttgtgttcagtatagatggcaccgtactctccaatattccata

SEQ ID NO: 57624 - DNA, 390 bp, Glycine max
gaaggtgcaagagtttgttgtgagctataagctagtttatcgtgaggagaatatgaagttgtttgttttctttgttgctgcagtagttttggtagcatggccatgccatggcgcaggctaccaaaggttccctctccgaatgaaaactggctatggtgagcgttcttcggaggtaaaatgcgcaagttttaggcttgctgtggaagcacacaacatccgagcctttaaaaccattcctgaagagtgcgttgaaccaacaaaggactacattaatggcgaacaatttagatcagactctaaaacagttaaccaacaagctttcttttatgctagtgaacgcgaagtccatcacaacgacatatttatattcggcataaataacaccgtact

SEQ ID NO: 57625 - DNA, 398 bp, Glycine max
  unsure (1)..(398): unsure at all n locations
ggcacaagtttgttgagatagctagaagcaataagatgaaaatgaaagtgcttgttttgtttgttgctacagttttggtagcatatgaatgccatggctcagactaccagaagttccctctccaaatgaaaactgggtttggtgggcaatacagcaatgaggtggcatgtgccagttggaggcttggcgtggaagcaaacaacgtagtcaagtggcaaactgttcctgcagcttgcggagagtacatagctgactacgttctaggagaccaatatagatcagattccaaaacagttaaccaacaagcttatttctatgctaaatccctcaaactcaacaancaaagatgtctttgtcttggacgttgacgacactactctctctaatctccagtattt

SEQ ID NO: 57626 - DNA, 388 bp, Glycine max
ggttctagtgtgtgattgtttgttgttgtaactcgttcttcttcttttgttgttctgtgtttgtgtttgttttttctctcacctgaaaatgtcttgctgcggtggtaactgtggttgcggaagctcctgcaagtgcggcaacggctgcggaggctgcaagatgtacccagacttgagctacactgagtcaaccaccaccgagaccttggtcatgggagtggcacctgttaaggctcaatttgagggtgctgaaatgggtgtgcccgctgagaacgatggctgcaaatgtggaccaaactgctcctgcaacccctgcacttgcaagtgaggtgtttgggagagcaagctttaaagcagagatagcccttaattaggaataatgataaac

SEQ ID NO: 57627 - DNA, 360 bp, Glycine max
ggcacaagtgagtttgttgatcgagataactagaaacagtgtgatgaaaatgaaggtccttgttttcttcgttgctacaattttggtagcatggcaatgccatgcgtacgatatgttccctctccgaatgaacactggctatggtgcccgtactccggaggtgaaatgcgcaagttggaggcttgctgtggaagcacacaacatctttggctttgagaccattcctgaagagtgcgttgaagcaacaaaggaatacatccatggcgaacaatatagatcagactccaaaacagttaaccaacaagcttacttttatgccagagacctcgaagtccatcccaaggacacatttgtgttcag

SEQ ID NO: 57628 - DNA, 302 bp, Glycine max
  unsure (1)..(302): unsure at all n locations
ggcacaagtgagtttgttgatcgagataactagaaacagtgtgatgaaaatgaaggtccttgttttcttcgttgctacaattttggtagcatggcaatgccatgcgtacgatatgttccctctccgaatgaacactggctatggtgcccgtactccggaggtgaaatgcgcaagttggaggcttgctgtggaagcacacaacatctttggctttgagaccattcctgaagagtgcgttgaagcancaaaggaatacatccatggcgaacattatagtatagactccaaaacagttaaccaac

SEQ ID NO: 57629 - DNA, 386 bp, Glycine max
ggcacaagtgagtttgttgatcgagataactagaaacagtgtgatgaaaatgaaggtccttgttttcttcgttgctacaattttggtagcatggcaatgccatgcgtacgatatgttccctctccgaatgaacactggctatggtgcccgtactccggaggtgaaatgcgcaagttggaggcttgctgtggaagcacacaacatctttggctttgagaccattcctgaagagtgcgttgaagcaacaaaggaatacatccatggcgaacaatatagatcagactccaaaacagttaaccaacaagcttacttttatgccagagaactccaagttcaatcccaaggacacatttgtgttcagtatagatggcaccgtactctctaat

SEQ ID NO: 57630 - DNA, 355 bp, Glycine max
ggtgcacaagtgagtttgttgatcgagataactagaaacagtgtgatgaaaatgaaggtccttgttttcttcgttgctacaattttggtagcatggcaatgccatgcgtacgatatgttccctctccgaatgaacactggctaatggtgcccttatcccggaggtgaaatgcccaatttggaggcttgctgtggaaccacacaacatctttggctttgagaccattcctgaagagtgcgttgaagcaacaaaggaatacatccatggcgaacaatatagatcagactccaaaacagttaaccaacaagcttacttttatgccagagacctcgaagtccatcccaaggacacattt

SEQ ID NO: 57631 - DNA, 327 bp, Glycine max
ggcacaagtgcgtttgttgatcgagataactagaaacagtgtgatgaaaatgaaggtccttgttttcttcgttgctacaattttggtagcatggcaatgccatgcgtacgatatgttccctctccgaatgaacactggctatggtgcccgtactccggaggtgaaatgcgcaagttggaggcttgctgtggaagcacacaacatctttggctttgagaccattcctgaagagtgcgttgaagcaacaaaggaatacatccatggcgaacaatatagatcagactccaaaacagttaaccgacaagcttacttttatgccagagacct

SEQ ID NO: 57632 - DNA, 396 bp, Glycine max
  unsure (1)..(396): unsure at all n locations
gcacaagtgagtttgttgatcgagataactagaaacagtgtgatgaaaatgaaaggccttgttttcctcgttgccacaattttggtaacatggcaatgccatgcgtacgatatgttccctccccgaatgaacactggctatggtgcccgtactccggaggtgaaatgcgcaagttggaggcttgctgtggaagcacacaacatctttggctttgagaccattcctgaagagtgcgttgaagcaacaaaggaatacatccatggcgaacaatatagatcagactccaaaacagttaaccaacaagcttacttttatgccagagacctcgaagtccatcccaanggacacatttgtgttcatgtatanatggcaccgtactctctaatattccatact

SEQ ID NO: 57633 - DNA, 393 bp, Glycine max
gacaagtgagtttgttgatcgagataactagaaacagtgtgatgaaaatgaaggtccttgttttcttcgttgctacaattttggtagcatggcaatgccatgcgtacgatatgttccctctccgaatgaacactggctatggtgcccgtactccggaggtgaaatgcgcaagttggaggcttgctgtggaagcacacaacatctttggctttgagaccattcctgaagagtgcgttgaagcaacaaaggaatacatccatggcgaacaatatagatcagactccaaaacagttaaccaacaagcttacttttatgccagagacctcgaagtccatcccaaggacacatttgtgttcagtatagatggcaccgtactctctaatattccatact

SEQ ID NO: 57634 - DNA, 381 bp, Glycine max
ggcacaagtgagtttgttgatcgagataactagaaacagtgtgatgaaaatgaaggtccttgttttcttcgttgctacaattttggtagcatggcaatgccatgcgtacgatatgttccctctccgaatgaacactggctatggtgcccgtactccggaggtgaaatgcgcaagttggaggcttgctgtggaagcacacaacatctttggctttgagaccattcctgaagagtgcgttgaagcaacaaaggaatacatccatggggaacaatatagatcagactccaaaacagtttaacaacaagcttacttttatgccagagacctcgaagtccatcccaaggacacatttgtgttcagtatagatggcaccgtactctc

SEQ ID NO: 57635 - DNA, 397 bp, Glycine max
ggacaagtgagtttgttgatcgagataactagaaacagtgtgatgaaaatgaaggtccttgttttcttcgttgctacaattttggtagcatggcaatgccatgcgtacgatatgttccctctccgaatgaacactggctatggtgcccgtactccggaggtgaaatgcgcaagttggaggcttgctgtggaagcacacaacatctttggctttgagaccattcctgaagagtgcgttgaagcaacaaaggaatacatccatggcgaacaatatagatcagactccaaaacagttaaccaacaagcttacttttatgccagagacctcgaagtccatcccaaggacacatttgtgttcagtatagatggcaccgtactctctaatattccatactaca

SEQ ID NO: 57636 - DNA, 352 bp, Glycine max
ggcacaagtgagtttgctgatcgagataactagaaacagtgtgatgaaaatgaaggtccttgttttcttcgttgctacaattttggtagcatggcaatgccatgcgtacgatatgttccctctccgaatgaacactggctatggtgcccgtactccggaggtgaaatgcgcaagttggaggcttgctgtggaagcacacaacatctttggctttgagaccattcctgaagagtgcgttgaagcaacaaaggaatacatccatggcgaacaatatagattagactccaaaacagttaaccaacaagcttacttttatgccagagacctcgaagtccatcccaaggacacattt

SEQ ID NO: 57637 - DNA, 368 bp, Glycine max
gaagctcacatttcctttgtgtttgtgagtaatttgcaaacacaccaaaaccatctctctctctctctctctctccaattcagatgaaggtcacagtggtttctcggagtggaagagaagtggttaaaggtggcattgagctcagtgattctgctactatagcagatctgcaggaggcaattcataagcgaaccaagaagtacccatcaaggcagcgcttgacacttccagtccaacctggattaaaggaaaggcctgttgtccttaattacaaaaagagtctgaaagactatacaagtggaaattcagaaaccttaactgttgtattcaaggattttgggccacaagtttcttaccggacacttttc

SEQ ID NO: 57638 - DNA, 394 bp, Glycine max
gaaagtgcaagagtttgttgtgagctataagctagtttatcgtgaggagaatatgaagttgtttgttttctttgttgctgcagtagttttggtagcatggccatgccatggcgcaggctaccaaaggttccctctccgaatgaaaactggctatggtgagcgttcttcggaggtaaaatgcgcaagttttaggcttgctgtggaagcacacaacatccgagcctttaaaaccattcctgaagagtgcgttgaaccaacaaaggactacattaatggcgaacaatttagatcagactctaaaacagttaaccaacaagctttcttttatgctaatgaacgcgaaatccaatcacacgacatatttatattcggcatagataacaccgtactctct

SEQ ID NO: 57639 - DNA, 386 bp, Glycine max
ggcacaagtgagtttgttgatcgagataactagaaacagtgtgatgaaaatgaaggtccttgttttcttcgttgctacaattttggtagcatggcaatgccatgcgtacgatatgttccctctccgaatgaacactggctatggtgcccgtactccggaggtgaaatgcgcaagttggaggcttgctgtggaagcacacaacatctttggctttgagaccattcctgaagagtgcgttgaagcaacaaaggaatacatccatggcgaacaatatagatcagactccaaaacagttaaccaacaagcttacttttatgccagagacctcgaagtccatcccaaggacacatttgtgttcagtatagatggcaccgtactctctaata

SEQ ID NO: 57640 - DNA, 383 bp, Glycine max
ggcacaagtttgttgagatagctagaagcaataagatgaaaatgaaagtgcttgttttgtttgttgctgcagttttggtagcatatgaatgccatggctcagactaccagaagttccctctccaaatgaaaactgggtttggtgggcaatacagcaatgaggtggcatgtgccagttggaggcttggcgtggaagcaaacaacgtagtcaagtggcaaaccgttcctgcagcttgcggagagtacatagctgactacgttctaggagaccaatatagatcagattccaaaacagttaaccaacaagcttatttctatgctaaatccctcaaactcaccaacaaagatgtctttgtcttggacgttgacgacactactctctct

SEQ ID NO: 57641 - DNA, 401 bp, Glycine max
ggcacaagtgagtttgttgatcgagataactagaaacagtgtgatgaaaatgaaggtccttgttttcttcgttgctacaattttggtagcatggcaatgccatgcgtacgatatgttccctctccgaatgaacactggctatggtgcctgtactccggaggtgaaatgcgcaagttggaggcttgctgtggaagcacacaacatctttggctttgagaccattcctgaagagtgcgttgaagcaacaaaggaatacatccatggcgaacaatatagatcagactccaaaacagttaaccaacaagcttacttttatgccagagacctcgaaatccatcgcaaagacacatttgtgttcagtatagatggcaccgtactctctaatattccatactacaaaa

SEQ ID NO: 57642 - DNA, 359 bp, Glycine max
  unsure (1)..(359): unsure at all n locations
ggcacaagtgagtttgttgatcgagataactagaaacagtgtgatgaaaatgaaggtccttgttttcttcgttgctacaattttggtagcatggcaatgccatgcgtacgatatgttccctctccgaatgaacactggctatggtgcccgtactccggaggtgaaatgcgcaagttggaggcttgctgtggaagcacacaacatctttggctttgagaccattcctgaagagtgcgttgaagcaacaaaggaatacatccattggcgaacaatatagatcagactccaaaacagttaaccaacaagcttacttttatgccagagacctcgaagtccatcncaaggacacatttgtgttc

SEQ ID NO: 57643 - DNA, 370 bp, Glycine max
ggcacttcaattgcaatcaaattagttcattctctttgcgcagttccctacctctcctttcaagatgcagatcttcgtcaagaccctcaccggaaagaccatcacccttgaggtggaaagctctgacaccatcgacaacgtcaaggccaagatccaggacaaggaaggaattcccccggatcagcaacgtctcatcttcgccggaaagcagctcgaggacggccgtaccctcgccgactacaacatccagaaggagtcaacccttcaccttgtccttcgtctccgtggtggcatgcagatcttcgtcaagactctcactggcaaaaccataaccctagaggtcgaaagctctgacaccattgacaacgtc

SEQ ID NO: 57644 - DNA, 393 bp, Glycine max
ggcacaagtgagtttgttgatcgagataactagaaacagtgtgatgaaaatgaaggtccttgttttcttcgttgctacaattttggtagcatggcaatgccatgcgtacgatatgttccctctccgaatgaacactggctatggtgcccgtactccggaggtgaaatgcgcaagttggaggcttgctgtggaagcacacaacatctttggctttgagaccattcctgaagagtgcgttgaagcaacaaaggaatacatccatggcgaacaatatagatcagactccaaaacagttaaccaacaagcttacttttatgccagagacctcgaagttcatcccaaggacacatttgtgttcagtatagatggcaccgtactctctaatattccata

SEQ ID NO: 57645 - DNA, 399 bp, Glycine max
  unsure (1)..(399): unsure at all n locations
agggcacaagtgagtttgttgattgagataactagaaacaatgtgatgaaaatgaaggtccctggtttcctcgttgccacaattttggtagcaaggcaatgccaagggttacatatgttccctccccgaatgaacactggctatggtgcccgtactccggaagtgaaatgcgcaagttggaggcttgctgtggaagcacacaacatctttggctttgagaccattcctgaagagtgcgttgaagcaacanaggaatacatccatggcgaacaatatagatcagactccaaaacagttaaccaacaagcttacttttatgccagagacctcgaagtccatcccaaggacacnattgtgttcagtatagatggcaccgtactctctaatattccatactac

SEQ ID NO: 57646 - DNA, 358 bp, Glycine max
ggcacaagtgagtttgttgatcgagataactagaaacagtgtgatgaaaatgaaggtccttgttttcttcgttgctacaattttggtagcatggcaatgccatgcgtacgatatgttccctctccgaatgaacactggctatggtgcccgtactccggaggtgaaatgcgcaagttggaggcttgctgtggaagcacacaacatctttggctttgagaccattcctgaagagtgcgttgaagcaacaaaggaatacatccatggcgaacaatatagatcggactccaaaacagttaaccaacaagcttacttttatgccagagacctcgaagtccatcccaaggacacatttgtgttc

SEQ ID NO: 57647 - DNA, 226 bp, Glycine max
ggcacaagtttgttgagatagctagaagcaataagatgaaaatgaaagtgcttgttttgtttgttgctacagttttggtagcatatgaatgccatggctcagactaccagaagttccctctccaaatgaaaactgggtttggtggggaatacagcaatgaggtggcatgtgccaattggaagcttggcgtggaagcaaacaacgtagtcaggtggcaaactgttcc

SEQ ID NO: 57648 - DNA, 370 bp, Glycine max
ggcacaagtgagtttgttgatcgagataactagaaacagtgtgatgaaaatgaaggtccttgttttcttcgttgctacaattttggtagcatggcaatgccatgcgtacgatatgttccctctccgaatgaacactggctatggtgcccgtactccggatgtgaaatgcgcaagttggaggcttgctgtggaagcacacaacatctttggctttgagaccattcctgaagagtgcgttgaagcaacataggaatacatccatggcgaacaatatagatcagactccaaaacagttaaccaacaagcttacttttatgccagagacctcgaagtccatcccaaggacacatttgtgttcagtatagatggc

SEQ ID NO: 57649 - DNA, 370 bp, Glycine max
aacaccgaaagggggacaagtgagtttgttgatcgagatgactaaaaacagtgtgatgaaaatgaaagtccttgttttcttcgttgcaacaattttggtagcatggcaatgccatgcgtacgatatgttccctctccgaatgaacactggctatggtgcccgtacaccggaggttaaatgcgcaagttggaggcttgctgtggacgcatacaacatccttggctttgagaccattcctgaagagtgcgtttaaacacacatggaatacatccatggcgaacaatagagatcagactccacaacagtgaaccaacaagcgtacttttatgccatagacctcgaagtccatcccaaggacacatttgtgttc

SEQ ID NO: 57650 - DNA, 281 bp, Glycine max
ggggcagttgaatatgattattcagtggagaaaaaacagtgtgatgaacatgtacgactatggattcttaaaagcgatgaatttgatgacgcagcaaagaaagcgattatcacacgatttaatctcaggcaagaaaacttgttaatgcggacgtacacgagacgtgaaatttcaacattcgatacattgattagaatgcgagtacatctaaagctcagatagaaatcgtaaaaaatgttttgaagccctacacgaatgaagttatgcgtatttatgggaat

SEQ ID NO: 57651 - DNA, 442 bp, Glycine max
  unsure (1)..(442): unsure at all n locations
gggggggggggggggaggggggggggggggggggggggggggggggggggggggggggtggggggcaaggttagggacangtatggggagagggggggaagagggggggaagggggggggagggggggaggggggggggggggggggagaggggggggggggggggggggggggggggggagggggggggggggggggggggggggggggggggggggggggggggggggggggggggggggggggggggagggggagagggggggggggggggggggggggggggggggggggggggggtggggggggaggggggggggggggggggggggggggggggggggggggggggggagggggggggggggggggggggagggggggggggggggggggggggggggggggtgggggaagggggggggggggggggggggggggg

SEQ ID NO: 57652 - DNA, 72 bp, Glycine max
gatttcagttatttttttgatgaagtactgtagcagcagtcttatgaatataaaagtcataggcttcatcat

SEQ ID NO: 57653 - DNA, 355 bp, Glycine max
ggcacaagtgagtttgttgatcgagataactagaaacagtgtgatgaaaatgaaggtccttgttttcttcgttgctacaattttggtagcatggcaatgccatgcgtacgatatgttccctctccgaatgaacactggctatggtgcccgtactccggaggtgaaatgcgcaagttggaggcttgctgtggaagcacacaacatctttggctttgagaccattcctgaagagtgcgttgaagcaacaaaggaatacatccatggcgaacaatatagatcggactccaaaacagttaaccaacaagcttacttttatgccatagacctcgaagtccatcccaaggacacatttgtg

SEQ ID NO: 57654 - DNA, 325 bp, Glycine max
gagtgcacaagtgagtttgttgatcgagataactagaaacagtgtgatgaaaatgaaggtccttgttttcttcgttgctacaattttggtagcatggcaatgccgtgcgtacgatatgttccctctccgaatgaacactggctatggggcccgtactccggaagtgaaatgcccaagttggaagcttgctgtgggagcacacaacatctttgggggttggacgattcctgaagagtgcgttgaagcaacaaaggaatagatccatggcgaacaatatagatcagactccagagcagttaaccaacaagcttacttttatgccaga

SEQ ID NO: 57655 - DNA, 258 bp, Glycine max
ggcacaagtgagtttgccgatctagataactagaaacagtgtgattaaaatgaaggtccttgttttcttcgttgctacgattttggtagcatggcaatgccatgcgtacgaaatgttccctctccgaatgaacactggttatggtggccgtagtccggaggtgaaatgcccaagttggaggcttgctgtggaagcacacaacatctttggctttgagaccattcctgaaaaattcgttgaagcaacaaaggaatacat

SEQ ID NO: 57656 - DNA, 329 bp, Glycine max
ggcacaagtgagtttgttgatcgagataactagaaacagtgtgatgaaaatgaaggtccttgttttcttcgttgctacaagtttggtagcatggcaatgccatgcgtacgatatgttccctctccgaatgaacactggctatggggcccgtactccggaggtgaaatgcgcaagttggaggcttgctgtggaagcacacaacatctttggctttgagaccattcctgaagagtgcgttgaagcaacaaaggaatacatccatggcgaacaatatagattagactccaagacagttagacaacaagcttacttttatgccagagacctcg

SEQ ID NO: 57657 - DNA, 361 bp, Glycine max
ggcacaagtgagtttgttgatcgagataactagaaacagtgtgatgaaaatgaaggtccttgttttcttcgttgctacaattttggtagcatggcaatgccatgcgtacgatatgttccctctccgaatgaacactggctatggtgcccgtactccggaggtgaaatgcgcaagttggaggcttgctgtggaagcacacaacatctttggctttgagaccattcctgaagagtgcgttgaagcaacagaggaatacatccatggcgaacaatatagatcagactccaaaacagttaaccaacaagcttacttttatgccagagacctcgaagtccatcgcaaggacacatttgtgttcagt

SEQ ID NO: 57658 - DNA, 209 bp, Glycine max
ggcacaagtgagtttgttgatcgagataactagaaacaatgtgatgaaaatgaaggtccctgttttcctcggtgccacaattttggtaacatggcaatgccatgcgtacgaaatgttccctccccgaatgaacactggctaaggtgcccgttctccggaagtgaaatgcccaagttggaagcttgctgttgaagcccacaacatccttg

SEQ ID NO: 57659 - DNA, 328 bp, Glycine max
ggcacaagtgagtttgttgatcgagataactagaaacagtgtgatgaaaatgaaggtccttgttttcgtcgttgctacaattttggtagcatggcaatgccatgcgtacgataggttccctctccgaatgaacactggctatggtgcccgtactccggaggtgaaatgcgcaagttggaggcttgctgtggaagcacacaacatctttggctttgagaccattcctgaagagtgcgttgaagcaacatatgaatacatccatggcgaagaagatagatcagactcgaaaacagtcaaccaacaagcttacttttatgccagagacctc

SEQ ID NO: 57660 - DNA, 348 bp, Glycine max
ggcacaagtgagtttgttgatcgagataactagaaacagtgtgatgaaaatgaaggtccttgttttcttcgttgctacaattttggtagcatggcaatgccatgcgtacgatatgttccctctccgaatgaacactggctatggtgcccgtactccggaggcgaaatgcgcaagttggaggcttgctgtggaagcacacaacatctttggctttgagaccattcctgaagagtgcgttgaagcaacaaaggaatacatccatggcgaacaatatagatcagactccaaaacagttaaccaacaagcttacttttatgccagagacctcgaagtccatcccaaggacac

SEQ ID NO: 57661 - DNA, 368 bp, Glycine max
  unsure (1)..(368): unsure at all n locations
ccagatgacaaaagacggggacaggggagaatctgctggtatcccttantttgactatgcgctctgttacctatgtgttcgtaactgctatgttcacttgacaagatttactagcatggctcattcatcaggtttgcaatactcgtcgtagtgatcacacagatccttgtcagtctagtcgtaacgtacaatgttcaagatcgacgcatggactagacccgtgatccaccttctggagatcaagactcaggctcaaatacgtatgctcatccatcgcatggctatgtaagcatctccgtctcatcatatccacatattcgaattaatcgaccatcacatccaagttgaaacggtggattaatacctcg

SEQ ID NO: 57662 - DNA, 165 bp, Glycine max
gaaaacattcatattataattaccaaaacgagaatgcaataactcaatgtacatgcccattgtgtgggagagacaatggtaataggtgtgttttggtgttggttcttgcacaggctgtggccacaaatgccaaaaaccttcccaaccccaaagatgcaggtcata

SEQ ID NO: 57663 - DNA, 370 bp, Glycine max
  unsure (1)..(370): unsure at all n locations
acaacaaacactacacaaaccttcaaaagccacacacaacacaagacacacttccgatggaagagacaccgcgacaattaagctactgacttctgagtaatgcggggaccgcagagatacggattgttttggctgtcagattactttcgtttgacgtttatgatcgtgttgggttttcactatgagtggtgttcctaagagatctcatgaggatgctgttcatcagtcgtcaaagcatccacatcaagattcaggtgcatattccaagttgatgccttcagtttcaaatgaccaccagattccttatgatatgagtcaggattcacgggtggcanagacagtccgtactgaacctcgtgatgcagataga

SEQ ID NO: 57664 - DNA, 252 bp, Glycine max
ggcagttgtattgttgaacaagggtttcgctgtctgcttcttcactttctctcgtttcaatcgaaacgaaaacaaaaacatgggcagaaaattcttcgtcggtggcaactggaaatgcaatgggaccactgaggaggtaaagaagattgttacgactttgaatgaggcgaaagtccctggagaagatatcgtacaagttgttgtgagccctccttttgtgttccttcctgtgggtaaaagtttgctgcgccc

SEQ ID NO: 57665 - DNA, 140 bp, Glycine max
ggttgttcccctttctctcgttttttcccaaaaccttctgaggttaaagcaaaaaacaaagagagagagaaaaagaaaatgatgaagccatcgatgctcaaatttctccaatccgccgccacccgcggggcctctcatct

SEQ ID NO: 57666 - DNA, 77 bp, Glycine max
tcgtaaaaaagacaacgaaagggggtgcaaagggggtagaacttacattgccaatcgagatagctaataactctggg

SEQ ID NO: 57667 - DNA, 250 bp, Glycine max
cgggtgccaaaaaaacacaaaaagggagactcaattcattatcatcatctgcgtcaacgtcgcttctcttctctcatacggttatggttttgttcacgtcactgcgttcccagtccttctaattcaatggctcagcaatatgctgagaatggtacgtccgacattgctgctgctgagttctctctgtgtcaccttcaagctgcactacctcatcgaaactcgtaatccgaactacgccgattctgttcta

SEQ ID NO: 57668 - DNA, 335 bp, Glycine max
ggaaagcggcttctattccctcaactcaccataatataactttccattttttctctagacacttctctctctctctctctctctctccagctttagcaaatacgcaaggcaaaacattcacagcgatagctagcaaacaccctcaagataacaactttctccaatggcagcatcaaagctggttccttgattgttattactaaccataataacaagaacgaggaatgtgttgggtcaaggaggaacagcgagctggtgtgtagcgaggagtgacgcgagaagcgatgcactgcaaacagcgttggactatgcttgtggggccggtggggattgtc

SEQ ID NO: 57669 - DNA, 346 bp, Glycine max
gactcacaactccataacacaaggcagaaagcaagctcatcctagagttttaaaaatggcagcagcctcctccatggctctctcttccccatccttggctggcaaggccgtgaagctgggcccatcagcccccgaagtcgggagggtcagcatgaggaagaccgtcaccaagcaggcctcctccggaagcccatggtacggcccagaccgcgtcaagtacttgggcccattctctggcgagcccccgtcctacctcactggcgagttcccaggtgactacggctgggacactgctgggctttcggccgacccagaaaccttcgccagaaaccgtgagctcgaagtg

SEQ ID NO: 57670 - DNA, 173 bp, Glycine max
agatgggagaaaaaaacagaagggaagggggggaatgacggagaaatcatggacgaccggacgagcgtaggcgtgtggatggcgttctacgatgtcgacaaggttagagagtaggacaagcgaagcagggaattgcggaggaataggaaaacctgtaagagtggaagagaggg

SEQ ID NO: 57671 - DNA, 378 bp, Glycine max
ggcacaagtgagtttgttgatcgagataactagaaacagtgtgatgaaaatgaacgtccttgttttcttcgttgctacaattttggtagcatggcaatgccatgcgtacgatatgttccctctccgaatgaacactggctatggtgcccgtactccggaggtgaaatgcgcaagttggaggcttgctgtggaagcacacaacatctttggctttgagaccattcctgaagagtgcgttgaagcaacaaaggaatacatccatggcgaacaatatagatcagactccaaaacagttaaccaacaagcttacttttatgccagagacctcgaagtcgatcccagggacacatttgtgttcagtatagatggcaccgtact

SEQ ID NO: 57672 - DNA, 349 bp, Glycine max
ggcacaagtgagtttgttgatcgagataactagaaacagtgtgatgaaaatgaaggtccttgttttcttcggtgctacaattttggtagcatggcaatgccatgcgtacgatatgttccctctccgaatgaacactggctatggtgcccgtactccggaggtgaaatgcgcaagttggaagcttgctgtggaagcacacaacatctttggcgttgagaccattcctgaagagtgcgttgaagcaacaaaggaatacatccatgggcgaacaatatagatcagactccaaaacagttaaccaacaagcttacttttatgccagagacctcgaagtcaagcccaaggacac

SEQ ID NO: 57673 - DNA, 271 bp, Glycine max
ggcacaagtgactttgttcatcgagaaaactagaaacagtgtgatgaaaatgaaggtccctggtttcttcgttgctacaattttggtaggatggcaatgccatgcgtacgatatgttccctctccgaatgaacactgggctatggtgcccgtactcccgaggtgaaatgcgcaagttggacgcttgctgtggaagcacacaacatctttggctttgagaccattcctgaagagtgcgttgaagcaacagaggaatacatccatggcgaaca

SEQ ID NO: 57674 - DNA, 153 bp, Glycine max
accggtcgtacgacggctgcgagagggggacagattgggatggttttgcacagttgtagctgcacagccaccgttaccaccgaccttggtatcgtccaaggaacccctttggaagacacatcgaatcggatttgctcgcaagctcaactccca

SEQ ID NO: 57675 - DNA, 255 bp, Glycine max
ggagtttgttgatcgagataagtacaaacagtgtgatgaaaatgaatgtccctgttttcttcgttgctacaatgttaggagcaaggcaatgccatgcgtaccatatgttccctctccgaatgaacaatggctatggtgcccgtaagcgggaggtgaaatgcgcaaattggaggcttgctgtggaagcacagaacatcattggctttgagacgattcctgaataatgcgttgaagcaacagcagaatacatccatg

SEQ ID NO: 57676 - DNA, 98 bp, Glycine max
ggggggggggggggggggggggggggggcggggggggggggaggggggggggggaggtagcgcagttggtagaatcgggcaagcagcgtagagggggg

SEQ ID NO: 57677 - DNA, 343 bp, Glycine max
gagtgcacaagtgagtttgttgatcgagataactagaaacagtgtgatgaaaatgaatgtccttgttttcttcgttgctacaattttggtagcatggcaatgccatgcgtacgatatgttccctctccgaatgaacactggctatggtgcccgtactccggaggtgaaatgcgcaagttggaggcttgctgtggaagcacacaacatctttggctttgagaccattcctgaagagtgcgttgaagcaacaaatgaatacatccatggcgaacaatatagattagactccaaaacacttaaacaacaagcttacttttatgccaaagacctcgaagttcaatcc

SEQ ID NO: 57678 - DNA, 304 bp, Glycine max
ggcacaagtgagtttgttgatcgagataactagaaacagtgtgatgaaaatgaaggtccttgttttcttcgttgctacaattttggtagcatggcaatgccatgcgtacgatatgttccctctccgaatgaacactggctatggtgcccgtactccggaggtgaaatgcgcaagttggaggcttgctgtggaagcacacaacatctttggctttgagaccattcctgaagagtgcgttgaagcaacaaaggaatacatccatggcgaacaatatagatcagactccaaaacagttaaccaacaa

SEQ ID NO: 57679 - DNA, 352 bp, Glycine max
ggcacaagtgagtttgttgatcgagataactagaaacagtgtgatgaaaatgaaggtccttgttttcttcgttgctacaattttggtagcatggcaatgccatgcgtacgatatgttccctctccgaatgaacactggctatggtgcccgtactccggaggtgaaatgcgcaagttggaggcttgctgtggaagcacacaacatctttggctttgagaccattcctgaagagtgcgttgaagcaacaaaggaatacatccatggcgaacaatatagatcagactccaaaacagttaaccaacaagcttacttttatgccagagacctcgaagtccatcccaaggacacattt

SEQ ID NO: 57680 - DNA, 334 bp, Glycine max
ggaagagaaaattagcaaaggaaaaaaagaaaaaagagaaagaaggagagagcgagcagaataaggtgtctctcttggactgattcgcttcaatcgcatctctattctcgagtactcattcatttttatatacctctcttccttctctctcgcagcctcaacacagagaaaaaagtggacatagttatttaatttatttttgttcatggccgttcaagctcaatatccatccaatgtcctttttctaaacagcagaaacgggcaagaagggcatgagtattcttcagtgcaaccacaagcaggaggagttgtactcttgaatcagcctcacatg

SEQ ID NO: 57681 - DNA, 354 bp, Glycine max
ggccactcgcaccaatcactacgtgtttgcattcccacactctcctcatattccaacgcctccactccgcgatccgctatggattctcgtgaacagcctcagccataaccgccaaacatgatggtgggacccaccgtgtacccttcgatgttggcccccgccatcgctagattcccttacagcaacaacaacaacatcaacagcaatcctcctcctccttcttcggagcctctcaacagcgacgccaacatcaaccataataacagcacgttcgaggcgttgaagccttgtgcgctggccgcctcggaatcgtcgatgaagaatcggggccggcccagaaaatactcgcccgat

SEQ ID NO: 57682 - DNA, 353 bp, Glycine max
gctacagttttggtaacatatgaatgccatggctcaaactaccaaaagttccctccccaaatgaaaactgggtttggtgggcaatacaacaatgaagtgtgcaagtgccaatttgaggcgtttggtgtaaacacacaccgtatataaatgtcacactgtgcccgcacatttcgcagagtatatatctcactacattctctgtgaccccaatagatcatcattccacaacacattccaccaaacttattatctactactcaacccccaacctcatcaccaacaatgtcgtcgtcgtcgtcgttgtcgacaatactctccccaatcaccactattttgctaaccatccaattttt

SEQ ID NO: 57683 - DNA, 273 bp, Glycine max
agggaacatatacacaaattacatagcctcagtacacacagacatactcattcagaatgactgtttccattgccaagttcgacgcccttgctctatgtttgttccttcacttggccttcaacacaaaacccctcctaacaccagaaccaaagctagtggatgataagcatcggaatccttatcagccaagagtaagatactacgtgtagctacattgggctgatgacagaggcctcacactaggccaaacaaagaacaatacatgccctcatt

SEQ ID NO: 57684 - DNA, 306 bp, Glycine max
gaacgcaagtttacgctaagccctatgcctcacagcacacagacttacgctttcggtgagttctctccgccgtcacagtagcactcacgtctccgataagttgaatggcaatgtcagttaatgatgatacactggttgcggctgaaactgacgatcagacagaagaaatgtcatcatctgaatcagaacaggatcaagatgtgaaattaactgaaccatctatcaatgcactgtacaacacagatgctctaccagagaaacttggagacatcagttgtccacagaatgtgcaatggatacatcgac

SEQ ID NO: 57685 - DNA, 359 bp, Glycine max
ggttctagtgtgtgattgtttgttgttgtaactcgttcttcttcttttgttgttctgtgtttgtgtttgttttttctctcacctgaaaatgtcttgctgcggtggtaactgtggttgcggaagctcctgcaagtgcggcaacggctgcggaggctgcaagatgtacccagacttgagctacactgagtcaaccaccaccgagaccttggtcatgggagtggcacctgttaaggctcaatttgagggtgctgaaatgggtgtgcccgctgagaacgatggctgcaaatgtggaccaaactgctcctgcaacccctgcacttgcaagtgaagtgttgggaaagcaagcttcaagcagagat

SEQ ID NO: 57686 - DNA, 340 bp, Glycine max
ggcacaagtgagtttgttgatcgagataactagaaacagtgtgatgaaaatgaaggtccttgttttcttcgttgctacaattttggtagcatggcaatgccatgcgtacgatatgttccctctccgaatgaacactggctatggtgcccgtactccggaggtgaaatgcgcaagttggaggcttgctgtggaagcacacaacatctttggctttgagaccattcctgaagagtgcgttgaagcaacaaaggaatacatccatggcgaacaatatagatcagactccaaaacagttaaccaacaagcttacttttatgccagagacctcgaagtccatcca

SEQ ID NO: 57687 - DNA, 385 bp, Glycine max
ggtgcacaagtgagtttgttgatcgagataactagaaacagtgtgatgaaaatgaaggtccttgttttcttcgttgctacaattttggtagcatgggaatgccatgcgtacgatatgttccctctccgaatgaacactggctatggtgcccgtactccggaggtgaaatgcgcaagttggaagcttgctgtggaagcacacaacatctttggctttgagaccattcctgaagagtgcgttgaagcaacaaaggagtacatccatggcgaacaatatagatcagactccaaaacagttaaccaacaagcttacttttatgccagagacctcgaagtccatcgcaaggacacatttgtgttcagtatagatggcaccgtactctcta

SEQ ID NO: 57688 - DNA, 377 bp, Glycine max
gaaggtgcaagagtttgttgtgagctataagctagtttatcgtgaggagaatatgaagttgtttgttttctttgttgctgcagtagttttggtagcatggccatgccatggagcatgctaccaaaggttccctctccgaatgaaaactggctatggtgagcgttcttcggaggtaaaatgcgcaagttttaggcttgctgtggaagcacacaatatccgagcctttaaaaccattcctgaagagtgcgttgaaccaacagaggactacattaatggcgaacaatttagatcagactctaaaacagttaaccaacatgctttcttttatgctagtgaacgcgaagtccatcacaacgacatatttatattcggcatag

SEQ ID NO: 57689 - DNA, 395 bp, Glycine max
ggcacaagtgagtttgttgatcgagataactataaacagtgtgatgaaaatgaaggtccttgttttcttcgttgctacaattttggtagcatggcaatgccatgcgtacgatatgttccctctccgaatgaacactggctatggtgcccgtactccggaggtgaaatgcgcaagttggaggcttgctgtggaagcacacaacatctttggctttgagaccattcctgaagagtgcgttgaagcaacaaaggaatacatccatggcgaacaatatagatcagactccaaatcagttaaccaacaagcttacttttatgccagagacctcgaagtccatcccaaggacacatttgtgttcagtatagatggcaccgtactctctaatattccatact

SEQ ID NO: 57690 - DNA, 328 bp, Glycine max
  unsure (1)..(328): unsure at all n locations
agggcagttcaattccaatatattccattctctctgtgtatttccctacctctcncttcaagatgcagatcttcgtcaagaccctcaccggcaagaccatcacccttgaggtggaaagctctgacaccatcgacaacgtcaaggccaagatccaggacaaggaaggaatccccccggaccagcaacgtctcattttcgccggaaagcaacttgaggacggccgtacccttgctgactacaacattcagaaggagagtactcttcacctcgtcctccgtctccgtggtggcatgcagatcttcgttaagacactcaccgggaagaccat

SEQ ID NO: 57691 - DNA, 384 bp, Glycine max
gaaggtgcaagagtttgttgtgagctataagctagtttatcgtgaggagaatatgaagttgtttgttttctttgttgctgcagtagttttggtagcatggccatgccatggcgcaggctaccaaaggttccctctccgaatgaaaactggctatggtgagcgttcttcggaggtaaaatgcgcaagttttaggcttgctgtggaagcacacaacatccgagcctttaaaaccattcctgaagagtgcgttgaaccaacaaaggactacattaatggcgaacaatttagattagactctaaaacagttaaccaacaagctttcttttatgctagtgaacgcgaagtccatcacaacgacatatttatattcggcatagataacac

SEQ ID NO: 57692 - DNA, 74 bp, Glycine max
agggaggcaaaaagacaacaaaggggaattcaatcatacaatagaaacaactttttgcttctttgtgaaatgga

SEQ ID NO: 57693 - DNA, 296 bp, Glycine max
  unsure (1)..(296): unsure at all n locations
naggggcacaagtgagtttgttgatcgagataactagaaacagtgtgatgaaaatgaaggtccttgttttcttcgttgctacaattttggtagcatggcaatgccatgcgtacgatatgttccctctccgaatgaacactggctatggtgcccgtactccggaggtgaaatgcgcaagttggaggcttgctgtggaagcacacaacatctttggctttgagaccattcctgaagagtgcgttgaagcaacaaaggaatacatccatggcgaacaatatagatcagactccaaaaca

SEQ ID NO: 57694 - DNA, 387 bp, Glycine max
gaaggtgcaagagtttgttgtgagctataagctagtttatcgtgaggagaatatgaagttgtttgttttccttggtgctgcagtagttttggtagcatggccatgccatggcgcaagctaccaaaggttccctctccgaatgaaaactggctatggtgaacgttcttcggaggtaaaatgcgcaagttttaagcttgctgtggaagcacacaacatccgagcctttaaaaccattcctgaagagtgcgttgaaccaacaaaggactacattaatggcgaacaatttagatcagactctaaaacagttaaccaacaagctttcttttatgctagtgaacgcgaagtccatcacaacgacatatttatattcggcatagataacaccgt

SEQ ID NO: 57695 - DNA, 357 bp, Glycine max
ggcacaagtgagtttgttgatcgagataactagaaacagtgtgatgaaaatgaacgtccttgttttcttcgttgctacaattttggtagcatggcaatgccatgcgtacgatatgttccctctccgaatgaacactggctatggtgcccgtactccggaggtgaaatgtgcaagttggatgcttgctgtggaagcacacaacatctttggctttgagaccattcctgaagagtgcgttgaagcaacaaaggaatacatccatggcgaacaatatagatcagactccaaaacagttaaccaacaagcttacttttatgccagagacctcgaagtccatcccaaggacacatttgtgtt

SEQ ID NO: 57696 - DNA, 392 bp, Glycine max
ggcacaagtgagtttgttgatcgagataactagatccagtgtgatgaaaatgaatgtccttgttttcttcgttgctacaattttggtagcatggcaatgccatgcgtacgatatgttccctctcagaatgaacactggctatggtgcccgtactccggaggtgaaatgcgcaagttggacgcttgctgtggaagcacacaacatctttggcgttgagaccattcctgaacagtgcgttgaagcaacataggaatacatccatggcgaacaatatacatcagactccaaaacagttaaccaacaagcttacttttatgccagagacctcgaagtcgatcccaaggacacatttgtgttcagtatagatggcaccgtactctctaatattccat

SEQ ID NO: 57697 - DNA, 388 bp, Glycine max
ggcacaagtttgttgagatagctagaagcaataagatgaaaatgaaagtgcttgttttgtttgttgctacagttttggtagcatatgaatgccatggctcagactaccagaagttccctctccaaatgaaaactgggtttggtgggcaatacagcaatgaggtggcatgtgccagttggaggcttggcgtggaagcaaacaacgtagtcaagtggcaaactgttcctgcagcttgcggagagtacatagctgactacgttctaggagaccaatatagatcagattccaaaacagttaaccaacaagcttatttctatgctaaatccctcaaactcaccaacaaagatgtctttgtcttggacgttgacgacactactctctctaatct

SEQ ID NO: 57698 - DNA, 386 bp, Glycine max
gaaggtgcaagagtttgttgtgagctataagctagtttatcgtgaggagaatatgaagttgtttgttttctttgttgctgcagtagttttggtagcatggccatgccatggcgcaggctaccaaaggttccctctccgaatgaaaactggctatggtgagcgttcttcggaggtaaaatgcgcaagttttaggcttgctgtggaagcacacaacatccgagcctttaaaaccattcctgaagagtgcgttgaaccaacaaaggactacattaatggcgaacaatttagatcagactctaaaacagttaaccaacaagctttcttttatgctagtgaacgcgaagtccatcacaacgacatatttatattcggcatagataacaccg

SEQ ID NO: 57699 - DNA, 386 bp, Glycine max
ggcacaagtgagtttgttgatcgagataactagaaacagtgtgatgaaaatgaaggtccttgttttcttcgtcgctacaattttggtagcatggcaatgccatgcgtacgatatgttccctctccgaatgaacactggctatggtgcccgtactccggaggtgaaatgcgcaagttggaggcttgctgtggaagcacacaacatctttggctttgagaccattcctgaagagtgcgttgaagcaacaaaggaatacatccatggcgaacaatatagatcagactccaagacagttaaccaacaagcttacttttatgccagagacctcgaagtccatcccaaggacacatttgtgttcagtatagatggcaccgtactctctaata

SEQ ID NO: 57700 - DNA, 382 bp, Glycine max
ggttctagtgtgtgattgtttgttgttgtaactcgttcttcttcttttgttgttctgtgtttgtgtttgttttttctctcacctgaaaatgtcttgctgcggtggtaactgtggttgcggaagctcctgcaagtgcggcaacggctgcggaggctgcaagatgtacccagacttgagctacactgagtcaaccaccaccgagaccttggtcatgggagtggcacctgttaaggctcaatttgagggtgctgaaatgggtgtgcccgctgagaacgatggctgcaaatgtggaccaaactgctcctgcaacccctgcacttgcaagtgaggtgttgggagagcaagcttcaagcagagatagcccttaattaggaataatgat

SEQ ID NO: 57701 - DNA, 387 bp, Glycine max
ggcacaagtttgttgagatagctagaagcaataagatgacaatgaaagtgcttgttttgtttgttgctacagttttggtagcatatgaatgccatggcgcagactaccagaagttccctctccaaatgaaaactgggtttggtgggcaatacagcaatgaggtggcatgtgccagttggaggcttggcgtggaagcaaacaacgtagtcaagtggcaaactgttcctgcagcttgcggagagtacatagctgactacgttctacgagaccaatatagatcagattccaatacagttaaccaacaagcttatttctatgctagatccctcaaactcaccaacaaagatgtctttgtcttggacgttgacgacactactctctccaatc

SEQ ID NO: 57702 - DNA, 397 bp, Glycine max
ggtgcacaagtgagtttgttgatcgagataactagaaacagtgtgatgaaaatgaaggtccttgttttcttcgttgctacaattttggtagcatggcaatgccatgcgtacgatatgttccctctccgaatgagcactggctatggtgcccgtactccggaggtgaaatgcgcaagttggaggcttgctgtggaagcacacaacatctttggctttgagaccattcctgaagagtgcgttgaagcaacaaaggaatacatccatggcgaacaatatagatcagactccaaaacagttaaccaacaagcttacttttatgccatagacctcgaagtccatcccaaggacacatttgtgttcagtatagatggcaccgtactctctaaaaatccatact

SEQ ID NO: 57703 - DNA, 349 bp, Glycine max
ggcacaagtgagtttgttgatcgagataactagaaacagtgtgatgaaaatgaacgtccttgttttcatcgttgctacaattttggtaacatggcaatgccatgcgtacgaaatgttccctcgccgaatgaacactggctatggtgcccgtactccggacgtgaaatgcgcaagttggaggcttgctgtggaagcacacatcatctttggctttgagaccattcctgaagagtgcgttgaagcaacatcggagtacatccatggcgtaaaatacagatcagactccacaacagttaaccaacaagcttacttttatgacagacacctcgaagtccatcccaatgacaca

SEQ ID NO: 57704 - DNA, 382 bp, Glycine max
ggcacaagtttgttgagatagctagaagcaataagatgaaaatgaaagtgcttgttttgtttgttgctacagttttggtagcatatgaatgccatggctcagactaccagaagttccctctccaaatgaaaactgggtttggtgggcaatacagcaatgaggtggcatgtgccagttggaggcttggcgtggaagcaaacaacgtagtcaagtggcaaactgttcctgcagcttgcggagagtacatagctgactacattctaggagaccaatatagatcagattccaaaacagttaaccaacaagcttatttctatgctaaatccctcaaactcaccaacaaagatgtctttgtcttggacgttgacgacactactctctc

SEQ ID NO: 57705 - DNA, 224 bp, Glycine max
tcgtaagtgacgatgcgaaggggcaacagtttgttgcgttagcaacatcaactctaacgcgtgtataacagattcagatacatgtagccacccatgtggcagcaacctgcaacgtgtgatcagaatattaaaaatatccactccccatgtcaactgtctgccgtggtcttcataatcccgaggtgacaagtgcaaattttaggcttaacatgaaagctgtcaac

SEQ ID NO: 57706 - DNA, 361 bp, Glycine max
gaaagtgcaagagtttgttgtgagctataagctaatttatcgtgaggagaatatgaagttgtttgttttctttgttgctgcagtagttttggtagcatggccatgccatggcgcaggctaccacaggttccctctccgaattaaaactggctatggtgagctttcttcggaggtaaaatgcgcaagttttaagcttgctgtggaagcacacatcatccgagcctttaaaaccattcatgaagagtgcgttgaaccaacagaggactacattaatggctaagaatttagatcatactctaaaacagttaaccaacaagctttcttttatgctagtgaacgcgaagtccatcacaacgacata

SEQ ID NO: 57707 - DNA, 302 bp, Glycine max
aaaaaggaagctgaagtcatagaagagaacaaagaagtggaagtgacggaacagaacaatgaaattgaagtaacagaagagaagaaggaagctgaagtcatacaagagaagaaggaattggaagtgaccgaagacaagaacgaaattgaagtagcagaagagaagaaggtagcagaagtgacacaacagaagaaggaaggggaagtgacggaacagacgaaggaagttgaagtgacggaagagaagaaggaaccggaagtgatactagaatagaagaatgaagttgaactgacggaagagaa

SEQ ID NO: 57708 - DNA, 392 bp, Glycine max
gaaggtgcaagagtttgttgtgagctatatgctagtttatcgtgaggagaatatgaagttgtttgttttctttgttgctgcagtagttttggtagcatggccatgccatggcgcaggctaccaaaggttccctctccgaatgaaaactggctatggtgagcgttcttctgaggtaaaatgcgcaagttttaggcttgctgtggaagcacacaacatccgagcctttaaaaccattcctgaagagtgcgttgaaccaacacaggactacattaatggctaacaatttagatcagactctaaaacagttaaccatcaagctttcttttatgctagtgaacgcgaagtccatcacaacgacatatttatattcggcatacataacaccgtactct

SEQ ID NO: 57709 - DNA, 94 bp, Glycine max
gacagcagaaagtttgttaatcgatattaatcaatatagacagattgagaatttggtccgtgtttgcttcgtagcgataacattggaacacttg

SEQ ID NO: 57710 - DNA, 385 bp, Glycine max
ggaagttatgagtgatgacgatattgacgggaaaacatgtcctgtcttgtgtttttctctccctttgagttgagaattcccttttgatcacacactcactccgtcacacccatctcttggcttcttcccaacatcatggacttggacttcatgagggcttcatctattcattccatcagtcatcagttctcttctcacaaaccatctcgccttcactcagatgacgatgatgatgcgcaatcccttcttcgatgtccttcctgtgaatttgagattgatttatcctctctgcgtatccatttggaagagattcaatgctatgaaccacaaaatatgctatgtcatgtgtgtgatgacacattaagggacgatgtaatcacggttg

SEQ ID NO: 57711 - DNA, 381 bp, Glycine max
ggcacaagtgagtttgttgatcgagataactagaaacagtgtgatgaaaatgaatgtccttgttttcgtcgttgctacaattttggtagcatggcaatgccatgcgtacgatatgttccctctccgaatgaacactggctatggtgcccgtactccggaggtgaaatgcgcaagttggaggcttgctgtggaagcacacaacatctttggctttgagaccattcctgaagagtgcgttgaagcaacaaaggaatacatccatggcgaacaatatagatcagactccaagacagttaaccaagaggcttacttttatgccagagacctcgaagtccatcccaaggacacatttgtgttcagtagagatggcaccgtactctc

SEQ ID NO: 57712 - DNA, 180 bp, Glycine max
gaattagatactcgcttacgccatttgtactaagctacgttcgtcagatcactgtgcatggcactgcaccacctcttcgggatctatggtttctatgactcagaggtcgcacagtaacatcggtaaaggttttcttggtgtcatattgaatctgataatctagatagggattgcaaggtt

SEQ ID NO: 57713 - DNA, 388 bp, Glycine max
ggcacaagtgagtttgttgatcgagataactagaaacagtgtgatgaaaatgaaggtccttgttttcttcgttgctacaattttggtagcatggcaatgccatgcgtatgatatgttccctctccgaatgaacactggctatggtgcccgtactccggaggtgaaatgcgcacgttggaagcttgctgtggaagcacacaacatctttggctttgataccattcctgaatagtgcgttgaagcaacaaaggaatacatccatggcgaacactatagatcagactccaaatcagttaaccaacaagcttacttttatgccagagacctctaagtccatcccaaggacacatttgtgttcagtataaattgcaacgtactctctaatatt

SEQ ID NO: 57714 - DNA, 394 bp, Glycine max
ggtctatttaaagaagcaaatcctcgatgaggaaagtgcacaagtgagtttgttgatcgagataactagaaacagtgtgatgaaaatgaaggtccttgttttcttcgttgctacaattttggtagcatggcaatgccatgcgtacgatatgttccctctccgaatgaacactggctatggtgcccgtactccggaggtgaaatgcgcaagttggaggcttgctgtggaagcacacaacatctttggctttgagaccattcctgaagagtgcgttgaagcaacaaaggaatacatccatggcgaacaatatagatcagactccaaaacagttaaccaacaagcttacttttatgccagagacctcgaagtctacccaaggacacatttgtgttca

SEQ ID NO: 57715 - DNA, 392 bp, Glycine max
gcacaagtgagtttgttgatcgagataactagaaacagtgtgatgaaaatgaaggtccttgttttcttcgttgctacaattttggtagcatggcaatgccatgcgtacgatatgttccctctccgaatgaacactggctatggtgcccgtactccggaggtgaaatgcgcaagttggaggcttgctgtggaagcacacaacatctttggctttgagaccattcctgaagagtgcgttgaagcaacaaaggaatacatccatggcgaacaatatagatcagactccaaaacagttaaccaacaagcttacttttatgccagagacctcgaagtccatcccaaggacacatttgtgttcagtatagatggcaccgtactctctaatattccata

SEQ ID NO: 57716 - DNA, 385 bp, Glycine max
ggcacaagtgagtttgttgatcgagataactagaaacagtgtgatgaaaatgaaggtccttgttttcttcgttgctacaattttggtagcatggcaatgccatgcgtacgatatgttccctctccgaatgaacactggctatggtgcccgtactccggaggtgaaatgcgcaagttggaggcttgctgtggaagcacacaacatctttggctttgagaccattcctgaagagtgcgttgaagcaacaaaggaatacatccatggcgaacaatatagattagactccaaaacagttaaccaacaagcttacttttatgccagagacctcgaagtccatcccaaggacacatttgtgttcagtatagatggcaccgtactctctaat

SEQ ID NO: 57717 - DNA, 386 bp, Glycine max
ggcacaagtgagtttgttgatcgagataactagaaacagtgtgatgaaaatgaaggtccttgttttcttcgttgctacaattttggtagcatggcaatgccatgcgtacgatatgttccctctccgaatgaacactggctatggtgcccgtactccggaggtgaaatgcgcaagttggaggcttgctgtggaagcacacaacatctttggctttgagaccattcctgaagagtgcgttgaagcaacaaaggaatacatccatggcgaacaatatagattagactccaaaacagttaaccaacaagcttacttttatgccagagacctcgaagtccatcccaaggacacatttgtgttcagtatagatggcaccgtactctctaata

SEQ ID NO: 57718 - DNA, 399 bp, Glycine max
ggcacaagtgagtttgttgatcgagataactagaaacagtgtgatgaaaatgaaggtccttgttttcttcgttgctacaattttggtagcatggcaatgccatgcgtacgatatgttccctctccgaatgaacactggctatggtgcccgtactccggaggtgaaatgcgcaagttggaagcttgctgtggaagcacacaacatctttggctttgagaccattcctgaagagtgcgttgaagcaacacaggaatacatccatggcgaacaatatagatcagactccacaacagttaaccaacaaacttacttttatgccagagacctcgaagtccatcccaaggacacatttgtgttcagtatagatggcaccgtactctctaatattccatactacaa

SEQ ID NO: 57719 - DNA, 351 bp, Glycine max
ggttgtgagctataagctagtttatcgtgaggagaatatgaagttgtttgttttctttgttgctgcagtagttttggtagcatggccatgccatggcgcaggctaccaaaggttccctctccgaatgaaaactggctatggtgagcgttcttcggaggtaaaatgcgcaagttttaggcttgctgtggaagcacacaacatccgagcctttaaaaccattcctgaagagtgcgttgaaccaacaaaggactacattaatggcgaacaatttagatcagactctaaaacagttaaccaacgagctttcttttatgctagtgaacgcgaagtccatcccaacgacatatttat

SEQ ID NO: 57720 - DNA, 294 bp, Glycine max
cgggactgcaactatgctccccgtgaggcttcaattaccaattacggtttcgcttatactaaccaattaccattgcagtccatccccttgtcgattgcaaatccagcaccgaatggagctccaagcaacattccggcaacaccaacgtctacgccgactcgaactacgatctccaaaggaagctcgtgcaatccgctctcgacgttgatacctccggtcgagtccagtcctccttctctcccgtgtctcctacgtccactgtgttcaaggtgattctatgtagtactgtattca

SEQ ID NO: 57721 - DNA, 385 bp, Glycine max
  unsure (1)..(385): unsure at all n locations
gagcgaaacagagagtgatttcagtgagtgatcggtgttcacttgatctcatcataatcgtcagcgtcaattgaagaagatgccgatcagaaacatcgccgtcggaaggcctgaagaggcgactcaccccgacacgttgaaggcggctttggctgagttcatctcaaccttcatcttcgtgttcgccggctcaggctccggcatcgcctacaacaagctcaccgacaacggcgctgccacccctgccggcctcatctccgcctccatcgcccatgcattcgccctcttcgtcgccgtctccgtcggcgccaacatctccggcggccacgtcaaccccgccgtcaccttcggcgccttcgtcngcggcaacatcaccttcctccgc

SEQ ID NO: 57722 - DNA, 262 bp, Glycine max
cgggtccaaccaagccttcaaacggttgcaaaaaaacaacagaaggggaatgaacttaacttggcctttccaactttggtggttggggctattctgaatttcactctcatgtatctattggcacctaccatgacatcatcagcatcaaacctgccagccctatttgccccatgccccaagagtcacatgtttgagcctggtgcattttcccttttgggtaggttaggaaccttggtgtacaaagggaacattttttccggtg

SEQ ID NO: 57723 - DNA, 395 bp, Glycine max
ggcacaagtgagtttgttgatcgagataactagaaacagtgtgatgaaaatgaaggtccttgttttcttcgttgctacaattttggtagcatggcaatgccatgcgtacgatatgttccctctccgaatgaacactggctatggtgcccgtactccggaggtgaaatgcgcaagttggaggcttgctgtggaagcacacaacatctttggctttgagaccattcctgaagagtgcgttgaagcaacaaaggaatacatccatggcgaacaatatagatcagactccaaaacagttaaccaacaagcttacttttatgccagagacctcgaagtcgatcccaaggacacatttgtgttcagtatagatggcaccgtactctctaatattccatact

SEQ ID NO: 57724 - DNA, 388 bp, Glycine max
ggtgcacaagtgagtttgttgatcgagataactagaaacagtgtgatgaaaatgaaggtccttgttttcttcgttgctacaattttggtagcatggcaatgccatgcgtacgatatgttccctctccgaatgaacactggctatggtgcccgtactccggaggtgaaatgcgcaagttggaggcttgctgtggaagcacacaacatctttggctttgagaccattcctgaagagtgcgttgaagcaacaaaggaatacatccatggcgaacaatatagatcagactccaaaacagttaaccaacaagcttacttttatgccagagacctcgaagtccatcccaaggacacatttgtgttcagtatagatggcaccgtactctctaata

SEQ ID NO: 57725 - DNA, 387 bp, Glycine max
gaaggtgcaagagtttgttgtgagctataagctagtttatcgtgaggagaatatgaagttgtttgttttctttgttgctgcagtagttttgggagcattgccatgccatggcgcaggctaccaaaagttccctctccgaatgaaaactggctatggtgagcgttcttcggatgtaaaatgcgcaagttttatgcttgctgtggaagcacacagcatccgagcctttaaaaccattcctgaagagtgcgttgaaccaacagaggactacattaatggcgaacaatttagattagactctaaaacagttaatcaacaagctttcttttatgctagtgaacgcgaagtccatcacaacgacatatttatattcggcatagataacaccgt

SEQ ID NO: 57726 - DNA, 376 bp, Glycine max
gaaggtgcaagagtttgttgtgagctataagctagtttatcgtgaggagaatatgaagttgtttgttttctttgttgctgcagtagttttggtagcatggccatgccatggcgcaggctaccaaaggttccctctccgaatgaaaactggctatggtgagcgttcttcggaggtaaaatgcgcaagttttaggcttgctgtggaagcacacaacatccgagcctttaaaaccattcctgaagagtgcgttgaaccaacaaaggactacattaatggcgaacaatttagatcagactctaaaacagttaaccaacaagctttcttttatgctagtgaacgcgaagtccatcacagcgacatatttatattcggcata

SEQ ID NO: 57727 - DNA, 404 bp, Glycine max
agtcagaatgcgacagaaggggaaggtgcaagagtttgttgtgagttataagctagtttatcgtgaggagaatatgaagttgtttgttttctttgttgctgcagtagttttggtagcatggccatgccatggcgcaggctaccaaaggttccctctccgaatgaaaactggctatggtgagcgttcttcggaggtaaaatgcgcaagttttaggcttgctgtggaagcacacaacatccgagcctttaaaaccattcctgaagagtgcgttgaaccaacaaaggactacattaatggcgaacaatttagatcagactctaaaacagttaaccaacaagctttcttttatgctagtgaacgcgaagtccatcacaacgacatatttatattcggcatagataaca

SEQ ID NO: 57728 - DNA, 224 bp, Glycine max
ccggtcgcgaagacaacacagggggaggcatcagtcattttgttgctcgaaactgctacgaacagtatcacgactctgcaagtcattcttatcatcgctgcaacacgtttagtcccatgtccttcccatgctttgaatgtgtgcacacgccgatgtcagactcaacatggtccacgttgaccagatgcaatgtccttctcttgacagcatgtctatcatccaca

SEQ ID NO: 57729 - DNA, 397 bp, Glycine max
gagaaaattaggatggggatgcacaagtttgttgagatagctagaagcaataagatgaaaatgaaagtgcttgttttgtttgttgctacagttttggtagcatatgaatgccatggctcagactaccagaagttccctctccaaatgaaaactgggtttggtgggcaatacagcaatgaggtggcatgtgccagttggaggcttggcgtggaagcaaacaacgtagtcaagtggcaaactgttcctgcagcttgcggagagtacatagctgactacgttctaggagaccaatatagatcagattccaaaacagttaaccaacaagcttatttctatgctaaatccctcaaactcaccaacaaagatgtctttgtcttggacgttgacgacactactc

SEQ ID NO: 57730 - DNA, 384 bp, Glycine max
ggcacaagtgagtttgttgatcgagataactagaaacagtgtgatgaaaatgaaggtccttgttttcttcgttgctacaattttggtagcatggcaatgccatgcgtacgatatgttccctctccgaatgaacactggctatggtgcccgtactccggaggtgaaatgcgcaagttggaggcttgctgtggaagcacacaacatctttggctttgagaccattcctgaagagtgcgttgatgcaacacaggaatacatccatggcgaacaatatagatcagattccaaaccagttaaccaacaagcttacttttatgctagagacctcgaagtccatcccaaggacacatttgtgttcagtatagatggcaccgtactctctaa

SEQ ID NO: 57731 - DNA, 386 bp, Glycine max
gagtgcacaagtgagtttgttgatcgagataactagaaacagtgtgatgaaaatgaaggtccttgttttcttcgttgctacaattttggtagcatggcaatgccatgcgtacgatatgttccctctccgaatgaacactggctatggtgcccgtactccggaggtgaaatgcgcaagttggaggcttgctgtggaagcacacaacatctttggctttgagaccattcctgaagagtgcgttgacgcaacaaaggaatacatccatggcgaacaatatagatcagactccaaaacagttaaccaacaagcttacttttatgccagagacctcgaagtccatcccaaggacacatttgtgttcagtatagatggcaccgtactctcta

SEQ ID NO: 57732 - DNA, 237 bp, Glycine max
gagtgcacaagtgagtttgttgatcgagataactagaaacagtgtgatgaaaatgaaggtccttgttttcttcgttgctacaggtttggtagcatgggaatgccatgccgtacgatatgtgccctctccgaatgaagactggctatggtgcccgtactccggaggtgagatgcgcaagttggaggcttgctgttgaagcagacagcatctttggccttgagagcattcctgaagagt

SEQ ID NO: 57733 - DNA, 122 bp, Glycine max
cagaagaccacagatggggaccattattaccttgtgaaacatcaattcactaagcatatatatcgtgtacgacggtcataaattccgtgttgtgtcgagataaatggctaggtggtgcatct

SEQ ID NO: 57734 - DNA, 361 bp, Glycine max
ggcacaagtttgttgagatagctagaagcaataagatgaaaatgaaagtgcttgttttgtttgttgctacagttttggtagcatatgaatgccatggctcagactaccagaagttccctctccaaatgaaaactgggtttggtgggcaatacagcaatgaggtggcatgtgccacttggaggcttggcgtggaagcacacaacgtagtcaagtggcaaactgttcctgcagcttgcggagagtacatatctgactacgttctatgagaccaatatagatcagattcgaggacagttaaccaacaagcttatttctatgctaaatccctcaaactcaccaacacagatgtccttgtcctgga

SEQ ID NO: 57735 - DNA, 119 bp, Glycine max
ggcacaagtttgttgacatggctagatgcgatatgatgggcatgatggtgcttgttttgtttgttgctacagttttggtagcgtatcactgccgtcgctccacagggcaggagttccct

SEQ ID NO: 57736 - DNA, 226 bp, Glycine max
ggcacaagtgagtttgttgatcgagataactagaaacagtgtgatgaaaatgaaggtccttgttttcttcgttgctacagttttggtagcatggcaatgccatgcgtaggatatgttccctctccgaatgaacactggctatggtgcccgtactccggacgtgaaatgcgcaagttggacgcttgctgtggaagcacacaacatcgttggctttgataccattccc

SEQ ID NO: 57737 - DNA, 146 bp, Glycine max
ggcagaggtagggttgcaaatctagtgccatgacgccactacagcgtcctactatcttcgtcttctctgcttcggagcaatggacacttgcaacacgttacctggcgttcgcctcattcctccgtcagagtcgtcttcgcgtcggt

SEQ ID NO: 57738 - DNA, 287 bp, Glycine max
ggagtcctgagtctttcagtttccatagattatcgttcgtgagagagagagaatggttcgggaagtatccgtgagttgcgttgatagcttgttgacagggatggtcgcgtgctagtgctatcgattctatcctatcagacctgaactcgccgcacgcaagatcgacgccactggttatcaggtcagtcttaagctctctgatgagtatcccatcgatcggcctcgtgttcacggttcatcacgaggccatttagttaatctgcgacgatttttggtccgagctcttc

SEQ ID NO: 57739 - DNA, 355 bp, Glycine max
ggcacaagtgagtttgttgatcgagataactagaaacagtgtgatgaaaatgaaggtccttgttttcttcgttgctacaattttggtagcatggcaatgccatgcgtacgatatgttccctctccgaatgaacactggctatggtgcccgtactccggaggtgaaatgcgcaagttggaggcttgctgtggaagcacacaacatctttggctttgagaccattcctgaagagtgcgttgaagcaacaaaggaatacatccatggcgaacaatagagattagactccagaacagttaaccaacaagcttacgtttatgccagagacctcgaagtccatcccaaggacacatttgtg

SEQ ID NO: 57740 - DNA, 150 bp, Glycine max
gcactcgtttgttccgattgctcgttgtcactctgatgagcttgacagtgcttgttttgtttgttgctacagttttggtcgcatatgacttccatggctcagtctcccagtggttccctctccaactgtatcctgggtttggtgggctct

SEQ ID NO: 57741 - DNA, 379 bp, Glycine max
gaaggtgcaagagtttgttgtgagctatatgctagtttatcgtgaggagaatatgaagttgtttgttttctttgttgctgcagtagttttggtagcatggccatgccatggcgcaggctaccaaaggttccctctccgaatgaaaactggctatggtgagcgttcttcggaggtaaaatgcgcaagttttaggcttgctgtggtagcacacaacatccgagcctttaaaaccattcctgaatagtgcgttgaaccaacataggactacattaatggcgaacaatttagatcagactctaaaacagttaaccaacaagctttcttttatgctagtgaacgcgaagtccatcacaacgacatatttatattcggcatagat

SEQ ID NO: 57742 - DNA, 109 bp, Glycine max
acccacgcgtgaggccggctgcgacgagtcgacggggggggtgcgtgcaggggtttgttgtgagctatctgctgctttatcctgtggacaggctgtagttgtttgtttt

SEQ ID NO: 57743 - DNA, 114 bp, Glycine max
gaattagatactcgcttacaccagttgtactcagatacgttcgtcaatcactgtgcatggcacggcaccacctctgcgggatctatggttcctatgacacagaggtcgctcagt

SEQ ID NO: 57744 - DNA, 173 bp, Glycine max
gagatgcacatgcaacagtcgcagcagcagctgcacgccacggcgggaccattctcgacctctactcctcgtcctcggcctccttcctccggcagctccgcgtccgatgcaccgtcgaagcacgtggctcactcaatggacaatctcagtcaagccgcgcgatgtcatcggcg

SEQ ID NO: 57745 - DNA, 386 bp, Glycine max
gcacaagtgagtttgttgatcgagataactagaaacagtgtgatgaaaatgaaggtccttgttttcttcgttgctacaattttggtagcatggcaatgccatgcgtacgatatgttccctctccgaatgaacactggctatggtgcccgtactccggaggtgaaatgcgcaagttggaggcttgctgtggaagcacacaacatctttggctttgagaccattcctgaagagtgcgttgaagcaacaaaggaatacatccatggcgaacaatatagatcagactccaaaacagttaaccaacaagcttacttttatgccagagacctcgaagtccatcccaaggacacatttgtgttcagtatagatggcaccgtactctctaatat

SEQ ID NO: 57746 - DNA, 361 bp, Glycine max
gcacaagtgagtttgttgatcgagataactagaaacagtgtgatgaaaatgaaggtccttgttttcttcgttgctacaattttggtagcatggcaatgccatgcgtacgatatgttccctctccgaatgaacactggctatggtgcccgtactccggaggtgaaatgcgcaagttggaggcttgctgtggaagcacacaacatctttggctttgagaccattcctgaagagtgcgttgaagcaacaaaggaatacatccatggcgaacaatatagatcagactccaagacagttaaacaacaagcttacttttatgccagagacctcgaagtccatcccaatgacacatttgtgttcagta

SEQ ID NO: 57747 - DNA, 83 bp, Glycine max
ggctgctaagactatagagtgggaatcaatttaacagtgccgaatagctagtactaattcttgaaccttcttcgtacctgttt

SEQ ID NO: 57748 - DNA, 277 bp, Glycine max
ggttcagatctatctgttatttaatctatctagtaacaatgtgttgatagtgtacgtcgttgctgtcatccttgcgacaactttggtatcatggagttcacagttgtatgagatcttccctcacctaatgaccactgtactagtgatgcctgttctccggatgtgatctcaggtttttggctgcctgttgtggcaccacacagcatctctgggtttgagattattccagaatactatgttccagcaacagactagttcaagcacggcgaatattatt

SEQ ID NO: 57749 - DNA, 359 bp, Glycine max
ggcacaagtgagtttgttgatcgagataactagaaacagtgtgatgaaaatgaaggtccttgttttcttcgttgctacaattttggtagcatggcaatgccatgcgtacgatatgttccctctccgaatgaacactggctatggtgcccgtactccggaagtgaaatgcgcaagttggaggcttgctgtggaagcacacaacatctttggctttgagaccattcctgaagagtgccttgaagcaacaaaggaatacatccatggcgaacaatatagatcagactccaaaacagttaaccaacaagcttacttttatgccagagacctcgaagtccatcccaaggacacatttgtgttca

SEQ ID NO: 57750 - DNA, 109 bp, Glycine max
gacaccgagtcgcccacaagcagaacagcgatcatagtttcacttcggccttatccagtttcgggtttcggttctctaggggatctgtcacgtgtcgaagccttaaatt

SEQ ID NO: 57751 - DNA, 235 bp, Glycine max
cacggggttcaaatcatgccgtgtttcgctgtctctctgatcctttcgcattctcactacccttttgatttgtgtcaggaaatcatggatgattgatcaagtccaacaccctacattcatggataaggttgctggtcaactccatctcggttctggtcgttcatctcgtattacaacgttatgatggagcctagcgccacccatctatgtagcagataccctcttttgggaatta

SEQ ID NO: 57752 - DNA, 164 bp, Glycine max
cggcgcgagaaacgtcatattggggggcatgtcatgtactctgtgttgggtctcaaatttgattgtctcaaagacctttctttcaattgctgatggtagagggagtggttcactttttctgattactggtgtcatggcggtggatgcatttgcatttgtgcttg

SEQ ID NO: 57753 - DNA, 335 bp, Glycine max
ggcacaagtttgttgagatagctagaagcaataagatgaaaatgaaagtgcttgttttgtttgttgctacagttttggtagcatatgaatgccatggctcagactaccagaagttccctctccaaatgaaaactgggtttggtgggcaatacagcaatgaggtggcatgtgccagttggaggcttggcgtggaagcaaacaacgtagtcaagtggcaaactgttcctgcagcttgcggagagtacatagctgactacgttctaagagaccaatatagatcagattccaaaacagttaaccaacaagcttagttctatggcaaatccctcaaactc

SEQ ID NO: 57754 - DNA, 388 bp, Glycine max
ggcacttcaattgcactcaaattagttcattctctttgcgcagttccctacctctcctttcaagatgcagatcttcgtcaagaccctcaccggaaagaccatcacccttgaggtggaaagctctgacaccatcgacaacgtcaaggccaagatccaggacaaggaaggaattcccccggatcagcaacgtctcatcttcgccggaaagcagctcgaggacggccgtaccctcgccgactacaacatccagaaggagtcaacccttcaccttgtccttcgtctccgtggtggcatgcagatcttcgtcaagactctcactgggaaaaccattaccctagaggtcgaaagctctgacaccattgacaacgtccaggccaagatcaggaca

SEQ ID NO: 57755 - DNA, 384 bp, Glycine max
ggttctagtgtgtgattgtttgttgttgtaactcgttcttcttcttttgttgttctgtgtttgtgtttgttttttctctcacctgaaaatgtcttgctgcggtggtaactgtggttgcggaagctcctgcaagtgcggcaacggctgcggaggctgcaagatgtacccagacttgagctacactgagtcaaccaccaccgagaccttggtcatgggagtggcacctgttaaggctcaatttgagggtgctgaaatgggtgtgcccgctgagaacgatggctgcaaatgtggaccaaactgctcctgcaacccctgcacttgcaagtgaggtgttgggagagcaagcttcaagcagagatagcccttaattaggaataatgatag

SEQ ID NO: 57756 - DNA, 181 bp, Glycine max
cgtcagacggaagcgaacgacagaagggggcatcaattcaaaatatatcatcacttataagcatgggtttgtggaacacaacgaatgcagtgtcttgccgctttcacaagtttggtgatgaccaaaagaatctggtcttcaaaggtgatgcaacgtcttcttccaggggcatagaactcac

SEQ ID NO: 57757 - DNA, 315 bp, Glycine max
acccacgcgtcagaccgctcctacatgctgatgcgaggggacaacaaaagggggtgcactgctgactttgttgatcgagatatctaccgactgtgtgattaaaatgaacgtccgtaattacctcgatgctacacatttggcaacatgttgataggatccctacgagttttacctgcggcaactgatcactgcctcctgtgcccgtaccccgcaggtgtaatgcccaagttgaaagggtcctgtgcaagctcacaacatccatggcttttatagcagtcctgacgagtatcttgcagcaaccttggattacatcca

SEQ ID NO: 57758 - DNA, 265 bp, Glycine max
acccgggtctatgtgagccataaggagtggaggtcgatctgtggtcatgttgggtctctgactcgcttgataatagtgaagcctcatatagagttttcctatttttgtgatgcattatcactgatagtccatatcgccacaatgtattatctaagatgatgatatctctagaagccagtaaagttacatggaaccacccttgggagttgtcaatagaaggggacttttggatcctttccattaggggggcacataacaaactcac

SEQ ID NO: 57759 - DNA, 373 bp, Glycine max
gaaggtgcaagagtttgttgtgagctataagctagtttatcgtgaggagaatatgaagttgtttgttttctttgttgctgcagtagttttggtagcatggccatgccatggcgcaggctaccaaaggttccctctccgaatgaaaactggctatggtgagcgttcttcggaggtaaaatgcgcaagttttaggcttgctgtggaagcacacaacatccgagcctttaaaaccattcctgaagagtgcgttgaaccaacagaggactacattaatggggaacaatttagatcagactctaaaacagttaaccaacaagctttcttttatgctagtgaacccgaagtccatcacaacgacatatttatattccgg

SEQ ID NO: 57760 - DNA, 330 bp, Glycine max
ggttctagtgtatgtgattgttgtgactcgttcttcttcgtcgttatcttcttcttttgttgtttgtgtgtttgttttttctctcacctgaaaatgtcttgctgcggtggtaactgtggttgcggaagcgcctgcaagtgcggcaacggctgcggaggctgcaagatgtacccagacttgagctacaccgagtcaaccaccaccgagaccttggtcatgggagtggcaccagttaaggctcaattcgagagtgctgaaatgggtgttccccctgagaacgatggctgcaaatgtggagctaactgcacctgcaacccctggacttgcaag

SEQ ID NO: 57761 - DNA, 245 bp, Glycine max
ggctgtggggggctctcgtgggtttgttcgtcgggtggctggggcggtgtggtgggtgtgggtgtcgttgttttcttcgttgctggggttttggtggcctggcggtgcggtgcgtggggtctgttccctctccgtggtggctctggctgtggtgctcgtgctccgggcgtggggtgcgccggttggcggcttgctgtgggcgcccgcggcgtctttggctttgggtcctttcctgggggcgtgcg

SEQ ID NO: 57762 - DNA, 359 bp, Glycine max
tggtctttgtctgagtgcttggttgcttccttggtgattggtcgggtctttatgcgtcggcgtccgtctttggggtgtgtttttgcttcgtctcttgggctgcgagagacttcaggtatgccagactttttatccaactaaccaggggacgagattacgtggatacacatatgcccaatgctaatcatgtttcggatcagatcttcaattacttgctttgtgtcttcagattatggtagaagatggcctgatgttatctcttgtttcgcatcactccttacttctgccacattactatcttaagatgtgtatgaatttagtatataactttgaacttagttcctcgttattattagctc

SEQ ID NO: 57763 - DNA, 110 bp, Glycine max
ggttctagtgtgtgactgtgtgctgttgcaatccgctcctcctctttcgtcgtcctgtgttggtggttggtttgtctcgggcctggggttatcgtgtcgtggtggtgtgg

SEQ ID NO: 57764 - DNA, 84 bp, Glycine max
ggcaccagtttcttttttgttctatactccttctctctctccgtcgtcagctgtcgtctttgctttcttcggggtctcgggttt

SEQ ID NO: 57765 - DNA, 68 bp, Glycine max
ggcacaagtgtgtttgttgatccagatcgcttcaaatcgtctttgtgagagcttctcgttgttgtttt

SEQ ID NO: 57766 - DNA, 113 bp, Glycine max
cataccgtccgcaacacggttttcctttgctttgcgttctacgatgtccataagctctgggattattacatgcagaactgctatttcctggggaattcgaaaacctgtgactg

SEQ ID NO: 57767 - DNA, 64 bp, Glycine max
gcccaggctaagaacagacactccaatgggcaaggacgctggcccgtcaaatcagctaagttca

SEQ ID NO: 57768 - DNA, 234 bp, Glycine max
gacgacagaagggggtggcccggggtcttttgctggctccggttggccggggtcctcgggaagctcatctgccagcatgacggtgcgacgctcggccgcagcagattccatctccgaggctcctcctaagaataaggttgtcctgaaggatgtgttccaggtttttgctgagaaggttacatctcataacgaattggtttcatcgttggctgttcgtacacgttacgcgtgttg

SEQ ID NO: 57769 - DNA, 150 bp, Glycine max
gggggctttctggttgcgttcgggcgcttctcgtccgtggccgcctcctccttctctgttgttctctccgtctccctggtcgttctttggtggtgctcttgtcttggctctgtcgaccggttcccgtttctttctccttctgttggttct

SEQ ID NO: 57770 - DNA, 73 bp, Glycine max
  unsure (1)..(73): unsure at all n locations
ggccgggtgtggtgcccggactttcatggccantcacttctgccgccactcttgcggcgggtgtggcttgacc

SEQ ID NO: 57771 - DNA, 368 bp, Glycine max
ggcacaagtgagtttgttgatcgagataactagaaacagtgtgatgaaaatgaaggtccttgttttcttcgttgctacaattttggtagcatggcaatgccatgcgtacgatatgttccctctccgaatgaacactggctatggtgcccgtactccggaggtgaaatgcgcaagttggaggcttgctgtggaagcacacaacatctttggctttgagaccattcctgaagagtgcgttgaagcaacaaaggaatacatccatggcgaacaatatagatcagactccaaaacagttaaacaacaagcttacttttatgccagagacctcgaagtccatcccaaggacacatttgtgttcagtatagatg

SEQ ID NO: 57772 - DNA, 287 bp, Glycine max
ggcacaagtgagtttgttgatcgagataactagaaacagtgtgatgaaaatgaaggtccttgttttcttcgttgctacaattttggtaccatgggaatgccatgcgtacgatatgttccctctccgaatgaacactggctatggtgcccgtactccggaggtgaaatgcgcaagttggatgcttgctgtggaagcacacaacatctttggctttgacaccattcctgaagagtgccttgaaagaacaccggaatacatccatggggaacactatacatcagactcca

SEQ ID NO: 57773 - DNA, 133 bp, Glycine max
acgacagaaggggagaaaagagatcaacgccacgaatagtgaagagtgaagagcaccgagtgaggattatagatatgcgttagatcagtgtgaggtatcttcagggtctgagtctcagatgggctattcagac

SEQ ID NO: 57774 - DNA, 163 bp, Glycine max
gacacttcagaatcctctggtaacccttattttatctattctctctctttcttttgtgttctaagcagctagagcgaggggagatgacgtatagtgcattcctctttcatcaggtttgcaatgcttgttggagtgatcgtctcagaggcttgtcattcgtgtg

SEQ ID NO: 57775 - DNA, 77 bp, Glycine max
ctttctttcatcatacctcattctcgcaaactaatatacatatcccaaggagccattatacatggcttccaagctct

SEQ ID NO: 57776 - DNA, 363 bp, Glycine max
ggttgcctatttaaagaagctaaccctccacaaggaattaaggtgcaagagtttgttgtgagctataagctagtttatcgtgaggagaatatgaagttgtttgttttctttgttgctgcagtagttttggtagcatggccatgccatggcgcaggctaccaaaggttccctctccgaatgaaaactggctatggtgagcgttcttcggaggtaaaatgcgcaagttttaggcttgctgtggaagcacacaacatccgagcctttaaaaccattcctgaagagtgcgttgaaccaacaaaggactacattaatggcgaacaatttagattagactctaaaacagttaaccaacaagctttcttt

SEQ ID NO: 57777 - DNA, 379 bp, Glycine max
ggcacaagtgagtttgttgatcgagataactagaaacagtgtgatgaaaatgaaggtccttgttttcttcgttgctacaattttggtagcatggcaatgccatgcgtacgatatgttccctctccgaatgaacactggctatggtgcccgtactccggaggtgaaatgcgcaagttggaggcttgctgtggaagcacacaacatctttggctttgagaccattcctgaagagtgcgttgaagcaacacaggaatacatccatggcgaacaatatagatcagactccaaaacagttaaccaacaagcttacttttatgccagagacctcgaagtccatcccaaggacacatttgtgttcagtatagatggcaccgtactc

SEQ ID NO: 57778 - DNA, 378 bp, Glycine max
ggcacaagtgagtttgttgatcgagataactagaaacagtgtgatgaaaatgaaggtccttgttttcttcgttgctacaattttggtagcatggcaatgccatgcgtacgatatgttccctctccgaatgaacactggctatggtgcccgtactccggaggtgaaatgcgcaagttggaggcttgctgtggaagcacacaacatctttggctttgagaccattcctgaagagtgcgttgaagcaacaaaggaatacatccatggcgaacaatatagatcagactccaaaacagttaaccaacaagcttacttttatgccagagacctcgaagtccatcccaaggacacatttgtgttcagtataaaaggcaccgttct

SEQ ID NO: 57779 - DNA, 372 bp, Glycine max
ggcacaagtttgttgagatagctagaagcaataagatgaaaatgaaagtgcttgttttgtttgttgctacagttttggtagcatatgaatgccatggctcagactaccagaagttccctctccaaatgaaaactgggtttggtgggcaatacagcaatgaggtggcatgtgccagttggaggcttggcgtggaagcaaacaacgtagtcaagtggcaaactgttcctgcagcttgcggagagtacatagctgactacgttctaggagaccaatatagatcagattccaaaacagttaaccaacaagcttatttctatgctaaatccctcaaactcaccaacaaagatgtctttgtcttggacgttgacgaca

SEQ ID NO: 57780 - DNA, 375 bp, Glycine max
gaaggtgcaagagtttgttgtgagctataagctagtttatcgtgaggagaatatgaagttgtttgttttctttgttgctgcagtagttttggtagcatggccatgccatggcgcaggctaccaaaggttccctctccgaatgaaaactggctatggtgagcgttcttcggaggtaaaatgcgcaagttttaggcttgctgtggaagcacacaacatccgagcctttaaaaccattcctgaagagtgcgttgaaccaacaaaggactacattaatggcgatcaatttagatcagactctaaaacagttaaccaacaagctttcttttatgctagtgaacgcgaagtccatcacaacgacatatttatattcggcat

SEQ ID NO: 57781 - DNA, 107 bp, Glycine max
ggcacaactctcttcacacagcgagagtccaacctatcatcctccaaatgcatgggttgctggttgctacagttctagcaccatgagagagacatagctccaaccac

SEQ ID NO: 57782 - DNA, 330 bp, Glycine max
gggacaactgagtttgttgatcgagatgacgataaacagtgtgatgaaaatgaaggtccatgttttcgtcgttgccacaattttggtagcatggcactgccatgcggtacgatatgttccctctccgaatgaacactggctatggtgcccgtactccggatgtgaaatgcgcaagttagaggcttgctgtggaagcacacaacatctttggctttgagaccattcctgaagagttcgttgaagctacaatggaatacatccatggcgatacatatacatcagactccataacagttaaccaatcagcttacttttatgcgatagatctcg

SEQ ID NO: 57783 - DNA, 402 bp, Glycine max
gacagcgaaacagagagtgatttcagtgagtgatcggtgttcacttgatctcatcataatcgtcagcgtcaattgaagaagatgccgatcagaaacatcgccgtcggaaggcctgaagaggcgactcaccccgacacgttgaaggcggctttggctgagttcatctcaaccttcatcttcgtgttcgccggctcaggctccggcatcgcctacaacaagctcaccgacaacggcgctgccacccctgccggcctcatctccgcctccatcgcccatgcattcgccctcttcgtcgccgtctccgtcggcgccaacatctccggcggccacgtcaaccccgccgtcaccttcggcgccttcgtcggcggcaacatcaccttcctccgcggcatcgtctacgtc

SEQ ID NO: 57784 - DNA, 369 bp, Glycine max
ggcacaagtttgttgagatagctagaagcaataagatgaaaatgaaagtgcttgttttgtttgttgctacagttttggtagcatatgaatgccatggctcagactaccagaagttccctctccaaatgaaaactgggtttggtgggcaatacagcaatgaggtggcatgtgccagttggaggcttggcgtggaagcaaacaacgtagtcaagtggcaaactgttcctgcagcttgcggagagtacatagctgactacgttctaggagaccaatatagatcagattccaaaacagttaaccaacaagcttatttctatgctaaatcgctcaaactcaccaacaaagatgtctttgtcttggacgttgacg

SEQ ID NO: 57785 - DNA, 367 bp, Glycine max
gagttcaattccaatatattccattctctctgtgtatttccctacctctcccttcaagatgcagatcttcgtcaagaccctcaccggcaagaccatcacccttgaggtggaaagctctgacaccatcgacaacgtcaaggccaagatccaggacaaggaaggaatccccccggaccagcaacgtctcattttcgccggaaagcaacttgaggacggccgtacccttgctgactacaacattcagaaggagagtactcttcacctcgtcctccgtctccgtggtggcatgcagatcttcgttaagacactcaccggcaagaccataaccctagaggttgaaagctccgacaccatcgataacgtcaag

SEQ ID NO: 57786 - DNA, 420 bp, Glycine max
aaacaaaaaaagggggaaaagttaatttgtttattcaaaatactaaaaacaattttaataaaaagaagggccttgttttcctcgttgccacaattttggtagcattgcaatgccatgcgtacgatatgttccctctccgaatgaacactggctatggtgcccgtactccggaagtgaaatgcgcaagttggaggcttgctgtggaagcacacaacatctttggctttgagaccattcctgaagagtgcgttgaagcaacaaaggaatacatccatggcgaacaatatagatcagactccaaaacagttaaccaacaagcttacttttatgccagagacctcgaagttcatcccaaggacacatttgtgttcagtatagatggcaccgtactctctaatattccatactacaaaaaacatg

SEQ ID NO: 57787 - DNA, 406 bp, Glycine max
ggcacaagtgagtttgttgatcgagataactagaaacagtgtgatgaaaatgaaaggccctggtttcctccttgccacaattttgggaacaaggcaatgccaagcgtacgatatgttccctccccgaatgaacactggctatggtgcccgtactccggaggtgaaatgcgcaagttggaggcttgctgtggaagcacacaacatctttggctttgagaccattcctgaagagtgcgttgaagcaacaaaggaatacatccatggcgaacaatatagatcagactccaaaacagttaaccaacaagcttacttttatgccagagacctcgaagttcatcccaaggacacatttgtgttcagtatagatggcaccgtactctctaatattccatactacaaaaaacat

SEQ ID NO: 57788 - DNA, 306 bp, Glycine max
gatcgagttcgtttgtgcagtcagcaattacttcgttttatgagcgtcacgaccgccctagtatactccgtttctaaaaaacctgtacccgcgaaaacacgaaattcacaggccaagctcatgactgagacaacagagatgggcgtcacgaaagaagaagttgaatcatcatgaaggacacactcaatccatcccaacttcatctggatgatacatctgatacggtaagagcacgttttgtgaaggcgattataccacaacggattacaggcaagatgacacattagaatcatcgacctagtgaac

SEQ ID NO: 57789 - DNA, 370 bp, Glycine max
aggcaagagtttgttgtgagctataagctagtttatcgtgaggagaatatgaagttgtttgttttctttgttgctgcagtagttttggtagcatggccatgccatggcgcaggctaccaaaggttccctctccgaatgaaaactggctatggtgagcgttcttcggaggtaaaatgcgcaagttttaggcttgctgtggaagcacacaacatccgagcctttaaaaccattcctgaagagtgcgttgaaccaacaaaggactacattaatggcgaacaatttagatcagactctaaaacagttaaccaacaagctttcttttatgctagtgaacgcgaagtccatcacaacgacatatttatattcggca

SEQ ID NO: 57790 - DNA, 400 bp, Glycine max
ggcacaagtgagtttgttgatcgagataactagaaacagtgtgatgaaaatgaaggtccttgttttcttcgttgctacaattttggtagcatggcaatgccatgcgtacgatatgttccctctccgaatgaacactggctatggtgcccgtactccggaagtgaaatgcgcaagttggaggcttgctgtggaagcacacaacatctttggctttgagaccattcctgaagagtgcgttgaagcaacacaggaatacatccatggcgaacaatatagatcagactccaaaatagttaaccaacaagcttacttttatgccagagacctcgaactccatcccaaggacacatttgtgttcagtatagatggcaccgtactctctaatattccatactacaaa

SEQ ID NO: 57791 - DNA, 367 bp, Glycine max
ggtgcacaagtgagtttgttgatcgagataactagaaacagtgtgatgaaaatgaaggtccttgttttcttcgttgctacaattttggtagcatggcaatgccatgcgtacgatatgttccctctccgaatgaacactggctatggtgcccgtactccggaggtgaaatgcgcaagttggaggcttgctgtggaagcacacaacatctttggctttgagaccattcctgaagagtgcgttgaagcaacaaaggaatacatccatggcgaacaatatagatcagactccaaaacagttaaccaacaagcttacttttatgccagagacctcgaagtccatcccaaggacacatttgtgttcagtatag

SEQ ID NO: 57792 - DNA, 435 bp, Glycine max
agccacgcgtccgaaaggggttcaatttcaataaattccattccctctgtgtaatttccctacctctcccttcaagatgcagatcttcgtcaagaccctcaccggcaagaccatcacccttgaggtggaaagctctgacaccatcgacaacgtcaaggccaagatccaggacaaggaaggaatccccccggaccagcaacgtctcattttcgccggaaagcaacttgaggacggccgtacccttgctgactacaacattcagaaggagagtactcttcacctcgtcctccgtctccgtggtggcatgcagatcttcgttaagacactcaccggcaagaccataaccctagaggttgaaagctccgacaccatcgataacgtcaaggccaagatccaggacaaggagggtatccccccggaccagcaacgtctcat

SEQ ID NO: 57793 - DNA, 481 bp, Glycine max
  unsure (1)..(481): unsure at all n locations
acgccgccatgtaccggtcaggaattcccaggtcgaccacgcgtcaaacggtgccaaaaaaccaacaaaagggaaaaacaaccttaggtaactaaagaaacaaaggaattaaaaaatcctccggaaacccaacttacaaaaaaaaggttccaaccccaaccgcaacaaattccaacttccaagcccctcccaagaaacaagttttccagaaaaaatttttccaagttttttcctaaaaaggttaaaaattaatnaaggaattgggttcaaaggtgggcctgttctacangagacgcgtgttgagtattttagacggaacgattttgtgagcttcttgaaaaaccatccggagctcaaagacgtcctagaatcagataggaatttggaaacagaggagattgccaacattctactcgcaaaaaatcttttagtgcgctgtgatcgtgttgtgaaaactgttcgtcctgngaagaaaaagctg

SEQ ID NO: 57794 - DNA, 395 bp, Glycine max
gaaggtgcaagagtttgttgtgagctataagctagtttatcgtgaggagaatatgaagttgtttgttttctttgttgctgcagtagttttggtagcatggccatgccatggcgcaggctaccaaaggttccctctccgaatgaaaactggctatggtgagcgttcttcggaggtaaaatgcgcaagttttaggcttgctgtggaagcacacaacatccgagcctttaaaaccattcctgaagagtgcgttgaaccaacaaaggactacattaatggcgaacaatttagatcagactctaaaacagttaaccaacaagctttcttttatgctagtgaacgcgaagtcgatcacaacgacatatttatattcggcatagataacaccgtactctcta

SEQ ID NO: 57795 - DNA, 407 bp, Glycine max
ggcacaagtttgttgagatagctagaagcaataagatgaaaatgaaagtgcttgttttgtttgttgctacagttttggtagcatatgaatgccatggctcagactaccagaagttccctctccaaatgaaaactgggtttggtgggcaatacagcaatgaggtggcatgtgccagttggaggcttggcgtggaagcaaacaacgtagtcaagtggcaaactgttcctgcagcttgcggagagtacatagctgactacgttctaggagaccaatatagatcagattccaaaacagttaaccaacaagcttatttctatgctaaatccctcaaactcaccaacaaagatgtctttgtcttggacgttgacgacactactctctctaatctccagtattttgctaaccat

SEQ ID NO: 57796 - DNA, 408 bp, Glycine max
  unsure (1)..(408): unsure at all n locations
aggggtgaagcaataaaaggcaatagagaaacaactatgggaagggaaaatgggaagaagctgaaaatactgggcctccaacggttcaaaacaagtgggagttttcctaaaaagcaaatcaacaaatgggattcttctctantcattcaatttgatatgggtaatatatgccatttactttgttaatgttcaagtgtttgcatgaagcatttttaaccttaagcccttgttcttagacatttcaaattcatattttattagtgttagtgctgattagcccttgttcataataattgctgatgttgtttagcttaatatagtatagtttatactgctacgtataatgtagtcttaatttttcccgagtacaaaaatatacagatgaaagcaatagaaccaaaaaagtta

SEQ ID NO: 57797 - DNA, 405 bp, Glycine max
ggcacaagtgagtttgttgatcgagataactagaaacagtgtgatgaaaatgaacgtccttgttttcttcgttgctacaattttggtagcatggcaatgccatgcgtacgatatgttccctctccgaatgaacaccggctatggtgcccgtactccggaggtgaaatgcgcaagttggaggcttgctgtggaagcacacaacatctttggctttgagaccattcctgaagagtgcgttgaagcaacaaaggaatacatccatggcgaacaatatagatcagactccaaaacagttaaccaacaagcttacttttatgccagagacctcgaagtccatcccaaggacacatttgtgttcagtatagatggcaccgtactctctaatatttcatactacaaaaaaca

SEQ ID NO: 57798 - DNA, 406 bp, Glycine max
ggcaaaagtgaatttgttgattgagaaaactaaaaacagtgtgatgaaaatgaaggtccttgttttcttcgttgctacaattttggtagcatggcaatgccatgcgtacgatatgttccctctccgaatgaacactggctatggtgcccgtactccggaggtgaaatgcgcaagttggaggcttgctgtggaagcacacaacatctttggctttgagaccattcctgaagagtgcgttgaagcaacaaaggaatacatccatggcgaacaatatagatcagactccaaaacagttaaccaacaagcttacttttatgccagagacctcgaagtccatcccaaggacacatttgtgttcagtatagatggcaccgtactctctaatattccatactacaaaaaacat

SEQ ID NO: 57799 - DNA, 133 bp, Glycine max
ggggcacacgtgagtttgttgatcgagattgctagaagcagtgtgatgaacatgaaggtccttgttttcctcgttgctacagttttgggaccatggccatgcccttgccttcatatgcttccctctcccactc

SEQ ID NO: 57800 - DNA, 406 bp, Glycine max
ggcacaagtgagtttgttgatcgagataactagaaacagtgtgatgaaaatgaaggtccttgttttcctcgttgctacaattttgggagcatggcaatgccatgcgtacgatatgttccctctccgaatgaacactggctatggtgcccgtactccggaggtgaaatgcgcaagttggaggcttgctgtggaagcacacaacatctttggctttgagaccattcctgaagagtgcgttggagcaacaaaggaatacatccatggcgaacaatatagatcagactccaaaacagttaaccaacaagcttacttttatgccagatacctcgaagtccatcccaaggacacatttgtgttcagtatagatggcaccgtactctctaatattccatactacaaaaaacat

SEQ ID NO: 57801 - DNA, 310 bp, Glycine max
aggctggtagaaaaagaccgaagggggggaacatttgttgttggttaattcatccgcagatggcagtggaaaatatcaaggtcgacgagtattccaacgttgcccctccatcactatcatcacaatcactatgcctaccatacactttgtgttatacttggttccacacgttctcctacagtgacgggatagtcttccattcactaaaggcacagcaagtacagtcttcctgcatctagacatctgacaatcgatgatctagatggacacgcactcacagactcgaacattaacgacctctcgctggcaa

SEQ ID NO: 57802 - DNA, 97 bp, Glycine max
ggtttgtgcctgatagtgattgttactctttcgccttcttctgctgttgtctgtctgtgtttctggggactgggacccgcaactgtcattctcctgt

SEQ ID NO: 57803 - DNA, 80 bp, Glycine max
gggggcatgagcgattgcactgatctagctctcacgtttgtgcttgcacttgcacctctccagcgattgcagcgaccagc

SEQ ID NO: 57804 - DNA, 399 bp, Glycine max
gcacaagtgagtttgttgatcgagataactagaaacagtgtgatgaaaatgaaggtccttgttttcttcgttgctacaattttggtagcatggcaatgccatgcgtacgatatgttccctctccgaatgaacactggctatggtgcccgtactccggaggtgaaatgcgcaagttggaggcttgctgtggaagcacacaacatctttggctttgagaccattcctgaagagtgcgttgaagcaacaaaggaatacatccatggcgaacaatatagatcagactccaaaacagttaaccaacaagcttacttttatgccagagacctcgaagtccatcccaaggacacatttgtgttcagtatagatggcaccgtactctctaatattccatactacaaa

SEQ ID NO: 57805 - DNA, 400 bp, Glycine max
gagtgcacaagtgagtttgttgatcgagataactagaaacagtgtgatgaaaatgaaggtccttgttttcttcgttgctacaattttggtagcatggcaatgccatgcgtacgatatgttccctctccgaatgaacactggctatggtgcccgtactccggaggtgaaatgcgcaagttggacgcttgctgtggaagcacacaacatctttggctttgagaccattcctgaagagtgcgttgaagcaacaaaggaatacatccatggcgaacaatatagatcagactccaaaacagttaaccaacaagcttacttttatgccagagacctcgaagtccatcccaaggacacatttgtgttcagtatagatggcaccgtactctctaatattccatactac

SEQ ID NO: 57806 - DNA, 407 bp, Glycine max
ggcacaagtgagtttgttgatcgagataactagaaacagtgtgatgaaaatgaaggtccttgttttcttcgttgctacaattttggtagcatggcaatgccatgcgtacgatatgttccctctccgaatgaacactggctatggtgcccgtactccggaggtgaaatgcgcaagttggaggcttgctgtggaagcacacaacatctttggctttgagaccattcctgaagagtgcgttgaagcaacaaaggaatacatccatggcgaacaatatagatcagactccaaaacagttaaccaacaagcttacttttatgccagagacctcgaagtccatcccaaggacacatttgtgttcagtatagatggcaccgtactctctaatattccatactacaaaaaacatg

SEQ ID NO: 57807 - DNA, 371 bp, Glycine max
ggcacaagtgagtttgttgatcgagataactagaaacagtgtgatgaaaatgaaggtccttgttttcttcgttgctacaattttggtagcatggcaatgccatgcgtacgatatgttccctctccgaatgaacactggctatggtgcccgtactccggaggtgaaatgcgcaagttggaggcttgctgtggaagcacacaacatctttggctttgagaccattcctgaagagtgcgttgaagcaacaaaggaatacatccatggcgaacaatatagatcagactccaaaacagttaaccaacaagcttacttttatgccagagacctcgaagtccatcccaaggacacatttgtgttcagtatagatggca

SEQ ID NO: 57808 - DNA, 387 bp, Glycine max
  unsure (1)..(387): unsure at all n locations
ggcacaagtttgttgagatagctagaagcaataagatgaaaatgaaagtgcttgttttgtttgttgctacagttttggtagcatatgaatgccatggctcagactaccagaagttccctctccaaatgaaaactgggtttggtgggcaatacagcaatgaggtggcatgtgccagttggaggcttggcgtggaagcaaacaacgtagtcaagtggcaaactgttcctgcagcttgcggagagtacatagctgactacgttctangagaccaatatagatcagattccaaaacagttaaccaacaagcttatttctatgctaaatccctcaaactcaacaacanagatgtctttggcttggacgttgacgacactactctctctaatc

SEQ ID NO: 57809 - DNA, 355 bp, Glycine max
ggcacaagtgagtttgttgatcgagataactagaaacagtgtgatgaaaatgaaggtccttgttttcttcgttgctacaattttggtagcatggcaatgccatgcgtacgatatgttccctctccgaatgaacactggctatggtgcccgtactccggaggtgaaatgcgcaagttggaggcttgctgtggaagcacacaacatctttggctttgagaccattcctgaagagtgcgttgaagcaacaaaggaatacatccatggcgaacaatatagatcagactccaaaacagttaaccaacaagcttacttttatgccagagacctcgaagtccatcgcaaggacacatttgtg

SEQ ID NO: 57810 - DNA, 376 bp, Glycine max
ggcacaagtttgttgagatagctagaagcaataagatgaaaatgaaagtgcttgttttgtttgttgctacagttttggtagcatatgaatgccatggctcagactaccagaagttccctctccaaatgaaaactgggtttggtgggcaatacagcaatgaggtggcatgtgccagttggaggcttggcgtggaagcaaacaacgtagtcaagtggcaaactgttcctgcagcttgcggagagtacatagctgactacgttctaggagaccaatatagatcagattccaaaacagttaaccaacaagcttatttctatgctaaatcgctcaaactcaccaacaaagatgtctttgtcttgggcgttgacgacactac

SEQ ID NO: 57811 - DNA, 198 bp, Glycine max
ggtcacattgtgtacgtagctctgcacaactaagacaacggggtgataatatacgaggcgcttatgtcactcggaccgaatcattcagtgtcaatcggagcgactagtatgtgttatttcatgacgactggtgatatcgctcttgcacgcctcaacttggagcgcgagtcatctaagaagtaccttccacatgttttt

SEQ ID NO: 57812 - DNA, 366 bp, Glycine max
gaaggtgcaagagtttgttgtgagctataagctagtttatcgtgaggagaatatgaagttgtttgttttctttgttgctgcagtagttttggtagcatggccatgccatggcgcaggctaccaaaggttccctctccgaatgaaaactggctatggtgagcgttcttcggaggtaaaatgcgcaagttttaggcttgctgtggaagcacacaacatccgagcctttaaaaccattcctgaagagtgcgttgaaccaacaaaggactacattaatggcgaacaatttagatcagactctaaaacagttaaccaacaagctttcttttatgctagtgaacgcgaagtccatcacaacgacatatttat

SEQ ID NO: 57813 - DNA, 291 bp, Glycine max
ggcacaagtgagtttgttgatcgagataactagaaacagtgtgatgaaaatgaaggtccttgttttcttcgttgctacaattttggtagcatggcaatgccatgcgtacgatatgttccctctccgaatgaacactggctatggtgcccgtactccggaggtgaaatgcgcaagttggaggcttgctgtggaagcacacaacatctttggctttgagaccattcctgaagagtgcgtttaagcaacaaaggaatacatccatggcgaacaatatagatcagactccaaaac

SEQ ID NO: 57814 - DNA, 367 bp, Glycine max
gggcacaagtttgttgagatagctagaagcaataagatgaaaatgaaagtgcttgttttgtttgttgctacagttttggtagcatatgaatgccatggctcagactaccagaagttccctctccaaatgaaaactgggtttggtgggcaatacagcaatgaggtggcatgtgccagttggaggcttggcgtggaagcaaacaacgtagtcaagtggcaaactgttcctgcagcttgcggagagtacatagctgactacgttctaggagaccaatatagatcagattccaaaacagttaaccaacaagcttatttctatgctaaatccctcaaactcaccaacaaagatgtctttgtctttgacgttg

SEQ ID NO: 57815 - DNA, 430 bp, Glycine max
accggtccaagaattcccgggccgacccacgcgtcagagacgacataaggggagctctcacacttgcgattggaggaactcgagatcagcagaccctaacacacactctctgtcgctcttcgaatctgaattttttttccatcttctccacgatcattgcgattgagattgagagtaaccctaacacacaacgaagtacatacacacacactcactcactctgttgcgatttctactttggattcaatgggtatgaatggtgcctctcgcaatcattcacgcaagccaggcttctcttcgccatggagccaaattgtctctgcagcagcacctcactcctcctcaacgccgtctgaagactctgacaacgtgtgcgggagcaatgcagacaccggtaataaggctgcgtgtattaaaccctcgactggcg

SEQ ID NO: 57816 - DNA, 358 bp, Glycine max
ggcacaagtgagtttgttgatcgagataactagaaacagtgtgatgaaaatgaacgtccttgttttcttcgttgctacaattttggtagcatggcaatgccatgcgtacgatatgttccctctccgaatgaacactggctatggtgcccgtactccggaggtgaaatgcgcaagttggaggcttgctgtggaagcacacaacatctttggctttgagaccattcctgaagagtgcgttgaagcaacaaaggaatgcatccatggcgaacaatatagatcagactccaaaacagttaaccaacaagcttacttttatgccagagacctcgaagtccatcccaaggacacatttgtgttc

SEQ ID NO: 57817 - DNA, 397 bp, Glycine max
ggcacaagtgagtttgttgatcgagataactagaaacagtgtgatgaaaatgaaggtccttgttttcttcgttgctacaattttggtagcatggcaatgccatgcgtacgatatgttccctctccgaatgaacactggctatggtgcccgtactccggaggtgaaatgcgcaagttggaggcttgctgtggaagcacacaacatctttggctttgagaccattcctgaagagtgcgttgaagcaacaaaggaatacatccatggcgaacaatatagatcagactccaaaacagttaaccaacaagcttacttttatgccagagacctcgaagttcatcccaaggacacatttgtgttcagtatagatggcaccgtactctctaatattccatactac

SEQ ID NO: 57818 - DNA, 370 bp, Glycine max
ggcacaagtgagtttgttgatcgagataactagaaacagtgtgatgaaaatgaaggtccttgttttcttcgttgctacaattttggtagcatggcaatgccatgcgtacgatatgttccctctccgaatgaacactggctatggtgcccgtactccggaggtgaaatgcgcaagttggaggcttgctgtggaagcacacaacatctttggctttgagaccattcctgaagagtgcgttgaagcaacaaaggaatacatccatggcgaacaatatagatcagactccaaaacagttaaccaacaagcttacttttatgccagagacctcgaagtccatcccaaggacacatttgtgttcagtatagatggc

SEQ ID NO: 57819 - DNA, 354 bp, Glycine max
ggcacaagtgagtttgttgatcgagataactagaaacagtgtgatgaaaatgaaggtccttgttttcttcgttgctacaattttggtagcatggcaatgccatgcgtacgatatgttccctctccgaatgaacactggctatggtgcccgtactccggaggtgaaatgcgcaagttggaggcttgctgtggaagcacacaacatctttggctttgagaacattcctgaagagtgcctttgagcaacaaaggattaatccaatggcgaacaatataaataagactccaaaacatttaacaaacaagcttacttttatccagagacctcgaagtccatcccaaggacacatttgtg

SEQ ID NO: 57820 - DNA, 356 bp, Glycine max
  unsure (1)..(356): unsure at all n locations
ggcacaagtgagtttgttgatcgagataactagaaacagtgtgatgaaaatgaaggtccttgttttcttcgttgctacaattttggtagcatggcaatgccatgcgtacgatatgttccctctccgaatgaacactggctatggtgcccgtactccggaggtgaaatgcgcaagttggaggcttgctgtggaagcacacaacatctttggctttgagaccattcctgaagagtgcgttgaagcaacaaaggaatacatccatggcgaacaatatagatcagactccanaacagttaaccaacaagcttacttttatgccagagacctcgaagtcaatcncaaggacacatttgtgt

SEQ ID NO: 57821 - DNA, 347 bp, Glycine max
ggaacctttgcattcgattcattcaagattcagcagctgcgttttggaagcagagaccgaaatacttcgagatggcccgtacaaagcaaactgctcgtaagtcaactggaggaaaagctcccaggaagcagcttgcaaccaaggctgcacgtaagtctgcaccaacaactggtggtgtgaagaagcctcatcgttatcgccctggaactgttgctcttcgtgagattaggaaataccagaagagcactgagctcctaatcaggaagcttcctttccagatgttggctcgtgaaattgcccaggatttcaagactgatctgcgtttccagaaccatgctgtgcttgca

SEQ ID NO: 57822 - DNA, 396 bp, Glycine max
  unsure (1)..(396): unsure at all n locations
ggcacaagtgagtttgttgatcgagataactagaaacagtgtgatgaaaatgaacgtccttgttttcttcgttgctacaattttggtagcatggcaatgccatgcgtacgatatgttccctctccgaatgaacactggctatggtgcccgtactccggaagtgaaatgcgcaagttggaggcttgctgtggaagcacacaacatctttggctttgagaccattcctgaagagtgcgttgaagcaacaaatgaatacatccatggcgaacaatatagatcagactccaaaacagttaaccaacaagcttacttttatgccagagacctcgaagtccatccncaagacacatttgtgttcagtatagatggcaccgtactctctaataatccacacta

SEQ ID NO: 57823 - DNA, 364 bp, Glycine max
gactcacaactccataacacaaggcagaaagcaagctcatcctagagttttaaaaatggcagcagcctcctccatggctctctcttccccatccttggctggcaaggccgtgaagctgggcccatcagcccccgaagtcgggagggtcagcatgaggaagaccgtcaccaagcaggcctcctccggaagcccatggtacggcccagaccgcgtcaagtacttgggcccattctctggcgagcccccgtcctacctcactggcgagttcccaggtgactaccgctgggacactgctgggctttcggccgacccagaaaccttcgccagaaaccgtgagctcgaagtgatccactccaggtggggc

SEQ ID NO: 57824 - DNA, 194 bp, Glycine max
tacagatgtgagtttactactcaagggggaacttcacagtcagataaagttgtgcggtgctgcctcctccgtatgcaacaacattggtctcatgtcacagccatttgtactctgtggacgtactcatgcagaacactgtgtatgattgccggattcataacgttgtaaacgtatattatatcacatgcattttt

SEQ ID NO: 57825 - DNA, 364 bp, Glycine max
ggcacaagtgagtttgttgatcgagataactagaaacagtgtgatgaaaatgaaggtccttgttttcttcgttgctacaattttggtagcatggcaatgccatgcgtacgatatgttccctctccgaatgaacactggctatggtgcccgtactccggaggtgaaatgcgcaagttggaggcttgctgtggaagcacacaacatctttggctttgagaccattcctgaagagtgcgttgaagcaacaaaggaatacatccatggcgaacaatatagatcagactccaaaacagttaaccaacaagcttaattttatgccagagacctcgaagtccatcccaaggacacatttgtgttcagtata

SEQ ID NO: 57826 - DNA, 397 bp, Glycine max
ggcacaagtgagtttgttgatcgagataactagaaacagtgtgatgaaaatgaaggtccttgttttcttcgttgctacaagtttggtagcatggcaatgccatgcgtacgatatgttccctctccgaatgaacactggctatggtgcccgtactccggaggtgaaatgcgcaagttggaggcttgctgtggaagcacacaacatctttggctttgagaccattcctgaagagtgcgttgaagcaacaaaggaatacatccatggcgaacaatatagatcagactccaaaacagttaaccaacaagcttacttttatgccagagacctcgaagtcgatcccaacgacacatttgtgttcagtatagatggcaccgtactctctaatattccatactac

SEQ ID NO: 57827 - DNA, 429 bp, Glycine max
  unsure (1)..(429): unsure at all n locations
agagtgccaaaagaccgacagaagggaaccaaaccaaaaagtgatttcagtgattgatcggtgttcacttgatctcatcataatcgtcagcgtcaattgaagaagatgccgatcagaaacatcgccgtcggaaggcctgaagaggcgactcaccccgacacgttgaaggcggctttggctgagttcatctcaaccttcatcttcgtgttcgccggctcaagctccggcatcgcctacaacaagctcaccgacaacggcgctgccacccctgccggcctcatctccgcctccatcgcccatgcattcgccctcttcgtcgccgtctccgtcggcgccaacatctccggcggccacgtcanacccgccgtcaccttcggcgccttcgtcggcggcaacatcaccttcctccgcggcatcgtctacgtcatc

SEQ ID NO: 57828 - DNA, 305 bp, Glycine max
ggcacaagtgagtttgttgatcgagataactagaaacagtgtgatgaaaatgaaggtccttgttttcttcgttgctacaattttggtagcatggcaatgccatgcgtacgatatgttccctctccgaatgaacactggctatggtgcccgtactccggaggtgaaatgcgcaagttggaggcttgctgtggaagcacacaacatctttggctttgagaccattcctgaagagtgcgttgaagcaacaaaggaatacatccatggcgaacaatatagattagactccaaaacagttaaacaacaag

SEQ ID NO: 57829 - DNA, 256 bp, Glycine max
ggcacaagtgagtttgttgatcgagataactagaaacagtgtgatgaaaatgaaggtccttgttttcttcgttgctacaattttggtagcatggcaatgccatgcgtacgatatgttccctctccgaatgaacactggctatggtgcccgtactccggaggtgaaatgcgcaagttggaggcttgctgtggaagcacacaacatctttggctttgagaccattcctgaagagtgcgttgaagcaacaaaggaatac

SEQ ID NO: 57830 - DNA, 209 bp, Glycine max
gatacagaagtggtgttgatgatcgcgttaaatatgcaaactgtaacaaaaattacggaccttgatttcatcgatagccacaatttaggcagtcatggcaacaccactgcgtacgaggaagttcactcctccgacattgacactagaatatgatacctcttatctggatgagaatcgcttaacatgatggcttgctgtgcacacacaca

SEQ ID NO: 57831 - DNA, 367 bp, Glycine max
gactcaccacttcaaaacactcataacacaaagcacaaagcaaagctcatccttgagttaaaaaatggcagcagcttcttccatggctctctcatccccatccttggctggcaaggccgtgaagctgggcccatcagccccagaagtgggaagggtgagcatgaggaagaccgtcaccaagcaggtctcctcaggaagcccatggtacggcccataccgagtcaagtacttgggcccattctctggcgagcccccgtcctacctaaccggtgagttcccaggcgactacggctgggacactgctgggctttccgcagacccagaaaccttcgccaagaaccgtgaactcgaagtgatccactccagg

SEQ ID NO: 57832 - DNA, 400 bp, Glycine max
  unsure (1)..(400): unsure at all n locations
ggcacaagtgagtttgttgatcgagataactagaaacagtgtgatgaaaatgaaggtccttgttttcttcgttgctacaattttggtagcatggcaatgccatgcgtacgatatgttccctctccgaatgaacactggctatggtgcccgtactccggaggtgaaatgcgcaagttggaggcttgctgtggaagcacacaacatctttggctttgagaccattcctgaagagtgcgttgaagcaacaaaggaatacatccatggcgaacaatatagatcagactccaaaacagtttaacaaacaagcttacttttatgccagagacctcgaagtccatcncaaggacacatttgtgttcagtatagatggcaccgtactctctaatattccatactacaa

SEQ ID NO: 57833 - DNA, 459 bp, Glycine max
  unsure (1)..(459): unsure at all n locations
gtacggtctatnattccgggctcaccacgcgtcagagcgagaagacaacagaagggggcacaagtgagtttgttgatcgagataactagaaacagtgtgatgaaaatgaacgtccttgttttcttcgttgctacaattttggtagcatggcaatgccatgcgtacgatatgttccctctccgaatgaacactggctatggtgcccgtactccggaggtgaaatgcgcaagttggaagcttgccgtggaagcacacaacatctttggctttgagaccattcctgaagagtgcgttgaagcaacaaaggaatacatccatggcgaacaatatagatcagactccaaaacagttaaccaacaagcttacttttatgccagagacctcgaagtccatcncaaggacacatttgtgttcagtatagatggcaccgtactctctaatattccatactacanaaaa

SEQ ID NO: 57834 - DNA, 389 bp, Glycine max
ggcacaagtgagtttgttgatcgagataactagaaacagtgtgatgaaaatgaatgtccttgttttcttcgttgctacaattttggtagcatggcaatgccatgcgtacgatatgttccctctccgaatgaacactggctatggtgcccgtactccggaggtgaaatgcgcaagttggaggcttgctgtggaagcacacaacatctttggctttgagaccattcctgaagagtgcgttgaagcaacaaaggaatacatccatggcgaacaatatagatcagactccaaaacagttaaccaacaagcttacttttatgccagagaactcgaagtcaatcccaaggacacatttgtgttcagtatagatggcaccgtactctctaatattc

SEQ ID NO: 57835 - DNA, 327 bp, Glycine max
ggcacaagtgagtttgttgatcgagataactagaaacagtgtgatgaaaatgaaggtccttgttttcttcgttgctacaattttggtagcatggcaatgccatgcgtacgatatgttccctctccgaatgaacactggctatggtgcccgtactccggaggtgaaatgcgcaagttggaggcttgctgtggaagcacacaacatctttggctttgagaccattcctgaagagtgcgttgaagcaacaaaggaatacatccatggcgaacaatatagatcagactccaaaacagttaaccaacaagcttactcttatgccagagacct

SEQ ID NO: 57836 - DNA, 364 bp, Glycine max
gactcaccacttcaaaacactcataacacaaagcacaaagcaaagctcatccttgagttaaaaaatggcagcagcttcttccatggctctctcatccccatccttggctggcaaggccgtgaagctgggcccatcagccccagaagtgggaagggtgagcatgaggaagaccgtcaccaagcaggtctcctcaggaagcccatggtacggcccagaccgagtcaagtacttgggcccattctctggcgagcccccgtcctacctaaccggtgagttcccaggcgactacggctgggacactgctgggctttccgcagacccagaaaccttcgccaagaaccgtgaactcgaagtgatccactcc

SEQ ID NO: 57837 - DNA, 363 bp, Glycine max
gataacaaaaacatacattacatcacctcactgatctagaagagaaacaaatgcaaggttcgattgcaatgttacattccattcccctatgctatgtccttcccttggcctggactacaacacacctcccatcataacaacaagaccaaatggattggatgcaaagcaacggattgctttgaagacaagggtacgatatgaggtgaggttactttgagcagagaagcgacgcatcacgctaagcaaggcacagaacatgacatcctcacgttatgtgagccgtgacactcaatgcaatggcactttaattccaatcataacaccatgcccaggttatattacacaatgaactgatcaaagaat

SEQ ID NO: 57838 - DNA, 402 bp, Glycine max
gaaggtgcaagagtttgttgtgagctataagctagtttatcgtgaggagaatatgaagttgtttgttttctttgttgctgcagtagttttggtagcatggccatgccatggcgcatgctaccaaaggttccctctccgaatgaaaactggctatggtgagcgttcttcggaggtaaaatgcgcaagttttaggcttgctgtggaagcacacaacatccgagcctttaaaaccattcctgaagagtgcgttgaaccaacaaaggactacattaatagcgaacaatttagatcagactctaaaacagttaaccaacaagctttcttttatgctagtgaacgcgaagtccatcacaacgacatatttatattcggcatagataacaccgtactctctaatatcca

SEQ ID NO: 57839 - DNA, 401 bp, Glycine max
ggacaagtgagtttgttgatcgagataactagaaacagtgtgatgaaaatgaaggtccttgttttcttcgttgctacaattttggtagcatggcaatgccatgcgtacgatatgttccctctccgaatgaacactggctatggtgcccgtactccggaggtgaaatgcgcaagttggaggcttgctgtggaagcacacaacatctttggctttgagaccattcctgaagagtgcgttgaagcaacaaaggaatacatccatggcgaacaatatagatcagactccaaaacagttaaccaacaagcttacttttatgccagagacctcgaagtccatcccaaggacacatttgtgttcagtatagatggcaccgtactctccaataatccatactacaaaaa

SEQ ID NO: 57840 - DNA, 357 bp, Glycine max
tacgacagaaggggaaggtgcaagagtttgttgtgagctataagctagtttatcgtgaggagaatatgaagttgtttgttttctttgttgctgcagtaattttggtagcatggccatgccatggcgcaagctaccaaatgttccctctccgaatgaaaactggctatggtgagcgttcttcggaggtaaaatgcgcaagttttaggcttgctgtggaaacacacaacatccgagcctttaaaaccattcctgaagagtgcgttgatgcaacacaggaatacatccatggcgaacaatatagatcagactccaaaacagttaaccaacaagcgtacttttatgccacagacctcgaag

SEQ ID NO: 57841 - DNA, 347 bp, Glycine max
  unsure (1)..(347): unsure at all n locations
gcacaagtttgttgagatagctagaagcaataagatgaaaatgaaagtgcttgttttgtttgttgctacagttttggtagcatatgaatgccatggctcagactaccagaagttccctctccaaatgaaaactgggtttggtgggcaatacagcaatgaggtggcatgtgccagttggaggcttggcgtggaagcaaacaacgtagtcaagtggcaaactgttcctgcagcttgcggagagtacatagctgactacgttctangagaccaatatagatcagattccaaaacagttaaccaacaagcttatttctatgctaaatccctcaaactcaccaacaaagatg

SEQ ID NO: 57842 - DNA, 358 bp, Glycine max
ggcacaagtgagtttgttgatcgagataactagaaacagtgtgatgaaaatgaaggtccttgttttcttcgttgctacaattttggtagcatggcaatgccatgcgtacgatatgttccctctccgaatgaacactggctatggtgcccgtactccggaggtgaaatgcgcaagttggaggcttgctgtggaagcacacaacatctttggctttgagaccattcctgaagagtgcgttgaagcaacataggaatacatccatggcgaacaatatagattagactccaaaacagttaaccaacaagcttacttttatgccagagacctcgaagtccatcccaaggacacatttgtgttc

SEQ ID NO: 57843 - DNA, 312 bp, Glycine max
agttccgcagcgtaatttttcctttcagcgatatttctacattttcacctctttggacaaatcaaaagaggggaacccatgattccgcctctatcttcctttctcttccagttcctcctcctctttcctctcatactctcgcattccgattccgattccggatcaccccgtgctcccgcgcccgctgatcgtggcgtaaccggagttcgacgcggtgctgcggtgcggcgcgtggcgcgtggcaggggacgtgaacaacctatgcgcgtgggcgataagtcactatgaatgctcggagtacgtgaatgacta

SEQ ID NO: 57844 - DNA, 353 bp, Glycine max
  unsure (1)..(353): unsure at all n locations
ggcacaagtttgttgagatagctagaagcaataagatgaaaatgaaagtgcttgttttgtttgttgctacagttttggtagcatatgaatgccatggctcagactaccagaagttccctctccaaatgaaaactgggtttggtgggcaatacagcaatgaggtggcatgtgccagttggaggcttggcgtggaagcaaacaacgtagtcaagtggcaaactgttcctgcagcttgcggagagtacatagctgactacgttctangagaccaatatagatcagattccaaaacagttaaccaacaagcttatttctatgctaaatccctcaaactcaccaacaaagatgtcctt

SEQ ID NO: 57845 - DNA, 348 bp, Glycine max
ggacacactcatcttcttcctcttctttttggttctctctctcacagtgagtcagcaccagtgggctccatttctgcagtagctcaagataatcataacactacagagaaggccatcatgaccagatgcgatccagcgaacgcatgcacgacatacgttcgtccaagctgagacatcctcgttcaggcaagtagtccacatgctgtccggctcctcggacacagcgagatatgcagccgacgcgcgctcttcgagaccttcgaactcgatcccaaccatgagatccatacgcattattcagcacttttctaagctctaccagcgcatatcaaagtcactgaatctcaa

SEQ ID NO: 57846 - DNA, 356 bp, Glycine max
gacaagtgagtttgttgatcgagataactagaaacagtgtgatgaaaatgaaggtccttgttttcttcgttgctacaattttggtagcatggcaatgccatgcgtacgatatgttccctctccgaatgaacactggctatggtgcccgtactccggaggtgaaatgcgcaagttggaggcttgctgtggaagcacacaacatctttggctttgagaccattcctgaagagtgcgttgaagcaacaaaggaatacatccatggcgaacaatatagatcagactccaaaacagttaaccaacaagcttacttttatgccagagacctcgaagtccatcccaaggacacatttgtgttc

SEQ ID NO: 57847 - DNA, 358 bp, Glycine max
ggcacaagtgagtttgttgatcgagataactagaaacagtgtgatgaaaatgaagggccttggtttcctcgttgctacaattttggtagcatggcaatgccatgcgtacgatatgttccctctccgaatgaacactggctatggtgcccgtactccggaagtgaaatgcgcaagttggaagcttgctgtggaagcacacaacatctttggctttgagaacattcctgaagagtgcgttgaagcaacaaaggaatacatccatggcgaacaatatagatcagactccaaaacagttaaccaacaagcttacttttatgccagagacctcgaagtccatcccaaggacacatttgtgttc

SEQ ID NO: 57848 - DNA, 349 bp, Glycine max
ggcacaagtgagtttgttgatcgagataactagaaacagtgtgatgaaaatgaaggtccttgttttcttcgttgctacaattttggtagcgtggcaatgccatgcgtacgatatgttccctctccgaatgaacactggctatggtgcccgtactccggaggtgaaatgcgcaagttggaggcttgctgtggaagcacacaacatctttggctttgagaccattcctgaagagtgcgttgaagcaacaaaggaatacatccatggcgaacaatatagatcagactccaaaacagttaaccaacaagcttacttttatgccagagacctcgaagtccatcccaaggacaca

SEQ ID NO: 57849 - DNA, 339 bp, Glycine max
gaaggtgcaagagtttgttgtgagctataagctagtttatcgtgaggagaatatgaagttgtttgttttctttgttgctgcagtagttttggtagcatggccatgccatggcgcaggctaccaaaggttccctctccgaatgaaaactggctatggtgagcgttcttcggaggtaaaatgcgcaagttttaggcttgctgtggaagcacacaacatccgagcctttaaaaccattcctgaagagtgcgttgaaccaacaaaggactacattaatggcgaacaatttagattagactctaaaacagttaaccaacaagctttcttttatgctagtgaacg

SEQ ID NO: 57850 - DNA, 383 bp, Glycine max
gaaggtgcaagagtttgttgtgagctataagctagtttatcgtgaggagaatatgaagttgtttgttttctttgttgctgcagtaattttggtagcatggccatgccatggcgcaggctaccaaaggttccctctccgaatgaaaactggctatggtgagcgttcttcggacgtaaaatgcgcaagttttaggcttgctgtggaagcacacaacatccgagcctttaaaaccattcctgaaaagttcgttgaaccaacaaaggactacattaatggccatcaatttagatcagactctaaaacagttaaacaacaatgctttcttttatgctagtgaacgcgaagtccatcactacgacatatttatattccgcattagatac

SEQ ID NO: 57851 - DNA, 341 bp, Glycine max
gagcgaaacagagagtgatttcagtgagtgatcggtgttcacttgatctcatcataatcgtcagcgtcaattgaagaagatgccgatcagaaacatcgccgtcggaaggcctgaagaggcgactcaccccgacacgttgaaggcggctttggctgagttcatctcaaccttcatcttcgtgttcgccggctcaggctccggcatcgcctacaacaagctcaccgacaacggcgctgccacccctgccggcctcatctccgcctccatcgcccatgcattcgccctcttcgtcgccgtctccgtcggcgccaacatctccggcggccacgtcaaccccgccg

SEQ ID NO: 57852 - DNA, 403 bp, Glycine max
ggcacaagtgagtttgttgatcgagataactagaaacagtgtgatgaaaatgaaggtccttgttttcttcgttgctacaattttggtagcatggcaatgccatgcgtacgatatgttccctctccgaatgaacactggctatggtgcccgtactccggaggtgaaatgcgcaagttggaggcttgctgtggaagcacacaacatctttggctttgagaccattcctgaagagtgcgttgaagcaacaaaggaatacatccatggcgaacaatatagatcagactccaaaacagttaaccaacaagcttacttttatgccagagacctcgaagtcccatccaaggacacatttggtgtcaattaaaaatggaacggtactctctaatattccatactacaaaaa

SEQ ID NO: 57853 - DNA, 165 bp, Glycine max
gtcggatccaatgctttctagtcacggccacgcccctgtcgcactccattatgaagctctggcattctctaaacccatgcaatcaattcacaattttggtaacctctttcgtcatacgcactatagaataccgatgcacaattcatgactgaaattcgaagaatg

SEQ ID NO: 57854 - DNA, 397 bp, Glycine max
gaaggtgcaagagtttgttgtgagctataagctagtttatcgtgaggagaatatgaagttgtttgttttctttgttgctgcagtagttttggtagcatggccatgccatggcgcaggctaccaaaggttccctctccgaatgaaaactggctatggtgagcgttcttcggaggtaaaatgcgcaagttttaggcttgctgtggaagcacacaacatccgagcctttaaaaccattcctgaagagtgcgttgaaccaacaaaggactacattaatggcgaacaatttagatcagactctaaaacagttaaccaacaagctttcttttatgccagttgacgcgaagtccaacacagcgacatatttaaattcggcatagataacaccgtactctctaat

SEQ ID NO: 57855 - DNA, 358 bp, Glycine max
ggcacaagtgagtttgttgatcgagataactacaaacagtgtgatgaaaatgaatgtccttgttttcttcgttgctacaattttggtagcatggcaatgccatgcgtacgatatgttccctctccgaatgaacactggctatggtgcccgtactccggacgtgaaatgcgcaagttggaagcttgctgtggaagcacacaacatctttggctttgagaccattcctgaatagtgcgttgaagcaacaaaggaatacatccatggcgaacaatatatatcagactccaaaacagttaaccaacaagcttacctttatgccagagacctcgaagtccatcccaaagacacatttgtgttc

SEQ ID NO: 57856 - DNA, 358 bp, Glycine max
ggcacaagtgagtttgttgatcgagataactagaaacagtgtgatgaaaatgaaggtccttgttttcttcgttgctacaattttggtagcatggcaatgccatgcgtacgatatgttccctctccgaatgaacactggctatggtgcccgtactccggaggtgaaatgcgcaagttggaggcttgctgtggaagcacacaacatctttggctttgagaccattcctgaagagtgcgttgaagcaacaaaggaatacatccacggcgaacaatatagattagactccaaaacagttaaccaacaagcttacttttatgccagagacctcgaagtccatcccaaggacacatttgtgttc

SEQ ID NO: 57857 - DNA, 357 bp, Glycine max
ggtgcacaagtgagtttgttgatcgagataactagaaacagtgtgatgaaaatgaaggtccgtgttttcttcgttgctacaattttggtagcatggcaatgccatgcgtacgatatgttccctctccgaatgaacactggctatggtgcccgtactccggaggtgaaatgcgcaagttggaggcttgctgtggaagcacacaacatctttggctttgagaccattcctgaagagtgcgttgaagcaacaaaggagtacatccatggcgaacaatatagatcagactccaaaacagttaaccaacaagcttacttttatgccagagacctcgaagtccatcccaaggacacatttgtg

SEQ ID NO: 57858 - DNA, 230 bp, Glycine max
ggcacaagtgagtttgttgatcgagataactataaacagtgtgatgaaaatgaaggtccttgttttcgtcgttgctacaattttggtagcatggcaatgccatacgtacgatatgttccctctccgaatgaacactggctatggtgcccgtactccggaggtgaaatgcgcaagttggaggcttgctgtggaagcacacaacatctttggctttgagaccattcctgaaa

SEQ ID NO: 57859 - DNA, 403 bp, Glycine max
gggtgcaagagtttgttgtgagctataagctagtttatcgtgaggagaatatgaagttgtttgttttctttgttgctgcagtagttttggtagcatggccatgccatggcgcaggctaccaaaggttccctctccgaatgaaaactggctatggtgagcgttcttcggaggtaaaatgcgcaagttttaggcttgctgtggaagcacacaacatccgagcctttaaaaccattcctgaagagtgcgttgaaccaacaaaggactacattaatggcgaacaatttagatcagactctaaaacagttaaccaacaagctttcttttatgctagtgaacgcgaagtccatcacaaccacattattaaaatccggactagataacacggtactctctaataccccat

SEQ ID NO: 57860 - DNA, 355 bp, Glycine max
ggcacaagtttgttgagatagctagaagcaataagatgaaaatgaaagtgcttgttttgtttgttgctacagttttggtagcatatgaatgccatggctcagactaccagaagttccctctccaaatgaaaactgggtttggtgggcaatacagcaatgaggtggcatgtgccagttggaggcttggcgtggaagcaaacaacgtagtcaagtggcaaactgttcctgcagcttgcggagagtacatagctgactacgttctaggagaccaatatagatcagattccaaaacagttaaccaacaagcttatttctatgctaaatccctcaaactcaccaacaaagatgtccttgg

SEQ ID NO: 57861 - DNA, 352 bp, Glycine max
ggcacaagtttgttgagatagctagaagcaataagatgaaaatgaaagtgcttgttttgtttgttgctacagttttggtagcatatgaatgccatggctcagactaccagaagttccctctccaaatgaaaactgggtttggtgggcaatacagcaatgaggtggcatgtgccagttggaggcttggcgtggaagcaaacaacgtagtcaagtggcaaactgttcctgcagcttgcggagagtacatagctgactacgttctaggagaccaatatagatcagattccaaaacagttaaccaacaagcttatttctatgctaaatccctcaaactcaccaacaaagatgtcct

SEQ ID NO: 57862 - DNA, 366 bp, Glycine max
tggggcacaagtgagtttgttgatcgagataactagaaacagtgtgatgaaaatgaaggtccttgttttcttcgttgctacaattttggtagcatggcaatgccatgcgtacgatatgttccctctccgaatgaacactggctatggtgcccgtactccggaggtgaaatgcgcaagttggaggcttgctgtggaagcacacaacatctttggctttgagaccattcctgaagagtgcgttgaagcaacaaaggaatacatccatggcgaacaatatagatcagactccaaaacagttaaccaacaagcttacttttatgccagagacctcgaagtccatcccaaggacacatttgtgttcagtat

SEQ ID NO: 57863 - DNA, 397 bp, Glycine max
gcacaagtgagtttgttgatcgaaataactagaaacagtgtgatgaaaatgaaggtccttgttttcttcgttgctacaattttggtagcatggcaatgccatgcgtacgatatgttccctctccgaatgaacactggctatggtgcccgtactccggaggtgaaatgcgcaagttggaggcttgctgtggaagcacacaacatctttggctttgagaccattcctgaagagtgcgttgaagcaacaaaggaatacatccatggcgaacaatatagatcagactccaaaacagttaaccaataagcttacttttatgccagagacctcgaagtccatcccaaggacacatttgtgttcagtataaatggcaccgtactctctaatattccatactaca

SEQ ID NO: 57864 - DNA, 367 bp, Glycine max
ggttctagtgtgtgattgtttgttgttgtaactcgttcttcttcttttgttgttctgtgtttgtgtttgttttttctctcacctgaaaatgtcttgctgcggtggtaactgtggttgcggaagctcctggaagtgcggcaacggctgcggaggctgcaagatgtacccagacttgagctacactgagtcaatcaccaccgagaccttggacatgggagtggcacctgttaaggttcaatttgagggtgctgaaatgggtgtgcccgctgagaacgatggctgcaaatgtggaccaaactgctcctgcaacccctgcacttgcaagtgatgtgttgggagagcaatcttctaacagagatagccctta

SEQ ID NO: 57865 - DNA, 317 bp, Glycine max
ggcacaagtgagtttgttgatcgagataactagaaacagtgtgatgaaaatgaaggtccttgttttcttcgttgctacaattttggtagcatggcaatgccatgcgtacgatatgttccctctccgaatgaacactggctatggtgcccgtactccggaggtgaaatgcacaagttggaggcttgctgtggaagcacacaacatctttggctttgagaccattcctgaagagtgcgttgaagcaacaaaggaatacatccatggcgaacaatatagatcagactccaaaacagttaaccaacaagcttacttttatg

SEQ ID NO: 57866 - DNA, 375 bp, Glycine max
gaaggtgcaagagtttgttgtgagctataagctagtttatcgtgaggagaatatgaagttgtttgttttctttgttgctgcagtagttttggtagcatggccatgccatggcgcaggctaccaaaggttccctctccgaatgaaaactggctatggtgagcgttcttcggaggtaaaatgcgcaagttttaggcttgctgtggaagcacacaacatccgagcctttaaaaccattcctgaagagtgcgttgaaccaacaaaggactacattaatggcgaacaatttagatcagactctaaaacagttaaccaacaagctttcttttatgctagtgaacgcgaagtccatcacaacgacatatttatattcggcat

SEQ ID NO: 57867 - DNA, 354 bp, Glycine max
aagaaggaagctgaagtcatagaagagaagaaggaagtggaagtgacggaagagaagaaggaaattgaagtaacagaagagaagaaggaagctgaagtcatagaagagaagaaggaagtggaagtgacggaagagaagaaggaaattgaagtaacagaagagaagaaggaagcagaagtgaaagaagagaagaaggaaggggaagtgacggaagagaagaaggaagttgaagtgacggaagagaagaaggaagcggaagtgatagtagaagagaagaaggaagttgaagtgacggaagagaagaaggaagtggaagtgaccgaaggaaagaaagaagtggaagtgatcgaagag

SEQ ID NO: 57868 - DNA, 341 bp, Glycine max
ggaattctccaaaatagaacaacttacactgaagtaacacatttgactcggaaattgatccatgtagtaatggcaagcttaggtgtagcatgtgtggtcatcgaagtgcatcggctgtgatcaggtgcatcattgatgatgcaagtcgtgtcatgcaatcatgtttctgtgaccctatcaccgtgcctatcctacctgacgcagggtgcagatgttccagaatcatgatgtaccagagtgatgaccattcagggttctgtcaccatcagctttgacaatcacagcgtgtgcaaatgtcttcagcaagctgtgaataactatggcatcacagacgattacac

SEQ ID NO: 57869 - DNA, 379 bp, Glycine max
gacaagtgagtttgttgatcgagataactagaaacagtgtgttgaaaatgaaggtccttgttttcttcgttgccacaattttggtagcatggcaatgccatgcgtacgatatgttccctctccgaatgaacactggctatggtgcccgtactccggaggtgaaatgcgcaagttggaggcttgctgtggaagcacacagcatctttggctttgagaccattcctgaagagtgcgttgaagcaacaaaggaatacatccatggcgaacaatatagatcagactccaaaacagttaaccaacaagcttacttttatgccagagacctcgaagtccatcccaaggacacatttgtgttcagtatagatggcaccgtactctc

SEQ ID NO: 57870 - DNA, 361 bp, Glycine max
gaaggtgcaagagtttgttgtgagctagaagctagtttatcgtgaggagaatatgaagttgtttgttttctttgttgctgcaatagttttggtagcatggccatgccatggcgcatgctaccaaaggttccctctccgaatgaaaactggctatggtgaacgttcttcggaggtaaaatgcgcaagttttacgcttgctgtggaagcacacaacatccgagcctttaaaaccattcctgaagagtgcgttgaaccaacaaaggactacattaatggcgaacaatttagatcagactctaatacagttaaccaacaagctttcatttatgcgagttaacgcgaattccatcacaacgacata

SEQ ID NO: 57871 - DNA, 369 bp, Glycine max
ggcacatgtgagtttgttgatcgagataactagaaacagtgtgatgaaaatgagtgtccgtgttttcctcggtgctacaattttggtaacatggcaatgccatgcgtacgatatgttccctctccgaatgaacactggctatggtgcccgtactccggatgtgaaatgcgcatgttggacgcttgctgtggaagcacacaacatctttggctttgagaccattcctgaagagtgcgttgacgcaacaagggaatacatccatggcgaacaatatatatcagactccaaaacagttaaccaacaagcttacttttatgccagagacctcgatgtccatcccaaggacacatttgtgtacagtatagatgg

SEQ ID NO: 57872 - DNA, 360 bp, Glycine max
gaaggtgcaagagtttgttgtgagctataagctagtttatcgtgaggagaatatgaagttgtttgttttctttgttgctgcagtagttttggtagcatggccatgccatggcgcaggctaccaaaggttccctctccgaatgaaaactggctatggtgagcgttcttcggaggtaaaatgcgcaggttttaggcttgctgtggaagcacacaacatccgagcctttaaaaccattcctgaagagtgcgttgaaccaacaaaggactacattaatggcgaacaatttagatcagactctaaaacagttaaccaacaagctttcttttatgctagtgaacgcgaagtccatcacaacgacat

SEQ ID NO: 57873 - DNA, 367 bp, Glycine max
gaaggtgcaagagtttgttgtgagctacaagctactttatcgtgaggagaatatgaagttgtttgttgtctttgttgctgcagtagttttggtagcatggccatgccatggcgcaggctaccaaaggttccctctccgaatgaaaactggctatggtgagcgttcttcggaggtagaatgcgcaagttttaggctcgctgtggaagcacacaacatccgagcctttaaaaccattcctgaagagtgcgttgaaccaacaaaggactacattaatggcgaacaatttagatcatactctacaacagttaaccaacaagctttcttctatgctactgaacgcgaagtccatcacaacgacatatttata

SEQ ID NO: 57874 - DNA, 366 bp, Glycine max
ggcacaagtgagtttgttgatcgagataactagaaacagtgtgatgaaaatgaaggtccttgttttcttcgttgctacaattttggtagcatggcaatgccatgcgtacgatatgttccctctccgaatgaacactggctatggtgcccgtactccggaggtgaaatgcgcaagttggaggcttgctgtggaagcacacaacatctttggctttgagaccattcctgaagagtgcgttgaagcaacaaaggaatacatccatggcgaacaatatagatcagactccaaaacagttaaccaacaagcttacttttatgccagagacctctaagtccatcccaaggacacatttgtgttcagtataga

SEQ ID NO: 57875 - DNA, 338 bp, Glycine max
ggtatcttcaagtccgtctatagaggtaatcaaaaacattgtgatgaagaaggcgagacccatagaacttcatggtactgatctaagcaatattgtgtcaagttcacttagaaaatcaacatctactaatacatctcgacctccagtgccagtacgttccaatgttaaaacactcacattggagcttaacgtagtagacataacgatcaatataatgataaacaagacgatgataatgattaggaacatgatagcagtgaccacgatgcaagtcagagtgatgagtttaacgatgatttagacgacagcgattgatctctgccagatttcacaatatc

SEQ ID NO: 57876 - DNA, 356 bp, Glycine max
ggcacaagtgagtttgttgatcgagataactagaaacagtgtgatgaaaatgaaggtccttgttttcttcgttgctacaattttggtagcatggcaatgccatgcgtacgatatgttccctctccgaatgaacactggctatggtgcccgtactccggaggtgaaatgcgcaagttggaggcttgctgtggaagcacacaacatctttggctttgagaccattcctgaagagtgcgttgaagcaacaaaggaatacatccatggcgaacaatatagatcagactccaaaacagttaaccaacaagcttacttttatgccagagacctcgaagtccgtcccaaggacacatttgtgt

SEQ ID NO: 57877 - DNA, 381 bp, Glycine max
  unsure (1)..(381): unsure at all n locations
ggcacangtgagtttgttgatcgagataactagaaacagtgtgatgaaaatgaaggtccttgttttcttcgttgctacaattttggtagcatggcaatgccatgcgtacgatatgttccctctccgaatgaacactggctatggtgcccgtactccggaggtgaaatgcgcaagttggaggcttgctgtggaagcacacaacatctttggctttgagaccattcctgaagagtgcgttgaagcaacaaaggaatacatccatggcgaacaatatagatcagactccaaaacagttaaccaacaagcttacttttatgccagagacctcgaagtccatcccaaggacacatttgtgttcagtatagatggcaccgtactctc

SEQ ID NO: 57878 - DNA, 361 bp, Glycine max
gaaggtgcaagagtttgttgtgagctataagctagtttatcgtgaggagaatatgaagttgtttgttttctttgttgctgcagtagttttggtagcatggccatgccatggcgcaggctaccaaaggttccctctccgaatgaaaactggctatggtgagcgttcttcggaggtaaaatgcgcaagttttaggcttgctgtggaagcacacaacatccgagcctttaaaaccattcctgaagagtgcgttgaaccaacataggactacattaatggcgaacaatttagatcagactctaaaacagttaaccaacaagctttcttttatgctagtgaacgcgaagtccatcacaacgacata

SEQ ID NO: 57879 - DNA, 391 bp, Glycine max
caaaaagggggacaagtgaatttggtgattgataaaactagaaacagtgtgataaaatgaaggtcctgttttcttcgttgctacaattttggtagcatggcaatgccatgcgtacgatatgttccctctccgaatgaacactggctatggtgcccgtactccggaggtgaaatgcgcaagttggaggcttgctgtggaagcacacaacatctttggctttgagaccattcctgaagagtgcgttgaagcaacaaaggaatacatccatggcgaacaatatagatcagactccaaaacagttaaccaacaagcttacttttatgccagagacctcgaagtccatcccaaggacacatttgtgttcagtatagatggcaccgtactctccaat

SEQ ID NO: 57880 - DNA, 369 bp, Glycine max
ggcacttcaattgcaatcaaattagttcaattccctttgcgcagttccctagctctcctttcaagatgcagatcgtcgtcaagaccctcaccggaaagaccatcacccttgaggtggaaagctctgacaccatcgacaacgtcaaggccaagatccaggacaaggaatgaattcccccggatcagcaacgtctcatcttcgccggaaagcagctcgaggacggccgtaccctcgccgactacaacatccagaaggagtcaacccttcaccttgtccttcgtctccgtggtggcatgcagatcttcgtcaagactctcactggcaaaaccataaccctagaggtcgaaagctctgacaccattgacaacg

SEQ ID NO: 57881 - DNA, 361 bp, Glycine max
ggcacaagtgagtttgttgatcgagataactagaaacagtgtgatgaaaatgaaggtccttgttttcttcgttgctacaattttggtagcatggcaatgccatgcgtacgatatgttccctctccgaatgaacactggctatggtgcccgtactccggaggtgaaatgcgcaagttggaggcttgctgtggaagcacacaacatctttggctttgagaccattcctgaagagtgcgttgaagcaacaaaggaatacatccatggcgaacaatatagatcagactccaaaacagttaaccagcaagcttacttttatgccagagacctcgaagtccatcccaaggacacatttgtgttcagt

SEQ ID NO: 57882 - DNA, 238 bp, Glycine max
gtacggtctagaattacggccaccacgctcataggctgcaaaacacaaagggaaaataacaataaagtggttagtttaccgcccacttggaatccctcccgtccaataaaacaaactgcccaaacaacacaatatcacaaactcaatttcccaattttcggcccctaaaaatgaaccttcaattcaatcccctcctcctaaggccccaacaattctggaacaagccaatcctttcccc

SEQ ID NO: 57883 - DNA, 385 bp, Glycine max
ggcacaagtgagtttgttgatcgagataactagaaacagtgtgatgaaaatgaatgtccttgttttcttcgttgctacaattttggtagcatggcaatgccatgcgtacgatatgttccctctccgaatgatcactgggtatggtgcccgtactccggaggtgaaatgcgcaagttggaggcttgctgtggaagcacacaacatctttggctttgagaccattcctgaagagtgcgttgaagcaacaaaggaatacatccatggcgaacaatatggatcagactccaaaacagttaaccaacaagcttacttttatgccagagacctcgaagtccatcccaaggacacatttgtgttcagtatagatggcaccgtactctctaat

SEQ ID NO: 57884 - DNA, 374 bp, Glycine max
  unsure (1)..(374): unsure at all n locations
ggtgcacaagtgagtttgttgatcgagataactagaaacagtgtgatgaaaatgaaggtccttgttttcttcgttgctacaattttggtagcatggcaatgccatgcgtacgatatgttccctctccgaatgaacactggctatggtgcccgtactccggaggtgaaatgcgcaagttggaggcttgctgtggaagcacacaacatctttggctttgagaccattcctgaagagtgcgttgaagcaacaaaggaatacatccatggcgaacaatatagatcagactccaaaacagttaaccaacaagcttacttttatgccagagacctcgaagttcatcncaaggacacatttgtgttcagtatagatggcac

SEQ ID NO: 57885 - DNA, 380 bp, Glycine max
ggcacaagtgagtttgttgatcgagataactagaaacagtgtgatgaaaatgaaggtccttgttttcttcgttgctacaattttggtagcatggcaatgccatgcgtacgatatgttccctctccgaatgaacactggctatggtgcccgtactccggaggtgaaatgcgcaagttggaggcttgctgtggaagcacacaacatctttggctttgagaccattcctgaagagtgcgttgaagcaacaaaggaatacatccatggcgaacaatatagattagactccaaaacagttaaccaacaagcttacttttatgccagagacctcgaagtccatcccaaggacacatttgtgttcagtatagatggcaccgtactct

SEQ ID NO: 57886 - DNA, 364 bp, Glycine max
ggcacaagtgagtttgttgatcgagataactagaaacagtgtgatgaaaatgaaggtccttgttttcttcgttgctacaattttggtagcatggcaatgccatgcgtacgatatgttccctctccgaatgaacactggctatggtgcccgtactccggaggtgaaatgcgcaagttggaggcttgctgtggaagcacacaacatctttggctttgagaccattcctgaagagtgcgttgaagcaacaaaggaatacatccatggcgaacaatatagatcagactccaaaacagttaaccaacaagcttacttttatgccagagacctcgaagtccatcccaaggacacatttgtgttcagtata

SEQ ID NO: 57887 - DNA, 329 bp, Glycine max
ggtgcacaagtgagtttgatgatcgagataactagaaacagtgtgatgaagatgaaggtcgttgttttcttcgttgctacaagtttggtagcatggcaatgcgatgcgtatgatatgttccctcgccgaatgaacactggctatggtgcccgtactcgggatgtgaaatgcgcaagttggaggcttgctgtggaagcacacaacatcgttggctttgagaccattcctgaatagtgcgttgaagcaacataggaatacatccatggcgaacaatatagatgagactcgaaaagagttaaccaacaggcttacttttatgccagggacgt

SEQ ID NO: 57888 - DNA, 361 bp, Glycine max
gagtgcacaagtgagtttgttgatcgagataactagaaacagtgtgatgaaaatgaaggtccttgttttcttcgttgctacaattttggtagcatggcaatgccatgcgtacgatatgttccctctccgaatgaacactggctatggtgcccgtactccggaggtgaaatgcgcaagttggaggcttgctgtggaagcacacaacatctttggctttgagaccattcctgaagagtgcgttgaagcaacaaaggaatacatccatggcgaacaatatagatcagactccaaaacagttaaccaacaagcttacttttatgccagagacctcgaagtccatcccaaggacacatttgtgttc

SEQ ID NO: 57889 - DNA, 361 bp, Glycine max
gagtgcacaagtgagtttgttgatcgagataactagaaacagtgtgatgaaaatgaaggtccttgttttcttcgttgctacaattttggtagcatggcaatgccatgcgtacgatatgttccctctccgaatgaacactggctatggtgcccgtactccggaggtgaaatgcgcaagttggaggcttgctgtggaagcacacaacatctttggctttgagaacattcctgaagagtgcgttgaagcaacaaaggaatacatccatggcgaacaatatagatcagactccaaaacagttaaccaacaagcttacttttatgccagagacctcgaaatccatcccaaggaaacatttgtgttc

SEQ ID NO: 57890 - DNA, 391 bp, Glycine max
ggcacaagtgagtttgttgatcgagataactagaaacagtgtgatgaaaatgaagggccttgttttcttcgttgcgacaattttggtagcatgggaatgccatgcgtacgatatgttccctctccgaatgaacactggctatggtgcccgtactccggaggtgaaatgcgcaagttggaggcttgctgtggaagcacacaacatctttggctttgagagcattcctgaagagtgcgttgaagcaacacaggaatacatccatggcgaacaatatagatcagactccaaaacagttaaccaacaagcttacttttatgccagagacctcgaagtccatcccaaggacacatttgtgttcagtatacatggcaccgtactctccaatattcca

SEQ ID NO: 57891 - DNA, 346 bp, Glycine max
  unsure (1)..(346): unsure at all n locations
gattgttgatcacttacacttgacttctatctgccttcacataagacatggacagattcattggtggacacatgtganatgaatatagctgcctcactacaccaatcaggtatgattcggtgactccaacacagatggcacatcatcacgtacacacacttctacagcatgctctacatcagcattggtcttatcacctgatgtcgctatcctcacatactccctacattctgatctcaaatgatctgcacatccatatgtcaaagctatcatcattgtaggatctcttcgatgctagctcttgctccattcttgtccggacaatcttacaatgtatgccacaaac

SEQ ID NO: 57892 - DNA, 386 bp, Glycine max
  unsure (1)..(386): unsure at all n locations
ggcacaagtgagtttgttgatcgagataactagaaacagtgtgatgaaaatgaacgtccttgttttcttcgttgctacaattttggtaacatggcaatgccatgcgtacgatatgttccctctccgaatgaacactggctatggtgcccgtactccggaggtgaaatgcgcatgttggaggcttgctgtggaagcacacaacatctttggctttgagaccattcctgaagagtgcgttgaagcaacaaaggaatacatccatggcgaacaatatatatcagactccaaaacagttaaccaacaagcttacttttatgccagagacctcgaagtccatcncaaggacacatttgtgttcagtatagatggcaccgtactctctaata

SEQ ID NO: 57893 - DNA, 391 bp, Glycine max
ggcacaagtttgttgagatagctagaagcaataagatgaaaatgaaagtgcttgttttgtttgttgctacagttttggtagcatatgaatgccatggctcagactaccagaagttccctctccaaatgaaaactgggtttggtgggcaatacagcaatgaggtggcatgtgccagttggaggcttggcgtggaagcaaacaacgtagtcaagtggcaaactgttcctgcagcttgcggagagtacatagctgactacgttctaggagaccaatatagatcagattccaaaacagttaaccaacaagcttatttctatgctaaatccctcaaactcaccaacaaagatgtctttgtcttggacgttgacgacactactctctccaatcccca

SEQ ID NO: 57894 - DNA, 393 bp, Glycine max
ggcacaagtgagtttgttgatcgagataactagaaacagtgtgatgaaaatgaaggtccttgttttcttcgttgctacacttttggtagcatggcaatgccatgcttacgatatgttccctctccgaatgaacactggctatggtgcccgtactccggaagtgaaatgcgcaagttggaggcatgctgtggaagcacacaacatctttggctttgagaccattcctgaagagtgcgttgaagcaacaaaggaatacatccatggcgaacaatatatatcagactccaaaacagttaaccaacaagcttacttttatgccaaagacctcgaagtctatcccaaggacacatttgtgttcagtaaagatggcatcgtactctccaatattccata

SEQ ID NO: 57895 - DNA, 391 bp, Glycine max
ggcacaagtttgttgagatagctagaagcaataagatgaaaatgaaagtgcttgttttgtttgttgctacagttttggtagcatatgaatgccatggctcagactaccagaagttccctctccaaatgaaaactgggtttggtgggcaatacagcaatgaggtggcatgtgccagttggaggcttggcgtggaagcaaacaacgtagtcaagtggcaaactgttcctgcagcttgcggagagtacatagctgactacgttctaggagaccaatatagatcagatcccaaaacagttaaccaacaagcttatttctatgctaaatccctcaaactcaccaacaaagatgtctttgtcttggacgttgacgacactactctctctaatctcca

SEQ ID NO: 57896 - DNA, 413 bp, Glycine max
gaggcagtcctgggacgtcatttagaataccagatgcagagatattcttgtacactggcattgagaattcatcagataccaccaattatgatcaagcaagtgtggaatcatattcctgctcaaacgaactaagcaattctgactcagccaattccccacataacaaggagtctacttctgtcaatgtaaggcgctcaaagtttcgtctccactggcctaggagaagagagacaaaagcagctgcctcagaattggcagatgatgattctcttgaccctttcagttcaagtagaaacttggaagagtttccaatcccgttgcggcaaagatactcacaaccatgctcccatccaaacaacaaaagaacacaatctatgaggacttctcttccaagttcatcctcgaatgtgaaa

SEQ ID NO: 57897 - DNA, 335 bp, Glycine max
gccacacttctgggacatcacttaaggggacgcctccaaatattttcctgtttaccgttgatgagaatgcaccagatgttgtcattcacaatgagacaggtgtcgactcagcatcgtgcacattggagcttctgagttctcatgcatgcacttgccaccttcaattgtgtccatttcggtcaggctacagctgacatttcatggactccactgagcactgatagaaaagttttaaataactgacttacaattgctaaacgataatgccattgtcacttacacttcatttacagacttagtccaatttcaaatcccatagcggaacctattctcac

SEQ ID NO: 57898 - DNA, 397 bp, Glycine max
ggcacaagtgagtttgttgatcgagataactagaaacagtgtgatgaaaatgaaggtccttgttttcctcgttgctacaattttggtagcatggcaatgccatgcgtacgatatgttccctctccgaatgaacactggctatggtgcccgtactccggaggtgaaatgcgcaagttggaggcttgctgtggaagcacacaacatctttggctttgagaccattcctgaagagtgcgttgaagcaacaaaggaatacatccatggcgaacaatatagatcagactccataacagttaaccaacaagcttacttttatgccagagacctcgaagtccatcccaatgacacatttgtgttcagtatagatggcaccgtactctctaatattccatactac

SEQ ID NO: 57899 - DNA, 382 bp, Glycine max
ggcacaagtttgttgagatagctagaagcaataagatgaaaatgaaagtgcttgttttgtttgttgctacagttttggtagcatatgaatgccatggctcagactaccagaagttccctctccaaatgaaaactgggtttggtgggcaatacagcaatgaggtggcatgtgccagttggaggcttggcgtggaagcaaacaacgtagtcaagtggcaaactgttcctgcagcttgcggagagtacatagctgactacgttctaggagaccaatatagatcagattccaaaacagttaaccaacaagcttatttctatgctaaatccctcaaactcaccaacaaagatgtctttgtcttggacgttgacgacactactctctc

SEQ ID NO: 57900 - DNA, 375 bp, Glycine max
  unsure (1)..(375): unsure at all n locations
gagacttcataagcctctagtaccccttcctttctcacgctctctctcgtgttcggagcggctatagccactgtttaggaaacatatccatgcttcgttcaacatgtttgcaatgtctgtctgcgatgctctctcagagtcttgtcagtcctgtaatatccacgactgatgtacatcataanagctacgagtccccacatccacattctgcaagtcgccccatatgcttacaccttactgatcctccatctcatggtcattgcaacgctacaacctcacatcacaatcgtccacatactccatcaacactcacatgtagacactgtcgctcatcatcaccacaacatcagtctctatcatgctcatctccatcac

SEQ ID NO: 57901 - DNA, 390 bp, Glycine max
ggcacaagtgagtttgttgatcgagataactagaaacagtgtgatgaaaatgaaggtccttgttttcttcgttgctacaattttggtagcatggcaatgccatgcgtacgatatgttccctctccgaatgaacactggctatggtgcccgtactccggaggtgaaatgcgcaagttggaggcttgctgtggaagcacacaacatctttggctttgagaccattcctgaagagtgcgttgaagcaacaaaggaatacatccatggcgaacaatatagattagactccaaaacagttaaccaacaagcttacttttatgccagagacctcgaagtccatcccaaggacacatttgtgttcagtatagatggcaccgtactctctaatattca

SEQ ID NO: 57902 - DNA, 392 bp, Glycine max
gcacaagtgagtttgttgatcgagataactagaaacagtgtgatgaaaatgaaggtccttgttttcttcgttgctacaattttggtagcatggcaatgccatgcgtacgatatgttccctctccgaatgaacactggctatggtgcccgtactccggaggtgaaatgcgcaagttggaggcttgctgtggaagcacacaacatctttggctttgagaccattcctgaagagtgcgttgaagcaacaaaggaatacatccatggcgaacaatatagatcagactccaaaacagttaaccaacaagcttacatttatgccaagagacctcgaagtccatcccaaggacacatttgtgttcagtatagatggcaccgtactctctaatattccaa

SEQ ID NO: 57903 - DNA, 393 bp, Glycine max
gcacaagtgagtttgttgatcgagataactagaaacagtgtgatgaaaatgaaggtccttgttttcttcgttgctacaattttggtagcatggcaatgccatgcgtacgatatgttccctctccgaatgaacactggctatggtgcccgtactccggaggtgaaatgcgcaagttggaggcttgctgtggaagcacacaacatctttggctttgagaccattcctgaagagtgcgttgaagcaacaaaggaatacatccatggcgaacaatatagattagactccaaaacagttaaccaacaagcttacttttatgccagagacctcgaagtccatcccaaggacacatttgtgttcagtatagatggcaacgtactctctaatattccatac

SEQ ID NO: 57904 - DNA, 71 bp, Glycine max
gaacgtgtaagattgtgtattgagatatctacaagtagtgtgttaagagtaaatgaccttgtttgcttcct

SEQ ID NO: 57905 - DNA, 397 bp, Glycine max
gaaggtgcaagagtttgttgtgagctataagctactttatcgtgaggagaatatgaagttgtttgttttctttgttgctgcagtagttttggtagcatggccatgccatggcgcaggctaccaaaggttccctctccgaatgaaaactggctatggtgagcgttcttcggaggtaaaatgcgcaagttttaggttgctgtggaagcacacaacatccgagcctttaaaaccattcctgaagagtgcgttgaaccaacaaaggactacattaatggcgaacaatttagatcagactctaaaacagttaaccaacaagctttcttttatgctagtgaacgcgaagtccatcactacgacatatttatattcggcatagattacaccgtactctctaata

SEQ ID NO: 57906 - DNA, 360 bp, Glycine max
ggtgcacaagtgagtttgttgatcgagataactagaaacagtgtgatgaaaatgaaggtccttgttttcttcgttgctacaattttggtagcatggcaatgccatgcgtacgatatgttccctctccgaatgaacactggctatggtgcccgtactccggaggtgaaatgcgcaagttggaggcttgctgtggaagcacacaacatctttggctttgagaccattcctgaagagtgcgttgaagcaacaaaggaatacatccatggcgaacaatatagatcagaccccaaaacagttaaccaacaagcttacttttatgccagagacctcgaagttcatcccaaggacacatttgtgttc

SEQ ID NO: 57907 - DNA, 381 bp, Glycine max
gagcgaaacagagagtgatttcagtgagtgatcggtgttcacttgatctcatcataatcgtcagcgtcaattgaagaagatgccgatcagaaacatcgccgtcggaaggcctgaagaggcgactcaccccgacacgttgaaggcggctttggctgagttcatctcaaccttcatcttcgtgttcgccggctcaggctccggcatcgcctacaacaagctcaccgacaacggcgctgccacccctgccggcctcatctccgcctccatcgcccatgcattcgccctcttcgtcgccgtctccgtcggcgccaacatctccggcggccacgtcaaccccgccgtcaccttcggcgccttcgtcggcggcaacatcaccttcct

SEQ ID NO: 57908 - DNA, 391 bp, Glycine max
ggcacaagtgagtttgttgatcgagataactagaaacagtgtgatgaaaatgaaggtccttgttttcttcgttgctacaattttggtagcatggcaatgccatgcgtacgatatgttccctctccgaatgaacactggctatggtgcccgtactccggaggtgaaatgcgcaagttggaggcttgctgtggaagcacacaacatctttggctttgagaccattcctgaagagtgcgttgaagcaacaaaggaatacatccatggcgaacaatatagatcagactccaaaacagttaaccaacaagcttacttttatgccagagacctcgaagtccatcccaaggacacatttgtgttcagtatagatggcaccgtactctctaataatcca

SEQ ID NO: 57909 - DNA, 151 bp, Glycine max
ccaaatccaagtcgcttcatatcaatcaaatgcttcgaattttggtagggtagatatgctatacatacgagacgttcacacccctgttgacgacagtcgatatcgtccctacacagcaggtaaagtgttcaaataacttacttgctatacc

SEQ ID NO: 57910 - DNA, 405 bp, Glycine max
ggcacaagtgagtttgttgatcgagataactagaaacagtgtgatgaaaatgaaggtccttgttttcttcgttgctacaattttggtagcatggcaatgccatgcgtacgatatgttccctctccgaatgaacactggctatggtgcccgtactccggaggtgaaatgcgcaagttggaggcttgctgtggaagcacacaacatctttggctttgagaccattcctgaagagtgcgttgaagcaacaaaggaatacatccatggcgaacaatatagatcagactccaaaacagttaaccaacaagcttacttttatgccagagacctcgaagtccatcccaaggacacatttgtgttcagtatagatggcaccgtactctctaatattccatactacaaaaaaca

SEQ ID NO: 57911 - DNA, 405 bp, Glycine max
gaaggtgcaagagtttgttgtgagctataagctagtttaccgtgacgagaataataagttgtttgttttctttgttgctgcagtaattttggtaacatggacatgccatggcgcaggctaccaaacgttccctctccgaatgaaaactggctatggtgagcgttcttcggaggtaaaatgcgcaagttttaggcttgctgtggaagcacacaacatccgagcctttaaaaccattcctgaatagtgcgttgaaccaacacacgactacattaatggcgaacaatttacatcagactctaaacagttaaccaacaagctttcttttatgctagtgaacgcgaagtccatcacaacgacatatttatattcggcatagactacagcgtactctctaatatcccatac

SEQ ID NO: 57912 - DNA, 381 bp, Glycine max
gaaggtgcaagagtttgttgtgagctataagctagtttatcgtgaggagaatatgaagttgtttgttttctttgttgctgcagtagttttggtagcatggccatgccatggcgcaggctaccaaaggttccctctccgaatgaaaactggctatggtgagcgttcttcggaggtaaaatgcgcaagttttaggcttgctgtggaagcacacaacatccgagcctttaaaaccattcctgaagagtgcgttgaaccaacaaaggactacattaatggcgaacaatttagatcagactctaaaacagttaaccaacaagctttcttttatgctagtgaacgcgaagtccatcacaacgacatatttatattcggcatagatta

SEQ ID NO: 57913 - DNA, 380 bp, Glycine max
gcacaagtgagtttgttgatcgagataactagaaacagtgtgatgaaaatgaaggtccttgttttcttcgttgctacaattttggtagcatggcaatgccatgcgtacgatatgttccctctccgaatgaacactggctatggtgcccgtactccggaggtgaaatgcgcaagttggaggcttgctgtggaagcacacaacatctttggctttgagaccattcctgaagagtgcgttgaagcaacaaaggaatacatccatggcgaacaatatagatcagactccaaaacagttaaccaacaagcttacttttatgccagagacctcgaagtccatcccaaagacacatttgtgttcagtatagatggcaccgtactctc

SEQ ID NO: 57914 - DNA, 384 bp, Glycine max
ggatgcacaagtttgttgagatagctagaagcaataagatgaaaatgaaagtgcgtgttttgtttgttgctacagttttggtagcatatgaatgccatggctcagactaccagaagttccctctccaaatgaaaactgggtttggtgggcaatacagcagtgaggtggcatgtgccagttggaggcttggcgtggaagcaaacaacgtagtcaagtggcaaactgttcctgcagcttgcggagagtacatagctgactacgttctaggagaccaatatagatcagattccaaaacagttaaccaacaagcttatttctatgctaaatcactcaaactcaccagcaaagatgtctttgtcttggacgttgaccacactactctct

SEQ ID NO: 57915 - DNA, 260 bp, Glycine max
ggcacaagtttgttgagatagctagaagcaataagatgaagatgaaagtgcttgttttgtttgttgctacagttttggtagcatatgaatgccatggctcagactaccagaagttccctctccaaatgaaaactgggtttggtgggcaatacagcaatgaggtggcatgtgccactttgatgcttggcgtggaagcaaacaacgtagtcaagtggcaaactgttcctgcagctttcagagagtacatagctgactacgtt

SEQ ID NO: 57916 - DNA, 406 bp, Glycine max
gaaggtgcaagagtttgttgtgagctataagctagtttatcgtgaggagaatatgaagttgtttgttttctttgttgctgcagtagttttggtagcatggccatgccatggcgcaggctaccaaaggttccctctccgaatgaaaactggctatggtgagcgttcttcggaggtaaaatgcgcaagttttaggcttgctgtggaagcacacaacatccgagcctttaaaaccattcctgaagagtgcgttgaaccaacaaaggactacattaatggcgaacaatttagatcagactctaaaacagttaaccaacaagctttcttttatgctagtgaacgcgaagtccatcacaacgacatatttatattcggcatagataacaccgtactctctaatatcccatac

SEQ ID NO: 57917 - DNA, 252 bp, Glycine max
gaccacattccaattcacagacacatacattgtagtatcacttttgtctcggaatttgttctttggagtcatggcaaccgtaaaagttgcatgtgtggttttgatctacatggcagtcaagaatgcactaacgctcgtgcaagccgtgtcatacaatgatctttctgtgaacgtaacatcctcccgatctaagctgactcagggtgcacatgttctacaatccttcagtaccagactgaggaacattctggg

SEQ ID NO: 57918 - DNA, 403 bp, Glycine max
ggcacaagtgagtttgttgatcgagataactagaaacagtgtgatgaaaatgaaggtccttgttttcttcgttgctacaattttggtagcatggcaatgccatgcgtacgatatgttccctctccgaatgaacactggctatggtgcccgtactccggaggtgaaatgcgcaagttggaggcttgctgtggaagcacacaacatctttggctttgagaccattcctgaagagtgcgttgaagcaacaaaggaatacatccatggcgaacaatatagatcagactccaaaacagttaaccaacaagcttacttttatgccagagacctcgaagtccatcccaaggacacatttgtgttcagtatagatggcaccgtactctctaataatccaaaactacaaaaa

SEQ ID NO: 57919 - DNA, 400 bp, Glycine max
ggtgcacaagtgagtttgttgatcgagataactagaaacagtgtgatgaaaatgaaggtccttgttttcttcgttgctacaattttggtagcatggcaatgccatgcgtacgatatgttccctctccgaatgaacactggctatggtgcccgtactccggaggtgaaatgcgcaagttggaggcttgctgtggaagcacacaacatctttggctttgagaccattcctgaagagtgcgttgaagcaacacaggaatacatccatggcgaacaatatagatcagactccaaaacagttaaccaacacgcttacttttatgccagagacctcgaagtccatcacaaggacacatttgtgctcagtatagatggcaccgtactctctaatattccatactaca

SEQ ID NO: 57920 - DNA, 270 bp, Glycine max
gatacactgtacctttcactcatagacagatatctgagcgcttcgcaaaataaccatgtctctcttttgtccctctcaatttcaactcgtcataatgccgccggcgaatcgcatagcggagggaactgctgcagctgccgcttcgtctgcggcagctccgatgagagtcactcatgctgcagcgaaacgcgccgccgcgagctccgatcctccgccggtgccagtggttaataatgccgcgaagaatgccaaagtatgctgctgctgcta

SEQ ID NO: 57921 - DNA, 408 bp, Glycine max
ggcacaagtgagtttgttgatcgagataactagaaacagtgtgatgaaaatgaaggtccttgttttcttcgttgctacaattttggtagcatggcaatgccatgcgtacgatatgttccctctccgaatgaacactggctatggtgcccgtactccggaggtgaaatgcgcaagttggaggcttgctgtggaagcacacaacatctttggctttgagaccattcctgaagagtgcgttgaagcaacaaaggaatacatccatggcgaacaatatagatcagactccaaaacagttaaccaacaagcttacttttatgccagagacctcgaagtccatcgcaaggacacatttgtgttcagtatagatggcaccgtactctctaatattccatactacaaaaacatgga

SEQ ID NO: 57922 - DNA, 383 bp, Glycine max
gcacttcaattgcaatcaaattagttcattctctttgcgcagttccctacctctcctttcaagatgcagatcttcgtcaagaccctcaccggaaagaccatcacccttgaggtggaaagctctgacaccatcgacaacgtcaaggccaagatccaggacaaggaaggaattcccccggatcagcagcgtctcatcttcgccggaaagcagctcgaggacggccgtaccctcgccgactacaacatccagaaggagtcaacccttcaccttgtccttcgtctccgtggtggcatgcagatcttcgtcaagactctcactggcaaaaccataaccctagatgtcgaaagctctgacaccattgacaacgtcaatgccaagattca

SEQ ID NO: 57923 - DNA, 388 bp, Glycine max
gttcatgaaacaagggatgattgacaaggcaggaaatgggagaacattcttaacctcactttctaaggggatagggagaattgcaatttttagcggtcaaggcgggggaaagcaccagaaatcaggtaggaagtctcgcggtttggaggggaaaactggtaggagtaggagacattctgtctcatagattagctaagcttttacagcattctctattcacaacatgtaaatgagttgatcaaaagtttctcttcatccttggccacactagtttagcagttgaacttgagtgtctcacattctcttctttttccctgctgtatatgatttcagctgctgagctaaggtcgaatactacacagtgacactgcttgttgcagtgacacca

SEQ ID NO: 57924 - DNA, 397 bp, Glycine max
gcacaagtgagtttgttgatcgagataactagaaacagtgtgatgaaaatgaaggtccttgttttcttcgttgctacaattttggtagcatggcaatgccatgcgtacgatatgttccctctccgaatgaacactggctatggtgcccgtactccggaggtgaaatgcgcaagttggaggcttgctgtggaagcacacaacatctttggctttgagaccattcctgaagagtgcgttgaagcaacaaaggaatacatccatggcgaacaatatagatcagactccaaaacagttaaccaacaagcttacttttatgccagagacctcgaagtccatcccaaggacacatttgtgttcagtatagatggcaccgtactctctaatattccatactaca

SEQ ID NO: 57925 - DNA, 380 bp, Glycine max
gatctggcagcagaagaacaagtagttgagaactaagaaggagaagcaaatggcttcctcaatgatctcttccccagctgttaccactgtcaaccgtgccggtgccggcatggttgctccattcactggcctcaagtccatggctggcttccccaccagaaagaccaacaatgacattacctccattgctagcaacggtggaagagtgcaatgcatgcaggtgtggccaccagttggcaagaagaagtttgagactctttcctacctgccagaccttgatgatgcacaattggcaaaggaagtagaataccttcttaggaagggatggattccttgcttggaattcgagttggagcacggtttcgtgtaccgtgagcaca

SEQ ID NO: 57926 - DNA, 369 bp, Glycine max
ggttctagtgtgtgattgtttgttgttgtaactcgttcttcttcttttgttgttctgtgtttgtgtttgttttttctctcacctgaaaatgtcttgctgcggtggtaactgtggttgcggaagctcctgcaagtgcggcaacggctgcggaggctgcaagatgtacccagacttgagctacactgagtcaaccaccaccgagaccttggtcatgggagtggcacctgttaaggctcaatttgagggtgctgaaatgggtgtgcccgctgagaacgatggctgcaaatgtggaccaaactgctcctgcaacccctgcacttgcaagtgaggtgttgggagagcaagcttcaagcagagatagcccttaat

SEQ ID NO: 57927 - DNA, 190 bp, Glycine max
gggataatgatgatactgataatgagattgatgatttggatgcgaagatttaaaatggtcgtaatgttcaatacggggagactagaaatgggattgaactgaatgatgaagatgagtttactgatgcctcacatgtgaaagaatgcgaataggcccgtgtgtctgttagctttgatgaggattgcaatga

SEQ ID NO: 57928 - DNA, 90 bp, Glycine max
ggcacaagtttgttgagatagctagaagcaataagatgaaaatgaaagtgcttgttttgtttgttgctacagttttggtagcatatgaat

SEQ ID NO: 57929 - DNA, 351 bp, Glycine max
ggtgcacaagtgagtttgttgatcgagataactagaaacagtgtgatgaaaatgaaggtccttgttttcttcgttgctacaattttggtagcatggcaatgccatgcgtacgatatgttccctctccgaatgaacactggctatggtgcccgtactccggaggtgaaatgcgcaagttggaggcttgctgtggaagcacacaacatctttggctttgagaccattcctgaagagtgcgttgaagcaacaaaggaatacatccatggcgaacaatatagatcagactccaaaacagttaaccaacaagcttacttttatgccagagacctcgaagtccatcccaaggacaca

SEQ ID NO: 57930 - DNA, 355 bp, Glycine max
ggtgcacaagtgagtttgttgatcgagataactagaaacagtgtgatgaaaatgaaagtccttgttttcttcgttgctacaattttggtagcatggcaatgccatgcgtacgatatgttccctctccgaatgaacactggctatggtgcccgtactccggaggtgaaatgcgcaagttggatgcttgctgtggaagcacacaacatctttggctttgagaccattcctgaagagtgcgttgaagcaacaaaggaatacatccatggcgaacaatatagatcagactccaaaacagttaaccaacaagcttacttttatgccagagacctcgaagtccatcccaaggacacatttg

SEQ ID NO: 57931 - DNA, 383 bp, Glycine max
  unsure (1)..(383): unsure at all n locations
ggcacaagtttgttgagatagctagaagcaataagatgaaaatgaaagtgcttgttttgtttgttgctacagttttggtagcatatgaatgccatggctcagactaccagaagttccctctccaaatgaaaactgggtttggtgggcaatacagcaatgaggtggcatgtgccagttggaggcttggcgtggaagcaaacaacgtagtcaagtggcaaactgttcctgcagcttgcggagatgtacatagctgactacgttctangagaccaatatagatcagattccaaaacagttaaccaacaagcttatttctatgctaaatccctcaaaactcacaacanagatgtctttgtcttggacgttgacgacactactctctc

SEQ ID NO: 57932 - DNA, 381 bp, Glycine max
cccacgcgtccgagacgacagaagggggcacaagtgagtttgttgatcgagataactagaaacagtgtgatgaaaatgaaggtccttgtcttcttcgttgctacaattttggtagcatggcaatgccatgcgtacgatatgttccctctccgaatgaacactggctatggtgcccgtactccggaggtgaaatgcgcaagttggaggcttgctgtggaagcacacaacatctttggctttgagaccattcctgaagagtgcgttgaagcaacaaaggaatacatccatggcgaacaatatagatcagactccaaaacagttaaccaacaagcttacttttatgccagagacctcgaagtccatcgcaaggacacatttgtg

SEQ ID NO: 57933 - DNA, 384 bp, Glycine max
gaaggtgcaagagtttgttgtgagctataagctagtttatcgtgaggagaatatgaagttgtttgttttctttgttgctgcagtagttttggtagcatggccatgccatggcgcatgctaccaaaggttccctctccgaatgaaaactggctatggtgagcgttcttcggaggtaaaatgcgcaagttttaggcttgcttgtggaagcacacaacatccgagcctttaaaaccattcctgaagagtgcgttgaaccaacaaaggactacattaatggcgaacaatttagatcagactctaaaacagttaaccaacaagctttcttttatgctagtgaacgcgaagtccatcacaacgacataattatattcggcataaataaca

SEQ ID NO: 57934 - DNA, 376 bp, Glycine max
  unsure (1)..(376): unsure at all n locations
ggcacaagtttgttgagatagctagaagcaataagatgaaaatgaaagtgcttgttttgtttgttgctacagttttggtagcatatgaatgccatggctcagactaccagaagttccctctccaaatgaaaactgggtttggtgggcaatacagcaatgaggtggcatgtgccagttggaggcttggcgtggaagcaaacaacgtagtcaagtggcaaactgttcctgcagcttgcggagagtacatagctgactacgttctangagaccaatatagatcagattccaaaacagttaaccaacaagcttatttctatgctaaatccctcaaactcnacaacaaagatgtctttggcttggacgttgacgacactac

SEQ ID NO: 57935 - DNA, 368 bp, Glycine max
ggcacaagtgagtttgttgatcgagataactagaaacagtgtgatgaaaatgaaggtccttgttttcttcgttgctgcaattttggtagcatggcaatgccatgcgtacgatatgttccctctccgaatgaacactggctatggtgcccgtactccggaggtgaaatgcgcaagttggaggcttgctgtggaagcacacaacatctttggctttgagaccattcctgaagagtgcgttgaagcaacaaaggaatacatccatggcgaacaatatagatcagactccaaaacagttaaccaacaagcttacttttatgccagagacctcgaagtccatcccaaggacacatttgtgttcagtatagatg

SEQ ID NO: 57936 - DNA, 309 bp, Glycine max
gatctggcagcagaagaacaagtagttgagaactaagaaggagaagcaaatggcttcctcaatgatctcttccccagctgttaccactgtcaaccgtgccggtgccggcatggttgctccattcactggcctcaggtccatggctggcttccccaccagaaagaccaacaatgacattacctccattgctagcaacggtgtgaagagtgcaatgcatgcaggtgtggccaccagttggcaagaagatgtttgagactctttcctacctgccagaccttgatgatgcacaattggcaaaggaagtagaat

SEQ ID NO: 57937 - DNA, 379 bp, Glycine max
gttctagtgtgtgattgtttgttgttgtaactcgttcttcttcttttgttgttctgtgtttgtgtttgttctttttctcacctgaaaatgtcttgctgcggtggtaactgtggttgcggaagctcctgcaagtgcggcaacggctgcggaggctgcaagatgtacccagacttgagctacatggagtcaaccaccgccgagaccttggtcatgggagtggcacctgttaaggctcaatttgagggtgctgaaatgggtgtgcccgctgagaacgatggctgcaaatgtggaccaaactgctcctgcaacccctgcacttgcaagtgaggtgttgggagagcaagcttcaagcagagatagcccttaattaagaataatg

SEQ ID NO: 57938 - DNA, 381 bp, Glycine max
ggcacaagtgagtttgttgatcgagataactagaaacagtgtgatgaaaatgaaggtccttgttttcttcgttgctacaattttggtagcatggcaatgccatgcgtacgatatgttccctctccgaatgaacactggctatggtgcccgtactccggaggtgaaatgcgcaagttggaggcttgctgtggaagcacacaacatctttggctttgagaccattcctgaagagtgcgttgaagcaacaaaggaatacatccatggcgaacaatatagatcagactccaaaacagttaaacaacaagcttacttttatgccagagaactcgaagtccatcccaaggacacatttgtgttcagtatagatggcaccgttctctc

SEQ ID NO: 57939 - DNA, 375 bp, Glycine max
ggcacaagtttgttgagatagctagaagcaataagatgaaaatgaaagtgcttgttttgtttgttgctacagttttggtagcatatgaatgccatggctcagactaccagaagttccctctccaaatgaaaactgggtttggtgggcaatacagcaatgaggtggcatgtgccagttggaggcttggcgtggaagcaaacaacgtagtcaagtggcaaactgttcctgcagcttgcggagagtacatagctgactacgttctaggagaccaatatagatcagattccaaaacagttaaccaacaagcttatttctatgctaaatccctcaaactcaccaacaaagatgtctttgtcttggacgttgacgacacta

SEQ ID NO: 57940 - DNA, 345 bp, Glycine max
  unsure (1)..(345): unsure at all n locations
gacaagtttgttgagatagctagaagcaataagatgaaaatgaaagtgcttgttttgtttgttgctacagttttggtagcatatgaatgccatggctcagactaccagaagttccctctccaaatgaaaactgggtttggtgggcaatacagcaatgaggtggcatgtgccagttggaggcttggcgtggaagcaaacaacgtagtcaagtggcaaactgttcctgcagcttgcggagagtacatagctgactacgttctaggagaccaatatagatcagattccaaaacagttaaccaacaagcttatttctatgctaaatcnctcaaactcaccaacaaagat

SEQ ID NO: 57941 - DNA, 378 bp, Glycine max
  unsure (1)..(378): unsure at all n locations
ggcaagagtttgttgtgagctataagctagtttatcgtgaggagaatatgaagttgtttgttttcgttgttgctgcagtagttttggtagcatggccatgccatggcgcaggctatcaaaggttccctctccgaatgaaaactggctatggtgagcgttcttcggaggtaaaatgcgcaagttttaggcttgctgtggaagcacacaacatccgagcctttaaaaccattcctgaagagtgcgttgaaccaacaaaggactacattaatggcgaacaatttagatcagactctaaaacagtttaacaacaagctttcttttatgctagtgaaacccangtccatcacaacgacatatttatattccgcatagataaca

SEQ ID NO: 57942 - DNA, 328 bp, Glycine max
ggcacaagtgagtttgtcgatcgagataactagaaacagtgtgatgaaaatgaaggtccttgttttcttcgttgctacaattttggtagcatggcaatgccatgcgtacgatatgttccctctccgaatgaacactggctatggtgcccgtactccggaggtgaaatgcgcaaggtggaggcttgtgtgggaagcacacaatgatctttggctttgagaccattcctgaagagtgcgttgaagcaactgaggaatacatccatggcgaacaatatagatcagactccaaaacagttaaccaacaagcttacttttatgccagagacct

SEQ ID NO: 57943 - DNA, 380 bp, Glycine max
gagtttgttgatcgagataactagaaacagtgtgatgaaaatgaacgtccttgttttcttcgttgctacaattttggtagcatggcaatgccatgcgtacgatatgttccctctccgaatgaacactggctatggtgcccgtactccggaggtgaaatgcgcaagttggaggcttgctgtggcgtgacacaacatctttggctttgagaccattcctgaagagtgcgttgaagcaacaaaggatgacatccatggcgaacaatatagatcagactccaaaacagttaaccaacaagcttacttgtatgccagagacctcgaagtccatcccaaggacacatttgtgttcagtatagatggcaccgtactctccaatattc

SEQ ID NO: 57944 - DNA, 367 bp, Glycine max
  unsure (1)..(367): unsure at all n locations
ggcacaagtgagtttgttgatcgagataactagaaacagtgtgatgaaaatgaaggtccttgttttcttcgttgctacaattttggtagcatggcaatgccatgcgtacgatatgttccctctccgaatgaacactggctatggtgcccgtactcctgaggtgaaatggggaagttggaggcttgctgtggaagcacacaacatctttggctttgagaccattcctgaagagtgcgttgaagcaacaaaggaatacatccatggcgaacaatatagatcagactccaaaacagttaaccaacaagcttacttttatgccagagacctcgaagtccatcncaaagacacatttgtgttcagtatagat

SEQ ID NO: 57945 - DNA, 376 bp, Glycine max
  unsure (1)..(376): unsure at all n locations
ggcacaagtgagtttgttgatcgagataactagaaacagtgtgatgaaaatgaaggtccttgttttcttcgttgctacaattttggtagcatggcaatgccatgcgtacgatatgttccctctccgaatgaacactggctatggtgcccgtactccggaggtgaaatgcgcaagttggaggcttgctgtggaagcacacaacatctttggctttgagaccattcctgaagagtgcgttgaagcaacanaggaatacatccatggcgaacaatatagatcagactccaaaacagttaaccaacaagcttacttttatgccggagacctcgaagtccatcccaaggacacatttgtgttcagtatagatggcaccgta

SEQ ID NO: 57946 - DNA, 329 bp, Glycine max
  unsure (1)..(329): unsure at all n locations
ggtgcacaagtgagtttgttgatcgagataactagaaacagtgtgatgaaaatgaaggtccttgttttcttcgttgctacaattttggtagcatggcaatgccatgcgtacgatatgttccctctccgaatgaacactggctatggtgcccgtactccggaggtgaaatgcgcaagttggaggcttgctgtggaagcacacaacatctttggctttgagaccattcctgaagagtgcgttgaagcaacaaaggaatacatccatggcgaacaatatagatcagactccanaacagttaaccaacaagcttacttttatgccagagacct

SEQ ID NO: 57947 - DNA, 363 bp, Glycine max
tcagttgcttaacaccagaaatggatggtctgcacagatgcatgacaatgctccatatttgcatgcatctgttacacctgcacaagtatcatctccatcatctgtgttaatgttccagcaagcagttaatccagtttcaaactgtgattataataaaaacaaacgtgataaggaaatggagggtagagtccattaccaaggtttatacacatctgaagtgaaaggtagaacatttgcatcttccccattcgatgatcctattttatccacgctagctgccgaaggtgctagttctttgggtatgtttgatgttcataaccagttgggtagttcacggccacatgaatcagtgtcagcattgag

SEQ ID NO: 57948 - DNA, 349 bp, Glycine max
gcacaagtgagtttgttgatcgagataactagaaacagtgtgatgaaaatgaaggtccttgttttcttcgttgctacaattttggtagcatggcaatgccatgcgtacgatatgttccctctccgaatgaacactggctatggtgcccgtactccggaggtgaaatgcgcaagttggaggcttgctgtggaagcacacaacatctttggctttgaaaccattcctgaaaattgcgttgaaccaccaaaggaatacatccatggcgaacaatatagatcagactccaaaacagttaaccaacaagcttacttttatgccagaaacctcaaagtccatcccaaggacacat

SEQ ID NO: 57949 - DNA, 235 bp, Glycine max
gaaggtgcaagagtttgttgtgagctataagctagtttatcgtgaggagaatatgaagttgtttgttttctttgttgctgcagtagttttggtagcatggccatgccatggcgcaggctaccaaaggttccctctccgaatgaaaactggctatggtgagcgttcttcggatgtaaaatgcgccgtgtttaggcttgcggtggaaccacacaacatccaaccctttaaaacaatt

SEQ ID NO: 57950 - DNA, 375 bp, Glycine max
gatggttttgatggcactcaggtagaggctattttgccacttgttgcccctacgaagcgtactagtattggatcaacatctggaacacacagaaaatcattttcaagtgcagctcagtctaagcaggttatttcattgaacccattgcctcttaagaaacatggttgtggtagaggcccagtacagacatgctctgaggaggaatttcttaaagatgtcatggagttcctgattctccggggacataatagactgattcctcaaggagggcttaccgagttccctgatgccatactcaatggaaaacgccttgatctctacaatctaaataaagaggtggttacaaggggaggatttcatgttggcaatggcatc

SEQ ID NO: 57951 - DNA, 383 bp, Glycine max
  unsure (1)..(383): unsure at all n locations
ggcacaagtgagtttgttgatcgagataactaggaacagtgtgatgaaaatgaaggtccttgttttcttcgttgctacaattttggtagcatggcaatgccatgcgtacgatatgttccctctccgaatgaacactggctatggtgcccgtactccggaggtgaaatgcgcaagttggaggctgtgctgtggaagcagagaacatctttggctttgagaccattcctgaagagtgcgttgaagcaacaaaggaatacatccatggcgaacaatatagatcagactccaaaacagttaaccaacaagcttacttttatgccagagacctcgaagtccatcncaaggacacatttgtgttcagtatagatggcaccgtactctct

SEQ ID NO: 57952 - DNA, 384 bp, Glycine max
gaaggtgcaagagtttgttgtgagctataagctagtttatcgtgaggagaatatgaagttgtttgttttctttgttgctgcagtagttttggtagcatggccatgccatggcgcaggctaccaaaggttccctctccgaatgaaaactggctatggtgagcgttcttctgaggtaaaatgcgtgagttttaggcttgcggtggaagcacacaacatccgagcctttaaaaccattcctgaatggtgcgttgaaccaacaaaggactacattaatggcgaacaatttagatcagactctaaaacagttaaccaacaagctttcttttatgctagtgaacgcgaagtcgatcacaacgacatatttatattcggcatagataacac

SEQ ID NO: 57953 - DNA, 354 bp, Glycine max
ggcacaagtttgttgagatagctagaagcaataagatgaaaatgaaagtgcttgttttgtttgttgctacagttttggtagcatatgaatgccatggctcagactaccagaagttccctctccaaatgaaaactgggtttggtgggcaatacagcaatgaggtggcatgtgccagttggaggcttggcgtggaagcaaacaacgtagtcaagtggcaaactgttcctgcagcttgcggagagtacatagctgactacgttctaggagaccaatatagatcagattccaaaacagttaaccaacaagcttatttctatgctaaatccctcaaactcaccaacaaagatgtctttg

SEQ ID NO: 57954 - DNA, 365 bp, Glycine max
  unsure (1)..(365): unsure at all n locations
gagtcaaagtgataactaatggggactgagcattttgatcgaagaaatggtttgtagaggttgttggccttgagtctctcaacaatggccatgttgctacaaacgcattaccctctcggtctacactcaccgcgttacccttatcttttcccaaacccttattatcattcatttctcattatccccaccaaacccctaccgcgattcaatgccgcagttgcattatccggtcaccggactctgtcgccacccccagccttcgcttccgaccgccacgcgcttccnggaacagcccctttccctcaaggtttttacgcgcgtcgccgtctccaccgtgctgtttctctgcttcggcgttcgcatgt

SEQ ID NO: 57955 - DNA, 365 bp, Glycine max
gacaagtgagtttgttgatcgagataactagaaacagtgtgatgaaaatgaaggtccttgttttcttcgttgctacaattttggtagcatggcaatgccatgcgtacgatatgttccctctccgaatgaacactggctatggtgcccgtactccggaggtgaaatgcgcaagttggaggcttgctgtggaagcacacaacatctttggctttgagaccattcctgaagagtgcgttgaagcaacaaaggaatacatccatggcgaacaatatagatcagactccaaaacagttaaccaacaagcttacttttatgccatagacctcgaagtccatcccaaggacacatttgtgttcagtatagat

SEQ ID NO: 57956 - DNA, 278 bp, Glycine max
agacgtcagacagacggcatcaggggaacagaaagtgctgcatcagtgcgttcgctcatgattaggattagcgacagtgtccttgatttcaacgtcgatgctctctccgttgatagcattttggtcgcagtggaatcacacccacactagatggtcactcttcggaggcctcatgccctcaggtgcttctatgttccgatgtgaagtgtgcagcttttacgcacactgtgtaggaacatcagaccattgatgctgagaccattcttgaagagtgtgtt

SEQ ID NO: 57957 - DNA, 368 bp, Glycine max
  unsure (1)..(368): unsure at all n locations
gacaagtgagtttgttgatcgagataactagaaacagtgtgatgaaaatgaaggtccttgttttcttcgttgctacaattttggtagcatggcaatgccatgcgtacgatatgttccctctccgaatgaacactggctatggtgcccgtactccggaggtgaaatgcgcaagttgggaggcttgctgtggaagcacacaacgtgtttggctttgagaccattcctgaagagtgcgttgaagcaacatgggaatacatccatggcgaacaatatagatcagactccanaacagttaaccaacaagcttacttttatgccagagaactcgaattcaatccaaggacacatttgtgttcaatatagatggc

SEQ ID NO: 57958 - DNA, 447 bp, Glycine max
taacggttaggaagtcccgggctacgactacgcatgaatgcggatgcgacaagaaggggacaagaaaatttggttgttcaaaatactaaaaacagtgtgatgaaaatgaaagccctgttttcttcgttgctacaattttggtagcatggcaatgccatgcgtacgatatgttccctctccgaatgaacactggctatggtgcccgtactccggaggtgaaatgcgcaagtttgaggcttgctgtgtgagcacacaacatgtgtggctttgagaccattcctgaagagtgcgttgaagcaacaaatgaatacatccatggcgaacaatatagatcagactccaaaacagttaaccaacaagcttacttttatgccagagacctcgaagtccatcccaaggacacatttgtgttcagtatagatggcaccgttacctctaatattccaa

SEQ ID NO: 57959 - DNA, 386 bp, Glycine max
  unsure (1)..(386): unsure at all n locations
ggcacaagtgagtttgttgatcgagataactagaaacagtgtgatgaaaatgaaggtccttgttttcttcgttgctacaattttggtagcatggcaatgccatgcgtacgatatgttccctctccgaatgaacactggctatggtgcccgtactccggaggtgaaatgcggaagttggaggtgtgctgtggaagcacgcgacatcgttggctttgagaccattcctgaagagtgcgttgaagcgacaaaggaatacatccatggcgaacaatatagatcagactccaaaacagttaaccaacaagcttacttttatgccagagaactcgaagttcatcncaaggacacatttgtgttcagtatagatggcaccgtactctctaata

SEQ ID NO: 57960 - DNA, 397 bp, Glycine max
  unsure (1)..(397): unsure at all n locations
ggcacaagtgagtttgttgatcgagataactagaaacagtgtgatgaaaatgaaggtccttgttttcttcgttgctacaattttggtagcatggcaatgccatgcgtacgatatgttccctctccgaatgaacactggctatggtgcccgtactccggaggtgaaatgcgcaagttggaggcttgctgtggaagcacacaacatctttggctttgagaccattcctgaagagtgcgttgaagcaacaaaggaatacatccatggcgaacaatatagatcagactccanaacagttaaccaacaagcttacttttatgccagagacctcgaagtccatcgcaaggacacatttgtgttcagtatagatggcaccgtactctctaatatttcatactac
